United States Patent Application Publication US 2022/0213167 A1 - sequence listing, part 19

SEQ ID NO: 393369 - protein, 14 aa, Homo sapiens
  CDR3 for alpha chain variable domain of TCR clone 196685 (TRAV36/DV7, TRAJ45)
CPLYSGGGADGLTF

SEQ ID NO: 393370 - protein, 17 aa, Homo sapiens
  CDR3 for beta chain variable domain of TCR clone 196685 (TRBV19, TRBJ2-7)
CASSISFYDSYPYEQYF

SEQ ID NO: 393371 - protein, 17 aa, Homo sapiens
  CDR3 for alpha chain variable domain of TCR clone 196686 (TRAV29/DV5, TRAJ52)
CAASVNAGGTSYGKLTF

SEQ ID NO: 393372 - protein, 15 aa, Homo sapiens
  CDR3 for beta chain variable domain of TCR clone 196686 (TRBV7-3, TRBJ2-3)
CANSLTSGVGDTQYF

SEQ ID NO: 393373 - protein, 15 aa, Homo sapiens
  CDR3 for alpha chain variable domain of TCR clone 196687 (TRAV17, TRAJ16)
CATALRFSDGQKLLF

SEQ ID NO: 393374 - protein, 14 aa, Homo sapiens
  CDR3 for beta chain variable domain of TCR clone 196687 (TRBV7-2, TRBJ2-2)
CASRGQGAAGELFF

SEQ ID NO: 393375 - protein, 14 aa, Homo sapiens
  CDR3 for alpha chain variable domain of TCR clone 196688 (TRAV12-1, TRAJ23)
CVVIVYNQGGKLIF

SEQ ID NO: 393376 - protein, 15 aa, Homo sapiens
  CDR3 for beta chain variable domain of TCR clone 196688 (TRBV20-1, TRBJ1-5)
RSAKPPGQGPQPQHF

SEQ ID NO: 393377 - protein, 10 aa, Homo sapiens
  CDR3 for alpha chain variable domain of TCR clone 196689 (TRAV13-2, TRAJ49)
CADTGNQFYF

SEQ ID NO: 393378 - protein, 16 aa, Homo sapiens
  CDR3 for beta chain variable domain of TCR clone 196689 (TRBV5-1, TRBJ2-2)
CASSLWDTTNTGELFF

SEQ ID NO: 393379 - protein, 13 aa, Homo sapiens
  CDR3 for alpha chain variable domain of TCR clone 196690 (TRAV3, TRAJ27)
CAARPLGEGKSTF

SEQ ID NO: 393380 - protein, 13 aa, Homo sapiens
  CDR3 for beta chain variable domain of TCR clone 196690 (TRBV10-3, TRBJ2-7)
CASKLAVNYEQYF

SEQ ID NO: 393381 - protein, 11 aa, Homo sapiens
  CDR3 for alpha chain variable domain of TCR clone 196691 (TRAV35, TRAJ34)
CWARNTDKLIF

SEQ ID NO: 393382 - protein, 15 aa, Homo sapiens
  CDR3 for beta chain variable domain of TCR clone 196691 (TRBV2, TRBJ2-1)
CASSELAGSYNEQFF

SEQ ID NO: 393383 - protein, 14 aa, Homo sapiens
  CDR3 for alpha chain variable domain of TCR clone 196692 (TRAV16, TRAJ15)
CALSFNQAGTDLIF

SEQ ID NO: 393384 - protein, 13 aa, Homo sapiens
  CDR3 for beta chain variable domain of TCR clone 196692 (TRBV19, TRBJ2-2)
CASRTLGTGELFF

SEQ ID NO: 393385 - protein, 11 aa, Homo sapiens
  CDR3 for alpha chain variable domain of TCR clone 196693 (TRAV12-2, TRAJ49)
CALQGGNQFYF

SEQ ID NO: 393386 - protein, 13 aa, Homo sapiens
  CDR3 for beta chain variable domain of TCR clone 196693 (TRBV3-1, TRBJ1-1)
CASSPGVITEAFF

SEQ ID NO: 393387 - protein, 13 aa, Homo sapiens
  CDR3 for alpha chain variable domain of TCR clone 196694 (TRAV17, TRAJ22)
CAHHSGSARQLTF

SEQ ID NO: 393388 - protein, 15 aa, Homo sapiens
  CDR3 for beta chain variable domain of TCR clone 196694 (TRBV20-1, TRBJ2-7)
CSARDRVSGMDEQYL

SEQ ID NO: 393389 - protein, 13 aa, Homo sapiens
  CDR3 for alpha chain variable domain of TCR clone 196695 (TRAV3, TRAJ5)
CAVRDTGRRALTF

SEQ ID NO: 393390 - protein, 15 aa, Homo sapiens
  CDR3 for beta chain variable domain of TCR clone 196695 (TRBV7-3, TRBJ2-2)
RASSETGQGTGELFF

SEQ ID NO: 393391 - protein, 16 aa, Homo sapiens
  CDR3 for alpha chain variable domain of TCR clone 196696 (TRAV8-3, TRAJ13)
RAVGAYPSGGYQKVTF

SEQ ID NO: 393392 - protein, 14 aa, Homo sapiens
  CDR3 for beta chain variable domain of TCR clone 196696 (TRBV18, TRBJ2-5)
CASSPRASSETQYF

SEQ ID NO: 393393 - protein, 15 aa, Homo sapiens
  CDR3 for alpha chain variable domain of TCR clone 196697 (TRAV30, TRAJ32)
CGTEILGGATNKLIF

SEQ ID NO: 393394 - protein, 12 aa, Homo sapiens
  CDR3 for beta chain variable domain of TCR clone 196697 (TRBV24-1, TRBJ2-3)
CATSDSTDTQYF

SEQ ID NO: 393395 - protein, 10 aa, Homo sapiens
  CDR3 for alpha chain variable domain of TCR clone 196698 (TRAV30, TRAJ48)
CGIGNEKLTF

SEQ ID NO: 393396 - protein, 15 aa, Homo sapiens
  CDR3 for beta chain variable domain of TCR clone 196698 (TRBV12-4, TRBJ1-2)
CASSPITGGGYGYTF

SEQ ID NO: 393397 - protein, 15 aa, Homo sapiens
  CDR3 for alpha chain variable domain of TCR clone 196699 (TRAV2, TRAJ40)
CAVVPQEPTNTSLEQ

SEQ ID NO: 393398 - protein, 14 aa, Homo sapiens
  CDR3 for beta chain variable domain of TCR clone 196699 (TRBV19, TRBJ2-1)
CASPTFVLSGEQFF

SEQ ID NO: 393399 - protein, 16 aa, Homo sapiens
  CDR3 for alpha chain variable domain of TCR clone 196700 (TRAV8-3, TRAJ13)
CAVGAYPSGGYQKVTF

SEQ ID NO: 393400 - protein, 17 aa, Homo sapiens
  CDR3 for beta chain variable domain of TCR clone 196700 (TRBV11-3, TRBJ2-3)
CASSPGSSGGRTDTQYF

SEQ ID NO: 393401 - protein, 16 aa, Homo sapiens
  CDR3 for alpha chain variable domain of TCR clone 196701 (TRAV3, TRAJ37)
CAVRPHGSGNTAKLIF

SEQ ID NO: 393402 - protein, 14 aa, Homo sapiens
  CDR3 for beta chain variable domain of TCR clone 196701 (TRBV2, TRBJ2-1)
CASSDRAYYKEQFF

SEQ ID NO: 393403 - protein, 15 aa, Homo sapiens
  CDR3 for alpha chain variable domain of TCR clone 196702 (TRAV29/DV5, TRAJ24)
CAASGATASWGEFQF

SEQ ID NO: 393404 - protein, 12 aa, Homo sapiens
  CDR3 for beta chain variable domain of TCR clone 196702 (TRBV11-2, TRBJ2-2)
CASSLPTGELFF

SEQ ID NO: 393405 - protein, 13 aa, Homo sapiens
  CDR3 for alpha chain variable domain of TCR clone 196703 (TRAV21, TRAJ27)
CAARPGNAGKSTF

SEQ ID NO: 393406 - protein, 12 aa, Homo sapiens
  CDR3 for beta chain variable domain of TCR clone 196703 (TRBV6-3, TRBJ2-7)
CASLGSYYEQCF

SEQ ID NO: 393407 - protein, 15 aa, Homo sapiens
  CDR3 for alpha chain variable domain of TCR clone 196704 (TRAV21, TRAJ58)
CAVRPPQTSGSRLTF

SEQ ID NO: 393408 - protein, 13 aa, Homo sapiens
  CDR3 for beta chain variable domain of TCR clone 196704 (TRBV5-5, TRBJ1-1)
CASSLTGETEAFF

SEQ ID NO: 393409 - protein, 14 aa, Homo sapiens
  CDR3 for alpha chain variable domain of TCR clone 196705 (TRAV8-4, TRAJ9)
CAVRINTGGFKTIF

SEQ ID NO: 393410 - protein, 15 aa, Homo sapiens
  CDR3 for beta chain variable domain of TCR clone 196705 (TRBV10-2, TRBJ2-6)
CASSEQGTVANVLTF

SEQ ID NO: 393411 - protein, 14 aa, Homo sapiens
  CDR3 for alpha chain variable domain of TCR clone 196706 (TRAV1-2, TRAJ16)
CAVNRLSDGQKLLF

SEQ ID NO: 393412 - protein, 15 aa, Homo sapiens
  CDR3 for beta chain variable domain of TCR clone 196706 (TRBV6-3, TRBJ2-7)
CASSSPETVFYEQYF

SEQ ID NO: 393413 - protein, 12 aa, Homo sapiens
  CDR3 for alpha chain variable domain of TCR clone 196707 (TRAV12-3, TRAJ17)
CAMTLTGNKPTF

SEQ ID NO: 393414 - protein, 15 aa, Homo sapiens
  CDR3 for beta chain variable domain of TCR clone 196707 (TRBV19, TRBJ2-5)
CASHGLAGAQETQYF

SEQ ID NO: 393415 - protein, 16 aa, Homo sapiens
  CDR3 for alpha chain variable domain of TCR clone 196708 (TRAV30, TRAJ24)
CGTEIVDADSWGKFQF

SEQ ID NO: 393416 - protein, 14 aa, Homo sapiens
  CDR3 for beta chain variable domain of TCR clone 196708 (TRBV13, TRBJ2-1)
CASSPRTRYNEQFF

SEQ ID NO: 393417 - protein, 12 aa, Homo sapiens
  CDR3 for alpha chain variable domain of TCR clone 196709 (TRAV13-2, TRAJ23)
CAERHRGGKLIF

SEQ ID NO: 393418 - protein, 11 aa, Homo sapiens
  CDR3 for beta chain variable domain of TCR clone 196709 (TRBV12-4, TRBJ2-3)
CASNATDTQYF

SEQ ID NO: 393419 - protein, 16 aa, Homo sapiens
  CDR3 for alpha chain variable domain of TCR clone 196710 (TRAV26-1, TRAJ23)
CIVRVADSNQGGKLIF

SEQ ID NO: 393420 - protein, 16 aa, Homo sapiens
  CDR3 for beta chain variable domain of TCR clone 196710 (TRBV10-3, TRBJ2-1)
CAISGVGDGGGGEQFF

SEQ ID NO: 393421 - protein, 14 aa, Homo sapiens
  CDR3 for alpha chain variable domain of TCR clone 196711 (TRAV29/DV5, TRAJ32)
CTAAYGGATNKLTF

SEQ ID NO: 393422 - protein, 15 aa, Homo sapiens
  CDR3 for beta chain variable domain of TCR clone 196711 (TRBV27, TRBJ2-7)
CASSTAGTGSYEQYF

SEQ ID NO: 393423 - protein, 13 aa, Homo sapiens
  CDR3 for alpha chain variable domain of TCR clone 196712 (TRAV2, TRAJ40)
CAVVTSGTYKYIF

SEQ ID NO: 393424 - protein, 21 aa, Homo sapiens
  CDR3 for beta chain variable domain of TCR clone 196712 (TRBV24-1, TRBJ2-5)
ESVIPNQTALYFCATRETQYF

SEQ ID NO: 393425 - protein, 14 aa, Homo sapiens
  CDR3 for alpha chain variable domain of TCR clone 196713 (TRAV29/DV5, TRAJ36)
CAARSKTGANTLFF

SEQ ID NO: 393426 - protein, 14 aa, Homo sapiens
  CDR3 for beta chain variable domain of TCR clone 196713 (TRBV12-5, TRBJ2-5)
CASGSRTHQETQYF

SEQ ID NO: 393427 - protein, 10 aa, Homo sapiens
  CDR3 for alpha chain variable domain of TCR clone 196714 (TRAV1-2, TRAJ31)
CVSEDARLMF

SEQ ID NO: 393428 - protein, 11 aa, Homo sapiens
  CDR3 for beta chain variable domain of TCR clone 196714 (TRBV24-1, TRBJ2-3)
CATASTDTQYF

SEQ ID NO: 393429 - protein, 14 aa, Homo sapiens
  CDR3 for alpha chain variable domain of TCR clone 196715 (TRAV17, TRAJ15)
CATGPNQAGTAPIF

SEQ ID NO: 393430 - protein, 15 aa, Homo sapiens
  CDR3 for beta chain variable domain of TCR clone 196715 (TRBV11-2, TRBJ2-2)
CASSSDRVNAGELFF

SEQ ID NO: 393431 - protein, 14 aa, Homo sapiens
  CDR3 for alpha chain variable domain of TCR clone 196716 (TRAV3, TRAJ7)
CAVREEEREQQTRF

SEQ ID NO: 393432 - protein, 16 aa, Homo sapiens
  CDR3 for beta chain variable domain of TCR clone 196716 (TRBV12-5, TRBJ2-5)
CASGPRTSGNQETQYF

SEQ ID NO: 393433 - protein, 12 aa, Homo sapiens
  CDR3 for alpha chain variable domain of TCR clone 196717 (TRAV1-2, TRAJ33)
CAALDSNYQLIW

SEQ ID NO: 393434 - protein, 15 aa, Homo sapiens
  CDR3 for beta chain variable domain of TCR clone 196717 (TRBV18, TRBJ1-5)
CASSPSDRSNQPQHF

SEQ ID NO: 393435 - protein, 14 aa, Homo sapiens
  CDR3 for alpha chain variable domain of TCR clone 196718 (TRAV30, TRAJ26)
FGTEIVSYGQNFVF

SEQ ID NO: 393436 - protein, 13 aa, Homo sapiens
  CDR3 for beta chain variable domain of TCR clone 196718 (TRBV19, TRBJ1-3)
CASRLSLGNTIYF

SEQ ID NO: 393437 - protein, 15 aa, Homo sapiens
  CDR3 for alpha chain variable domain of TCR clone 196719 (TRAV2, TRAJ9)
CAVEDRGTGGFKTIF

SEQ ID NO: 393438 - protein, 17 aa, Homo sapiens
  CDR3 for beta chain variable domain of TCR clone 196719 (TRBV20-1, TRBJ2-1)
CSASSSGLAGSYNEQFF

SEQ ID NO: 393439 - protein, 14 aa, Homo sapiens
  CDR3 for alpha chain variable domain of TCR clone 196720 (TRAV8-3, TRAJ21)
CAVDARDNFNKFYF

SEQ ID NO: 393440 - protein, 16 aa, Homo sapiens
  CDR3 for beta chain variable domain of TCR clone 196720 (TRBV20-1, TRBJ2-1)
CSARDQAGHSYNEQFF

SEQ ID NO: 393441 - protein, 13 aa, Homo sapiens
  CDR3 for alpha chain variable domain of TCR clone 196721 (TRAV5, TRAJ30)
CAEIANRDDKIIF

SEQ ID NO: 393442 - protein, 14 aa, Homo sapiens
  CDR3 for beta chain variable domain of TCR clone 196721 (TRBV4-1, TRBJ2-2)
CASSQALNTGELFF

SEQ ID NO: 393443 - protein, 13 aa, Homo sapiens
  CDR3 for alpha chain variable domain of TCR clone 196722 (TRAV2, TRAJ21)
CAVEDLNFNKFYF

SEQ ID NO: 393444 - protein, 15 aa, Homo sapiens
  CDR3 for beta chain variable domain of TCR clone 196722 (TRBV7-9, TRBJ1-5)
CASSQGHQPNQPQHF

SEQ ID NO: 393445 - protein, 23 aa, Homo sapiens
  CDR3 for alpha chain variable domain of TCR clone 196723 (TRAV12-2, TRAJ43)
SLLIRDSQPSDSATYLCAFDMRF

SEQ ID NO: 393446 - protein, 13 aa, Homo sapiens
  CDR3 for beta chain variable domain of TCR clone 196723 (TRBV4-2, TRBJ1-1)
CASSQAGNTEAFF

SEQ ID NO: 393447 - protein, 10 aa, Homo sapiens
  CDR3 for alpha chain variable domain of TCR clone 196724 (TRAV30, TRAJ48)
CGIGNEKLTF

SEQ ID NO: 393448 - protein, 13 aa, Homo sapiens
  CDR3 for beta chain variable domain of TCR clone 196724 (TRBV29-1, TRBJ2-7)
CSVGPSGGYEQDF

SEQ ID NO: 393449 - protein, 16 aa, Homo sapiens
  CDR3 for alpha chain variable domain of TCR clone 196725 (TRAV22, TRAJ45)
CSVERGKRGGADGLTF

SEQ ID NO: 393450 - protein, 11 aa, Homo sapiens
  CDR3 for beta chain variable domain of TCR clone 196725 (TRBV29-1, TRBJ2-5)
CSEDRTGTQYF

SEQ ID NO: 393451 - protein, 10 aa, Homo sapiens
  CDR3 for alpha chain variable domain of TCR clone 196726 (TRAV12-2, TRAJ20)
CAVYLYKLSF

SEQ ID NO: 393452 - protein, 13 aa, Homo sapiens
  CDR3 for beta chain variable domain of TCR clone 196726 (TRBV10-3, TRBJ2-2)
SISEVSHSGELFF

SEQ ID NO: 393453 - protein, 13 aa, Homo sapiens
  CDR3 for alpha chain variable domain of TCR clone 196727 (TRAV36/DV7, TRAJ38)
CVANAGNNRKLIW

SEQ ID NO: 393454 - protein, 14 aa, Homo sapiens
  CDR3 for beta chain variable domain of TCR clone 196727 (TRBV7-2, TRBJ2-3)
CASSQTGSSYTQYF

SEQ ID NO: 393455 - protein, 13 aa, Homo sapiens
  CDR3 for alpha chain variable domain of TCR clone 196728 (TRAV2, TRAJ40)
CAVVTSGTYKYIF

SEQ ID NO: 393456 - protein, 14 aa, Homo sapiens
  CDR3 for beta chain variable domain of TCR clone 196728 (TRBV7-2, TRBJ2-5)
CASSFTQGQETQYF

SEQ ID NO: 393457 - protein, 14 aa, Homo sapiens
  CDR3 for alpha chain variable domain of TCR clone 196729 (TRAV2, TRAJ9)
CAVEDRSGGFKTIF

SEQ ID NO: 393458 - protein, 13 aa, Homo sapiens
  CDR3 for beta chain variable domain of TCR clone 196729 (TRBV19, TRBJ1-1)
CASNGQVNTEAFF

SEQ ID NO: 393459 - protein, 15 aa, Homo sapiens
  CDR3 for alpha chain variable domain of TCR clone 196730 (TRAV27, TRAJ38)
CAARRNAGNNRKLIW

SEQ ID NO: 393460 - protein, 15 aa, Homo sapiens
  CDR3 for beta chain variable domain of TCR clone 196730 (TRBV28, TRBJ2-5)
CASSPPWSYQETQYF

SEQ ID NO: 393461 - protein, 12 aa, Homo sapiens
  CDR3 for alpha chain variable domain of TCR clone 196731 (TRAV12-1, TRAJ40)
CVVYSGTNKYIF

SEQ ID NO: 393462 - protein, 15 aa, Homo sapiens
  CDR3 for beta chain variable domain of TCR clone 196731 (TRBV7-9, TRBJ1-6)
CASSSPGRGNSPLHF

SEQ ID NO: 393463 - protein, 10 aa, Homo sapiens
  CDR3 for alpha chain variable domain of TCR clone 196732 (TRAV12-3, TRAJ18)
CAMSADAQPW

SEQ ID NO: 393464 - protein, 13 aa, Homo sapiens
  CDR3 for beta chain variable domain of TCR clone 196732 (TRBV15, TRBJ1-6)
CATSGGLNSPLHF

SEQ ID NO: 393465 - protein, 15 aa, Homo sapiens
  CDR3 for alpha chain variable domain of TCR clone 196733 (TRAV21, TRAJ37)
CAVRPTLSNTGKLIF

SEQ ID NO: 393466 - protein, 15 aa, Homo sapiens
  CDR3 for beta chain variable domain of TCR clone 196733 (TRBV28, TRBJ2-1)
CASSFQEGVYNEQFF

SEQ ID NO: 393467 - protein, 14 aa, Homo sapiens
  CDR3 for alpha chain variable domain of TCR clone 196734 (TRAV12-3, TRAJ29)
CAMSPYSGNTPLVF

SEQ ID NO: 393468 - protein, 14 aa, Homo sapiens
  CDR3 for beta chain variable domain of TCR clone 196734 (TRBV12-4, TRBJ2-5)
CASSLWQKQETQYF

SEQ ID NO: 393469 - protein, 15 aa, Homo sapiens
  CDR3 for alpha chain variable domain of TCR clone 196735 (TRAV9-2, TRAJ39)
CALSETPNAGNMLTF

SEQ ID NO: 393470 - protein, 12 aa, Homo sapiens
  CDR3 for beta chain variable domain of TCR clone 196735 (TRBV6-5, TRBJ2-7)
CASRGTGVRQYF

SEQ ID NO: 393471 - protein, 18 aa, Homo sapiens
  CDR3 for alpha chain variable domain of TCR clone 196736 (TRAV26-1, TRAJ44)
CIVRVAGGGVRTASKTTF

SEQ ID NO: 393472 - protein, 12 aa, Homo sapiens
  CDR3 for beta chain variable domain of TCR clone 196736 (TRBV14, TRBJ2-7)
CASSRLKGEQYF

SEQ ID NO: 393473 - protein, 15 aa, Homo sapiens
  CDR3 for alpha chain variable domain of TCR clone 196737 (TRAV13-1, TRAJ49)
CAASTEGNTGNQFYF

SEQ ID NO: 393474 - protein, 12 aa, Homo sapiens
  CDR3 for beta chain variable domain of TCR clone 196737 (TRBV11-2, TRBJ1-5)
CASSSDNQPQHF

SEQ ID NO: 393475 - protein, 15 aa, Homo sapiens
  CDR3 for alpha chain variable domain of TCR clone 196738 (TRAV3, TRAJ17)
CAVRDTGAAGNKLTF

SEQ ID NO: 393476 - protein, 15 aa, Homo sapiens
  CDR3 for beta chain variable domain of TCR clone 196738 (TRBV20-1, TRBJ2-7)
CSARDRVSGMDGQYF

SEQ ID NO: 393477 - protein, 14 aa, Homo sapiens
  CDR3 for alpha chain variable domain of TCR clone 196739 (TRAV4, TRAJ20)
CLVGRRYNDYKLSF

SEQ ID NO: 393478 - protein, 18 aa, Homo sapiens
  CDR3 for beta chain variable domain of TCR clone 196739 (TRBV2, TRBJ2-5)
CASSGDPQGRGAQETQYF

SEQ ID NO: 393479 - protein, 12 aa, Homo sapiens
  CDR3 for alpha chain variable domain of TCR clone 196740 (TRAV12-2, TRAJ42)
CAVGGSQGNLIF

SEQ ID NO: 393480 - protein, 20 aa, Homo sapiens
  CDR3 for beta chain variable domain of TCR clone 196740 (TRBV28, TRBJ2-1)
CASTPIGRSPGLAGGNEQFF

SEQ ID NO: 393481 - protein, 17 aa, Homo sapiens
  CDR3 for alpha chain variable domain of TCR clone 196741 (TRAV21, TRAJ52)
AASQPGDSATYLCAVTN

SEQ ID NO: 393482 - protein, 13 aa, Homo sapiens
  CDR3 for beta chain variable domain of TCR clone 196741 (TRBV20-1, TRBJ2-3)
CSARLAGTDTQYF

SEQ ID NO: 393483 - protein, 16 aa, Homo sapiens
  CDR3 for alpha chain variable domain of TCR clone 196742 (TRAV20, TRAJ53)
CAVQAESGGSNYKLTF

SEQ ID NO: 393484 - protein, 17 aa, Homo sapiens
  CDR3 for beta chain variable domain of TCR clone 196742 (TRBV23-1, TRBJ2-1)
CASSQYTAAGVVMSSSS

SEQ ID NO: 393485 - protein, 14 aa, Homo sapiens
  CDR3 for alpha chain variable domain of TCR clone 196743 (TRAV26-1, TRAJ38)
CIADNAGNNRKLIW

SEQ ID NO: 393486 - protein, 13 aa, Homo sapiens
  CDR3 for beta chain variable domain of TCR clone 196743 (TRBV20-1, TRBJ2-5)
CSARGDYQETQYF

SEQ ID NO: 393487 - protein, 14 aa, Homo sapiens
  CDR3 for alpha chain variable domain of TCR clone 196744 (TRAV2, TRAJ9)
CAVEDRSGGFKTIF

SEQ ID NO: 393488 - protein, 13 aa, Homo sapiens
  CDR3 for beta chain variable domain of TCR clone 196744 (TRBV27, TRBJ1-1)
CASSLSIGDEAFF

SEQ ID NO: 393489 - protein, 13 aa, Homo sapiens
  CDR3 for alpha chain variable domain of TCR clone 196745 (TRAV3, TRAJ21)
CAVREPDFNKFYF

SEQ ID NO: 393490 - protein, 18 aa, Homo sapiens
  CDR3 for beta chain variable domain of TCR clone 196745 (TRBV11-2, TRBJ2-3)
CASSLRGASRGAPNTQYF

SEQ ID NO: 393491 - protein, 15 aa, Homo sapiens
  CDR3 for alpha chain variable domain of TCR clone 196746 (TRAV26-2, TRAJ26)
CILRDLDNYGQNFVF

SEQ ID NO: 393492 - protein, 14 aa, Homo sapiens
  CDR3 for beta chain variable domain of TCR clone 196746 (TRBV29-1, TRBJ2-5)
CRFWTPYAGETQYF

SEQ ID NO: 393493 - protein, 16 aa, Homo sapiens
  CDR3 for alpha chain variable domain of TCR clone 196747 (TRAV26-2, TRAJ45)
CTTASPIGGGADGLTF

SEQ ID NO: 393494 - protein, 20 aa, Homo sapiens
  CDR3 for beta chain variable domain of TCR clone 196747 (TRBV28, TRBJ2-1)
CASTPIGRSPGLAGGNKQFF

SEQ ID NO: 393495 - protein, 14 aa, Homo sapiens
  CDR3 for alpha chain variable domain of TCR clone 196748 (TRAV1-2, TRAJ16)
CAVNRFSDGQKLLF

SEQ ID NO: 393496 - protein, 15 aa, Homo sapiens
  CDR3 for beta chain variable domain of TCR clone 196748 (TRBV27, TRBJ1-4)
CASSPRHATNEKLFF

SEQ ID NO: 393497 - protein, 14 aa, Homo sapiens
  CDR3 for alpha chain variable domain of TCR clone 196749 (TRAV1-2, TRAJ16)
CAVNRFSDGEKLLF

SEQ ID NO: 393498 - protein, 17 aa, Homo sapiens
  CDR3 for beta chain variable domain of TCR clone 196749 (TRBV10-3, TRBJ2-4)
CTSVPSVNKGSKNIQYF

SEQ ID NO: 393499 - protein, 15 aa, Homo sapiens
  CDR3 for alpha chain variable domain of TCR clone 196750 (TRAV29/DV5, TRAJ24)
CAASGATDSWGKFQF

SEQ ID NO: 393500 - protein, 15 aa, Homo sapiens
  CDR3 for beta chain variable domain of TCR clone 196750 (TRBV5-1, TRBJ2-7)
CASSLNGGPAREQYF

SEQ ID NO: 393501 - protein, 14 aa, Homo sapiens
  CDR3 for alpha chain variable domain of TCR clone 196751 (TRAV29/DV5, TRAJ45)
CAASFRGGADGLTF

SEQ ID NO: 393502 - protein, 15 aa, Homo sapiens
  CDR3 for beta chain variable domain of TCR clone 196751 (TRBV19, TRBJ2-7)
CASRPTPGLSIEQYF

SEQ ID NO: 393503 - protein, 14 aa, Homo sapiens
  CDR3 for alpha chain variable domain of TCR clone 196752 (TRAV12-3, TRAJ10)
SHLPLTGGGNKLTF

SEQ ID NO: 393504 - protein, 14 aa, Homo sapiens
  CDR3 for beta chain variable domain of TCR clone 196752 (TRBV7-2, TRBJ2-2)
CASRGQGAAGELFF

SEQ ID NO: 393505 - protein, 15 aa, Homo sapiens
  CDR3 for alpha chain variable domain of TCR clone 196753 (TRAV3, TRAJ4)
CAQNMFSGGYNKLIS

SEQ ID NO: 393506 - protein, 16 aa, Homo sapiens
  CDR3 for beta chain variable domain of TCR clone 196753 (TRBV3-1, TRBJ1-6)
CASSQEFQGSYSPLHF

SEQ ID NO: 393507 - protein, 13 aa, Homo sapiens
  CDR3 for alpha chain variable domain of TCR clone 196754 (TRAV2, TRAJ40)
CAVVTSGTYKYIF

SEQ ID NO: 393508 - protein, 14 aa, Homo sapiens
  CDR3 for beta chain variable domain of TCR clone 196754 (TRBV18, TRBJ2-7)
CASSPRGGVYEQYF

SEQ ID NO: 393509 - protein, 13 aa, Homo sapiens
  CDR3 for alpha chain variable domain of TCR clone 196755 (TRAV3, TRAJ21)
CAVREPDFNKFYF

SEQ ID NO: 393510 - protein, 19 aa, Homo sapiens
  CDR3 for beta chain variable domain of TCR clone 196755 (TRBV4-2, TRBJ1-5)
CASSQDGGSGGGLNQPQHF

SEQ ID NO: 393511 - protein, 16 aa, Homo sapiens
  CDR3 for alpha chain variable domain of TCR clone 196756 (TRAV14/DV4, TRAJ20)
CAMREGRSRDDYKLSF

SEQ ID NO: 393512 - protein, 15 aa, Homo sapiens
  CDR3 for beta chain variable domain of TCR clone 196756 (TRBV7-2, TRBJ2-2)
CASRRPGQNTGELFF

SEQ ID NO: 393513 - protein, 11 aa, Homo sapiens
  CDR3 for alpha chain variable domain of TCR clone 196757 (TRAV13-1, TRAJ6)
CATLGSYIPTF

SEQ ID NO: 393514 - protein, 12 aa, Homo sapiens
  CDR3 for beta chain variable domain of TCR clone 196757 (TRBV11-2, TRBJ2-1)
CASSPGNNEKFF

SEQ ID NO: 393515 - protein, 18 aa, Homo sapiens
  CDR3 for alpha chain variable domain of TCR clone 196758 (TRAV12-3, TRAJ52)
CAMSVGGAGGNSDGKLTF

SEQ ID NO: 393516 - protein, 15 aa, Homo sapiens
  CDR3 for beta chain variable domain of TCR clone 196758 (TRBV27, TRBJ1-6)
CASSFDRGLGSPRHF

SEQ ID NO: 393517 - protein, 12 aa, Homo sapiens
  CDR3 for alpha chain variable domain of TCR clone 196759 (TRAV16, TRAJ10)
CSRTGGGNKLTF

SEQ ID NO: 393518 - protein, 16 aa, Homo sapiens
  CDR3 for beta chain variable domain of TCR clone 196759 (TRBV28, TRBJ2-1)
CASRRSGRVVGNEQFF

SEQ ID NO: 393519 - protein, 12 aa, Homo sapiens
  CDR3 for alpha chain variable domain of TCR clone 196760 (TRAV12-3, TRAJ17)
CAMTLTGNKLTF

SEQ ID NO: 393520 - protein, 14 aa, Homo sapiens
  CDR3 for beta chain variable domain of TCR clone 196760 (TRBV20-1, TRBJ2-7)
CSARDRVSGMEQYF

SEQ ID NO: 393521 - protein, 16 aa, Homo sapiens
  CDR3 for alpha chain variable domain of TCR clone 196761 (TRAV12-1, TRAJ34)
CVVNPLETPTSSSLGL

SEQ ID NO: 393522 - protein, 20 aa, Homo sapiens
  CDR3 for beta chain variable domain of TCR clone 196761 (TRBV19, TRBJ2-1)
CASSISRTVTSTRLNNEQFF

SEQ ID NO: 393523 - protein, 15 aa, Homo sapiens
  CDR3 for alpha chain variable domain of TCR clone 196762 (TRAV17, TRAJ57)
CATGPYQGGSEKLVF

SEQ ID NO: 393524 - protein, 13 aa, Homo sapiens
  CDR3 for beta chain variable domain of TCR clone 196762 (TRBV6-5, TRBJ2-5)
CASSPQGGETQYF

SEQ ID NO: 393525 - protein, 12 aa, Homo sapiens
  CDR3 for alpha chain variable domain of TCR clone 196763 (TRAV2, TRAJ33)
CAFMDSNYQLIW

SEQ ID NO: 393526 - protein, 12 aa, Homo sapiens
  CDR3 for beta chain variable domain of TCR clone 196763 (TRBV6-1, TRBJ2-1)
CATQKGGGHLFF

SEQ ID NO: 393527 - protein, 13 aa, Homo sapiens
  CDR3 for alpha chain variable domain of TCR clone 196764 (TRAV3, TRAJ8)
CAVRFTGFQKLVF

SEQ ID NO: 393528 - protein, 15 aa, Homo sapiens
  CDR3 for beta chain variable domain of TCR clone 196764 (TRBV9, TRBJ1-6)
CASSVAGTGDSPLHF

SEQ ID NO: 393529 - protein, 14 aa, Homo sapiens
  CDR3 for alpha chain variable domain of TCR clone 196765 (TRAV8-3, TRAJ4)
CAVGAAGGYNKLIF

SEQ ID NO: 393530 - protein, 13 aa, Homo sapiens
  CDR3 for beta chain variable domain of TCR clone 196765 (TRBV12-4, TRBJ1-1)
CASSPGTGFEAFF

SEQ ID NO: 393531 - protein, 16 aa, Homo sapiens
  CDR3 for alpha chain variable domain of TCR clone 196766 (TRAV14/DV4, TRAJ54)
CAMREGRIQGAQKLVF

SEQ ID NO: 393532 - protein, 15 aa, Homo sapiens
  CDR3 for beta chain variable domain of TCR clone 196766 (TRBV20-1, TRBJ2-1)
CSARGIGGTYNEQFF

SEQ ID NO: 393533 - protein, 15 aa, Homo sapiens
  CDR3 for alpha chain variable domain of TCR clone 196767 (TRAV26-1, TRAJ29)
CIVRVEGAGNIPLVF

SEQ ID NO: 393534 - protein, 14 aa, Homo sapiens
  CDR3 for beta chain variable domain of TCR clone 196767 (TRBV18, TRBJ2-5)
CASSPGVSQETQYF

SEQ ID NO: 393535 - protein, 13 aa, Homo sapiens
  CDR3 for alpha chain variable domain of TCR clone 196768 (TRAV3, TRAJ21)
CSVREPDFNKFYF

SEQ ID NO: 393536 - protein, 13 aa, Homo sapiens
  CDR3 for beta chain variable domain of TCR clone 196768 (TRBV20-1, TRBJ1-1)
CSARGGGNTEAFF

SEQ ID NO: 393537 - protein, 15 aa, Homo sapiens
  CDR3 for alpha chain variable domain of TCR clone 196769 (TRAV26-1, TRAJ44)
CIVRANTGTASNLTF

SEQ ID NO: 393538 - protein, 16 aa, Homo sapiens
  CDR3 for beta chain variable domain of TCR clone 196769 (TRBV7-7, TRBJ2-1)
CASSLASGTSYSGQFF

SEQ ID NO: 393539 - protein, 15 aa, Homo sapiens
  CDR3 for alpha chain variable domain of TCR clone 196770 (TRAV17, TRAJ52)
CATEAGGTSYGKLTF

SEQ ID NO: 393540 - protein, 14 aa, Homo sapiens
  CDR3 for beta chain variable domain of TCR clone 196770 (TRBV28, TRBJ1-5)
CASSLGGLVKPQHF

SEQ ID NO: 393541 - protein, 14 aa, Homo sapiens
  CDR3 for alpha chain variable domain of TCR clone 196771 (TRAV1-1, TRAJ23)
CAVSIYNQGGKLIF

SEQ ID NO: 393542 - protein, 12 aa, Homo sapiens
  CDR3 for beta chain variable domain of TCR clone 196771 (TRBV11-2, TRBJ2-1)
CASSPGNNEQFF

SEQ ID NO: 393543 - protein, 14 aa, Homo sapiens
  CDR3 for alpha chain variable domain of TCR clone 196772 (TRAV1-2, TRAJ8)
CAVREDTGFQKLVF

SEQ ID NO: 393544 - protein, 14 aa, Homo sapiens
  CDR3 for beta chain variable domain of TCR clone 196772 (TRBV5-1, TRBJ1-2)
CASSLEPVNYGYTF

SEQ ID NO: 393545 - protein, 11 aa, Homo sapiens
  CDR3 for alpha chain variable domain of TCR clone 196773 (TRAV3, TRAJ21)
CAVGNFNKYYF

SEQ ID NO: 393546 - protein, 14 aa, Homo sapiens
  CDR3 for beta chain variable domain of TCR clone 196773 (TRBV7-9, TRBJ2-1)
CASSSMVGFGEQFF

SEQ ID NO: 393547 - protein, 14 aa, Homo sapiens
  CDR3 for alpha chain variable domain of TCR clone 196774 (TRAV1-2, TRAJ16)
CAVNRLSDGQKLLC

SEQ ID NO: 393548 - protein, 12 aa, Homo sapiens
  CDR3 for beta chain variable domain of TCR clone 196774 (TRBV11-2, TRBJ2-2)
CARSLGGGELFF

SEQ ID NO: 393549 - protein, 15 aa, Homo sapiens
  CDR3 for alpha chain variable domain of TCR clone 196775 (TRAV13-1, TRAJ52)
CAANAGGTSYGKLTF

SEQ ID NO: 393550 - protein, 11 aa, Homo sapiens
  CDR3 for beta chain variable domain of TCR clone 196775 (TRBV12-4, TRBJ2-3)
CAGTATDTQYF

SEQ ID NO: 393551 - protein, 14 aa, Homo sapiens
  CDR3 for alpha chain variable domain of TCR clone 196776 (TRAV13-2, TRAJ17)
CAENSKAAGNKLTF

SEQ ID NO: 393552 - protein, 15 aa, Homo sapiens
  CDR3 for beta chain variable domain of TCR clone 196776 (TRBV19, TRBJ2-4)
CASSIGLAGANIQYF

SEQ ID NO: 393553 - protein, 12 aa, Homo sapiens
  CDR3 for alpha chain variable domain of TCR clone 196777 (TRAV2, TRAJ34)
RAVERNTDKLIF

SEQ ID NO: 393554 - protein, 20 aa, Homo sapiens
  CDR3 for beta chain variable domain of TCR clone 196777 (TRBV7-2, TRBJ2-5)
CASSFLRGGGRDPVLRARHA

SEQ ID NO: 393555 - protein, 14 aa, Homo sapiens
  CDR3 for alpha chain variable domain of TCR clone 196778 (TRAV12-2, TRAJ13)
CAVKKTGGYQKVTF

SEQ ID NO: 393556 - protein, 15 aa, Homo sapiens
  CDR3 for beta chain variable domain of TCR clone 196778 (TRBV10-3, TRBJ2-7)
CAISESSGLTYEQYF

SEQ ID NO: 393557 - protein, 16 aa, Homo sapiens
  CDR3 for alpha chain variable domain of TCR clone 196779 (TRAV12-2, TRAJ18)
CAVTTDRGSTLGRLYF

SEQ ID NO: 393558 - protein, 15 aa, Homo sapiens
  CDR3 for beta chain variable domain of TCR clone 196779 (TRBV7-9, TRBJ1-6)
CASSSPGRGNSPLHF

SEQ ID NO: 393559 - protein, 12 aa, Homo sapiens
  CDR3 for alpha chain variable domain of TCR clone 196780 (TRAV12-2, TRAJ45)
CASGGGADGLTF

SEQ ID NO: 393560 - protein, 16 aa, Homo sapiens
  CDR3 for beta chain variable domain of TCR clone 196780 (TRBV19, TRBJ2-3)
CASSAGLLASTDTQYF

SEQ ID NO: 393561 - protein, 15 aa, Homo sapiens
  CDR3 for alpha chain variable domain of TCR clone 196781 (TRAV23/DV6, TRAJ45)
CAASARGGGTDGLTF

SEQ ID NO: 393562 - protein, 15 aa, Homo sapiens
  CDR3 for beta chain variable domain of TCR clone 196781 (TRBV3-1, TRBJ2-5)
CASSRGQASWKTQYF

SEQ ID NO: 393563 - protein, 13 aa, Homo sapiens
  CDR3 for alpha chain variable domain of TCR clone 196782 (TRAV8-3, TRAJ16)
CAVGRGGWPEAAL

SEQ ID NO: 393564 - protein, 23 aa, Homo sapiens
  CDR3 for beta chain variable domain of TCR clone 196782 (TRBV7-8, TRBJ2-3)
CASRNSGTSGKNWLAQIRSILAQ

SEQ ID NO: 393565 - protein, 17 aa, Homo sapiens
  CDR3 for alpha chain variable domain of TCR clone 196783 (TRAV3, TRAJ6)
CAVRDGPRAGGSYIPTF

SEQ ID NO: 393566 - protein, 15 aa, Homo sapiens
  CDR3 for beta chain variable domain of TCR clone 196783 (TRBV27, TRBJ2-1)
CASSNGGGPSNEQFF

SEQ ID NO: 393567 - protein, 14 aa, Homo sapiens
  CDR3 for alpha chain variable domain of TCR clone 196784 (TRAV26-2, TRAJ32)
CCVGYGGATNKLIF

SEQ ID NO: 393568 - protein, 14 aa, Homo sapiens
  CDR3 for beta chain variable domain of TCR clone 196784 (TRBV4-2, TRBJ2-1)
CASGLDRAYNEEFF

SEQ ID NO: 393569 - protein, 14 aa, Homo sapiens
  CDR3 for alpha chain variable domain of TCR clone 196785 (TRAV23/DV6, TRAJ40)
CAASLTSGTYKYIF

SEQ ID NO: 393570 - protein, 14 aa, Homo sapiens
  CDR3 for beta chain variable domain of TCR clone 196785 (TRBV7-2, TRBJ1-1)
CASSFLTGTTEAFF

SEQ ID NO: 393571 - protein, 15 aa, Homo sapiens
  CDR3 for alpha chain variable domain of TCR clone 196786 (TRAV2, TRAJ22)
CAVPSRGGSARQLSF

SEQ ID NO: 393572 - protein, 16 aa, Homo sapiens
  CDR3 for beta chain variable domain of TCR clone 196786 (TRBV7-2, TRBJ2-1)
CASSPRLAGSNNEQFF

SEQ ID NO: 393573 - protein, 12 aa, Homo sapiens
  CDR3 for alpha chain variable domain of TCR clone 196787 (TRAV6, TRAJ20)
CALDRGDYKLSF

SEQ ID NO: 393574 - protein, 13 aa, Homo sapiens
  CDR3 for beta chain variable domain of TCR clone 196787 (TRBV5-1, TRBJ1-2)
CASSFQDGYGYTV

SEQ ID NO: 393575 - protein, 15 aa, Homo sapiens
  CDR3 for alpha chain variable domain of TCR clone 196788 (TRAV27, TRAJ38)
CAARRNAGNNRKLIW

SEQ ID NO: 393576 - protein, 13 aa, Homo sapiens
  CDR3 for beta chain variable domain of TCR clone 196788 (TRBV12-5, TRBJ2-3)
CASCDRQSNTHYF

SEQ ID NO: 393577 - protein, 12 aa, Homo sapiens
  CDR3 for alpha chain variable domain of TCR clone 196789 (TRAV12-3, TRAJ17)
GAMTLTGNKLTF

SEQ ID NO: 393578 - protein, 12 aa, Homo sapiens
  CDR3 for beta chain variable domain of TCR clone 196789 (TRBV11-2, TRBJ2-7)
CASSLPTYEQYF

SEQ ID NO: 393579 - protein, 14 aa, Homo sapiens
  CDR3 for alpha chain variable domain of TCR clone 196790 (TRAV8-2, TRAJ4)
CVVGPSVGYNKLMF

SEQ ID NO: 393580 - protein, 15 aa, Homo sapiens
  CDR3 for beta chain variable domain of TCR clone 196790 (TRBV4-1, TRBJ1-4)
CASSDTGGTNEKLFF

SEQ ID NO: 393581 - protein, 14 aa, Homo sapiens
  CDR3 for alpha chain variable domain of TCR clone 196791 (TRAV29/DV5, TRAJ36)
CAARRKTGANNLYF

SEQ ID NO: 393582 - protein, 12 aa, Homo sapiens
  CDR3 for beta chain variable domain of TCR clone 196791 (TRBV12-4, TRBJ2-7)
CASSLGGYEQYF

SEQ ID NO: 393583 - protein, 16 aa, Homo sapiens
  CDR3 for alpha chain variable domain of TCR clone 196792 (TRAV8-2, TRAJ7)
CVVSEGPYYGNNRLAF

SEQ ID NO: 393584 - protein, 15 aa, Homo sapiens
  CDR3 for beta chain variable domain of TCR clone 196792 (TRBV27, TRBJ2-3)
CASSVGLAATDTQYF

SEQ ID NO: 393585 - protein, 18 aa, Homo sapiens
  CDR3 for alpha chain variable domain of TCR clone 196793 (TRAV6, TRAJ37)
CALRLQHRQTNLWARDNF

SEQ ID NO: 393586 - protein, 15 aa, Homo sapiens
  CDR3 for beta chain variable domain of TCR clone 196793 (TRBV12-4, TRBJ2-5)
CASSPPTGLQETQYF

SEQ ID NO: 393587 - protein, 15 aa, Homo sapiens
  CDR3 for alpha chain variable domain of TCR clone 196794 (TRAV8-6, TRAJ37)
CAVIFSSGNTGKLIF

SEQ ID NO: 393588 - protein, 12 aa, Homo sapiens
  CDR3 for beta chain variable domain of TCR clone 196794 (TRBV11-2, TRBJ2-5)
CASSLGQETQYF

SEQ ID NO: 393589 - protein, 16 aa, Homo sapiens
  CDR3 for alpha chain variable domain of TCR clone 196795 (TRAV26-1, TRAJ23)
CIVRVHPYNQGGKLIF

SEQ ID NO: 393590 - protein, 15 aa, Homo sapiens
  CDR3 for beta chain variable domain of TCR clone 196795 (TRBV5-7, TRBJ2-7)
CASSPYFEGTYEQYF

SEQ ID NO: 393591 - protein, 15 aa, Homo sapiens
  CDR3 for alpha chain variable domain of TCR clone 196796 (TRAV2, TRAJ9)
CAVEDRGTGGFKTIF

SEQ ID NO: 393592 - protein, 16 aa, Homo sapiens
  CDR3 for beta chain variable domain of TCR clone 196796 (TRBV9, TRBJ2-7)
CASSAGPDRSPYEQYF

SEQ ID NO: 393593 - protein, 14 aa, Homo sapiens
  CDR3 for alpha chain variable domain of TCR clone 196797 (TRAV2, TRAJ9)
CAVADRSGGFKTIF

SEQ ID NO: 393594 - protein, 14 aa, Homo sapiens
  CDR3 for beta chain variable domain of TCR clone 196797 (TRBV18, TRBJ1-5)
CASSRQQRNQPQHF

SEQ ID NO: 393595 - protein, 16 aa, Homo sapiens
  CDR3 for alpha chain variable domain of TCR clone 196798 (TRAV3, TRAJ37)
CAARGKGSGNTGKLIF

SEQ ID NO: 393596 - protein, 16 aa, Homo sapiens
  CDR3 for beta chain variable domain of TCR clone 196798 (TRBV5-1, TRBJ1-1)
CASSSGGNSLNTEAFF

SEQ ID NO: 393597 - protein, 21 aa, Homo sapiens
  CDR3 for alpha chain variable domain of TCR clone 196799 (TRAV1-1, TRAJ6)
CLLLLRCERLERTGGSYIPTF

SEQ ID NO: 393598 - protein, 15 aa, Homo sapiens
  CDR3 for beta chain variable domain of TCR clone 196799 (TRBV6-1, TRBJ2-3)
CASSERGGITDTQYF

SEQ ID NO: 393599 - protein, 12 aa, Homo sapiens
  CDR3 for alpha chain variable domain of TCR clone 196800 (TRAV8-6, TRAJ40)
CAVSPGTYKYIF

SEQ ID NO: 393600 - protein, 15 aa, Homo sapiens
  CDR3 for beta chain variable domain of TCR clone 196800 (TRBV7-3, TRBJ2-1)
CASSPTGGGEVEQFF

SEQ ID NO: 393601 - protein, 15 aa, Homo sapiens
  CDR3 for alpha chain variable domain of TCR clone 196801 (TRAV8-3, TRAJ45)
CASSYSGGGAYGLTV

SEQ ID NO: 393602 - protein, 13 aa, Homo sapiens
  CDR3 for beta chain variable domain of TCR clone 196801 (TRBV10-3, TRBJ2-7)
CASKLAVNYEQYF

SEQ ID NO: 393603 - protein, 13 aa, Homo sapiens
  CDR3 for alpha chain variable domain of TCR clone 196802 (TRAV3, TRAJ21)
CAVREPDFNKFYF

SEQ ID NO: 393604 - protein, 15 aa, Homo sapiens
  CDR3 for beta chain variable domain of TCR clone 196802 (TRBV27, TRBJ1-4)
CASSNRRGFNDKLFF

SEQ ID NO: 393605 - protein, 15 aa, Homo sapiens
  CDR3 for alpha chain variable domain of TCR clone 196803 (TRAV23/DV6, TRAJ18)
CAARYRGSTLGGLYF

SEQ ID NO: 393606 - protein, 13 aa, Homo sapiens
  CDR3 for beta chain variable domain of TCR clone 196803 (TRBV7-3, TRBJ1-1)
CASSQDWGAEAFS

SEQ ID NO: 393607 - protein, 16 aa, Homo sapiens
  CDR3 for alpha chain variable domain of TCR clone 196804 (TRAV8-3, TRAJ13)
CAVGAYPSGGYQKVTF

SEQ ID NO: 393608 - protein, 14 aa, Homo sapiens
  CDR3 for beta chain variable domain of TCR clone 196804 (TRBV18, TRBJ2-5)
CASSPRASSETKYF

SEQ ID NO: 393609 - protein, 17 aa, Homo sapiens
  CDR3 for alpha chain variable domain of TCR clone 196805 (TRAV3, TRAJ42)
CAVRDRDYGGSQGNLIF

SEQ ID NO: 393610 - protein, 17 aa, Homo sapiens
  CDR3 for beta chain variable domain of TCR clone 196805 (TRBV7-9, TRBJ2-3)
CAISPTVAGDLTDTQYF

SEQ ID NO: 393611 - protein, 16 aa, Homo sapiens
  CDR3 for alpha chain variable domain of TCR clone 196806 (TRAV16, TRAJ52)
CGLSAAGGTSYGKLTF

SEQ ID NO: 393612 - protein, 14 aa, Homo sapiens
  CDR3 for beta chain variable domain of TCR clone 196806 (TRBV7-2, TRBJ2-7)
CASRSQGAAYEQYF

SEQ ID NO: 393613 - protein, 12 aa, Homo sapiens
  CDR3 for alpha chain variable domain of TCR clone 196807 (TRAV27, TRAJ9)
CAGESGSFKTIF

SEQ ID NO: 393614 - protein, 14 aa, Homo sapiens
  CDR3 for beta chain variable domain of TCR clone 196807 (TRBV6-1, TRBJ2-1)
CASAKDGFYNEQFF

SEQ ID NO: 393615 - protein, 23 aa, Homo sapiens
  CDR3 for alpha chain variable domain of TCR clone 196808 (TRAV26-1, )
CIADNAGNNHIQNPDPAGYQLRD

SEQ ID NO: 393616 - protein, 16 aa, Homo sapiens
  CDR3 for beta chain variable domain of TCR clone 196808 (TRBV19, TRBJ2-1)
CASSKAGPSSYNEQFF

SEQ ID NO: 393617 - protein, 13 aa, Homo sapiens
  CDR3 for alpha chain variable domain of TCR clone 196809 (TRAV1-2, TRAJ11)
CAVRREGYSTLTF

SEQ ID NO: 393618 - protein, 14 aa, Homo sapiens
  CDR3 for beta chain variable domain of TCR clone 196809 (TRBV25-1, TRBJ1-6)
CASSLSADISPLHF

SEQ ID NO: 393619 - protein, 11 aa, Homo sapiens
  CDR3 for alpha chain variable domain of TCR clone 196810 (TRAV3, TRAJ21)
CAVGNFNKFYF

SEQ ID NO: 393620 - protein, 16 aa, Homo sapiens
  CDR3 for beta chain variable domain of TCR clone 196810 (TRBV19, TRBJ2-2)
CASSPSGGLNTGELFF

SEQ ID NO: 393621 - protein, 14 aa, Homo sapiens
  CDR3 for alpha chain variable domain of TCR clone 196811 (TRAV38-1, TRAJ40)
CALRPTSGTYKYIF

SEQ ID NO: 393622 - protein, 14 aa, Homo sapiens
  CDR3 for beta chain variable domain of TCR clone 196811 (TRBV7-2, TRBJ2-3)
CQQRRGGGRDTQYF

SEQ ID NO: 393623 - protein, 13 aa, Homo sapiens
  CDR3 for alpha chain variable domain of TCR clone 196812 (TRAV12-2, TRAJ42)
CAVKRGSQGNLIF

SEQ ID NO: 393624 - protein, 13 aa, Homo sapiens
  CDR3 for beta chain variable domain of TCR clone 196812 (TRBV7-9, TRBJ2-3)
CASSPGSTDTQYC

SEQ ID NO: 393625 - protein, 12 aa, Homo sapiens
  CDR3 for alpha chain variable domain of TCR clone 196813 (TRAV8-3, TRAJ41)
CAVALSGYALNF

SEQ ID NO: 393626 - protein, 18 aa, Homo sapiens
  CDR3 for beta chain variable domain of TCR clone 196813 (TRBV20-1, TRBJ2-6)
CSAETTPTHGSGANVQTF

SEQ ID NO: 393627 - protein, 14 aa, Homo sapiens
  CDR3 for alpha chain variable domain of TCR clone 196814 (TRAV26-1, TRAJ38)
CIADNAGNNRKRIW

SEQ ID NO: 393628 - protein, 15 aa, Homo sapiens
  CDR3 for beta chain variable domain of TCR clone 196814 (TRBV11-3, TRBJ2-3)
CASLKDGREGDTQYF

SEQ ID NO: 393629 - protein, 17 aa, Homo sapiens
  CDR3 for alpha chain variable domain of TCR clone 196815 (TRAV8-6, TRAJ58)
CAVSSWVGETSGSRLTF

SEQ ID NO: 393630 - protein, 14 aa, Homo sapiens
  CDR3 for beta chain variable domain of TCR clone 196815 (TRBV4-2, TRBJ2-1)
CASCLDRAYNEQLF

SEQ ID NO: 393631 - protein, 13 aa, Homo sapiens
  CDR3 for alpha chain variable domain of TCR clone 196816 (TRAV12-3, TRAJ13)
CAMSSGGYQEVTF

SEQ ID NO: 393632 - protein, 13 aa, Homo sapiens
  CDR3 for beta chain variable domain of TCR clone 196816 (TRBV20-1, TRBJ1-1)
CSAPPGGHTEAAF

SEQ ID NO: 393633 - protein, 15 aa, Homo sapiens
  CDR3 for alpha chain variable domain of TCR clone 196817 (TRAV3, TRAJ22)
CAVRDRGGSARHLTF

SEQ ID NO: 393634 - protein, 18 aa, Homo sapiens
  CDR3 for beta chain variable domain of TCR clone 196817 (TRBV28, TRBJ2-1)
CASSSTSGRANSYNEQFF

SEQ ID NO: 393635 - protein, 15 aa, Homo sapiens
  CDR3 for alpha chain variable domain of TCR clone 196818 (TRAV12-2, TRAJ50)
CAVNGLETSYDKVIF

SEQ ID NO: 393636 - protein, 11 aa, Homo sapiens
  CDR3 for beta chain variable domain of TCR clone 196818 (TRBV11-2, TRBJ1-1)
CASSINTEAFF

SEQ ID NO: 393637 - protein, 12 aa, Homo sapiens
  CDR3 for alpha chain variable domain of TCR clone 196819 (TRAV8-3, TRAJ41)
CAVGSLGYALNF

SEQ ID NO: 393638 - protein, 16 aa, Homo sapiens
  CDR3 for beta chain variable domain of TCR clone 196819 (TRBV7-6, TRBJ2-3)
CASSDSRGEGTDTQYF

SEQ ID NO: 393639 - protein, 14 aa, Homo sapiens
  CDR3 for alpha chain variable domain of TCR clone 196820 (TRAV1-2, TRAJ16)
CAVNRFSDGPKLLF

SEQ ID NO: 393640 - protein, 14 aa, Homo sapiens
  CDR3 for beta chain variable domain of TCR clone 196820 (TRBV6-1, TRBJ1-6)
CASSGTAYNSPLHF

SEQ ID NO: 393641 - protein, 14 aa, Homo sapiens
  CDR3 for alpha chain variable domain of TCR clone 196821 (TRAV10, TRAJ48)
CVVSAGLWKCEINL

SEQ ID NO: 393642 - protein, 16 aa, Homo sapiens
  CDR3 for beta chain variable domain of TCR clone 196821 (TRBV12-4, TRBJ2-5)
CASSWRPSGDLETQYF

SEQ ID NO: 393643 - protein, 11 aa, Homo sapiens
  CDR3 for alpha chain variable domain of TCR clone 196822 (TRAV13-1, TRAJ8)
CAARGFQKLLF

SEQ ID NO: 393644 - protein, 16 aa, Homo sapiens
  CDR3 for beta chain variable domain of TCR clone 196822 (TRBV19, TRBJ1-5)
CASSTRGTRSNQPQHF

SEQ ID NO: 393645 - protein, 11 aa, Homo sapiens
  CDR3 for alpha chain variable domain of TCR clone 196823 (TRAV12-2, TRAJ54)
CAVEGAQKLVF

SEQ ID NO: 393646 - protein, 17 aa, Homo sapiens
  CDR3 for beta chain variable domain of TCR clone 196823 (TRBV18, TRBJ1-3)
CASSPCPTGPSGNTMYF

SEQ ID NO: 393647 - protein, 18 aa, Homo sapiens
  CDR3 for alpha chain variable domain of TCR clone 196824 (TRAV13-1, TRAJ10)
CAASKGRAVTGGGNKLTF

SEQ ID NO: 393648 - protein, 14 aa, Homo sapiens
  CDR3 for beta chain variable domain of TCR clone 196824 (TRBV18, TRBJ2-7)
CASPPRGGAYEQYF

SEQ ID NO: 393649 - protein, 14 aa, Homo sapiens
  CDR3 for alpha chain variable domain of TCR clone 196825 (TRAV12-3, TRAJ10)
SHLPLTGGGNKLTF

SEQ ID NO: 393650 - protein, 12 aa, Homo sapiens
  CDR3 for beta chain variable domain of TCR clone 196825 (TRBV7-9, TRBJ2-7)
CASSIKQEEQYF

SEQ ID NO: 393651 - protein, 16 aa, Homo sapiens
  CDR3 for alpha chain variable domain of TCR clone 196826 (TRAV12-2, TRAJ40)
CAVIRGGTSGTYKYIF

SEQ ID NO: 393652 - protein, 13 aa, Homo sapiens
  CDR3 for beta chain variable domain of TCR clone 196826 (TRBV7-6, TRBJ1-2)
CASSLVADYGYTF

SEQ ID NO: 393653 - protein, 12 aa, Homo sapiens
  CDR3 for alpha chain variable domain of TCR clone 196827 (TRAV21, TRAJ47)
CAAMEYGNKLVF

SEQ ID NO: 393654 - protein, 13 aa, Homo sapiens
  CDR3 for beta chain variable domain of TCR clone 196827 (TRBV7-3, TRBJ1-2)
CASSLKRGYGYTF

SEQ ID NO: 393655 - protein, 16 aa, Homo sapiens
  CDR3 for alpha chain variable domain of TCR clone 196828 (TRAV12-3, TRAJ53)
CAMSPGRGGSNYKLKF

SEQ ID NO: 393656 - protein, 13 aa, Homo sapiens
  CDR3 for beta chain variable domain of TCR clone 196828 (TRBV12-5, TRBJ2-3)
CASGDRQSDTQYF

SEQ ID NO: 393657 - protein, 13 aa, Homo sapiens
  CDR3 for alpha chain variable domain of TCR clone 196829 (TRAV3, TRAJ21)
CAVREPDFNKFYF

SEQ ID NO: 393658 - protein, 14 aa, Homo sapiens
  CDR3 for beta chain variable domain of TCR clone 196829 (TRBV15, TRBJ2-7)
CATSRVARGYEQYF

SEQ ID NO: 393659 - protein, 23 aa, Homo sapiens
  CDR3 for alpha chain variable domain of TCR clone 196830 (TRAV1-1, TRAJ29)
LLQELQMKDSASYFLGGNTPLVF

SEQ ID NO: 393660 - protein, 13 aa, Homo sapiens
  CDR3 for beta chain variable domain of TCR clone 196830 (TRBV25-1, TRBJ2-7)
CASSGDGDYEQYF

SEQ ID NO: 393661 - protein, 14 aa, Homo sapiens
  CDR3 for alpha chain variable domain of TCR clone 196831 (TRAV12-1, TRAJ30)
CVVNIGGRDDKIIF

SEQ ID NO: 393662 - protein, 13 aa, Homo sapiens
  CDR3 for beta chain variable domain of TCR clone 196831 (TRBV7-3, TRBJ2-5)
CASSFRGGETQYF

SEQ ID NO: 393663 - protein, 16 aa, Homo sapiens
  CDR3 for alpha chain variable domain of TCR clone 196832 (TRAV26-1, TRAJ45)
RIVEKYSGGGADGLTF

SEQ ID NO: 393664 - protein, 15 aa, Homo sapiens
  CDR3 for beta chain variable domain of TCR clone 196832 (TRBV15, TRBJ2-7)
CHQQRPIQQAYEQYF

SEQ ID NO: 393665 - protein, 15 aa, Homo sapiens
  CDR3 for alpha chain variable domain of TCR clone 196833 (TRAV34, TRAJ38)
CGADFTPGNNCKLIW

SEQ ID NO: 393666 - protein, 14 aa, Homo sapiens
  CDR3 for beta chain variable domain of TCR clone 196833 (TRBV19, TRBJ2-1)
CASPTFVLSGEQFF

SEQ ID NO: 393667 - protein, 14 aa, Homo sapiens
  CDR3 for alpha chain variable domain of TCR clone 196834 (TRAV12-3, TRAJ4)
CAMSATGGYNKLIF

SEQ ID NO: 393668 - protein, 14 aa, Homo sapiens
  CDR3 for beta chain variable domain of TCR clone 196834 (TRBV28, TRBJ1-2)
CASRIQGANYGYTF

SEQ ID NO: 393669 - protein, 14 aa, Homo sapiens
  CDR3 for alpha chain variable domain of TCR clone 196835 (TRAV13-2, TRAJ22)
CADGTLGSARQLTF

SEQ ID NO: 393670 - protein, 16 aa, Homo sapiens
  CDR3 for beta chain variable domain of TCR clone 196835 (TRBV19, TRBJ2-1)
YASSSKGTRSYNEQFF

SEQ ID NO: 393671 - protein, 11 aa, Homo sapiens
  CDR3 for alpha chain variable domain of TCR clone 196836 (TRAV12-3, TRAJ43)
CAMSVSNDMRF

SEQ ID NO: 393672 - protein, 18 aa, Homo sapiens
  CDR3 for beta chain variable domain of TCR clone 196836 (TRBV20-1, TRBJ2-3)
YSASGLAGGPGTTDTQYF

SEQ ID NO: 393673 - protein, 15 aa, Homo sapiens
  CDR3 for alpha chain variable domain of TCR clone 196837 (TRAV13-2, TRAJ45)
CADHHSGGGADGLTF

SEQ ID NO: 393674 - protein, 15 aa, Homo sapiens
  CDR3 for beta chain variable domain of TCR clone 196837 (TRBV7-2, TRBJ2-7)
CASSLALGSAYEQYF

SEQ ID NO: 393675 - protein, 13 aa, Homo sapiens
  CDR3 for alpha chain variable domain of TCR clone 196838 (TRAV27, TRAJ45)
CRSSGGGADGLTF

SEQ ID NO: 393676 - protein, 13 aa, Homo sapiens
  CDR3 for beta chain variable domain of TCR clone 196838 (TRBV7-2, TRBJ2-2)
CASSLAVTGELFF

SEQ ID NO: 393677 - protein, 14 aa, Homo sapiens
  CDR3 for alpha chain variable domain of TCR clone 196839 (TRAV12-3, TRAJ10)
SHLPLTGGGNKLTF

SEQ ID NO: 393678 - protein, 14 aa, Homo sapiens
  CDR3 for beta chain variable domain of TCR clone 196839 (TRBV5-4, TRBJ2-2)
CASRLDGGTGELFF

SEQ ID NO: 393679 - protein, 13 aa, Homo sapiens
  CDR3 for alpha chain variable domain of TCR clone 196840 (TRAV1-1, TRAJ23)
CAVVANQGGKLIF

SEQ ID NO: 393680 - protein, 18 aa, Homo sapiens
  CDR3 for beta chain variable domain of TCR clone 196840 (TRBV11-2, TRBJ2-3)
CASSLGGASRGAPNTQYF

SEQ ID NO: 393681 - protein, 12 aa, Homo sapiens
  CDR3 for alpha chain variable domain of TCR clone 196841 (TRAV13-1, TRAJ48)
CAANFRNEKLTF

SEQ ID NO: 393682 - protein, 17 aa, Homo sapiens
  CDR3 for beta chain variable domain of TCR clone 196841 (TRBV4-1, TRBJ2-7)
CASSRDPLGVRGGEQYF

SEQ ID NO: 393683 - protein, 12 aa, Homo sapiens
  CDR3 for alpha chain variable domain of TCR clone 196842 (TRAV8-3, TRAJ26)
CAGDNCGQNFVF

SEQ ID NO: 393684 - protein, 14 aa, Homo sapiens
  CDR3 for beta chain variable domain of TCR clone 196842 (TRBV25-1, TRBJ1-1)
CASTHLGGNTEAFF

SEQ ID NO: 393685 - protein, 14 aa, Homo sapiens
  CDR3 for alpha chain variable domain of TCR clone 196843 (TRAV2, TRAJ9)
CAVEDRSGGFNTIF

SEQ ID NO: 393686 - protein, 12 aa, Homo sapiens
  CDR3 for beta chain variable domain of TCR clone 196843 (TRBV7-9, TRBJ2-7)
CASSLEGYEQYF

SEQ ID NO: 393687 - protein, 13 aa, Homo sapiens
  CDR3 for alpha chain variable domain of TCR clone 196844 (TRAV1-2, TRAJ9)
CAVLNTGGFKTIF

SEQ ID NO: 393688 - protein, 17 aa, Homo sapiens
  CDR3 for beta chain variable domain of TCR clone 196844 (TRBV7-2, TRBJ2-3)
CASGLAGGLAGTAGQYF

SEQ ID NO: 393689 - protein, 12 aa, Homo sapiens
  CDR3 for alpha chain variable domain of TCR clone 196845 (TRAV12-3, TRAJ17)
CAMTLSGNKLTF

SEQ ID NO: 393690 - protein, 12 aa, Homo sapiens
  CDR3 for beta chain variable domain of TCR clone 196845 (TRBV11-2, TRBJ2-2)
CASSLPTGELFF

SEQ ID NO: 393691 - protein, 15 aa, Homo sapiens
  CDR3 for alpha chain variable domain of TCR clone 196846 (TRAV21, TRAJ53)
CATLNSGGSNYKLTF

SEQ ID NO: 393692 - protein, 15 aa, Homo sapiens
  CDR3 for beta chain variable domain of TCR clone 196846 (TRBV2, TRBJ2-1)
CASSEEREGDNEQFF

SEQ ID NO: 393693 - protein, 14 aa, Homo sapiens
  CDR3 for alpha chain variable domain of TCR clone 196847 (TRAV12-3, TRAJ7)
CAMSEIGGNNRLAF

SEQ ID NO: 393694 - protein, 13 aa, Homo sapiens
  CDR3 for beta chain variable domain of TCR clone 196847 (TRBV9, TRBJ1-1)
CASSVARNPEAFF

SEQ ID NO: 393695 - protein, 14 aa, Homo sapiens
  CDR3 for alpha chain variable domain of TCR clone 196848 (TRAV26-1, TRAJ45)
CIEVKGGGADGLPF

SEQ ID NO: 393696 - protein, 13 aa, Homo sapiens
  CDR3 for beta chain variable domain of TCR clone 196848 (TRBV7-6, TRBJ1-2)
CASSLVADYGYTF

SEQ ID NO: 393697 - protein, 15 aa, Homo sapiens
  CDR3 for alpha chain variable domain of TCR clone 196849 (TRAV14/DV4, TRAJ10)
CAMRELTGGGNKLTF

SEQ ID NO: 393698 - protein, 18 aa, Homo sapiens
  CDR3 for beta chain variable domain of TCR clone 196849 (TRBV7-9, TRBJ2-7)
CASSLTTSGSRTWYEQFF

SEQ ID NO: 393699 - protein, 20 aa, Homo sapiens
  CDR3 for alpha chain variable domain of TCR clone 196850 (TRAV12-1, TRAJ42)
SSVIQPPTSVKGGSQGNLIF

SEQ ID NO: 393700 - protein, 13 aa, Homo sapiens
  CDR3 for beta chain variable domain of TCR clone 196850 (TRBV12-4, TRBJ1-5)
CASSPDRAQPQHF

SEQ ID NO: 393701 - protein, 13 aa, Homo sapiens
  CDR3 for alpha chain variable domain of TCR clone 196851 (TRAV13-1, TRAJ39)
CAASIWAGDMLTF

SEQ ID NO: 393702 - protein, 15 aa, Homo sapiens
  CDR3 for beta chain variable domain of TCR clone 196851 (TRBV7-9, TRBJ1-1)
CASSLLEQGGTEAFC

SEQ ID NO: 393703 - protein, 16 aa, Homo sapiens
  CDR3 for alpha chain variable domain of TCR clone 196852 (TRAV3, TRAJ10)
CAVRDMRAGGGNKLTF

SEQ ID NO: 393704 - protein, 13 aa, Homo sapiens
  CDR3 for beta chain variable domain of TCR clone 196852 (TRBV6-5, TRBJ2-5)
CATAPSPQETQYF

SEQ ID NO: 393705 - protein, 15 aa, Homo sapiens
  CDR3 for alpha chain variable domain of TCR clone 196853 (TRAV16, TRAJ31)
CAPSGLGNNNARLMF

SEQ ID NO: 393706 - protein, 13 aa, Homo sapiens
  CDR3 for beta chain variable domain of TCR clone 196853 (TRBV28, TRBJ2-5)
CAGVSRGEETQYF

SEQ ID NO: 393707 - protein, 14 aa, Homo sapiens
  CDR3 for alpha chain variable domain of TCR clone 196854 (TRAV14/DV4, TRAJ20)
CAMRESLNDYKLSF

SEQ ID NO: 393708 - protein, 18 aa, Homo sapiens
  CDR3 for beta chain variable domain of TCR clone 196854 (TRBV7-9, TRBJ2-1)
CASSKTGFTTTGNNEQFF

SEQ ID NO: 393709 - protein, 14 aa, Homo sapiens
  CDR3 for alpha chain variable domain of TCR clone 196855 (TRAV17, TRAJ15)
CATTTNQAGTALIF

SEQ ID NO: 393710 - protein, 16 aa, Homo sapiens
  CDR3 for beta chain variable domain of TCR clone 196855 (TRBV4-1, TRBJ2-7)
CAGSRGDILNSYEQYF

SEQ ID NO: 393711 - protein, 15 aa, Homo sapiens
  CDR3 for alpha chain variable domain of TCR clone 196856 (TRAV21, TRAJ24)
CAARSSTDSWGKLQV

SEQ ID NO: 393712 - protein, 15 aa, Homo sapiens
  CDR3 for beta chain variable domain of TCR clone 196856 (TRBV9, TRBJ1-6)
CASSVSGTGDSPLHF

SEQ ID NO: 393713 - protein, 15 aa, Homo sapiens
  CDR3 for alpha chain variable domain of TCR clone 196857 (TRAV3, TRAJ5)
CSVRGLDTGRRALTF

SEQ ID NO: 393714 - protein, 15 aa, Homo sapiens
  CDR3 for beta chain variable domain of TCR clone 196857 (TRBV20-1, TRBJ2-1)
CSARSPGGPGNEQFF

SEQ ID NO: 393715 - protein, 16 aa, Homo sapiens
  CDR3 for alpha chain variable domain of TCR clone 196858 (TRAV8-2, TRAJ7)
CVVSEGPYYGNNRLAF

SEQ ID NO: 393716 - protein, 13 aa, Homo sapiens
  CDR3 for beta chain variable domain of TCR clone 196858 (TRBV19, TRBJ2-1)
CASSMYRVNEQFI

SEQ ID NO: 393717 - protein, 16 aa, Homo sapiens
  CDR3 for alpha chain variable domain of TCR clone 196859 (TRAV12-1, TRAJ49)
CVVNKGTGNTGNQFYF

SEQ ID NO: 393718 - protein, 15 aa, Homo sapiens
  CDR3 for beta chain variable domain of TCR clone 196859 (TRBV7-9, TRBJ2-6)
CASSFNREGANVLPF

SEQ ID NO: 393719 - protein, 13 aa, Homo sapiens
  CDR3 for alpha chain variable domain of TCR clone 196860 (TRAV3, TRAJ3)
CAVADGSASKIIF

SEQ ID NO: 393720 - protein, 16 aa, Homo sapiens
  CDR3 for beta chain variable domain of TCR clone 196860 (TRBV5-1, TRBJ2-3)
CASSLGQAVYTDTQYF

SEQ ID NO: 393721 - protein, 17 aa, Homo sapiens
  CDR3 for alpha chain variable domain of TCR clone 196861 (TRAV27, TRAJ18)
CAGLHRGRGSTMGRLYF

SEQ ID NO: 393722 - protein, 14 aa, Homo sapiens
  CDR3 for beta chain variable domain of TCR clone 196861 (TRBV20-1, TRBJ1-5)
CSARGRGSNQTQHF

SEQ ID NO: 393723 - protein, 16 aa, Homo sapiens
  CDR3 for alpha chain variable domain of TCR clone 196862 (TRAV3, TRAJ10)
CAVRDMRAGGGNKLTF

SEQ ID NO: 393724 - protein, 18 aa, Homo sapiens
  CDR3 for beta chain variable domain of TCR clone 196862 (TRBV11-2, TRBJ2-3)
CASSLGGASWGAPNTQYF

SEQ ID NO: 393725 - protein, 12 aa, Homo sapiens
  CDR3 for alpha chain variable domain of TCR clone 196863 (TRAV8-3, TRAJ40)
CAVTSGTYKYIF

SEQ ID NO: 393726 - protein, 14 aa, Homo sapiens
  CDR3 for beta chain variable domain of TCR clone 196863 (TRBV7-6, TRBJ2-3)
CASSLGTVTDTQYF

SEQ ID NO: 393727 - protein, 13 aa, Homo sapiens
  CDR3 for alpha chain variable domain of TCR clone 196864 (TRAV26-1, TRAJ54)
CIVRVKGAQKLVF

SEQ ID NO: 393728 - protein, 15 aa, Homo sapiens
  CDR3 for beta chain variable domain of TCR clone 196864 (TRBV20-1, TRBJ2-1)
CSAQPGGRPYNEQFF

SEQ ID NO: 393729 - protein, 12 aa, Homo sapiens
  CDR3 for alpha chain variable domain of TCR clone 196865 (TRAV24, TRAJ26)
CAFNNYGQNFVF

SEQ ID NO: 393730 - protein, 12 aa, Homo sapiens
  CDR3 for beta chain variable domain of TCR clone 196865 (TRBV11-2, TRBJ2-1)
CASSVQREGQFF

SEQ ID NO: 393731 - protein, 15 aa, Homo sapiens
  CDR3 for alpha chain variable domain of TCR clone 196866 (TRAV21, TRAJ13)
CAVPRSFCGLPESYL

SEQ ID NO: 393732 - protein, 15 aa, Homo sapiens
  CDR3 for beta chain variable domain of TCR clone 196866 (TRBV7-9, TRBJ1-6)
CASSSPGRGNSPLHF

SEQ ID NO: 393733 - protein, 15 aa, Homo sapiens
  CDR3 for alpha chain variable domain of TCR clone 196867 (TRAV13-1, TRAJ52)
CAATSPRTSYGKLTF

SEQ ID NO: 393734 - protein, 15 aa, Homo sapiens
  CDR3 for beta chain variable domain of TCR clone 196867 (TRBV20-1, TRBJ2-7)
CSARVLASPLYEQYF

SEQ ID NO: 393735 - protein, 13 aa, Homo sapiens
  CDR3 for alpha chain variable domain of TCR clone 196868 (TRAV20, TRAJ15)
CATINQAGTALIF

SEQ ID NO: 393736 - protein, 13 aa, Homo sapiens
  CDR3 for beta chain variable domain of TCR clone 196868 (TRBV12-4, TRBJ2-1)
CARRQPSNNEQFF

SEQ ID NO: 393737 - protein, 13 aa, Homo sapiens
  CDR3 for alpha chain variable domain of TCR clone 196869 (TRAV13-2, TRAJ13)
CAERPGGYQQVTF

SEQ ID NO: 393738 - protein, 16 aa, Homo sapiens
  CDR3 for beta chain variable domain of TCR clone 196869 (TRBV18, TRBJ2-5)
CASSPPSSGGAKTQYF

SEQ ID NO: 393739 - protein, 19 aa, Homo sapiens
  CDR3 for alpha chain variable domain of TCR clone 196870 (TRAV29/DV5, TRAJ49)
CSVLLCSKLTVDTGNQFYF

SEQ ID NO: 393740 - protein, 17 aa, Homo sapiens
  CDR3 for beta chain variable domain of TCR clone 196870 (TRBV13, TRBJ2-3)
CASSLSRVAGGRNTQYF

SEQ ID NO: 393741 - protein, 17 aa, Homo sapiens
  CDR3 for alpha chain variable domain of TCR clone 196871 (TRAV3, TRAJ12)
CPVRDGGRMDSSYKLIF

SEQ ID NO: 393742 - protein, 13 aa, Homo sapiens
  CDR3 for beta chain variable domain of TCR clone 196871 (TRBV15, TRBJ1-6)
CATSGGLNSPLHF

SEQ ID NO: 393743 - protein, 20 aa, Homo sapiens
  CDR3 for alpha chain variable domain of TCR clone 196872 (TRAV12-3, TRAJ41)
SLFIRDSQPSDSATPEALNF

SEQ ID NO: 393744 - protein, 15 aa, Homo sapiens
  CDR3 for beta chain variable domain of TCR clone 196872 (TRBV11-3, TRBJ2-3)
CASLKDGREGDTQYF

SEQ ID NO: 393745 - protein, 13 aa, Homo sapiens
  CDR3 for alpha chain variable domain of TCR clone 196873 (TRAV12-3, TRAJ7)
CAMTQYGNDRLAF

SEQ ID NO: 393746 - protein, 16 aa, Homo sapiens
  CDR3 for beta chain variable domain of TCR clone 196873 (TRBV20-1, TRBJ1-4)
CSARPYGGELNEKLFF

SEQ ID NO: 393747 - protein, 12 aa, Homo sapiens
  CDR3 for alpha chain variable domain of TCR clone 196874 (TRAV1-1, TRAJ8)
CAGGTGFHKLVF

SEQ ID NO: 393748 - protein, 15 aa, Homo sapiens
  CDR3 for beta chain variable domain of TCR clone 196874 (TRBV7-9, TRBJ1-4)
CASSRTGGSNEKLFF

SEQ ID NO: 393749 - protein, 14 aa, Homo sapiens
  CDR3 for alpha chain variable domain of TCR clone 196875 (TRAV8-2, TRAJ11)
CVVSEKSGYSTLTC

SEQ ID NO: 393750 - protein, 16 aa, Homo sapiens
  CDR3 for beta chain variable domain of TCR clone 196875 (TRBV28, TRBJ2-1)
CASSSPEYPRDNEQFF

SEQ ID NO: 393751 - protein, 15 aa, Homo sapiens
  CDR3 for alpha chain variable domain of TCR clone 196876 (TRAV21, TRAJ38)
CTVRQDAGNNRKLIW

SEQ ID NO: 393752 - protein, 16 aa, Homo sapiens
  CDR3 for beta chain variable domain of TCR clone 196876 (TRBV4-2, TRBJ1-1)
CASRPLDGGGDTEAFF

SEQ ID NO: 393753 - protein, 13 aa, Homo sapiens
  CDR3 for alpha chain variable domain of TCR clone 196877 (TRAV21, TRAJ26)
CAVLDNYGQNFVF

SEQ ID NO: 393754 - protein, 14 aa, Homo sapiens
  CDR3 for beta chain variable domain of TCR clone 196877 (TRBV7-8, TRBJ2-7)
CASSPWDRVYEQYF

SEQ ID NO: 393755 - protein, 11 aa, Homo sapiens
  CDR3 for alpha chain variable domain of TCR clone 196878 (TRAV12-3, TRAJ49)
CAANTGNQFYF

SEQ ID NO: 393756 - protein, 13 aa, Homo sapiens
  CDR3 for beta chain variable domain of TCR clone 196878 (TRBV2, TRBJ2-3)
CASGRGRTDTQYF

SEQ ID NO: 393757 - protein, 16 aa, Homo sapiens
  CDR3 for alpha chain variable domain of TCR clone 196879 (TRAV23/DV6, TRAJ3)
CSKHAVSYSSASKIIF

SEQ ID NO: 393758 - protein, 15 aa, Homo sapiens
  CDR3 for beta chain variable domain of TCR clone 196879 (TRBV2, TRBJ2-1)
CASSVLAGSYNEQFF

SEQ ID NO: 393759 - protein, 13 aa, Homo sapiens
  CDR3 for alpha chain variable domain of TCR clone 196880 (TRAV29/DV5, TRAJ31)
CAASRNNNARLMF

SEQ ID NO: 393760 - protein, 15 aa, Homo sapiens
  CDR3 for beta chain variable domain of TCR clone 196880 (TRBV28, TRBJ2-5)
CASSADRGRGETQYF

SEQ ID NO: 393761 - protein, 12 aa, Homo sapiens
  CDR3 for alpha chain variable domain of TCR clone 196881 (TRAV35, TRAJ30)
CAEQLADDKIIF

SEQ ID NO: 393762 - protein, 17 aa, Homo sapiens
  CDR3 for beta chain variable domain of TCR clone 196881 (TRBV4-2, TRBJ2-5)
CASSPGRWRNFQETQYF

SEQ ID NO: 393763 - protein, 16 aa, Homo sapiens
  CDR3 for alpha chain variable domain of TCR clone 196882 (TRAV23/DV6, TRAJ9)
CAASIGGNTGGLKTIF

SEQ ID NO: 393764 - protein, 15 aa, Homo sapiens
  CDR3 for beta chain variable domain of TCR clone 196882 (TRBV6-3, TRBJ2-7)
CASSSPGTVLYEQYF

SEQ ID NO: 393765 - protein, 17 aa, Homo sapiens
  CDR3 for alpha chain variable domain of TCR clone 196883 (TRAV26-1, TRAJ10)
CIVSFRGLTGGGNKLTF

SEQ ID NO: 393766 - protein, 13 aa, Homo sapiens
  CDR3 for beta chain variable domain of TCR clone 196883 (TRBV20-1, TRBJ2-3)
CSASRQAADTRYF

SEQ ID NO: 393767 - protein, 13 aa, Homo sapiens
  CDR3 for alpha chain variable domain of TCR clone 196884 (TRAV8-3, TRAJ21)
CAVGAYNFNKFYF

SEQ ID NO: 393768 - protein, 15 aa, Homo sapiens
  CDR3 for beta chain variable domain of TCR clone 196884 (TRBV7-2, TRBJ1-2)
CASSLAPDRGLGYTF

SEQ ID NO: 393769 - protein, 12 aa, Homo sapiens
  CDR3 for alpha chain variable domain of TCR clone 196885 (TRAV29/DV5, TRAJ34)
CAARHNTDKLIF

SEQ ID NO: 393770 - protein, 14 aa, Homo sapiens
  CDR3 for beta chain variable domain of TCR clone 196885 (TRBV7-2, TRBJ1-5)
FASSTQGAGQPQHF

SEQ ID NO: 393771 - protein, 14 aa, Homo sapiens
  CDR3 for alpha chain variable domain of TCR clone 196886 (TRAV12-1, TRAJ17)
CVVDERAAGNKLTF

SEQ ID NO: 393772 - protein, 13 aa, Homo sapiens
  CDR3 for beta chain variable domain of TCR clone 196886 (TRBV7-3, TRBJ1-1)
CASSQDWGAEAFF

SEQ ID NO: 393773 - protein, 17 aa, Homo sapiens
  CDR3 for alpha chain variable domain of TCR clone 196887 (TRAV4, TRAJ13)
CLVGVQGSSGGYQKVTF

SEQ ID NO: 393774 - protein, 18 aa, Homo sapiens
  CDR3 for beta chain variable domain of TCR clone 196887 (TRBV15, TRBJ2-3)
YATSRDGARSWDTDTQYF

SEQ ID NO: 393775 - protein, 13 aa, Homo sapiens
  CDR3 for alpha chain variable domain of TCR clone 196888 (TRAV26-2, TRAJ43)
CILRAVNNNDTSF

SEQ ID NO: 393776 - protein, 15 aa, Homo sapiens
  CDR3 for beta chain variable domain of TCR clone 196888 (TRBV7-2, TRBJ2-1)
CASTHGTGIYNEQFF

SEQ ID NO: 393777 - protein, 13 aa, Homo sapiens
  CDR3 for alpha chain variable domain of TCR clone 196889 (TRAV8-3, TRAJ28)
CAVGAVGSYQLTF

SEQ ID NO: 393778 - protein, 17 aa, Homo sapiens
  CDR3 for beta chain variable domain of TCR clone 196889 (TRBV28, TRBJ2-5)
CASSTPEGDALQETQYF

SEQ ID NO: 393779 - protein, 13 aa, Homo sapiens
  CDR3 for alpha chain variable domain of TCR clone 196890 (TRAV17, TRAJ54)
CATSWGGAQKLVF

SEQ ID NO: 393780 - protein, 15 aa, Homo sapiens
  CDR3 for beta chain variable domain of TCR clone 196890 (TRBV4-3, TRBJ2-3)
CASSPSRLSTETQYF

SEQ ID NO: 393781 - protein, 13 aa, Homo sapiens
  CDR3 for alpha chain variable domain of TCR clone 196891 (TRAV1-1, TRAJ9)
CAAKNTGGYKTIF

SEQ ID NO: 393782 - protein, 14 aa, Homo sapiens
  CDR3 for beta chain variable domain of TCR clone 196891 (TRBV12-5, TRBJ2-5)
CASGSRTHQETQYF

SEQ ID NO: 393783 - protein, 13 aa, Homo sapiens
  CDR3 for alpha chain variable domain of TCR clone 196892 (TRAV29/DV5, TRAJ31)
CAASRNNNARLMF

SEQ ID NO: 393784 - protein, 12 aa, Homo sapiens
  CDR3 for beta chain variable domain of TCR clone 196892 (TRBV14, TRBJ1-1)
CASSQLKGLGFF

SEQ ID NO: 393785 - protein, 15 aa, Homo sapiens
  CDR3 for alpha chain variable domain of TCR clone 196893 (TRAV8-4, TRAJ29)
CAVSEDFRGNTPLVF

SEQ ID NO: 393786 - protein, 12 aa, Homo sapiens
  CDR3 for beta chain variable domain of TCR clone 196893 (TRBV14, TRBJ2-7)
CASSSLRGEQYF

SEQ ID NO: 393787 - protein, 12 aa, Homo sapiens
  CDR3 for alpha chain variable domain of TCR clone 196894 (TRAV9-2, TRAJ26)
CALRGYGQNFVF

SEQ ID NO: 393788 - protein, 13 aa, Homo sapiens
  CDR3 for beta chain variable domain of TCR clone 196894 (TRBV10-3, TRBJ2-7)
CASKLAVNYEQYF

SEQ ID NO: 393789 - protein, 15 aa, Homo sapiens
  CDR3 for alpha chain variable domain of TCR clone 196895 (TRAV3, TRAJ5)
CAVRDRKAGRRALTF

SEQ ID NO: 393790 - protein, 17 aa, Homo sapiens
  CDR3 for beta chain variable domain of TCR clone 196895 (TRBV7-3, TRBJ2-3)
CASSPRGQGYGTDTQYF

SEQ ID NO: 393791 - protein, 16 aa, Homo sapiens
  CDR3 for alpha chain variable domain of TCR clone 196896 (TRAV36/DV7, TRAJ41)
CAVDDLNSNSGYALNF

SEQ ID NO: 393792 - protein, 14 aa, Homo sapiens
  CDR3 for beta chain variable domain of TCR clone 196896 (TRBV4-1, TRBJ2-2)
CASSQAVNTGELFF

SEQ ID NO: 393793 - protein, 13 aa, Homo sapiens
  CDR3 for alpha chain variable domain of TCR clone 196897 (TRAV12-3, TRAJ47)
SAMKKEYGNKLVF

SEQ ID NO: 393794 - protein, 16 aa, Homo sapiens
  CDR3 for beta chain variable domain of TCR clone 196897 (TRBV3-1, TRBJ2-6)
CASSLTWVSGANVLTF

SEQ ID NO: 393795 - protein, 13 aa, Homo sapiens
  CDR3 for alpha chain variable domain of TCR clone 196898 (TRAV36/DV7, TRAJ54)
CAVCTQGAQKLVF

SEQ ID NO: 393796 - protein, 13 aa, Homo sapiens
  CDR3 for beta chain variable domain of TCR clone 196898 (TRBV7-6, TRBJ2-7)
CASSLDHTREQYF

SEQ ID NO: 393797 - protein, 12 aa, Homo sapiens
  CDR3 for alpha chain variable domain of TCR clone 196899 (TRAV13-2, TRAJ8)
CAPWLGFEKLVF

SEQ ID NO: 393798 - protein, 18 aa, Homo sapiens
  CDR3 for beta chain variable domain of TCR clone 196899 (TRBV11-2, TRBJ2-3)
CASSLGGASRGAPNTQYF

SEQ ID NO: 393799 - protein, 11 aa, Homo sapiens
  CDR3 for alpha chain variable domain of TCR clone 196900 (TRAV8-1, TRAJ8)
CAITGFQKLVF

SEQ ID NO: 393800 - protein, 14 aa, Homo sapiens
  CDR3 for beta chain variable domain of TCR clone 196900 (TRBV5-4, TRBJ1-2)
CASTRQTGNYGYTF

SEQ ID NO: 393801 - protein, 11 aa, Homo sapiens
  CDR3 for alpha chain variable domain of TCR clone 196901 (TRAV17, TRAJ9)
CGFTGGVKTIF

SEQ ID NO: 393802 - protein, 14 aa, Homo sapiens
  CDR3 for beta chain variable domain of TCR clone 196901 (TRBV7-9, TRBJ2-2)
CASSVVQDTGELFF

SEQ ID NO: 393803 - protein, 13 aa, Homo sapiens
  CDR3 for alpha chain variable domain of TCR clone 196902 (TRAV1-2, TRAJ7)
CAGPYYGNNRLAF

SEQ ID NO: 393804 - protein, 11 aa, Homo sapiens
  CDR3 for beta chain variable domain of TCR clone 196902 (TRBV7-2, TRBJ2-7)
CASSLGWEQYF

SEQ ID NO: 393805 - protein, 15 aa, Homo sapiens
  CDR3 for alpha chain variable domain of TCR clone 196903 (TRAV21, TRAJ53)
CATLNSGGSNYNLTF

SEQ ID NO: 393806 - protein, 16 aa, Homo sapiens
  CDR3 for beta chain variable domain of TCR clone 196903 (TRBV12-4, TRBJ2-5)
CASSWRPSGDLETQYF

SEQ ID NO: 393807 - protein, 12 aa, Homo sapiens
  CDR3 for alpha chain variable domain of TCR clone 196904 (TRAV30, TRAJ43)
CGTEERGNDTRF

SEQ ID NO: 393808 - protein, 15 aa, Homo sapiens
  CDR3 for beta chain variable domain of TCR clone 196904 (TRBV6-3, TRBJ2-7)
CASSSPGTVFYEQYF

SEQ ID NO: 393809 - protein, 16 aa, Homo sapiens
  CDR3 for alpha chain variable domain of TCR clone 196905 (TRAV12-3, TRAJ53)
CAMNPGSGGSNYKLTY

SEQ ID NO: 393810 - protein, 11 aa, Homo sapiens
  CDR3 for beta chain variable domain of TCR clone 196905 (TRBV29-1, TRBJ2-5)
CSEDRTGTQYF

SEQ ID NO: 393811 - protein, 14 aa, Homo sapiens
  CDR3 for alpha chain variable domain of TCR clone 196906 (TRAV16, TRAJ15)
CALSGPQAGTALIF

SEQ ID NO: 393812 - protein, 12 aa, Homo sapiens
  CDR3 for beta chain variable domain of TCR clone 196906 (TRBV18, TRBJ2-5)
FASSPSKETQYF

SEQ ID NO: 393813 - protein, 14 aa, Homo sapiens
  CDR3 for alpha chain variable domain of TCR clone 196907 (TRAV8-3, TRAJ4)
CAVGAAGGSNKLFF

SEQ ID NO: 393814 - protein, 15 aa, Homo sapiens
  CDR3 for beta chain variable domain of TCR clone 196907 (TRBV6-5, TRBJ2-1)
CASSYDAGAGNEQFF

SEQ ID NO: 393815 - protein, 11 aa, Homo sapiens
  CDR3 for alpha chain variable domain of TCR clone 196908 (TRAV13-1, TRAJ43)
CAASMRNDMRF

SEQ ID NO: 393816 - protein, 13 aa, Homo sapiens
  CDR3 for beta chain variable domain of TCR clone 196908 (TRBV20-1, TRBJ1-2)
CSASTERIYGYTF

SEQ ID NO: 393817 - protein, 11 aa, Homo sapiens
  CDR3 for alpha chain variable domain of TCR clone 196909 (TRAV16, TRAJ33)
CALHSNYQLIW

SEQ ID NO: 393818 - protein, 15 aa, Homo sapiens
  CDR3 for beta chain variable domain of TCR clone 196909 (TRBV4-1, TRBJ2-7)
CASSQQGQGFDEQSF

SEQ ID NO: 393819 - protein, 14 aa, Homo sapiens
  CDR3 for alpha chain variable domain of TCR clone 196910 (TRAV29/DV5, TRAJ36)
CAARRKTGANNLFF

SEQ ID NO: 393820 - protein, 15 aa, Homo sapiens
  CDR3 for beta chain variable domain of TCR clone 196910 (TRBV6-1, TRBJ2-7)
CASRDPFGPGTRLTV

SEQ ID NO: 393821 - protein, 12 aa, Homo sapiens
  CDR3 for alpha chain variable domain of TCR clone 196911 (TRAV3, TRAJ26)
CAVRDYGQNFAF

SEQ ID NO: 393822 - protein, 13 aa, Homo sapiens
  CDR3 for beta chain variable domain of TCR clone 196911 (TRBV25-1, TRBJ2-5)
CASSESGRETQYF

SEQ ID NO: 393823 - protein, 14 aa, Homo sapiens
  CDR3 for alpha chain variable domain of TCR clone 196912 (TRAV12-2, TRAJ22)
CAVRFSGSARQLTF

SEQ ID NO: 393824 - protein, 16 aa, Homo sapiens
  CDR3 for beta chain variable domain of TCR clone 196912 (TRBV15, TRBJ1-2)
CATSRGPRTGGGGYTF

SEQ ID NO: 393825 - protein, 18 aa, Homo sapiens
  CDR3 for alpha chain variable domain of TCR clone 196913 (TRAV21, TRAJ52)
CAVRPSPAGGTSSGKLTF

SEQ ID NO: 393826 - protein, 15 aa, Homo sapiens
  CDR3 for beta chain variable domain of TCR clone 196913 (TRBV19, TRBJ2-1)
CASSIQATSYNEQFF

SEQ ID NO: 393827 - protein, 13 aa, Homo sapiens
  CDR3 for alpha chain variable domain of TCR clone 196914 (TRAV29/DV5, TRAJ29)
CAASAAGNNPLVF

SEQ ID NO: 393828 - protein, 14 aa, Homo sapiens
  CDR3 for beta chain variable domain of TCR clone 196914 (TRBV19, TRBJ2-3)
CASSAPRGTDTQYF

SEQ ID NO: 393829 - protein, 14 aa, Homo sapiens
  CDR3 for alpha chain variable domain of TCR clone 196915 (TRAV26-1, TRAJ38)
CIADNAGNKRKLIW

SEQ ID NO: 393830 - protein, 13 aa, Homo sapiens
  CDR3 for beta chain variable domain of TCR clone 196915 (TRBV7-3, TRBJ1-1)
CASSQDWGAEAFF

SEQ ID NO: 393831 - protein, 17 aa, Homo sapiens
  CDR3 for alpha chain variable domain of TCR clone 196916 (TRAV29/DV5, TRAJ40)
CAASVIYTTSGSYKYIF

SEQ ID NO: 393832 - protein, 13 aa, Homo sapiens
  CDR3 for beta chain variable domain of TCR clone 196916 (TRBV6-1, TRBJ2-1)
CASSHDRNNEQFF

SEQ ID NO: 393833 - protein, 15 aa, Homo sapiens
  CDR3 for alpha chain variable domain of TCR clone 196917 (TRAV27, TRAJ38)
CAARRNAGNNRKLIW

SEQ ID NO: 393834 - protein, 18 aa, Homo sapiens
  CDR3 for beta chain variable domain of TCR clone 196917 (TRBV24-1, TRBJ2-2)
CATSDSGQGTANTGELFF

SEQ ID NO: 393835 - protein, 13 aa, Homo sapiens
  CDR3 for alpha chain variable domain of TCR clone 196918 (TRAV13-1, TRAJ5)
CAARVTGRRELTF

SEQ ID NO: 393836 - protein, 15 aa, Homo sapiens
  CDR3 for beta chain variable domain of TCR clone 196918 (TRBV28, TRBJ2-7)
CASSPGGRGFYEQYF

SEQ ID NO: 393837 - protein, 13 aa, Homo sapiens
  CDR3 for alpha chain variable domain of TCR clone 196919 (TRAV13-2, TRAJ53)
CAENMGSNYKLTF

SEQ ID NO: 393838 - protein, 14 aa, Homo sapiens
  CDR3 for beta chain variable domain of TCR clone 196919 (TRBV19, TRBJ2-1)
CASPTFVLRGEQFF

SEQ ID NO: 393839 - protein, 16 aa, Homo sapiens
  CDR3 for alpha chain variable domain of TCR clone 196920 (TRAV30, TRAJ24)
CGTEIVDADSWGKFQF

SEQ ID NO: 393840 - protein, 13 aa, Homo sapiens
  CDR3 for beta chain variable domain of TCR clone 196920 (TRBV14, TRBJ1-2)
CARSEDRRYGYTF

SEQ ID NO: 393841 - protein, 14 aa, Homo sapiens
  CDR3 for alpha chain variable domain of TCR clone 196921 (TRAV12-3, TRAJ47)
CAMSVMEYGNKLVF

SEQ ID NO: 393842 - protein, 13 aa, Homo sapiens
  CDR3 for beta chain variable domain of TCR clone 196921 (TRBV7-6, TRBJ1-2)
CASSLVADYGYTF

SEQ ID NO: 393843 - protein, 16 aa, Homo sapiens
  CDR3 for alpha chain variable domain of TCR clone 196922 (TRAV30, TRAJ42)
CGTSKNYGGSQGNLIS

SEQ ID NO: 393844 - protein, 14 aa, Homo sapiens
  CDR3 for beta chain variable domain of TCR clone 196922 (TRBV19, TRBJ1-5)
CASNSYGTHQPQHF

SEQ ID NO: 393845 - protein, 13 aa, Homo sapiens
  CDR3 for alpha chain variable domain of TCR clone 196923 (TRAV23/DV6, TRAJ16)
CAASISAAQKLLF

SEQ ID NO: 393846 - protein, 15 aa, Homo sapiens
  CDR3 for beta chain variable domain of TCR clone 196923 (TRBV2, TRBJ2-2)
CASSRETVGTGELFF

SEQ ID NO: 393847 - protein, 13 aa, Homo sapiens
  CDR3 for alpha chain variable domain of TCR clone 196924 (TRAV12-1, TRAJ26)
SATYLYYGQNFVF

SEQ ID NO: 393848 - protein, 15 aa, Homo sapiens
  CDR3 for beta chain variable domain of TCR clone 196924 (TRBV5-1, TRBJ2-6)
CTSSLDPSGANVLTF

SEQ ID NO: 393849 - protein, 11 aa, Homo sapiens
  CDR3 for alpha chain variable domain of TCR clone 196925 (TRAV12-3, TRAJ43)
CAMSVSNDMRF

SEQ ID NO: 393850 - protein, 16 aa, Homo sapiens
  CDR3 for beta chain variable domain of TCR clone 196925 (TRBV2, TRBJ2-7)
CASRKGSLGLVYEQYF

SEQ ID NO: 393851 - protein, 17 aa, Homo sapiens
  CDR3 for alpha chain variable domain of TCR clone 196926 (TRAV8-6, TRAJ58)
CAVSSWEGETSGSRLTF

SEQ ID NO: 393852 - protein, 16 aa, Homo sapiens
  CDR3 for beta chain variable domain of TCR clone 196926 (TRBV5-1, TRBJ2-3)
CASSLGLAVYTDTQYF

SEQ ID NO: 393853 - protein, 16 aa, Homo sapiens
  CDR3 for alpha chain variable domain of TCR clone 196927 (TRAV30, TRAJ24)
CGTEIVDADSWGKFQF

SEQ ID NO: 393854 - protein, 14 aa, Homo sapiens
  CDR3 for beta chain variable domain of TCR clone 196927 (TRBV12-5, TRBJ2-1)
CASGSRTHQETQSF

SEQ ID NO: 393855 - protein, 16 aa, Homo sapiens
  CDR3 for alpha chain variable domain of TCR clone 196928 (TRAV12-1, TRAJ48)
FVVNMRDNFGNEKLTF

SEQ ID NO: 393856 - protein, 16 aa, Homo sapiens
  CDR3 for beta chain variable domain of TCR clone 196928 (TRBV7-6, TRBJ2-1)
CASSSVVAGTYNEQFF

SEQ ID NO: 393857 - protein, 14 aa, Homo sapiens
  CDR3 for alpha chain variable domain of TCR clone 196929 (TRAV17, TRAJ57)
CATDPQGGSEKLVF

SEQ ID NO: 393858 - protein, 14 aa, Homo sapiens
  CDR3 for beta chain variable domain of TCR clone 196929 (TRBV25-1, TRBJ1-1)
CASTHLGGKTEAFF

SEQ ID NO: 393859 - protein, 18 aa, Homo sapiens
  CDR3 for alpha chain variable domain of TCR clone 196930 (TRAV21, TRAJ52)
CAVRPSPAGGTSYGKLTF

SEQ ID NO: 393860 - protein, 15 aa, Homo sapiens
  CDR3 for beta chain variable domain of TCR clone 196930 (TRBV5-1, TRBJ2-7)
CASSLNGEPAREQYF

SEQ ID NO: 393861 - protein, 15 aa, Homo sapiens
  CDR3 for alpha chain variable domain of TCR clone 196931 (TRAV8-3, TRAJ45)
CASSYSGGGADGLTF

SEQ ID NO: 393862 - protein, 14 aa, Homo sapiens
  CDR3 for beta chain variable domain of TCR clone 196931 (TRBV5-1, TRBJ2-7)
CASSLGRGSYEQYF

SEQ ID NO: 393863 - protein, 14 aa, Homo sapiens
  CDR3 for alpha chain variable domain of TCR clone 196932 (TRAV35, TRAJ40)
CAGHPISGTYKYIF

SEQ ID NO: 393864 - protein, 17 aa, Homo sapiens
  CDR3 for beta chain variable domain of TCR clone 196932 (TRBV4-1, TRBJ2-7)
CASSRDPLGVRGGEQYF

SEQ ID NO: 393865 - protein, 18 aa, Homo sapiens
  CDR3 for alpha chain variable domain of TCR clone 196933 (TRAV21, TRAJ52)
CAVRPSPAGGTSYGKLTF

SEQ ID NO: 393866 - protein, 17 aa, Homo sapiens
  CDR3 for beta chain variable domain of TCR clone 196933 (TRBV11-2, TRBJ2-1)
CASSLYPPGVEYNEQFL

SEQ ID NO: 393867 - protein, 15 aa, Homo sapiens
  CDR3 for alpha chain variable domain of TCR clone 196934 (TRAV13-1, TRAJ8)
CAASIPNTGFKKLVF

SEQ ID NO: 393868 - protein, 13 aa, Homo sapiens
  CDR3 for beta chain variable domain of TCR clone 196934 (TRBV5-4, TRBJ1-1)
CASSFQVNTEAFF

SEQ ID NO: 393869 - protein, 14 aa, Homo sapiens
  CDR3 for alpha chain variable domain of TCR clone 196935 (TRAV12-2, TRAJ11)
CAVEGGSAYSTLTF

SEQ ID NO: 393870 - protein, 16 aa, Homo sapiens
  CDR3 for beta chain variable domain of TCR clone 196935 (TRBV6-1, TRBJ1-2)
CASSGAWQGRSHGYTF

SEQ ID NO: 393871 - protein, 13 aa, Homo sapiens
  CDR3 for alpha chain variable domain of TCR clone 196936 (TRAV27, TRAJ54)
CAGAGQRAQKLVF

SEQ ID NO: 393872 - protein, 15 aa, Homo sapiens
  CDR3 for beta chain variable domain of TCR clone 196936 (TRBV18, TRBJ2-6)
CASSPSYAGANVLTF

SEQ ID NO: 393873 - protein, 17 aa, Homo sapiens
  CDR3 for alpha chain variable domain of TCR clone 196937 (TRAV13-1, TRAJ28)
CAASPPYSGAGSYQLTF

SEQ ID NO: 393874 - protein, 15 aa, Homo sapiens
  CDR3 for beta chain variable domain of TCR clone 196937 (TRBV6-3, TRBJ2-2)
FASSFLATLTGELFF

SEQ ID NO: 393875 - protein, 14 aa, Homo sapiens
  CDR3 for alpha chain variable domain of TCR clone 196938 (TRAV1-2, TRAJ16)
CSVNRFSDGQKLLF

SEQ ID NO: 393876 - protein, 13 aa, Homo sapiens
  CDR3 for beta chain variable domain of TCR clone 196938 (TRBV19, TRBJ2-7)
CASRKAGGSEQYF

SEQ ID NO: 393877 - protein, 14 aa, Homo sapiens
  CDR3 for alpha chain variable domain of TCR clone 196939 (TRAV16, TRAJ58)
CSQTGETSGSRLTF

SEQ ID NO: 393878 - protein, 17 aa, Homo sapiens
  CDR3 for beta chain variable domain of TCR clone 196939 (TRBV18, TRBJ2-1)
CASSKGLSGGADNEQFF

SEQ ID NO: 393879 - protein, 12 aa, Homo sapiens
  CDR3 for alpha chain variable domain of TCR clone 196940 (TRAV17, TRAJ39)
CATGAAGNMLTF

SEQ ID NO: 393880 - protein, 14 aa, Homo sapiens
  CDR3 for beta chain variable domain of TCR clone 196940 (TRBV6-1, TRBJ2-1)
CASSGGAIKNEQFF

SEQ ID NO: 393881 - protein, 12 aa, Homo sapiens
  CDR3 for alpha chain variable domain of TCR clone 196941 (TRAV30, TRAJ41)
CGTEISGYALNF

SEQ ID NO: 393882 - protein, 13 aa, Homo sapiens
  CDR3 for beta chain variable domain of TCR clone 196941 (TRBV6-3, TRBJ2-7)
CASSTDLAGEQYF

SEQ ID NO: 393883 - protein, 12 aa, Homo sapiens
  CDR3 for alpha chain variable domain of TCR clone 196942 (TRAV13-1, TRAJ49)
YAASPMGNQFYF

SEQ ID NO: 393884 - protein, 13 aa, Homo sapiens
  CDR3 for beta chain variable domain of TCR clone 196942 (TRBV20-1, TRBJ2-2)
CSASAAGTGELFF

SEQ ID NO: 393885 - protein, 16 aa, Homo sapiens
  CDR3 for alpha chain variable domain of TCR clone 196943 (TRAV20, TRAJ22)
CAVQASSSGSARQLTY

SEQ ID NO: 393886 - protein, 13 aa, Homo sapiens
  CDR3 for beta chain variable domain of TCR clone 196943 (TRBV7-2, TRBJ2-5)
CASSQTSVETQYF

SEQ ID NO: 393887 - protein, 16 aa, Homo sapiens
  CDR3 for alpha chain variable domain of TCR clone 196944 (TRAV30, TRAJ24)
CGTEIVDADSWGKFQF

SEQ ID NO: 393888 - protein, 15 aa, Homo sapiens
  CDR3 for beta chain variable domain of TCR clone 196944 (TRBV19, TRBJ2-1)
CASNAQGLAGREQFF

SEQ ID NO: 393889 - protein, 13 aa, Homo sapiens
  CDR3 for alpha chain variable domain of TCR clone 196945 (TRAV23/DV6, TRAJ34)
CSAIENNTDKLIF

SEQ ID NO: 393890 - protein, 13 aa, Homo sapiens
  CDR3 for beta chain variable domain of TCR clone 196945 (TRBV29-1, TRBJ2-7)
CSVGPSGGYEQYF

SEQ ID NO: 393891 - protein, 16 aa, Homo sapiens
  CDR3 for alpha chain variable domain of TCR clone 196946 (TRAV14/DV4, TRAJ53)
CAMREGGGGSNYKLTF

SEQ ID NO: 393892 - protein, 12 aa, Homo sapiens
  CDR3 for beta chain variable domain of TCR clone 196946 (TRBV29-1, TRBJ2-3)
CSVTGGADTQYF

SEQ ID NO: 393893 - protein, 12 aa, Homo sapiens
  CDR3 for alpha chain variable domain of TCR clone 196947 (TRAV12-3, TRAJ17)
CAMTLTANKLTF

SEQ ID NO: 393894 - protein, 13 aa, Homo sapiens
  CDR3 for beta chain variable domain of TCR clone 196947 (TRBV7-3, TRBJ1-1)
CASSQDWGAEAFF

SEQ ID NO: 393895 - protein, 12 aa, Homo sapiens
  CDR3 for alpha chain variable domain of TCR clone 196948 (TRAV1-2, TRAJ29)
CAVPSVNTPLVF

SEQ ID NO: 393896 - protein, 13 aa, Homo sapiens
  CDR3 for beta chain variable domain of TCR clone 196948 (TRBV5-4, TRBJ1-1)
CASSVDLGTEAFF

SEQ ID NO: 393897 - protein, 14 aa, Homo sapiens
  CDR3 for alpha chain variable domain of TCR clone 196949 (TRAV9-2, TRAJ38)
CALSNAGNNRKLIW

SEQ ID NO: 393898 - protein, 15 aa, Homo sapiens
  CDR3 for beta chain variable domain of TCR clone 196949 (TRBV9, TRBJ1-6)
CASSVAGTGDSPLHF

SEQ ID NO: 393899 - protein, 14 aa, Homo sapiens
  CDR3 for alpha chain variable domain of TCR clone 196950 (TRAV12-2, TRAJ17)
CAVLFKAAGNKLTF

SEQ ID NO: 393900 - protein, 15 aa, Homo sapiens
  CDR3 for beta chain variable domain of TCR clone 196950 (TRBV20-1, TRBJ2-7)
CSARDRVAGMDEQYF

SEQ ID NO: 393901 - protein, 13 aa, Homo sapiens
  CDR3 for alpha chain variable domain of TCR clone 196951 (TRAV27, TRAJ41)
CAGEGNSGYALIF

SEQ ID NO: 393902 - protein, 16 aa, Homo sapiens
  CDR3 for beta chain variable domain of TCR clone 196951 (TRBV29-1, TRBJ2-7)
CSVEVVGTSGSYEQYF

SEQ ID NO: 393903 - protein, 11 aa, Homo sapiens
  CDR3 for alpha chain variable domain of TCR clone 196952 (TRAV12-2, TRAJ3)
CAVKRASKIIF

SEQ ID NO: 393904 - protein, 14 aa, Homo sapiens
  CDR3 for beta chain variable domain of TCR clone 196952 (TRBV9, TRBJ2-7)
CASSVGVGSYEQYF

SEQ ID NO: 393905 - protein, 11 aa, Homo sapiens
  CDR3 for alpha chain variable domain of TCR clone 196953 (TRAV17, TRAJ36)
CAPTEANNLFF

SEQ ID NO: 393906 - protein, 12 aa, Homo sapiens
  CDR3 for beta chain variable domain of TCR clone 196953 (TRBV29-1, TRBJ2-3)
CSVTGGADTQYF

SEQ ID NO: 393907 - protein, 16 aa, Homo sapiens
  CDR3 for alpha chain variable domain of TCR clone 196954 (TRAV35, TRAJ28)
CAGQRYSGAGSYQLTF

SEQ ID NO: 393908 - protein, 13 aa, Homo sapiens
  CDR3 for beta chain variable domain of TCR clone 196954 (TRBV10-3, TRBJ2-7)
CASKLAVNYEQYF

SEQ ID NO: 393909 - protein, 16 aa, Homo sapiens
  CDR3 for alpha chain variable domain of TCR clone 196955 (TRAV20, TRAJ38)
CAVQASNAGNYRKPIW

SEQ ID NO: 393910 - protein, 16 aa, Homo sapiens
  CDR3 for beta chain variable domain of TCR clone 196955 (TRBV7-8, TRBJ2-6)
CASRVGDSSGANVLTF

SEQ ID NO: 393911 - protein, 14 aa, Homo sapiens
  CDR3 for alpha chain variable domain of TCR clone 196956 (TRAV30, TRAJ33)
CGTVAPRSNYQLIC

SEQ ID NO: 393912 - protein, 14 aa, Homo sapiens
  CDR3 for beta chain variable domain of TCR clone 196956 (TRBV19, TRBJ2-1)
CASPTFVLSGEQFF

SEQ ID NO: 393913 - protein, 15 aa, Homo sapiens
  CDR3 for alpha chain variable domain of TCR clone 196957 (TRAV29/DV5, TRAJ29)
CAASERSSGNTPLVF

SEQ ID NO: 393914 - protein, 17 aa, Homo sapiens
  CDR3 for beta chain variable domain of TCR clone 196957 (TRBV4-1, TRBJ1-4)
CASSREGPRGVEEKLFF

SEQ ID NO: 393915 - protein, 17 aa, Homo sapiens
  CDR3 for alpha chain variable domain of TCR clone 196958 (TRAV3, TRAJ6)
CAVRDGLRAGGSYIPPL

SEQ ID NO: 393916 - protein, 14 aa, Homo sapiens
  CDR3 for beta chain variable domain of TCR clone 196958 (TRBV7-2, TRBJ2-7)
CASSPKTSFYEQYF

SEQ ID NO: 393917 - protein, 12 aa, Homo sapiens
  CDR3 for alpha chain variable domain of TCR clone 196959 (TRAV17, TRAJ4)
CATDGGYNKLIF

SEQ ID NO: 393918 - protein, 11 aa, Homo sapiens
  CDR3 for beta chain variable domain of TCR clone 196959 (TRBV6-3, TRBJ2-3)
CATGQADTQYF

SEQ ID NO: 393919 - protein, 14 aa, Homo sapiens
  CDR3 for alpha chain variable domain of TCR clone 196960 (TRAV12-3, TRAJ10)
SHLPLTGGGNKLTF

SEQ ID NO: 393920 - protein, 15 aa, Homo sapiens
  CDR3 for beta chain variable domain of TCR clone 196960 (TRBV7-8, TRBJ1-5)
CASSLALGGQQPQHF

SEQ ID NO: 393921 - protein, 12 aa, Homo sapiens
  CDR3 for alpha chain variable domain of TCR clone 196961 (TRAV21, TRAJ23)
CAVMLQGGKLIF

SEQ ID NO: 393922 - protein, 13 aa, Homo sapiens
  CDR3 for beta chain variable domain of TCR clone 196961 (TRBV7-8, TRBJ2-7)
CASSLSGPYEQYF

SEQ ID NO: 393923 - protein, 11 aa, Homo sapiens
  CDR3 for alpha chain variable domain of TCR clone 196962 (TRAV12-2, TRAJ3)
CAVKRASKIIF

SEQ ID NO: 393924 - protein, 16 aa, Homo sapiens
  CDR3 for beta chain variable domain of TCR clone 196962 (TRBV12-4, TRBJ1-5)
CASSRPVGGSNQPQHF

SEQ ID NO: 393925 - protein, 12 aa, Homo sapiens
  CDR3 for alpha chain variable domain of TCR clone 196963 (TRAV13-1, TRAJ21)
CAAKEGLNKFYF

SEQ ID NO: 393926 - protein, 15 aa, Homo sapiens
  CDR3 for beta chain variable domain of TCR clone 196963 (TRBV12-4, TRBJ2-5)
CASSPPTGLQETQYF

SEQ ID NO: 393927 - protein, 13 aa, Homo sapiens
  CDR3 for alpha chain variable domain of TCR clone 196964 (TRAV30, TRAJ6)
CGFIEGGIYIPTF

SEQ ID NO: 393928 - protein, 13 aa, Homo sapiens
  CDR3 for beta chain variable domain of TCR clone 196964 (TRBV5-4, TRBJ2-5)
CASSPVSQETQYF

SEQ ID NO: 393929 - protein, 13 aa, Homo sapiens
  CDR3 for alpha chain variable domain of TCR clone 196965 (TRAV1-2, TRAJ12)
CAVSMDSSYKLIF

SEQ ID NO: 393930 - protein, 14 aa, Homo sapiens
  CDR3 for beta chain variable domain of TCR clone 196965 (TRBV19, TRBJ2-1)
CAISSGRDYNEQFF

SEQ ID NO: 393931 - protein, 20 aa, Homo sapiens
  CDR3 for alpha chain variable domain of TCR clone 196966 (TRAV25, TRAJ3)
CRNLLLCERPGYSSASKIIF

SEQ ID NO: 393932 - protein, 18 aa, Homo sapiens
  CDR3 for beta chain variable domain of TCR clone 196966 (TRBV5-1, TRBJ2-5)
CASSLLGETSGIGETQYF

SEQ ID NO: 393933 - protein, 13 aa, Homo sapiens
  CDR3 for alpha chain variable domain of TCR clone 196967 (TRAV12-1, TRAJ39)
CVVPQRAGNMLTF

SEQ ID NO: 393934 - protein, 15 aa, Homo sapiens
  CDR3 for beta chain variable domain of TCR clone 196967 (TRBV9, TRBJ2-1)
CASSLAGSSYNEQFF

SEQ ID NO: 393935 - protein, 13 aa, Homo sapiens
  CDR3 for alpha chain variable domain of TCR clone 196968 (TRAV16, TRAJ5)
CALTNTGRRALAF

SEQ ID NO: 393936 - protein, 15 aa, Homo sapiens
  CDR3 for beta chain variable domain of TCR clone 196968 (TRBV11-2, TRBJ2-4)
CASSRPGTGINIQYF

SEQ ID NO: 393937 - protein, 13 aa, Homo sapiens
  CDR3 for alpha chain variable domain of TCR clone 196969 (TRAV12-1, TRAJ42)
CGGVGGSQGKLIF

SEQ ID NO: 393938 - protein, 15 aa, Homo sapiens
  CDR3 for beta chain variable domain of TCR clone 196969 (TRBV5-4, TRBJ1-4)
CASSSFGTGNEKLFF

SEQ ID NO: 393939 - protein, 13 aa, Homo sapiens
  CDR3 for alpha chain variable domain of TCR clone 196970 (TRAV13-1, TRAJ12)
CAASPDSSYKLIF

SEQ ID NO: 393940 - protein, 14 aa, Homo sapiens
  CDR3 for beta chain variable domain of TCR clone 196970 (TRBV7-8, TRBJ2-4)
CASSLTRVGDIQYF

SEQ ID NO: 393941 - protein, 15 aa, Homo sapiens
  CDR3 for alpha chain variable domain of TCR clone 196971 (TRAV21, TRAJ13)
CAVRTTSGGYQKVTF

SEQ ID NO: 393942 - protein, 14 aa, Homo sapiens
  CDR3 for beta chain variable domain of TCR clone 196971 (TRBV28, TRBJ2-7)
CSSPGGRGFYEQYF

SEQ ID NO: 393943 - protein, 16 aa, Homo sapiens
  CDR3 for alpha chain variable domain of TCR clone 196972 (TRAV3, TRAJ37)
CAVRPHGSANTGKLIF

SEQ ID NO: 393944 - protein, 15 aa, Homo sapiens
  CDR3 for beta chain variable domain of TCR clone 196972 (TRBV20-1, TRBJ2-7)
CSARDRVSGMDEQYF

SEQ ID NO: 393945 - protein, 16 aa, Homo sapiens
  CDR3 for alpha chain variable domain of TCR clone 196973 (TRAV30, TRAJ24)
CGTEIVDADSGGKFKF

SEQ ID NO: 393946 - protein, 14 aa, Homo sapiens
  CDR3 for beta chain variable domain of TCR clone 196973 (TRBV12-5, TRBJ2-5)
CASGSRTHQETQYF

SEQ ID NO: 393947 - protein, 16 aa, Homo sapiens
  CDR3 for alpha chain variable domain of TCR clone 196974 (TRAV1-2, TRAJ27)
CALREPQTPMQANQPL

SEQ ID NO: 393948 - protein, 13 aa, Homo sapiens
  CDR3 for beta chain variable domain of TCR clone 196974 (TRBV6-1, TRBJ1-2)
CASSAREGYGYTF

SEQ ID NO: 393949 - protein, 16 aa, Homo sapiens
  CDR3 for alpha chain variable domain of TCR clone 196975 (TRAV3, TRAJ10)
CAVRDMRAGGGNKLTF

SEQ ID NO: 393950 - protein, 14 aa, Homo sapiens
  CDR3 for beta chain variable domain of TCR clone 196975 (TRBV12-4, TRBJ2-3)
CASSLGQGTDTQYF

SEQ ID NO: 393951 - protein, 11 aa, Homo sapiens
  CDR3 for alpha chain variable domain of TCR clone 196976 (TRAV8-3, TRAJ15)
CAVGHGTALIF

SEQ ID NO: 393952 - protein, 18 aa, Homo sapiens
  CDR3 for beta chain variable domain of TCR clone 196976 (TRBV18, TRBJ2-3)
CASSYTSGAAGGTDTQYF

SEQ ID NO: 393953 - protein, 11 aa, Homo sapiens
  CDR3 for alpha chain variable domain of TCR clone 196977 (TRAV35, TRAJ34)
CWARNTDKLIF

SEQ ID NO: 393954 - protein, 14 aa, Homo sapiens
  CDR3 for beta chain variable domain of TCR clone 196977 (TRBV5-1, TRBJ2-7)
CASSRGESLYEQHF

SEQ ID NO: 393955 - protein, 16 aa, Homo sapiens
  CDR3 for alpha chain variable domain of TCR clone 196978 (TRAV12-2, TRAJ28)
CAVITDSGAGSYQLTF

SEQ ID NO: 393956 - protein, 12 aa, Homo sapiens
  CDR3 for beta chain variable domain of TCR clone 196978 (TRBV9, TRBJ2-2)
CASSLVTWELFF

SEQ ID NO: 393957 - protein, 11 aa, Homo sapiens
  CDR3 for alpha chain variable domain of TCR clone 196979 (TRAV3, TRAJ17)
PRGAAGNKLTI

SEQ ID NO: 393958 - protein, 16 aa, Homo sapiens
  CDR3 for beta chain variable domain of TCR clone 196979 (TRBV7-6, TRBJ2-1)
CASSAPGPSSYNEQFF

SEQ ID NO: 393959 - protein, 11 aa, Homo sapiens
  CDR3 for alpha chain variable domain of TCR clone 196980 (TRAV17, TRAJ57)
CATDGGSKAGL

SEQ ID NO: 393960 - protein, 13 aa, Homo sapiens
  CDR3 for beta chain variable domain of TCR clone 196980 (TRBV7-9, TRBJ2-7)
CASSFAGAYEQYF

SEQ ID NO: 393961 - protein, 12 aa, Homo sapiens
  CDR3 for alpha chain variable domain of TCR clone 196981 (TRAV29/DV5, TRAJ34)
CAARHNTDKLIF

SEQ ID NO: 393962 - protein, 13 aa, Homo sapiens
  CDR3 for beta chain variable domain of TCR clone 196981 (TRBV10-2, TRBJ2-7)
CASGASGGYEQYF

SEQ ID NO: 393963 - protein, 14 aa, Homo sapiens
  CDR3 for alpha chain variable domain of TCR clone 196982 (TRAV13-2, TRAJ10)
CAETFTGGGNKLTF

SEQ ID NO: 393964 - protein, 16 aa, Homo sapiens
  CDR3 for beta chain variable domain of TCR clone 196982 (TRBV18, TRBJ2-7)
RASSPRSQGISYEQYF

SEQ ID NO: 393965 - protein, 11 aa, Homo sapiens
  CDR3 for alpha chain variable domain of TCR clone 196983 (TRAV2, TRAJ13)
CASGGYQKVTF

SEQ ID NO: 393966 - protein, 16 aa, Homo sapiens
  CDR3 for beta chain variable domain of TCR clone 196983 (TRBV6-1, TRBJ2-5)
CASSETLDRGAERQYF

SEQ ID NO: 393967 - protein, 15 aa, Homo sapiens
  CDR3 for alpha chain variable domain of TCR clone 196984 (TRAV4, TRAJ39)
CLVGPNNNAGNMLTF

SEQ ID NO: 393968 - protein, 13 aa, Homo sapiens
  CDR3 for beta chain variable domain of TCR clone 196984 (TRBV11-2, TRBJ2-5)
CDSSSTGEETQYF

SEQ ID NO: 393969 - protein, 14 aa, Homo sapiens
  CDR3 for alpha chain variable domain of TCR clone 196985 (TRAV12-2, TRAJ45)
CAVYSGGGADGLTF

SEQ ID NO: 393970 - protein, 14 aa, Homo sapiens
  CDR3 for beta chain variable domain of TCR clone 196985 (TRBV11-2, TRBJ2-5)
CASRPLAGRETQYF

SEQ ID NO: 393971 - protein, 12 aa, Homo sapiens
  CDR3 for alpha chain variable domain of TCR clone 196986 (TRAV13-2, TRAJ8)
FAPWLGFQKLVF

SEQ ID NO: 393972 - protein, 13 aa, Homo sapiens
  CDR3 for beta chain variable domain of TCR clone 196986 (TRBV12-4, TRBJ1-5)
CASSPDRAQPQHF

SEQ ID NO: 393973 - protein, 15 aa, Homo sapiens
  CDR3 for alpha chain variable domain of TCR clone 196987 (TRAV17, TRAJ57)
CATGPSQGGSEKLVL

SEQ ID NO: 393974 - protein, 11 aa, Homo sapiens
  CDR3 for beta chain variable domain of TCR clone 196987 (TRBV29-1, TRBJ2-5)
CSEDRTGTQYF

SEQ ID NO: 393975 - protein, 16 aa, Homo sapiens
  CDR3 for alpha chain variable domain of TCR clone 196988 (TRAV8-2, TRAJ7)
CVVSEGPYYGDNRLAF

SEQ ID NO: 393976 - protein, 11 aa, Homo sapiens
  CDR3 for beta chain variable domain of TCR clone 196988 (TRBV19, TRBJ1-1)
CASSIGSEAFF

SEQ ID NO: 393977 - protein, 14 aa, Homo sapiens
  CDR3 for alpha chain variable domain of TCR clone 196989 (TRAV1-2, TRAJ8)
CAVREDTGFQQLVF

SEQ ID NO: 393978 - protein, 12 aa, Homo sapiens
  CDR3 for beta chain variable domain of TCR clone 196989 (TRBV14, TRBJ2-5)
CASSQLKETQYF

SEQ ID NO: 393979 - protein, 14 aa, Homo sapiens
  CDR3 for alpha chain variable domain of TCR clone 196990 (TRAV12-2, TRAJ9)
CAVNMECGGFKTIF

SEQ ID NO: 393980 - protein, 14 aa, Homo sapiens
  CDR3 for beta chain variable domain of TCR clone 196990 (TRBV27, TRBJ2-3)
CASRKGGRTDTQYF

SEQ ID NO: 393981 - protein, 16 aa, Homo sapiens
  CDR3 for alpha chain variable domain of TCR clone 196991 (TRAV27, TRAJ13)
CAGAKSDSGGYQKVTF

SEQ ID NO: 393982 - protein, 15 aa, Homo sapiens
  CDR3 for beta chain variable domain of TCR clone 196991 (TRBV29-1, TRBJ2-1)
CSVGRHALFYKEQLF

SEQ ID NO: 393983 - protein, 11 aa, Homo sapiens
  CDR3 for alpha chain variable domain of TCR clone 196992 (TRAV2, TRAJ13)
CASGGYQKVTF

SEQ ID NO: 393984 - protein, 12 aa, Homo sapiens
  CDR3 for beta chain variable domain of TCR clone 196992 (TRBV5-1, TRBJ1-1)
CASSLTGAEAFF

SEQ ID NO: 393985 - protein, 16 aa, Homo sapiens
  CDR3 for alpha chain variable domain of TCR clone 196993 (TRAV3, TRAJ18)
CAVRDGRGSTLGRLYF

SEQ ID NO: 393986 - protein, 15 aa, Homo sapiens
  CDR3 for beta chain variable domain of TCR clone 196993 (TRBV7-9, TRBJ1-6)
CTSSSPGRGNSPLHF

SEQ ID NO: 393987 - protein, 12 aa, Homo sapiens
  CDR3 for alpha chain variable domain of TCR clone 196994 (TRAV2, TRAJ37)
CAVTMNSGKLIF

SEQ ID NO: 393988 - protein, 15 aa, Homo sapiens
  CDR3 for beta chain variable domain of TCR clone 196994 (TRBV5-1, TRBJ2-5)
CASSFGGPPQETQYF

SEQ ID NO: 393989 - protein, 11 aa, Homo sapiens
  CDR3 for alpha chain variable domain of TCR clone 196995 (TRAV26-1, TRAJ37)
FIVRVGRKLIF

SEQ ID NO: 393990 - protein, 15 aa, Homo sapiens
  CDR3 for beta chain variable domain of TCR clone 196995 (TRBV19, TRBJ2-7)
CASSIGLAVSYEQYF

SEQ ID NO: 393991 - protein, 14 aa, Homo sapiens
  CDR3 for alpha chain variable domain of TCR clone 196996 (TRAV20, TRAJ44)
CAVQDTGTASKLTF

SEQ ID NO: 393992 - protein, 13 aa, Homo sapiens
  CDR3 for beta chain variable domain of TCR clone 196996 (TRBV29-1, TRBJ1-3)
CSAGTGRRNTIYF

SEQ ID NO: 393993 - protein, 13 aa, Homo sapiens
  CDR3 for alpha chain variable domain of TCR clone 196997 (TRAV8-3, TRAJ15)
CAVGIQAGTARIF

SEQ ID NO: 393994 - protein, 17 aa, Homo sapiens
  CDR3 for beta chain variable domain of TCR clone 196997 (TRBV20-1, TRBJ2-1)
CSARDPLAGVSYNEQFF

SEQ ID NO: 393995 - protein, 11 aa, Homo sapiens
  CDR3 for alpha chain variable domain of TCR clone 196998 (TRAV21, TRAJ11)
CAVNGYSTLTF

SEQ ID NO: 393996 - protein, 15 aa, Homo sapiens
  CDR3 for beta chain variable domain of TCR clone 196998 (TRBV7-8, TRBJ2-1)
CASSLAGGLYNEQFF

SEQ ID NO: 393997 - protein, 16 aa, Homo sapiens
  CDR3 for alpha chain variable domain of TCR clone 196999 (TRAV23/DV6, TRAJ9)
CAASIGGNTGGFKTIF

SEQ ID NO: 393998 - protein, 14 aa, Homo sapiens
  CDR3 for beta chain variable domain of TCR clone 196999 (TRBV28, TRBJ1-2)
CASRIQGANYGYTF

SEQ ID NO: 393999 - protein, 13 aa, Homo sapiens
  CDR3 for alpha chain variable domain of TCR clone 197000 (TRAV20, TRAJ45)
CAVKKRGADGLTF

SEQ ID NO: 394000 - protein, 14 aa, Homo sapiens
  CDR3 for beta chain variable domain of TCR clone 197000 (TRBV15, TRBJ2-5)
CATSIGGLGETQYF

SEQ ID NO: 394001 - protein, 17 aa, Homo sapiens
  CDR3 for alpha chain variable domain of TCR clone 197001 (TRAV13-2, TRAJ28)
CAEEPAGSGAGSYQLPF

SEQ ID NO: 394002 - protein, 15 aa, Homo sapiens
  CDR3 for beta chain variable domain of TCR clone 197001 (TRBV5-5, TRBJ1-1)
CASSLVGKDNTEAFF

SEQ ID NO: 394003 - protein, 14 aa, Homo sapiens
  CDR3 for alpha chain variable domain of TCR clone 197002 (TRAV12-2, TRAJ13)
CAVKKTGGYQKVTF

SEQ ID NO: 394004 - protein, 20 aa, Homo sapiens
  CDR3 for beta chain variable domain of TCR clone 197002 (TRBV19, TRBJ2-1)
CASSISRTVTSTRRNNEQFF

SEQ ID NO: 394005 - protein, 12 aa, Homo sapiens
  CDR3 for alpha chain variable domain of TCR clone 197003 (TRAV8-3, TRAJ20)
CAVDFNDYKLSF

SEQ ID NO: 394006 - protein, 13 aa, Homo sapiens
  CDR3 for beta chain variable domain of TCR clone 197003 (TRBV19, TRBJ1-1)
CASSPQMNTEAFF

SEQ ID NO: 394007 - protein, 14 aa, Homo sapiens
  CDR3 for alpha chain variable domain of TCR clone 197004 (TRAV1-2, TRAJ16)
CAVNRFSDGQKLLF

SEQ ID NO: 394008 - protein, 15 aa, Homo sapiens
  CDR3 for beta chain variable domain of TCR clone 197004 (TRBV27, TRBJ2-1)
CASSNGVGSSNEQFF

SEQ ID NO: 394009 - protein, 15 aa, Homo sapiens
  CDR3 for alpha chain variable domain of TCR clone 197005 (TRAV12-1, TRAJ44)
CVVFVNTGTASKLTF

SEQ ID NO: 394010 - protein, 16 aa, Homo sapiens
  CDR3 for beta chain variable domain of TCR clone 197005 (TRBV24-1, TRBJ2-3)
CATSDPGTGATDTQYF

SEQ ID NO: 394011 - protein, 14 aa, Homo sapiens
  CDR3 for alpha chain variable domain of TCR clone 197006 (TRAV12-2, TRAJ13)
CAVKKTGGYQKVTF

SEQ ID NO: 394012 - protein, 14 aa, Homo sapiens
  CDR3 for beta chain variable domain of TCR clone 197006 (TRBV7-3, TRBJ1-1)
CASSLGTVYTEAFF

SEQ ID NO: 394013 - protein, 13 aa, Homo sapiens
  CDR3 for alpha chain variable domain of TCR clone 197007 (TRAV12-1, TRAJ21)
CVVTLYNFNKFYF

SEQ ID NO: 394014 - protein, 14 aa, Homo sapiens
  CDR3 for beta chain variable domain of TCR clone 197007 (TRBV7-8, TRBJ2-7)
CASSGLAGRGEQYF

SEQ ID NO: 394015 - protein, 12 aa, Homo sapiens
  CDR3 for alpha chain variable domain of TCR clone 197008 (TRAV8-3, TRAJ26)
CAGDNYGQNFVF

SEQ ID NO: 394016 - protein, 14 aa, Homo sapiens
  CDR3 for beta chain variable domain of TCR clone 197008 (TRBV7-2, TRBJ1-1)
CASSFLTGTTEAFF

SEQ ID NO: 394017 - protein, 11 aa, Homo sapiens
  CDR3 for alpha chain variable domain of TCR clone 197009 (TRAV3, TRAJ21)
CAVGNFNKFYF

SEQ ID NO: 394018 - protein, 16 aa, Homo sapiens
  CDR3 for beta chain variable domain of TCR clone 197009 (TRBV19, TRBJ2-1)
CASSKAGPGSYNEQFF

SEQ ID NO: 394019 - protein, 15 aa, Homo sapiens
  CDR3 for alpha chain variable domain of TCR clone 197010 (TRAV13-1, TRAJ44)
CAASRGGGTASKLTF

SEQ ID NO: 394020 - protein, 14 aa, Homo sapiens
  CDR3 for beta chain variable domain of TCR clone 197010 (TRBV7-2, TRBJ2-7)
CASSPKTSFYEQYF

SEQ ID NO: 394021 - protein, 12 aa, Homo sapiens
  CDR3 for alpha chain variable domain of TCR clone 197011 (TRAV13-1, TRAJ43)
CAAGRFNNDMPF

SEQ ID NO: 394022 - protein, 11 aa, Homo sapiens
  CDR3 for beta chain variable domain of TCR clone 197011 (TRBV29-1, TRBJ2-5)
CSEDRTGTQYF

SEQ ID NO: 394023 - protein, 14 aa, Homo sapiens
  CDR3 for alpha chain variable domain of TCR clone 197012 (TRAV13-1, TRAJ26)
CAAPKGPDGKNFVF

SEQ ID NO: 394024 - protein, 15 aa, Homo sapiens
  CDR3 for beta chain variable domain of TCR clone 197012 (TRBV28, TRBJ2-5)
CASSFRQGALETQYF

SEQ ID NO: 394025 - protein, 14 aa, Homo sapiens
  CDR3 for alpha chain variable domain of TCR clone 197013 (TRAV1-2, TRAJ16)
CAVNRFSDGQKLLF

SEQ ID NO: 394026 - protein, 14 aa, Homo sapiens
  CDR3 for beta chain variable domain of TCR clone 197013 (TRBV19, TRBJ2-2)
CASSDLHRSGELFF

SEQ ID NO: 394027 - protein, 16 aa, Homo sapiens
  CDR3 for alpha chain variable domain of TCR clone 197014 (TRAV3, TRAJ10)
CAVRDMRVGGGNKLTF

SEQ ID NO: 394028 - protein, 19 aa, Homo sapiens
  CDR3 for beta chain variable domain of TCR clone 197014 (TRBV6-3, TRBJ1-2)
CASSYSKGRTGPPNYGYTF

SEQ ID NO: 394029 - protein, 13 aa, Homo sapiens
  CDR3 for alpha chain variable domain of TCR clone 197015 (TRAV21, TRAJ27)
CAARPGNEGKSTF

SEQ ID NO: 394030 - protein, 15 aa, Homo sapiens
  CDR3 for beta chain variable domain of TCR clone 197015 (TRBV2, TRBJ2-3)
CASSDAGGPPDTQYF

SEQ ID NO: 394031 - protein, 11 aa, Homo sapiens
  CDR3 for alpha chain variable domain of TCR clone 197016 (TRAV2, TRAJ13)
CASGGDQKVTF

SEQ ID NO: 394032 - protein, 13 aa, Homo sapiens
  CDR3 for beta chain variable domain of TCR clone 197016 (TRBV20-1, TRBJ1-1)
CSARVGGNTEAFF

SEQ ID NO: 394033 - protein, 14 aa, Homo sapiens
  CDR3 for alpha chain variable domain of TCR clone 197017 (TRAV12-3, TRAJ10)
SHLPLTGGGNKLTF

SEQ ID NO: 394034 - protein, 14 aa, Homo sapiens
  CDR3 for beta chain variable domain of TCR clone 197017 (TRBV6-1, TRBJ1-3)
CASVQGGGWKHHIF

SEQ ID NO: 394035 - protein, 14 aa, Homo sapiens
  CDR3 for alpha chain variable domain of TCR clone 197018 (TRAV4, TRAJ17)
CLAGDTLVGNKLTF

SEQ ID NO: 394036 - protein, 12 aa, Homo sapiens
  CDR3 for beta chain variable domain of TCR clone 197018 (TRBV19, TRBJ1-5)
CASSIAQQPQHF

SEQ ID NO: 394037 - protein, 15 aa, Homo sapiens
  CDR3 for alpha chain variable domain of TCR clone 197019 (TRAV27, TRAJ38)
CAARRNAGNNRKLIW

SEQ ID NO: 394038 - protein, 16 aa, Homo sapiens
  CDR3 for beta chain variable domain of TCR clone 197019 (TRBV28, TRBJ2-1)
CASSSPEYPRDNEQFF

SEQ ID NO: 394039 - protein, 14 aa, Homo sapiens
  CDR3 for alpha chain variable domain of TCR clone 197020 (TRAV13-1, TRAJ35)
CAASKGGFGNVLHC

SEQ ID NO: 394040 - protein, 13 aa, Homo sapiens
  CDR3 for beta chain variable domain of TCR clone 197020 (TRBV7-3, TRBJ1-1)
YASSQDWEAEAFF

SEQ ID NO: 394041 - protein, 12 aa, Homo sapiens
  CDR3 for alpha chain variable domain of TCR clone 197021 (TRAV38-1, TRAJ47)
CAFETYGNKLVF

SEQ ID NO: 394042 - protein, 15 aa, Homo sapiens
  CDR3 for beta chain variable domain of TCR clone 197021 (TRBV5-7, TRBJ2-7)
CASRGGRPVPYEQYF

SEQ ID NO: 394043 - protein, 18 aa, Homo sapiens
  CDR3 for alpha chain variable domain of TCR clone 197022 (TRAV9-2, TRAJ52)
CALSRHNAGGTSYGKLTF

SEQ ID NO: 394044 - protein, 15 aa, Homo sapiens
  CDR3 for beta chain variable domain of TCR clone 197022 (TRBV29-1, TRBJ2-1)
CSVPTGLALYNEQFF

SEQ ID NO: 394045 - protein, 13 aa, Homo sapiens
  CDR3 for alpha chain variable domain of TCR clone 197023 (TRAV29/DV5, TRAJ49)
CAASTNTGNQFYF

SEQ ID NO: 394046 - protein, 17 aa, Homo sapiens
  CDR3 for beta chain variable domain of TCR clone 197023 (TRBV11-2, TRBJ2-1)
CASSLALAEFGRNEQFF

SEQ ID NO: 394047 - protein, 17 aa, Homo sapiens
  CDR3 for alpha chain variable domain of TCR clone 197024 (TRAV4, TRAJ42)
CLVGVLNYGGSQGNLIF

SEQ ID NO: 394048 - protein, 16 aa, Homo sapiens
  CDR3 for beta chain variable domain of TCR clone 197024 (TRBV2, TRBJ2-1)
CASSVGGSLSYNEQFF

SEQ ID NO: 394049 - protein, 17 aa, Homo sapiens
  CDR3 for alpha chain variable domain of TCR clone 197025 (TRAV3, TRAJ42)
CAVRDRDYGGSQGNLIF

SEQ ID NO: 394050 - protein, 15 aa, Homo sapiens
  CDR3 for beta chain variable domain of TCR clone 197025 (TRBV12-4, TRBJ2-5)
CASSPPTGLQETQYF

SEQ ID NO: 394051 - protein, 13 aa, Homo sapiens
  CDR3 for alpha chain variable domain of TCR clone 197026 (TRAV21, TRAJ10)
CAVRPGGGNKLTF

SEQ ID NO: 394052 - protein, 14 aa, Homo sapiens
  CDR3 for beta chain variable domain of TCR clone 197026 (TRBV5-4, TRBJ2-7)
CASSADASSYEQYF

SEQ ID NO: 394053 - protein, 12 aa, Homo sapiens
  CDR3 for alpha chain variable domain of TCR clone 197027 (TRAV3, TRAJ43)
CAVRGPDNDMRF

SEQ ID NO: 394054 - protein, 14 aa, Homo sapiens
  CDR3 for beta chain variable domain of TCR clone 197027 (TRBV19, TRBJ2-7)
CASSMGQGAIEQYF

SEQ ID NO: 394055 - protein, 13 aa, Homo sapiens
  CDR3 for alpha chain variable domain of TCR clone 197028 (TRAV20, TRAJ42)
CAVQGGSQGNLIL

SEQ ID NO: 394056 - protein, 15 aa, Homo sapiens
  CDR3 for beta chain variable domain of TCR clone 197028 (TRBV10-1, TRBJ2-1)
CASSEWRGTYNEQFF

SEQ ID NO: 394057 - protein, 12 aa, Homo sapiens
  CDR3 for alpha chain variable domain of TCR clone 197029 (TRAV21, TRAJ49)
CAVNDGGNQFYF

SEQ ID NO: 394058 - protein, 20 aa, Homo sapiens
  CDR3 for beta chain variable domain of TCR clone 197029 (TRBV19, TRBJ2-1)
CASSISRTVTSTRLNNEQFF

SEQ ID NO: 394059 - protein, 18 aa, Homo sapiens
  CDR3 for alpha chain variable domain of TCR clone 197030 (TRAV29/DV5, TRAJ26)
CSVLLCSNRKPEGQNFVF

SEQ ID NO: 394060 - protein, 17 aa, Homo sapiens
  CDR3 for beta chain variable domain of TCR clone 197030 (TRBV20-1, TRBJ2-2)
CSASGSGQGGLTGELFF

SEQ ID NO: 394061 - protein, 15 aa, Homo sapiens
  CDR3 for alpha chain variable domain of TCR clone 197031 (TRAV38-2/DV8, TRAJ26)
CAYRSRDNYGQNFVF

SEQ ID NO: 394062 - protein, 16 aa, Homo sapiens
  CDR3 for beta chain variable domain of TCR clone 197031 (TRBV19, TRBJ2-2)
CASRSPGTGATGELFF

SEQ ID NO: 394063 - protein, 13 aa, Homo sapiens
  CDR3 for alpha chain variable domain of TCR clone 197032 (TRAV8-6, TRAJ9)
CAVWDTGGFKTIF

SEQ ID NO: 394064 - protein, 13 aa, Homo sapiens
  CDR3 for beta chain variable domain of TCR clone 197032 (TRBV27, TRBJ1-1)
CASSLTIGAEAFF

SEQ ID NO: 394065 - protein, 16 aa, Homo sapiens
  CDR3 for alpha chain variable domain of TCR clone 197033 (TRAV30, TRAJ26)
CSTESVGDNYGQNFVF

SEQ ID NO: 394066 - protein, 13 aa, Homo sapiens
  CDR3 for beta chain variable domain of TCR clone 197033 (TRBV19, TRBJ1-2)
CASSISEDYGYTF

SEQ ID NO: 394067 - protein, 13 aa, Homo sapiens
  CDR3 for alpha chain variable domain of TCR clone 197034 (TRAV8-3, TRAJ36)
CAVGATGAKNLFF

SEQ ID NO: 394068 - protein, 15 aa, Homo sapiens
  CDR3 for beta chain variable domain of TCR clone 197034 (TRBV7-2, TRBJ1-2)
CASSPRASWNYGYTF

SEQ ID NO: 394069 - protein, 11 aa, Homo sapiens
  CDR3 for alpha chain variable domain of TCR clone 197035 (TRAV21, TRAJ9)
CAVPGGFKTIF

SEQ ID NO: 394070 - protein, 12 aa, Homo sapiens
  CDR3 for beta chain variable domain of TCR clone 197035 (TRBV20-1, TRBJ2-3)
CSARVGTHTQYF

SEQ ID NO: 394071 - protein, 14 aa, Homo sapiens
  CDR3 for alpha chain variable domain of TCR clone 197036 (TRAV2, TRAJ9)
CAVEDRSGGFKTIF

SEQ ID NO: 394072 - protein, 11 aa, Homo sapiens
  CDR3 for beta chain variable domain of TCR clone 197036 (TRBV12-4, TRBJ2-2)
CASSSAGELFF

SEQ ID NO: 394073 - protein, 14 aa, Homo sapiens
  CDR3 for alpha chain variable domain of TCR clone 197037 (TRAV13-2, TRAJ6)
CAERGSGGSYIPTF

SEQ ID NO: 394074 - protein, 14 aa, Homo sapiens
  CDR3 for beta chain variable domain of TCR clone 197037 (TRBV7-3, TRBJ2-1)
CASSLAGGTNEQFF

SEQ ID NO: 394075 - protein, 13 aa, Homo sapiens
  CDR3 for alpha chain variable domain of TCR clone 197038 (TRAV16, TRAJ31)
CSLSAHNNARLTF

SEQ ID NO: 394076 - protein, 17 aa, Homo sapiens
  CDR3 for beta chain variable domain of TCR clone 197038 (TRBV12-4, TRBJ2-1)
CASSPGLAGGRINEQFF

SEQ ID NO: 394077 - protein, 12 aa, Homo sapiens
  CDR3 for alpha chain variable domain of TCR clone 197039 (TRAV21, TRAJ31)
CVLAGSNARLMF

SEQ ID NO: 394078 - protein, 16 aa, Homo sapiens
  CDR3 for beta chain variable domain of TCR clone 197039 (TRBV27, TRBJ2-5)
CASSFGPGGTKETQYF

SEQ ID NO: 394079 - protein, 14 aa, Homo sapiens
  CDR3 for alpha chain variable domain of TCR clone 197040 (TRAV1-1, TRAJ30)
CAVRSLNSDDKIIF

SEQ ID NO: 394080 - protein, 15 aa, Homo sapiens
  CDR3 for beta chain variable domain of TCR clone 197040 (TRBV27, TRBJ1-4)
CASSAQQDLNEKLFF

SEQ ID NO: 394081 - protein, 13 aa, Homo sapiens
  CDR3 for alpha chain variable domain of TCR clone 197041 (TRAV29/DV5, TRAJ31)
CAASRNNNARLMF

SEQ ID NO: 394082 - protein, 17 aa, Homo sapiens
  CDR3 for beta chain variable domain of TCR clone 197041 (TRBV11-2, TRBJ2-4)
CASSFLALGGAGDIQYF

SEQ ID NO: 394083 - protein, 16 aa, Homo sapiens
  CDR3 for alpha chain variable domain of TCR clone 197042 (TRAV26-1, TRAJ56)
CIVRARERGANSKPTF

SEQ ID NO: 394084 - protein, 13 aa, Homo sapiens
  CDR3 for beta chain variable domain of TCR clone 197042 (TRBV7-2, TRBJ1-1)
CASSLRANTEAFF

SEQ ID NO: 394085 - protein, 17 aa, Homo sapiens
  CDR3 for alpha chain variable domain of TCR clone 197043 (TRAV26-1, TRAJ58)
CIVRVGTEETSGSRLTF

SEQ ID NO: 394086 - protein, 12 aa, Homo sapiens
  CDR3 for beta chain variable domain of TCR clone 197043 (TRBV11-2, TRBJ2-5)
CASSLDTQTQYF

SEQ ID NO: 394087 - protein, 13 aa, Homo sapiens
  CDR3 for alpha chain variable domain of TCR clone 197044 (TRAV17, TRAJ26)
CATVGNYGQNFVF

SEQ ID NO: 394088 - protein, 16 aa, Homo sapiens
  CDR3 for beta chain variable domain of TCR clone 197044 (TRBV2, TRBJ2-1)
CASSVGGSLSYNEQFF

SEQ ID NO: 394089 - protein, 14 aa, Homo sapiens
  CDR3 for alpha chain variable domain of TCR clone 197045 (TRAV4, TRAJ11)
CLVGEYSGYSTLTF

SEQ ID NO: 394090 - protein, 14 aa, Homo sapiens
  CDR3 for beta chain variable domain of TCR clone 197045 (TRBV11-2, TRBJ1-5)
CASSLDRGRQPQHF

SEQ ID NO: 394091 - protein, 15 aa, Homo sapiens
  CDR3 for alpha chain variable domain of TCR clone 197046 (TRAV26-1, TRAJ29)
CIVRVEGSGNTPLVF

SEQ ID NO: 394092 - protein, 22 aa, Homo sapiens
  CDR3 for beta chain variable domain of TCR clone 197046 (TRBV7-9, TRBJ1-5)
RGTRPCISVPAAKVTPNQPQHF

SEQ ID NO: 394093 - protein, 11 aa, Homo sapiens
  CDR3 for alpha chain variable domain of TCR clone 197047 (TRAV13-2, TRAJ23)
FAESPRGKLIF

SEQ ID NO: 394094 - protein, 15 aa, Homo sapiens
  CDR3 for beta chain variable domain of TCR clone 197047 (TRBV28, TRBJ2-1)
CASSGLAEVDNEQFF

SEQ ID NO: 394095 - protein, 14 aa, Homo sapiens
  CDR3 for alpha chain variable domain of TCR clone 197048 (TRAV21, TRAJ45)
CAVSSGGGADGLTF

SEQ ID NO: 394096 - protein, 13 aa, Homo sapiens
  CDR3 for beta chain variable domain of TCR clone 197048 (TRBV11-2, TRBJ2-5)
CASSFSSQETQYF

SEQ ID NO: 394097 - protein, 13 aa, Homo sapiens
  CDR3 for alpha chain variable domain of TCR clone 197049 (TRAV29/DV5, TRAJ29)
CAASAAGNTPPVF

SEQ ID NO: 394098 - protein, 14 aa, Homo sapiens
  CDR3 for beta chain variable domain of TCR clone 197049 (TRBV19, TRBJ2-3)
CASSAPRGTDTQYF

SEQ ID NO: 394099 - protein, 10 aa, Homo sapiens
  CDR3 for alpha chain variable domain of TCR clone 197050 (TRAV12-3, TRAJ49)
CAMNDDQFYF

SEQ ID NO: 394100 - protein, 16 aa, Homo sapiens
  CDR3 for beta chain variable domain of TCR clone 197050 (TRBV20-1, TRBJ1-4)
CSAPGQVLLTNEKLFF

SEQ ID NO: 394101 - protein, 13 aa, Homo sapiens
  CDR3 for alpha chain variable domain of TCR clone 197051 (TRAV5, TRAJ30)
CAEIANRDDKIIF

SEQ ID NO: 394102 - protein, 13 aa, Homo sapiens
  CDR3 for beta chain variable domain of TCR clone 197051 (TRBV4-1, TRBJ2-1)
CASSQEVQYEQFF

SEQ ID NO: 394103 - protein, 12 aa, Homo sapiens
  CDR3 for alpha chain variable domain of TCR clone 197052 (TRAV2, TRAJ9)
CAVGSGGFKTIF

SEQ ID NO: 394104 - protein, 16 aa, Homo sapiens
  CDR3 for beta chain variable domain of TCR clone 197052 (TRBV13, TRBJ2-2)
CASSPRTGEHTGELCF

SEQ ID NO: 394105 - protein, 17 aa, Homo sapiens
  CDR3 for alpha chain variable domain of TCR clone 197053 (TRAV3, TRAJ6)
CAVRDGPRAGGSYIPTF

SEQ ID NO: 394106 - protein, 16 aa, Homo sapiens
  CDR3 for beta chain variable domain of TCR clone 197053 (TRBV24-1, TRBJ2-3)
CATSDAISGITDTQYF

SEQ ID NO: 394107 - protein, 15 aa, Homo sapiens
  CDR3 for alpha chain variable domain of TCR clone 197054 (TRAV17, TRAJ28)
CATVDSGVGSYQLTF

SEQ ID NO: 394108 - protein, 13 aa, Homo sapiens
  CDR3 for beta chain variable domain of TCR clone 197054 (TRBV5-4, TRBJ2-5)
CASSRQEGETQYF

SEQ ID NO: 394109 - protein, 16 aa, Homo sapiens
  CDR3 for alpha chain variable domain of TCR clone 197055 (TRAV8-6, TRAJ53)
CAVTSNSGGSNYKLTF

SEQ ID NO: 394110 - protein, 15 aa, Homo sapiens
  CDR3 for beta chain variable domain of TCR clone 197055 (TRBV28, TRBJ2-1)
CASSIIAGGRSEQFF

SEQ ID NO: 394111 - protein, 14 aa, Homo sapiens
  CDR3 for alpha chain variable domain of TCR clone 197056 (TRAV1-2, TRAJ16)
VAVNRFSDGQKLLF

SEQ ID NO: 394112 - protein, 15 aa, Homo sapiens
  CDR3 for beta chain variable domain of TCR clone 197056 (TRBV7-9, TRBJ2-7)
CASSLALAEAYEQYF

SEQ ID NO: 394113 - protein, 13 aa, Homo sapiens
  CDR3 for alpha chain variable domain of TCR clone 197057 (TRAV12-2, TRAJ52)
CAVSGTSYGKLTF

SEQ ID NO: 394114 - protein, 16 aa, Homo sapiens
  CDR3 for beta chain variable domain of TCR clone 197057 (TRBV2, TRBJ2-1)
CASSVGGSLSYNEQFF

SEQ ID NO: 394115 - protein, 16 aa, Homo sapiens
  CDR3 for alpha chain variable domain of TCR clone 197058 (TRAV3, TRAJ10)
CAVRDMRAGGGNKRTF

SEQ ID NO: 394116 - protein, 16 aa, Homo sapiens
  CDR3 for beta chain variable domain of TCR clone 197058 (TRBV5-1, TRBJ2-3)
CASSSVGRRSTDTQYF

SEQ ID NO: 394117 - protein, 14 aa, Homo sapiens
  CDR3 for alpha chain variable domain of TCR clone 197059 (TRAV3, TRAJ21)
CAVESQANFNKFYF

SEQ ID NO: 394118 - protein, 18 aa, Homo sapiens
  CDR3 for beta chain variable domain of TCR clone 197059 (TRBV7-9, TRBJ2-1)
CASSLAVSGTSGRNAQFC

SEQ ID NO: 394119 - protein, 12 aa, Homo sapiens
  CDR3 for alpha chain variable domain of TCR clone 197060 (TRAV30, TRAJ43)
CGTEERGNDMRL

SEQ ID NO: 394120 - protein, 13 aa, Homo sapiens
  CDR3 for beta chain variable domain of TCR clone 197060 (TRBV12-4, TRBJ1-2)
CASSSGSKDGYTF

SEQ ID NO: 394121 - protein, 13 aa, Homo sapiens
  CDR3 for alpha chain variable domain of TCR clone 197061 (TRAV12-3, TRAJ33)
CAMSVNSNYQLIW

SEQ ID NO: 394122 - protein, 14 aa, Homo sapiens
  CDR3 for beta chain variable domain of TCR clone 197061 (TRBV11-2, TRBJ2-7)
CASSLVPGGDEQYF

SEQ ID NO: 394123 - protein, 13 aa, Homo sapiens
  CDR3 for alpha chain variable domain of TCR clone 197062 (TRAV12-3, TRAJ16)
CAVQLSDGQKLPF

SEQ ID NO: 394124 - protein, 14 aa, Homo sapiens
  CDR3 for beta chain variable domain of TCR clone 197062 (TRBV5-1, TRBJ2-1)
CASSLDGDWNEQFF

SEQ ID NO: 394125 - protein, 13 aa, Homo sapiens
  CDR3 for alpha chain variable domain of TCR clone 197063 (TRAV8-3, TRAJ43)
CDVVSYNNNDMRF

SEQ ID NO: 394126 - protein, 17 aa, Homo sapiens
  CDR3 for beta chain variable domain of TCR clone 197063 (TRBV7-7, TRBJ1-1)
CASIGDRPNLGVTEAFF

SEQ ID NO: 394127 - protein, 13 aa, Homo sapiens
  CDR3 for alpha chain variable domain of TCR clone 197064 (TRAV9-2, TRAJ53)
CALSGGSNYKLTF

SEQ ID NO: 394128 - protein, 14 aa, Homo sapiens
  CDR3 for beta chain variable domain of TCR clone 197064 (TRBV7-6, TRBJ2-3)
CASSLGTVTDTQYF

SEQ ID NO: 394129 - protein, 11 aa, Homo sapiens
  CDR3 for alpha chain variable domain of TCR clone 197065 (TRAV1-1, TRAJ23)
CAVRQGGKLIF

SEQ ID NO: 394130 - protein, 12 aa, Homo sapiens
  CDR3 for beta chain variable domain of TCR clone 197065 (TRBV19, TRBJ1-5)
CASSIAQQAQHF

SEQ ID NO: 394131 - protein, 13 aa, Homo sapiens
  CDR3 for alpha chain variable domain of TCR clone 197066 (TRAV2, TRAJ40)
CDVVTSGTYKYIF

SEQ ID NO: 394132 - protein, 15 aa, Homo sapiens
  CDR3 for beta chain variable domain of TCR clone 197066 (TRBV18, TRBJ1-1)
CASSPRQGENTEAFF

SEQ ID NO: 394133 - protein, 15 aa, Homo sapiens
  CDR3 for alpha chain variable domain of TCR clone 197067 (TRAV14/DV4, TRAJ33)
CAMREGRDSNYQLIW

SEQ ID NO: 394134 - protein, 16 aa, Homo sapiens
  CDR3 for beta chain variable domain of TCR clone 197067 (TRBV19, TRBJ2-2)
CASRSPGTGATGELFF

SEQ ID NO: 394135 - protein, 16 aa, Homo sapiens
  CDR3 for alpha chain variable domain of TCR clone 197068 (TRAV17, TRAJ35)
CATAEGGIGFGNVLHC

SEQ ID NO: 394136 - protein, 17 aa, Homo sapiens
  CDR3 for beta chain variable domain of TCR clone 197068 (TRBV11-2, TRBJ2-1)
CASSLYPPGVEYNEQFF

SEQ ID NO: 394137 - protein, 17 aa, Homo sapiens
  CDR3 for alpha chain variable domain of TCR clone 197069 (TRAV4, TRAJ42)
CLVGVLNYGGSQGNLIF

SEQ ID NO: 394138 - protein, 14 aa, Homo sapiens
  CDR3 for beta chain variable domain of TCR clone 197069 (TRBV7-2, TRBJ2-3)
CASRRGLAADTQYF

SEQ ID NO: 394139 - protein, 14 aa, Homo sapiens
  CDR3 for alpha chain variable domain of TCR clone 197070 (TRAV12-1, TRAJ22)
RVAFSSGSARQLTF

SEQ ID NO: 394140 - protein, 12 aa, Homo sapiens
  CDR3 for beta chain variable domain of TCR clone 197070 (TRBV2, TRBJ2-7)
CASTYRTDEQYF

SEQ ID NO: 394141 - protein, 16 aa, Homo sapiens
  CDR3 for alpha chain variable domain of TCR clone 197071 (TRAV12-3, TRAJ53)
CAMSPGSGGSNYKLTF

SEQ ID NO: 394142 - protein, 16 aa, Homo sapiens
  CDR3 for beta chain variable domain of TCR clone 197071 (TRBV5-4, TRBJ2-1)
CASSLVGSGQDNEQLF

SEQ ID NO: 394143 - protein, 12 aa, Homo sapiens
  CDR3 for alpha chain variable domain of TCR clone 197072 (TRAV16, TRAJ26)
CALRSYGQNFVF

SEQ ID NO: 394144 - protein, 16 aa, Homo sapiens
  CDR3 for beta chain variable domain of TCR clone 197072 (TRBV7-3, TRBJ2-1)
CASSLEGYRSYNEQFF

SEQ ID NO: 394145 - protein, 15 aa, Homo sapiens
  CDR3 for alpha chain variable domain of TCR clone 197073 (TRAV3, TRAJ3)
CAVRDRRSSASTLIF

SEQ ID NO: 394146 - protein, 16 aa, Homo sapiens
  CDR3 for beta chain variable domain of TCR clone 197073 (TRBV24-1, TRBJ2-3)
GATSDPGTGATDTQYF

SEQ ID NO: 394147 - protein, 14 aa, Homo sapiens
  CDR3 for alpha chain variable domain of TCR clone 197074 (TRAV13-1, TRAJ13)
CAAGRVGGYQKGTF

SEQ ID NO: 394148 - protein, 17 aa, Homo sapiens
  CDR3 for beta chain variable domain of TCR clone 197074 (TRBV15, TRBJ1-5)
CATSRAPPGTRNQPQHF

SEQ ID NO: 394149 - protein, 16 aa, Homo sapiens
  CDR3 for alpha chain variable domain of TCR clone 197075 (TRAV12-1, TRAJ45)
CVVIRYSGGGADGLTF

SEQ ID NO: 394150 - protein, 12 aa, Homo sapiens
  CDR3 for beta chain variable domain of TCR clone 197075 (TRBV6-5, TRBJ2-2)
CASRQMTGELFF

SEQ ID NO: 394151 - protein, 15 aa, Homo sapiens
  CDR3 for alpha chain variable domain of TCR clone 197076 (TRAV8-4, TRAJ39)
CAVSHHRGAGNMLTF

SEQ ID NO: 394152 - protein, 15 aa, Homo sapiens
  CDR3 for beta chain variable domain of TCR clone 197076 (TRBV20-1, TRBJ1-1)
CSARPRQGAPTETFF

SEQ ID NO: 394153 - protein, 12 aa, Homo sapiens
  CDR3 for alpha chain variable domain of TCR clone 197077 (TRAV35, TRAJ39)
LAPNNTGNMLTF

SEQ ID NO: 394154 - protein, 16 aa, Homo sapiens
  CDR3 for beta chain variable domain of TCR clone 197077 (TRBV2, TRBJ2-3)
CASSTSVEGVTDTQYF

SEQ ID NO: 394155 - protein, 14 aa, Homo sapiens
  CDR3 for alpha chain variable domain of TCR clone 197078 (TRAV12-2, TRAJ40)
CAVKIPSGTYKYIF

SEQ ID NO: 394156 - protein, 15 aa, Homo sapiens
  CDR3 for beta chain variable domain of TCR clone 197078 (TRBV11-3, TRBJ2-3)
CASLKGGREGDTQYF

SEQ ID NO: 394157 - protein, 13 aa, Homo sapiens
  CDR3 for alpha chain variable domain of TCR clone 197079 (TRAV12-3, TRAJ40)
CAMSARGTYKYIF

SEQ ID NO: 394158 - protein, 15 aa, Homo sapiens
  CDR3 for beta chain variable domain of TCR clone 197079 (TRBV3-1, TRBJ2-2)
CASSQDWTRAGELFF

SEQ ID NO: 394159 - protein, 15 aa, Homo sapiens
  CDR3 for alpha chain variable domain of TCR clone 197080 (TRAV12-1, TRAJ44)
CVVFVNTGTASKLTF

SEQ ID NO: 394160 - protein, 13 aa, Homo sapiens
  CDR3 for beta chain variable domain of TCR clone 197080 (TRBV12-5, TRBJ2-1)
CASGLGRGNEQFF

SEQ ID NO: 394161 - protein, 10 aa, Homo sapiens
  CDR3 for alpha chain variable domain of TCR clone 197081 (TRAV13-1, TRAJ27)
CAPLARQIKL

SEQ ID NO: 394162 - protein, 13 aa, Homo sapiens
  CDR3 for beta chain variable domain of TCR clone 197081 (TRBV7-3, TRBJ1-1)
CASSQDWGAEAFF

SEQ ID NO: 394163 - protein, 13 aa, Homo sapiens
  CDR3 for alpha chain variable domain of TCR clone 197082 (TRAV17, TRAJ22)
CAHHSGSARQLTF

SEQ ID NO: 394164 - protein, 14 aa, Homo sapiens
  CDR3 for beta chain variable domain of TCR clone 197082 (TRBV16, TRBJ1-1)
CASSQAGPNTEDFF

SEQ ID NO: 394165 - protein, 14 aa, Homo sapiens
  CDR3 for alpha chain variable domain of TCR clone 197083 (TRAV38-1, TRAJ40)
CALRPTSGTSRYIF

SEQ ID NO: 394166 - protein, 14 aa, Homo sapiens
  CDR3 for beta chain variable domain of TCR clone 197083 (TRBV25-1, TRBJ1-1)
CASTHLGGNTEAFF

SEQ ID NO: 394167 - protein, 14 aa, Homo sapiens
  CDR3 for alpha chain variable domain of TCR clone 197084 (TRAV3, TRAJ34)
CDVRDINNTDKLIF

SEQ ID NO: 394168 - protein, 15 aa, Homo sapiens
  CDR3 for beta chain variable domain of TCR clone 197084 (TRBV20-1, TRBJ2-7)
CSARDRVSGMDEQYF

SEQ ID NO: 394169 - protein, 18 aa, Homo sapiens
  CDR3 for alpha chain variable domain of TCR clone 197085 (TRAV29/DV5, TRAJ52)
CAAGFRGAGGTCYGKLTF

SEQ ID NO: 394170 - protein, 16 aa, Homo sapiens
  CDR3 for beta chain variable domain of TCR clone 197085 (TRBV7-3, TRBJ2-2)
CASSLKRGTLSGELFF

SEQ ID NO: 394171 - protein, 14 aa, Homo sapiens
  CDR3 for alpha chain variable domain of TCR clone 197086 (TRAV26-1, TRAJ38)
CIADNAGNNRRLIW

SEQ ID NO: 394172 - protein, 13 aa, Homo sapiens
  CDR3 for beta chain variable domain of TCR clone 197086 (TRBV7-9, TRBJ2-3)
CASSPGSTDTQYF

SEQ ID NO: 394173 - protein, 17 aa, Homo sapiens
  CDR3 for alpha chain variable domain of TCR clone 197087 (TRAV4, TRAJ10)
CLVGDITPREEETNSPL

SEQ ID NO: 394174 - protein, 14 aa, Homo sapiens
  CDR3 for beta chain variable domain of TCR clone 197087 (TRBV25-1, TRBJ1-4)
CASSPLVGEEKLFF

SEQ ID NO: 394175 - protein, 14 aa, Homo sapiens
  CDR3 for alpha chain variable domain of TCR clone 197088 (TRAV1-2, TRAJ8)
CAVREDTGFQKLVF

SEQ ID NO: 394176 - protein, 12 aa, Homo sapiens
  CDR3 for beta chain variable domain of TCR clone 197088 (TRBV7-9, TRBJ2-7)
CASSIKRGEQYF

SEQ ID NO: 394177 - protein, 12 aa, Homo sapiens
  CDR3 for alpha chain variable domain of TCR clone 197089 (TRAV12-3, TRAJ17)
CAMSLTGNKLTF

SEQ ID NO: 394178 - protein, 17 aa, Homo sapiens
  CDR3 for beta chain variable domain of TCR clone 197089 (TRBV11-2, TRBJ2-1)
CASSLYPPGVEYNEQFF

SEQ ID NO: 394179 - protein, 13 aa, Homo sapiens
  CDR3 for alpha chain variable domain of TCR clone 197090 (TRAV35, TRAJ48)
CAGHEFGNEKLTF

SEQ ID NO: 394180 - protein, 14 aa, Homo sapiens
  CDR3 for beta chain variable domain of TCR clone 197090 (TRBV6-1, TRBJ1-3)
CASVQGGGGNTIYF

SEQ ID NO: 394181 - protein, 13 aa, Homo sapiens
  CDR3 for alpha chain variable domain of TCR clone 197091 (TRAV8-3, TRAJ28)
CAVGAVGSYQTTF

SEQ ID NO: 394182 - protein, 15 aa, Homo sapiens
  CDR3 for beta chain variable domain of TCR clone 197091 (TRBV7-9, TRBJ1-5)
CASSQGHQPNQPQHF

SEQ ID NO: 394183 - protein, 15 aa, Homo sapiens
  CDR3 for alpha chain variable domain of TCR clone 197092 (TRAV8-6, TRAJ5)
CAVRDRKTGRRALTF

SEQ ID NO: 394184 - protein, 15 aa, Homo sapiens
  CDR3 for beta chain variable domain of TCR clone 197092 (TRBV7-8, TRBJ2-1)
CASSLADSLYNEQFF

SEQ ID NO: 394185 - protein, 15 aa, Homo sapiens
  CDR3 for alpha chain variable domain of TCR clone 197093 (TRAV21, TRAJ53)
CSTLNSGGSNYKLTF

SEQ ID NO: 394186 - protein, 13 aa, Homo sapiens
  CDR3 for beta chain variable domain of TCR clone 197093 (TRBV7-2, TRBJ2-2)
CASSLAVTGELFF

SEQ ID NO: 394187 - protein, 11 aa, Homo sapiens
  CDR3 for alpha chain variable domain of TCR clone 197094 (TRAV23/DV6, TRAJ49)
CAASSRNQFYF

SEQ ID NO: 394188 - protein, 17 aa, Homo sapiens
  CDR3 for beta chain variable domain of TCR clone 197094 (TRBV13, TRBJ2-3)
CAGSLSRVAGGRNTQYF

SEQ ID NO: 394189 - protein, 14 aa, Homo sapiens
  CDR3 for alpha chain variable domain of TCR clone 197095 (TRAV8-3, TRAJ4)
CAVGAAGGYNKLIF

SEQ ID NO: 394190 - protein, 14 aa, Homo sapiens
  CDR3 for beta chain variable domain of TCR clone 197095 (TRBV11-2, TRBJ2-1)
CASSLSGPYNEQFF

SEQ ID NO: 394191 - protein, 15 aa, Homo sapiens
  CDR3 for alpha chain variable domain of TCR clone 197096 (TRAV4, TRAJ42)
CIVGGYGGSQGNLIF

SEQ ID NO: 394192 - protein, 16 aa, Homo sapiens
  CDR3 for beta chain variable domain of TCR clone 197096 (TRBV27, TRBJ1-1)
CASSTRTGGVGTEAFF

SEQ ID NO: 394193 - protein, 19 aa, Homo sapiens
  CDR3 for alpha chain variable domain of TCR clone 197097 (TRAV40, )
CLPLPDIQNPDPAVYQLRD

SEQ ID NO: 394194 - protein, 15 aa, Homo sapiens
  CDR3 for beta chain variable domain of TCR clone 197097 (TRBV2, TRBJ1-2)
CASSEIGGANYGYTF

SEQ ID NO: 394195 - protein, 13 aa, Homo sapiens
  CDR3 for alpha chain variable domain of TCR clone 197098 (TRAV35, TRAJ42)
CAGFPGSQGNLIF

SEQ ID NO: 394196 - protein, 17 aa, Homo sapiens
  CDR3 for beta chain variable domain of TCR clone 197098 (TRBV7-8, TRBJ2-6)
CASSAGTGGAGANVLTF

SEQ ID NO: 394197 - protein, 11 aa, Homo sapiens
  CDR3 for alpha chain variable domain of TCR clone 197099 (TRAV35, TRAJ34)
CLARNTDKLIF

SEQ ID NO: 394198 - protein, 14 aa, Homo sapiens
  CDR3 for beta chain variable domain of TCR clone 197099 (TRBV5-1, TRBJ2-7)
CASSRGESLYEQYF

SEQ ID NO: 394199 - protein, 11 aa, Homo sapiens
  CDR3 for alpha chain variable domain of TCR clone 197100 (TRAV4, TRAJ31)
CLVGDNARLMF

SEQ ID NO: 394200 - protein, 16 aa, Homo sapiens
  CDR3 for beta chain variable domain of TCR clone 197100 (TRBV7-2, TRBJ2-5)
CASSSQWLSGQETQYF

SEQ ID NO: 394201 - protein, 15 aa, Homo sapiens
  CDR3 for alpha chain variable domain of TCR clone 197101 (TRAV13-1, TRAJ44)
CAASRNTGTASKLTF

SEQ ID NO: 394202 - protein, 13 aa, Homo sapiens
  CDR3 for beta chain variable domain of TCR clone 197101 (TRBV7-3, TRBJ1-1)
CASSQDWGAEAFF

SEQ ID NO: 394203 - protein, 15 aa, Homo sapiens
  CDR3 for alpha chain variable domain of TCR clone 197102 (TRAV13-1, TRAJ45)
QVGRYSGGGADGLTF

SEQ ID NO: 394204 - protein, 15 aa, Homo sapiens
  CDR3 for beta chain variable domain of TCR clone 197102 (TRBV20-1, TRBJ2-7)
CSARDRVSGMDEQYF

SEQ ID NO: 394205 - protein, 11 aa, Homo sapiens
  CDR3 for alpha chain variable domain of TCR clone 197103 (TRAV3, TRAJ21)
CAVGNFNKFYF

SEQ ID NO: 394206 - protein, 16 aa, Homo sapiens
  CDR3 for beta chain variable domain of TCR clone 197103 (TRBV5-1, TRBJ2-3)
CASSVFPMSSTDTQYF

SEQ ID NO: 394207 - protein, 13 aa, Homo sapiens
  CDR3 for alpha chain variable domain of TCR clone 197104 (TRAV12-1, TRAJ6)
CVVFPGGSYIPTF

SEQ ID NO: 394208 - protein, 15 aa, Homo sapiens
  CDR3 for beta chain variable domain of TCR clone 197104 (TRBV5-5, TRBJ1-5)
CASSLKGGGEQPQHF

SEQ ID NO: 394209 - protein, 16 aa, Homo sapiens
  CDR3 for alpha chain variable domain of TCR clone 197105 (TRAV12-2, TRAJ43)
CAGADMRFGAGTSLTV

SEQ ID NO: 394210 - protein, 16 aa, Homo sapiens
  CDR3 for beta chain variable domain of TCR clone 197105 (TRBV2, TRBJ2-4)
CASSEAPGGEQNIQYF

SEQ ID NO: 394211 - protein, 14 aa, Homo sapiens
  CDR3 for alpha chain variable domain of TCR clone 197106 (TRAV2, TRAJ37)
CAVDFTSNTGKLIF

SEQ ID NO: 394212 - protein, 16 aa, Homo sapiens
  CDR3 for beta chain variable domain of TCR clone 197106 (TRBV2, TRBJ2-1)
CASRSPAGGKYNEQFF

SEQ ID NO: 394213 - protein, 14 aa, Homo sapiens
  CDR3 for alpha chain variable domain of TCR clone 197107 (TRAV12-3, TRAJ10)
SHLPLTGGGNKLTF

SEQ ID NO: 394214 - protein, 16 aa, Homo sapiens
  CDR3 for beta chain variable domain of TCR clone 197107 (TRBV18, TRBJ1-3)
CASALGILNGENTIYF

SEQ ID NO: 394215 - protein, 14 aa, Homo sapiens
  CDR3 for alpha chain variable domain of TCR clone 197108 (TRAV12-1, TRAJ13)
CVVIDSGGYQTVTF

SEQ ID NO: 394216 - protein, 12 aa, Homo sapiens
  CDR3 for beta chain variable domain of TCR clone 197108 (TRBV29-1, TRBJ2-3)
CSVTGGADTQYF

SEQ ID NO: 394217 - protein, 10 aa, Homo sapiens
  CDR3 for alpha chain variable domain of TCR clone 197109 (TRAV8-4, TRAJ43)
CAVSAEDMRF

SEQ ID NO: 394218 - protein, 13 aa, Homo sapiens
  CDR3 for beta chain variable domain of TCR clone 197109 (TRBV12-4, TRBJ2-5)
CASSPGTEETQYF

SEQ ID NO: 394219 - protein, 14 aa, Homo sapiens
  CDR3 for alpha chain variable domain of TCR clone 197110 (TRAV13-1, TRAJ44)
CAAKATGTASKLTL

SEQ ID NO: 394220 - protein, 17 aa, Homo sapiens
  CDR3 for beta chain variable domain of TCR clone 197110 (TRBV7-3, TRBJ2-3)
CASSLMKRMRGADTQYV

SEQ ID NO: 394221 - protein, 14 aa, Homo sapiens
  CDR3 for alpha chain variable domain of TCR clone 197111 (TRAV12-2, TRAJ40)
CAVKIPSGTYKYIF

SEQ ID NO: 394222 - protein, 14 aa, Homo sapiens
  CDR3 for beta chain variable domain of TCR clone 197111 (TRBV6-3, TRBJ2-1)
CASLHSAYYNEQFF

SEQ ID NO: 394223 - protein, 13 aa, Homo sapiens
  CDR3 for alpha chain variable domain of TCR clone 197112 (TRAV13-1, TRAJ21)
CAASIYNVNKFYF

SEQ ID NO: 394224 - protein, 20 aa, Homo sapiens
  CDR3 for beta chain variable domain of TCR clone 197112 (TRBV7-8, TRBJ2-2)
CASSHLFPGPTIHITGELFF

SEQ ID NO: 394225 - protein, 14 aa, Homo sapiens
  CDR3 for alpha chain variable domain of TCR clone 197113 (TRAV2, TRAJ9)
CAVEDRSGGFKTIF

SEQ ID NO: 394226 - protein, 14 aa, Homo sapiens
  CDR3 for beta chain variable domain of TCR clone 197113 (TRBV18, TRBJ2-7)
CANSPRGGAYEQYF

SEQ ID NO: 394227 - protein, 14 aa, Homo sapiens
  CDR3 for alpha chain variable domain of TCR clone 197114 (TRAV23/DV6, TRAJ53)
CAARSGGSNYKLTF

SEQ ID NO: 394228 - protein, 16 aa, Homo sapiens
  CDR3 for beta chain variable domain of TCR clone 197114 (TRBV4-2, TRBJ1-1)
CASSQAGFGMNTEAFF

SEQ ID NO: 394229 - protein, 15 aa, Homo sapiens
  CDR3 for alpha chain variable domain of TCR clone 197115 (TRAV1-2, TRAJ13)
CAVRGSSGGNQKVTF

SEQ ID NO: 394230 - protein, 15 aa, Homo sapiens
  CDR3 for beta chain variable domain of TCR clone 197115 (TRBV11-3, TRBJ1-3)
CASSLSGTSGNTIYF

SEQ ID NO: 394231 - protein, 19 aa, Homo sapiens
  CDR3 for alpha chain variable domain of TCR clone 197116 (TRAV2, )
CAVEEDIQNPDPAVYQLRD

SEQ ID NO: 394232 - protein, 14 aa, Homo sapiens
  CDR3 for beta chain variable domain of TCR clone 197116 (TRBV19, TRBJ1-2)
YASNPGQAPYGYTF

SEQ ID NO: 394233 - protein, 14 aa, Homo sapiens
  CDR3 for alpha chain variable domain of TCR clone 197117 (TRAV12-2, TRAJ17)
CVVLFKAAGNKLTF

SEQ ID NO: 394234 - protein, 14 aa, Homo sapiens
  CDR3 for beta chain variable domain of TCR clone 197117 (TRBV4-1, TRBJ2-2)
CASSQAVNTGELFF

SEQ ID NO: 394235 - protein, 12 aa, Homo sapiens
  CDR3 for alpha chain variable domain of TCR clone 197118 (TRAV29/DV5, TRAJ43)
CAAPYNNNDMRF

SEQ ID NO: 394236 - protein, 13 aa, Homo sapiens
  CDR3 for beta chain variable domain of TCR clone 197118 (TRBV19, TRBJ1-5)
CASSMRGYQPQHF

SEQ ID NO: 394237 - protein, 14 aa, Homo sapiens
  CDR3 for alpha chain variable domain of TCR clone 197119 (TRAV1-2, TRAJ29)
CAVRELTSATPLVF

SEQ ID NO: 394238 - protein, 13 aa, Homo sapiens
  CDR3 for beta chain variable domain of TCR clone 197119 (TRBV19, TRBJ1-2)
CASSQGQVYGYTF

SEQ ID NO: 394239 - protein, 16 aa, Homo sapiens
  CDR3 for alpha chain variable domain of TCR clone 197120 (TRAV23/DV6, TRAJ9)
CAASIGGNTGGFKTIF

SEQ ID NO: 394240 - protein, 13 aa, Homo sapiens
  CDR3 for beta chain variable domain of TCR clone 197120 (TRBV10-3, TRBJ2-7)
CASKLAVNYEQDF

SEQ ID NO: 394241 - protein, 11 aa, Homo sapiens
  CDR3 for alpha chain variable domain of TCR clone 197121 (TRAV29/DV5, TRAJ43)
CAAKPNNDMRF

SEQ ID NO: 394242 - protein, 14 aa, Homo sapiens
  CDR3 for beta chain variable domain of TCR clone 197121 (TRBV11-2, TRBJ2-7)
CASSPSTTSYEQYF

SEQ ID NO: 394243 - protein, 16 aa, Homo sapiens
  CDR3 for alpha chain variable domain of TCR clone 197122 (TRAV2, TRAJ20)
TTVLWSLRSNDYKLSF

SEQ ID NO: 394244 - protein, 12 aa, Homo sapiens
  CDR3 for beta chain variable domain of TCR clone 197122 (TRBV7-6, TRBJ2-3)
CASSTGTDTQYF

SEQ ID NO: 394245 - protein, 17 aa, Homo sapiens
  CDR3 for alpha chain variable domain of TCR clone 197123 (TRAV8-6, TRAJ58)
CAVSSWVGETRGSRLTF

SEQ ID NO: 394246 - protein, 14 aa, Homo sapiens
  CDR3 for beta chain variable domain of TCR clone 197123 (TRBV4-2, TRBJ2-1)
CASGLDRAYNEQSF

SEQ ID NO: 394247 - protein, 16 aa, Homo sapiens
  CDR3 for alpha chain variable domain of TCR clone 197124 (TRAV1-2, TRAJ27)
CAVREHQTPMQANQPL

SEQ ID NO: 394248 - protein, 13 aa, Homo sapiens
  CDR3 for beta chain variable domain of TCR clone 197124 (TRBV6-1, TRBJ1-2)
CASSAREGYGYTF

SEQ ID NO: 394249 - protein, 16 aa, Homo sapiens
  CDR3 for alpha chain variable domain of TCR clone 197125 (TRAV12-3, TRAJ53)
CAMSPGSGGSNYKLTF

SEQ ID NO: 394250 - protein, 11 aa, Homo sapiens
  CDR3 for beta chain variable domain of TCR clone 197125 (TRBV29-1, TRBJ2-5)
CSGYRTGTQYF

SEQ ID NO: 394251 - protein, 11 aa, Homo sapiens
  CDR3 for alpha chain variable domain of TCR clone 197126 (TRAV17, TRAJ31)
CATSNNARLMF

SEQ ID NO: 394252 - protein, 14 aa, Homo sapiens
  CDR3 for beta chain variable domain of TCR clone 197126 (TRBV18, TRBJ2-7)
CSSSPRGGAYEQYF

SEQ ID NO: 394253 - protein, 17 aa, Homo sapiens
  CDR3 for alpha chain variable domain of TCR clone 197127 (TRAV8-3, TRAJ50)
CAVGAVDPETSYDKVIF

SEQ ID NO: 394254 - protein, 13 aa, Homo sapiens
  CDR3 for beta chain variable domain of TCR clone 197127 (TRBV7-9, TRBJ2-2)
CASSSAGTGELFF

SEQ ID NO: 394255 - protein, 14 aa, Homo sapiens
  CDR3 for alpha chain variable domain of TCR clone 197128 (TRAV13-1, TRAJ44)
CAAKATGTASKLTF

SEQ ID NO: 394256 - protein, 13 aa, Homo sapiens
  CDR3 for beta chain variable domain of TCR clone 197128 (TRBV12-4, TRBJ1-2)
CASSSGLTVRSTF

SEQ ID NO: 394257 - protein, 14 aa, Homo sapiens
  CDR3 for alpha chain variable domain of TCR clone 197129 (TRAV35, TRAJ33)
CAGSSQDSNYQLFW

SEQ ID NO: 394258 - protein, 15 aa, Homo sapiens
  CDR3 for beta chain variable domain of TCR clone 197129 (TRBV29-1, TRBJ2-7)
CSVEFFDRGSYEQYF

SEQ ID NO: 394259 - protein, 21 aa, Homo sapiens
  CDR3 for alpha chain variable domain of TCR clone 197130 (TRAV26-1, TRAJ17)
CCVLLHRQSSGSKAAVNKLTF

SEQ ID NO: 394260 - protein, 13 aa, Homo sapiens
  CDR3 for beta chain variable domain of TCR clone 197130 (TRBV12-4, TRBJ2-7)
CASSRQASYEQYF

SEQ ID NO: 394261 - protein, 13 aa, Homo sapiens
  CDR3 for alpha chain variable domain of TCR clone 197131 (TRAV21, TRAJ27)
CAARPGNAGKSTF

SEQ ID NO: 394262 - protein, 14 aa, Homo sapiens
  CDR3 for beta chain variable domain of TCR clone 197131 (TRBV20-1, TRBJ2-1)
FSAAGSGEYNEQFF

SEQ ID NO: 394263 - protein, 14 aa, Homo sapiens
  CDR3 for alpha chain variable domain of TCR clone 197132 (TRAV12-2, TRAJ17)
CAVLFKAAGNKLTF

SEQ ID NO: 394264 - protein, 14 aa, Homo sapiens
  CDR3 for beta chain variable domain of TCR clone 197132 (TRBV19, TRBJ2-7)
CASSIEASSYEQYF

SEQ ID NO: 394265 - protein, 13 aa, Homo sapiens
  CDR3 for alpha chain variable domain of TCR clone 197133 (TRAV8-3, TRAJ43)
CAVVPYNNNDMRF

SEQ ID NO: 394266 - protein, 16 aa, Homo sapiens
  CDR3 for beta chain variable domain of TCR clone 197133 (TRBV7-2, TRBJ2-5)
CASSPFPTGGEETKYF

SEQ ID NO: 394267 - protein, 17 aa, Homo sapiens
  CDR3 for alpha chain variable domain of TCR clone 197134 (TRAV3, TRAJ42)
CAVRDRDYGGSQGNLIF

SEQ ID NO: 394268 - protein, 16 aa, Homo sapiens
  CDR3 for beta chain variable domain of TCR clone 197134 (TRBV7-9, TRBJ1-2)
CASSLGFSSGEDGYTF

SEQ ID NO: 394269 - protein, 14 aa, Homo sapiens
  CDR3 for alpha chain variable domain of TCR clone 197135 (TRAV17, TRAJ56)
CATVPAGANSKLTF

SEQ ID NO: 394270 - protein, 20 aa, Homo sapiens
  CDR3 for beta chain variable domain of TCR clone 197135 (TRBV4-1, TRBJ2-2)
SASSQASPPGLASNTGELFF

SEQ ID NO: 394271 - protein, 15 aa, Homo sapiens
  CDR3 for alpha chain variable domain of TCR clone 197136 (TRAV21, TRAJ45)
CAVSYSGGGADGLTF

SEQ ID NO: 394272 - protein, 13 aa, Homo sapiens
  CDR3 for beta chain variable domain of TCR clone 197136 (TRBV20-1, TRBJ2-5)
CSAATELQETHYF

SEQ ID NO: 394273 - protein, 13 aa, Homo sapiens
  CDR3 for alpha chain variable domain of TCR clone 197137 (TRAV26-1, TRAJ23)
CIDLRTRGGKLIF

SEQ ID NO: 394274 - protein, 17 aa, Homo sapiens
  CDR3 for beta chain variable domain of TCR clone 197137 (TRBV7-8, TRBJ2-6)
CASSAGTGGAGANVLTF

SEQ ID NO: 394275 - protein, 13 aa, Homo sapiens
  CDR3 for alpha chain variable domain of TCR clone 197138 (TRAV26-1, TRAJ34)
CIVRPWITDKLIF

SEQ ID NO: 394276 - protein, 13 aa, Homo sapiens
  CDR3 for beta chain variable domain of TCR clone 197138 (TRBV5-1, TRBJ2-1)
CARSLGSYNEQLF

SEQ ID NO: 394277 - protein, 12 aa, Homo sapiens
  CDR3 for alpha chain variable domain of TCR clone 197139 (TRAV21, TRAJ11)
CAATSGYSTLTF

SEQ ID NO: 394278 - protein, 17 aa, Homo sapiens
  CDR3 for beta chain variable domain of TCR clone 197139 (TRBV7-2, TRBJ2-3)
CASSLAGGLAGTAGQYF

SEQ ID NO: 394279 - protein, 17 aa, Homo sapiens
  CDR3 for alpha chain variable domain of TCR clone 197140 (TRAV26-1, TRAJ53)
CIVRADDSGGRNYKLTF

SEQ ID NO: 394280 - protein, 15 aa, Homo sapiens
  CDR3 for beta chain variable domain of TCR clone 197140 (TRBV20-1, TRBJ2-7)
CSARVPAAYFYEQYF

SEQ ID NO: 394281 - protein, 15 aa, Homo sapiens
  CDR3 for alpha chain variable domain of TCR clone 197141 (TRAV13-1, TRAJ44)
CAASRGGGTATKLTF

SEQ ID NO: 394282 - protein, 14 aa, Homo sapiens
  CDR3 for beta chain variable domain of TCR clone 197141 (TRBV7-2, TRBJ2-5)
CASSPRGSSETQYF

SEQ ID NO: 394283 - protein, 12 aa, Homo sapiens
  CDR3 for alpha chain variable domain of TCR clone 197142 (TRAV21, TRAJ23)
CAVVPQGGKLIF

SEQ ID NO: 394284 - protein, 13 aa, Homo sapiens
  CDR3 for beta chain variable domain of TCR clone 197142 (TRBV20-1, TRBJ2-7)
CSARTGAGYEQYF

SEQ ID NO: 394285 - protein, 14 aa, Homo sapiens
  CDR3 for alpha chain variable domain of TCR clone 197143 (TRAV8-3, TRAJ23)
CAVIIYNQGGKLIF

SEQ ID NO: 394286 - protein, 15 aa, Homo sapiens
  CDR3 for beta chain variable domain of TCR clone 197143 (TRBV18, TRBJ1-5)
CASSSGQGHAQPQHF

SEQ ID NO: 394287 - protein, 14 aa, Homo sapiens
  CDR3 for alpha chain variable domain of TCR clone 197144 (TRAV26-1, TRAJ45)
CIVRVVGGADGLTC

SEQ ID NO: 394288 - protein, 16 aa, Homo sapiens
  CDR3 for beta chain variable domain of TCR clone 197144 (TRBV7-9, TRBJ1-1)
CASSLTQVRSNTEAFF

SEQ ID NO: 394289 - protein, 15 aa, Homo sapiens
  CDR3 for alpha chain variable domain of TCR clone 197145 (TRAV2, TRAJ9)
CAVEDRGTGVFKTIF

SEQ ID NO: 394290 - protein, 17 aa, Homo sapiens
  CDR3 for beta chain variable domain of TCR clone 197145 (TRBV24-1, TRBJ2-1)
CATSDVSTSGTYNEQFF

SEQ ID NO: 394291 - protein, 16 aa, Homo sapiens
  CDR3 for alpha chain variable domain of TCR clone 197146 (TRAV3, TRAJ28)
CAVLPRSGAGIYQLTF

SEQ ID NO: 394292 - protein, 13 aa, Homo sapiens
  CDR3 for beta chain variable domain of TCR clone 197146 (TRBV12-4, TRBJ2-5)
CASRLAVQETQYF

SEQ ID NO: 394293 - protein, 15 aa, Homo sapiens
  CDR3 for alpha chain variable domain of TCR clone 197147 (TRAV38-2/DV8, TRAJ45)
WAYWDSGGGADGLTF

SEQ ID NO: 394294 - protein, 14 aa, Homo sapiens
  CDR3 for beta chain variable domain of TCR clone 197147 (TRBV7-2, TRBJ2-7)
CASRSQGAAYEQYF

SEQ ID NO: 394295 - protein, 15 aa, Homo sapiens
  CDR3 for alpha chain variable domain of TCR clone 197148 (TRAV17, TRAJ37)
CATDHGSSNTGKLIF

SEQ ID NO: 394296 - protein, 14 aa, Homo sapiens
  CDR3 for beta chain variable domain of TCR clone 197148 (TRBV7-2, TRBJ2-3)
CASSRTSGADTQYI

SEQ ID NO: 394297 - protein, 15 aa, Homo sapiens
  CDR3 for alpha chain variable domain of TCR clone 197149 (TRAV25, TRAJ52)
CAGRPGGTSYGKLTF

SEQ ID NO: 394298 - protein, 14 aa, Homo sapiens
  CDR3 for beta chain variable domain of TCR clone 197149 (TRBV11-2, TRBJ2-3)
CASSLGGGANTQYF

SEQ ID NO: 394299 - protein, 14 aa, Homo sapiens
  CDR3 for alpha chain variable domain of TCR clone 197150 (TRAV9-2, TRAJ39)
CAPYIYNEGNMLTF

SEQ ID NO: 394300 - protein, 13 aa, Homo sapiens
  CDR3 for beta chain variable domain of TCR clone 197150 (TRBV19, TRBJ2-7)
CASRKAGGSEQYF

SEQ ID NO: 394301 - protein, 14 aa, Homo sapiens
  CDR3 for alpha chain variable domain of TCR clone 197151 (TRAV9-2, TRAJ39)
CALYIYNAGNILTF

SEQ ID NO: 394302 - protein, 13 aa, Homo sapiens
  CDR3 for beta chain variable domain of TCR clone 197151 (TRBV7-3, TRBJ2-3)
SLSGYRPEDTQYF

SEQ ID NO: 394303 - protein, 15 aa, Homo sapiens
  CDR3 for alpha chain variable domain of TCR clone 197152 (TRAV27, TRAJ38)
CAARRNAGNSRKLIW

SEQ ID NO: 394304 - protein, 17 aa, Homo sapiens
  CDR3 for beta chain variable domain of TCR clone 197152 (TRBV20-1, TRBJ2-2)
CSASGSGQGGLTGELFF

SEQ ID NO: 394305 - protein, 12 aa, Homo sapiens
  CDR3 for alpha chain variable domain of TCR clone 197153 (TRAV2, TRAJ31)
CAVEDNNARLMF

SEQ ID NO: 394306 - protein, 15 aa, Homo sapiens
  CDR3 for beta chain variable domain of TCR clone 197153 (TRBV7-2, TRBJ1-2)
CASSLAPDRGLGYTF

SEQ ID NO: 394307 - protein, 12 aa, Homo sapiens
  CDR3 for alpha chain variable domain of TCR clone 197154 (TRAV1-2, TRAJ33)
CAALDSNYQLIR

SEQ ID NO: 394308 - protein, 14 aa, Homo sapiens
  CDR3 for beta chain variable domain of TCR clone 197154 (TRBV19, TRBJ2-3)
CASSAPRGTDTQYF

SEQ ID NO: 394309 - protein, 15 aa, Homo sapiens
  CDR3 for alpha chain variable domain of TCR clone 197155 (TRAV8-3, TRAJ7)
CAVGSISYGNNRLAF

SEQ ID NO: 394310 - protein, 20 aa, Homo sapiens
  CDR3 for beta chain variable domain of TCR clone 197155 (TRBV28, TRBJ2-1)
CASTPIGRSPGLAGGNEQFF

SEQ ID NO: 394311 - protein, 12 aa, Homo sapiens
  CDR3 for alpha chain variable domain of TCR clone 197156 (TRAV8-3, TRAJ43)
CAVVDNNNDMRF

SEQ ID NO: 394312 - protein, 16 aa, Homo sapiens
  CDR3 for beta chain variable domain of TCR clone 197156 (TRBV19, TRBJ2-2)
CASRSPGTGATGELFF

SEQ ID NO: 394313 - protein, 11 aa, Homo sapiens
  CDR3 for alpha chain variable domain of TCR clone 197157 (TRAV1-2, TRAJ40)
VAVPGTYKYIF

SEQ ID NO: 394314 - protein, 16 aa, Homo sapiens
  CDR3 for beta chain variable domain of TCR clone 197157 (TRBV29-1, TRBJ2-7)
CSVEVVGTSGSYEQYF

SEQ ID NO: 394315 - protein, 13 aa, Homo sapiens
  CDR3 for alpha chain variable domain of TCR clone 197158 (TRAV13-1, TRAJ39)
CSKYSNAGNMLTF

SEQ ID NO: 394316 - protein, 12 aa, Homo sapiens
  CDR3 for beta chain variable domain of TCR clone 197158 (TRBV29-1, TRBJ2-3)
CSVTGGADTQYF

SEQ ID NO: 394317 - protein, 15 aa, Homo sapiens
  CDR3 for alpha chain variable domain of TCR clone 197159 (TRAV38-1, TRAJ37)
CAFIHGSGNTAKLIF

SEQ ID NO: 394318 - protein, 14 aa, Homo sapiens
  CDR3 for beta chain variable domain of TCR clone 197159 (TRBV29-1, TRBJ2-5)
CSVETSGSGETQYF

SEQ ID NO: 394319 - protein, 14 aa, Homo sapiens
  CDR3 for alpha chain variable domain of TCR clone 197160 (TRAV8-6, TRAJ52)
CAVIGGTSYGKLTF

SEQ ID NO: 394320 - protein, 13 aa, Homo sapiens
  CDR3 for beta chain variable domain of TCR clone 197160 (TRBV19, TRBJ1-2)
CASSVPGQDGYTF

SEQ ID NO: 394321 - protein, 15 aa, Homo sapiens
  CDR3 for alpha chain variable domain of TCR clone 197161 (TRAV30, TRAJ13)
CGTQGVTGGYQKVTF

SEQ ID NO: 394322 - protein, 13 aa, Homo sapiens
  CDR3 for beta chain variable domain of TCR clone 197161 (TRBV20-1, TRBJ2-5)
CSARATGEETQYF

SEQ ID NO: 394323 - protein, 15 aa, Homo sapiens
  CDR3 for alpha chain variable domain of TCR clone 197162 (TRAV2, TRAJ15)
CAVEDREQAGTALIF

SEQ ID NO: 394324 - protein, 14 aa, Homo sapiens
  CDR3 for beta chain variable domain of TCR clone 197162 (TRBV20-1, TRBJ2-5)
CSARYRGLQETQYF

SEQ ID NO: 394325 - protein, 16 aa, Homo sapiens
  CDR3 for alpha chain variable domain of TCR clone 197163 (TRAV26-1, TRAJ23)
CIVRVHPYNQGGKLIF

SEQ ID NO: 394326 - protein, 13 aa, Homo sapiens
  CDR3 for beta chain variable domain of TCR clone 197163 (TRBV15, TRBJ1-6)
CATSGGLNSPLHF

SEQ ID NO: 394327 - protein, 13 aa, Homo sapiens
  CDR3 for alpha chain variable domain of TCR clone 197164 (TRAV12-2, TRAJ20)
CAVYPSNDYKLSF

SEQ ID NO: 394328 - protein, 14 aa, Homo sapiens
  CDR3 for beta chain variable domain of TCR clone 197164 (TRBV7-9, TRBJ2-7)
CASSLSQGSYEQYF

SEQ ID NO: 394329 - protein, 14 aa, Homo sapiens
  CDR3 for alpha chain variable domain of TCR clone 197165 (TRAV12-3, TRAJ10)
SHLPLTGGGDKLTF

SEQ ID NO: 394330 - protein, 18 aa, Homo sapiens
  CDR3 for beta chain variable domain of TCR clone 197165 (TRBV5-4, TRBJ2-3)
CASSPTAGFLPSTDMQYF

SEQ ID NO: 394331 - protein, 14 aa, Homo sapiens
  CDR3 for alpha chain variable domain of TCR clone 197166 (TRAV26-1, TRAJ40)
CIVRVARGTYKYIL

SEQ ID NO: 394332 - protein, 14 aa, Homo sapiens
  CDR3 for beta chain variable domain of TCR clone 197166 (TRBV25-1, TRBJ1-1)
CASTHLGGNTEAFF

SEQ ID NO: 394333 - protein, 12 aa, Homo sapiens
  CDR3 for alpha chain variable domain of TCR clone 197167 (TRAV22, TRAJ29)
CAPPSGNTPLGF

SEQ ID NO: 394334 - protein, 14 aa, Homo sapiens
  CDR3 for beta chain variable domain of TCR clone 197167 (TRBV11-2, TRBJ2-7)
CASSLGAGAYEQYF

SEQ ID NO: 394335 - protein, 15 aa, Homo sapiens
  CDR3 for alpha chain variable domain of TCR clone 197168 (TRAV13-2, TRAJ50)
CAEEPLKNSYDKVIF

SEQ ID NO: 394336 - protein, 16 aa, Homo sapiens
  CDR3 for beta chain variable domain of TCR clone 197168 (TRBV5-1, TRBJ1-1)
CASSSGGNSLNTEAFF

SEQ ID NO: 394337 - protein, 14 aa, Homo sapiens
  CDR3 for alpha chain variable domain of TCR clone 197169 (TRAV13-1, TRAJ35)
CAASKGGFGNVLHC

SEQ ID NO: 394338 - protein, 15 aa, Homo sapiens
  CDR3 for beta chain variable domain of TCR clone 197169 (TRBV9, TRBJ1-6)
CASSVAGTGDSALHF

SEQ ID NO: 394339 - protein, 17 aa, Homo sapiens
  CDR3 for alpha chain variable domain of TCR clone 197170 (TRAV14/DV4, TRAJ28)
CAMREVSSEAGSYQLTF

SEQ ID NO: 394340 - protein, 15 aa, Homo sapiens
  CDR3 for beta chain variable domain of TCR clone 197170 (TRBV11-2, TRBJ1-6)
CASTLRETGNSPLHF

SEQ ID NO: 394341 - protein, 13 aa, Homo sapiens
  CDR3 for alpha chain variable domain of TCR clone 197171 (TRAV12-2, TRAJ18)
CAVRGSTLGRLYF

SEQ ID NO: 394342 - protein, 14 aa, Homo sapiens
  CDR3 for beta chain variable domain of TCR clone 197171 (TRBV23-1, TRBJ2-5)
CASSFLRSQETQYF

SEQ ID NO: 394343 - protein, 14 aa, Homo sapiens
  CDR3 for alpha chain variable domain of TCR clone 197172 (TRAV27, TRAJ22)
CAGLPSGSARQLTF

SEQ ID NO: 394344 - protein, 12 aa, Homo sapiens
  CDR3 for beta chain variable domain of TCR clone 197172 (TRBV7-9, TRBJ2-7)
CASSLEGYEQYF

SEQ ID NO: 394345 - protein, 12 aa, Homo sapiens
  CDR3 for alpha chain variable domain of TCR clone 197173 (TRAV27, TRAJ9)
CAGESGGFKTIF

SEQ ID NO: 394346 - protein, 23 aa, Homo sapiens
  CDR3 for beta chain variable domain of TCR clone 197173 (TRBV7-3, TRBJ2-1)
CASSPRGRTGDYLTSSPTMSSSS

SEQ ID NO: 394347 - protein, 12 aa, Homo sapiens
  CDR3 for alpha chain variable domain of TCR clone 197174 (TRAV1-1, TRAJ20)
CAVREDDYKLSF

SEQ ID NO: 394348 - protein, 16 aa, Homo sapiens
  CDR3 for beta chain variable domain of TCR clone 197174 (TRBV19, TRBJ2-2)
CASRSPGTGATGELFF

SEQ ID NO: 394349 - protein, 12 aa, Homo sapiens
  CDR3 for alpha chain variable domain of TCR clone 197175 (TRAV27, TRAJ35)
CAGADFGNVLHC

SEQ ID NO: 394350 - protein, 13 aa, Homo sapiens
  CDR3 for beta chain variable domain of TCR clone 197175 (TRBV7-3, TRBJ1-1)
CASSQDLGAEAFF

SEQ ID NO: 394351 - protein, 11 aa, Homo sapiens
  CDR3 for alpha chain variable domain of TCR clone 197176 (TRAV8-4, TRAJ34)
CAVSWTSKLIF

SEQ ID NO: 394352 - protein, 14 aa, Homo sapiens
  CDR3 for beta chain variable domain of TCR clone 197176 (TRBV7-9, TRBJ2-3)
CASSLEDGTDTQYF

SEQ ID NO: 394353 - protein, 15 aa, Homo sapiens
  CDR3 for alpha chain variable domain of TCR clone 197177 (TRAV13-1, TRAJ5)
RAASKADTGRRALTL

SEQ ID NO: 394354 - protein, 16 aa, Homo sapiens
  CDR3 for beta chain variable domain of TCR clone 197177 (TRBV7-2, TRBJ2-1)
CASSLGRTSGDNEQFF

SEQ ID NO: 394355 - protein, 15 aa, Homo sapiens
  CDR3 for alpha chain variable domain of TCR clone 197178 (TRAV3, TRAJ9)
CAVRDSNTGGFKTIF

SEQ ID NO: 394356 - protein, 13 aa, Homo sapiens
  CDR3 for beta chain variable domain of TCR clone 197178 (TRBV7-3, TRBJ2-1)
CASSLDSYNEQFF

SEQ ID NO: 394357 - protein, 16 aa, Homo sapiens
  CDR3 for alpha chain variable domain of TCR clone 197179 (TRAV3, TRAJ3)
CAVRDRAKSSASKILF

SEQ ID NO: 394358 - protein, 14 aa, Homo sapiens
  CDR3 for beta chain variable domain of TCR clone 197179 (TRBV19, TRBJ2-1)
CASPTFVLSGEQFF

SEQ ID NO: 394359 - protein, 16 aa, Homo sapiens
  CDR3 for alpha chain variable domain of TCR clone 197180 (TRAV3, TRAJ37)
CAVRPPGSGNTGKLIF

SEQ ID NO: 394360 - protein, 15 aa, Homo sapiens
  CDR3 for beta chain variable domain of TCR clone 197180 (TRBV10-3, TRBJ2-3)
CAISLTSGGTDTQYF

SEQ ID NO: 394361 - protein, 14 aa, Homo sapiens
  CDR3 for alpha chain variable domain of TCR clone 197181 (TRAV13-1, TRAJ52)
CAALDGTSYGKLTF

SEQ ID NO: 394362 - protein, 17 aa, Homo sapiens
  CDR3 for beta chain variable domain of TCR clone 197181 (TRBV11-2, TRBJ2-1)
CASSLYPPGVEYNEQFF

SEQ ID NO: 394363 - protein, 12 aa, Homo sapiens
  CDR3 for alpha chain variable domain of TCR clone 197182 (TRAV12-2, TRAJ21)
CAPSDNFNKFYF

SEQ ID NO: 394364 - protein, 11 aa, Homo sapiens
  CDR3 for beta chain variable domain of TCR clone 197182 (TRBV6-3, TRBJ2-3)
CATGQADTQYF

SEQ ID NO: 394365 - protein, 16 aa, Homo sapiens
  CDR3 for alpha chain variable domain of TCR clone 197183 (TRAV12-3, TRAJ53)
CAMSPGRGGSNYKLTF

SEQ ID NO: 394366 - protein, 16 aa, Homo sapiens
  CDR3 for beta chain variable domain of TCR clone 197183 (TRBV4-2, TRBJ1-1)
CASRPLDGGGDTEAFF

SEQ ID NO: 394367 - protein, 14 aa, Homo sapiens
  CDR3 for alpha chain variable domain of TCR clone 197184 (TRAV8-6, TRAJ52)
CAGIGGTSYGRLTF

SEQ ID NO: 394368 - protein, 15 aa, Homo sapiens
  CDR3 for beta chain variable domain of TCR clone 197184 (TRBV27, TRBJ2-7)
CASTQRRPEYYEQYF

SEQ ID NO: 394369 - protein, 17 aa, Homo sapiens
  CDR3 for alpha chain variable domain of TCR clone 197185 (TRAV3, TRAJ6)
CAARDGPRAGGSYIPTF

SEQ ID NO: 394370 - protein, 14 aa, Homo sapiens
  CDR3 for beta chain variable domain of TCR clone 197185 (TRBV7-2, TRBJ2-7)
CASSPKTSFYGQYF

SEQ ID NO: 394371 - protein, 15 aa, Homo sapiens
  CDR3 for alpha chain variable domain of TCR clone 197186 (TRAV27, TRAJ38)
CAARRNACNDRKLIW

SEQ ID NO: 394372 - protein, 13 aa, Homo sapiens
  CDR3 for beta chain variable domain of TCR clone 197186 (TRBV12-5, TRBJ2-3)
CASGDRQSDTQYF

SEQ ID NO: 394373 - protein, 20 aa, Homo sapiens
  CDR3 for alpha chain variable domain of TCR clone 197187 (TRAV27, TRAJ10)
ASTSVPSRGILTGGGNKLTF

SEQ ID NO: 394374 - protein, 14 aa, Homo sapiens
  CDR3 for beta chain variable domain of TCR clone 197187 (TRBV5-7, TRBJ2-3)
CASSYFGQVHTQYF

SEQ ID NO: 394375 - protein, 14 aa, Homo sapiens
  CDR3 for alpha chain variable domain of TCR clone 197188 (TRAV13-1, TRAJ9)
CAASALTGGFKTIF

SEQ ID NO: 394376 - protein, 15 aa, Homo sapiens
  CDR3 for beta chain variable domain of TCR clone 197188 (TRBV6-1, TRBJ2-3)
CASSERGGITDTQYF

SEQ ID NO: 394377 - protein, 13 aa, Homo sapiens
  CDR3 for alpha chain variable domain of TCR clone 197189 (TRAV12-1, TRAJ9)
CVVLNTGGFKTIF

SEQ ID NO: 394378 - protein, 15 aa, Homo sapiens
  CDR3 for beta chain variable domain of TCR clone 197189 (TRBV7-9, TRBJ2-2)
CASSPETGAGGELFF

SEQ ID NO: 394379 - protein, 14 aa, Homo sapiens
  CDR3 for alpha chain variable domain of TCR clone 197190 (TRAV8-4, TRAJ9)
CALRINTGGFKTIF

SEQ ID NO: 394380 - protein, 16 aa, Homo sapiens
  CDR3 for beta chain variable domain of TCR clone 197190 (TRBV20-1, TRBJ1-4)
CSAPGQGLLTNEKLFF

SEQ ID NO: 394381 - protein, 16 aa, Homo sapiens
  CDR3 for alpha chain variable domain of TCR clone 197191 (TRAV13-1, TRAJ18)
CAASRMRGSTLGRLYV

SEQ ID NO: 394382 - protein, 16 aa, Homo sapiens
  CDR3 for beta chain variable domain of TCR clone 197191 (TRBV27, TRBJ1-1)
CASSSRGRTGYTEVFF

SEQ ID NO: 394383 - protein, 14 aa, Homo sapiens
  CDR3 for alpha chain variable domain of TCR clone 197192 (TRAV26-1, TRAJ38)
CIVMGAGNNRKLIW

SEQ ID NO: 394384 - protein, 13 aa, Homo sapiens
  CDR3 for beta chain variable domain of TCR clone 197192 (TRBV7-3, TRBJ1-1)
CASSQDWGAEAFF

SEQ ID NO: 394385 - protein, 17 aa, Homo sapiens
  CDR3 for alpha chain variable domain of TCR clone 197193 (TRAV26-1, TRAJ28)
CIVRVPDSGAGSYQLTF

SEQ ID NO: 394386 - protein, 13 aa, Homo sapiens
  CDR3 for beta chain variable domain of TCR clone 197193 (TRBV12-5, TRBJ2-3)
CASGDRQSDTQYF

SEQ ID NO: 394387 - protein, 14 aa, Homo sapiens
  CDR3 for alpha chain variable domain of TCR clone 197194 (TRAV13-1, TRAJ26)
CAAPKGPDGQNFVF

SEQ ID NO: 394388 - protein, 15 aa, Homo sapiens
  CDR3 for beta chain variable domain of TCR clone 197194 (TRBV19, TRBJ2-7)
CASSPAGSGEALRYF

SEQ ID NO: 394389 - protein, 14 aa, Homo sapiens
  CDR3 for alpha chain variable domain of TCR clone 197195 (TRAV8-4, TRAJ9)
CSVRINTGGFKTIF

SEQ ID NO: 394390 - protein, 13 aa, Homo sapiens
  CDR3 for beta chain variable domain of TCR clone 197195 (TRBV4-1, TRBJ1-1)
CASSQLGTGEAFF

SEQ ID NO: 394391 - protein, 12 aa, Homo sapiens
  CDR3 for alpha chain variable domain of TCR clone 197196 (TRAV16, TRAJ21)
CALFGNFNKFYF

SEQ ID NO: 394392 - protein, 15 aa, Homo sapiens
  CDR3 for beta chain variable domain of TCR clone 197196 (TRBV3-1, TRBJ2-2)
CASSQAVRETGELFF

SEQ ID NO: 394393 - protein, 17 aa, Homo sapiens
  CDR3 for alpha chain variable domain of TCR clone 197197 (TRAV8-6, TRAJ58)
CAVSSWVGETSGSRLAF

SEQ ID NO: 394394 - protein, 15 aa, Homo sapiens
  CDR3 for beta chain variable domain of TCR clone 197197 (TRBV7-9, TRBJ1-4)
CASSRTGGFNEKLFF

SEQ ID NO: 394395 - protein, 15 aa, Homo sapiens
  CDR3 for alpha chain variable domain of TCR clone 197198 (TRAV8-2, TRAJ40)
CVVSDRGLGTYQYIF

SEQ ID NO: 394396 - protein, 17 aa, Homo sapiens
  CDR3 for beta chain variable domain of TCR clone 197198 (TRBV9, TRBJ2-1)
CASSVRSLSGGNNEQFF

SEQ ID NO: 394397 - protein, 13 aa, Homo sapiens
  CDR3 for alpha chain variable domain of TCR clone 197199 (TRAV12-2, TRAJ30)
CAVTLNRDDKIIF

SEQ ID NO: 394398 - protein, 14 aa, Homo sapiens
  CDR3 for beta chain variable domain of TCR clone 197199 (TRBV20-1, TRBJ2-3)
CSASSGGRTDTQYF

SEQ ID NO: 394399 - protein, 14 aa, Homo sapiens
  CDR3 for alpha chain variable domain of TCR clone 197200 (TRAV38-1, TRAJ45)
CASHSGGGADGLTF

SEQ ID NO: 394400 - protein, 14 aa, Homo sapiens
  CDR3 for beta chain variable domain of TCR clone 197200 (TRBV7-2, TRBJ2-7)
CASSPKTSFYEQYF

SEQ ID NO: 394401 - protein, 14 aa, Homo sapiens
  CDR3 for alpha chain variable domain of TCR clone 197201 (TRAV26-1, TRAJ21)
CIVRPPYNFNKFYF

SEQ ID NO: 394402 - protein, 14 aa, Homo sapiens
  CDR3 for beta chain variable domain of TCR clone 197201 (TRBV11-3, TRBJ2-1)
CTSSATTSGSIQFF

SEQ ID NO: 394403 - protein, 15 aa, Homo sapiens
  CDR3 for alpha chain variable domain of TCR clone 197202 (TRAV1-2, TRAJ15)
CAVDVMGSAGTALIF

SEQ ID NO: 394404 - protein, 13 aa, Homo sapiens
  CDR3 for beta chain variable domain of TCR clone 197202 (TRBV20-1, TRBJ1-1)
CSAFDRENTEAYF

SEQ ID NO: 394405 - protein, 13 aa, Homo sapiens
  CDR3 for alpha chain variable domain of TCR clone 197203 (TRAV8-6, TRAJ49)
CAVITNTGNQVYF

SEQ ID NO: 394406 - protein, 17 aa, Homo sapiens
  CDR3 for beta chain variable domain of TCR clone 197203 (TRBV11-2, TRBJ2-1)
CASSLYPPGVEYNEQFF

SEQ ID NO: 394407 - protein, 15 aa, Homo sapiens
  CDR3 for alpha chain variable domain of TCR clone 197204 (TRAV8-3, TRAJ23)
WAVGDRYNQGGKLIF

SEQ ID NO: 394408 - protein, 22 aa, Homo sapiens
  CDR3 for beta chain variable domain of TCR clone 197204 (TRBV29-1, TRBJ2-5)
TVSNMSPEDSSIYLCSAGTQYF

SEQ ID NO: 394409 - protein, 13 aa, Homo sapiens
  CDR3 for alpha chain variable domain of TCR clone 197205 (TRAV27, TRAJ29)
CAGAHSGNTTLGF

SEQ ID NO: 394410 - protein, 14 aa, Homo sapiens
  CDR3 for beta chain variable domain of TCR clone 197205 (TRBV7-9, TRBJ2-7)
CASSIGQGAGEQYF

SEQ ID NO: 394411 - protein, 12 aa, Homo sapiens
  CDR3 for alpha chain variable domain of TCR clone 197206 (TRAV3, TRAJ43)
CCERGRNNDMSF

SEQ ID NO: 394412 - protein, 12 aa, Homo sapiens
  CDR3 for beta chain variable domain of TCR clone 197206 (TRBV5-1, TRBJ2-7)
CASSLDSYEQYF

SEQ ID NO: 394413 - protein, 12 aa, Homo sapiens
  CDR3 for alpha chain variable domain of TCR clone 197207 (TRAV8-1, TRAJ31)
CAVINNNARLMF

SEQ ID NO: 394414 - protein, 15 aa, Homo sapiens
  CDR3 for beta chain variable domain of TCR clone 197207 (TRBV20-1, TRBJ2-2)
YSARGGQGNTGELFF

SEQ ID NO: 394415 - protein, 11 aa, Homo sapiens
  CDR3 for alpha chain variable domain of TCR clone 197208 (TRAV1-1, TRAJ23)
CAVRQGGKLIF

SEQ ID NO: 394416 - protein, 20 aa, Homo sapiens
  CDR3 for beta chain variable domain of TCR clone 197208 (TRBV7-8, TRBJ2-2)
CAISHLFPGPTVHITGELFF

SEQ ID NO: 394417 - protein, 14 aa, Homo sapiens
  CDR3 for alpha chain variable domain of TCR clone 197209 (TRAV3, TRAJ21)
CALGRGSTNFTLDL

SEQ ID NO: 394418 - protein, 14 aa, Homo sapiens
  CDR3 for beta chain variable domain of TCR clone 197209 (TRBV7-9, TRBJ2-4)
CASSLSMGGNIQYF

SEQ ID NO: 394419 - protein, 11 aa, Homo sapiens
  CDR3 for alpha chain variable domain of TCR clone 197210 (TRAV5, TRAJ31)
CAESNNARLMF

SEQ ID NO: 394420 - protein, 13 aa, Homo sapiens
  CDR3 for beta chain variable domain of TCR clone 197210 (TRBV7-3, TRBJ1-1)
CASSQDWGAEAFF

SEQ ID NO: 394421 - protein, 15 aa, Homo sapiens
  CDR3 for alpha chain variable domain of TCR clone 197211 (TRAV17, TRAJ54)
CATARSEQGAQKLVV

SEQ ID NO: 394422 - protein, 16 aa, Homo sapiens
  CDR3 for beta chain variable domain of TCR clone 197211 (TRBV12-4, TRBJ2-3)
CASSLRLAETTDTQYF

SEQ ID NO: 394423 - protein, 15 aa, Homo sapiens
  CDR3 for alpha chain variable domain of TCR clone 197212 (TRAV12-3, TRAJ48)
CAMNAKNFGNEKLTF

SEQ ID NO: 394424 - protein, 14 aa, Homo sapiens
  CDR3 for beta chain variable domain of TCR clone 197212 (TRBV2, TRBJ1-6)
CASSEARNKSPLHF

SEQ ID NO: 394425 - protein, 14 aa, Homo sapiens
  CDR3 for alpha chain variable domain of TCR clone 197213 (TRAV35, TRAJ42)
CAGRYGGSQGNLIF

SEQ ID NO: 394426 - protein, 15 aa, Homo sapiens
  CDR3 for beta chain variable domain of TCR clone 197213 (TRBV7-9, TRBJ2-1)
CASSSGWGRANEQFF

SEQ ID NO: 394427 - protein, 17 aa, Homo sapiens
  CDR3 for alpha chain variable domain of TCR clone 197214 (TRAV3, TRAJ42)
CAVRDRDYVGSQGNLIF

SEQ ID NO: 394428 - protein, 15 aa, Homo sapiens
  CDR3 for beta chain variable domain of TCR clone 197214 (TRBV3-1, TRBJ2-1)
CASSQVVDDGEEQFF

SEQ ID NO: 394429 - protein, 14 aa, Homo sapiens
  CDR3 for alpha chain variable domain of TCR clone 197215 (TRAV12-3, TRAJ10)
SHLPLTGGGNKLTF

SEQ ID NO: 394430 - protein, 16 aa, Homo sapiens
  CDR3 for beta chain variable domain of TCR clone 197215 (TRBV20-1, TRBJ1-1)
CSARALTQGMNTEAFF

SEQ ID NO: 394431 - protein, 13 aa, Homo sapiens
  CDR3 for alpha chain variable domain of TCR clone 197216 (TRAV27, TRAJ58)
CAGAETSGSRLTF

SEQ ID NO: 394432 - protein, 17 aa, Homo sapiens
  CDR3 for beta chain variable domain of TCR clone 197216 (TRBV7-8, TRBJ1-2)
CASSLRPLQGHLYGYTF

SEQ ID NO: 394433 - protein, 15 aa, Homo sapiens
  CDR3 for alpha chain variable domain of TCR clone 197217 (TRAV26-2, TRAJ13)
CILRDLSGGYQKVTF

SEQ ID NO: 394434 - protein, 11 aa, Homo sapiens
  CDR3 for beta chain variable domain of TCR clone 197217 (TRBV7-9, TRBJ2-5)
SASSLSATQYF

SEQ ID NO: 394435 - protein, 17 aa, Homo sapiens
  CDR3 for alpha chain variable domain of TCR clone 197218 (TRAV38-1, TRAJ45)
CAFMRVYSGGGADGLTF

SEQ ID NO: 394436 - protein, 14 aa, Homo sapiens
  CDR3 for beta chain variable domain of TCR clone 197218 (TRBV28, TRBJ1-2)
CASRIQGANYGYTF

SEQ ID NO: 394437 - protein, 13 aa, Homo sapiens
  CDR3 for alpha chain variable domain of TCR clone 197219 (TRAV20, TRAJ37)
CAGCSSNTGKLIF

SEQ ID NO: 394438 - protein, 13 aa, Homo sapiens
  CDR3 for beta chain variable domain of TCR clone 197219 (TRBV20-1, TRBJ2-7)
CSAIHTSGYEQYF

SEQ ID NO: 394439 - protein, 14 aa, Homo sapiens
  CDR3 for alpha chain variable domain of TCR clone 197220 (TRAV2, TRAJ9)
CAAEDRSGGFKTIF

SEQ ID NO: 394440 - protein, 14 aa, Homo sapiens
  CDR3 for beta chain variable domain of TCR clone 197220 (TRBV18, TRBJ1-5)
CASSRQQRNQPQHF

SEQ ID NO: 394441 - protein, 15 aa, Homo sapiens
  CDR3 for alpha chain variable domain of TCR clone 197221 (TRAV38-1, TRAJ37)
CAFIHGSGNTGKLIF

SEQ ID NO: 394442 - protein, 12 aa, Homo sapiens
  CDR3 for beta chain variable domain of TCR clone 197221 (TRBV7-9, TRBJ2-7)
CASSFSSYEQYF

SEQ ID NO: 394443 - protein, 14 aa, Homo sapiens
  CDR3 for alpha chain variable domain of TCR clone 197222 (TRAV1-2, TRAJ16)
CAINRFSDGQKLLF

SEQ ID NO: 394444 - protein, 13 aa, Homo sapiens
  CDR3 for beta chain variable domain of TCR clone 197222 (TRBV7-3, TRBJ1-1)
CASSQDWGAEAFF

SEQ ID NO: 394445 - protein, 14 aa, Homo sapiens
  CDR3 for alpha chain variable domain of TCR clone 197223 (TRAV38-1, TRAJ45)
CASHSGGGADGLTF

SEQ ID NO: 394446 - protein, 14 aa, Homo sapiens
  CDR3 for beta chain variable domain of TCR clone 197223 (TRBV7-2, TRBJ1-2)
CASSQTGSTYGYTF

SEQ ID NO: 394447 - protein, 14 aa, Homo sapiens
  CDR3 for alpha chain variable domain of TCR clone 197224 (TRAV8-3, TRAJ6)
CAVYPSGGSYIPTF

SEQ ID NO: 394448 - protein, 19 aa, Homo sapiens
  CDR3 for beta chain variable domain of TCR clone 197224 (TRBV5-1, TRBJ2-5)
CASSLRPAAGVGYQETQYF

SEQ ID NO: 394449 - protein, 14 aa, Homo sapiens
  CDR3 for alpha chain variable domain of TCR clone 197225 (TRAV12-1, TRAJ9)
CVVNEGNGGFKTIF

SEQ ID NO: 394450 - protein, 16 aa, Homo sapiens
  CDR3 for beta chain variable domain of TCR clone 197225 (TRBV4-3, TRBJ2-2)
CASSQDRGSDTGELFF

SEQ ID NO: 394451 - protein, 14 aa, Homo sapiens
  CDR3 for alpha chain variable domain of TCR clone 197226 (TRAV1-2, TRAJ16)
CAVNRFSDGQKLLF

SEQ ID NO: 394452 - protein, 13 aa, Homo sapiens
  CDR3 for beta chain variable domain of TCR clone 197226 (TRBV2, TRBJ2-1)
CASISGGNNEQFF

SEQ ID NO: 394453 - protein, 18 aa, Homo sapiens
  CDR3 for alpha chain variable domain of TCR clone 197227 (TRAV16, TRAJ45)
CAQASYPSSGGGADGLTF

SEQ ID NO: 394454 - protein, 15 aa, Homo sapiens
  CDR3 for beta chain variable domain of TCR clone 197227 (TRBV9, TRBJ1-6)
CASSVAGTGDSPLHF

SEQ ID NO: 394455 - protein, 15 aa, Homo sapiens
  CDR3 for alpha chain variable domain of TCR clone 197228 (TRAV12-3, TRAJ10)
CASYILTGGGSKLTF

SEQ ID NO: 394456 - protein, 15 aa, Homo sapiens
  CDR3 for beta chain variable domain of TCR clone 197228 (TRBV7-2, TRBJ1-6)
CASSLGPDRGMPLLF

SEQ ID NO: 394457 - protein, 14 aa, Homo sapiens
  CDR3 for alpha chain variable domain of TCR clone 197229 (TRAV8-4, TRAJ5)
CAVSTDTGRRALTF

SEQ ID NO: 394458 - protein, 11 aa, Homo sapiens
  CDR3 for beta chain variable domain of TCR clone 197229 (TRBV4-1, TRBJ2-7)
CASSGPYEQYF

SEQ ID NO: 394459 - protein, 16 aa, Homo sapiens
  CDR3 for alpha chain variable domain of TCR clone 197230 (TRAV8-4, TRAJ5)
CAVSPLTDTGRRALTV

SEQ ID NO: 394460 - protein, 14 aa, Homo sapiens
  CDR3 for beta chain variable domain of TCR clone 197230 (TRBV19, TRBJ1-6)
CASSTDGWNSPLHF

SEQ ID NO: 394461 - protein, 18 aa, Homo sapiens
  CDR3 for alpha chain variable domain of TCR clone 197231 (TRAV26-2, TRAJ54)
CILRDVEVGIQGAQKLVF

SEQ ID NO: 394462 - protein, 17 aa, Homo sapiens
  CDR3 for beta chain variable domain of TCR clone 197231 (TRBV20-1, TRBJ1-5)
CSASLSPRQGGNQPQHF

SEQ ID NO: 394463 - protein, 15 aa, Homo sapiens
  CDR3 for alpha chain variable domain of TCR clone 197232 (TRAV21, TRAJ45)
CAVSYSGGGADGLTF

SEQ ID NO: 394464 - protein, 13 aa, Homo sapiens
  CDR3 for beta chain variable domain of TCR clone 197232 (TRBV20-1, TRBJ2-5)
GSAATGLQETQYF

SEQ ID NO: 394465 - protein, 14 aa, Homo sapiens
  CDR3 for alpha chain variable domain of TCR clone 197233 (TRAV1-2, TRAJ8)
CAVREGTGFQKLVF

SEQ ID NO: 394466 - protein, 16 aa, Homo sapiens
  CDR3 for beta chain variable domain of TCR clone 197233 (TRBV27, TRBJ2-3)
CAGSLQGNRGTDTQYF

SEQ ID NO: 394467 - protein, 14 aa, Homo sapiens
  CDR3 for alpha chain variable domain of TCR clone 197234 (TRAV26-1, TRAJ49)
CIVRLTNTGNQFYF

SEQ ID NO: 394468 - protein, 12 aa, Homo sapiens
  CDR3 for beta chain variable domain of TCR clone 197234 (TRBV11-2, TRBJ2-2)
CASSLGGRELFF

SEQ ID NO: 394469 - protein, 15 aa, Homo sapiens
  CDR3 for alpha chain variable domain of TCR clone 197235 (TRAV26-1, TRAJ23)
CIVRVAGYQGGKLIF

SEQ ID NO: 394470 - protein, 18 aa, Homo sapiens
  CDR3 for beta chain variable domain of TCR clone 197235 (TRBV28, TRBJ2-1)
CASSSTSGRATSYNEQFF

SEQ ID NO: 394471 - protein, 13 aa, Homo sapiens
  CDR3 for alpha chain variable domain of TCR clone 197236 (TRAV20, TRAJ48)
CAVQGGGNEKLTF

SEQ ID NO: 394472 - protein, 19 aa, Homo sapiens
  CDR3 for beta chain variable domain of TCR clone 197236 (TRBV2, TRBJ2-2)
CASSQPGLAGGGNTGELFF

SEQ ID NO: 394473 - protein, 14 aa, Homo sapiens
  CDR3 for alpha chain variable domain of TCR clone 197237 (TRAV8-3, TRAJ10)
CAVGNAGGGNKLTF

SEQ ID NO: 394474 - protein, 20 aa, Homo sapiens
  CDR3 for beta chain variable domain of TCR clone 197237 (TRBV7-8, TRBJ2-2)
CASSHLFPGPTIHITGELFF

SEQ ID NO: 394475 - protein, 14 aa, Homo sapiens
  CDR3 for alpha chain variable domain of TCR clone 197238 (TRAV12-2, TRAJ13)
CAVKKTGGYQKVTS

SEQ ID NO: 394476 - protein, 12 aa, Homo sapiens
  CDR3 for beta chain variable domain of TCR clone 197238 (TRBV29-1, TRBJ1-1)
CSESDGDTEAFF

SEQ ID NO: 394477 - protein, 12 aa, Homo sapiens
  CDR3 for alpha chain variable domain of TCR clone 197239 (TRAV17, TRAJ20)
CATDSNDYKLSF

SEQ ID NO: 394478 - protein, 17 aa, Homo sapiens
  CDR3 for beta chain variable domain of TCR clone 197239 (TRBV13, TRBJ2-3)
CASSLSRVAGGRNTQYF

SEQ ID NO: 394479 - protein, 14 aa, Homo sapiens
  CDR3 for alpha chain variable domain of TCR clone 197240 (TRAV12-2, TRAJ13)
CAVKKTGGYQKVTF

SEQ ID NO: 394480 - protein, 14 aa, Homo sapiens
  CDR3 for beta chain variable domain of TCR clone 197240 (TRBV4-2, TRBJ2-5)
CASSQERGRETQYF

SEQ ID NO: 394481 - protein, 14 aa, Homo sapiens
  CDR3 for alpha chain variable domain of TCR clone 197241 (TRAV21, TRAJ35)
CAVMPIGFANVLHC

SEQ ID NO: 394482 - protein, 12 aa, Homo sapiens
  CDR3 for beta chain variable domain of TCR clone 197241 (TRBV7-9, TRBJ2-7)
CASSIKREEQYF

SEQ ID NO: 394483 - protein, 13 aa, Homo sapiens
  CDR3 for alpha chain variable domain of TCR clone 197242 (TRAV21, TRAJ20)
CAVGLKVDYKLSF

SEQ ID NO: 394484 - protein, 15 aa, Homo sapiens
  CDR3 for beta chain variable domain of TCR clone 197242 (TRBV7-3, TRBJ2-1)
CASSPTGGGEVEQFF

SEQ ID NO: 394485 - protein, 12 aa, Homo sapiens
  CDR3 for alpha chain variable domain of TCR clone 197243 (TRAV12-1, TRAJ6)
CVVNSRSYILTF

SEQ ID NO: 394486 - protein, 11 aa, Homo sapiens
  CDR3 for beta chain variable domain of TCR clone 197243 (TRBV6-5, TRBJ2-1)
CASSLSGEQFF

SEQ ID NO: 394487 - protein, 14 aa, Homo sapiens
  CDR3 for alpha chain variable domain of TCR clone 197244 (TRAV38-1, TRAJ40)
CALRPTSGTYKYIF

SEQ ID NO: 394488 - protein, 12 aa, Homo sapiens
  CDR3 for beta chain variable domain of TCR clone 197244 (TRBV3-1, TRBJ2-2)
CASSLFPGELFF

SEQ ID NO: 394489 - protein, 10 aa, Homo sapiens
  CDR3 for alpha chain variable domain of TCR clone 197245 (TRAV12-2, TRAJ49)
CAVRRNQFYF

SEQ ID NO: 394490 - protein, 13 aa, Homo sapiens
  CDR3 for beta chain variable domain of TCR clone 197245 (TRBV7-9, TRBJ2-7)
CASSSDRIYEQYF

SEQ ID NO: 394491 - protein, 15 aa, Homo sapiens
  CDR3 for alpha chain variable domain of TCR clone 197246 (TRAV12-2, TRAJ43)
CAFDMRFGAGTRLTV

SEQ ID NO: 394492 - protein, 16 aa, Homo sapiens
  CDR3 for beta chain variable domain of TCR clone 197246 (TRBV11-2, TRBJ2-2)
CASRKPGQGFTGELFF

SEQ ID NO: 394493 - protein, 12 aa, Homo sapiens
  CDR3 for alpha chain variable domain of TCR clone 197247 (TRAV12-1, TRAJ40)
CVVYSGTYKYIF

SEQ ID NO: 394494 - protein, 13 aa, Homo sapiens
  CDR3 for beta chain variable domain of TCR clone 197247 (TRBV12-4, TRBJ2-1)
CASSHYTDNEQFF

SEQ ID NO: 394495 - protein, 10 aa, Homo sapiens
  CDR3 for alpha chain variable domain of TCR clone 197248 (TRAV4, TRAJ15)
CLPFWTALLF

SEQ ID NO: 394496 - protein, 15 aa, Homo sapiens
  CDR3 for beta chain variable domain of TCR clone 197248 (TRBV5-1, TRBJ2-1)
CASSFSGTGYNEQFF

SEQ ID NO: 394497 - protein, 15 aa, Homo sapiens
  CDR3 for alpha chain variable domain of TCR clone 197249 (TRAV36/DV7, TRAJ6)
CAVVGPSGGSYIPTF

SEQ ID NO: 394498 - protein, 14 aa, Homo sapiens
  CDR3 for beta chain variable domain of TCR clone 197249 (TRBV19, TRBJ2-1)
CASTTARTGNEQFF

SEQ ID NO: 394499 - protein, 13 aa, Homo sapiens
  CDR3 for alpha chain variable domain of TCR clone 197250 (TRAV12-3, TRAJ9)
CAMRNTGGFKTIF

SEQ ID NO: 394500 - protein, 16 aa, Homo sapiens
  CDR3 for beta chain variable domain of TCR clone 197250 (TRBV19, TRBJ2-1)
CTSSIDGSFAYNEQFF

SEQ ID NO: 394501 - protein, 15 aa, Homo sapiens
  CDR3 for alpha chain variable domain of TCR clone 197251 (TRAV21, TRAJ32)
CAVNSYVGATNKLIF

SEQ ID NO: 394502 - protein, 14 aa, Homo sapiens
  CDR3 for beta chain variable domain of TCR clone 197251 (TRBV7-2, TRBJ2-7)
CASSPKTSFYEQYF

SEQ ID NO: 394503 - protein, 13 aa, Homo sapiens
  CDR3 for alpha chain variable domain of TCR clone 197252 (TRAV21, TRAJ27)
CAARPGNAGKSTS

SEQ ID NO: 394504 - protein, 14 aa, Homo sapiens
  CDR3 for beta chain variable domain of TCR clone 197252 (TRBV20-1, TRBJ2-1)
CSAAGSGEYNEQFF

SEQ ID NO: 394505 - protein, 13 aa, Homo sapiens
  CDR3 for alpha chain variable domain of TCR clone 197253 (TRAV2, TRAJ27)
CAVEAPMQANQPL

SEQ ID NO: 394506 - protein, 15 aa, Homo sapiens
  CDR3 for beta chain variable domain of TCR clone 197253 (TRBV10-2, TRBJ2-3)
CASSESGTIRSILAQ

SEQ ID NO: 394507 - protein, 14 aa, Homo sapiens
  CDR3 for alpha chain variable domain of TCR clone 197254 (TRAV12-2, TRAJ24)
CAVNPADSWGKLQF

SEQ ID NO: 394508 - protein, 12 aa, Homo sapiens
  CDR3 for beta chain variable domain of TCR clone 197254 (TRBV5-1, TRBJ2-7)
CASSPRQGPQYF

SEQ ID NO: 394509 - protein, 11 aa, Homo sapiens
  CDR3 for alpha chain variable domain of TCR clone 197255 (TRAV3, TRAJ21)
CAVGNFNKFYF

SEQ ID NO: 394510 - protein, 15 aa, Homo sapiens
  CDR3 for beta chain variable domain of TCR clone 197255 (TRBV29-1, TRBJ2-1)
CSVGRHALFYNEQFF

SEQ ID NO: 394511 - protein, 15 aa, Homo sapiens
  CDR3 for alpha chain variable domain of TCR clone 197256 (TRAV20, TRAJ4)
CAVQVFSGGDNKLIF

SEQ ID NO: 394512 - protein, 14 aa, Homo sapiens
  CDR3 for beta chain variable domain of TCR clone 197256 (TRBV7-6, TRBJ2-3)
CASNSGGDANTQYF

SEQ ID NO: 394513 - protein, 11 aa, Homo sapiens
  CDR3 for alpha chain variable domain of TCR clone 197257 (TRAV2, TRAJ13)
CASGGYRKVTF

SEQ ID NO: 394514 - protein, 17 aa, Homo sapiens
  CDR3 for beta chain variable domain of TCR clone 197257 (TRBV20-1, TRBJ2-2)
CSASGSGQGGLTGELFF

SEQ ID NO: 394515 - protein, 12 aa, Homo sapiens
  CDR3 for alpha chain variable domain of TCR clone 197258 (TRAV13-2, TRAJ23)
CAERHRGGKLIF

SEQ ID NO: 394516 - protein, 15 aa, Homo sapiens
  CDR3 for beta chain variable domain of TCR clone 197258 (TRBV29-1, TRBJ2-7)
CSVEFFDRGSYEQYF

SEQ ID NO: 394517 - protein, 13 aa, Homo sapiens
  CDR3 for alpha chain variable domain of TCR clone 197259 (TRAV3, TRAJ36)
CAVKRTGANNLFF

SEQ ID NO: 394518 - protein, 12 aa, Homo sapiens
  CDR3 for beta chain variable domain of TCR clone 197259 (TRBV7-9, TRBJ2-7)
CASSIKREEQYF

SEQ ID NO: 394519 - protein, 18 aa, Homo sapiens
  CDR3 for alpha chain variable domain of TCR clone 197260 (TRAV21, TRAJ52)
CAVRPSPAGGTSYGKLTF

SEQ ID NO: 394520 - protein, 19 aa, Homo sapiens
  CDR3 for beta chain variable domain of TCR clone 197260 (TRBV7-2, TRBJ2-3)
CASSFLWRNWGGGTDTQYF

SEQ ID NO: 394521 - protein, 17 aa, Homo sapiens
  CDR3 for alpha chain variable domain of TCR clone 197261 (TRAV3, TRAJ6)
CAVRDGPRAGGSYIPTF

SEQ ID NO: 394522 - protein, 16 aa, Homo sapiens
  CDR3 for beta chain variable domain of TCR clone 197261 (TRBV2, TRBJ2-1)
CASSVGGSLSYSEQFF

SEQ ID NO: 394523 - protein, 16 aa, Homo sapiens
  CDR3 for alpha chain variable domain of TCR clone 197262 (TRAV30, TRAJ24)
CGTEIVDADSWGKFHF

SEQ ID NO: 394524 - protein, 13 aa, Homo sapiens
  CDR3 for beta chain variable domain of TCR clone 197262 (TRBV7-9, TRBJ1-2)
CASSLKQNYGYTF

SEQ ID NO: 394525 - protein, 11 aa, Homo sapiens
  CDR3 for alpha chain variable domain of TCR clone 197263 (TRAV1-2, TRAJ20)
CAVANDYKLSF

SEQ ID NO: 394526 - protein, 16 aa, Homo sapiens
  CDR3 for beta chain variable domain of TCR clone 197263 (TRBV2, TRBJ2-3)
CASSTSVEGVTDTQYF

SEQ ID NO: 394527 - protein, 14 aa, Homo sapiens
  CDR3 for alpha chain variable domain of TCR clone 197264 (TRAV12-1, TRAJ12)
CVVNGRDSSYKLIF

SEQ ID NO: 394528 - protein, 13 aa, Homo sapiens
  CDR3 for beta chain variable domain of TCR clone 197264 (TRBV28, TRBJ2-2)
CASIQESTGELFF

SEQ ID NO: 394529 - protein, 12 aa, Homo sapiens
  CDR3 for alpha chain variable domain of TCR clone 197265 (TRAV8-3, TRAJ41)
CAVALSVYALNF

SEQ ID NO: 394530 - protein, 16 aa, Homo sapiens
  CDR3 for beta chain variable domain of TCR clone 197265 (TRBV27, TRBJ2-7)
CASSSERRDSAYEQYF

SEQ ID NO: 394531 - protein, 13 aa, Homo sapiens
  CDR3 for alpha chain variable domain of TCR clone 197266 (TRAV13-2, TRAJ13)
CAERPGGYQKVTF

SEQ ID NO: 394532 - protein, 15 aa, Homo sapiens
  CDR3 for beta chain variable domain of TCR clone 197266 (TRBV11-3, TRBJ2-7)
CASSPGPASSYKQYF

SEQ ID NO: 394533 - protein, 13 aa, Homo sapiens
  CDR3 for alpha chain variable domain of TCR clone 197267 (TRAV8-6, TRAJ9)
CAVWGTGGFKTIF

SEQ ID NO: 394534 - protein, 14 aa, Homo sapiens
  CDR3 for beta chain variable domain of TCR clone 197267 (TRBV2, TRBJ2-1)
CASSEALIYNEQFF

SEQ ID NO: 394535 - protein, 14 aa, Homo sapiens
  CDR3 for alpha chain variable domain of TCR clone 197268 (TRAV12-2, TRAJ44)
CAVNPASTPSKLTF

SEQ ID NO: 394536 - protein, 13 aa, Homo sapiens
  CDR3 for beta chain variable domain of TCR clone 197268 (TRBV20-1, TRBJ1-6)
CSAPLGVGSPLHF

SEQ ID NO: 394537 - protein, 14 aa, Homo sapiens
  CDR3 for alpha chain variable domain of TCR clone 197269 (TRAV13-1, TRAJ40)
CAASMTSGTYKYIF

SEQ ID NO: 394538 - protein, 15 aa, Homo sapiens
  CDR3 for beta chain variable domain of TCR clone 197269 (TRBV4-1, TRBJ2-5)
CASSQWDLYQETQYF

SEQ ID NO: 394539 - protein, 14 aa, Homo sapiens
  CDR3 for alpha chain variable domain of TCR clone 197270 (TRAV12-2, TRAJ45)
CAVYSGGGADGLTF

SEQ ID NO: 394540 - protein, 14 aa, Homo sapiens
  CDR3 for beta chain variable domain of TCR clone 197270 (TRBV7-2, TRBJ2-2)
CASRGQGAAGELFF

SEQ ID NO: 394541 - protein, 14 aa, Homo sapiens
  CDR3 for alpha chain variable domain of TCR clone 197271 (TRAV2, TRAJ9)
CAVEDRSGGFKTIF

SEQ ID NO: 394542 - protein, 15 aa, Homo sapiens
  CDR3 for beta chain variable domain of TCR clone 197271 (TRBV19, TRBJ2-4)
CASRGPRRGENMQYF

SEQ ID NO: 394543 - protein, 16 aa, Homo sapiens
  CDR3 for alpha chain variable domain of TCR clone 197272 (TRAV3, TRAJ37)
CAVRVRGSGNPGKLIF

SEQ ID NO: 394544 - protein, 15 aa, Homo sapiens
  CDR3 for beta chain variable domain of TCR clone 197272 (TRBV9, TRBJ1-6)
CASSVAGTGDSPLHF

SEQ ID NO: 394545 - protein, 15 aa, Homo sapiens
  CDR3 for alpha chain variable domain of TCR clone 197273 (TRAV12-3, TRAJ6)
CAMSATTGGSYIPKF

SEQ ID NO: 394546 - protein, 16 aa, Homo sapiens
  CDR3 for beta chain variable domain of TCR clone 197273 (TRBV20-1, TRBJ1-2)
CSASMGQGVANYGYTF

SEQ ID NO: 394547 - protein, 15 aa, Homo sapiens
  CDR3 for alpha chain variable domain of TCR clone 197274 (TRAV26-1, TRAJ40)
CIVSFATSGTYKYSF

SEQ ID NO: 394548 - protein, 15 aa, Homo sapiens
  CDR3 for beta chain variable domain of TCR clone 197274 (TRBV5-7, TRBJ2-3)
CASSPGLATTDTQYF

SEQ ID NO: 394549 - protein, 14 aa, Homo sapiens
  CDR3 for alpha chain variable domain of TCR clone 197275 (TRAV20, TRAJ10)
CALRVEGGGNKLTF

SEQ ID NO: 394550 - protein, 13 aa, Homo sapiens
  CDR3 for beta chain variable domain of TCR clone 197275 (TRBV13, TRBJ2-2)
CASSPGLTGELFF

SEQ ID NO: 394551 - protein, 12 aa, Homo sapiens
  CDR3 for alpha chain variable domain of TCR clone 197276 (TRAV1-1, TRAJ39)
CAVPVVGNMLTF

SEQ ID NO: 394552 - protein, 15 aa, Homo sapiens
  CDR3 for beta chain variable domain of TCR clone 197276 (TRBV19, TRBJ1-6)
CASSTQEAVGSPLHF

SEQ ID NO: 394553 - protein, 13 aa, Homo sapiens
  CDR3 for alpha chain variable domain of TCR clone 197277 (TRAV8-6, TRAJ13)
CAVSSGGYQKVTF

SEQ ID NO: 394554 - protein, 15 aa, Homo sapiens
  CDR3 for beta chain variable domain of TCR clone 197277 (TRBV7-9, TRBJ2-7)
CASSFPMGQANEQYF

SEQ ID NO: 394555 - protein, 13 aa, Homo sapiens
  CDR3 for alpha chain variable domain of TCR clone 197278 (TRAV2, TRAJ10)
CAVETGGGNKLTF

SEQ ID NO: 394556 - protein, 14 aa, Homo sapiens
  CDR3 for beta chain variable domain of TCR clone 197278 (TRBV20-1, TRBJ2-3)
FSAGGRRGTDTQYF

SEQ ID NO: 394557 - protein, 14 aa, Homo sapiens
  CDR3 for alpha chain variable domain of TCR clone 197279 (TRAV1-2, TRAJ16)
CAVNRFSDGQKLLF

SEQ ID NO: 394558 - protein, 15 aa, Homo sapiens
  CDR3 for beta chain variable domain of TCR clone 197279 (TRBV7-2, TRBJ2-1)
CAISSGLAGGNEQFF

SEQ ID NO: 394559 - protein, 12 aa, Homo sapiens
  CDR3 for alpha chain variable domain of TCR clone 197280 (TRAV12-3, TRAJ17)
CAMTLTGNKLTF

SEQ ID NO: 394560 - protein, 16 aa, Homo sapiens
  CDR3 for beta chain variable domain of TCR clone 197280 (TRBV2, TRBJ2-4)
CASSEAPGGEQNIQYF

SEQ ID NO: 394561 - protein, 14 aa, Homo sapiens
  CDR3 for alpha chain variable domain of TCR clone 197281 (TRAV23/DV6, TRAJ4)
CAAPSSGGYNKLIF

SEQ ID NO: 394562 - protein, 16 aa, Homo sapiens
  CDR3 for beta chain variable domain of TCR clone 197281 (TRBV19, TRBJ1-1)
CASRFGGPVTDTEAFF

SEQ ID NO: 394563 - protein, 16 aa, Homo sapiens
  CDR3 for alpha chain variable domain of TCR clone 197282 (TRAV3, TRAJ7)
CAVREEEREQQTRVRE

SEQ ID NO: 394564 - protein, 12 aa, Homo sapiens
  CDR3 for beta chain variable domain of TCR clone 197282 (TRBV7-8, TRBJ2-7)
CASSLGDREQYF

SEQ ID NO: 394565 - protein, 14 aa, Homo sapiens
  CDR3 for alpha chain variable domain of TCR clone 197283 (TRAV17, TRAJ54)
CATDANQGAQKLVF

SEQ ID NO: 394566 - protein, 12 aa, Homo sapiens
  CDR3 for beta chain variable domain of TCR clone 197283 (TRBV6-3, TRBJ2-1)
CASSGSYNEQFV

SEQ ID NO: 394567 - protein, 13 aa, Homo sapiens
  CDR3 for alpha chain variable domain of TCR clone 197284 (TRAV12-2, TRAJ13)
CREETGGYQKVTF

SEQ ID NO: 394568 - protein, 14 aa, Homo sapiens
  CDR3 for beta chain variable domain of TCR clone 197284 (TRBV19, TRBJ2-1)
CASPTFVLISEQFF

SEQ ID NO: 394569 - protein, 15 aa, Homo sapiens
  CDR3 for alpha chain variable domain of TCR clone 197285 (TRAV8-3, TRAJ11)
CAVGLLNSGYGTLTF

SEQ ID NO: 394570 - protein, 16 aa, Homo sapiens
  CDR3 for beta chain variable domain of TCR clone 197285 (TRBV7-9, TRBJ1-2)
CASSLGFSSGEDGYSF

SEQ ID NO: 394571 - protein, 12 aa, Homo sapiens
  CDR3 for alpha chain variable domain of TCR clone 197286 (TRAV2, TRAJ9)
CAVGAGGCKTIC

SEQ ID NO: 394572 - protein, 16 aa, Homo sapiens
  CDR3 for beta chain variable domain of TCR clone 197286 (TRBV13, TRBJ2-2)
CASSPRTGEHTGELFF

SEQ ID NO: 394573 - protein, 14 aa, Homo sapiens
  CDR3 for alpha chain variable domain of TCR clone 197287 (TRAV1-1, TRAJ27)
CAVIYNTNAGKSTF

SEQ ID NO: 394574 - protein, 16 aa, Homo sapiens
  CDR3 for beta chain variable domain of TCR clone 197287 (TRBV5-1, TRBJ2-1)
FAPAADAGLVDYEQFF

SEQ ID NO: 394575 - protein, 16 aa, Homo sapiens
  CDR3 for alpha chain variable domain of TCR clone 197288 (TRAV3, TRAJ37)
CAVRPHGSGNTGKLIF

SEQ ID NO: 394576 - protein, 14 aa, Homo sapiens
  CDR3 for beta chain variable domain of TCR clone 197288 (TRBV19, TRBJ2-2)
CATTGHANTGELFF

SEQ ID NO: 394577 - protein, 12 aa, Homo sapiens
  CDR3 for alpha chain variable domain of TCR clone 197289 (TRAV25, TRAJ11)
CAGASGYSTVTF

SEQ ID NO: 394578 - protein, 14 aa, Homo sapiens
  CDR3 for beta chain variable domain of TCR clone 197289 (TRBV5-8, TRBJ2-3)
CASSLGQGTDTQYF

SEQ ID NO: 394579 - protein, 12 aa, Homo sapiens
  CDR3 for alpha chain variable domain of TCR clone 197290 (TRAV12-2, TRAJ47)
CAVAEYGNKLVF

SEQ ID NO: 394580 - protein, 14 aa, Homo sapiens
  CDR3 for beta chain variable domain of TCR clone 197290 (TRBV20-1, TRBJ1-1)
CSAMGGTTNTEAFF

SEQ ID NO: 394581 - protein, 12 aa, Homo sapiens
  CDR3 for alpha chain variable domain of TCR clone 197291 (TRAV17, TRAJ57)
CATDGGSEKLVF

SEQ ID NO: 394582 - protein, 15 aa, Homo sapiens
  CDR3 for beta chain variable domain of TCR clone 197291 (TRBV12-4, TRBJ2-5)
CASSPPTGLQETQYF

SEQ ID NO: 394583 - protein, 12 aa, Homo sapiens
  CDR3 for alpha chain variable domain of TCR clone 197292 (TRAV23/DV6, TRAJ24)
CAANDSWGKSQF

SEQ ID NO: 394584 - protein, 16 aa, Homo sapiens
  CDR3 for beta chain variable domain of TCR clone 197292 (TRBV12-4, TRBJ2-5)
CASSLSTSGGKETQYF

SEQ ID NO: 394585 - protein, 16 aa, Homo sapiens
  CDR3 for alpha chain variable domain of TCR clone 197293 (TRAV26-1, TRAJ33)
CIVPFWGEDSNYQLIW

SEQ ID NO: 394586 - protein, 15 aa, Homo sapiens
  CDR3 for beta chain variable domain of TCR clone 197293 (TRBV2, TRBJ2-3)
CASSDFEKATDTQYF

SEQ ID NO: 394587 - protein, 13 aa, Homo sapiens
  CDR3 for alpha chain variable domain of TCR clone 197294 (TRAV8-1, TRAJ23)
CAWRGNQGGKLIF

SEQ ID NO: 394588 - protein, 13 aa, Homo sapiens
  CDR3 for beta chain variable domain of TCR clone 197294 (TRBV20-1, TRBJ2-7)
CSATHTSGYEQYF

SEQ ID NO: 394589 - protein, 15 aa, Homo sapiens
  CDR3 for alpha chain variable domain of TCR clone 197295 (TRAV21, TRAJ57)
CAVIITQGGSEKLVF

SEQ ID NO: 394590 - protein, 14 aa, Homo sapiens
  CDR3 for beta chain variable domain of TCR clone 197295 (TRBV11-2, TRBJ2-7)
CASSLGAGAYEQYF

SEQ ID NO: 394591 - protein, 13 aa, Homo sapiens
  CDR3 for alpha chain variable domain of TCR clone 197296 (TRAV8-6, TRAJ40)
CAVSETGTYKYIF

SEQ ID NO: 394592 - protein, 15 aa, Homo sapiens
  CDR3 for beta chain variable domain of TCR clone 197296 (TRBV4-1, TRBJ2-3)
CASGRGQGIPDTQYF

SEQ ID NO: 394593 - protein, 14 aa, Homo sapiens
  CDR3 for alpha chain variable domain of TCR clone 197297 (TRAV13-1, TRAJ9)
CAASALTGGFKTIF

SEQ ID NO: 394594 - protein, 12 aa, Homo sapiens
  CDR3 for beta chain variable domain of TCR clone 197297 (TRBV5-1, TRBJ2-3)
CASSLAADTQYF

SEQ ID NO: 394595 - protein, 13 aa, Homo sapiens
  CDR3 for alpha chain variable domain of TCR clone 197298 (TRAV36/DV7, TRAJ38)
CVANAGNNRKLIW

SEQ ID NO: 394596 - protein, 14 aa, Homo sapiens
  CDR3 for beta chain variable domain of TCR clone 197298 (TRBV7-2, TRBJ2-7)
CANSLRWEVNGQYF

SEQ ID NO: 394597 - protein, 16 aa, Homo sapiens
  CDR3 for alpha chain variable domain of TCR clone 197299 (TRAV27, TRAJ48)
TAAQPGDTGLYLPLTF

SEQ ID NO: 394598 - protein, 20 aa, Homo sapiens
  CDR3 for beta chain variable domain of TCR clone 197299 (TRBV7-8, TRBJ2-2)
CASSHLFPGPTIHITGELFF

SEQ ID NO: 394599 - protein, 12 aa, Homo sapiens
  CDR3 for alpha chain variable domain of TCR clone 197300 (TRAV17, TRAJ20)
CATDSNDYKLSF

SEQ ID NO: 394600 - protein, 16 aa, Homo sapiens
  CDR3 for beta chain variable domain of TCR clone 197300 (TRBV7-3, TRBJ2-2)
CASSLKRGTLSGELFF

SEQ ID NO: 394601 - protein, 15 aa, Homo sapiens
  CDR3 for alpha chain variable domain of TCR clone 197301 (TRAV2, TRAJ9)
CAVEDRGTGGFKTIF

SEQ ID NO: 394602 - protein, 13 aa, Homo sapiens
  CDR3 for beta chain variable domain of TCR clone 197301 (TRBV19, TRBJ1-2)
CAGSVPGQDGYTF

SEQ ID NO: 394603 - protein, 12 aa, Homo sapiens
  CDR3 for alpha chain variable domain of TCR clone 197302 (TRAV27, TRAJ35)
CAGANFGNVLHG

SEQ ID NO: 394604 - protein, 16 aa, Homo sapiens
  CDR3 for beta chain variable domain of TCR clone 197302 (TRBV6-1, TRBJ2-1)
CASILRQGSSYNEQFF

SEQ ID NO: 394605 - protein, 15 aa, Homo sapiens
  CDR3 for alpha chain variable domain of TCR clone 197303 (TRAV12-3, TRAJ6)
CAMSATTGGSYIPTF

SEQ ID NO: 394606 - protein, 16 aa, Homo sapiens
  CDR3 for beta chain variable domain of TCR clone 197303 (TRBV12-4, TRBJ2-5)
CASSFFVRGRQETQYF

SEQ ID NO: 394607 - protein, 11 aa, Homo sapiens
  CDR3 for alpha chain variable domain of TCR clone 197304 (TRAV2, TRAJ33)
CAVDSNYQLIW

SEQ ID NO: 394608 - protein, 15 aa, Homo sapiens
  CDR3 for beta chain variable domain of TCR clone 197304 (TRBV19, TRBJ1-1)
CASTSGQIKNTEAFF

SEQ ID NO: 394609 - protein, 17 aa, Homo sapiens
  CDR3 for alpha chain variable domain of TCR clone 197305 (TRAV26-1, TRAJ28)
CIVRVPDSGAGSYQLNF

SEQ ID NO: 394610 - protein, 17 aa, Homo sapiens
  CDR3 for beta chain variable domain of TCR clone 197305 (TRBV28, TRBJ2-7)
CASSPLPAGGKSYEQYF

SEQ ID NO: 394611 - protein, 13 aa, Homo sapiens
  CDR3 for alpha chain variable domain of TCR clone 197306 (TRAV36/DV7, TRAJ29)
CAVEPSGNTPLVF

SEQ ID NO: 394612 - protein, 16 aa, Homo sapiens
  CDR3 for beta chain variable domain of TCR clone 197306 (TRBV4-2, TRBJ1-5)
CASSQGQGASNQPQHF

SEQ ID NO: 394613 - protein, 14 aa, Homo sapiens
  CDR3 for alpha chain variable domain of TCR clone 197307 (TRAV12-1, TRAJ6)
CVVARIRRKLHTYI

SEQ ID NO: 394614 - protein, 15 aa, Homo sapiens
  CDR3 for beta chain variable domain of TCR clone 197307 (TRBV7-3, TRBJ2-1)
CASSSKASEYNERFF

SEQ ID NO: 394615 - protein, 14 aa, Homo sapiens
  CDR3 for alpha chain variable domain of TCR clone 197308 (TRAV12-2, TRAJ17)
CAVLFKAAGNKLTF

SEQ ID NO: 394616 - protein, 17 aa, Homo sapiens
  CDR3 for beta chain variable domain of TCR clone 197308 (TRBV20-1, TRBJ2-1)
CSARDPLAGVWDNEQFF

SEQ ID NO: 394617 - protein, 12 aa, Homo sapiens
  CDR3 for alpha chain variable domain of TCR clone 197309 (TRAV12-3, TRAJ17)
CAMTLIGNKLTF

SEQ ID NO: 394618 - protein, 12 aa, Homo sapiens
  CDR3 for beta chain variable domain of TCR clone 197309 (TRBV7-9, TRBJ2-3)
CASSFITDTQYF

SEQ ID NO: 394619 - protein, 14 aa, Homo sapiens
  CDR3 for alpha chain variable domain of TCR clone 197310 (TRAV17, TRAJ33)
CATDARRSNYQLTW

SEQ ID NO: 394620 - protein, 14 aa, Homo sapiens
  CDR3 for beta chain variable domain of TCR clone 197310 (TRBV25-1, TRBJ1-4)
CASSGGGQPEKLFF

SEQ ID NO: 394621 - protein, 14 aa, Homo sapiens
  CDR3 for alpha chain variable domain of TCR clone 197311 (TRAV20, TRAJ56)
CAVQFGGANSKLTF

SEQ ID NO: 394622 - protein, 14 aa, Homo sapiens
  CDR3 for beta chain variable domain of TCR clone 197311 (TRBV20-1, TRBJ2-7)
CSAKRGGSPYEQYF

SEQ ID NO: 394623 - protein, 16 aa, Homo sapiens
  CDR3 for alpha chain variable domain of TCR clone 197312 (TRAV3, TRAJ37)
CAVRGKGSGNTGKLIF

SEQ ID NO: 394624 - protein, 13 aa, Homo sapiens
  CDR3 for beta chain variable domain of TCR clone 197312 (TRBV6-1, TRBJ1-3)
CSVQGGGGNTIYF

SEQ ID NO: 394625 - protein, 16 aa, Homo sapiens
  CDR3 for alpha chain variable domain of TCR clone 197313 (TRAV21, TRAJ37)
CAVRTAGSSNTGKLIF

SEQ ID NO: 394626 - protein, 18 aa, Homo sapiens
  CDR3 for beta chain variable domain of TCR clone 197313 (TRBV7-7, TRBJ2-1)
CASSLALTSGRSYNEQFF

SEQ ID NO: 394627 - protein, 15 aa, Homo sapiens
  CDR3 for alpha chain variable domain of TCR clone 197314 (TRAV3, TRAJ22)
CAVRDRGGSARQLTF

SEQ ID NO: 394628 - protein, 14 aa, Homo sapiens
  CDR3 for beta chain variable domain of TCR clone 197314 (TRBV7-3, TRBJ2-1)
CASSLSGSYNEQFF

SEQ ID NO: 394629 - protein, 14 aa, Homo sapiens
  CDR3 for alpha chain variable domain of TCR clone 197315 (TRAV8-3, TRAJ9)
CAVVYNTGGFKTIF

SEQ ID NO: 394630 - protein, 14 aa, Homo sapiens
  CDR3 for beta chain variable domain of TCR clone 197315 (TRBV7-3, TRBJ2-2)
CASSSEGYTGELFF

SEQ ID NO: 394631 - protein, 15 aa, Homo sapiens
  CDR3 for alpha chain variable domain of TCR clone 197316 (TRAV8-3, TRAJ45)
CASSYSGGGADGLTF

SEQ ID NO: 394632 - protein, 15 aa, Homo sapiens
  CDR3 for beta chain variable domain of TCR clone 197316 (TRBV12-4, TRBJ2-2)
CASSRQGANTGELFF

SEQ ID NO: 394633 - protein, 12 aa, Homo sapiens
  CDR3 for alpha chain variable domain of TCR clone 197317 (TRAV4, TRAJ6)
CLAPGGSYIPTF

SEQ ID NO: 394634 - protein, 16 aa, Homo sapiens
  CDR3 for beta chain variable domain of TCR clone 197317 (TRBV7-3, TRBJ2-2)
CASSLKRGTLSGELFF

SEQ ID NO: 394635 - protein, 15 aa, Homo sapiens
  CDR3 for alpha chain variable domain of TCR clone 197318 (TRAV4, TRAJ8)
CLVGEQHTGFQKLVF

SEQ ID NO: 394636 - protein, 15 aa, Homo sapiens
  CDR3 for beta chain variable domain of TCR clone 197318 (TRBV7-9, TRBJ2-5)
CASSNRDYLQETQYC

SEQ ID NO: 394637 - protein, 16 aa, Homo sapiens
  CDR3 for alpha chain variable domain of TCR clone 197319 (TRAV12-1, TRAJ8)
CVVNGRGNTGFQKLVL

SEQ ID NO: 394638 - protein, 15 aa, Homo sapiens
  CDR3 for beta chain variable domain of TCR clone 197319 (TRBV6-1, TRBJ1-2)
CASNPGRGGSYGYTF

SEQ ID NO: 394639 - protein, 12 aa, Homo sapiens
  CDR3 for alpha chain variable domain of TCR clone 197320 (TRAV17, TRAJ26)
CATVGYGQNFVF

SEQ ID NO: 394640 - protein, 15 aa, Homo sapiens
  CDR3 for beta chain variable domain of TCR clone 197320 (TRBV6-4, TRBJ2-1)
CASSSGTSGYNEQFF

SEQ ID NO: 394641 - protein, 14 aa, Homo sapiens
  CDR3 for alpha chain variable domain of TCR clone 197321 (TRAV12-3, TRAJ10)
SHLPLTGGGNKLTF

SEQ ID NO: 394642 - protein, 13 aa, Homo sapiens
  CDR3 for beta chain variable domain of TCR clone 197321 (TRBV20-1, TRBJ2-5)
CSARGDYQETKYF

SEQ ID NO: 394643 - protein, 14 aa, Homo sapiens
  CDR3 for alpha chain variable domain of TCR clone 197322 (TRAV21, TRAJ45)
CAVVSGGGAAGLPF

SEQ ID NO: 394644 - protein, 14 aa, Homo sapiens
  CDR3 for beta chain variable domain of TCR clone 197322 (TRBV20-1, TRBJ2-3)
CSALGLEGADTQYF

SEQ ID NO: 394645 - protein, 15 aa, Homo sapiens
  CDR3 for alpha chain variable domain of TCR clone 197323 (TRAV8-3, TRAJ45)
CASSYSGGGADGLTF

SEQ ID NO: 394646 - protein, 14 aa, Homo sapiens
  CDR3 for beta chain variable domain of TCR clone 197323 (TRBV12-4, TRBJ1-1)
CASSLNDMNTEAFF

SEQ ID NO: 394647 - protein, 14 aa, Homo sapiens
  CDR3 for alpha chain variable domain of TCR clone 197324 (TRAV26-1, TRAJ39)
CIVRGSRTGNMLTF

SEQ ID NO: 394648 - protein, 15 aa, Homo sapiens
  CDR3 for beta chain variable domain of TCR clone 197324 (TRBV7-9, TRBJ1-5)
CASSQGHQPNQPQHF

SEQ ID NO: 394649 - protein, 12 aa, Homo sapiens
  CDR3 for alpha chain variable domain of TCR clone 197325 (TRAV12-3, TRAJ21)
CAMFNNFKKFYF

SEQ ID NO: 394650 - protein, 16 aa, Homo sapiens
  CDR3 for beta chain variable domain of TCR clone 197325 (TRBV7-9, TRBJ1-2)
CASSLAPLRAAYGYTF

SEQ ID NO: 394651 - protein, 14 aa, Homo sapiens
  CDR3 for alpha chain variable domain of TCR clone 197326 (TRAV17, TRAJ22)
CATSPSGSARKLTF

SEQ ID NO: 394652 - protein, 15 aa, Homo sapiens
  CDR3 for beta chain variable domain of TCR clone 197326 (TRBV6-3, TRBJ2-7)
CASSSPGTVFYEQYF

SEQ ID NO: 394653 - protein, 15 aa, Homo sapiens
  CDR3 for alpha chain variable domain of TCR clone 197327 (TRAV26-1, TRAJ56)
CIVRVDSGANSKLTF

SEQ ID NO: 394654 - protein, 15 aa, Homo sapiens
  CDR3 for beta chain variable domain of TCR clone 197327 (TRBV20-1, TRBJ2-7)
CSARDPTEVGHEQYF

SEQ ID NO: 394655 - protein, 11 aa, Homo sapiens
  CDR3 for alpha chain variable domain of TCR clone 197328 (TRAV17, TRAJ43)
CATDLHNDMRF

SEQ ID NO: 394656 - protein, 16 aa, Homo sapiens
  CDR3 for beta chain variable domain of TCR clone 197328 (TRBV11-2, TRBJ1-2)
CASSLDTGGADYGYAF

SEQ ID NO: 394657 - protein, 18 aa, Homo sapiens
  CDR3 for alpha chain variable domain of TCR clone 197329 (TRAV3, TRAJ17)
CAVRARRGGRSCRPQANF

SEQ ID NO: 394658 - protein, 14 aa, Homo sapiens
  CDR3 for beta chain variable domain of TCR clone 197329 (TRBV4-1, TRBJ2-2)
CASSQAVNTGELFF

SEQ ID NO: 394659 - protein, 16 aa, Homo sapiens
  CDR3 for alpha chain variable domain of TCR clone 197330 (TRAV30, TRAJ24)
CGTEIVDADSWGKFQF

SEQ ID NO: 394660 - protein, 23 aa, Homo sapiens
  CDR3 for beta chain variable domain of TCR clone 197330 (TRBV12-5, TRBJ2-7)
AIPMARRHWSHPDTKAQGDREYF

SEQ ID NO: 394661 - protein, 16 aa, Homo sapiens
  CDR3 for alpha chain variable domain of TCR clone 197331 (TRAV13-1, TRAJ48)
CAASIFGNFGNEKSTF

SEQ ID NO: 394662 - protein, 14 aa, Homo sapiens
  CDR3 for beta chain variable domain of TCR clone 197331 (TRBV7-3, TRBJ1-1)
CASSLKGGNTEAFF

SEQ ID NO: 394663 - protein, 17 aa, Homo sapiens
  CDR3 for alpha chain variable domain of TCR clone 197332 (TRAV17, TRAJ52)
CATDRNAGGTSYGKLTF

SEQ ID NO: 394664 - protein, 14 aa, Homo sapiens
  CDR3 for beta chain variable domain of TCR clone 197332 (TRBV7-8, TRBJ2-3)
CASSLEAGTDTQYF

SEQ ID NO: 394665 - protein, 18 aa, Homo sapiens
  CDR3 for alpha chain variable domain of TCR clone 197333 (TRAV21, TRAJ52)
CAVRPSPAGGTSYRKLTF

SEQ ID NO: 394666 - protein, 17 aa, Homo sapiens
  CDR3 for beta chain variable domain of TCR clone 197333 (TRBV13, TRBJ2-3)
CASILSRVAGGRNTQYF

SEQ ID NO: 394667 - protein, 13 aa, Homo sapiens
  CDR3 for alpha chain variable domain of TCR clone 197334 (TRAV12-2, TRAJ4)
CAGFSGGYNKLIF

SEQ ID NO: 394668 - protein, 15 aa, Homo sapiens
  CDR3 for beta chain variable domain of TCR clone 197334 (TRBV4-1, TRBJ1-4)
CASSDTGGTNEKLFF

SEQ ID NO: 394669 - protein, 14 aa, Homo sapiens
  CDR3 for alpha chain variable domain of TCR clone 197335 (TRAV13-2, TRAJ29)
CAEGTFEKNTPLVF

SEQ ID NO: 394670 - protein, 13 aa, Homo sapiens
  CDR3 for beta chain variable domain of TCR clone 197335 (TRBV2, TRBJ1-1)
CASNLLRNTEAFF

SEQ ID NO: 394671 - protein, 11 aa, Homo sapiens
  CDR3 for alpha chain variable domain of TCR clone 197336 (TRAV36/DV7, TRAJ20)
CAANNDYKLSF

SEQ ID NO: 394672 - protein, 12 aa, Homo sapiens
  CDR3 for beta chain variable domain of TCR clone 197336 (TRBV2, TRBJ2-1)
CAYGPPGNEQFF

SEQ ID NO: 394673 - protein, 17 aa, Homo sapiens
  CDR3 for alpha chain variable domain of TCR clone 197337 (TRAV35, TRAJ38)
CAGQLQRNAGNNRKLFW

SEQ ID NO: 394674 - protein, 15 aa, Homo sapiens
  CDR3 for beta chain variable domain of TCR clone 197337 (TRBV7-9, TRBJ2-1)
CASSLGLAGGTEQFF

SEQ ID NO: 394675 - protein, 13 aa, Homo sapiens
  CDR3 for alpha chain variable domain of TCR clone 197338 (TRAV12-2, TRAJ12)
CASPEDSSYKLIF

SEQ ID NO: 394676 - protein, 13 aa, Homo sapiens
  CDR3 for beta chain variable domain of TCR clone 197338 (TRBV28, TRBJ2-1)
CASSLIGGDEQFF

SEQ ID NO: 394677 - protein, 12 aa, Homo sapiens
  CDR3 for alpha chain variable domain of TCR clone 197339 (TRAV13-1, TRAJ48)
CAANFGNEKLTF

SEQ ID NO: 394678 - protein, 15 aa, Homo sapiens
  CDR3 for beta chain variable domain of TCR clone 197339 (TRBV11-1, TRBJ2-7)
CASSLNYGASYEQYF

SEQ ID NO: 394679 - protein, 16 aa, Homo sapiens
  CDR3 for alpha chain variable domain of TCR clone 197340 (TRAV3, TRAJ42)
CAVRDIEGGSQGNLIF

SEQ ID NO: 394680 - protein, 14 aa, Homo sapiens
  CDR3 for beta chain variable domain of TCR clone 197340 (TRBV18, TRBJ1-1)
RASSPPTGRTEAFF

SEQ ID NO: 394681 - protein, 15 aa, Homo sapiens
  CDR3 for alpha chain variable domain of TCR clone 197341 (TRAV38-1, TRAJ37)
CAFIFGSGNTVKLIF

SEQ ID NO: 394682 - protein, 12 aa, Homo sapiens
  CDR3 for beta chain variable domain of TCR clone 197341 (TRBV7-9, TRBJ2-7)
CTSSLEGYEQYF

SEQ ID NO: 394683 - protein, 13 aa, Homo sapiens
  CDR3 for alpha chain variable domain of TCR clone 197342 (TRAV26-2, TRAJ37)
CIRGSSNPGKLIF

SEQ ID NO: 394684 - protein, 16 aa, Homo sapiens
  CDR3 for beta chain variable domain of TCR clone 197342 (TRBV7-2, TRBJ2-5)
CASSPGGARRGETQYF

SEQ ID NO: 394685 - protein, 14 aa, Homo sapiens
  CDR3 for alpha chain variable domain of TCR clone 197343 (TRAV12-3, TRAJ56)
CAMSVTGAYSKLTF

SEQ ID NO: 394686 - protein, 17 aa, Homo sapiens
  CDR3 for beta chain variable domain of TCR clone 197343 (TRBV20-1, TRBJ2-3)
CSASLLGRGGSADTQYF

SEQ ID NO: 394687 - protein, 15 aa, Homo sapiens
  CDR3 for alpha chain variable domain of TCR clone 197344 (TRAV3, TRAJ17)
CAVRATGAAGNKLTF

SEQ ID NO: 394688 - protein, 14 aa, Homo sapiens
  CDR3 for beta chain variable domain of TCR clone 197344 (TRBV6-3, TRBJ1-1)
CASSNLLPGAEAVF

SEQ ID NO: 394689 - protein, 16 aa, Homo sapiens
  CDR3 for alpha chain variable domain of TCR clone 197345 (TRAV3, TRAJ10)
CAVRDMNAGGGNKLTF

SEQ ID NO: 394690 - protein, 15 aa, Homo sapiens
  CDR3 for beta chain variable domain of TCR clone 197345 (TRBV28, TRBJ2-2)
CASTVAGANTGELFF

SEQ ID NO: 394691 - protein, 13 aa, Homo sapiens
  CDR3 for alpha chain variable domain of TCR clone 197346 (TRAV21, TRAJ20)
CAVGLRVDYKLSF

SEQ ID NO: 394692 - protein, 15 aa, Homo sapiens
  CDR3 for beta chain variable domain of TCR clone 197346 (TRBV7-3, TRBJ2-1)
CASSLDGNSYNEQFF

SEQ ID NO: 394693 - protein, 21 aa, Homo sapiens
  CDR3 for alpha chain variable domain of TCR clone 197347 (TRAV27, TRAJ11)
CAGARVASPLGRGLCFESLQI

SEQ ID NO: 394694 - protein, 13 aa, Homo sapiens
  CDR3 for beta chain variable domain of TCR clone 197347 (TRBV20-1, TRBJ2-1)
CSASTGGYNEQFF

SEQ ID NO: 394695 - protein, 16 aa, Homo sapiens
  CDR3 for alpha chain variable domain of TCR clone 197348 (TRAV38-1, TRAJ45)
CAFMKGSGGGADGLTF

SEQ ID NO: 394696 - protein, 15 aa, Homo sapiens
  CDR3 for beta chain variable domain of TCR clone 197348 (TRBV20-1, TRBJ2-7)
CSAREGRGSLYEQYF

SEQ ID NO: 394697 - protein, 16 aa, Homo sapiens
  CDR3 for alpha chain variable domain of TCR clone 197349 (TRAV30, TRAJ24)
CGTEIVAADSWGKFQF

SEQ ID NO: 394698 - protein, 14 aa, Homo sapiens
  CDR3 for beta chain variable domain of TCR clone 197349 (TRBV12-5, TRBJ2-5)
CASGSRKHQETQYF

SEQ ID NO: 394699 - protein, 14 aa, Homo sapiens
  CDR3 for alpha chain variable domain of TCR clone 197350 (TRAV1-2, TRAJ8)
CAVREDTGFQKLVF

SEQ ID NO: 394700 - protein, 15 aa, Homo sapiens
  CDR3 for beta chain variable domain of TCR clone 197350 (TRBV7-2, TRBJ2-7)
CASSTRLAGVDEQYF

SEQ ID NO: 394701 - protein, 23 aa, Homo sapiens
  CDR3 for alpha chain variable domain of TCR clone 197351 (TRAV8-1, TRAJ5)
CAVKTEQPGRRAGRNLLLGVEQE

SEQ ID NO: 394702 - protein, 15 aa, Homo sapiens
  CDR3 for beta chain variable domain of TCR clone 197351 (TRBV7-3, TRBJ2-1)
CASSLAGAGADEQFF

SEQ ID NO: 394703 - protein, 21 aa, Homo sapiens
  CDR3 for alpha chain variable domain of TCR clone 197352 (TRAV3, )
CAVRPTPAIQNPDPAVYQLRD

SEQ ID NO: 394704 - protein, 15 aa, Homo sapiens
  CDR3 for beta chain variable domain of TCR clone 197352 (TRBV11-3, TRBJ2-5)
CASSDTSGGIETQYF

SEQ ID NO: 394705 - protein, 11 aa, Homo sapiens
  CDR3 for alpha chain variable domain of TCR clone 197353 (TRAV27, TRAJ41)
CRKKFRYALNF

SEQ ID NO: 394706 - protein, 13 aa, Homo sapiens
  CDR3 for beta chain variable domain of TCR clone 197353 (TRBV12-4, TRBJ1-1)
CASSPGTGFEAFF

SEQ ID NO: 394707 - protein, 11 aa, Homo sapiens
  CDR3 for alpha chain variable domain of TCR clone 197354 (TRAV12-2, TRAJ29)
CAVTIRSPLVF

SEQ ID NO: 394708 - protein, 16 aa, Homo sapiens
  CDR3 for beta chain variable domain of TCR clone 197354 (TRBV19, TRBJ1-5)
CASSIDRGGPRQPQHF

SEQ ID NO: 394709 - protein, 23 aa, Homo sapiens
  CDR3 for alpha chain variable domain of TCR clone 197355 (TRAV8-4, TRAJ38)
CARLNAGNNHIQNPDPAGYQLRD

SEQ ID NO: 394710 - protein, 12 aa, Homo sapiens
  CDR3 for beta chain variable domain of TCR clone 197355 (TRBV6-1, TRBJ2-7)
CASSEPLYEQYF

SEQ ID NO: 394711 - protein, 20 aa, Homo sapiens
  CDR3 for alpha chain variable domain of TCR clone 197356 (TRAV12-1, TRAJ42)
SSVIQPPTSVKGGSQGNLIF

SEQ ID NO: 394712 - protein, 18 aa, Homo sapiens
  CDR3 for beta chain variable domain of TCR clone 197356 (TRBV11-2, TRBJ2-3)
CASSLGGASRGAPNAQYF

SEQ ID NO: 394713 - protein, 10 aa, Homo sapiens
  CDR3 for alpha chain variable domain of TCR clone 197357 (TRAV1-2, TRAJ20)
CALNDYKLSL

SEQ ID NO: 394714 - protein, 17 aa, Homo sapiens
  CDR3 for beta chain variable domain of TCR clone 197357 (TRBV13, TRBJ2-3)
CASSLSRVAGGRNTQYF

SEQ ID NO: 394715 - protein, 13 aa, Homo sapiens
  CDR3 for alpha chain variable domain of TCR clone 197358 (TRAV2, TRAJ24)
CAVTTDSGGKLQF

SEQ ID NO: 394716 - protein, 14 aa, Homo sapiens
  CDR3 for beta chain variable domain of TCR clone 197358 (TRBV13, TRBJ2-5)
CASSLGREQETQYF

SEQ ID NO: 394717 - protein, 14 aa, Homo sapiens
  CDR3 for alpha chain variable domain of TCR clone 197359 (TRAV1-2, TRAJ16)
CAVNRFSDGQKLLF

SEQ ID NO: 394718 - protein, 17 aa, Homo sapiens
  CDR3 for beta chain variable domain of TCR clone 197359 (TRBV5-1, TRBJ2-2)
CASSLAGSSGGTGELFF

SEQ ID NO: 394719 - protein, 15 aa, Homo sapiens
  CDR3 for alpha chain variable domain of TCR clone 197360 (TRAV21, TRAJ24)
CAARSSTDSWGKLQF

SEQ ID NO: 394720 - protein, 17 aa, Homo sapiens
  CDR3 for beta chain variable domain of TCR clone 197360 (TRBV6-6, TRBJ2-1)
CASSYRPGWSSYNEQFF

SEQ ID NO: 394721 - protein, 14 aa, Homo sapiens
  CDR3 for alpha chain variable domain of TCR clone 197361 (TRAV3, TRAJ8)
CAVSLNTGFQKLGF

SEQ ID NO: 394722 - protein, 14 aa, Homo sapiens
  CDR3 for beta chain variable domain of TCR clone 197361 (TRBV6-6, TRBJ1-5)
CASVDSGFNQPQHF

SEQ ID NO: 394723 - protein, 12 aa, Homo sapiens
  CDR3 for alpha chain variable domain of TCR clone 197362 (TRAV12-3, TRAJ17)
CAMTLTGNKLTF

SEQ ID NO: 394724 - protein, 16 aa, Homo sapiens
  CDR3 for beta chain variable domain of TCR clone 197362 (TRBV12-4, TRBJ2-5)
CASSFFVRGGQETQYF

SEQ ID NO: 394725 - protein, 14 aa, Homo sapiens
  CDR3 for alpha chain variable domain of TCR clone 197363 (TRAV26-1, TRAJ45)
CIEVTGGGADGLTF

SEQ ID NO: 394726 - protein, 13 aa, Homo sapiens
  CDR3 for beta chain variable domain of TCR clone 197363 (TRBV7-6, TRBJ1-2)
RASSLVAGYGYTF

SEQ ID NO: 394727 - protein, 14 aa, Homo sapiens
  CDR3 for alpha chain variable domain of TCR clone 197364 (TRAV12-2, TRAJ45)
CAVYSGGGADGLTF

SEQ ID NO: 394728 - protein, 14 aa, Homo sapiens
  CDR3 for beta chain variable domain of TCR clone 197364 (TRBV2, TRBJ1-1)
CASRDNIRNTEAFF

SEQ ID NO: 394729 - protein, 18 aa, Homo sapiens
  CDR3 for alpha chain variable domain of TCR clone 197365 (TRAV21, TRAJ52)
CAVRHSPAGGTSYGKLTF

SEQ ID NO: 394730 - protein, 15 aa, Homo sapiens
  CDR3 for beta chain variable domain of TCR clone 197365 (TRBV7-9, TRBJ2-7)
CASSSSGLAVYEQYF

SEQ ID NO: 394731 - protein, 13 aa, Homo sapiens
  CDR3 for alpha chain variable domain of TCR clone 197366 (TRAV35, TRAJ48)
FAGHEFGNEKLTF

SEQ ID NO: 394732 - protein, 13 aa, Homo sapiens
  CDR3 for beta chain variable domain of TCR clone 197366 (TRBV7-2, TRBJ1-6)
CASSLVGSSPLHF

SEQ ID NO: 394733 - protein, 15 aa, Homo sapiens
  CDR3 for alpha chain variable domain of TCR clone 197367 (TRAV8-4, TRAJ37)
CAVSRGSGNQGKLIF

SEQ ID NO: 394734 - protein, 16 aa, Homo sapiens
  CDR3 for beta chain variable domain of TCR clone 197367 (TRBV7-3, TRBJ2-3)
CASSLSGYRPEDTQYF

SEQ ID NO: 394735 - protein, 14 aa, Homo sapiens
  CDR3 for alpha chain variable domain of TCR clone 197368 (TRAV12-2, TRAJ53)
CRERGGGSNYKLTF

SEQ ID NO: 394736 - protein, 14 aa, Homo sapiens
  CDR3 for beta chain variable domain of TCR clone 197368 (TRBV7-2, TRBJ1-1)
CASSFLTGTTEAFF

SEQ ID NO: 394737 - protein, 14 aa, Homo sapiens
  CDR3 for alpha chain variable domain of TCR clone 197369 (TRAV12-3, TRAJ58)
CAMSTETSGSRLTF

SEQ ID NO: 394738 - protein, 14 aa, Homo sapiens
  CDR3 for beta chain variable domain of TCR clone 197369 (TRBV28, TRBJ1-2)
CASRIQGANYGYTF

SEQ ID NO: 394739 - protein, 12 aa, Homo sapiens
  CDR3 for alpha chain variable domain of TCR clone 197370 (TRAV20, TRAJ49)
CAVNKDGNQFYF

SEQ ID NO: 394740 - protein, 16 aa, Homo sapiens
  CDR3 for beta chain variable domain of TCR clone 197370 (TRBV19, TRBJ2-3)
CASSFYTTGIGDTQYF

SEQ ID NO: 394741 - protein, 13 aa, Homo sapiens
  CDR3 for alpha chain variable domain of TCR clone 197371 (TRAV8-3, TRAJ28)
CAVGAVGSYQLTF

SEQ ID NO: 394742 - protein, 13 aa, Homo sapiens
  CDR3 for beta chain variable domain of TCR clone 197371 (TRBV27, TRBJ2-1)
CASSSGSYNEQFF

SEQ ID NO: 394743 - protein, 12 aa, Homo sapiens
  CDR3 for alpha chain variable domain of TCR clone 197372 (TRAV30, TRAJ29)
CGTGSGNTPLVF

SEQ ID NO: 394744 - protein, 15 aa, Homo sapiens
  CDR3 for beta chain variable domain of TCR clone 197372 (TRBV29-1, TRBJ2-6)
CSVGDSGSGANVLTF

SEQ ID NO: 394745 - protein, 15 aa, Homo sapiens
  CDR3 for alpha chain variable domain of TCR clone 197373 (TRAV8-3, TRAJ27)
CAVGPSKTNAGKSTF

SEQ ID NO: 394746 - protein, 12 aa, Homo sapiens
  CDR3 for beta chain variable domain of TCR clone 197373 (TRBV14, TRBJ2-4)
CASSNLKSIQYF

SEQ ID NO: 394747 - protein, 15 aa, Homo sapiens
  CDR3 for alpha chain variable domain of TCR clone 197374 (TRAV17, TRAJ42)
TSVLRTHSGNKPLVF

SEQ ID NO: 394748 - protein, 13 aa, Homo sapiens
  CDR3 for beta chain variable domain of TCR clone 197374 (TRBV5-7, TRBJ2-6)
CASTSSGANVLTF

SEQ ID NO: 394749 - protein, 13 aa, Homo sapiens
  CDR3 for alpha chain variable domain of TCR clone 197375 (TRAV13-1, TRAJ5)
CAARVTGRRALTF

SEQ ID NO: 394750 - protein, 14 aa, Homo sapiens
  CDR3 for beta chain variable domain of TCR clone 197375 (TRBV7-6, TRBJ2-3)
CASSLGTVTDTQYF

SEQ ID NO: 394751 - protein, 14 aa, Homo sapiens
  CDR3 for alpha chain variable domain of TCR clone 197376 (TRAV1-1, TRAJ28)
CAAPFGAGSYQLTF

SEQ ID NO: 394752 - protein, 15 aa, Homo sapiens
  CDR3 for beta chain variable domain of TCR clone 197376 (TRBV7-2, TRBJ1-2)
CASSLVLGGDYGYTF

SEQ ID NO: 394753 - protein, 13 aa, Homo sapiens
  CDR3 for alpha chain variable domain of TCR clone 197377 (TRAV16, TRAJ58)
CALSIPSGSRLTF

SEQ ID NO: 394754 - protein, 13 aa, Homo sapiens
  CDR3 for beta chain variable domain of TCR clone 197377 (TRBV10-3, TRBJ1-2)
CAISELDSYGYTF

SEQ ID NO: 394755 - protein, 16 aa, Homo sapiens
  CDR3 for alpha chain variable domain of TCR clone 197378 (TRAV3, TRAJ37)
CAVRPHGSGNTGKLIF

SEQ ID NO: 394756 - protein, 16 aa, Homo sapiens
  CDR3 for beta chain variable domain of TCR clone 197378 (TRBV9, TRBJ1-2)
CASSVEEKVSPYGDTL

SEQ ID NO: 394757 - protein, 14 aa, Homo sapiens
  CDR3 for alpha chain variable domain of TCR clone 197379 (TRAV17, TRAJ30)
CATVTMNRDDKIIF

SEQ ID NO: 394758 - protein, 17 aa, Homo sapiens
  CDR3 for beta chain variable domain of TCR clone 197379 (TRBV15, TRBJ1-5)
CATSRVKGIYSNQPQHF

SEQ ID NO: 394759 - protein, 14 aa, Homo sapiens
  CDR3 for alpha chain variable domain of TCR clone 197380 (TRAV12-2, TRAJ40)
CAVKIPSGTYKYIF

SEQ ID NO: 394760 - protein, 15 aa, Homo sapiens
  CDR3 for beta chain variable domain of TCR clone 197380 (TRBV4-1, TRBJ2-5)
CASSQWDLYQETQYF

SEQ ID NO: 394761 - protein, 14 aa, Homo sapiens
  CDR3 for alpha chain variable domain of TCR clone 197381 (TRAV27, TRAJ13)
CRSSNSGGYQKVTF

SEQ ID NO: 394762 - protein, 14 aa, Homo sapiens
  CDR3 for beta chain variable domain of TCR clone 197381 (TRBV7-6, TRBJ2-1)
CTSSLGGGADEQFF

SEQ ID NO: 394763 - protein, 23 aa, Homo sapiens
  CDR3 for alpha chain variable domain of TCR clone 197382 (TRAV26-1, TRAJ38)
CIADNAGNNHIQNPDPAVYQLRD

SEQ ID NO: 394764 - protein, 17 aa, Homo sapiens
  CDR3 for beta chain variable domain of TCR clone 197382 (TRBV28, TRBJ2-5)
CASSRQGGLAGAETQYF

SEQ ID NO: 394765 - protein, 16 aa, Homo sapiens
  CDR3 for alpha chain variable domain of TCR clone 197383 (TRAV3, TRAJ37)
CAVRGKGSGNTGKLIF

SEQ ID NO: 394766 - protein, 16 aa, Homo sapiens
  CDR3 for beta chain variable domain of TCR clone 197383 (TRBV7-9, TRBJ2-7)
CASSYPDREGGYEQYF

SEQ ID NO: 394767 - protein, 12 aa, Homo sapiens
  CDR3 for alpha chain variable domain of TCR clone 197384 (TRAV1-1, TRAJ39)
CAVPVVGNMLTF

SEQ ID NO: 394768 - protein, 15 aa, Homo sapiens
  CDR3 for beta chain variable domain of TCR clone 197384 (TRBV7-9, TRBJ1-5)
CASSQGHQPNQPQHF

SEQ ID NO: 394769 - protein, 14 aa, Homo sapiens
  CDR3 for alpha chain variable domain of TCR clone 197385 (TRAV12-3, TRAJ6)
CAMSATGGSYIPTF

SEQ ID NO: 394770 - protein, 14 aa, Homo sapiens
  CDR3 for beta chain variable domain of TCR clone 197385 (TRBV7-2, TRBJ2-7)
CASSPKTSFYEQYF

SEQ ID NO: 394771 - protein, 12 aa, Homo sapiens
  CDR3 for alpha chain variable domain of TCR clone 197386 (TRAV2, TRAJ31)
CAVADNNARLLF

SEQ ID NO: 394772 - protein, 16 aa, Homo sapiens
  CDR3 for beta chain variable domain of TCR clone 197386 (TRBV10-3, TRBJ2-1)
CAISGVGDRGGGEQFF

SEQ ID NO: 394773 - protein, 14 aa, Homo sapiens
  CDR3 for alpha chain variable domain of TCR clone 197387 (TRAV13-1, TRAJ35)
CAASKGGFGNVLHC

SEQ ID NO: 394774 - protein, 16 aa, Homo sapiens
  CDR3 for beta chain variable domain of TCR clone 197387 (TRBV24-1, TRBJ2-3)
CATSDPGTGATDTQYF

SEQ ID NO: 394775 - protein, 10 aa, Homo sapiens
  CDR3 for alpha chain variable domain of TCR clone 197388 (TRAV1-2, TRAJ31)
CAFFDARLMF

SEQ ID NO: 394776 - protein, 14 aa, Homo sapiens
  CDR3 for beta chain variable domain of TCR clone 197388 (TRBV7-2, TRBJ2-7)
CASSSISGFSEQYF

SEQ ID NO: 394777 - protein, 13 aa, Homo sapiens
  CDR3 for alpha chain variable domain of TCR clone 197389 (TRAV2, TRAJ40)
YAVVTSGTYKYIF

SEQ ID NO: 394778 - protein, 14 aa, Homo sapiens
  CDR3 for beta chain variable domain of TCR clone 197389 (TRBV19, TRBJ2-1)
RASPTFVLSGEQFF

SEQ ID NO: 394779 - protein, 14 aa, Homo sapiens
  CDR3 for alpha chain variable domain of TCR clone 197390 (TRAV21, TRAJ45)
CAVSSGGGADGLTF

SEQ ID NO: 394780 - protein, 17 aa, Homo sapiens
  CDR3 for beta chain variable domain of TCR clone 197390 (TRBV4-2, TRBJ1-1)
CASTQFGGGSGNTEAFF

SEQ ID NO: 394781 - protein, 15 aa, Homo sapiens
  CDR3 for alpha chain variable domain of TCR clone 197391 (TRAV21, TRAJ45)
CAVSYSGGGADGLTF

SEQ ID NO: 394782 - protein, 13 aa, Homo sapiens
  CDR3 for beta chain variable domain of TCR clone 197391 (TRBV20-1, TRBJ2-5)
CSAATALQETQYF

SEQ ID NO: 394783 - protein, 20 aa, Homo sapiens
  CDR3 for alpha chain variable domain of TCR clone 197392 (TRAV8-3, TRAJ44)
LSTSVLWVRLYTGTASKLTF

SEQ ID NO: 394784 - protein, 15 aa, Homo sapiens
  CDR3 for beta chain variable domain of TCR clone 197392 (TRBV6-5, TRBJ1-2)
CASSYSQAFSYGYTF

SEQ ID NO: 394785 - protein, 12 aa, Homo sapiens
  CDR3 for alpha chain variable domain of TCR clone 197393 (TRAV12-3, TRAJ17)
CAMALTGNKLTI

SEQ ID NO: 394786 - protein, 15 aa, Homo sapiens
  CDR3 for beta chain variable domain of TCR clone 197393 (TRBV20-1, TRBJ2-7)
CSARDRVSGMDEQYF

SEQ ID NO: 394787 - protein, 14 aa, Homo sapiens
  CDR3 for alpha chain variable domain of TCR clone 197394 (TRAV2, TRAJ9)
CAVEDRGGGFKTIF

SEQ ID NO: 394788 - protein, 12 aa, Homo sapiens
  CDR3 for beta chain variable domain of TCR clone 197394 (TRBV14, TRBJ2-7)
CANSRLKGEQYF

SEQ ID NO: 394789 - protein, 14 aa, Homo sapiens
  CDR3 for alpha chain variable domain of TCR clone 197395 (TRAV38-2/DV8, TRAJ54)
AAMYQIQGAQKLVF

SEQ ID NO: 394790 - protein, 17 aa, Homo sapiens
  CDR3 for beta chain variable domain of TCR clone 197395 (TRBV6-1, TRBJ2-3)
WASSEALRLISTDTQYF

SEQ ID NO: 394791 - protein, 14 aa, Homo sapiens
  CDR3 for alpha chain variable domain of TCR clone 197396 (TRAV20, TRAJ22)
CAVKVSGSARQLTF

SEQ ID NO: 394792 - protein, 16 aa, Homo sapiens
  CDR3 for beta chain variable domain of TCR clone 197396 (TRBV12-4, TRBJ1-4)
CASSLKGIGHGEKLFF

SEQ ID NO: 394793 - protein, 11 aa, Homo sapiens
  CDR3 for alpha chain variable domain of TCR clone 197397 (TRAV13-2, TRAJ20)
CADSNDYKLSF

SEQ ID NO: 394794 - protein, 13 aa, Homo sapiens
  CDR3 for beta chain variable domain of TCR clone 197397 (TRBV7-3, TRBJ1-1)
CASSQDWGAEAFF

SEQ ID NO: 394795 - protein, 15 aa, Homo sapiens
  CDR3 for alpha chain variable domain of TCR clone 197398 (TRAV3, TRAJ5)
CAVRDLDTGRRALTF

SEQ ID NO: 394796 - protein, 14 aa, Homo sapiens
  CDR3 for beta chain variable domain of TCR clone 197398 (TRBV7-9, TRBJ1-2)
CASSRQGANYGYTF

SEQ ID NO: 394797 - protein, 17 aa, Homo sapiens
  CDR3 for alpha chain variable domain of TCR clone 197399 (TRAV3, TRAJ6)
CVVRDGPRAGGSYIPTF

SEQ ID NO: 394798 - protein, 15 aa, Homo sapiens
  CDR3 for beta chain variable domain of TCR clone 197399 (TRBV27, TRBJ2-1)
CASSNGGGSSNEQFF

SEQ ID NO: 394799 - protein, 12 aa, Homo sapiens
  CDR3 for alpha chain variable domain of TCR clone 197400 (TRAV17, TRAJ4)
CATDGGYNKLIF

SEQ ID NO: 394800 - protein, 14 aa, Homo sapiens
  CDR3 for beta chain variable domain of TCR clone 197400 (TRBV19, TRBJ2-1)
CASSMGSGATEQFF

SEQ ID NO: 394801 - protein, 11 aa, Homo sapiens
  CDR3 for alpha chain variable domain of TCR clone 197401 (TRAV13-1, TRAJ6)
CAALGSYIPTF

SEQ ID NO: 394802 - protein, 12 aa, Homo sapiens
  CDR3 for beta chain variable domain of TCR clone 197401 (TRBV11-2, TRBJ2-1)
CASSPGNNEQFF

SEQ ID NO: 394803 - protein, 15 aa, Homo sapiens
  CDR3 for alpha chain variable domain of TCR clone 197402 (TRAV26-1, TRAJ56)
CIVRVATGADSKLTF

SEQ ID NO: 394804 - protein, 15 aa, Homo sapiens
  CDR3 for beta chain variable domain of TCR clone 197402 (TRBV27, TRBJ2-7)
CASSPQREGQREQYF

SEQ ID NO: 394805 - protein, 12 aa, Homo sapiens
  CDR3 for alpha chain variable domain of TCR clone 197403 (TRAV41, TRAJ58)
CAVETSGSRLTF

SEQ ID NO: 394806 - protein, 17 aa, Homo sapiens
  CDR3 for beta chain variable domain of TCR clone 197403 (TRBV24-1, TRBJ2-4)
CATSDAEARGVRNIQYF

SEQ ID NO: 394807 - protein, 21 aa, Homo sapiens
  CDR3 for alpha chain variable domain of TCR clone 197404 (TRAV25, TRAJ7)
TATQTTDVGTYFCLGNNRLAF

SEQ ID NO: 394808 - protein, 14 aa, Homo sapiens
  CDR3 for beta chain variable domain of TCR clone 197404 (TRBV11-2, TRBJ2-2)
CASSLGLRVRELFF

SEQ ID NO: 394809 - protein, 14 aa, Homo sapiens
  CDR3 for alpha chain variable domain of TCR clone 197405 (TRAV27, TRAJ13)
CRSSNSGGYQKVTF

SEQ ID NO: 394810 - protein, 12 aa, Homo sapiens
  CDR3 for beta chain variable domain of TCR clone 197405 (TRBV14, TRBJ2-5)
CACSQLKETQYF

SEQ ID NO: 394811 - protein, 13 aa, Homo sapiens
  CDR3 for alpha chain variable domain of TCR clone 197406 (TRAV3, TRAJ20)
CAVRDTPRYKLSF

SEQ ID NO: 394812 - protein, 14 aa, Homo sapiens
  CDR3 for beta chain variable domain of TCR clone 197406 (TRBV7-9, TRBJ2-5)
CASSLDTAQETQYF

SEQ ID NO: 394813 - protein, 12 aa, Homo sapiens
  CDR3 for alpha chain variable domain of TCR clone 197407 (TRAV8-3, TRAJ26)
CAGDNYGQNFVF

SEQ ID NO: 394814 - protein, 15 aa, Homo sapiens
  CDR3 for beta chain variable domain of TCR clone 197407 (TRBV9, TRBJ2-1)
CASSLAGSSSNEQFF

SEQ ID NO: 394815 - protein, 14 aa, Homo sapiens
  CDR3 for alpha chain variable domain of TCR clone 197408 (TRAV1-2, TRAJ16)
CAVNRFSDGQKLLF

SEQ ID NO: 394816 - protein, 12 aa, Homo sapiens
  CDR3 for beta chain variable domain of TCR clone 197408 (TRBV7-9, TRBJ2-7)
CATRTDAYEQYF

SEQ ID NO: 394817 - protein, 13 aa, Homo sapiens
  CDR3 for alpha chain variable domain of TCR clone 197409 (TRAV36/DV7, TRAJ37)
FAVFSSNTGKLIF

SEQ ID NO: 394818 - protein, 14 aa, Homo sapiens
  CDR3 for beta chain variable domain of TCR clone 197409 (TRBV6-1, TRBJ1-3)
CASVQGGGGNTIYF

SEQ ID NO: 394819 - protein, 12 aa, Homo sapiens
  CDR3 for alpha chain variable domain of TCR clone 197410 (TRAV8-3, TRAJ26)
CAGDNYGQNFVF

SEQ ID NO: 394820 - protein, 14 aa, Homo sapiens
  CDR3 for beta chain variable domain of TCR clone 197410 (TRBV19, TRBJ2-7)
CASNFRDTFTGMYF

SEQ ID NO: 394821 - protein, 13 aa, Homo sapiens
  CDR3 for alpha chain variable domain of TCR clone 197411 (TRAV12-3, TRAJ36)
CAMRRPGANNLFF

SEQ ID NO: 394822 - protein, 18 aa, Homo sapiens
  CDR3 for beta chain variable domain of TCR clone 197411 (TRBV11-1, TRBJ2-2)
CASSRGAGGPGNTGELFF

SEQ ID NO: 394823 - protein, 13 aa, Homo sapiens
  CDR3 for alpha chain variable domain of TCR clone 197412 (TRAV8-6, TRAJ21)
CAVSPYSLNKFYF

SEQ ID NO: 394824 - protein, 14 aa, Homo sapiens
  CDR3 for beta chain variable domain of TCR clone 197412 (TRBV7-9, TRBJ2-5)
CASSLDTAQETQYF

SEQ ID NO: 394825 - protein, 13 aa, Homo sapiens
  CDR3 for alpha chain variable domain of TCR clone 197413 (TRAV1-1, TRAJ9)
CAAKNTGGFKTIF

SEQ ID NO: 394826 - protein, 14 aa, Homo sapiens
  CDR3 for beta chain variable domain of TCR clone 197413 (TRBV20-1, TRBJ2-1)
GSAQRGGSANEQFF

SEQ ID NO: 394827 - protein, 16 aa, Homo sapiens
  CDR3 for alpha chain variable domain of TCR clone 197414 (TRAV27, TRAJ56)
CAGVSRKDGANSKLTF

SEQ ID NO: 394828 - protein, 15 aa, Homo sapiens
  CDR3 for beta chain variable domain of TCR clone 197414 (TRBV4-1, TRBJ2-5)
CASSQVAGGQETQYF

SEQ ID NO: 394829 - protein, 16 aa, Homo sapiens
  CDR3 for alpha chain variable domain of TCR clone 197415 (TRAV21, TRAJ17)
CAVRPGEEAAGNKLTF

SEQ ID NO: 394830 - protein, 20 aa, Homo sapiens
  CDR3 for beta chain variable domain of TCR clone 197415 (TRBV7-2, TRBJ1-4)
CASSFDPYSKTVFWQWNPAL

SEQ ID NO: 394831 - protein, 13 aa, Homo sapiens
  CDR3 for alpha chain variable domain of TCR clone 197416 (TRAV1-1, TRAJ9)
CAAKNTGSFKTIF

SEQ ID NO: 394832 - protein, 14 aa, Homo sapiens
  CDR3 for beta chain variable domain of TCR clone 197416 (TRBV20-1, TRBJ2-1)
CSAQIGGSANEQFF

SEQ ID NO: 394833 - protein, 13 aa, Homo sapiens
  CDR3 for alpha chain variable domain of TCR clone 197417 (TRAV21, TRAJ27)
CAARPGNAGKSTF

SEQ ID NO: 394834 - protein, 14 aa, Homo sapiens
  CDR3 for beta chain variable domain of TCR clone 197417 (TRBV7-6, TRBJ2-3)
CASSLGAVTDTQYY

SEQ ID NO: 394835 - protein, 13 aa, Homo sapiens
  CDR3 for alpha chain variable domain of TCR clone 197418 (TRAV3, TRAJ21)
SAVATSTNFTLDL

SEQ ID NO: 394836 - protein, 16 aa, Homo sapiens
  CDR3 for beta chain variable domain of TCR clone 197418 (TRBV19, TRBJ2-1)
CASSKAGPSSYNEQFF

SEQ ID NO: 394837 - protein, 12 aa, Homo sapiens
  CDR3 for alpha chain variable domain of TCR clone 197419 (TRAV8-3, TRAJ40)
CAVTSATYKYIF

SEQ ID NO: 394838 - protein, 14 aa, Homo sapiens
  CDR3 for beta chain variable domain of TCR clone 197419 (TRBV12-4, TRBJ2-3)
CASSGQGSTDTQYF

SEQ ID NO: 394839 - protein, 14 aa, Homo sapiens
  CDR3 for alpha chain variable domain of TCR clone 197420 (TRAV3, TRAJ3)
CAVRPRDSASKIIF

SEQ ID NO: 394840 - protein, 14 aa, Homo sapiens
  CDR3 for beta chain variable domain of TCR clone 197420 (TRBV19, TRBJ2-2)
CASSGQGIAGELFF

SEQ ID NO: 394841 - protein, 12 aa, Homo sapiens
  CDR3 for alpha chain variable domain of TCR clone 197421 (TRAV27, TRAJ42)
CAGGGSQGNLIF

SEQ ID NO: 394842 - protein, 13 aa, Homo sapiens
  CDR3 for beta chain variable domain of TCR clone 197421 (TRBV19, TRBJ2-7)
CTSSIRSSYEQYF

SEQ ID NO: 394843 - protein, 14 aa, Homo sapiens
  CDR3 for alpha chain variable domain of TCR clone 197422 (TRAV17, TRAJ57)
CATDPQGGSEQLVS

SEQ ID NO: 394844 - protein, 18 aa, Homo sapiens
  CDR3 for beta chain variable domain of TCR clone 197422 (TRBV6-6, TRBJ1-3)
CASSYSKWDSISGNTIYF

SEQ ID NO: 394845 - protein, 17 aa, Homo sapiens
  CDR3 for alpha chain variable domain of TCR clone 197423 (TRAV4, TRAJ18)
CLVGERSVGSTLGRLYF

SEQ ID NO: 394846 - protein, 16 aa, Homo sapiens
  CDR3 for beta chain variable domain of TCR clone 197423 (TRBV19, TRBJ2-1)
CASSRAGPSSYNEQFF

SEQ ID NO: 394847 - protein, 14 aa, Homo sapiens
  CDR3 for alpha chain variable domain of TCR clone 197424 (TRAV13-1, TRAJ9)
CAASALTGGFKTIF

SEQ ID NO: 394848 - protein, 16 aa, Homo sapiens
  CDR3 for beta chain variable domain of TCR clone 197424 (TRBV12-4, TRBJ1-5)
CASSRPVGGSNQTQHF

SEQ ID NO: 394849 - protein, 11 aa, Homo sapiens
  CDR3 for alpha chain variable domain of TCR clone 197425 (TRAV17, TRAJ9)
CATTGGFKTIF

SEQ ID NO: 394850 - protein, 11 aa, Homo sapiens
  CDR3 for beta chain variable domain of TCR clone 197425 (TRBV18, TRBJ2-5)
CASSPRETQYF

SEQ ID NO: 394851 - protein, 12 aa, Homo sapiens
  CDR3 for alpha chain variable domain of TCR clone 197426 (TRAV4, TRAJ34)
CLGGEGTDKLIF

SEQ ID NO: 394852 - protein, 13 aa, Homo sapiens
  CDR3 for beta chain variable domain of TCR clone 197426 (TRBV2, TRBJ2-7)
CATSMGLVYGQYF

SEQ ID NO: 394853 - protein, 13 aa, Homo sapiens
  CDR3 for alpha chain variable domain of TCR clone 197427 (TRAV14/DV4, TRAJ20)
CAMRESNDSKLSF

SEQ ID NO: 394854 - protein, 14 aa, Homo sapiens
  CDR3 for beta chain variable domain of TCR clone 197427 (TRBV2, TRBJ2-7)
CASSLTSGGYEQYF

SEQ ID NO: 394855 - protein, 14 aa, Homo sapiens
  CDR3 for alpha chain variable domain of TCR clone 197428 (TRAV13-1, TRAJ10)
CAALFTGGGNKLTV

SEQ ID NO: 394856 - protein, 15 aa, Homo sapiens
  CDR3 for beta chain variable domain of TCR clone 197428 (TRBV10-3, TRBJ2-2)
CAISEGDRAAGELFF

SEQ ID NO: 394857 - protein, 14 aa, Homo sapiens
  CDR3 for alpha chain variable domain of TCR clone 197429 (TRAV2, TRAJ20)
CAVDLRKHDYKLSF

SEQ ID NO: 394858 - protein, 14 aa, Homo sapiens
  CDR3 for beta chain variable domain of TCR clone 197429 (TRBV18, TRBJ2-3)
CASSGLADTDTQYF

SEQ ID NO: 394859 - protein, 19 aa, Homo sapiens
  CDR3 for alpha chain variable domain of TCR clone 197430 (TRAV25, TRAJ20)
TATQTTDVGILPHDYKLSF

SEQ ID NO: 394860 - protein, 13 aa, Homo sapiens
  CDR3 for beta chain variable domain of TCR clone 197430 (TRBV7-2, TRBJ2-7)
CASILSGRSGLAG

SEQ ID NO: 394861 - protein, 15 aa, Homo sapiens
  CDR3 for alpha chain variable domain of TCR clone 197431 (TRAV21, TRAJ40)
CAVRPQTSGTYKYIF

SEQ ID NO: 394862 - protein, 13 aa, Homo sapiens
  CDR3 for beta chain variable domain of TCR clone 197431 (TRBV29-1, TRBJ2-1)
CSVEGGRVNEQFF

SEQ ID NO: 394863 - protein, 17 aa, Homo sapiens
  CDR3 for alpha chain variable domain of TCR clone 197432 (TRAV29/DV5, TRAJ45)
CAADGPFSGGGADGLTF

SEQ ID NO: 394864 - protein, 15 aa, Homo sapiens
  CDR3 for beta chain variable domain of TCR clone 197432 (TRBV2, TRBJ2-1)
CASSELAGSYNEQFF

SEQ ID NO: 394865 - protein, 14 aa, Homo sapiens
  CDR3 for alpha chain variable domain of TCR clone 197433 (TRAV12-3, TRAJ10)
SHLPLTGGGNKLTF

SEQ ID NO: 394866 - protein, 16 aa, Homo sapiens
  CDR3 for beta chain variable domain of TCR clone 197433 (TRBV7-2, TRBJ2-5)
CASSPRGRGGGETQYF

SEQ ID NO: 394867 - protein, 13 aa, Homo sapiens
  CDR3 for alpha chain variable domain of TCR clone 197434 (TRAV8-6, TRAJ49)
CAVITNTGNQFYF

SEQ ID NO: 394868 - protein, 12 aa, Homo sapiens
  CDR3 for beta chain variable domain of TCR clone 197434 (TRBV7-2, TRBJ2-1)
CASSLMGAEQFF

SEQ ID NO: 394869 - protein, 11 aa, Homo sapiens
  CDR3 for alpha chain variable domain of TCR clone 197435 (TRAV2, TRAJ13)
CASGGYQKVTF

SEQ ID NO: 394870 - protein, 13 aa, Homo sapiens
  CDR3 for beta chain variable domain of TCR clone 197435 (TRBV27, TRBJ1-4)
CASSLMGDENLFF

SEQ ID NO: 394871 - protein, 13 aa, Homo sapiens
  CDR3 for alpha chain variable domain of TCR clone 197436 (TRAV13-2, TRAJ48)
CAEMDFGNEKLTF

SEQ ID NO: 394872 - protein, 14 aa, Homo sapiens
  CDR3 for beta chain variable domain of TCR clone 197436 (TRBV20-1, TRBJ1-3)
CSASPTGAGNTIYF

SEQ ID NO: 394873 - protein, 11 aa, Homo sapiens
  CDR3 for alpha chain variable domain of TCR clone 197437 (TRAV3, TRAJ17)
PRGAAGNKLTF

SEQ ID NO: 394874 - protein, 16 aa, Homo sapiens
  CDR3 for beta chain variable domain of TCR clone 197437 (TRBV7-6, TRBJ2-1)
CASSAPGPSSNNEQFF

SEQ ID NO: 394875 - protein, 13 aa, Homo sapiens
  CDR3 for alpha chain variable domain of TCR clone 197438 (TRAV8-3, TRAJ48)
CAMVPFGNEKLTF

SEQ ID NO: 394876 - protein, 12 aa, Homo sapiens
  CDR3 for beta chain variable domain of TCR clone 197438 (TRBV11-2, TRBJ2-2)
CASSLGGGELFF

SEQ ID NO: 394877 - protein, 15 aa, Homo sapiens
  CDR3 for alpha chain variable domain of TCR clone 197439 (TRAV27, TRAJ38)
CAARRNAGNNRKLIG

SEQ ID NO: 394878 - protein, 13 aa, Homo sapiens
  CDR3 for beta chain variable domain of TCR clone 197439 (TRBV19, TRBJ1-2)
CASSVPGQDGYTF

SEQ ID NO: 394879 - protein, 13 aa, Homo sapiens
  CDR3 for alpha chain variable domain of TCR clone 197440 (TRAV25, TRAJ30)
CAGRVDRDDKIIY

SEQ ID NO: 394880 - protein, 17 aa, Homo sapiens
  CDR3 for beta chain variable domain of TCR clone 197440 (TRBV7-9, TRBJ2-6)
CASSFGAGYSGANVLTF

SEQ ID NO: 394881 - protein, 13 aa, Homo sapiens
  CDR3 for alpha chain variable domain of TCR clone 197441 (TRAV13-1, TRAJ21)
CVASKGNFNKFHF

SEQ ID NO: 394882 - protein, 16 aa, Homo sapiens
  CDR3 for beta chain variable domain of TCR clone 197441 (TRBV5-4, TRBJ2-3)
CASSWGTSGGTDTQYF

SEQ ID NO: 394883 - protein, 13 aa, Homo sapiens
  CDR3 for alpha chain variable domain of TCR clone 197442 (TRAV21, TRAJ20)
CAVGLRVDYKLSF

SEQ ID NO: 394884 - protein, 16 aa, Homo sapiens
  CDR3 for beta chain variable domain of TCR clone 197442 (TRBV18, TRBJ1-4)
CASSLQTVATNEKLFF

SEQ ID NO: 394885 - protein, 12 aa, Homo sapiens
  CDR3 for alpha chain variable domain of TCR clone 197443 (TRAV27, TRAJ9)
CAGESGGFKTIF

SEQ ID NO: 394886 - protein, 14 aa, Homo sapiens
  CDR3 for beta chain variable domain of TCR clone 197443 (TRBV6-1, TRBJ2-1)
CASAKDGFYNEQFL

SEQ ID NO: 394887 - protein, 15 aa, Homo sapiens
  CDR3 for alpha chain variable domain of TCR clone 197444 (TRAV26-1, TRAJ44)
CIARVPFGTASKLTF

SEQ ID NO: 394888 - protein, 15 aa, Homo sapiens
  CDR3 for beta chain variable domain of TCR clone 197444 (TRBV20-1, TRBJ1-1)
CSASRGVTGNTEAFF

SEQ ID NO: 394889 - protein, 15 aa, Homo sapiens
  CDR3 for alpha chain variable domain of TCR clone 197445 (TRAV21, TRAJ24)
CAARSSTDSWGKLQF

SEQ ID NO: 394890 - protein, 17 aa, Homo sapiens
  CDR3 for beta chain variable domain of TCR clone 197445 (TRBV13, TRBJ2-3)
CASSRSRVAGGRNTQYF

SEQ ID NO: 394891 - protein, 13 aa, Homo sapiens
  CDR3 for alpha chain variable domain of TCR clone 197446 (TRAV27, TRAJ41)
CAGEGNTGYALNF

SEQ ID NO: 394892 - protein, 14 aa, Homo sapiens
  CDR3 for beta chain variable domain of TCR clone 197446 (TRBV7-2, TRBJ1-1)
CASSFLTGTTEAFF

SEQ ID NO: 394893 - protein, 17 aa, Homo sapiens
  CDR3 for alpha chain variable domain of TCR clone 197447 (TRAV8-3, TRAJ52)
CCGCDLPGDYSYGTLTF

SEQ ID NO: 394894 - protein, 18 aa, Homo sapiens
  CDR3 for beta chain variable domain of TCR clone 197447 (TRBV11-2, TRBJ2-6)
CASSFNTFLGTGANVLTF

SEQ ID NO: 394895 - protein, 18 aa, Homo sapiens
  CDR3 for alpha chain variable domain of TCR clone 197448 (TRAV29/DV5, TRAJ52)
CAAGFRVVGGTSYGKLTF

SEQ ID NO: 394896 - protein, 17 aa, Homo sapiens
  CDR3 for beta chain variable domain of TCR clone 197448 (TRBV20-1, TRBJ2-3)
CSARSAGLAGVTDTQYF

SEQ ID NO: 394897 - protein, 13 aa, Homo sapiens
  CDR3 for alpha chain variable domain of TCR clone 197449 (TRAV8-2, TRAJ15)
CVVSGPGSNCSDL

SEQ ID NO: 394898 - protein, 16 aa, Homo sapiens
  CDR3 for beta chain variable domain of TCR clone 197449 (TRBV20-1, TRBJ1-4)
CSARPYGGELNEKLFF

SEQ ID NO: 394899 - protein, 17 aa, Homo sapiens
  CDR3 for alpha chain variable domain of TCR clone 197450 (TRAV3, TRAJ42)
CAVRDRDYGGSQGNLIF

SEQ ID NO: 394900 - protein, 20 aa, Homo sapiens
  CDR3 for beta chain variable domain of TCR clone 197450 (TRBV28, TRBJ2-1)
CDSTPIGRSPGLAGGNEQFF

SEQ ID NO: 394901 - protein, 13 aa, Homo sapiens
  CDR3 for alpha chain variable domain of TCR clone 197451 (TRAV26-1, )
CIVSHRVEGFWNQ

SEQ ID NO: 394902 - protein, 15 aa, Homo sapiens
  CDR3 for beta chain variable domain of TCR clone 197451 (TRBV7-2, TRBJ2-7)
CASSLAVGQVYEQYF

SEQ ID NO: 394903 - protein, 17 aa, Homo sapiens
  CDR3 for alpha chain variable domain of TCR clone 197452 (TRAV26-2, TRAJ42)
CILRDVGYGGSQGNLIF

SEQ ID NO: 394904 - protein, 16 aa, Homo sapiens
  CDR3 for beta chain variable domain of TCR clone 197452 (TRBV12-4, TRBJ2-7)
CASSLIGGTGTDEQYF

SEQ ID NO: 394905 - protein, 19 aa, Homo sapiens
  CDR3 for alpha chain variable domain of TCR clone 197453 (TRAV26-1, TRAJ52)
CIVRAHRNAGGTSYGKLTC

SEQ ID NO: 394906 - protein, 15 aa, Homo sapiens
  CDR3 for beta chain variable domain of TCR clone 197453 (TRBV29-1, TRBJ2-1)
CSGRDRKSSYNKQFF

SEQ ID NO: 394907 - protein, 16 aa, Homo sapiens
  CDR3 for alpha chain variable domain of TCR clone 197454 (TRAV30, TRAJ24)
CGTEIVDADSWGKFQF

SEQ ID NO: 394908 - protein, 15 aa, Homo sapiens
  CDR3 for beta chain variable domain of TCR clone 197454 (TRBV20-1, TRBJ2-7)
CSARDRVSGMDKQYF

SEQ ID NO: 394909 - protein, 18 aa, Homo sapiens
  CDR3 for alpha chain variable domain of TCR clone 197455 (TRAV12-1, TRAJ26)
SSVIQPPTSVPCGQNFVF

SEQ ID NO: 394910 - protein, 14 aa, Homo sapiens
  CDR3 for beta chain variable domain of TCR clone 197455 (TRBV5-4, TRBJ2-1)
CASSLDQGLNEQFF

SEQ ID NO: 394911 - protein, 14 aa, Homo sapiens
  CDR3 for alpha chain variable domain of TCR clone 197456 (TRAV17, TRAJ40)
CATALTSGTYKYFF

SEQ ID NO: 394912 - protein, 13 aa, Homo sapiens
  CDR3 for beta chain variable domain of TCR clone 197456 (TRBV27, TRBJ2-1)
CASSSGSYNEQFF

SEQ ID NO: 394913 - protein, 14 aa, Homo sapiens
  CDR3 for alpha chain variable domain of TCR clone 197457 (TRAV12-2, TRAJ5)
CAVNRSTGRRALTF

SEQ ID NO: 394914 - protein, 15 aa, Homo sapiens
  CDR3 for beta chain variable domain of TCR clone 197457 (TRBV6-6, TRBJ2-7)
CASSYSYGGSYEHYF

SEQ ID NO: 394915 - protein, 14 aa, Homo sapiens
  CDR3 for alpha chain variable domain of TCR clone 197458 (TRAV13-1, TRAJ44)
CAAKATGTASKLTF

SEQ ID NO: 394916 - protein, 15 aa, Homo sapiens
  CDR3 for beta chain variable domain of TCR clone 197458 (TRBV19, TRBJ2-1)
CASIKGSGPYNEQFF

SEQ ID NO: 394917 - protein, 14 aa, Homo sapiens
  CDR3 for alpha chain variable domain of TCR clone 197459 (TRAV12-3, TRAJ10)
SHLPLTGGGNKLTF

SEQ ID NO: 394918 - protein, 18 aa, Homo sapiens
  CDR3 for beta chain variable domain of TCR clone 197459 (TRBV5-1, TRBJ2-1)
CASSLRASGGADYNEQFF

SEQ ID NO: 394919 - protein, 14 aa, Homo sapiens
  CDR3 for alpha chain variable domain of TCR clone 197460 (TRAV1-2, TRAJ16)
CAVNRFSDGQKLLF

SEQ ID NO: 394920 - protein, 14 aa, Homo sapiens
  CDR3 for beta chain variable domain of TCR clone 197460 (TRBV4-1, TRBJ2-2)
CASSQAVNTGKLFF

SEQ ID NO: 394921 - protein, 11 aa, Homo sapiens
  CDR3 for alpha chain variable domain of TCR clone 197461 (TRAV17, TRAJ9)
CATTGGFKTIF

SEQ ID NO: 394922 - protein, 15 aa, Homo sapiens
  CDR3 for beta chain variable domain of TCR clone 197461 (TRBV19, TRBJ1-2)
CASSVGQVLNYGYTF

SEQ ID NO: 394923 - protein, 14 aa, Homo sapiens
  CDR3 for alpha chain variable domain of TCR clone 197462 (TRAV16, TRAJ48)
CDLTPGFGNEKLTF

SEQ ID NO: 394924 - protein, 14 aa, Homo sapiens
  CDR3 for beta chain variable domain of TCR clone 197462 (TRBV7-2, TRBJ2-7)
CASSSISGFSEQYF

SEQ ID NO: 394925 - protein, 15 aa, Homo sapiens
  CDR3 for alpha chain variable domain of TCR clone 197463 (TRAV8-1, TRAJ6)
CAVNTPAGGSYIPTF

SEQ ID NO: 394926 - protein, 15 aa, Homo sapiens
  CDR3 for beta chain variable domain of TCR clone 197463 (TRBV11-2, TRBJ2-2)
CASSSDRVNAGELFF

SEQ ID NO: 394927 - protein, 12 aa, Homo sapiens
  CDR3 for alpha chain variable domain of TCR clone 197464 (TRAV8-3, TRAJ26)
CAGDNYGQNFVF

SEQ ID NO: 394928 - protein, 15 aa, Homo sapiens
  CDR3 for beta chain variable domain of TCR clone 197464 (TRBV7-9, TRBJ2-1)
CASSSVGGGRNEQFF

SEQ ID NO: 394929 - protein, 16 aa, Homo sapiens
  CDR3 for alpha chain variable domain of TCR clone 197465 (TRAV26-1, TRAJ23)
CIVRPHGNNQGGKLIF

SEQ ID NO: 394930 - protein, 14 aa, Homo sapiens
  CDR3 for beta chain variable domain of TCR clone 197465 (TRBV28, TRBJ2-3)
CASSFVQGTDTQYF

SEQ ID NO: 394931 - protein, 15 aa, Homo sapiens
  CDR3 for alpha chain variable domain of TCR clone 197466 (TRAV26-2, TRAJ34)
DAAVYYCIFTDKLIF

SEQ ID NO: 394932 - protein, 14 aa, Homo sapiens
  CDR3 for beta chain variable domain of TCR clone 197466 (TRBV19, TRBJ2-1)
CASPTFVLSGEQFF

SEQ ID NO: 394933 - protein, 17 aa, Homo sapiens
  CDR3 for alpha chain variable domain of TCR clone 197467 (TRAV26-1, TRAJ53)
CIVRVDDSGGSNYKLTF

SEQ ID NO: 394934 - protein, 15 aa, Homo sapiens
  CDR3 for beta chain variable domain of TCR clone 197467 (TRBV5-1, TRBJ2-3)
CASSVTSGSTDTQYF

SEQ ID NO: 394935 - protein, 16 aa, Homo sapiens
  CDR3 for alpha chain variable domain of TCR clone 197468 (TRAV3, TRAJ6)
SAVRDGMGRRKLHTYI

SEQ ID NO: 394936 - protein, 15 aa, Homo sapiens
  CDR3 for beta chain variable domain of TCR clone 197468 (TRBV9, TRBJ2-1)
CASSLAGSSYNEQFF

SEQ ID NO: 394937 - protein, 10 aa, Homo sapiens
  CDR3 for alpha chain variable domain of TCR clone 197469 (TRAV23/DV6, TRAJ57)
CAASSTLSQG

SEQ ID NO: 394938 - protein, 16 aa, Homo sapiens
  CDR3 for beta chain variable domain of TCR clone 197469 (TRBV5-4, TRBJ2-3)
CASQQPGAGGADTQYF

SEQ ID NO: 394939 - protein, 15 aa, Homo sapiens
  CDR3 for alpha chain variable domain of TCR clone 197470 (TRAV2, TRAJ15)
CAVEDQEQAGTALIF

SEQ ID NO: 394940 - protein, 12 aa, Homo sapiens
  CDR3 for beta chain variable domain of TCR clone 197470 (TRBV7-8, TRBJ2-7)
CASSLGDREQYF

SEQ ID NO: 394941 - protein, 14 aa, Homo sapiens
  CDR3 for alpha chain variable domain of TCR clone 197471 (TRAV8-4, TRAJ9)
CAVRINTGGFKTIF

SEQ ID NO: 394942 - protein, 15 aa, Homo sapiens
  CDR3 for beta chain variable domain of TCR clone 197471 (TRBV10-2, TRBJ2-6)
CASSEQGTGANVLTS

SEQ ID NO: 394943 - protein, 16 aa, Homo sapiens
  CDR3 for alpha chain variable domain of TCR clone 197472 (TRAV14/DV4, TRAJ20)
CAMREGRSRDDYKLSF

SEQ ID NO: 394944 - protein, 13 aa, Homo sapiens
  CDR3 for beta chain variable domain of TCR clone 197472 (TRBV7-9, TRBJ2-3)
CASSPGSTDTQYF

SEQ ID NO: 394945 - protein, 10 aa, Homo sapiens
  CDR3 for alpha chain variable domain of TCR clone 197473 (TRAV30, TRAJ48)
CGIGNEKLTF

SEQ ID NO: 394946 - protein, 13 aa, Homo sapiens
  CDR3 for beta chain variable domain of TCR clone 197473 (TRBV29-1, TRBJ2-7)
CGVGPSGGYEQYF

SEQ ID NO: 394947 - protein, 14 aa, Homo sapiens
  CDR3 for alpha chain variable domain of TCR clone 197474 (TRAV1-2, TRAJ16)
CAVIRFSDGQKLLF

SEQ ID NO: 394948 - protein, 15 aa, Homo sapiens
  CDR3 for beta chain variable domain of TCR clone 197474 (TRBV7-9, TRBJ1-6)
CASSSPGRGNSPLHF

SEQ ID NO: 394949 - protein, 13 aa, Homo sapiens
  CDR3 for alpha chain variable domain of TCR clone 197475 (TRAV12-1, TRAJ22)
CVVPSGSARQLTF

SEQ ID NO: 394950 - protein, 15 aa, Homo sapiens
  CDR3 for beta chain variable domain of TCR clone 197475 (TRBV27, TRBJ2-5)
CASSLYPRGGETQYF

SEQ ID NO: 394951 - protein, 14 aa, Homo sapiens
  CDR3 for alpha chain variable domain of TCR clone 197476 (TRAV35, TRAJ13)
CAGSPSGGYQKVTF

SEQ ID NO: 394952 - protein, 17 aa, Homo sapiens
  CDR3 for beta chain variable domain of TCR clone 197476 (TRBV7-6, TRBJ2-5)
CASSPGLADRWGETQYF

SEQ ID NO: 394953 - protein, 14 aa, Homo sapiens
  CDR3 for alpha chain variable domain of TCR clone 197477 (TRAV8-4, TRAJ54)
CAVSEVLGAQKLVF

SEQ ID NO: 394954 - protein, 14 aa, Homo sapiens
  CDR3 for beta chain variable domain of TCR clone 197477 (TRBV4-2, TRBJ2-1)
CASGLDRAYNEQFF

SEQ ID NO: 394955 - protein, 14 aa, Homo sapiens
  CDR3 for alpha chain variable domain of TCR clone 197478 (TRAV2, TRAJ9)
CAVEDRSGGFKTIF

SEQ ID NO: 394956 - protein, 22 aa, Homo sapiens
  CDR3 for beta chain variable domain of TCR clone 197478 (TRBV11-2, TRBJ1-4)
CASSGTGTGGRKTVFWQWNPAL

SEQ ID NO: 394957 - protein, 13 aa, Homo sapiens
  CDR3 for alpha chain variable domain of TCR clone 197479 (TRAV13-1, TRAJ20)
CAARVSNDYKLSF

SEQ ID NO: 394958 - protein, 16 aa, Homo sapiens
  CDR3 for beta chain variable domain of TCR clone 197479 (TRBV11-1, TRBJ1-1)
CATNPRDRAFKTEAFF

SEQ ID NO: 394959 - protein, 16 aa, Homo sapiens
  CDR3 for alpha chain variable domain of TCR clone 197480 (TRAV16, TRAJ4)
CALSRMFSGGYNKLIF

SEQ ID NO: 394960 - protein, 16 aa, Homo sapiens
  CDR3 for beta chain variable domain of TCR clone 197480 (TRBV24-1, TRBJ2-3)
CATSDPGSGATDTQYF

SEQ ID NO: 394961 - protein, 15 aa, Homo sapiens
  CDR3 for alpha chain variable domain of TCR clone 197481 (TRAV8-4, TRAJ7)
CAVSGGNYVNNRLAF

SEQ ID NO: 394962 - protein, 11 aa, Homo sapiens
  CDR3 for beta chain variable domain of TCR clone 197481 (TRBV20-1, TRBJ2-1)
CSLSSGSEQFF

SEQ ID NO: 394963 - protein, 10 aa, Homo sapiens
  CDR3 for alpha chain variable domain of TCR clone 197482 (TRAV23/DV6, TRAJ57)
CSASSTLSQG

SEQ ID NO: 394964 - protein, 17 aa, Homo sapiens
  CDR3 for beta chain variable domain of TCR clone 197482 (TRBV10-3, TRBJ2-6)
CAISESTAPSGANVLTF

SEQ ID NO: 394965 - protein, 17 aa, Homo sapiens
  CDR3 for alpha chain variable domain of TCR clone 197483 (TRAV27, TRAJ42)
CAERVIYYGGSQGNLIL

SEQ ID NO: 394966 - protein, 14 aa, Homo sapiens
  CDR3 for beta chain variable domain of TCR clone 197483 (TRBV19, TRBJ2-7)
CASSIRLGDHEQYF

SEQ ID NO: 394967 - protein, 17 aa, Homo sapiens
  CDR3 for alpha chain variable domain of TCR clone 197484 (TRAV17, TRAJ52)
CATDANAGGTSYGKLTF

SEQ ID NO: 394968 - protein, 16 aa, Homo sapiens
  CDR3 for beta chain variable domain of TCR clone 197484 (TRBV28, TRBJ2-7)
CASSLFFETGGPEQYF

SEQ ID NO: 394969 - protein, 15 aa, Homo sapiens
  CDR3 for alpha chain variable domain of TCR clone 197485 (TRAV12-1, TRAJ41)
CVVNSRTGSGDAPNF

SEQ ID NO: 394970 - protein, 11 aa, Homo sapiens
  CDR3 for beta chain variable domain of TCR clone 197485 (TRBV6-4, TRBJ2-1)
CASSDSYAQFF

SEQ ID NO: 394971 - protein, 15 aa, Homo sapiens
  CDR3 for alpha chain variable domain of TCR clone 197486 (TRAV26-2, TRAJ28)
CILVESGAGSYQLTF

SEQ ID NO: 394972 - protein, 16 aa, Homo sapiens
  CDR3 for beta chain variable domain of TCR clone 197486 (TRBV4-2, TRBJ1-2)
CANSQEIGGASYGYTF

SEQ ID NO: 394973 - protein, 13 aa, Homo sapiens
  CDR3 for alpha chain variable domain of TCR clone 197487 (TRAV13-1, TRAJ21)
CAASIYNVNKFYF

SEQ ID NO: 394974 - protein, 15 aa, Homo sapiens
  CDR3 for beta chain variable domain of TCR clone 197487 (TRBV7-8, TRBJ1-5)
CASSLAGQPNQPQHF

SEQ ID NO: 394975 - protein, 12 aa, Homo sapiens
  CDR3 for alpha chain variable domain of TCR clone 197488 (TRAV23/DV6, TRAJ16)
CAATGTGQKLLF

SEQ ID NO: 394976 - protein, 15 aa, Homo sapiens
  CDR3 for beta chain variable domain of TCR clone 197488 (TRBV12-5, TRBJ2-1)
CASGSPRQGLNEQFF

SEQ ID NO: 394977 - protein, 14 aa, Homo sapiens
  CDR3 for alpha chain variable domain of TCR clone 197489 (TRAV35, TRAJ33)
CAGSSQDSNYQLIW

SEQ ID NO: 394978 - protein, 17 aa, Homo sapiens
  CDR3 for beta chain variable domain of TCR clone 197489 (TRBV2, TRBJ1-6)
CASSLRPGGLMTSPLHF

SEQ ID NO: 394979 - protein, 12 aa, Homo sapiens
  CDR3 for alpha chain variable domain of TCR clone 197490 (TRAV17, TRAJ20)
CATALHDYKLSF

SEQ ID NO: 394980 - protein, 12 aa, Homo sapiens
  CDR3 for beta chain variable domain of TCR clone 197490 (TRBV10-3, TRBJ2-7)
CAHGADSGEQYF

SEQ ID NO: 394981 - protein, 14 aa, Homo sapiens
  CDR3 for alpha chain variable domain of TCR clone 197491 (TRAV9-2, TRAJ39)
CALYIYNAGNMLTF

SEQ ID NO: 394982 - protein, 14 aa, Homo sapiens
  CDR3 for beta chain variable domain of TCR clone 197491 (TRBV28, TRBJ2-7)
CAIVGQGNLYEQYF

SEQ ID NO: 394983 - protein, 12 aa, Homo sapiens
  CDR3 for alpha chain variable domain of TCR clone 197492 (TRAV3, TRAJ31)
CAVRDGNARLMF

SEQ ID NO: 394984 - protein, 12 aa, Homo sapiens
  CDR3 for beta chain variable domain of TCR clone 197492 (TRBV7-3, TRBJ2-1)
CASSFINNEQFF

SEQ ID NO: 394985 - protein, 13 aa, Homo sapiens
  CDR3 for alpha chain variable domain of TCR clone 197493 (TRAV20, TRAJ40)
CAVPFSGTYKYIF

SEQ ID NO: 394986 - protein, 15 aa, Homo sapiens
  CDR3 for beta chain variable domain of TCR clone 197493 (TRBV7-2, TRBJ2-1)
CASSSRTSREDEQFF

SEQ ID NO: 394987 - protein, 16 aa, Homo sapiens
  CDR3 for alpha chain variable domain of TCR clone 197494 (TRAV8-1, TRAJ39)
CAVNVPSYNAVNMLTF

SEQ ID NO: 394988 - protein, 15 aa, Homo sapiens
  CDR3 for beta chain variable domain of TCR clone 197494 (TRBV4-1, TRBJ2-3)
CASRSTRAGTDTQYF

SEQ ID NO: 394989 - protein, 12 aa, Homo sapiens
  CDR3 for alpha chain variable domain of TCR clone 197495 (TRAV8-3, TRAJ41)
CAVGALGYALNF

SEQ ID NO: 394990 - protein, 16 aa, Homo sapiens
  CDR3 for beta chain variable domain of TCR clone 197495 (TRBV7-6, TRBJ2-3)
CAISDSRGEGTDTQYF

SEQ ID NO: 394991 - protein, 11 aa, Homo sapiens
  CDR3 for alpha chain variable domain of TCR clone 197496 (TRAV13-1, TRAJ6)
CATLGSYIPTF

SEQ ID NO: 394992 - protein, 13 aa, Homo sapiens
  CDR3 for beta chain variable domain of TCR clone 197496 (TRBV12-4, TRBJ2-5)
CASSPGTEETQYF

SEQ ID NO: 394993 - protein, 12 aa, Homo sapiens
  CDR3 for alpha chain variable domain of TCR clone 197497 (TRAV27, TRAJ13)
CAGVRGYQKVTF

SEQ ID NO: 394994 - protein, 16 aa, Homo sapiens
  CDR3 for beta chain variable domain of TCR clone 197497 (TRBV28, TRBJ2-1)
CASSASYSGSLNEQFF

SEQ ID NO: 394995 - protein, 13 aa, Homo sapiens
  CDR3 for alpha chain variable domain of TCR clone 197498 (TRAV13-2, TRAJ48)
FAEVDFGNEKLNF

SEQ ID NO: 394996 - protein, 15 aa, Homo sapiens
  CDR3 for beta chain variable domain of TCR clone 197498 (TRBV7-9, TRBJ1-6)
CASSSAGRGNSPLHF

SEQ ID NO: 394997 - protein, 18 aa, Homo sapiens
  CDR3 for alpha chain variable domain of TCR clone 197499 (TRAV12-3, TRAJ52)
CAMSVGGADGTSYGKLTF

SEQ ID NO: 394998 - protein, 15 aa, Homo sapiens
  CDR3 for beta chain variable domain of TCR clone 197499 (TRBV19, TRBJ1-5)
CASSIVWADNQPQHF

SEQ ID NO: 394999 - protein, 12 aa, Homo sapiens
  CDR3 for alpha chain variable domain of TCR clone 197500 (TRAV13-2, TRAJ23)
CAERHRGGKLIF

SEQ ID NO: 395000 - protein, 15 aa, Homo sapiens
  CDR3 for beta chain variable domain of TCR clone 197500 (TRBV20-1, TRBJ1-1)
CSASRGVTGNTEAFF

SEQ ID NO: 395001 - protein, 19 aa, Homo sapiens
  CDR3 for alpha chain variable domain of TCR clone 197501 (TRAV36/DV7, TRAJ38)
CVANAGNNHIQNPDPAVYQ

SEQ ID NO: 395002 - protein, 15 aa, Homo sapiens
  CDR3 for beta chain variable domain of TCR clone 197501 (TRBV20-1, TRBJ2-7)
CSARDRVSGMDEQYF

SEQ ID NO: 395003 - protein, 13 aa, Homo sapiens
  CDR3 for alpha chain variable domain of TCR clone 197502 (TRAV23/DV6, TRAJ58)
CAARLIRGSRLTF

SEQ ID NO: 395004 - protein, 13 aa, Homo sapiens
  CDR3 for beta chain variable domain of TCR clone 197502 (TRBV2, TRBJ1-6)
CADSGSYNSPLHV

SEQ ID NO: 395005 - protein, 14 aa, Homo sapiens
  CDR3 for alpha chain variable domain of TCR clone 197503 (TRAV12-2, TRAJ13)
GAVKKTGGYQKVTF

SEQ ID NO: 395006 - protein, 15 aa, Homo sapiens
  CDR3 for beta chain variable domain of TCR clone 197503 (TRBV27, TRBJ2-1)
CASSNGGRSSNEQFF

SEQ ID NO: 395007 - protein, 13 aa, Homo sapiens
  CDR3 for alpha chain variable domain of TCR clone 197504 (TRAV21, TRAJ27)
CAALPGNAGKSTF

SEQ ID NO: 395008 - protein, 15 aa, Homo sapiens
  CDR3 for beta chain variable domain of TCR clone 197504 (TRBV11-3, TRBJ2-7)
CASSPGPASSYEQYF

SEQ ID NO: 395009 - protein, 16 aa, Homo sapiens
  CDR3 for alpha chain variable domain of TCR clone 197505 (TRAV30, TRAJ24)
CGTEIVDADSWGKFQF

SEQ ID NO: 395010 - protein, 14 aa, Homo sapiens
  CDR3 for beta chain variable domain of TCR clone 197505 (TRBV12-5, TRBJ2-5)
CVSGSRKHQETQYF

SEQ ID NO: 395011 - protein, 15 aa, Homo sapiens
  CDR3 for alpha chain variable domain of TCR clone 197506 (TRAV21, TRAJ24)
CAARSSTDSWGKLQF

SEQ ID NO: 395012 - protein, 13 aa, Homo sapiens
  CDR3 for beta chain variable domain of TCR clone 197506 (TRBV7-2, TRBJ1-5)
CASSFARNQPQHF

SEQ ID NO: 395013 - protein, 15 aa, Homo sapiens
  CDR3 for alpha chain variable domain of TCR clone 197507 (TRAV38-1, TRAJ37)
CAFMKGPGNTGKLIF

SEQ ID NO: 395014 - protein, 14 aa, Homo sapiens
  CDR3 for beta chain variable domain of TCR clone 197507 (TRBV11-2, TRBJ2-3)
CASSRLARTDTQYF

SEQ ID NO: 395015 - protein, 11 aa, Homo sapiens
  CDR3 for alpha chain variable domain of TCR clone 197508 (TRAV2, TRAJ13)
CASGGYQKVIF

SEQ ID NO: 395016 - protein, 15 aa, Homo sapiens
  CDR3 for beta chain variable domain of TCR clone 197508 (TRBV7-9, TRBJ1-6)
CASSSPGRGNSPLHF

SEQ ID NO: 395017 - protein, 22 aa, Homo sapiens
  CDR3 for alpha chain variable domain of TCR clone 197509 (TRAV1-1, TRAJ30)
CAVRDQTEMTRSSLEKGHDFVF

SEQ ID NO: 395018 - protein, 12 aa, Homo sapiens
  CDR3 for beta chain variable domain of TCR clone 197509 (TRBV28, TRBJ2-6)
CAIQAGANVLTF

SEQ ID NO: 395019 - protein, 14 aa, Homo sapiens
  CDR3 for alpha chain variable domain of TCR clone 197510 (TRAV12-3, TRAJ11)
CAMTTNSGYSTLTF

SEQ ID NO: 395020 - protein, 16 aa, Homo sapiens
  CDR3 for beta chain variable domain of TCR clone 197510 (TRBV20-1, TRBJ1-1)
CSARALTQGMNTESFF

SEQ ID NO: 395021 - protein, 16 aa, Homo sapiens
  CDR3 for alpha chain variable domain of TCR clone 197511 (TRAV8-3, TRAJ13)
CAVGAYPSGGYQKVTF

SEQ ID NO: 395022 - protein, 14 aa, Homo sapiens
  CDR3 for beta chain variable domain of TCR clone 197511 (TRBV7-6, TRBJ2-3)
CASSLGTVTDTQYF

SEQ ID NO: 395023 - protein, 15 aa, Homo sapiens
  CDR3 for alpha chain variable domain of TCR clone 197512 (TRAV12-2, TRAJ53)
CAVNGGGGSNYILTF

SEQ ID NO: 395024 - protein, 17 aa, Homo sapiens
  CDR3 for beta chain variable domain of TCR clone 197512 (TRBV7-3, TRBJ2-3)
CASSLMKRMRGADTQYF

SEQ ID NO: 395025 - protein, 15 aa, Homo sapiens
  CDR3 for alpha chain variable domain of TCR clone 197513 (TRAV3, TRAJ7)
CAVIDKDNGNNRLAF

SEQ ID NO: 395026 - protein, 19 aa, Homo sapiens
  CDR3 for beta chain variable domain of TCR clone 197513 (TRBV5-8, TRBJ2-3)
CASSFLGTSGSHRTDTQYF

SEQ ID NO: 395027 - protein, 17 aa, Homo sapiens
  CDR3 for alpha chain variable domain of TCR clone 197514 (TRAV3, TRAJ42)
CAVRDRDYGGSQGNLIF

SEQ ID NO: 395028 - protein, 14 aa, Homo sapiens
  CDR3 for beta chain variable domain of TCR clone 197514 (TRBV10-3, TRBJ2-7)
CHQCGTSETYEQYF

SEQ ID NO: 395029 - protein, 14 aa, Homo sapiens
  CDR3 for alpha chain variable domain of TCR clone 197515 (TRAV16, TRAJ54)
CALSGVQGAQTLVF

SEQ ID NO: 395030 - protein, 15 aa, Homo sapiens
  CDR3 for beta chain variable domain of TCR clone 197515 (TRBV18, TRBJ2-2)
CASSTSGLHTGELFF

SEQ ID NO: 395031 - protein, 11 aa, Homo sapiens
  CDR3 for alpha chain variable domain of TCR clone 197516 (TRAV23/DV6, TRAJ48)
CAPRWGEKLTF

SEQ ID NO: 395032 - protein, 13 aa, Homo sapiens
  CDR3 for beta chain variable domain of TCR clone 197516 (TRBV12-4, TRBJ2-5)
CASSPGTEETKYF

SEQ ID NO: 395033 - protein, 13 aa, Homo sapiens
  CDR3 for alpha chain variable domain of TCR clone 197517 (TRAV21, TRAJ32)
CAVSGGATKKLIF

SEQ ID NO: 395034 - protein, 15 aa, Homo sapiens
  CDR3 for beta chain variable domain of TCR clone 197517 (TRBV23-1, TRBJ2-1)
CASSQWPQLTMSSSS

SEQ ID NO: 395035 - protein, 10 aa, Homo sapiens
  CDR3 for alpha chain variable domain of TCR clone 197518 (TRAV12-2, TRAJ43)
CAVKVLSTRF

SEQ ID NO: 395036 - protein, 14 aa, Homo sapiens
  CDR3 for beta chain variable domain of TCR clone 197518 (TRBV11-2, TRBJ2-7)
CASSLGNSLYEQYF

SEQ ID NO: 395037 - protein, 14 aa, Homo sapiens
  CDR3 for alpha chain variable domain of TCR clone 197519 (TRAV35, TRAJ13)
CAGRSPGGYQKVTF

SEQ ID NO: 395038 - protein, 14 aa, Homo sapiens
  CDR3 for beta chain variable domain of TCR clone 197519 (TRBV19, TRBJ2-2)
CASSMVGLSGKLFF

SEQ ID NO: 395039 - protein, 12 aa, Homo sapiens
  CDR3 for alpha chain variable domain of TCR clone 197520 (TRAV3, TRAJ27)
CAVRDKAGKSPF

SEQ ID NO: 395040 - protein, 14 aa, Homo sapiens
  CDR3 for beta chain variable domain of TCR clone 197520 (TRBV15, TRBJ2-5)
CATSIGGLGETQYF

SEQ ID NO: 395041 - protein, 11 aa, Homo sapiens
  CDR3 for alpha chain variable domain of TCR clone 197521 (TRAV21, TRAJ11)
CAVNGYSTLTF

SEQ ID NO: 395042 - protein, 14 aa, Homo sapiens
  CDR3 for beta chain variable domain of TCR clone 197521 (TRBV12-4, TRBJ1-1)
CASGLGTGGTEAFF

SEQ ID NO: 395043 - protein, 16 aa, Homo sapiens
  CDR3 for alpha chain variable domain of TCR clone 197522 (TRAV3, TRAJ23)
CAVKIGIYNQGGKLIF

SEQ ID NO: 395044 - protein, 17 aa, Homo sapiens
  CDR3 for beta chain variable domain of TCR clone 197522 (TRBV10-3, TRBJ2-6)
SAISESTAPSGANVLTF

SEQ ID NO: 395045 - protein, 14 aa, Homo sapiens
  CDR3 for alpha chain variable domain of TCR clone 197523 (TRAV36/DV7, TRAJ40)
CAVEGASGTYKYIF

SEQ ID NO: 395046 - protein, 12 aa, Homo sapiens
  CDR3 for beta chain variable domain of TCR clone 197523 (TRBV12-4, TRBJ2-7)
CASSLGGYEQYF

SEQ ID NO: 395047 - protein, 13 aa, Homo sapiens
  CDR3 for alpha chain variable domain of TCR clone 197524 (TRAV26-1, TRAJ48)
CIVANFGNEKLTF

SEQ ID NO: 395048 - protein, 17 aa, Homo sapiens
  CDR3 for beta chain variable domain of TCR clone 197524 (TRBV13, TRBJ2-3)
CASSLSRVAGGRNTQYF

SEQ ID NO: 395049 - protein, 17 aa, Homo sapiens
  CDR3 for alpha chain variable domain of TCR clone 197525 (TRAV26-1, TRAJ28)
CIVRVPDSGAGSYQLPF

SEQ ID NO: 395050 - protein, 16 aa, Homo sapiens
  CDR3 for beta chain variable domain of TCR clone 197525 (TRBV28, TRBJ2-7)
GSSPLPAGGKSYEQYF

SEQ ID NO: 395051 - protein, 17 aa, Homo sapiens
  CDR3 for alpha chain variable domain of TCR clone 197526 (TRAV3, TRAJ42)
CAVRDRDYGGSQGNLIF

SEQ ID NO: 395052 - protein, 16 aa, Homo sapiens
  CDR3 for beta chain variable domain of TCR clone 197526 (TRBV7-3, TRBJ2-2)
CASSLKRGTLSGDLFF

SEQ ID NO: 395053 - protein, 16 aa, Homo sapiens
  CDR3 for alpha chain variable domain of TCR clone 197527 (TRAV3, TRAJ10)
CAVRDMNAGGGNKLTF

SEQ ID NO: 395054 - protein, 14 aa, Homo sapiens
  CDR3 for beta chain variable domain of TCR clone 197527 (TRBV5-1, TRBJ2-3)
CASSLFGPTDTQYF

SEQ ID NO: 395055 - protein, 14 aa, Homo sapiens
  CDR3 for alpha chain variable domain of TCR clone 197528 (TRAV12-2, TRAJ3)
CAVKGYSSSSKIIF

SEQ ID NO: 395056 - protein, 14 aa, Homo sapiens
  CDR3 for beta chain variable domain of TCR clone 197528 (TRBV6-3, TRBJ1-2)
CASSEGGGSYGYTF

SEQ ID NO: 395057 - protein, 16 aa, Homo sapiens
  CDR3 for alpha chain variable domain of TCR clone 197529 (TRAV26-1, TRAJ37)
FIYARHGSSNTGKLIF

SEQ ID NO: 395058 - protein, 16 aa, Homo sapiens
  CDR3 for beta chain variable domain of TCR clone 197529 (TRBV19, TRBJ2-4)
CATGGLAGGTKNIQYF

SEQ ID NO: 395059 - protein, 18 aa, Homo sapiens
  CDR3 for alpha chain variable domain of TCR clone 197530 (TRAV29/DV5, TRAJ26)
CSVLLCSKRKPEGQNFVF

SEQ ID NO: 395060 - protein, 12 aa, Homo sapiens
  CDR3 for beta chain variable domain of TCR clone 197530 (TRBV12-4, TRBJ1-5)
CASSLSGQPQHF

SEQ ID NO: 395061 - protein, 11 aa, Homo sapiens
  CDR3 for alpha chain variable domain of TCR clone 197531 (TRAV2, TRAJ13)
CASGGYQKVTF

SEQ ID NO: 395062 - protein, 14 aa, Homo sapiens
  CDR3 for beta chain variable domain of TCR clone 197531 (TRBV7-3, TRBJ2-3)
CASSSTGVADTQYF

SEQ ID NO: 395063 - protein, 13 aa, Homo sapiens
  CDR3 for alpha chain variable domain of TCR clone 197532 (TRAV2, TRAJ5)
CAVPYTGRRALTF

SEQ ID NO: 395064 - protein, 15 aa, Homo sapiens
  CDR3 for beta chain variable domain of TCR clone 197532 (TRBV7-3, TRBJ2-1)
CASSPTGGGEVEQFF

SEQ ID NO: 395065 - protein, 13 aa, Homo sapiens
  CDR3 for alpha chain variable domain of TCR clone 197533 (TRAV23/DV6, TRAJ22)
CAPYPGSARQLTF

SEQ ID NO: 395066 - protein, 13 aa, Homo sapiens
  CDR3 for beta chain variable domain of TCR clone 197533 (TRBV6-1, TRBJ1-1)
CASSRQGNTEAFF

SEQ ID NO: 395067 - protein, 15 aa, Homo sapiens
  CDR3 for alpha chain variable domain of TCR clone 197534 (TRAV35, TRAJ33)
CAGQPPRYSNYQLIW

SEQ ID NO: 395068 - protein, 14 aa, Homo sapiens
  CDR3 for beta chain variable domain of TCR clone 197534 (TRBV5-4, TRBJ1-1)
CASSLDSRRDEAFF

SEQ ID NO: 395069 - protein, 14 aa, Homo sapiens
  CDR3 for alpha chain variable domain of TCR clone 197535 (TRAV1-2, TRAJ16)
CAVNRFSDGQKLLF

SEQ ID NO: 395070 - protein, 15 aa, Homo sapiens
  CDR3 for beta chain variable domain of TCR clone 197535 (TRBV27, TRBJ2-1)
CASRNGGGSSNEQFF

SEQ ID NO: 395071 - protein, 14 aa, Homo sapiens
  CDR3 for alpha chain variable domain of TCR clone 197536 (TRAV38-1, TRAJ27)
CAFIHNTNAGKSTF

SEQ ID NO: 395072 - protein, 14 aa, Homo sapiens
  CDR3 for beta chain variable domain of TCR clone 197536 (TRBV11-2, TRBJ2-1)
CQQQKPGLIYEQFF

SEQ ID NO: 395073 - protein, 14 aa, Homo sapiens
  CDR3 for alpha chain variable domain of TCR clone 197537 (TRAV21, TRAJ52)
CGWAGGTSYGKLTF

SEQ ID NO: 395074 - protein, 14 aa, Homo sapiens
  CDR3 for beta chain variable domain of TCR clone 197537 (TRBV19, TRBJ1-2)
CASSVLGYNYGYTF

SEQ ID NO: 395075 - protein, 14 aa, Homo sapiens
  CDR3 for alpha chain variable domain of TCR clone 197538 (TRAV1-2, TRAJ8)
CAAREDTGFQKLVF

SEQ ID NO: 395076 - protein, 16 aa, Homo sapiens
  CDR3 for beta chain variable domain of TCR clone 197538 (TRBV4-2, TRBJ2-3)
CASSQELAGDTDTQYF

SEQ ID NO: 395077 - protein, 11 aa, Homo sapiens
  CDR3 for alpha chain variable domain of TCR clone 197539 (TRAV21, TRAJ11)
CAVNGYGTLTI

SEQ ID NO: 395078 - protein, 11 aa, Homo sapiens
  CDR3 for beta chain variable domain of TCR clone 197539 (TRBV19, TRBJ1-1)
CASSIGSEAFF

SEQ ID NO: 395079 - protein, 14 aa, Homo sapiens
  CDR3 for alpha chain variable domain of TCR clone 197540 (TRAV1-1, TRAJ27)
CAVIYNTNAGKSTF

SEQ ID NO: 395080 - protein, 14 aa, Homo sapiens
  CDR3 for beta chain variable domain of TCR clone 197540 (TRBV7-2, TRBJ2-2)
CASSLNSNTGELFF

SEQ ID NO: 395081 - protein, 12 aa, Homo sapiens
  CDR3 for alpha chain variable domain of TCR clone 197541 (TRAV21, TRAJ33)
CSKMDSNYQLIW

SEQ ID NO: 395082 - protein, 14 aa, Homo sapiens
  CDR3 for beta chain variable domain of TCR clone 197541 (TRBV11-3, TRBJ2-3)
CASSLVTTTDTQYF

SEQ ID NO: 395083 - protein, 18 aa, Homo sapiens
  CDR3 for alpha chain variable domain of TCR clone 197542 (TRAV21, TRAJ52)
CAVRPSPAGGTSYGELTF

SEQ ID NO: 395084 - protein, 14 aa, Homo sapiens
  CDR3 for beta chain variable domain of TCR clone 197542 (TRBV11-1, TRBJ2-7)
CASSFRQGSYEQYF

SEQ ID NO: 395085 - protein, 14 aa, Homo sapiens
  CDR3 for alpha chain variable domain of TCR clone 197543 (TRAV38-1, TRAJ29)
CAFITPSGNTPLVF

SEQ ID NO: 395086 - protein, 18 aa, Homo sapiens
  CDR3 for beta chain variable domain of TCR clone 197543 (TRBV18, TRBJ2-1)
CASSRLAGDQNSYNEQFF

SEQ ID NO: 395087 - protein, 13 aa, Homo sapiens
  CDR3 for alpha chain variable domain of TCR clone 197544 (TRAV25, TRAJ54)
CAGTIKGAQKLVF

SEQ ID NO: 395088 - protein, 15 aa, Homo sapiens
  CDR3 for beta chain variable domain of TCR clone 197544 (TRBV19, TRBJ1-5)
CASSILTGENQPQHF

SEQ ID NO: 395089 - protein, 16 aa, Homo sapiens
  CDR3 for alpha chain variable domain of TCR clone 197545 (TRAV4, TRAJ22)
CLVGDLNSGSARQMTF

SEQ ID NO: 395090 - protein, 17 aa, Homo sapiens
  CDR3 for beta chain variable domain of TCR clone 197545 (TRBV13, TRBJ2-3)
CASSLSRVAGGRNTQYF

SEQ ID NO: 395091 - protein, 13 aa, Homo sapiens
  CDR3 for alpha chain variable domain of TCR clone 197546 (TRAV13-1, TRAJ10)
CAALEGGGNKLTF

SEQ ID NO: 395092 - protein, 17 aa, Homo sapiens
  CDR3 for beta chain variable domain of TCR clone 197546 (TRBV7-3, TRBJ2-2)
CASSFSGTSGGTGELFF

SEQ ID NO: 395093 - protein, 14 aa, Homo sapiens
  CDR3 for alpha chain variable domain of TCR clone 197547 (TRAV12-2, TRAJ15)
RAPHTGQAGTALIF

SEQ ID NO: 395094 - protein, 15 aa, Homo sapiens
  CDR3 for beta chain variable domain of TCR clone 197547 (TRBV7-3, TRBJ2-1)
CASSPTGGGEVEQFF

SEQ ID NO: 395095 - protein, 13 aa, Homo sapiens
  CDR3 for alpha chain variable domain of TCR clone 197548 (TRAV2, TRAJ23)
CAVMGNQGGKLIF

SEQ ID NO: 395096 - protein, 15 aa, Homo sapiens
  CDR3 for beta chain variable domain of TCR clone 197548 (TRBV11-2, TRBJ2-1)
CASSSSTISYNEQSF

SEQ ID NO: 395097 - protein, 11 aa, Homo sapiens
  CDR3 for alpha chain variable domain of TCR clone 197549 (TRAV21, TRAJ34)
CAVTNTDKLIF

SEQ ID NO: 395098 - protein, 17 aa, Homo sapiens
  CDR3 for beta chain variable domain of TCR clone 197549 (TRBV18, TRBJ2-1)
CASSKGLSGGADNEQFF

SEQ ID NO: 395099 - protein, 23 aa, Homo sapiens
  CDR3 for alpha chain variable domain of TCR clone 197550 (TRAV8-3, )
CAVVTTRIPDIQNPDPAVYQLRD

SEQ ID NO: 395100 - protein, 14 aa, Homo sapiens
  CDR3 for beta chain variable domain of TCR clone 197550 (TRBV11-2, TRBJ2-7)
CASIPSTTSYEQYF

SEQ ID NO: 395101 - protein, 12 aa, Homo sapiens
  CDR3 for alpha chain variable domain of TCR clone 197551 (TRAV13-1, TRAJ48)
CAAHFGNEKLTF

SEQ ID NO: 395102 - protein, 15 aa, Homo sapiens
  CDR3 for beta chain variable domain of TCR clone 197551 (TRBV7-9, TRBJ2-1)
CASSLGLAGGTEQFF

SEQ ID NO: 395103 - protein, 13 aa, Homo sapiens
  CDR3 for alpha chain variable domain of TCR clone 197552 (TRAV21, TRAJ20)
CAVGLRVDYKLSF

SEQ ID NO: 395104 - protein, 14 aa, Homo sapiens
  CDR3 for beta chain variable domain of TCR clone 197552 (TRBV20-1, TRBJ2-2)
CSAPDTANTGELFF

SEQ ID NO: 395105 - protein, 14 aa, Homo sapiens
  CDR3 for alpha chain variable domain of TCR clone 197553 (TRAV9-2, TRAJ38)
CALRGAGNIRKLIW

SEQ ID NO: 395106 - protein, 14 aa, Homo sapiens
  CDR3 for beta chain variable domain of TCR clone 197553 (TRBV13, TRBJ2-2)
CASSFQGGAGELFF

SEQ ID NO: 395107 - protein, 16 aa, Homo sapiens
  CDR3 for alpha chain variable domain of TCR clone 197554 (TRAV3, TRAJ21)
CAVRDIERGNFNKFYF

SEQ ID NO: 395108 - protein, 15 aa, Homo sapiens
  CDR3 for beta chain variable domain of TCR clone 197554 (TRBV5-1, TRBJ1-2)
CASSLVGGQSQGYTF

SEQ ID NO: 395109 - protein, 20 aa, Homo sapiens
  CDR3 for alpha chain variable domain of TCR clone 197555 (TRAV12-2, TRAJ43)
SPVIQPPTSVPLRLGNDMRF

SEQ ID NO: 395110 - protein, 12 aa, Homo sapiens
  CDR3 for beta chain variable domain of TCR clone 197555 (TRBV20-1, TRBJ2-7)
CSAGLKMGEQYF

SEQ ID NO: 395111 - protein, 17 aa, Homo sapiens
  CDR3 for alpha chain variable domain of TCR clone 197556 (TRAV3, TRAJ38)
CAVRDCLNAGNNRKRIG

SEQ ID NO: 395112 - protein, 15 aa, Homo sapiens
  CDR3 for beta chain variable domain of TCR clone 197556 (TRBV27, TRBJ2-1)
CASSNGGGSSNEQFF

SEQ ID NO: 395113 - protein, 12 aa, Homo sapiens
  CDR3 for alpha chain variable domain of TCR clone 197557 (TRAV1-2, TRAJ7)
CAVAYGNNRLAF

SEQ ID NO: 395114 - protein, 16 aa, Homo sapiens
  CDR3 for beta chain variable domain of TCR clone 197557 (TRBV5-1, TRBJ2-7)
CASSPMTGALPYEQYF

SEQ ID NO: 395115 - protein, 13 aa, Homo sapiens
  CDR3 for alpha chain variable domain of TCR clone 197558 (TRAV8-2, TRAJ36)
CVVSHLPTNNLFF

SEQ ID NO: 395116 - protein, 18 aa, Homo sapiens
  CDR3 for beta chain variable domain of TCR clone 197558 (TRBV7-9, TRBJ2-6)
CASSFPGAGISGANDLTF

SEQ ID NO: 395117 - protein, 15 aa, Homo sapiens
  CDR3 for alpha chain variable domain of TCR clone 197559 (TRAV4, TRAJ39)
CLVGPNSNAGNMLTF

SEQ ID NO: 395118 - protein, 12 aa, Homo sapiens
  CDR3 for beta chain variable domain of TCR clone 197559 (TRBV12-4, TRBJ2-7)
CASNPGGGEQYF

SEQ ID NO: 395119 - protein, 14 aa, Homo sapiens
  CDR3 for alpha chain variable domain of TCR clone 197560 (TRAV12-2, TRAJ3)
CAVSLYSSASKIIF

SEQ ID NO: 395120 - protein, 14 aa, Homo sapiens
  CDR3 for beta chain variable domain of TCR clone 197560 (TRBV19, TRBJ2-1)
CASPTFVLSGEQFF

SEQ ID NO: 395121 - protein, 20 aa, Homo sapiens
  CDR3 for alpha chain variable domain of TCR clone 197561 (TRAV1-2, TRAJ34)
LLKELQMKDSASPNTDKLIF

SEQ ID NO: 395122 - protein, 12 aa, Homo sapiens
  CDR3 for beta chain variable domain of TCR clone 197561 (TRBV11-2, TRBJ2-2)
CASSLPTGELFF

SEQ ID NO: 395123 - protein, 18 aa, Homo sapiens
  CDR3 for alpha chain variable domain of TCR clone 197562 (TRAV8-6, TRAJ39)
CAVTPQGLIDNAGNGLTF

SEQ ID NO: 395124 - protein, 15 aa, Homo sapiens
  CDR3 for beta chain variable domain of TCR clone 197562 (TRBV9, TRBJ2-1)
CASSVGSGFYNEQFF

SEQ ID NO: 395125 - protein, 14 aa, Homo sapiens
  CDR3 for alpha chain variable domain of TCR clone 197563 (TRAV8-4, TRAJ17)
GAVSEGAAGNKLTF

SEQ ID NO: 395126 - protein, 13 aa, Homo sapiens
  CDR3 for beta chain variable domain of TCR clone 197563 (TRBV19, TRBJ2-1)
CASSMYRVNEQFF

SEQ ID NO: 395127 - protein, 15 aa, Homo sapiens
  CDR3 for alpha chain variable domain of TCR clone 197564 (TRAV30, TRAJ57)
CGTAIPQGGSEKLVF

SEQ ID NO: 395128 - protein, 13 aa, Homo sapiens
  CDR3 for beta chain variable domain of TCR clone 197564 (TRBV7-9, TRBJ1-2)
CASSTSNFWGYTF

SEQ ID NO: 395129 - protein, 11 aa, Homo sapiens
  CDR3 for alpha chain variable domain of TCR clone 197565 (TRAV21, TRAJ34)
CAVTNTDKLIF

SEQ ID NO: 395130 - protein, 15 aa, Homo sapiens
  CDR3 for beta chain variable domain of TCR clone 197565 (TRBV19, TRBJ1-1)
CASTSGQIQNTEAFF

SEQ ID NO: 395131 - protein, 16 aa, Homo sapiens
  CDR3 for alpha chain variable domain of TCR clone 197566 (TRAV12-3, TRAJ50)
CAMRDPMKTSYDKVIF

SEQ ID NO: 395132 - protein, 15 aa, Homo sapiens
  CDR3 for beta chain variable domain of TCR clone 197566 (TRBV4-1, TRBJ2-5)
CASSQWDLYQETQYF

SEQ ID NO: 395133 - protein, 17 aa, Homo sapiens
  CDR3 for alpha chain variable domain of TCR clone 197567 (TRAV38-2/DV8, TRAJ23)
CALSRKLIFGQGTELSV

SEQ ID NO: 395134 - protein, 14 aa, Homo sapiens
  CDR3 for beta chain variable domain of TCR clone 197567 (TRBV28, TRBJ2-3)
CASSLTDLLDTQYF

SEQ ID NO: 395135 - protein, 18 aa, Homo sapiens
  CDR3 for alpha chain variable domain of TCR clone 197568 (TRAV26-1, TRAJ23)
CIVRVGLEVWKQGGKPIF

SEQ ID NO: 395136 - protein, 16 aa, Homo sapiens
  CDR3 for beta chain variable domain of TCR clone 197568 (TRBV12-4, TRBJ2-5)
CASSFFVRGRQETQYF

SEQ ID NO: 395137 - protein, 14 aa, Homo sapiens
  CDR3 for alpha chain variable domain of TCR clone 197569 (TRAV3, TRAJ28)
CAVRRGAGSYQLTF

SEQ ID NO: 395138 - protein, 15 aa, Homo sapiens
  CDR3 for beta chain variable domain of TCR clone 197569 (TRBV10-2, TRBJ2-6)
CASSEQGTGANVLTF

SEQ ID NO: 395139 - protein, 13 aa, Homo sapiens
  CDR3 for alpha chain variable domain of TCR clone 197570 (TRAV13-2, TRAJ48)
CAEMDFGNEKLTF

SEQ ID NO: 395140 - protein, 15 aa, Homo sapiens
  CDR3 for beta chain variable domain of TCR clone 197570 (TRBV5-1, TRBJ2-4)
CASSLGGGGSYIQYF

SEQ ID NO: 395141 - protein, 15 aa, Homo sapiens
  CDR3 for alpha chain variable domain of TCR clone 197571 (TRAV21, TRAJ32)
CAAAPYGVATNKLIF

SEQ ID NO: 395142 - protein, 17 aa, Homo sapiens
  CDR3 for beta chain variable domain of TCR clone 197571 (TRBV18, TRBJ2-3)
CASSPFGDGGFTDTQYF

SEQ ID NO: 395143 - protein, 14 aa, Homo sapiens
  CDR3 for alpha chain variable domain of TCR clone 197572 (TRAV13-1, TRAJ35)
CAASKGGFGNGLHC

SEQ ID NO: 395144 - protein, 13 aa, Homo sapiens
  CDR3 for beta chain variable domain of TCR clone 197572 (TRBV7-3, TRBJ1-1)
RASSQDWGAEAFF

SEQ ID NO: 395145 - protein, 17 aa, Homo sapiens
  CDR3 for alpha chain variable domain of TCR clone 197573 (TRAV3, TRAJ42)
CAVRDREYGGSQGNLIF

SEQ ID NO: 395146 - protein, 15 aa, Homo sapiens
  CDR3 for beta chain variable domain of TCR clone 197573 (TRBV9, TRBJ1-6)
CASSVAGTGDSPLHF

SEQ ID NO: 395147 - protein, 13 aa, Homo sapiens
  CDR3 for alpha chain variable domain of TCR clone 197574 (TRAV1-1, TRAJ7)
CAVRDHGNNRLAV

SEQ ID NO: 395148 - protein, 20 aa, Homo sapiens
  CDR3 for beta chain variable domain of TCR clone 197574 (TRBV28, TRBJ2-3)
CASSLGVRSTSGRSTDTQYF

SEQ ID NO: 395149 - protein, 13 aa, Homo sapiens
  CDR3 for alpha chain variable domain of TCR clone 197575 (TRAV3, TRAJ21)
CAVREPDFNKFYF

SEQ ID NO: 395150 - protein, 14 aa, Homo sapiens
  CDR3 for beta chain variable domain of TCR clone 197575 (TRBV11-2, TRBJ2-5)
CASRPLAGRETQYF

SEQ ID NO: 395151 - protein, 14 aa, Homo sapiens
  CDR3 for alpha chain variable domain of TCR clone 197576 (TRAV1-2, TRAJ8)
CAVREDTGCQKLVL

SEQ ID NO: 395152 - protein, 13 aa, Homo sapiens
  CDR3 for beta chain variable domain of TCR clone 197576 (TRBV27, TRBJ1-1)
CASSLSIGAEAFF

SEQ ID NO: 395153 - protein, 14 aa, Homo sapiens
  CDR3 for alpha chain variable domain of TCR clone 197577 (TRAV21, TRAJ12)
CAVRNGDSSYKLMF

SEQ ID NO: 395154 - protein, 14 aa, Homo sapiens
  CDR3 for beta chain variable domain of TCR clone 197577 (TRBV7-6, TRBJ2-7)
CASSLTGTGNEQYF

SEQ ID NO: 395155 - protein, 14 aa, Homo sapiens
  CDR3 for alpha chain variable domain of TCR clone 197578 (TRAV1-2, TRAJ16)
CAVNRFSDGQKLLF

SEQ ID NO: 395156 - protein, 12 aa, Homo sapiens
  CDR3 for beta chain variable domain of TCR clone 197578 (TRBV7-3, TRBJ2-1)
CASSFINNEQFF

SEQ ID NO: 395157 - protein, 14 aa, Homo sapiens
  CDR3 for alpha chain variable domain of TCR clone 197579 (TRAV26-1, TRAJ16)
CIVRVPSDGQKLLF

SEQ ID NO: 395158 - protein, 15 aa, Homo sapiens
  CDR3 for beta chain variable domain of TCR clone 197579 (TRBV4-1, TRBJ2-5)
CASSQWDLYQETQYF

SEQ ID NO: 395159 - protein, 15 aa, Homo sapiens
  CDR3 for alpha chain variable domain of TCR clone 197580 (TRAV26-1, TRAJ29)
CIVRVEGSGNTPLVF

SEQ ID NO: 395160 - protein, 14 aa, Homo sapiens
  CDR3 for beta chain variable domain of TCR clone 197580 (TRBV7-2, TRBJ2-7)
CASSLRWEVNEQYF

SEQ ID NO: 395161 - protein, 13 aa, Homo sapiens
  CDR3 for alpha chain variable domain of TCR clone 197581 (TRAV16, TRAJ28)
CAPTGAGSYQLTF

SEQ ID NO: 395162 - protein, 16 aa, Homo sapiens
  CDR3 for beta chain variable domain of TCR clone 197581 (TRBV28, TRBJ1-5)
CASSLTGQGWKQPQHF

SEQ ID NO: 395163 - protein, 11 aa, Homo sapiens
  CDR3 for alpha chain variable domain of TCR clone 197582 (TRAV1-1, TRAJ23)
CAVRQGGKLIF

SEQ ID NO: 395164 - protein, 20 aa, Homo sapiens
  CDR3 for beta chain variable domain of TCR clone 197582 (TRBV7-8, TRBJ2-2)
CASSHLFPGPAIHNTGELFF

SEQ ID NO: 395165 - protein, 19 aa, Homo sapiens
  CDR3 for alpha chain variable domain of TCR clone 197583 (TRAV8-4, TRAJ3)
CAVTGENLVQQCFQDNLLI

SEQ ID NO: 395166 - protein, 14 aa, Homo sapiens
  CDR3 for beta chain variable domain of TCR clone 197583 (TRBV25-1, TRBJ1-1)
CASTHLGGNTEAFF

SEQ ID NO: 395167 - protein, 13 aa, Homo sapiens
  CDR3 for alpha chain variable domain of TCR clone 197584 (TRAV27, TRAJ53)
CAGQGGSNYKLTF

SEQ ID NO: 395168 - protein, 13 aa, Homo sapiens
  CDR3 for beta chain variable domain of TCR clone 197584 (TRBV29-1, TRBJ1-1)
CSVESGFGTESFF

SEQ ID NO: 395169 - protein, 14 aa, Homo sapiens
  CDR3 for alpha chain variable domain of TCR clone 197585 (TRAV12-3, TRAJ5)
CAMSADTGRRALTF

SEQ ID NO: 395170 - protein, 14 aa, Homo sapiens
  CDR3 for beta chain variable domain of TCR clone 197585 (TRBV18, TRBJ2-7)
CASSPRGGAYEQYF

SEQ ID NO: 395171 - protein, 15 aa, Homo sapiens
  CDR3 for alpha chain variable domain of TCR clone 197586 (TRAV12-1, TRAJ4)
CVVNPLSGCYNKLIF

SEQ ID NO: 395172 - protein, 13 aa, Homo sapiens
  CDR3 for beta chain variable domain of TCR clone 197586 (TRBV20-1, TRBJ1-2)
CSARGTADYGYTF

SEQ ID NO: 395173 - protein, 13 aa, Homo sapiens
  CDR3 for alpha chain variable domain of TCR clone 197587 (TRAV1-1, TRAJ9)
CAAKNTGGFKTIF

SEQ ID NO: 395174 - protein, 13 aa, Homo sapiens
  CDR3 for beta chain variable domain of TCR clone 197587 (TRBV10-3, TRBJ1-2)
CAISERDSYGYTF

SEQ ID NO: 395175 - protein, 13 aa, Homo sapiens
  CDR3 for alpha chain variable domain of TCR clone 197588 (TRAV38-2/DV8, TRAJ53)
CASGGGSNYKLTV

SEQ ID NO: 395176 - protein, 16 aa, Homo sapiens
  CDR3 for beta chain variable domain of TCR clone 197588 (TRBV28, TRBJ1-5)
CASRCRGAVQNQPQHF

SEQ ID NO: 395177 - protein, 16 aa, Homo sapiens
  CDR3 for alpha chain variable domain of TCR clone 197589 (TRAV1-2, TRAJ10)
CAVRGVLTGGGNKLTF

SEQ ID NO: 395178 - protein, 15 aa, Homo sapiens
  CDR3 for beta chain variable domain of TCR clone 197589 (TRBV28, TRBJ2-7)
CASSVRQVSSYEQYF

SEQ ID NO: 395179 - protein, 14 aa, Homo sapiens
  CDR3 for alpha chain variable domain of TCR clone 197590 (TRAV29/DV5, TRAJ45)
CAPYSGGGVDGLTF

SEQ ID NO: 395180 - protein, 13 aa, Homo sapiens
  CDR3 for beta chain variable domain of TCR clone 197590 (TRBV29-1, TRBJ2-3)
CSATRGGRDTQYF

SEQ ID NO: 395181 - protein, 14 aa, Homo sapiens
  CDR3 for alpha chain variable domain of TCR clone 197591 (TRAV26-1, TRAJ38)
CIADNAGNNRKLIW

SEQ ID NO: 395182 - protein, 14 aa, Homo sapiens
  CDR3 for beta chain variable domain of TCR clone 197591 (TRBV5-1, TRBJ2-5)
CASSLSLNQETQYF

SEQ ID NO: 395183 - protein, 16 aa, Homo sapiens
  CDR3 for alpha chain variable domain of TCR clone 197592 (TRAV3, TRAJ37)
CAVRGKGSGNTGKLIF

SEQ ID NO: 395184 - protein, 13 aa, Homo sapiens
  CDR3 for beta chain variable domain of TCR clone 197592 (TRBV19, TRBJ1-2)
CASSVPGQDGYIF

SEQ ID NO: 395185 - protein, 14 aa, Homo sapiens
  CDR3 for alpha chain variable domain of TCR clone 197593 (TRAV2, TRAJ9)
CAVEEGTGGFKISF

SEQ ID NO: 395186 - protein, 17 aa, Homo sapiens
  CDR3 for beta chain variable domain of TCR clone 197593 (TRBV5-4, TRBJ2-1)
CASSSAGGRGPYNEQFF

SEQ ID NO: 395187 - protein, 13 aa, Homo sapiens
  CDR3 for alpha chain variable domain of TCR clone 197594 (TRAV20, TRAJ42)
CAVQGGSQGNLIF

SEQ ID NO: 395188 - protein, 15 aa, Homo sapiens
  CDR3 for beta chain variable domain of TCR clone 197594 (TRBV10-1, TRBJ2-1)
CASSEWRGTYNEQCF

SEQ ID NO: 395189 - protein, 11 aa, Homo sapiens
  CDR3 for alpha chain variable domain of TCR clone 197595 (TRAV2, TRAJ33)
CAVESNYQLIW

SEQ ID NO: 395190 - protein, 12 aa, Homo sapiens
  CDR3 for beta chain variable domain of TCR clone 197595 (TRBV5-1, TRBJ2-7)
CASSLDSYEQYF

SEQ ID NO: 395191 - protein, 16 aa, Homo sapiens
  CDR3 for alpha chain variable domain of TCR clone 197596 (TRAV26-1, TRAJ37)
CIYARHGSSNTGKLIF

SEQ ID NO: 395192 - protein, 16 aa, Homo sapiens
  CDR3 for beta chain variable domain of TCR clone 197596 (TRBV19, TRBJ2-4)
CATGGLAGGTKNSQYF

SEQ ID NO: 395193 - protein, 13 aa, Homo sapiens
  CDR3 for alpha chain variable domain of TCR clone 197597 (TRAV35, TRAJ44)
CAGLSGTASKLTF

SEQ ID NO: 395194 - protein, 16 aa, Homo sapiens
  CDR3 for beta chain variable domain of TCR clone 197597 (TRBV4-1, TRBJ2-3)
CASSQRAVGLTDTQYF

SEQ ID NO: 395195 - protein, 13 aa, Homo sapiens
  CDR3 for alpha chain variable domain of TCR clone 197598 (TRAV41, TRAJ48)
SVPVNFGNEKLTF

SEQ ID NO: 395196 - protein, 16 aa, Homo sapiens
  CDR3 for beta chain variable domain of TCR clone 197598 (TRBV12-5, TRBJ2-5)
CASGPRTSGKQETQYF

SEQ ID NO: 395197 - protein, 14 aa, Homo sapiens
  CDR3 for alpha chain variable domain of TCR clone 197599 (TRAV38-1, TRAJ30)
CAFMPMNREDKIIF

SEQ ID NO: 395198 - protein, 15 aa, Homo sapiens
  CDR3 for beta chain variable domain of TCR clone 197599 (TRBV7-9, TRBJ2-7)
CASSLDLQGPYEQYF

SEQ ID NO: 395199 - protein, 13 aa, Homo sapiens
  CDR3 for alpha chain variable domain of TCR clone 197600 (TRAV12-3, TRAJ9)
CAMRNTGGFKTIF

SEQ ID NO: 395200 - protein, 13 aa, Homo sapiens
  CDR3 for beta chain variable domain of TCR clone 197600 (TRBV27, TRBJ2-1)
CASRTLGVGEQFV

SEQ ID NO: 395201 - protein, 11 aa, Homo sapiens
  CDR3 for alpha chain variable domain of TCR clone 197601 (TRAV3, TRAJ21)
CAVGNFNKFYF

SEQ ID NO: 395202 - protein, 18 aa, Homo sapiens
  CDR3 for beta chain variable domain of TCR clone 197601 (TRBV7-2, TRBJ2-1)
CASSFGTSGSRSYNEQFF

SEQ ID NO: 395203 - protein, 14 aa, Homo sapiens
  CDR3 for alpha chain variable domain of TCR clone 197602 (TRAV9-2, TRAJ39)
CALYIYNAGNMLTF

SEQ ID NO: 395204 - protein, 13 aa, Homo sapiens
  CDR3 for beta chain variable domain of TCR clone 197602 (TRBV15, TRBJ1-6)
CATSGGLNSTLHF

SEQ ID NO: 395205 - protein, 15 aa, Homo sapiens
  CDR3 for alpha chain variable domain of TCR clone 197603 (TRAV17, TRAJ57)
CATGPSQGGSEKLVF

SEQ ID NO: 395206 - protein, 15 aa, Homo sapiens
  CDR3 for beta chain variable domain of TCR clone 197603 (TRBV7-9, TRBJ1-6)
CASSSPGRGNSPLYF

SEQ ID NO: 395207 - protein, 13 aa, Homo sapiens
  CDR3 for alpha chain variable domain of TCR clone 197604 (TRAV12-2, TRAJ52)
CAVSGTSYGKLTF

SEQ ID NO: 395208 - protein, 17 aa, Homo sapiens
  CDR3 for beta chain variable domain of TCR clone 197604 (TRBV11-2, TRBJ2-1)
CASSLYPPGVGYNEQFF

SEQ ID NO: 395209 - protein, 14 aa, Homo sapiens
  CDR3 for alpha chain variable domain of TCR clone 197605 (TRAV12-2, TRAJ17)
CAVLFKAAGSKLTF

SEQ ID NO: 395210 - protein, 17 aa, Homo sapiens
  CDR3 for beta chain variable domain of TCR clone 197605 (TRBV11-2, TRBJ2-1)
CASSLYPPGVEYNEQFF

SEQ ID NO: 395211 - protein, 19 aa, Homo sapiens
  CDR3 for alpha chain variable domain of TCR clone 197606 (TRAV3, TRAJ37)
CAVRDIVGGYPSNTGKLIL

SEQ ID NO: 395212 - protein, 14 aa, Homo sapiens
  CDR3 for beta chain variable domain of TCR clone 197606 (TRBV7-8, TRBJ2-3)
CASSLEAGTNTQYF

SEQ ID NO: 395213 - protein, 13 aa, Homo sapiens
  CDR3 for alpha chain variable domain of TCR clone 197607 (TRAV36/DV7, TRAJ37)
CAVFSSNTGKLIF

SEQ ID NO: 395214 - protein, 12 aa, Homo sapiens
  CDR3 for beta chain variable domain of TCR clone 197607 (TRBV11-2, TRBJ2-2)
CASSLVGGELFF

SEQ ID NO: 395215 - protein, 16 aa, Homo sapiens
  CDR3 for alpha chain variable domain of TCR clone 197608 (TRAV8-2, TRAJ4)
CVVSPSGGYNKLILEQ

SEQ ID NO: 395216 - protein, 15 aa, Homo sapiens
  CDR3 for beta chain variable domain of TCR clone 197608 (TRBV2, TRBJ2-1)
CASSELAGSYNEQFF

SEQ ID NO: 395217 - protein, 14 aa, Homo sapiens
  CDR3 for alpha chain variable domain of TCR clone 197609 (TRAV12-1, TRAJ17)
CVVNYKAAGNKLTF

SEQ ID NO: 395218 - protein, 12 aa, Homo sapiens
  CDR3 for beta chain variable domain of TCR clone 197609 (TRBV7-3, TRBJ2-1)
CASSFINNEQFF

SEQ ID NO: 395219 - protein, 17 aa, Homo sapiens
  CDR3 for alpha chain variable domain of TCR clone 197610 (TRAV3, TRAJ6)
CAVRDCPRAGGSYIPTF

SEQ ID NO: 395220 - protein, 14 aa, Homo sapiens
  CDR3 for beta chain variable domain of TCR clone 197610 (TRBV7-2, TRBJ2-7)
CASSPETSFYEQYF

SEQ ID NO: 395221 - protein, 15 aa, Homo sapiens
  CDR3 for alpha chain variable domain of TCR clone 197611 (TRAV3, TRAJ22)
CAVRDRGGSARKLPF

SEQ ID NO: 395222 - protein, 13 aa, Homo sapiens
  CDR3 for beta chain variable domain of TCR clone 197611 (TRBV2, TRBJ1-5)
CATAGPGNQPQHF

SEQ ID NO: 395223 - protein, 14 aa, Homo sapiens
  CDR3 for alpha chain variable domain of TCR clone 197612 (TRAV26-1, TRAJ8)
CIVRVDTGFQKLVF

SEQ ID NO: 395224 - protein, 12 aa, Homo sapiens
  CDR3 for beta chain variable domain of TCR clone 197612 (TRBV11-2, TRBJ2-2)
CASSLPTGELFF

SEQ ID NO: 395225 - protein, 16 aa, Homo sapiens
  CDR3 for alpha chain variable domain of TCR clone 197613 (TRAV12-1, TRAJ42)
CVVTPYYGGSQGNLIF

SEQ ID NO: 395226 - protein, 15 aa, Homo sapiens
  CDR3 for beta chain variable domain of TCR clone 197613 (TRBV6-3, TRBJ2-2)
CASSFLATLTGELFF

SEQ ID NO: 395227 - protein, 14 aa, Homo sapiens
  CDR3 for alpha chain variable domain of TCR clone 197614 (TRAV12-2, TRAJ13)
CAVKKTGGYQKVTF

SEQ ID NO: 395228 - protein, 19 aa, Homo sapiens
  CDR3 for beta chain variable domain of TCR clone 197614 (TRBV25-1, TRBJ2-2)
CAILVYRVDRGRKTGELVF

SEQ ID NO: 395229 - protein, 15 aa, Homo sapiens
  CDR3 for alpha chain variable domain of TCR clone 197615 (TRAV21, TRAJ21)
CAVRRRTSTNFTLDL

SEQ ID NO: 395230 - protein, 16 aa, Homo sapiens
  CDR3 for beta chain variable domain of TCR clone 197615 (TRBV7-9, TRBJ1-2)
CASSLGFSSGEDGYTF

SEQ ID NO: 395231 - protein, 14 aa, Homo sapiens
  CDR3 for alpha chain variable domain of TCR clone 197616 (TRAV1-1, TRAJ23)
CAVSIYYQGGKLIF

SEQ ID NO: 395232 - protein, 14 aa, Homo sapiens
  CDR3 for beta chain variable domain of TCR clone 197616 (TRBV12-5, TRBJ2-5)
CASGSRTHQETQYF

SEQ ID NO: 395233 - protein, 15 aa, Homo sapiens
  CDR3 for alpha chain variable domain of TCR clone 197617 (TRAV2, TRAJ11)
CAVGGRNSGYSTLTF

SEQ ID NO: 395234 - protein, 15 aa, Homo sapiens
  CDR3 for beta chain variable domain of TCR clone 197617 (TRBV27, TRBJ2-1)
CASSNGGGSSNEQFF

SEQ ID NO: 395235 - protein, 16 aa, Homo sapiens
  CDR3 for alpha chain variable domain of TCR clone 197618 (TRAV13-1, TRAJ48)
CAASIFGNFGNEKLTF

SEQ ID NO: 395236 - protein, 16 aa, Homo sapiens
  CDR3 for beta chain variable domain of TCR clone 197618 (TRBV18, TRBJ1-5)
CASSPYRVEGKQPQHF

SEQ ID NO: 395237 - protein, 12 aa, Homo sapiens
  CDR3 for alpha chain variable domain of TCR clone 197619 (TRAV23/DV6, TRAJ31)
CAARRIGARLMF

SEQ ID NO: 395238 - protein, 13 aa, Homo sapiens
  CDR3 for beta chain variable domain of TCR clone 197619 (TRBV28, TRBJ2-7)
CASKAGGVYEQCF

SEQ ID NO: 395239 - protein, 13 aa, Homo sapiens
  CDR3 for alpha chain variable domain of TCR clone 197620 (TRAV13-2, TRAJ53)
CAENMGSNYKLTF

SEQ ID NO: 395240 - protein, 15 aa, Homo sapiens
  CDR3 for beta chain variable domain of TCR clone 197620 (TRBV28, TRBJ2-1)
CASSIIAGGRSEQFF

SEQ ID NO: 395241 - protein, 19 aa, Homo sapiens
  CDR3 for alpha chain variable domain of TCR clone 197621 (TRAV13-1, TRAJ52)
CAACSSPNAGGTSYGKLTF

SEQ ID NO: 395242 - protein, 15 aa, Homo sapiens
  CDR3 for beta chain variable domain of TCR clone 197621 (TRBV9, TRBJ1-6)
CASSTGGGVDSPLHF

SEQ ID NO: 395243 - protein, 15 aa, Homo sapiens
  CDR3 for alpha chain variable domain of TCR clone 197622 (TRAV8-6, TRAJ10)
CAVSDQAGGGNKLTF

SEQ ID NO: 395244 - protein, 14 aa, Homo sapiens
  CDR3 for beta chain variable domain of TCR clone 197622 (TRBV7-2, TRBJ2-7)
CASRSQGAAYEQYF

SEQ ID NO: 395245 - protein, 11 aa, Homo sapiens
  CDR3 for alpha chain variable domain of TCR clone 197623 (TRAV16, TRAJ29)
WEPSGNTPLVF

SEQ ID NO: 395246 - protein, 15 aa, Homo sapiens
  CDR3 for beta chain variable domain of TCR clone 197623 (TRBV5-7, TRBJ2-7)
CASSPYFEGSYEQYF

SEQ ID NO: 395247 - protein, 13 aa, Homo sapiens
  CDR3 for alpha chain variable domain of TCR clone 197624 (TRAV25, TRAJ12)
CAGPRDSSYKLIF

SEQ ID NO: 395248 - protein, 15 aa, Homo sapiens
  CDR3 for beta chain variable domain of TCR clone 197624 (TRBV28, TRBJ2-1)
CASSIIAGGRSEQFF

SEQ ID NO: 395249 - protein, 11 aa, Homo sapiens
  CDR3 for alpha chain variable domain of TCR clone 197625 (TRAV12-2, TRAJ21)
CAVEGFNKFYF

SEQ ID NO: 395250 - protein, 15 aa, Homo sapiens
  CDR3 for beta chain variable domain of TCR clone 197625 (TRBV20-1, TRBJ1-5)
CSASGRGDLGQPQHF

SEQ ID NO: 395251 - protein, 16 aa, Homo sapiens
  CDR3 for alpha chain variable domain of TCR clone 197626 (TRAV8-3, TRAJ42)
CAVGEGNGGSQGKLIF

SEQ ID NO: 395252 - protein, 14 aa, Homo sapiens
  CDR3 for beta chain variable domain of TCR clone 197626 (TRBV7-2, TRBJ2-1)
CASSRGGARNGQFF

SEQ ID NO: 395253 - protein, 16 aa, Homo sapiens
  CDR3 for alpha chain variable domain of TCR clone 197627 (TRAV26-2, TRAJ47)
CCVLLHHKSRRNKLVF

SEQ ID NO: 395254 - protein, 13 aa, Homo sapiens
  CDR3 for beta chain variable domain of TCR clone 197627 (TRBV7-3, TRBJ1-1)
CASSQDWGAEAFF

SEQ ID NO: 395255 - protein, 11 aa, Homo sapiens
  CDR3 for alpha chain variable domain of TCR clone 197628 (TRAV12-2, TRAJ43)
CASPIGNDMRF

SEQ ID NO: 395256 - protein, 12 aa, Homo sapiens
  CDR3 for beta chain variable domain of TCR clone 197628 (TRBV7-3, TRBJ1-2)
CQQLKRGYGYTF

SEQ ID NO: 395257 - protein, 10 aa, Homo sapiens
  CDR3 for alpha chain variable domain of TCR clone 197629 (TRAV13-1, TRAJ30)
CAARDDKIIF

SEQ ID NO: 395258 - protein, 15 aa, Homo sapiens
  CDR3 for beta chain variable domain of TCR clone 197629 (TRBV28, TRBJ1-1)
CASTSTRGLNTEAFF

SEQ ID NO: 395259 - protein, 12 aa, Homo sapiens
  CDR3 for alpha chain variable domain of TCR clone 197630 (TRAV26-2, TRAJ21)
CILKGNFKKFYF

SEQ ID NO: 395260 - protein, 14 aa, Homo sapiens
  CDR3 for beta chain variable domain of TCR clone 197630 (TRBV7-9, TRBJ1-1)
CASSPLQSYTEAFF

SEQ ID NO: 395261 - protein, 12 aa, Homo sapiens
  CDR3 for alpha chain variable domain of TCR clone 197631 (TRAV25, TRAJ11)
CAGASGYSTLTF

SEQ ID NO: 395262 - protein, 14 aa, Homo sapiens
  CDR3 for beta chain variable domain of TCR clone 197631 (TRBV12-5, TRBJ2-5)
CASGSRTHQETQYF

SEQ ID NO: 395263 - protein, 14 aa, Homo sapiens
  CDR3 for alpha chain variable domain of TCR clone 197632 (TRAV8-6, TRAJ34)
CAVSDQGNTDKLIF

SEQ ID NO: 395264 - protein, 14 aa, Homo sapiens
  CDR3 for beta chain variable domain of TCR clone 197632 (TRBV7-9, TRBJ2-5)
CASSLDTAQETQYF

SEQ ID NO: 395265 - protein, 17 aa, Homo sapiens
  CDR3 for alpha chain variable domain of TCR clone 197633 (TRAV3, TRAJ6)
CAVRDGTRAGGSYITTF

SEQ ID NO: 395266 - protein, 14 aa, Homo sapiens
  CDR3 for beta chain variable domain of TCR clone 197633 (TRBV20-1, TRBJ2-2)
CSAPDTANTGELFF

SEQ ID NO: 395267 - protein, 11 aa, Homo sapiens
  CDR3 for alpha chain variable domain of TCR clone 197634 (TRAV35, TRAJ30)
CTGPGDDKIIF

SEQ ID NO: 395268 - protein, 14 aa, Homo sapiens
  CDR3 for beta chain variable domain of TCR clone 197634 (TRBV7-6, TRBJ1-6)
CASSQAGGGSPLHF

SEQ ID NO: 395269 - protein, 13 aa, Homo sapiens
  CDR3 for alpha chain variable domain of TCR clone 197635 (TRAV8-3, TRAJ28)
CAVGAVGSYQLTF

SEQ ID NO: 395270 - protein, 15 aa, Homo sapiens
  CDR3 for beta chain variable domain of TCR clone 197635 (TRBV20-1, TRBJ2-7)
CSARDLVSGMDEQYF

SEQ ID NO: 395271 - protein, 10 aa, Homo sapiens
  CDR3 for alpha chain variable domain of TCR clone 197636 (TRAV30, TRAJ16)
CGTGGQKLLF

SEQ ID NO: 395272 - protein, 15 aa, Homo sapiens
  CDR3 for beta chain variable domain of TCR clone 197636 (TRBV13, TRBJ2-1)
CQQPPQRGENNEQFF

SEQ ID NO: 395273 - protein, 14 aa, Homo sapiens
  CDR3 for alpha chain variable domain of TCR clone 197637 (TRAV26-1, TRAJ8)
CIVRVDTGFQRLVC

SEQ ID NO: 395274 - protein, 15 aa, Homo sapiens
  CDR3 for beta chain variable domain of TCR clone 197637 (TRBV10-2, TRBJ2-7)
CASWNRGQATYEQYF

SEQ ID NO: 395275 - protein, 16 aa, Homo sapiens
  CDR3 for alpha chain variable domain of TCR clone 197638 (TRAV38-1, TRAJ32)
CAFMRGGGGATNKLIF

SEQ ID NO: 395276 - protein, 13 aa, Homo sapiens
  CDR3 for beta chain variable domain of TCR clone 197638 (TRBV20-1, TRBJ2-5)
CSAREAFQETQYF

SEQ ID NO: 395277 - protein, 15 aa, Homo sapiens
  CDR3 for alpha chain variable domain of TCR clone 197639 (TRAV13-1, TRAJ32)
CAASIYGGATNKLIF

SEQ ID NO: 395278 - protein, 12 aa, Homo sapiens
  CDR3 for beta chain variable domain of TCR clone 197639 (TRBV7-6, TRBJ2-3)
CASSTGTDTHYF

SEQ ID NO: 395279 - protein, 14 aa, Homo sapiens
  CDR3 for alpha chain variable domain of TCR clone 197640 (TRAV17, TRAJ45)
CATASGGGADGLTF

SEQ ID NO: 395280 - protein, 14 aa, Homo sapiens
  CDR3 for beta chain variable domain of TCR clone 197640 (TRBV7-3, TRBJ2-1)
CASSLAGGTNEQFF

SEQ ID NO: 395281 - protein, 14 aa, Homo sapiens
  CDR3 for alpha chain variable domain of TCR clone 197641 (TRAV1-2, TRAJ8)
CALREDTGFQKLGF

SEQ ID NO: 395282 - protein, 13 aa, Homo sapiens
  CDR3 for beta chain variable domain of TCR clone 197641 (TRBV7-3, TRBJ2-1)
CASSLDSYNEQFF

SEQ ID NO: 395283 - protein, 15 aa, Homo sapiens
  CDR3 for alpha chain variable domain of TCR clone 197642 (TRAV21, TRAJ37)
CAVRPTLSNTGKLIF

SEQ ID NO: 395284 - protein, 16 aa, Homo sapiens
  CDR3 for beta chain variable domain of TCR clone 197642 (TRBV24-1, TRBJ2-3)
CASSGRRQDLTDTQYF

SEQ ID NO: 395285 - protein, 14 aa, Homo sapiens
  CDR3 for alpha chain variable domain of TCR clone 197643 (TRAV17, TRAJ54)
FATDANQGAQKLVF

SEQ ID NO: 395286 - protein, 12 aa, Homo sapiens
  CDR3 for beta chain variable domain of TCR clone 197643 (TRBV6-3, TRBJ2-1)
CASSGSYNEQFF

SEQ ID NO: 395287 - protein, 13 aa, Homo sapiens
  CDR3 for alpha chain variable domain of TCR clone 197644 (TRAV17, TRAJ9)
CATDYTGGFKTIF

SEQ ID NO: 395288 - protein, 13 aa, Homo sapiens
  CDR3 for beta chain variable domain of TCR clone 197644 (TRBV19, TRBJ1-2)
CASSVPGQDGYSF

SEQ ID NO: 395289 - protein, 14 aa, Homo sapiens
  CDR3 for alpha chain variable domain of TCR clone 197645 (TRAV17, TRAJ6)
CATPAMGGSYILTF

SEQ ID NO: 395290 - protein, 14 aa, Homo sapiens
  CDR3 for beta chain variable domain of TCR clone 197645 (TRBV7-6, TRBJ2-3)
CASSLGTVTDTQYF

SEQ ID NO: 395291 - protein, 14 aa, Homo sapiens
  CDR3 for alpha chain variable domain of TCR clone 197646 (TRAV2, TRAJ9)
CAVEDRSGGFKTIF

SEQ ID NO: 395292 - protein, 16 aa, Homo sapiens
  CDR3 for beta chain variable domain of TCR clone 197646 (TRBV7-9, TRBJ2-7)
CASSNHGGQEKYEQYF

SEQ ID NO: 395293 - protein, 13 aa, Homo sapiens
  CDR3 for alpha chain variable domain of TCR clone 197647 (TRAV8-6, TRAJ49)
CAVITNTGNQFYF

SEQ ID NO: 395294 - protein, 16 aa, Homo sapiens
  CDR3 for beta chain variable domain of TCR clone 197647 (TRBV27, TRBJ2-7)
CASSSERRDSAYEQYF

SEQ ID NO: 395295 - protein, 15 aa, Homo sapiens
  CDR3 for alpha chain variable domain of TCR clone 197648 (TRAV27, TRAJ42)
CAGGNYGGSQGNLIF

SEQ ID NO: 395296 - protein, 14 aa, Homo sapiens
  CDR3 for beta chain variable domain of TCR clone 197648 (TRBV7-6, TRBJ2-3)
CASSLGTVTDTQYF

SEQ ID NO: 395297 - protein, 16 aa, Homo sapiens
  CDR3 for alpha chain variable domain of TCR clone 197649 (TRAV8-3, TRAJ35)
CAVVPQGFGNVPHCVS

SEQ ID NO: 395298 - protein, 15 aa, Homo sapiens
  CDR3 for beta chain variable domain of TCR clone 197649 (TRBV6-1, TRBJ2-2)
CASSAGQGYTGELFF

SEQ ID NO: 395299 - protein, 16 aa, Homo sapiens
  CDR3 for alpha chain variable domain of TCR clone 197650 (TRAV8-3, TRAJ8)
CAFPRDGNTGFQKLVF

SEQ ID NO: 395300 - protein, 14 aa, Homo sapiens
  CDR3 for beta chain variable domain of TCR clone 197650 (TRBV28, TRBJ1-1)
CASSESGWGTEAFF

SEQ ID NO: 395301 - protein, 14 aa, Homo sapiens
  CDR3 for alpha chain variable domain of TCR clone 197651 (TRAV26-1, TRAJ54)
CIVRRTQGAQKLVF

SEQ ID NO: 395302 - protein, 12 aa, Homo sapiens
  CDR3 for beta chain variable domain of TCR clone 197651 (TRBV28, TRBJ2-3)
CASSLYRDTQYF

SEQ ID NO: 395303 - protein, 13 aa, Homo sapiens
  CDR3 for alpha chain variable domain of TCR clone 197652 (TRAV27, TRAJ41)
FAGEGNSGYALNF

SEQ ID NO: 395304 - protein, 13 aa, Homo sapiens
  CDR3 for beta chain variable domain of TCR clone 197652 (TRBV20-1, TRBJ1-1)
CSARGGGNTEAFF

SEQ ID NO: 395305 - protein, 15 aa, Homo sapiens
  CDR3 for alpha chain variable domain of TCR clone 197653 (TRAV12-1, TRAJ41)
CVVNSRTGSGYALNF

SEQ ID NO: 395306 - protein, 12 aa, Homo sapiens
  CDR3 for beta chain variable domain of TCR clone 197653 (TRBV11-2, TRBJ2-2)
CASSLGGGELFF

SEQ ID NO: 395307 - protein, 15 aa, Homo sapiens
  CDR3 for alpha chain variable domain of TCR clone 197654 (TRAV21, TRAJ24)
CAARSSTDSWGKLQF

SEQ ID NO: 395308 - protein, 13 aa, Homo sapiens
  CDR3 for beta chain variable domain of TCR clone 197654 (TRBV7-2, TRBJ2-5)
CASSQTSVETQYF

SEQ ID NO: 395309 - protein, 12 aa, Homo sapiens
  CDR3 for alpha chain variable domain of TCR clone 197655 (TRAV16, TRAJ26)
CALRSYGQNFVF

SEQ ID NO: 395310 - protein, 14 aa, Homo sapiens
  CDR3 for beta chain variable domain of TCR clone 197655 (TRBV19, TRBJ2-1)
FASPTFVLSGEQFF

SEQ ID NO: 395311 - protein, 14 aa, Homo sapiens
  CDR3 for alpha chain variable domain of TCR clone 197656 (TRAV13-1, TRAJ26)
CAASSAHYGQNFVF

SEQ ID NO: 395312 - protein, 13 aa, Homo sapiens
  CDR3 for beta chain variable domain of TCR clone 197656 (TRBV2, TRBJ1-4)
CASSELGVEKLFF

SEQ ID NO: 395313 - protein, 11 aa, Homo sapiens
  CDR3 for alpha chain variable domain of TCR clone 197657 (TRAV2, TRAJ40)
CAVEEPGNLQI

SEQ ID NO: 395314 - protein, 14 aa, Homo sapiens
  CDR3 for beta chain variable domain of TCR clone 197657 (TRBV19, TRBJ2-2)
CASSTLHRSGELFF

SEQ ID NO: 395315 - protein, 12 aa, Homo sapiens
  CDR3 for alpha chain variable domain of TCR clone 197658 (TRAV23/DV6, TRAJ30)
CAASKGDDKIIF

SEQ ID NO: 395316 - protein, 13 aa, Homo sapiens
  CDR3 for beta chain variable domain of TCR clone 197658 (TRBV12-4, TRBJ1-1)
CASSPGTGFEAFF

SEQ ID NO: 395317 - protein, 16 aa, Homo sapiens
  CDR3 for alpha chain variable domain of TCR clone 197659 (TRAV1-2, TRAJ10)
CAVRGVLTGGGNKLTF

SEQ ID NO: 395318 - protein, 17 aa, Homo sapiens
  CDR3 for beta chain variable domain of TCR clone 197659 (TRBV15, TRBJ1-5)
CATSRAPPGTRNQPQHC

SEQ ID NO: 395319 - protein, 14 aa, Homo sapiens
  CDR3 for alpha chain variable domain of TCR clone 197660 (TRAV12-3, TRAJ12)
CAMSALDSSNKLIF

SEQ ID NO: 395320 - protein, 16 aa, Homo sapiens
  CDR3 for beta chain variable domain of TCR clone 197660 (TRBV7-9, TRBJ2-3)
CASSLQGNPGTDTQYF

SEQ ID NO: 395321 - protein, 12 aa, Homo sapiens
  CDR3 for alpha chain variable domain of TCR clone 197661 (TRAV14/DV4, TRAJ50)
CAMREGNSKAIF

SEQ ID NO: 395322 - protein, 16 aa, Homo sapiens
  CDR3 for beta chain variable domain of TCR clone 197661 (TRBV28, TRBJ2-3)
CASSLSGQTSTDTQYF

SEQ ID NO: 395323 - protein, 11 aa, Homo sapiens
  CDR3 for alpha chain variable domain of TCR clone 197662 (TRAV12-2, TRAJ49)
CALQGGNQFYF

SEQ ID NO: 395324 - protein, 13 aa, Homo sapiens
  CDR3 for beta chain variable domain of TCR clone 197662 (TRBV4-1, TRBJ1-1)
CARSQLGTGEAFF

SEQ ID NO: 395325 - protein, 16 aa, Homo sapiens
  CDR3 for alpha chain variable domain of TCR clone 197663 (TRAV4, TRAJ22)
CLVGDLYSGSARQLTF

SEQ ID NO: 395326 - protein, 16 aa, Homo sapiens
  CDR3 for beta chain variable domain of TCR clone 197663 (TRBV7-3, TRBJ2-2)
RASSLKRGTLSGELFF

SEQ ID NO: 395327 - protein, 14 aa, Homo sapiens
  CDR3 for alpha chain variable domain of TCR clone 197664 (TRAV12-2, TRAJ17)
CAVNIKAAGNKLTF

SEQ ID NO: 395328 - protein, 16 aa, Homo sapiens
  CDR3 for beta chain variable domain of TCR clone 197664 (TRBV20-1, TRBJ2-6)
SAVLAQGYDGANVLTF

SEQ ID NO: 395329 - protein, 18 aa, Homo sapiens
  CDR3 for alpha chain variable domain of TCR clone 197665 (TRAV12-2, )
CAVEDIQNPAPAVYQLRD

SEQ ID NO: 395330 - protein, 16 aa, Homo sapiens
  CDR3 for beta chain variable domain of TCR clone 197665 (TRBV13, TRBJ2-2)
CASSPRTGEHTGELFF

SEQ ID NO: 395331 - protein, 14 aa, Homo sapiens
  CDR3 for alpha chain variable domain of TCR clone 197666 (TRAV12-2, TRAJ40)
CAVKIPPGTYKYIF

SEQ ID NO: 395332 - protein, 15 aa, Homo sapiens
  CDR3 for beta chain variable domain of TCR clone 197666 (TRBV11-2, TRBJ2-3)
CASLKDGREGDTQYF

SEQ ID NO: 395333 - protein, 14 aa, Homo sapiens
  CDR3 for alpha chain variable domain of TCR clone 197667 (TRAV21, TRAJ21)
CAVGVEDNFNKFYF

SEQ ID NO: 395334 - protein, 15 aa, Homo sapiens
  CDR3 for beta chain variable domain of TCR clone 197667 (TRBV20-1, TRBJ1-1)
CSASWTGGMNTEAFF

SEQ ID NO: 395335 - protein, 14 aa, Homo sapiens
  CDR3 for alpha chain variable domain of TCR clone 197668 (TRAV27, TRAJ49)
CAGRPEGTGNQFYF

SEQ ID NO: 395336 - protein, 16 aa, Homo sapiens
  CDR3 for beta chain variable domain of TCR clone 197668 (TRBV5-4, TRBJ2-1)
CASSLVGSGQDNEQFF

SEQ ID NO: 395337 - protein, 15 aa, Homo sapiens
  CDR3 for alpha chain variable domain of TCR clone 197669 (TRAV1-2, TRAJ36)
CAASADQTGANNPFF

SEQ ID NO: 395338 - protein, 15 aa, Homo sapiens
  CDR3 for beta chain variable domain of TCR clone 197669 (TRBV5-1, TRBJ2-7)
CASSFSTDSVYEQYF

SEQ ID NO: 395339 - protein, 14 aa, Homo sapiens
  CDR3 for alpha chain variable domain of TCR clone 197670 (TRAV8-2, TRAJ37)
CVVSISCNTGKLIF

SEQ ID NO: 395340 - protein, 17 aa, Homo sapiens
  CDR3 for beta chain variable domain of TCR clone 197670 (TRBV28, TRBJ2-5)
CASSRQGGLAGAETQYF

SEQ ID NO: 395341 - protein, 10 aa, Homo sapiens
  CDR3 for alpha chain variable domain of TCR clone 197671 (TRAV1-2, TRAJ20)
CGCNDYKLSF

SEQ ID NO: 395342 - protein, 16 aa, Homo sapiens
  CDR3 for beta chain variable domain of TCR clone 197671 (TRBV20-1, TRBJ2-1)
CSARDLKQGMNNEQFF

SEQ ID NO: 395343 - protein, 14 aa, Homo sapiens
  CDR3 for alpha chain variable domain of TCR clone 197672 (TRAV1-2, TRAJ16)
CAVNRFSDGQKLLF

SEQ ID NO: 395344 - protein, 15 aa, Homo sapiens
  CDR3 for beta chain variable domain of TCR clone 197672 (TRBV7-6, TRBJ2-5)
CASSLAGGTGDTQYF

SEQ ID NO: 395345 - protein, 14 aa, Homo sapiens
  CDR3 for alpha chain variable domain of TCR clone 197673 (TRAV8-3, TRAJ42)
CAVGAWGSQGNLIF

SEQ ID NO: 395346 - protein, 16 aa, Homo sapiens
  CDR3 for beta chain variable domain of TCR clone 197673 (TRBV7-9, TRBJ1-2)
CASSLAPLRAAYGYTF

SEQ ID NO: 395347 - protein, 14 aa, Homo sapiens
  CDR3 for alpha chain variable domain of TCR clone 197674 (TRAV1-2, TRAJ8)
CAVRDDTGFQKLVF

SEQ ID NO: 395348 - protein, 16 aa, Homo sapiens
  CDR3 for beta chain variable domain of TCR clone 197674 (TRBV12-5, TRBJ2-5)
CASGPRTSGNQETQYF

SEQ ID NO: 395349 - protein, 13 aa, Homo sapiens
  CDR3 for alpha chain variable domain of TCR clone 197675 (TRAV21, TRAJ27)
CAARPGNAGKSTF

SEQ ID NO: 395350 - protein, 15 aa, Homo sapiens
  CDR3 for beta chain variable domain of TCR clone 197675 (TRBV11-3, TRBJ2-2)
CASSFVRTDTGELFF

SEQ ID NO: 395351 - protein, 13 aa, Homo sapiens
  CDR3 for alpha chain variable domain of TCR clone 197676 (TRAV3, TRAJ27)
CAVRPLGASKSTF

SEQ ID NO: 395352 - protein, 15 aa, Homo sapiens
  CDR3 for beta chain variable domain of TCR clone 197676 (TRBV9, TRBJ1-6)
CASSVAGTGDSPLHF

SEQ ID NO: 395353 - protein, 15 aa, Homo sapiens
  CDR3 for alpha chain variable domain of TCR clone 197677 (TRAV17, TRAJ23)
CATDAEDNQGGKFIF

SEQ ID NO: 395354 - protein, 12 aa, Homo sapiens
  CDR3 for beta chain variable domain of TCR clone 197677 (TRBV2, TRBJ2-1)
CAKREGYNEQFF

SEQ ID NO: 395355 - protein, 16 aa, Homo sapiens
  CDR3 for alpha chain variable domain of TCR clone 197678 (TRAV17, TRAJ53)
CATDALSGGSNYQLTF

SEQ ID NO: 395356 - protein, 15 aa, Homo sapiens
  CDR3 for beta chain variable domain of TCR clone 197678 (TRBV20-1, TRBJ2-7)
CSARDRVSGMDEQYF

SEQ ID NO: 395357 - protein, 11 aa, Homo sapiens
  CDR3 for alpha chain variable domain of TCR clone 197679 (TRAV12-1, TRAJ30)
CVGNGQDKIIF

SEQ ID NO: 395358 - protein, 15 aa, Homo sapiens
  CDR3 for beta chain variable domain of TCR clone 197679 (TRBV28, TRBJ2-5)
CASSSGRTIQETQYF

SEQ ID NO: 395359 - protein, 15 aa, Homo sapiens
  CDR3 for alpha chain variable domain of TCR clone 197680 (TRAV3, TRAJ22)
CAVRDRGGSARQLTF

SEQ ID NO: 395360 - protein, 14 aa, Homo sapiens
  CDR3 for beta chain variable domain of TCR clone 197680 (TRBV7-2, TRBJ1-5)
CASSTQGAGQPQHF

SEQ ID NO: 395361 - protein, 15 aa, Homo sapiens
  CDR3 for alpha chain variable domain of TCR clone 197681 (TRAV17, TRAJ52)
CATEAGGTSYGKLTF

SEQ ID NO: 395362 - protein, 16 aa, Homo sapiens
  CDR3 for beta chain variable domain of TCR clone 197681 (TRBV20-1, TRBJ2-1)
CSAGGAAGGPYNEQFF

SEQ ID NO: 395363 - protein, 14 aa, Homo sapiens
  CDR3 for alpha chain variable domain of TCR clone 197682 (TRAV26-1, TRAJ49)
RIVRLTNTGNQFYF

SEQ ID NO: 395364 - protein, 13 aa, Homo sapiens
  CDR3 for beta chain variable domain of TCR clone 197682 (TRBV4-1, TRBJ2-7)
CASSQGQAYEQYF

SEQ ID NO: 395365 - protein, 18 aa, Homo sapiens
  CDR3 for alpha chain variable domain of TCR clone 197683 (TRAV21, TRAJ52)
CAVRPFPAGGTSYGKLTF

SEQ ID NO: 395366 - protein, 13 aa, Homo sapiens
  CDR3 for beta chain variable domain of TCR clone 197683 (TRBV19, TRBJ1-2)
CASSVPGQDGYTF

SEQ ID NO: 395367 - protein, 13 aa, Homo sapiens
  CDR3 for alpha chain variable domain of TCR clone 197684 (TRAV12-3, TRAJ7)
CAMTPYGNNRLAF

SEQ ID NO: 395368 - protein, 16 aa, Homo sapiens
  CDR3 for beta chain variable domain of TCR clone 197684 (TRBV20-1, IGHJ2)
CSARPYGGELNEQLFF

SEQ ID NO: 395369 - protein, 11 aa, Homo sapiens
  CDR3 for alpha chain variable domain of TCR clone 197685 (TRAV12-1, TRAJ30)
CVVNGQDKIIF

SEQ ID NO: 395370 - protein, 12 aa, Homo sapiens
  CDR3 for beta chain variable domain of TCR clone 197685 (TRBV12-4, TRBJ2-7)
CASNPGGGEQYF

SEQ ID NO: 395371 - protein, 14 aa, Homo sapiens
  CDR3 for alpha chain variable domain of TCR clone 197686 (TRAV12-2, TRAJ13)
CAVKKPGGYQKVTF

SEQ ID NO: 395372 - protein, 15 aa, Homo sapiens
  CDR3 for beta chain variable domain of TCR clone 197686 (TRBV5-1, TRBJ2-3)
CASSVTSGSTDTQYF

SEQ ID NO: 395373 - protein, 14 aa, Homo sapiens
  CDR3 for alpha chain variable domain of TCR clone 197687 (TRAV9-2, TRAJ39)
CALYIYNAANMLTF

SEQ ID NO: 395374 - protein, 14 aa, Homo sapiens
  CDR3 for beta chain variable domain of TCR clone 197687 (TRBV6-1, TRBJ1-3)
CASVQGGGGNTIYF

SEQ ID NO: 395375 - protein, 14 aa, Homo sapiens
  CDR3 for alpha chain variable domain of TCR clone 197688 (TRAV17, TRAJ32)
CSTDPGGATNNLIF

SEQ ID NO: 395376 - protein, 12 aa, Homo sapiens
  CDR3 for beta chain variable domain of TCR clone 197688 (TRBV12-4, TRBJ1-2)
CASSFIWLHLRF

SEQ ID NO: 395377 - protein, 14 aa, Homo sapiens
  CDR3 for alpha chain variable domain of TCR clone 197689 (TRAV1-2, TRAJ16)
CAVNRFSDGQKLLF

SEQ ID NO: 395378 - protein, 13 aa, Homo sapiens
  CDR3 for beta chain variable domain of TCR clone 197689 (TRBV12-4, TRBJ1-5)
CASSSRSYQPQHF

SEQ ID NO: 395379 - protein, 13 aa, Homo sapiens
  CDR3 for alpha chain variable domain of TCR clone 197690 (TRAV21, TRAJ27)
CAARPGNAGKSTF

SEQ ID NO: 395380 - protein, 15 aa, Homo sapiens
  CDR3 for beta chain variable domain of TCR clone 197690 (TRBV11-3, TRBJ2-7)
CASSPGPASSYEQYV

SEQ ID NO: 395381 - protein, 21 aa, Homo sapiens
  CDR3 for alpha chain variable domain of TCR clone 197691 (TRAV2, TRAJ23)
ILQVREADAAGYYCVVGKLIF

SEQ ID NO: 395382 - protein, 20 aa, Homo sapiens
  CDR3 for beta chain variable domain of TCR clone 197691 (TRBV20-1, TRBJ2-5)
CSARAGLAGRLAGHLETQYF

SEQ ID NO: 395383 - protein, 12 aa, Homo sapiens
  CDR3 for alpha chain variable domain of TCR clone 197692 (TRAV16, TRAJ13)
CITLRGYLKVTF

SEQ ID NO: 395384 - protein, 17 aa, Homo sapiens
  CDR3 for beta chain variable domain of TCR clone 197692 (TRBV28, TRBJ2-5)
CASSRQGGLAGAETQYF

SEQ ID NO: 395385 - protein, 15 aa, Homo sapiens
  CDR3 for alpha chain variable domain of TCR clone 197693 (TRAV27, TRAJ38)
CAARRNAGNNRELLW

SEQ ID NO: 395386 - protein, 13 aa, Homo sapiens
  CDR3 for beta chain variable domain of TCR clone 197693 (TRBV20-1, TRBJ1-1)
CSARAGGNTEAFF

SEQ ID NO: 395387 - protein, 16 aa, Homo sapiens
  CDR3 for alpha chain variable domain of TCR clone 197694 (TRAV30, TRAJ49)
SAAQRVGPNTGNQFYF

SEQ ID NO: 395388 - protein, 15 aa, Homo sapiens
  CDR3 for beta chain variable domain of TCR clone 197694 (TRBV7-2, TRBJ2-7)
CASSLALGSAYEQYF

SEQ ID NO: 395389 - protein, 12 aa, Homo sapiens
  CDR3 for alpha chain variable domain of TCR clone 197695 (TRAV30, TRAJ43)
CGTEERGNYMRF

SEQ ID NO: 395390 - protein, 13 aa, Homo sapiens
  CDR3 for beta chain variable domain of TCR clone 197695 (TRBV27, TRBJ2-7)
CASSVSQGYEQYF

SEQ ID NO: 395391 - protein, 12 aa, Homo sapiens
  CDR3 for alpha chain variable domain of TCR clone 197696 (TRAV2, TRAJ10)
CASTGGGNKLTF

SEQ ID NO: 395392 - protein, 14 aa, Homo sapiens
  CDR3 for beta chain variable domain of TCR clone 197696 (TRBV7-2, TRBJ2-2)
FASRGQGAAGELFF

SEQ ID NO: 395393 - protein, 15 aa, Homo sapiens
  CDR3 for alpha chain variable domain of TCR clone 197697 (TRAV17, TRAJ35)
CATAFVIGFGNVLHF

SEQ ID NO: 395394 - protein, 16 aa, Homo sapiens
  CDR3 for beta chain variable domain of TCR clone 197697 (TRBV5-7, TRBJ2-7)
PAANEGGGRGSYEQYF

SEQ ID NO: 395395 - protein, 18 aa, Homo sapiens
  CDR3 for alpha chain variable domain of TCR clone 197698 (TRAV21, TRAJ52)
CAVRPSPAGGTSYGKLTF

SEQ ID NO: 395396 - protein, 17 aa, Homo sapiens
  CDR3 for beta chain variable domain of TCR clone 197698 (TRBV12-4, TRBJ1-1)
CASSLSGFRTMNTEAFF

SEQ ID NO: 395397 - protein, 14 aa, Homo sapiens
  CDR3 for alpha chain variable domain of TCR clone 197699 (TRAV12-2, TRAJ8)
CAVKENTGFQKLVF

SEQ ID NO: 395398 - protein, 16 aa, Homo sapiens
  CDR3 for beta chain variable domain of TCR clone 197699 (TRBV18, TRBJ1-1)
CASSPGVGGRGGEAFF

SEQ ID NO: 395399 - protein, 12 aa, Homo sapiens
  CDR3 for alpha chain variable domain of TCR clone 197700 (TRAV2, TRAJ34)
CAVERNTDKLIF

SEQ ID NO: 395400 - protein, 12 aa, Homo sapiens
  CDR3 for beta chain variable domain of TCR clone 197700 (TRBV7-8, TRBJ2-7)
CASSLGDREQYF

SEQ ID NO: 395401 - protein, 16 aa, Homo sapiens
  CDR3 for alpha chain variable domain of TCR clone 197701 (TRAV3, TRAJ37)
CAVRVRGSGNTGKLIF

SEQ ID NO: 395402 - protein, 11 aa, Homo sapiens
  CDR3 for beta chain variable domain of TCR clone 197701 (TRBV11-2, TRBJ2-2)
CASSLHGELFF

SEQ ID NO: 395403 - protein, 13 aa, Homo sapiens
  CDR3 for alpha chain variable domain of TCR clone 197702 (TRAV26-2, TRAJ57)
CILSRGGSEKLVS

SEQ ID NO: 395404 - protein, 16 aa, Homo sapiens
  CDR3 for beta chain variable domain of TCR clone 197702 (TRBV18, TRBJ1-5)
CASSPRTGGGNQPQHF

SEQ ID NO: 395405 - protein, 13 aa, Homo sapiens
  CDR3 for alpha chain variable domain of TCR clone 197703 (TRAV14/DV4, TRAJ20)
CSMRESNDYKLSF

SEQ ID NO: 395406 - protein, 15 aa, Homo sapiens
  CDR3 for beta chain variable domain of TCR clone 197703 (TRBV7-9, TRBJ1-1)
CASSRPGTANTEAFF

SEQ ID NO: 395407 - protein, 15 aa, Homo sapiens
  CDR3 for alpha chain variable domain of TCR clone 197704 (TRAV13-1, TRAJ15)
CAASIARQAGTALIF

SEQ ID NO: 395408 - protein, 13 aa, Homo sapiens
  CDR3 for beta chain variable domain of TCR clone 197704 (TRBV5-1, TRBJ2-7)
CASSATGGNEQYF

SEQ ID NO: 395409 - protein, 14 aa, Homo sapiens
  CDR3 for alpha chain variable domain of TCR clone 197705 (TRAV14/DV4, TRAJ58)
CAMMKETSGSRLTF

SEQ ID NO: 395410 - protein, 12 aa, Homo sapiens
  CDR3 for beta chain variable domain of TCR clone 197705 (TRBV12-4, TRBJ2-1)
CASTYVLNEQSF

SEQ ID NO: 395411 - protein, 14 aa, Homo sapiens
  CDR3 for alpha chain variable domain of TCR clone 197706 (TRAV29/DV5, TRAJ36)
CAARRKTGANCLFF

SEQ ID NO: 395412 - protein, 14 aa, Homo sapiens
  CDR3 for beta chain variable domain of TCR clone 197706 (TRBV12-5, TRBJ2-5)
CASGSRTHQETQYF

SEQ ID NO: 395413 - protein, 13 aa, Homo sapiens
  CDR3 for alpha chain variable domain of TCR clone 197707 (TRAV12-1, TRAJ39)
CVVPQRAGNMLTF

SEQ ID NO: 395414 - protein, 16 aa, Homo sapiens
  CDR3 for beta chain variable domain of TCR clone 197707 (TRBV6-1, TRBJ2-5)
CASSETLDRGAETQYF

SEQ ID NO: 395415 - protein, 13 aa, Homo sapiens
  CDR3 for alpha chain variable domain of TCR clone 197708 (TRAV1-2, TRAJ9)
CAALNTGGFKTTF

SEQ ID NO: 395416 - protein, 16 aa, Homo sapiens
  CDR3 for beta chain variable domain of TCR clone 197708 (TRBV28, TRBJ2-2)
CASSLEGGSNTGELFF

SEQ ID NO: 395417 - protein, 17 aa, Homo sapiens
  CDR3 for alpha chain variable domain of TCR clone 197709 (TRAV3, TRAJ6)
CAVRDGPRAGGSYIPTF

SEQ ID NO: 395418 - protein, 14 aa, Homo sapiens
  CDR3 for beta chain variable domain of TCR clone 197709 (TRBV19, TRBJ2-1)
CASPTLVLTGEQFF

SEQ ID NO: 395419 - protein, 12 aa, Homo sapiens
  CDR3 for alpha chain variable domain of TCR clone 197710 (TRAV13-1, TRAJ21)
CAAKEGFNIFYF

SEQ ID NO: 395420 - protein, 14 aa, Homo sapiens
  CDR3 for beta chain variable domain of TCR clone 197710 (TRBV5-4, TRBJ1-1)
CASSFDSRRDEAFF

SEQ ID NO: 395421 - protein, 12 aa, Homo sapiens
  CDR3 for alpha chain variable domain of TCR clone 197711 (TRAV12-3, TRAJ17)
CAMTLTGNKLTF

SEQ ID NO: 395422 - protein, 15 aa, Homo sapiens
  CDR3 for beta chain variable domain of TCR clone 197711 (TRBV11-3, TRBJ1-1)
CASSLGGPGDTEAFF

SEQ ID NO: 395423 - protein, 12 aa, Homo sapiens
  CDR3 for alpha chain variable domain of TCR clone 197712 (TRAV12-1, TRAJ40)
CVVYSGTYKYIF

SEQ ID NO: 395424 - protein, 14 aa, Homo sapiens
  CDR3 for beta chain variable domain of TCR clone 197712 (TRBV19, TRBJ1-5)
CASSLGTGGQPQHF

SEQ ID NO: 395425 - protein, 12 aa, Homo sapiens
  CDR3 for alpha chain variable domain of TCR clone 197713 (TRAV27, TRAJ13)
CAGAGGYQKVTF

SEQ ID NO: 395426 - protein, 15 aa, Homo sapiens
  CDR3 for beta chain variable domain of TCR clone 197713 (TRBV20-1, TRBJ2-6)
CSARDRGPGSNVLTF

SEQ ID NO: 395427 - protein, 13 aa, Homo sapiens
  CDR3 for alpha chain variable domain of TCR clone 197714 (TRAV2, TRAJ10)
CAVETGGGNNITF

SEQ ID NO: 395428 - protein, 14 aa, Homo sapiens
  CDR3 for beta chain variable domain of TCR clone 197714 (TRBV20-1, TRBJ2-3)
CSAGGRRGTDTQYF

SEQ ID NO: 395429 - protein, 17 aa, Homo sapiens
  CDR3 for alpha chain variable domain of TCR clone 197715 (TRAV3, TRAJ12)
CCERRDGTMDISYKLIF

SEQ ID NO: 395430 - protein, 15 aa, Homo sapiens
  CDR3 for beta chain variable domain of TCR clone 197715 (TRBV5-5, TRBJ1-5)
CASSLKGGGEQPQHF

SEQ ID NO: 395431 - protein, 11 aa, Homo sapiens
  CDR3 for alpha chain variable domain of TCR clone 197716 (TRAV1-1, TRAJ23)
CAVRQGGKLIF

SEQ ID NO: 395432 - protein, 13 aa, Homo sapiens
  CDR3 for beta chain variable domain of TCR clone 197716 (TRBV2, TRBJ1-4)
CASSELGVEKLFF

SEQ ID NO: 395433 - protein, 11 aa, Homo sapiens
  CDR3 for alpha chain variable domain of TCR clone 197717 (TRAV3, TRAJ21)
CAVGSFNNFYF

SEQ ID NO: 395434 - protein, 16 aa, Homo sapiens
  CDR3 for beta chain variable domain of TCR clone 197717 (TRBV19, TRBJ2-1)
CASSKAGPSSYNEQFF

SEQ ID NO: 395435 - protein, 13 aa, Homo sapiens
  CDR3 for alpha chain variable domain of TCR clone 197718 (TRAV26-1, TRAJ34)
SIVRPWITDKLIF

SEQ ID NO: 395436 - protein, 13 aa, Homo sapiens
  CDR3 for beta chain variable domain of TCR clone 197718 (TRBV2, TRBJ2-7)
CASSVGGSGEQYF

SEQ ID NO: 395437 - protein, 14 aa, Homo sapiens
  CDR3 for alpha chain variable domain of TCR clone 197719 (TRAV13-2, TRAJ39)
CAENKNNAGNMLTF

SEQ ID NO: 395438 - protein, 11 aa, Homo sapiens
  CDR3 for beta chain variable domain of TCR clone 197719 (TRBV3-1, TRBJ2-4)
CASSRSDIQYF

SEQ ID NO: 395439 - protein, 16 aa, Homo sapiens
  CDR3 for alpha chain variable domain of TCR clone 197720 (TRAV30, TRAJ24)
CGTEIVDADSWGKFQF

SEQ ID NO: 395440 - protein, 15 aa, Homo sapiens
  CDR3 for beta chain variable domain of TCR clone 197720 (TRBV6-1, TRBJ2-4)
CASSEAVWTINIQYF

SEQ ID NO: 395441 - protein, 15 aa, Homo sapiens
  CDR3 for alpha chain variable domain of TCR clone 197721 (TRAV38-1, TRAJ57)
CAFMKLQGGSEKLVL

SEQ ID NO: 395442 - protein, 16 aa, Homo sapiens
  CDR3 for beta chain variable domain of TCR clone 197721 (TRBV11-2, TRBJ2-5)
CSSSGQGYSPQETQYF

SEQ ID NO: 395443 - protein, 13 aa, Homo sapiens
  CDR3 for alpha chain variable domain of TCR clone 197722 (TRAV27, TRAJ29)
CAGAHSGNTPLVF

SEQ ID NO: 395444 - protein, 13 aa, Homo sapiens
  CDR3 for beta chain variable domain of TCR clone 197722 (TRBV7-9, TRBJ2-7)
CSSIGQGAGEQYF

SEQ ID NO: 395445 - protein, 15 aa, Homo sapiens
  CDR3 for alpha chain variable domain of TCR clone 197723 (TRAV13-2, TRAJ10)
CVENRDTGGGNKLTF

SEQ ID NO: 395446 - protein, 16 aa, Homo sapiens
  CDR3 for beta chain variable domain of TCR clone 197723 (TRBV2, TRBJ1-3)
CASSRTGGSTGNTIYF

SEQ ID NO: 395447 - protein, 12 aa, Homo sapiens
  CDR3 for alpha chain variable domain of TCR clone 197724 (TRAV17, TRAJ39)
CVTGAAGNMLTF

SEQ ID NO: 395448 - protein, 14 aa, Homo sapiens
  CDR3 for beta chain variable domain of TCR clone 197724 (TRBV7-9, TRBJ1-2)
CASSRQGANYGYTF

SEQ ID NO: 395449 - protein, 14 aa, Homo sapiens
  CDR3 for alpha chain variable domain of TCR clone 197725 (TRAV12-2, TRAJ45)
CAVYSGGGADGLTF

SEQ ID NO: 395450 - protein, 15 aa, Homo sapiens
  CDR3 for beta chain variable domain of TCR clone 197725 (TRBV15, TRBJ1-4)
CATSRDMGSYEKLFF

SEQ ID NO: 395451 - protein, 12 aa, Homo sapiens
  CDR3 for alpha chain variable domain of TCR clone 197726 (TRAV25, TRAJ11)
CAGASGYSTLTF

SEQ ID NO: 395452 - protein, 14 aa, Homo sapiens
  CDR3 for beta chain variable domain of TCR clone 197726 (TRBV28, TRBJ2-3)
CASSWRGRADTQYF

SEQ ID NO: 395453 - protein, 13 aa, Homo sapiens
  CDR3 for alpha chain variable domain of TCR clone 197727 (TRAV8-6, TRAJ32)
CAVRDRATNKLIF

SEQ ID NO: 395454 - protein, 13 aa, Homo sapiens
  CDR3 for beta chain variable domain of TCR clone 197727 (TRBV11-2, TRBJ2-7)
CASSLDLGYEQYF

SEQ ID NO: 395455 - protein, 15 aa, Homo sapiens
  CDR3 for alpha chain variable domain of TCR clone 197728 (TRAV25, TRAJ52)
CAGRPGGASYGKLTF

SEQ ID NO: 395456 - protein, 17 aa, Homo sapiens
  CDR3 for beta chain variable domain of TCR clone 197728 (TRBV7-8, TRBJ2-6)
CASSAGTGGAGANDLTF

SEQ ID NO: 395457 - protein, 14 aa, Homo sapiens
  CDR3 for alpha chain variable domain of TCR clone 197729 (TRAV12-3, TRAJ13)
CAMRNSGGYQKVTF

SEQ ID NO: 395458 - protein, 14 aa, Homo sapiens
  CDR3 for beta chain variable domain of TCR clone 197729 (TRBV4-1, TRBJ1-6)
CASSPRSDSSPLHL

SEQ ID NO: 395459 - protein, 15 aa, Homo sapiens
  CDR3 for alpha chain variable domain of TCR clone 197730 (TRAV35, TRAJ40)
CAGQLGNSGTYKYIF

SEQ ID NO: 395460 - protein, 14 aa, Homo sapiens
  CDR3 for beta chain variable domain of TCR clone 197730 (TRBV7-3, TRBJ2-1)
CASGLAGGTNEQFF

SEQ ID NO: 395461 - protein, 19 aa, Homo sapiens
  CDR3 for alpha chain variable domain of TCR clone 197731 (TRAV2, TRAJ20)
ILQVREADAAVYRVCKLSF

SEQ ID NO: 395462 - protein, 16 aa, Homo sapiens
  CDR3 for beta chain variable domain of TCR clone 197731 (TRBV9, TRBJ2-2)
CASSAMGKGNTGGLFF

SEQ ID NO: 395463 - protein, 13 aa, Homo sapiens
  CDR3 for alpha chain variable domain of TCR clone 197732 (TRAV8-3, TRAJ31)
CSVGARNNDRLMF

SEQ ID NO: 395464 - protein, 14 aa, Homo sapiens
  CDR3 for beta chain variable domain of TCR clone 197732 (TRBV12-5, TRBJ2-5)
CASGSRTHQETQYF

SEQ ID NO: 395465 - protein, 16 aa, Homo sapiens
  CDR3 for alpha chain variable domain of TCR clone 197733 (TRAV17, TRAJ28)
CATASVSGAVSYQLTF

SEQ ID NO: 395466 - protein, 11 aa, Homo sapiens
  CDR3 for beta chain variable domain of TCR clone 197733 (TRBV7-9, TRBJ2-5)
CASSLGETQYS

SEQ ID NO: 395467 - protein, 15 aa, Homo sapiens
  CDR3 for alpha chain variable domain of TCR clone 197734 (TRAV12-1, TRAJ45)
CVVLSGGGGADGLTF

SEQ ID NO: 395468 - protein, 15 aa, Homo sapiens
  CDR3 for beta chain variable domain of TCR clone 197734 (TRBV7-3, TRBJ2-1)
CASSPTGGGEVEQFF

SEQ ID NO: 395469 - protein, 15 aa, Homo sapiens
  CDR3 for alpha chain variable domain of TCR clone 197735 (TRAV14/DV4, TRAJ10)
CAMRELTGGGNKLTF

SEQ ID NO: 395470 - protein, 14 aa, Homo sapiens
  CDR3 for beta chain variable domain of TCR clone 197735 (TRBV20-1, TRBJ2-3)
CSARGGTSTDTQYF

SEQ ID NO: 395471 - protein, 14 aa, Homo sapiens
  CDR3 for alpha chain variable domain of TCR clone 197736 (TRAV1-2, TRAJ16)
CAVNRFSDGQKLLF

SEQ ID NO: 395472 - protein, 16 aa, Homo sapiens
  CDR3 for beta chain variable domain of TCR clone 197736 (TRBV12-4, TRBJ1-5)
CASSRPVGGSNQPQHV

SEQ ID NO: 395473 - protein, 13 aa, Homo sapiens
  CDR3 for alpha chain variable domain of TCR clone 197737 (TRAV27, TRAJ8)
CTGGPTGFQKLVF

SEQ ID NO: 395474 - protein, 15 aa, Homo sapiens
  CDR3 for beta chain variable domain of TCR clone 197737 (TRBV6-1, TRBJ2-7)
CASSESMGDFYEQYF

SEQ ID NO: 395475 - protein, 14 aa, Homo sapiens
  CDR3 for alpha chain variable domain of TCR clone 197738 (TRAV16, TRAJ33)
CALSAMDSNYQLLW

SEQ ID NO: 395476 - protein, 17 aa, Homo sapiens
  CDR3 for beta chain variable domain of TCR clone 197738 (TRBV25-1, TRBJ2-7)
CASSDARVVFSSYEQYF

SEQ ID NO: 395477 - protein, 14 aa, Homo sapiens
  CDR3 for alpha chain variable domain of TCR clone 197739 (TRAV26-1, TRAJ34)
CIVRVAYNTDKLIF

SEQ ID NO: 395478 - protein, 13 aa, Homo sapiens
  CDR3 for beta chain variable domain of TCR clone 197739 (TRBV7-9, TRBJ1-2)
CASSVKQNYGYTF

SEQ ID NO: 395479 - protein, 12 aa, Homo sapiens
  CDR3 for alpha chain variable domain of TCR clone 197740 (TRAV8-3, TRAJ26)
CAGDNYGQNYVF

SEQ ID NO: 395480 - protein, 15 aa, Homo sapiens
  CDR3 for beta chain variable domain of TCR clone 197740 (TRBV9, TRBJ2-1)
CASSLAGSSYNEQFF

SEQ ID NO: 395481 - protein, 15 aa, Homo sapiens
  CDR3 for alpha chain variable domain of TCR clone 197741 (TRAV13-1, TRAJ45)
CAASGSGGGADGPTF

SEQ ID NO: 395482 - protein, 14 aa, Homo sapiens
  CDR3 for beta chain variable domain of TCR clone 197741 (TRBV12-4, TRBJ1-2)
CASSFVGTAYGYTF

SEQ ID NO: 395483 - protein, 15 aa, Homo sapiens
  CDR3 for alpha chain variable domain of TCR clone 197742 (TRAV4, TRAJ42)
CLVGGYGGSQGNLIF

SEQ ID NO: 395484 - protein, 14 aa, Homo sapiens
  CDR3 for beta chain variable domain of TCR clone 197742 (TRBV6-1, TRBJ1-3)
CASVQGGGGNTIYF

SEQ ID NO: 395485 - protein, 13 aa, Homo sapiens
  CDR3 for alpha chain variable domain of TCR clone 197743 (TRAV38-2/DV8, TRAJ34)
CAYRNYNTEKLIF

SEQ ID NO: 395486 - protein, 17 aa, Homo sapiens
  CDR3 for beta chain variable domain of TCR clone 197743 (TRBV7-2, TRBJ2-5)
CASNSHSGRGKAETQYF

SEQ ID NO: 395487 - protein, 12 aa, Homo sapiens
  CDR3 for alpha chain variable domain of TCR clone 197744 (TRAV12-1, TRAJ9)
CVVNTGGFKTIF

SEQ ID NO: 395488 - protein, 16 aa, Homo sapiens
  CDR3 for beta chain variable domain of TCR clone 197744 (TRBV7-9, TRBJ1-2)
CASSLGFSSGEDGYTF

SEQ ID NO: 395489 - protein, 14 aa, Homo sapiens
  CDR3 for alpha chain variable domain of TCR clone 197745 (TRAV8-3, TRAJ37)
CAVGPYDNTGKLIF

SEQ ID NO: 395490 - protein, 13 aa, Homo sapiens
  CDR3 for beta chain variable domain of TCR clone 197745 (TRBV20-1, TRBJ2-5)
CSARGDYQETQYF

SEQ ID NO: 395491 - protein, 14 aa, Homo sapiens
  CDR3 for alpha chain variable domain of TCR clone 197746 (TRAV1-2, TRAJ8)
CAVREDTGFQKLVF

SEQ ID NO: 395492 - protein, 14 aa, Homo sapiens
  CDR3 for beta chain variable domain of TCR clone 197746 (TRBV7-9, TRBJ2-5)
CASSLAFGQETQYF

SEQ ID NO: 395493 - protein, 14 aa, Homo sapiens
  CDR3 for alpha chain variable domain of TCR clone 197747 (TRAV12-2, TRAJ44)
CAVNPAGTASKLTF

SEQ ID NO: 395494 - protein, 12 aa, Homo sapiens
  CDR3 for beta chain variable domain of TCR clone 197747 (TRBV27, TRBJ2-5)
CASSPAGETQYF

SEQ ID NO: 395495 - protein, 13 aa, Homo sapiens
  CDR3 for alpha chain variable domain of TCR clone 197748 (TRAV1-2, TRAJ9)
CAALNTGGFKTIF

SEQ ID NO: 395496 - protein, 13 aa, Homo sapiens
  CDR3 for beta chain variable domain of TCR clone 197748 (TRBV19, TRBJ1-2)
CASSVPGLDGYTF

SEQ ID NO: 395497 - protein, 17 aa, Homo sapiens
  CDR3 for alpha chain variable domain of TCR clone 197749 (TRAV35, TRAJ47)
GLLDCRTHSEYGNKLVF

SEQ ID NO: 395498 - protein, 11 aa, Homo sapiens
  CDR3 for beta chain variable domain of TCR clone 197749 (TRBV29-1, TRBJ1-1)
CSVEVGTRTFF

SEQ ID NO: 395499 - protein, 15 aa, Homo sapiens
  CDR3 for alpha chain variable domain of TCR clone 197750 (TRAV3, TRAJ23)
CAVRDRGNQGGKRIF

SEQ ID NO: 395500 - protein, 15 aa, Homo sapiens
  CDR3 for beta chain variable domain of TCR clone 197750 (TRBV7-3, TRBJ2-1)
CQQLAPSGSYNEQFF

SEQ ID NO: 395501 - protein, 14 aa, Homo sapiens
  CDR3 for alpha chain variable domain of TCR clone 197751 (TRAV38-1, TRAJ29)
CAFIIPSGNTPLVF

SEQ ID NO: 395502 - protein, 14 aa, Homo sapiens
  CDR3 for beta chain variable domain of TCR clone 197751 (TRBV18, TRBJ2-7)
CASSPRGGAYEQYS

SEQ ID NO: 395503 - protein, 19 aa, Homo sapiens
  CDR3 for alpha chain variable domain of TCR clone 197752 (TRAV35, TRAJ30)
CAPGGMTRSSLEKGHDFIF

SEQ ID NO: 395504 - protein, 16 aa, Homo sapiens
  CDR3 for beta chain variable domain of TCR clone 197752 (TRBV7-6, TRBJ2-1)
CIAVPAAWGGADEQFF

SEQ ID NO: 395505 - protein, 13 aa, Homo sapiens
  CDR3 for alpha chain variable domain of TCR clone 197753 (TRAV20, TRAJ20)
CSVRWVRDYKLSF

SEQ ID NO: 395506 - protein, 14 aa, Homo sapiens
  CDR3 for beta chain variable domain of TCR clone 197753 (TRBV19, TRBJ2-2)
CASTVTANTGELFF

SEQ ID NO: 395507 - protein, 18 aa, Homo sapiens
  CDR3 for alpha chain variable domain of TCR clone 197754 (TRAV21, TRAJ52)
CAVRPSPAGGTSYGKLAF

SEQ ID NO: 395508 - protein, 16 aa, Homo sapiens
  CDR3 for beta chain variable domain of TCR clone 197754 (TRBV13, TRBJ2-3)
CQQPLQGSGGRNTQYF

SEQ ID NO: 395509 - protein, 17 aa, Homo sapiens
  CDR3 for alpha chain variable domain of TCR clone 197755 (TRAV27, TRAJ18)
CAGLHRGIGPTLGRLYF

SEQ ID NO: 395510 - protein, 14 aa, Homo sapiens
  CDR3 for beta chain variable domain of TCR clone 197755 (TRBV20-1, TRBJ1-5)
CSARGRGSNQPQHF

SEQ ID NO: 395511 - protein, 13 aa, Homo sapiens
  CDR3 for alpha chain variable domain of TCR clone 197756 (TRAV12-1, TRAJ26)
CVVNPVYGQNFVF

SEQ ID NO: 395512 - protein, 13 aa, Homo sapiens
  CDR3 for beta chain variable domain of TCR clone 197756 (TRBV20-1, TRBJ1-1)
CSAPLGGGTEAFF

SEQ ID NO: 395513 - protein, 18 aa, Homo sapiens
  CDR3 for alpha chain variable domain of TCR clone 197757 (TRAV13-1, TRAJ52)
CAAKNPNAGGTSYGTLTF

SEQ ID NO: 395514 - protein, 14 aa, Homo sapiens
  CDR3 for beta chain variable domain of TCR clone 197757 (TRBV7-3, TRBJ2-1)
CASSLAGGTNEQFF

SEQ ID NO: 395515 - protein, 10 aa, Homo sapiens
  CDR3 for alpha chain variable domain of TCR clone 197758 (TRAV17, TRAJ52)
FATSYGKLTF

SEQ ID NO: 395516 - protein, 13 aa, Homo sapiens
  CDR3 for beta chain variable domain of TCR clone 197758 (TRBV29-1, TRBJ2-5)
CSVGGTSAETQYF

SEQ ID NO: 395517 - protein, 11 aa, Homo sapiens
  CDR3 for alpha chain variable domain of TCR clone 197759 (TRAV12-3, TRAJ49)
CAANTGNQFYF

SEQ ID NO: 395518 - protein, 17 aa, Homo sapiens
  CDR3 for beta chain variable domain of TCR clone 197759 (TRBV28, TRBJ2-5)
CASSRQGGLAGAETQYF

SEQ ID NO: 395519 - protein, 13 aa, Homo sapiens
  CDR3 for alpha chain variable domain of TCR clone 197760 (TRAV8-3, TRAJ48)
CAVVPFGNEKLTF

SEQ ID NO: 395520 - protein, 22 aa, Homo sapiens
  CDR3 for beta chain variable domain of TCR clone 197760 (TRBV11-2, TRBJ2-1)
LRTRPCISVPAALSTRYNEQFF

SEQ ID NO: 395521 - protein, 15 aa, Homo sapiens
  CDR3 for alpha chain variable domain of TCR clone 197761 (TRAV26-1, TRAJ29)
CIVRVEGSGNTPLVF

SEQ ID NO: 395522 - protein, 14 aa, Homo sapiens
  CDR3 for beta chain variable domain of TCR clone 197761 (TRBV7-9, TRBJ2-4)
CASSLAMGGNIQYF

SEQ ID NO: 395523 - protein, 12 aa, Homo sapiens
  CDR3 for alpha chain variable domain of TCR clone 197762 (TRAV16, TRAJ10)
CAFTGGGNKLTF

SEQ ID NO: 395524 - protein, 16 aa, Homo sapiens
  CDR3 for beta chain variable domain of TCR clone 197762 (TRBV7-3, TRBJ2-2)
CASSLKRGTLSGELFF

SEQ ID NO: 395525 - protein, 12 aa, Homo sapiens
  CDR3 for alpha chain variable domain of TCR clone 197763 (TRAV13-2, TRAJ23)
CAERHRGGKLIF

SEQ ID NO: 395526 - protein, 16 aa, Homo sapiens
  CDR3 for beta chain variable domain of TCR clone 197763 (TRBV7-2, TRBJ2-6)
CAILSGVSSVANVLTF

SEQ ID NO: 395527 - protein, 12 aa, Homo sapiens
  CDR3 for alpha chain variable domain of TCR clone 197764 (TRAV21, TRAJ33)
CAKMYSNYQLIW

SEQ ID NO: 395528 - protein, 13 aa, Homo sapiens
  CDR3 for beta chain variable domain of TCR clone 197764 (TRBV12-4, TRBJ2-5)
CASSPGTEETQYF

SEQ ID NO: 395529 - protein, 14 aa, Homo sapiens
  CDR3 for alpha chain variable domain of TCR clone 197765 (TRAV17, TRAJ34)
CVTDSLEGTDKLIF

SEQ ID NO: 395530 - protein, 13 aa, Homo sapiens
  CDR3 for beta chain variable domain of TCR clone 197765 (TRBV11-2, TRBJ2-7)
CASSGTRPYEQYF

SEQ ID NO: 395531 - protein, 16 aa, Homo sapiens
  CDR3 for alpha chain variable domain of TCR clone 197766 (TRAV3, TRAJ37)
CAVRGKGSGNTGKLIF

SEQ ID NO: 395532 - protein, 16 aa, Homo sapiens
  CDR3 for beta chain variable domain of TCR clone 197766 (TRBV7-2, TRBJ1-3)
CASSSGRVLSGNTIYF

SEQ ID NO: 395533 - protein, 23 aa, Homo sapiens
  CDR3 for alpha chain variable domain of TCR clone 197767 (TRAV8-4, )
CAVSYAGNNHIQNPDPAVYQLRD

SEQ ID NO: 395534 - protein, 14 aa, Homo sapiens
  CDR3 for beta chain variable domain of TCR clone 197767 (TRBV7-9, TRBJ2-1)
CASSPRDSLYEQFF

SEQ ID NO: 395535 - protein, 15 aa, Homo sapiens
  CDR3 for alpha chain variable domain of TCR clone 197768 (TRAV8-3, TRAJ45)
GAASYSGGGADGLNF

SEQ ID NO: 395536 - protein, 13 aa, Homo sapiens
  CDR3 for beta chain variable domain of TCR clone 197768 (TRBV10-3, TRBJ2-7)
CASKLAVNYEQYF

SEQ ID NO: 395537 - protein, 14 aa, Homo sapiens
  CDR3 for alpha chain variable domain of TCR clone 197769 (TRAV16, TRAJ17)
CALSEGAAGNKITF

SEQ ID NO: 395538 - protein, 14 aa, Homo sapiens
  CDR3 for beta chain variable domain of TCR clone 197769 (TRBV28, TRBJ2-2)
CASRIRSGTGELFF

SEQ ID NO: 395539 - protein, 18 aa, Homo sapiens
  CDR3 for alpha chain variable domain of TCR clone 197770 (TRAV13-1, TRAJ52)
CAAKNPNAGGTSYGKLTF

SEQ ID NO: 395540 - protein, 14 aa, Homo sapiens
  CDR3 for beta chain variable domain of TCR clone 197770 (TRBV19, TRBJ2-3)
CASSAPRGTDTQYF

SEQ ID NO: 395541 - protein, 14 aa, Homo sapiens
  CDR3 for alpha chain variable domain of TCR clone 197771 (TRAV35, TRAJ38)
CAGSNAGNNRKLIW

SEQ ID NO: 395542 - protein, 16 aa, Homo sapiens
  CDR3 for beta chain variable domain of TCR clone 197771 (TRBV6-1, TRBJ1-3)
CASVQGGVETPYILER

SEQ ID NO: 395543 - protein, 14 aa, Homo sapiens
  CDR3 for alpha chain variable domain of TCR clone 197772 (TRAV26-1, TRAJ38)
CIADNAGNNRKLIW

SEQ ID NO: 395544 - protein, 16 aa, Homo sapiens
  CDR3 for beta chain variable domain of TCR clone 197772 (TRBV20-1, TRBJ2-7)
CSASTSGRLSSYEQYV

SEQ ID NO: 395545 - protein, 15 aa, Homo sapiens
  CDR3 for alpha chain variable domain of TCR clone 197773 (TRAV3, TRAJ17)
CAVSPKEAAGNKLTV

SEQ ID NO: 395546 - protein, 12 aa, Homo sapiens
  CDR3 for beta chain variable domain of TCR clone 197773 (TRBV24-1, TRBJ1-1)
CATLYPDTEAFF

SEQ ID NO: 395547 - protein, 14 aa, Homo sapiens
  CDR3 for alpha chain variable domain of TCR clone 197774 (TRAV16, TRAJ32)
CALKSGGATNKLIF

SEQ ID NO: 395548 - protein, 13 aa, Homo sapiens
  CDR3 for beta chain variable domain of TCR clone 197774 (TRBV15, TRBJ1-6)
CATSGGLNSSLHF

SEQ ID NO: 395549 - protein, 16 aa, Homo sapiens
  CDR3 for alpha chain variable domain of TCR clone 197775 (TRAV30, TRAJ24)
CGTEIVDADSWGKFQF

SEQ ID NO: 395550 - protein, 17 aa, Homo sapiens
  CDR3 for beta chain variable domain of TCR clone 197775 (TRBV20-1, TRBJ2-3)
CSASLLGRGGSADTQYF

SEQ ID NO: 395551 - protein, 15 aa, Homo sapiens
  CDR3 for alpha chain variable domain of TCR clone 197776 (TRAV17, TRAJ12)
TSVLRTRRIAYKLIF

SEQ ID NO: 395552 - protein, 16 aa, Homo sapiens
  CDR3 for beta chain variable domain of TCR clone 197776 (TRBV11-2, TRBJ2-1)
CASSPRLAGVYNEQFF

SEQ ID NO: 395553 - protein, 14 aa, Homo sapiens
  CDR3 for alpha chain variable domain of TCR clone 197777 (TRAV21, TRAJ3)
CAVTGYSSASKIIF

SEQ ID NO: 395554 - protein, 17 aa, Homo sapiens
  CDR3 for beta chain variable domain of TCR clone 197777 (TRBV28, TRBJ2-5)
CASSRHGGLAGAETQYF

SEQ ID NO: 395555 - protein, 14 aa, Homo sapiens
  CDR3 for alpha chain variable domain of TCR clone 197778 (TRAV17, TRAJ12)
CAILPMDSSYKLIF

SEQ ID NO: 395556 - protein, 14 aa, Homo sapiens
  CDR3 for beta chain variable domain of TCR clone 197778 (TRBV3-1, TRBJ2-1)
CASSQAVYLGEQFF

SEQ ID NO: 395557 - protein, 13 aa, Homo sapiens
  CDR3 for alpha chain variable domain of TCR clone 197779 (TRAV17, TRAJ26)
CATVDNYGQNFVF

SEQ ID NO: 395558 - protein, 16 aa, Homo sapiens
  CDR3 for beta chain variable domain of TCR clone 197779 (TRBV2, TRBJ2-1)
CARRKTSGGSYNEQFF

SEQ ID NO: 395559 - protein, 13 aa, Homo sapiens
  CDR3 for alpha chain variable domain of TCR clone 197780 (TRAV12-2, TRAJ4)
CAVRSGGYNKLIF

SEQ ID NO: 395560 - protein, 15 aa, Homo sapiens
  CDR3 for beta chain variable domain of TCR clone 197780 (TRBV10-3, TRBJ2-1)
CDISDVQDRAYEQFF

SEQ ID NO: 395561 - protein, 14 aa, Homo sapiens
  CDR3 for alpha chain variable domain of TCR clone 197781 (TRAV12-2, TRAJ13)
CSVKKTGGYQKVTF

SEQ ID NO: 395562 - protein, 13 aa, Homo sapiens
  CDR3 for beta chain variable domain of TCR clone 197781 (TRBV20-1, TRBJ2-2)
CSALSGGAGELFF

SEQ ID NO: 395563 - protein, 12 aa, Homo sapiens
  CDR3 for alpha chain variable domain of TCR clone 197782 (TRAV3, TRAJ20)
CAVRDPYYKLSF

SEQ ID NO: 395564 - protein, 14 aa, Homo sapiens
  CDR3 for beta chain variable domain of TCR clone 197782 (TRBV6-1, TRBJ1-3)
CASVQGGGGNTIYF

SEQ ID NO: 395565 - protein, 14 aa, Homo sapiens
  CDR3 for alpha chain variable domain of TCR clone 197783 (TRAV27, TRAJ41)
CAVRTQIPGMHSTS

SEQ ID NO: 395566 - protein, 19 aa, Homo sapiens
  CDR3 for beta chain variable domain of TCR clone 197783 (TRBV25-1, TRBJ2-2)
CAILVYRVDRGRKTGELFF

SEQ ID NO: 395567 - protein, 14 aa, Homo sapiens
  CDR3 for alpha chain variable domain of TCR clone 197784 (TRAV17, TRAJ6)
CATDASGGCYIPTF

SEQ ID NO: 395568 - protein, 19 aa, Homo sapiens
  CDR3 for beta chain variable domain of TCR clone 197784 (TRBV4-3, TRBJ2-7)
CASSQEFIGWQVTPYEQYF

SEQ ID NO: 395569 - protein, 15 aa, Homo sapiens
  CDR3 for alpha chain variable domain of TCR clone 197785 (TRAV27, TRAJ38)
CAARRNAGNNRKLIW

SEQ ID NO: 395570 - protein, 15 aa, Homo sapiens
  CDR3 for beta chain variable domain of TCR clone 197785 (TRBV4-1, TRBJ2-7)
CASSQQGQGFDEQYF

SEQ ID NO: 395571 - protein, 14 aa, Homo sapiens
  CDR3 for alpha chain variable domain of TCR clone 197786 (TRAV1-1, TRAJ27)
CAVIYNTNAGKSTF

SEQ ID NO: 395572 - protein, 13 aa, Homo sapiens
  CDR3 for beta chain variable domain of TCR clone 197786 (TRBV12-5, TRBJ1-2)
CASGVRTGNGYTL

SEQ ID NO: 395573 - protein, 11 aa, Homo sapiens
  CDR3 for alpha chain variable domain of TCR clone 197787 (TRAV2, TRAJ13)
CASGGYQKVTF

SEQ ID NO: 395574 - protein, 13 aa, Homo sapiens
  CDR3 for beta chain variable domain of TCR clone 197787 (TRBV20-1, TRBJ2-1)
CSARSSPRDEQFF

SEQ ID NO: 395575 - protein, 14 aa, Homo sapiens
  CDR3 for alpha chain variable domain of TCR clone 197788 (TRAV8-3, TRAJ42)
CAVGAWGSQGNLIF

SEQ ID NO: 395576 - protein, 15 aa, Homo sapiens
  CDR3 for beta chain variable domain of TCR clone 197788 (TRBV12-4, TRBJ2-5)
CASSPPTGLQETQYF

SEQ ID NO: 395577 - protein, 11 aa, Homo sapiens
  CDR3 for alpha chain variable domain of TCR clone 197789 (TRAV3, TRAJ21)
CAVGNFNKFYF

SEQ ID NO: 395578 - protein, 13 aa, Homo sapiens
  CDR3 for beta chain variable domain of TCR clone 197789 (TRBV7-9, TRBJ2-2)
CASSLDPTGELFF

SEQ ID NO: 395579 - protein, 12 aa, Homo sapiens
  CDR3 for alpha chain variable domain of TCR clone 197790 (TRAV13-1, TRAJ42)
SVLRGSQGNLIF

SEQ ID NO: 395580 - protein, 15 aa, Homo sapiens
  CDR3 for beta chain variable domain of TCR clone 197790 (TRBV18, TRBJ2-7)
CASSPASTPNYEQYF

SEQ ID NO: 395581 - protein, 13 aa, Homo sapiens
  CDR3 for alpha chain variable domain of TCR clone 197791 (TRAV27, TRAJ37)
CAGGPSNTGKLIF

SEQ ID NO: 395582 - protein, 15 aa, Homo sapiens
  CDR3 for beta chain variable domain of TCR clone 197791 (TRBV20-1, TRBJ2-7)
CSARDRVSGMDEQYF

SEQ ID NO: 395583 - protein, 16 aa, Homo sapiens
  CDR3 for alpha chain variable domain of TCR clone 197792 (TRAV13-1, TRAJ48)
CAASIFGTFGNEKLTF

SEQ ID NO: 395584 - protein, 14 aa, Homo sapiens
  CDR3 for beta chain variable domain of TCR clone 197792 (TRBV7-3, TRBJ1-1)
CASSLKGGNTEAFF

SEQ ID NO: 395585 - protein, 14 aa, Homo sapiens
  CDR3 for alpha chain variable domain of TCR clone 197793 (TRAV1-2, TRAJ16)
CAVNRFSDGQKLLF

SEQ ID NO: 395586 - protein, 15 aa, Homo sapiens
  CDR3 for beta chain variable domain of TCR clone 197793 (TRBV23-1, TRBJ2-1)
CASSQWPQLTMSSSS

SEQ ID NO: 395587 - protein, 15 aa, Homo sapiens
  CDR3 for alpha chain variable domain of TCR clone 197794 (TRAV26-1, TRAJ48)
CIARWSWFGNGKLTF

SEQ ID NO: 395588 - protein, 16 aa, Homo sapiens
  CDR3 for beta chain variable domain of TCR clone 197794 (TRBV7-2, TRBJ2-5)
CASSPFPTGGEETQYF

SEQ ID NO: 395589 - protein, 13 aa, Homo sapiens
  CDR3 for alpha chain variable domain of TCR clone 197795 (TRAV20, TRAJ3)
CARRYSSASKIIL

SEQ ID NO: 395590 - protein, 12 aa, Homo sapiens
  CDR3 for beta chain variable domain of TCR clone 197795 (TRBV28, TRBJ2-1)
CASSFRGNEQFF

SEQ ID NO: 395591 - protein, 15 aa, Homo sapiens
  CDR3 for alpha chain variable domain of TCR clone 197796 (TRAV8-4, TRAJ13)
CAVSDWSGGYQKVTF

SEQ ID NO: 395592 - protein, 14 aa, Homo sapiens
  CDR3 for beta chain variable domain of TCR clone 197796 (TRBV11-3, TRBJ2-1)
CASSPTTSGSIQFF

SEQ ID NO: 395593 - protein, 15 aa, Homo sapiens
  CDR3 for alpha chain variable domain of TCR clone 197797 (TRAV8-4, TRAJ37)
CAVSRGSSNTGKLIF

SEQ ID NO: 395594 - protein, 16 aa, Homo sapiens
  CDR3 for beta chain variable domain of TCR clone 197797 (TRBV7-3, TRBJ2-3)
CASSLSGYRPEDTQYF

SEQ ID NO: 395595 - protein, 14 aa, Homo sapiens
  CDR3 for alpha chain variable domain of TCR clone 197798 (TRAV35, TRAJ50)
CAGHRKTSYDKVIF

SEQ ID NO: 395596 - protein, 16 aa, Homo sapiens
  CDR3 for beta chain variable domain of TCR clone 197798 (TRBV12-4, TRBJ2-5)
CASSFFVRGRQETQYF

SEQ ID NO: 395597 - protein, 18 aa, Homo sapiens
  CDR3 for alpha chain variable domain of TCR clone 197799 (TRAV21, TRAJ52)
CAVRPSPAGGTSYGKLTF

SEQ ID NO: 395598 - protein, 16 aa, Homo sapiens
  CDR3 for beta chain variable domain of TCR clone 197799 (TRBV7-2, TRBJ2-3)
CASSSVALYSTDTQYF

SEQ ID NO: 395599 - protein, 14 aa, Homo sapiens
  CDR3 for alpha chain variable domain of TCR clone 197800 (TRAV12-1, TRAJ30)
CVVNIGGRDEDHLW

SEQ ID NO: 395600 - protein, 15 aa, Homo sapiens
  CDR3 for beta chain variable domain of TCR clone 197800 (TRBV18, TRBJ1-2)
CASSPSNTPNYGYTF

SEQ ID NO: 395601 - protein, 16 aa, Homo sapiens
  CDR3 for alpha chain variable domain of TCR clone 197801 (TRAV3, TRAJ37)
CAVRPHGSGNTGKLIF

SEQ ID NO: 395602 - protein, 16 aa, Homo sapiens
  CDR3 for beta chain variable domain of TCR clone 197801 (TRBV9, TRBJ1-2)
CASRVEEKVSPYGYTF

SEQ ID NO: 395603 - protein, 14 aa, Homo sapiens
  CDR3 for alpha chain variable domain of TCR clone 197802 (TRAV12-2, TRAJ17)
CAVNIKAAGNKLTF

SEQ ID NO: 395604 - protein, 16 aa, Homo sapiens
  CDR3 for beta chain variable domain of TCR clone 197802 (TRBV20-1, TRBJ2-6)
CSASSQGYVGANVLTF

SEQ ID NO: 395605 - protein, 13 aa, Homo sapiens
  CDR3 for alpha chain variable domain of TCR clone 197803 (TRAV1-2, TRAJ13)
CAVNSGGHQKVTF

SEQ ID NO: 395606 - protein, 14 aa, Homo sapiens
  CDR3 for beta chain variable domain of TCR clone 197803 (TRBV4-1, TRBJ1-5)
CASSPKGDNQPQHF

SEQ ID NO: 395607 - protein, 11 aa, Homo sapiens
  CDR3 for alpha chain variable domain of TCR clone 197804 (TRAV1-2, TRAJ31)
CAVNNNARLMF

SEQ ID NO: 395608 - protein, 17 aa, Homo sapiens
  CDR3 for beta chain variable domain of TCR clone 197804 (TRBV28, TRBJ2-5)
CASSRQGGLAGAETQYF

SEQ ID NO: 395609 - protein, 16 aa, Homo sapiens
  CDR3 for alpha chain variable domain of TCR clone 197805 (TRAV3, TRAJ37)
CAVRGKGSGNTGKILF

SEQ ID NO: 395610 - protein, 13 aa, Homo sapiens
  CDR3 for beta chain variable domain of TCR clone 197805 (TRBV4-2, TRBJ1-1)
CASSQAGNTEAFF

SEQ ID NO: 395611 - protein, 14 aa, Homo sapiens
  CDR3 for alpha chain variable domain of TCR clone 197806 (TRAV1-2, TRAJ33)
CAVRAPDSNFPLIW

SEQ ID NO: 395612 - protein, 14 aa, Homo sapiens
  CDR3 for beta chain variable domain of TCR clone 197806 (TRBV11-3, TRBJ1-6)
CASSFSGGDSPLHF

SEQ ID NO: 395613 - protein, 14 aa, Homo sapiens
  CDR3 for alpha chain variable domain of TCR clone 197807 (TRAV23/DV6, TRAJ37)
CAANTSSNTGKLIF

SEQ ID NO: 395614 - protein, 17 aa, Homo sapiens
  CDR3 for beta chain variable domain of TCR clone 197807 (TRBV7-3, TRBJ2-2)
CASSLSGTSGGTGELFF

SEQ ID NO: 395615 - protein, 14 aa, Homo sapiens
  CDR3 for alpha chain variable domain of TCR clone 197808 (TRAV26-1, TRAJ45)
CIEVTGGGADGLTF

SEQ ID NO: 395616 - protein, 16 aa, Homo sapiens
  CDR3 for beta chain variable domain of TCR clone 197808 (TRBV6-1, TRBJ2-1)
CASILRQGSSYNEQFF

SEQ ID NO: 395617 - protein, 13 aa, Homo sapiens
  CDR3 for alpha chain variable domain of TCR clone 197809 (TRAV20, TRAJ42)
CAVQGGSQGNPIF

SEQ ID NO: 395618 - protein, 15 aa, Homo sapiens
  CDR3 for beta chain variable domain of TCR clone 197809 (TRBV10-1, TRBJ2-1)
CASSEWRGTYNEQFF

SEQ ID NO: 395619 - protein, 12 aa, Homo sapiens
  CDR3 for alpha chain variable domain of TCR clone 197810 (TRAV13-1, TRAJ21)
CAAKEGFNKFYF

SEQ ID NO: 395620 - protein, 13 aa, Homo sapiens
  CDR3 for beta chain variable domain of TCR clone 197810 (TRBV19, TRBJ1-2)
CASSVPGQDGHTF

SEQ ID NO: 395621 - protein, 14 aa, Homo sapiens
  CDR3 for alpha chain variable domain of TCR clone 197811 (TRAV1-2, TRAJ16)
CAVNRFSDGQKLLF

SEQ ID NO: 395622 - protein, 14 aa, Homo sapiens
  CDR3 for beta chain variable domain of TCR clone 197811 (TRBV20-1, TRBJ2-4)
CSARGRVGENIQYF

SEQ ID NO: 395623 - protein, 12 aa, Homo sapiens
  CDR3 for alpha chain variable domain of TCR clone 197812 (TRAV8-3, TRAJ26)
CSGDNYGQNFVF

SEQ ID NO: 395624 - protein, 15 aa, Homo sapiens
  CDR3 for beta chain variable domain of TCR clone 197812 (TRBV12-4, TRBJ2-1)
CASSLSGGASNEQFF

SEQ ID NO: 395625 - protein, 13 aa, Homo sapiens
  CDR3 for alpha chain variable domain of TCR clone 197813 (TRAV17, TRAJ22)
CAHHSGSARQLTF

SEQ ID NO: 395626 - protein, 14 aa, Homo sapiens
  CDR3 for beta chain variable domain of TCR clone 197813 (TRBV16, TRBJ1-1)
CARRKEGEKNEDLF

SEQ ID NO: 395627 - protein, 12 aa, Homo sapiens
  CDR3 for alpha chain variable domain of TCR clone 197814 (TRAV13-2, TRAJ8)
CAPWLGFQKLVF

SEQ ID NO: 395628 - protein, 11 aa, Homo sapiens
  CDR3 for beta chain variable domain of TCR clone 197814 (TRBV7-8, TRBJ2-7)
CASSLSLEQYF

SEQ ID NO: 395629 - protein, 17 aa, Homo sapiens
  CDR3 for alpha chain variable domain of TCR clone 197815 (TRAV17, TRAJ28)
CATDPRRGGAGSYQLTF

SEQ ID NO: 395630 - protein, 16 aa, Homo sapiens
  CDR3 for beta chain variable domain of TCR clone 197815 (TRBV25-1, TRBJ1-1)
CASSGDRDSGRIEAFF

SEQ ID NO: 395631 - protein, 16 aa, Homo sapiens
  CDR3 for alpha chain variable domain of TCR clone 197816 (TRAV17, TRAJ35)
CATAEGGIGFGNVLHC

SEQ ID NO: 395632 - protein, 13 aa, Homo sapiens
  CDR3 for beta chain variable domain of TCR clone 197816 (TRBV19, TRBJ1-2)
YASSVPGQDGYTF

SEQ ID NO: 395633 - protein, 13 aa, Homo sapiens
  CDR3 for alpha chain variable domain of TCR clone 197817 (TRAV27, TRAJ45)
CRSSGGGADGLTF

SEQ ID NO: 395634 - protein, 13 aa, Homo sapiens
  CDR3 for beta chain variable domain of TCR clone 197817 (TRBV25-1, TRBJ2-5)
CASSESGRETQYF

SEQ ID NO: 395635 - protein, 14 aa, Homo sapiens
  CDR3 for alpha chain variable domain of TCR clone 197818 (TRAV12-1, TRAJ3)
WVVILYSSASKIIF

SEQ ID NO: 395636 - protein, 12 aa, Homo sapiens
  CDR3 for beta chain variable domain of TCR clone 197818 (TRBV11-2, TRBJ2-2)
CASSLPTGELFF

SEQ ID NO: 395637 - protein, 11 aa, Homo sapiens
  CDR3 for alpha chain variable domain of TCR clone 197819 (TRAV1-2, TRAJ20)
CAVANDYKLSF

SEQ ID NO: 395638 - protein, 15 aa, Homo sapiens
  CDR3 for beta chain variable domain of TCR clone 197819 (TRBV2, TRBJ2-1)
CASSELAGSYNGQFF

SEQ ID NO: 395639 - protein, 16 aa, Homo sapiens
  CDR3 for alpha chain variable domain of TCR clone 197820 (TRAV38-1, TRAJ32)
CAFTKGGGGATNKLIF

SEQ ID NO: 395640 - protein, 13 aa, Homo sapiens
  CDR3 for beta chain variable domain of TCR clone 197820 (TRBV20-1, TRBJ2-5)
CSAREAFQETQYV

SEQ ID NO: 395641 - protein, 14 aa, Homo sapiens
  CDR3 for alpha chain variable domain of TCR clone 197821 (TRAV4, TRAJ17)
CLVGDMAAVNKLTF

SEQ ID NO: 395642 - protein, 15 aa, Homo sapiens
  CDR3 for beta chain variable domain of TCR clone 197821 (TRBV27, TRBJ1-5)
CASSLGTGFDQPQHF

SEQ ID NO: 395643 - protein, 17 aa, Homo sapiens
  CDR3 for alpha chain variable domain of TCR clone 197822 (TRAV1-1, TRAJ4)
CALYNKLIFGAGTRLAV

SEQ ID NO: 395644 - protein, 16 aa, Homo sapiens
  CDR3 for beta chain variable domain of TCR clone 197822 (TRBV7-3, TRBJ2-2)
CAGSLKRGTLSGELFF

SEQ ID NO: 395645 - protein, 14 aa, Homo sapiens
  CDR3 for alpha chain variable domain of TCR clone 197823 (TRAV23/DV6, TRAJ57)
CAASNQGGSEKLVF

SEQ ID NO: 395646 - protein, 15 aa, Homo sapiens
  CDR3 for beta chain variable domain of TCR clone 197823 (TRBV11-2, TRBJ2-2)
CASSSDRVNAGELFF

SEQ ID NO: 395647 - protein, 15 aa, Homo sapiens
  CDR3 for alpha chain variable domain of TCR clone 197824 (TRAV3, TRAJ22)
CAVRDRGGSARLLTF

SEQ ID NO: 395648 - protein, 13 aa, Homo sapiens
  CDR3 for beta chain variable domain of TCR clone 197824 (TRBV7-9, TRBJ1-2)
CASSLKQDYGYTF

SEQ ID NO: 395649 - protein, 14 aa, Homo sapiens
  CDR3 for alpha chain variable domain of TCR clone 197825 (TRAV12-2, TRAJ13)
CAVNPSGGYRKVTF

SEQ ID NO: 395650 - protein, 13 aa, Homo sapiens
  CDR3 for beta chain variable domain of TCR clone 197825 (TRBV20-1, TRBJ1-6)
CSAKLGGTSPLHF

SEQ ID NO: 395651 - protein, 12 aa, Homo sapiens
  CDR3 for alpha chain variable domain of TCR clone 197826 (TRAV13-1, TRAJ20)
CAACQNDYKLSF

SEQ ID NO: 395652 - protein, 14 aa, Homo sapiens
  CDR3 for beta chain variable domain of TCR clone 197826 (TRBV5-1, TRBJ2-7)
CASSFASGVNEQYF

SEQ ID NO: 395653 - protein, 13 aa, Homo sapiens
  CDR3 for alpha chain variable domain of TCR clone 197827 (TRAV20, TRAJ48)
CAVQGVGNEKLTF

SEQ ID NO: 395654 - protein, 14 aa, Homo sapiens
  CDR3 for beta chain variable domain of TCR clone 197827 (TRBV27, TRBJ2-7)
CAGSFRDGPYEQYF

SEQ ID NO: 395655 - protein, 14 aa, Homo sapiens
  CDR3 for alpha chain variable domain of TCR clone 197828 (TRAV17, TRAJ17)
CATDHRAAGNKLTF

SEQ ID NO: 395656 - protein, 14 aa, Homo sapiens
  CDR3 for beta chain variable domain of TCR clone 197828 (TRBV19, TRBJ1-5)
CASSIGGGEQPQHF

SEQ ID NO: 395657 - protein, 14 aa, Homo sapiens
  CDR3 for alpha chain variable domain of TCR clone 197829 (TRAV38-1, TRAJ48)
CAFMANFGNEKITF

SEQ ID NO: 395658 - protein, 16 aa, Homo sapiens
  CDR3 for beta chain variable domain of TCR clone 197829 (TRBV4-1, TRBJ2-7)
CASRPSGGGADNEQYF

SEQ ID NO: 395659 - protein, 14 aa, Homo sapiens
  CDR3 for alpha chain variable domain of TCR clone 197830 (TRAV17, TRAJ6)
SATFSSGGSYIPTF

SEQ ID NO: 395660 - protein, 13 aa, Homo sapiens
  CDR3 for beta chain variable domain of TCR clone 197830 (TRBV20-1, TRBJ1-1)
CSAPLGGGTEAFF

SEQ ID NO: 395661 - protein, 13 aa, Homo sapiens
  CDR3 for alpha chain variable domain of TCR clone 197831 (TRAV12-3, TRAJ13)
CAMGTGGYQKVTF

SEQ ID NO: 395662 - protein, 16 aa, Homo sapiens
  CDR3 for beta chain variable domain of TCR clone 197831 (TRBV7-8, TRBJ2-4)
CASSAERTLAKNIQYF

SEQ ID NO: 395663 - protein, 13 aa, Homo sapiens
  CDR3 for alpha chain variable domain of TCR clone 197832 (TRAV12-2, TRAJ4)
CAGFSGGCNKLIF

SEQ ID NO: 395664 - protein, 14 aa, Homo sapiens
  CDR3 for beta chain variable domain of TCR clone 197832 (TRBV24-1, TRBJ1-1)
CATSIPRGDTEAFF

SEQ ID NO: 395665 - protein, 16 aa, Homo sapiens
  CDR3 for alpha chain variable domain of TCR clone 197833 (TRAV30, TRAJ24)
CGTEIVDADSWGKFKF

SEQ ID NO: 395666 - protein, 19 aa, Homo sapiens
  CDR3 for beta chain variable domain of TCR clone 197833 (TRBV24-1, TRBJ2-1)
TSVPPVIFPNNSSYNEQFF

SEQ ID NO: 395667 - protein, 17 aa, Homo sapiens
  CDR3 for alpha chain variable domain of TCR clone 197834 (TRAV26-1, TRAJ28)
CIVRALYSGAGSYQLTF

SEQ ID NO: 395668 - protein, 12 aa, Homo sapiens
  CDR3 for beta chain variable domain of TCR clone 197834 (TRBV12-4, TRBJ2-7)
CASRQTENEQYF

SEQ ID NO: 395669 - protein, 15 aa, Homo sapiens
  CDR3 for alpha chain variable domain of TCR clone 197835 (TRAV35, TRAJ23)
CAGQRGYNLGGKLIF

SEQ ID NO: 395670 - protein, 16 aa, Homo sapiens
  CDR3 for beta chain variable domain of TCR clone 197835 (TRBV27, TRBJ2-1)
CASSSRLAGNYNEQFF

SEQ ID NO: 395671 - protein, 13 aa, Homo sapiens
  CDR3 for alpha chain variable domain of TCR clone 197836 (TRAV2, TRAJ29)
CAAGNSGNTPLVF

SEQ ID NO: 395672 - protein, 16 aa, Homo sapiens
  CDR3 for beta chain variable domain of TCR clone 197836 (TRBV7-9, TRBJ1-2)
RASSPGGGAINYGYTL

SEQ ID NO: 395673 - protein, 16 aa, Homo sapiens
  CDR3 for alpha chain variable domain of TCR clone 197837 (TRAV30, TRAJ24)
CGTEIVDADSWWKFQF

SEQ ID NO: 395674 - protein, 14 aa, Homo sapiens
  CDR3 for beta chain variable domain of TCR clone 197837 (TRBV12-5, TRBJ2-5)
CASGSRTHQETQYV

SEQ ID NO: 395675 - protein, 17 aa, Homo sapiens
  CDR3 for alpha chain variable domain of TCR clone 197838 (TRAV3, TRAJ6)
CAVRDGPRAGGSYIPTF

SEQ ID NO: 395676 - protein, 14 aa, Homo sapiens
  CDR3 for beta chain variable domain of TCR clone 197838 (TRBV7-6, TRBJ2-3)
CARSLGTVTDTQYF

SEQ ID NO: 395677 - protein, 14 aa, Homo sapiens
  CDR3 for alpha chain variable domain of TCR clone 197839 (TRAV12-2, TRAJ17)
CAVLFKAEGNKLTF

SEQ ID NO: 395678 - protein, 15 aa, Homo sapiens
  CDR3 for beta chain variable domain of TCR clone 197839 (TRBV6-1, TRBJ2-3)
CASSERGGITDTQYF

SEQ ID NO: 395679 - protein, 16 aa, Homo sapiens
  CDR3 for alpha chain variable domain of TCR clone 197840 (TRAV4, TRAJ22)
CLVGDLYSGSARQLTF

SEQ ID NO: 395680 - protein, 14 aa, Homo sapiens
  CDR3 for beta chain variable domain of TCR clone 197840 (TRBV28, TRBJ2-3)
CASSWRGRADSQYF

SEQ ID NO: 395681 - protein, 12 aa, Homo sapiens
  CDR3 for alpha chain variable domain of TCR clone 197841 (TRAV4, TRAJ26)
CLVGDYGQNFVF

SEQ ID NO: 395682 - protein, 14 aa, Homo sapiens
  CDR3 for beta chain variable domain of TCR clone 197841 (TRBV11-2, TRBJ2-7)
CASSSTGEGYEQYF

SEQ ID NO: 395683 - protein, 16 aa, Homo sapiens
  CDR3 for alpha chain variable domain of TCR clone 197842 (TRAV12-2, TRAJ10)
CAVNRVLTGGGNKLPF

SEQ ID NO: 395684 - protein, 13 aa, Homo sapiens
  CDR3 for beta chain variable domain of TCR clone 197842 (TRBV29-1, TRBJ2-7)
CSVKRGGNYEQYF

SEQ ID NO: 395685 - protein, 16 aa, Homo sapiens
  CDR3 for alpha chain variable domain of TCR clone 197843 (TRAV3, TRAJ37)
CAVRPHGSGNTGKLIL

SEQ ID NO: 395686 - protein, 11 aa, Homo sapiens
  CDR3 for beta chain variable domain of TCR clone 197843 (TRBV10-3, TRBJ2-7)
CAISEGLEQYF

SEQ ID NO: 395687 - protein, 14 aa, Homo sapiens
  CDR3 for alpha chain variable domain of TCR clone 197844 (TRAV12-2, TRAJ5)
CAVNRSTGRRALTF

SEQ ID NO: 395688 - protein, 17 aa, Homo sapiens
  CDR3 for beta chain variable domain of TCR clone 197844 (TRBV15, TRBJ1-4)
CATSRYGTGDPNEKLFF

SEQ ID NO: 395689 - protein, 12 aa, Homo sapiens
  CDR3 for alpha chain variable domain of TCR clone 197845 (TRAV13-1, TRAJ48)
CAANFGNEKLTF

SEQ ID NO: 395690 - protein, 15 aa, Homo sapiens
  CDR3 for beta chain variable domain of TCR clone 197845 (TRBV12-4, TRBJ1-2)
CASSPITGGGYGYTF

SEQ ID NO: 395691 - protein, 15 aa, Homo sapiens
  CDR3 for alpha chain variable domain of TCR clone 197846 (TRAV12-2, TRAJ26)
CAVNSHSNYGQNFVF

SEQ ID NO: 395692 - protein, 13 aa, Homo sapiens
  CDR3 for beta chain variable domain of TCR clone 197846 (TRBV2, TRBJ1-1)
CARNPTGGFHAFF

SEQ ID NO: 395693 - protein, 15 aa, Homo sapiens
  CDR3 for alpha chain variable domain of TCR clone 197847 (TRAV8-2, TRAJ15)
CVVTMGNQAGTALIF

SEQ ID NO: 395694 - protein, 15 aa, Homo sapiens
  CDR3 for beta chain variable domain of TCR clone 197847 (TRBV10-2, TRBJ2-6)
CASSEQGTGANVLTF

SEQ ID NO: 395695 - protein, 16 aa, Homo sapiens
  CDR3 for alpha chain variable domain of TCR clone 197848 (TRAV21, TRAJ37)
CAVRTAGPSNTGTLIF

SEQ ID NO: 395696 - protein, 13 aa, Homo sapiens
  CDR3 for beta chain variable domain of TCR clone 197848 (TRBV7-9, TRBJ2-5)
CASLPSGRETQYF

SEQ ID NO: 395697 - protein, 13 aa, Homo sapiens
  CDR3 for alpha chain variable domain of TCR clone 197849 (TRAV8-6, TRAJ15)
CCDFNPAGTALIF

SEQ ID NO: 395698 - protein, 14 aa, Homo sapiens
  CDR3 for beta chain variable domain of TCR clone 197849 (TRBV6-5, TRBJ2-7)
CAASRSGGSYEQYF

SEQ ID NO: 395699 - protein, 13 aa, Homo sapiens
  CDR3 for alpha chain variable domain of TCR clone 197850 (TRAV13-1, TRAJ12)
CSKYMGSSYKLIF

SEQ ID NO: 395700 - protein, 11 aa, Homo sapiens
  CDR3 for beta chain variable domain of TCR clone 197850 (TRBV29-1, TRBJ2-3)
PSGAGTDTQYF

SEQ ID NO: 395701 - protein, 14 aa, Homo sapiens
  CDR3 for alpha chain variable domain of TCR clone 197851 (TRAV1-2, TRAJ8)
CAVSEDAGFQKLVF

SEQ ID NO: 395702 - protein, 15 aa, Homo sapiens
  CDR3 for beta chain variable domain of TCR clone 197851 (TRBV6-3, TRBJ2-7)
CASSSPGTVFYEQYF

SEQ ID NO: 395703 - protein, 11 aa, Homo sapiens
  CDR3 for alpha chain variable domain of TCR clone 197852 (TRAV1-1, TRAJ23)
CVVRQGGKLIF

SEQ ID NO: 395704 - protein, 12 aa, Homo sapiens
  CDR3 for beta chain variable domain of TCR clone 197852 (TRBV19, TRBJ1-1)
CASSIGTEEAFF

SEQ ID NO: 395705 - protein, 14 aa, Homo sapiens
  CDR3 for alpha chain variable domain of TCR clone 197853 (TRAV35, TRAJ38)
CAGSNAGNNRKLIW

SEQ ID NO: 395706 - protein, 12 aa, Homo sapiens
  CDR3 for beta chain variable domain of TCR clone 197853 (TRBV19, TRBJ2-7)
CASTDRGYEQYV

SEQ ID NO: 395707 - protein, 16 aa, Homo sapiens
  CDR3 for alpha chain variable domain of TCR clone 197854 (TRAV26-1, TRAJ22)
CIVRVPSSGSARQLTF

SEQ ID NO: 395708 - protein, 14 aa, Homo sapiens
  CDR3 for beta chain variable domain of TCR clone 197854 (TRBV25-1, TRBJ1-1)
CASTHLGGNTEAFF

SEQ ID NO: 395709 - protein, 11 aa, Homo sapiens
  CDR3 for alpha chain variable domain of TCR clone 197855 (TRAV17, TRAJ36)
CAPTGANNLFF

SEQ ID NO: 395710 - protein, 15 aa, Homo sapiens
  CDR3 for beta chain variable domain of TCR clone 197855 (TRBV7-9, TRBJ1-4)
CASSRTGGFNEKLFF

SEQ ID NO: 395711 - protein, 14 aa, Homo sapiens
  CDR3 for alpha chain variable domain of TCR clone 197856 (TRAV38-1, TRAJ40)
CALRPTSGTYKYIF

SEQ ID NO: 395712 - protein, 16 aa, Homo sapiens
  CDR3 for beta chain variable domain of TCR clone 197856 (TRBV6-1, TRBJ1-2)
CASNGAWQGRSHGYTF

SEQ ID NO: 395713 - protein, 15 aa, Homo sapiens
  CDR3 for alpha chain variable domain of TCR clone 197857 (TRAV21, TRAJ24)
CAARSSTDSWGNCRL

SEQ ID NO: 395714 - protein, 14 aa, Homo sapiens
  CDR3 for beta chain variable domain of TCR clone 197857 (TRBV11-2, TRBJ2-5)
CASSRTGGIETQYF

SEQ ID NO: 395715 - protein, 14 aa, Homo sapiens
  CDR3 for alpha chain variable domain of TCR clone 197858 (TRAV12-2, TRAJ5)
CAVNRSTGSRALTF

SEQ ID NO: 395716 - protein, 17 aa, Homo sapiens
  CDR3 for beta chain variable domain of TCR clone 197858 (TRBV13, TRBJ2-3)
CASSLSRVAGGRNTQYF

SEQ ID NO: 395717 - protein, 13 aa, Homo sapiens
  CDR3 for alpha chain variable domain of TCR clone 197859 (TRAV9-2, TRAJ9)
CALSDTGGFKTIF

SEQ ID NO: 395718 - protein, 14 aa, Homo sapiens
  CDR3 for beta chain variable domain of TCR clone 197859 (TRBV12-4, TRBJ1-1)
CASSPRQGRTEAFF

SEQ ID NO: 395719 - protein, 22 aa, Homo sapiens
  CDR3 for alpha chain variable domain of TCR clone 197860 (TRAV21, )
CAVRQDAGNNHIQNPDPAVYHL

SEQ ID NO: 395720 - protein, 16 aa, Homo sapiens
  CDR3 for beta chain variable domain of TCR clone 197860 (TRBV4-2, TRBJ1-1)
CASRPLDGGGDTEAFF

SEQ ID NO: 395721 - protein, 12 aa, Homo sapiens
  CDR3 for alpha chain variable domain of TCR clone 197861 (TRAV29/DV5, TRAJ15)
CASNQAGTAPIF

SEQ ID NO: 395722 - protein, 15 aa, Homo sapiens
  CDR3 for beta chain variable domain of TCR clone 197861 (TRBV11-2, TRBJ2-2)
CASSSDRVNAGELFF

SEQ ID NO: 395723 - protein, 14 aa, Homo sapiens
  CDR3 for alpha chain variable domain of TCR clone 197862 (TRAV1-2, TRAJ33)
CAVRAPGSNYQLIW

SEQ ID NO: 395724 - protein, 15 aa, Homo sapiens
  CDR3 for beta chain variable domain of TCR clone 197862 (TRBV4-3, TRBJ1-1)
CASSQELGRGTEAFF

SEQ ID NO: 395725 - protein, 15 aa, Homo sapiens
  CDR3 for alpha chain variable domain of TCR clone 197863 (TRAV38-2/DV8, TRAJ45)
CDYWDSGGGADGLTF

SEQ ID NO: 395726 - protein, 16 aa, Homo sapiens
  CDR3 for beta chain variable domain of TCR clone 197863 (TRBV19, TRBJ1-1)
CASSPTRFWPGTEAFF

SEQ ID NO: 395727 - protein, 11 aa, Homo sapiens
  CDR3 for alpha chain variable domain of TCR clone 197864 (TRAV21, TRAJ34)
CAPLDTDKLIF

SEQ ID NO: 395728 - protein, 16 aa, Homo sapiens
  CDR3 for beta chain variable domain of TCR clone 197864 (TRBV5-1, TRBJ2-3)
CASSLAGDGGTDTQYF

SEQ ID NO: 395729 - protein, 18 aa, Homo sapiens
  CDR3 for alpha chain variable domain of TCR clone 197865 (TRAV9-2, TRAJ52)
CALSRHNAGGTSYGRLTF

SEQ ID NO: 395730 - protein, 13 aa, Homo sapiens
  CDR3 for beta chain variable domain of TCR clone 197865 (TRBV7-9, TRBJ1-2)
CASSLKQNYGYTF

SEQ ID NO: 395731 - protein, 12 aa, Homo sapiens
  CDR3 for alpha chain variable domain of TCR clone 197866 (TRAV12-3, TRAJ13)
CNELWGYQKVTF

SEQ ID NO: 395732 - protein, 13 aa, Homo sapiens
  CDR3 for beta chain variable domain of TCR clone 197866 (TRBV20-1, TRBJ1-1)
CSAPPGGRTEGFF

SEQ ID NO: 395733 - protein, 14 aa, Homo sapiens
  CDR3 for alpha chain variable domain of TCR clone 197867 (TRAV13-1, TRAJ44)
SVQQRRGTASKLTF

SEQ ID NO: 395734 - protein, 13 aa, Homo sapiens
  CDR3 for beta chain variable domain of TCR clone 197867 (TRBV5-5, TRBJ1-2)
CASSFWRGEDYTF

SEQ ID NO: 395735 - protein, 16 aa, Homo sapiens
  CDR3 for alpha chain variable domain of TCR clone 197868 (TRAV3, TRAJ10)
CAVRDMRAGGGNNLTF

SEQ ID NO: 395736 - protein, 13 aa, Homo sapiens
  CDR3 for beta chain variable domain of TCR clone 197868 (TRBV12-4, TRBJ2-7)
CASSPTETYEQYF

SEQ ID NO: 395737 - protein, 14 aa, Homo sapiens
  CDR3 for alpha chain variable domain of TCR clone 197869 (TRAV20, TRAJ42)
CAVQGWRSQGNLIF

SEQ ID NO: 395738 - protein, 13 aa, Homo sapiens
  CDR3 for beta chain variable domain of TCR clone 197869 (TRBV7-2, TRBJ2-2)
CASSLAVTGELFF

SEQ ID NO: 395739 - protein, 14 aa, Homo sapiens
  CDR3 for alpha chain variable domain of TCR clone 197870 (TRAV12-2, TRAJ44)
CAVNPAGTASKLTF

SEQ ID NO: 395740 - protein, 13 aa, Homo sapiens
  CDR3 for beta chain variable domain of TCR clone 197870 (TRBV7-2, TRBJ2-5)
CASSQTSVETQYF

SEQ ID NO: 395741 - protein, 14 aa, Homo sapiens
  CDR3 for alpha chain variable domain of TCR clone 197871 (TRAV2, TRAJ37)
CAVAFTSNTGKLIF

SEQ ID NO: 395742 - protein, 15 aa, Homo sapiens
  CDR3 for beta chain variable domain of TCR clone 197871 (TRBV20-1, TRBJ1-1)
WSASRGVTGNTEAFF

SEQ ID NO: 395743 - protein, 13 aa, Homo sapiens
  CDR3 for alpha chain variable domain of TCR clone 197872 (TRAV16, TRAJ34)
CALSPYNTVKLIF

SEQ ID NO: 395744 - protein, 17 aa, Homo sapiens
  CDR3 for beta chain variable domain of TCR clone 197872 (TRBV5-1, TRBJ2-1)
CASSTGTSGYSYNEQFF

SEQ ID NO: 395745 - protein, 14 aa, Homo sapiens
  CDR3 for alpha chain variable domain of TCR clone 197873 (TRAV8-2, TRAJ37)
CVVSISGNTGKLIF

SEQ ID NO: 395746 - protein, 17 aa, Homo sapiens
  CDR3 for beta chain variable domain of TCR clone 197873 (TRBV13, TRBJ2-3)
CASSLSRVAGGRNTQYF

SEQ ID NO: 395747 - protein, 14 aa, Homo sapiens
  CDR3 for alpha chain variable domain of TCR clone 197874 (TRAV8-3, TRAJ36)
CAVGPITWANNLFF

SEQ ID NO: 395748 - protein, 15 aa, Homo sapiens
  CDR3 for beta chain variable domain of TCR clone 197874 (TRBV4-1, TRBJ2-1)
CASGQDPGNYNEQFF

SEQ ID NO: 395749 - protein, 11 aa, Homo sapiens
  CDR3 for alpha chain variable domain of TCR clone 197875 (TRAV12-2, TRAJ31)
CAVTRWARLMF

SEQ ID NO: 395750 - protein, 13 aa, Homo sapiens
  CDR3 for beta chain variable domain of TCR clone 197875 (TRBV29-1, TRBJ2-1)
CSVEGGRVNEQFF

SEQ ID NO: 395751 - protein, 14 aa, Homo sapiens
  CDR3 for alpha chain variable domain of TCR clone 197876 (TRAV38-2/DV8, TRAJ31)
CAYKGVRNNARLMF

SEQ ID NO: 395752 - protein, 17 aa, Homo sapiens
  CDR3 for beta chain variable domain of TCR clone 197876 (TRBV11-2, TRBJ2-3)
CASSPTGTGGLTDTQYF

SEQ ID NO: 395753 - protein, 11 aa, Homo sapiens
  CDR3 for alpha chain variable domain of TCR clone 197877 (TRAV2, TRAJ13)
CASGGYQKVTF

SEQ ID NO: 395754 - protein, 17 aa, Homo sapiens
  CDR3 for beta chain variable domain of TCR clone 197877 (TRBV6-1, TRBJ2-1)
CASSEGGSGRGRNEQFF

SEQ ID NO: 395755 - protein, 14 aa, Homo sapiens
  CDR3 for alpha chain variable domain of TCR clone 197878 (TRAV2, TRAJ9)
CAVEDRSGGFKTIF

SEQ ID NO: 395756 - protein, 18 aa, Homo sapiens
  CDR3 for beta chain variable domain of TCR clone 197878 (TRBV4-1, TRBJ2-3)
CASSHQLAGGRSTDTQYF

SEQ ID NO: 395757 - protein, 14 aa, Homo sapiens
  CDR3 for alpha chain variable domain of TCR clone 197879 (TRAV17, TRAJ45)
CATASGGGADGLTF

SEQ ID NO: 395758 - protein, 15 aa, Homo sapiens
  CDR3 for beta chain variable domain of TCR clone 197879 (TRBV11-2, TRBJ2-1)
CASSRDRGLMYEQFF

SEQ ID NO: 395759 - protein, 12 aa, Homo sapiens
  CDR3 for alpha chain variable domain of TCR clone 197880 (TRAV3, TRAJ43)
CCERDRNNDMRF

SEQ ID NO: 395760 - protein, 12 aa, Homo sapiens
  CDR3 for beta chain variable domain of TCR clone 197880 (TRBV5-1, TRBJ2-7)
CASSLDSYEQYF

SEQ ID NO: 395761 - protein, 14 aa, Homo sapiens
  CDR3 for alpha chain variable domain of TCR clone 197881 (TRAV4, TRAJ9)
CLVGSGTGGFKTIF

SEQ ID NO: 395762 - protein, 14 aa, Homo sapiens
  CDR3 for beta chain variable domain of TCR clone 197881 (TRBV7-2, TRBJ2-5)
CASSPAGNQETQYF

SEQ ID NO: 395763 - protein, 18 aa, Homo sapiens
  CDR3 for alpha chain variable domain of TCR clone 197882 (TRAV13-1, TRAJ52)
CAAKNPNAGGTSYGKLTF

SEQ ID NO: 395764 - protein, 18 aa, Homo sapiens
  CDR3 for beta chain variable domain of TCR clone 197882 (TRBV4-1, TRBJ1-4)
CASSARTGGAWTNEKLFF

SEQ ID NO: 395765 - protein, 12 aa, Homo sapiens
  CDR3 for alpha chain variable domain of TCR clone 197883 (TRAV13-1, TRAJ21)
CAAKEGVNNFYF

SEQ ID NO: 395766 - protein, 15 aa, Homo sapiens
  CDR3 for beta chain variable domain of TCR clone 197883 (TRBV7-9, TRBJ1-6)
CASSSPGRGNSHLHF

SEQ ID NO: 395767 - protein, 15 aa, Homo sapiens
  CDR3 for alpha chain variable domain of TCR clone 197884 (TRAV25, TRAJ52)
CAGTSGGTSYGKLTF

SEQ ID NO: 395768 - protein, 12 aa, Homo sapiens
  CDR3 for beta chain variable domain of TCR clone 197884 (TRBV7-9, TRBJ2-7)
CATRTDAYEQYF

SEQ ID NO: 395769 - protein, 16 aa, Homo sapiens
  CDR3 for alpha chain variable domain of TCR clone 197885 (TRAV30, TRAJ49)
SAAQRVGPNTGNQFYF

SEQ ID NO: 395770 - protein, 16 aa, Homo sapiens
  CDR3 for beta chain variable domain of TCR clone 197885 (TRBV7-3, TRBJ2-1)
CASSLEGYRSYNEQFF

SEQ ID NO: 395771 - protein, 12 aa, Homo sapiens
  CDR3 for alpha chain variable domain of TCR clone 197886 (TRAV12-2, TRAJ29)
CAVDSGNTPLVF

SEQ ID NO: 395772 - protein, 14 aa, Homo sapiens
  CDR3 for beta chain variable domain of TCR clone 197886 (TRBV6-5, TRBJ1-2)
CASSYDGTGGGYTF

SEQ ID NO: 395773 - protein, 14 aa, Homo sapiens
  CDR3 for alpha chain variable domain of TCR clone 197887 (TRAV38-1, TRAJ45)
CASHSGGGADGLTL

SEQ ID NO: 395774 - protein, 16 aa, Homo sapiens
  CDR3 for beta chain variable domain of TCR clone 197887 (TRBV7-3, TRBJ2-1)
CASSLEGYRSYNEQFF

SEQ ID NO: 395775 - protein, 15 aa, Homo sapiens
  CDR3 for alpha chain variable domain of TCR clone 197888 (TRAV21, TRAJ32)
CAVNSYGGATNKLIF

SEQ ID NO: 395776 - protein, 13 aa, Homo sapiens
  CDR3 for beta chain variable domain of TCR clone 197888 (TRBV4-2, TRBJ1-1)
CASSQAGNTDDFF

SEQ ID NO: 395777 - protein, 12 aa, Homo sapiens
  CDR3 for alpha chain variable domain of TCR clone 197889 (TRAV13-1, TRAJ11)
CAASKGYSTLTF

SEQ ID NO: 395778 - protein, 14 aa, Homo sapiens
  CDR3 for beta chain variable domain of TCR clone 197889 (TRBV12-5, TRBJ2-5)
CASGSRTHQETQYF

SEQ ID NO: 395779 - protein, 14 aa, Homo sapiens
  CDR3 for alpha chain variable domain of TCR clone 197890 (TRAV17, TRAJ35)
CATDRPGLGNVLHC

SEQ ID NO: 395780 - protein, 19 aa, Homo sapiens
  CDR3 for beta chain variable domain of TCR clone 197890 (TRBV11-3, TRBJ2-2)
CAGSTRPVAKTTNTGELFF

SEQ ID NO: 395781 - protein, 14 aa, Homo sapiens
  CDR3 for alpha chain variable domain of TCR clone 197891 (TRAV12-1, TRAJ17)
CVVNYKAAGNKLTF

SEQ ID NO: 395782 - protein, 14 aa, Homo sapiens
  CDR3 for beta chain variable domain of TCR clone 197891 (TRBV7-6, TRBJ2-3)
CASSLGTVTDTQYF

SEQ ID NO: 395783 - protein, 14 aa, Homo sapiens
  CDR3 for alpha chain variable domain of TCR clone 197892 (TRAV35, TRAJ13)
CAGSPSGGCQKVTF

SEQ ID NO: 395784 - protein, 10 aa, Homo sapiens
  CDR3 for beta chain variable domain of TCR clone 197892 (TRBV29-1, TRBJ1-1)
WDSRNTEAFF

SEQ ID NO: 395785 - protein, 17 aa, Homo sapiens
  CDR3 for alpha chain variable domain of TCR clone 197893 (TRAV12-2, TRAJ48)
CASNEKLTFGTGTRLTI

SEQ ID NO: 395786 - protein, 17 aa, Homo sapiens
  CDR3 for beta chain variable domain of TCR clone 197893 (TRBV20-1, TRBJ2-1)
CSAPPRLAGTRYKEQFF

SEQ ID NO: 395787 - protein, 14 aa, Homo sapiens
  CDR3 for alpha chain variable domain of TCR clone 197894 (TRAV25, TRAJ22)
CAVRYSGSARQLTF

SEQ ID NO: 395788 - protein, 16 aa, Homo sapiens
  CDR3 for beta chain variable domain of TCR clone 197894 (TRBV4-2, TRBJ1-1)
CASSTSPGRAAPEAFF

SEQ ID NO: 395789 - protein, 14 aa, Homo sapiens
  CDR3 for alpha chain variable domain of TCR clone 197895 (TRAV16, TRAJ15)
CALSGPQAGTALIF

SEQ ID NO: 395790 - protein, 17 aa, Homo sapiens
  CDR3 for beta chain variable domain of TCR clone 197895 (TRBV7-8, TRBJ2-6)
CASSAGTGGAVANVLTF

SEQ ID NO: 395791 - protein, 12 aa, Homo sapiens
  CDR3 for alpha chain variable domain of TCR clone 197896 (TRAV1-1, TRAJ39)
CAVPVVGNMLTL

SEQ ID NO: 395792 - protein, 13 aa, Homo sapiens
  CDR3 for beta chain variable domain of TCR clone 197896 (TRBV7-7, TRBJ2-5)
CASSRSGQETQYF

SEQ ID NO: 395793 - protein, 12 aa, Homo sapiens
  CDR3 for alpha chain variable domain of TCR clone 197897 (TRAV2, TRAJ34)
CAVERNTDKLIS

SEQ ID NO: 395794 - protein, 14 aa, Homo sapiens
  CDR3 for beta chain variable domain of TCR clone 197897 (TRBV7-9, TRBJ2-1)
CASSDNSGYNEQFF

SEQ ID NO: 395795 - protein, 14 aa, Homo sapiens
  CDR3 for alpha chain variable domain of TCR clone 197898 (TRAV2, TRAJ9)
CAVADRSGGFKTIF

SEQ ID NO: 395796 - protein, 19 aa, Homo sapiens
  CDR3 for beta chain variable domain of TCR clone 197898 (TRBV25-1, TRBJ2-2)
CAILVYRVDRGRKTGELFF

SEQ ID NO: 395797 - protein, 11 aa, Homo sapiens
  CDR3 for alpha chain variable domain of TCR clone 197899 (TRAV12-3, TRAJ43)
CAMSVSTEMRF

SEQ ID NO: 395798 - protein, 12 aa, Homo sapiens
  CDR3 for beta chain variable domain of TCR clone 197899 (TRBV20-1, TRBJ1-1)
QCSTWGGTEAFF

SEQ ID NO: 395799 - protein, 11 aa, Homo sapiens
  CDR3 for alpha chain variable domain of TCR clone 197900 (TRAV1-2, TRAJ40)
CAVPGTYKYIF

SEQ ID NO: 395800 - protein, 12 aa, Homo sapiens
  CDR3 for beta chain variable domain of TCR clone 197900 (TRBV11-2, TRBJ2-2)
CASSLPTGELFF

SEQ ID NO: 395801 - protein, 20 aa, Homo sapiens
  CDR3 for alpha chain variable domain of TCR clone 197901 (TRAV26-1, TRAJ42)
CCVLLHRQTYYGGSQGNLIF

SEQ ID NO: 395802 - protein, 16 aa, Homo sapiens
  CDR3 for beta chain variable domain of TCR clone 197901 (TRBV7-3, TRBJ2-2)
CASSLKRGTLCGELFF

SEQ ID NO: 395803 - protein, 14 aa, Homo sapiens
  CDR3 for alpha chain variable domain of TCR clone 197902 (TRAV20, TRAJ54)
CAVQAGRGAQKLVF

SEQ ID NO: 395804 - protein, 14 aa, Homo sapiens
  CDR3 for beta chain variable domain of TCR clone 197902 (TRBV7-8, TRBJ2-7)
CASSPRDRVYEQYF

SEQ ID NO: 395805 - protein, 13 aa, Homo sapiens
  CDR3 for alpha chain variable domain of TCR clone 197903 (TRAV12-1, TRAJ31)
CVVNMNNNARLMF

SEQ ID NO: 395806 - protein, 14 aa, Homo sapiens
  CDR3 for beta chain variable domain of TCR clone 197903 (TRBV11-2, TRBJ2-7)
CASSSTGEGYEQYF

SEQ ID NO: 395807 - protein, 11 aa, Homo sapiens
  CDR3 for alpha chain variable domain of TCR clone 197904 (TRAV26-1, TRAJ37)
CIVRVGRKLIF

SEQ ID NO: 395808 - protein, 14 aa, Homo sapiens
  CDR3 for beta chain variable domain of TCR clone 197904 (TRBV2, TRBJ2-5)
CASKRDGTTEAQYF

SEQ ID NO: 395809 - protein, 14 aa, Homo sapiens
  CDR3 for alpha chain variable domain of TCR clone 197905 (TRAV12-2, TRAJ17)
CAVLFKAAGNKLTF

SEQ ID NO: 395810 - protein, 14 aa, Homo sapiens
  CDR3 for beta chain variable domain of TCR clone 197905 (TRBV7-2, TRBJ2-3)
CAGSQTGSSYTQYF

SEQ ID NO: 395811 - protein, 13 aa, Homo sapiens
  CDR3 for alpha chain variable domain of TCR clone 197906 (TRAV21, TRAJ57)
CAVIEGGSEKLVF

SEQ ID NO: 395812 - protein, 15 aa, Homo sapiens
  CDR3 for beta chain variable domain of TCR clone 197906 (TRBV10-3, TRBJ2-5)
CASSECGRGQEAQYF

SEQ ID NO: 395813 - protein, 15 aa, Homo sapiens
  CDR3 for alpha chain variable domain of TCR clone 197907 (TRAV25, TRAJ52)
CAGRPGGTSYGKLTF

SEQ ID NO: 395814 - protein, 23 aa, Homo sapiens
  CDR3 for beta chain variable domain of TCR clone 197907 (TRBV7-8, TRBJ2-6)
CASSAGTGGWGQRPDFRGRQQAD

SEQ ID NO: 395815 - protein, 13 aa, Homo sapiens
  CDR3 for alpha chain variable domain of TCR clone 197908 (TRAV36/DV7, TRAJ54)
CAVLIQGAQKLVY

SEQ ID NO: 395816 - protein, 13 aa, Homo sapiens
  CDR3 for beta chain variable domain of TCR clone 197908 (TRBV29-1, TRBJ2-4)
CSVGEGTKSIQYF

SEQ ID NO: 395817 - protein, 14 aa, Homo sapiens
  CDR3 for alpha chain variable domain of TCR clone 197909 (TRAV12-3, TRAJ10)
SHLPLTGGGNKLTF

SEQ ID NO: 395818 - protein, 11 aa, Homo sapiens
  CDR3 for beta chain variable domain of TCR clone 197909 (TRBV12-4, TRBJ1-2)
CASRGDRGYTF

SEQ ID NO: 395819 - protein, 14 aa, Homo sapiens
  CDR3 for alpha chain variable domain of TCR clone 197910 (TRAV12-2, TRAJ44)
CAVNPAGTTSKLTF

SEQ ID NO: 395820 - protein, 16 aa, Homo sapiens
  CDR3 for beta chain variable domain of TCR clone 197910 (TRBV2, TRBJ2-1)
CASSVGGSLSYNEQFF

SEQ ID NO: 395821 - protein, 15 aa, Homo sapiens
  CDR3 for alpha chain variable domain of TCR clone 197911 (TRAV13-1, TRAJ9)
CAASTLNIGGFKTIF

SEQ ID NO: 395822 - protein, 15 aa, Homo sapiens
  CDR3 for beta chain variable domain of TCR clone 197911 (TRBV6-5, TRBJ2-4)
CASSLRESPKNMQYF

SEQ ID NO: 395823 - protein, 15 aa, Homo sapiens
  CDR3 for alpha chain variable domain of TCR clone 197912 (TRAV21, TRAJ40)
CAVRPQTSGTYKYIF

SEQ ID NO: 395824 - protein, 11 aa, Homo sapiens
  CDR3 for beta chain variable domain of TCR clone 197912 (TRBV6-3, TRBJ1-5)
CASSYREQQHF

SEQ ID NO: 395825 - protein, 11 aa, Homo sapiens
  CDR3 for alpha chain variable domain of TCR clone 197913 (TRAV4, TRAJ39)
CLVGLIGNAHL

SEQ ID NO: 395826 - protein, 16 aa, Homo sapiens
  CDR3 for beta chain variable domain of TCR clone 197913 (TRBV29-1, TRBJ2-7)
CSVEVVGTSGSYEQYF

SEQ ID NO: 395827 - protein, 15 aa, Homo sapiens
  CDR3 for alpha chain variable domain of TCR clone 197914 (TRAV8-3, TRAJ37)
CAVGAPSSNKGKLIF

SEQ ID NO: 395828 - protein, 15 aa, Homo sapiens
  CDR3 for beta chain variable domain of TCR clone 197914 (TRBV11-2, TRBJ1-2)
CASSQMRGLNYGYTF

SEQ ID NO: 395829 - protein, 13 aa, Homo sapiens
  CDR3 for alpha chain variable domain of TCR clone 197915 (TRAV12-1, TRAJ16)
CVVNGPDGQKLLF

SEQ ID NO: 395830 - protein, 12 aa, Homo sapiens
  CDR3 for beta chain variable domain of TCR clone 197915 (TRBV13, TRBJ2-7)
CASSLQAYEQYF

SEQ ID NO: 395831 - protein, 13 aa, Homo sapiens
  CDR3 for alpha chain variable domain of TCR clone 197916 (TRAV20, TRAJ49)
CAVQARTGNQFYF

SEQ ID NO: 395832 - protein, 15 aa, Homo sapiens
  CDR3 for beta chain variable domain of TCR clone 197916 (TRBV27, TRBJ2-1)
CASSNGGGSSNEQFF

SEQ ID NO: 395833 - protein, 15 aa, Homo sapiens
  CDR3 for alpha chain variable domain of TCR clone 197917 (TRAV17, TRAJ54)
YATEKLGQGAQKLVF

SEQ ID NO: 395834 - protein, 14 aa, Homo sapiens
  CDR3 for beta chain variable domain of TCR clone 197917 (TRBV7-3, TRBJ1-1)
CQQLRGQMNTEAFF

SEQ ID NO: 395835 - protein, 13 aa, Homo sapiens
  CDR3 for alpha chain variable domain of TCR clone 197918 (TRAV12-2, TRAJ52)
CAVSGTSYGKLTF

SEQ ID NO: 395836 - protein, 16 aa, Homo sapiens
  CDR3 for beta chain variable domain of TCR clone 197918 (TRBV5-7, TRBJ2-7)
CASSPTSGRKLDEQYF

SEQ ID NO: 395837 - protein, 17 aa, Homo sapiens
  CDR3 for alpha chain variable domain of TCR clone 197919 (TRAV23/DV6, TRAJ57)
CAASSTLSQGGSEKLVF

SEQ ID NO: 395838 - protein, 14 aa, Homo sapiens
  CDR3 for beta chain variable domain of TCR clone 197919 (TRBV20-1, TRBJ2-1)
CSAQIGGSANEQFF

SEQ ID NO: 395839 - protein, 13 aa, Homo sapiens
  CDR3 for alpha chain variable domain of TCR clone 197920 (TRAV1-2, TRAJ20)
CAVRDGNDYKLSF

SEQ ID NO: 395840 - protein, 17 aa, Homo sapiens
  CDR3 for beta chain variable domain of TCR clone 197920 (TRBV7-3, TRBJ2-3)
CASSLMKRMRGADTQYF

SEQ ID NO: 395841 - protein, 14 aa, Homo sapiens
  CDR3 for alpha chain variable domain of TCR clone 197921 (TRAV23/DV6, TRAJ4)
CAANLSGGHTQLIF

SEQ ID NO: 395842 - protein, 11 aa, Homo sapiens
  CDR3 for beta chain variable domain of TCR clone 197921 (TRBV7-9, TRBJ2-3)
CASSPTDTQYF

SEQ ID NO: 395843 - protein, 12 aa, Homo sapiens
  CDR3 for alpha chain variable domain of TCR clone 197922 (TRAV30, TRAJ43)
CGTEERGIDMRF

SEQ ID NO: 395844 - protein, 13 aa, Homo sapiens
  CDR3 for beta chain variable domain of TCR clone 197922 (TRBV27, TRBJ2-7)
CASSFSQGYEQYF

SEQ ID NO: 395845 - protein, 10 aa, Homo sapiens
  CDR3 for alpha chain variable domain of TCR clone 197923 (TRAV13-1, TRAJ11)
CAADYSTLTF

SEQ ID NO: 395846 - protein, 15 aa, Homo sapiens
  CDR3 for beta chain variable domain of TCR clone 197923 (TRBV19, TRBJ1-1)
CASSIRRQMNTEAFF

SEQ ID NO: 395847 - protein, 15 aa, Homo sapiens
  CDR3 for alpha chain variable domain of TCR clone 197924 (TRAV13-2, TRAJ16)
YAENDRFSDGQKLLF

SEQ ID NO: 395848 - protein, 17 aa, Homo sapiens
  CDR3 for beta chain variable domain of TCR clone 197924 (TRBV20-1, TRBJ2-1)
CSAPPRLAGTRYNEKFF

SEQ ID NO: 395849 - protein, 12 aa, Homo sapiens
  CDR3 for alpha chain variable domain of TCR clone 197925 (TRAV21, TRAJ39)
CAADNAGNMLTF

SEQ ID NO: 395850 - protein, 13 aa, Homo sapiens
  CDR3 for beta chain variable domain of TCR clone 197925 (TRBV24-1, TRBJ2-1)
CATSAGPYNEQFF

SEQ ID NO: 395851 - protein, 11 aa, Homo sapiens
  CDR3 for alpha chain variable domain of TCR clone 197926 (TRAV1-2, TRAJ20)
YAVSNDYKLSF

SEQ ID NO: 395852 - protein, 16 aa, Homo sapiens
  CDR3 for beta chain variable domain of TCR clone 197926 (TRBV29-1, TRBJ2-6)
CSVEDITYSGANVLTF

SEQ ID NO: 395853 - protein, 19 aa, Homo sapiens
  CDR3 for alpha chain variable domain of TCR clone 197927 (TRAV1-1, TRAJ37)
CAVPSSGRFGSGNTGKLIF

SEQ ID NO: 395854 - protein, 14 aa, Homo sapiens
  CDR3 for beta chain variable domain of TCR clone 197927 (TRBV7-6, TRBJ2-7)
CASSLGDRGYEQYF

SEQ ID NO: 395855 - protein, 13 aa, Homo sapiens
  CDR3 for alpha chain variable domain of TCR clone 197928 (TRAV27, TRAJ6)
CAGGTRRSYIPTF

SEQ ID NO: 395856 - protein, 14 aa, Homo sapiens
  CDR3 for beta chain variable domain of TCR clone 197928 (TRBV6-3, TRBJ1-1)
CASSYQRRDTEAFF

SEQ ID NO: 395857 - protein, 14 aa, Homo sapiens
  CDR3 for alpha chain variable domain of TCR clone 197929 (TRAV2, TRAJ37)
WAVDFTSNTGKLIF

SEQ ID NO: 395858 - protein, 15 aa, Homo sapiens
  CDR3 for beta chain variable domain of TCR clone 197929 (TRBV20-1, TRBJ1-1)
CSASRGVTGNTEDFF

SEQ ID NO: 395859 - protein, 16 aa, Homo sapiens
  CDR3 for alpha chain variable domain of TCR clone 197930 (TRAV12-3, TRAJ53)
CAMSVGSGGSNYKLTF

SEQ ID NO: 395860 - protein, 11 aa, Homo sapiens
  CDR3 for beta chain variable domain of TCR clone 197930 (TRBV29-1, TRBJ2-5)
CSVASRETQYF

SEQ ID NO: 395861 - protein, 12 aa, Homo sapiens
  CDR3 for alpha chain variable domain of TCR clone 197931 (TRAV21, TRAJ17)
CAVIAAGNKLTF

SEQ ID NO: 395862 - protein, 15 aa, Homo sapiens
  CDR3 for beta chain variable domain of TCR clone 197931 (TRBV11-2, TRBJ2-1)
CASSLTSGGYNEQFF

SEQ ID NO: 395863 - protein, 16 aa, Homo sapiens
  CDR3 for alpha chain variable domain of TCR clone 197932 (TRAV3, TRAJ3)
CAVRTRAKSSASKIIF

SEQ ID NO: 395864 - protein, 13 aa, Homo sapiens
  CDR3 for beta chain variable domain of TCR clone 197932 (TRBV10-3, TRBJ2-7)
CASKLAVNYEQYF

SEQ ID NO: 395865 - protein, 10 aa, Homo sapiens
  CDR3 for alpha chain variable domain of TCR clone 197933 (TRAV38-1, TRAJ53)
CAFMKHGLEG

SEQ ID NO: 395866 - protein, 13 aa, Homo sapiens
  CDR3 for beta chain variable domain of TCR clone 197933 (TRBV19, TRBJ2-7)
CASSPRQSYEQYF

SEQ ID NO: 395867 - protein, 13 aa, Homo sapiens
  CDR3 for alpha chain variable domain of TCR clone 197934 (TRAV2, TRAJ15)
CAVASQAGTALIF

SEQ ID NO: 395868 - protein, 14 aa, Homo sapiens
  CDR3 for beta chain variable domain of TCR clone 197934 (TRBV25-1, TRBJ1-1)
CSSTHLGGNTEAFF

SEQ ID NO: 395869 - protein, 10 aa, Homo sapiens
  CDR3 for alpha chain variable domain of TCR clone 197935 (TRAV13-2, TRAJ49)
CADTGNQYYF

SEQ ID NO: 395870 - protein, 13 aa, Homo sapiens
  CDR3 for beta chain variable domain of TCR clone 197935 (TRBV10-3, TRBJ1-2)
CAISERDSYGYTF

SEQ ID NO: 395871 - protein, 14 aa, Homo sapiens
  CDR3 for alpha chain variable domain of TCR clone 197936 (TRAV12-3, TRAJ58)
SAMSTETSGSRLTF

SEQ ID NO: 395872 - protein, 12 aa, Homo sapiens
  CDR3 for beta chain variable domain of TCR clone 197936 (TRBV7-8, TRBJ2-7)
CASSLGDREQYF

SEQ ID NO: 395873 - protein, 16 aa, Homo sapiens
  CDR3 for alpha chain variable domain of TCR clone 197937 (TRAV16, TRAJ4)
CALSRMFSGGYNKLIF

SEQ ID NO: 395874 - protein, 11 aa, Homo sapiens
  CDR3 for beta chain variable domain of TCR clone 197937 (TRBV11-2, TRBJ2-2)
CASSLPGELFF

SEQ ID NO: 395875 - protein, 17 aa, Homo sapiens
  CDR3 for alpha chain variable domain of TCR clone 197938 (TRAV16, TRAJ42)
CALSTKLYGGSQGNLIF

SEQ ID NO: 395876 - protein, 13 aa, Homo sapiens
  CDR3 for beta chain variable domain of TCR clone 197938 (TRBV19, TRBJ1-5)
CASSRRRDQSQHF

SEQ ID NO: 395877 - protein, 13 aa, Homo sapiens
  CDR3 for alpha chain variable domain of TCR clone 197939 (TRAV8-3, TRAJ44)
CAVVPGTASKLTF

SEQ ID NO: 395878 - protein, 14 aa, Homo sapiens
  CDR3 for beta chain variable domain of TCR clone 197939 (TRBV7-2, TRBJ2-7)
CASSPKTSFYEQYF

SEQ ID NO: 395879 - protein, 15 aa, Homo sapiens
  CDR3 for alpha chain variable domain of TCR clone 197940 (TRAV27, TRAJ38)
CAARRNAGNNRKLIW

SEQ ID NO: 395880 - protein, 17 aa, Homo sapiens
  CDR3 for beta chain variable domain of TCR clone 197940 (TRBV7-9, TRBJ2-1)
CASSLVASYPSYNEQFF

SEQ ID NO: 395881 - protein, 16 aa, Homo sapiens
  CDR3 for alpha chain variable domain of TCR clone 197941 (TRAV12-3, TRAJ53)
CAMSVGSGGSNYKLTF

SEQ ID NO: 395882 - protein, 13 aa, Homo sapiens
  CDR3 for beta chain variable domain of TCR clone 197941 (TRBV7-2, TRBJ2-3)
CASSTDNLDTQYF

SEQ ID NO: 395883 - protein, 10 aa, Homo sapiens
  CDR3 for alpha chain variable domain of TCR clone 197942 (TRAV13-1, TRAJ5)
CAASRRALTF

SEQ ID NO: 395884 - protein, 16 aa, Homo sapiens
  CDR3 for beta chain variable domain of TCR clone 197942 (TRBV4-3, TRBJ2-3)
CASSHGGLAGTDTRYF

SEQ ID NO: 395885 - protein, 13 aa, Homo sapiens
  CDR3 for alpha chain variable domain of TCR clone 197943 (TRAV36/DV7, TRAJ7)
CAGTRYGNNRLAF

SEQ ID NO: 395886 - protein, 15 aa, Homo sapiens
  CDR3 for beta chain variable domain of TCR clone 197943 (TRBV11-3, TRBJ2-7)
CVSSPGPASSYEQYF

SEQ ID NO: 395887 - protein, 14 aa, Homo sapiens
  CDR3 for alpha chain variable domain of TCR clone 197944 (TRAV16, TRAJ33)
CALSAMDSNYQLIW

SEQ ID NO: 395888 - protein, 15 aa, Homo sapiens
  CDR3 for beta chain variable domain of TCR clone 197944 (TRBV28, TRBJ2-7)
CASSLEADPIYEQYF

SEQ ID NO: 395889 - protein, 15 aa, Homo sapiens
  CDR3 for alpha chain variable domain of TCR clone 197945 (TRAV12-1, TRAJ22)
CVVRISSGSARQLTF

SEQ ID NO: 395890 - protein, 13 aa, Homo sapiens
  CDR3 for beta chain variable domain of TCR clone 197945 (TRBV6-3, TRBJ1-1)
CARSYSRTDSAFF

SEQ ID NO: 395891 - protein, 14 aa, Homo sapiens
  CDR3 for alpha chain variable domain of TCR clone 197946 (TRAV1-2, TRAJ8)
CAVREDTGFQKLVF

SEQ ID NO: 395892 - protein, 18 aa, Homo sapiens
  CDR3 for beta chain variable domain of TCR clone 197946 (TRBV6-3, TRBJ2-3)
CASSLGGASRGAPNTQYF

SEQ ID NO: 395893 - protein, 14 aa, Homo sapiens
  CDR3 for alpha chain variable domain of TCR clone 197947 (TRAV26-1, TRAJ45)
CIEVTGGGADGLNF

SEQ ID NO: 395894 - protein, 13 aa, Homo sapiens
  CDR3 for beta chain variable domain of TCR clone 197947 (TRBV7-6, TRBJ1-2)
CASSLVADFGYTF

SEQ ID NO: 395895 - protein, 12 aa, Homo sapiens
  CDR3 for alpha chain variable domain of TCR clone 197948 (TRAV17, TRAJ31)
CATEQGNARLMF

SEQ ID NO: 395896 - protein, 15 aa, Homo sapiens
  CDR3 for beta chain variable domain of TCR clone 197948 (TRBV12-4, TRBJ2-5)
CASSPPTGLQETQYF

SEQ ID NO: 395897 - protein, 13 aa, Homo sapiens
  CDR3 for alpha chain variable domain of TCR clone 197949 (TRAV21, TRAJ15)
CAVANQAGTALTF

SEQ ID NO: 395898 - protein, 14 aa, Homo sapiens
  CDR3 for beta chain variable domain of TCR clone 197949 (TRBV27, TRBJ2-2)
CASSLGAATGQLFF

SEQ ID NO: 395899 - protein, 20 aa, Homo sapiens
  CDR3 for alpha chain variable domain of TCR clone 197950 (TRAV12-1, TRAJ42)
SSVIQPPTSVKGGSQGNLIF

SEQ ID NO: 395900 - protein, 14 aa, Homo sapiens
  CDR3 for beta chain variable domain of TCR clone 197950 (TRBV7-7, TRBJ2-7)
CASSLGRGVGEQYF

SEQ ID NO: 395901 - protein, 18 aa, Homo sapiens
  CDR3 for alpha chain variable domain of TCR clone 197951 (TRAV29/DV5, TRAJ52)
CASGFRGAGGTSYGNLTF

SEQ ID NO: 395902 - protein, 16 aa, Homo sapiens
  CDR3 for beta chain variable domain of TCR clone 197951 (TRBV7-3, TRBJ2-2)
CASSLKRGTLSGELFF

SEQ ID NO: 395903 - protein, 15 aa, Homo sapiens
  CDR3 for alpha chain variable domain of TCR clone 197952 (TRAV21, TRAJ13)
CAVRPTSGGYQKVTF

SEQ ID NO: 395904 - protein, 18 aa, Homo sapiens
  CDR3 for beta chain variable domain of TCR clone 197952 (TRBV11-3, TRBJ2-1)
CASSSYPGGRNSYNEQFF

SEQ ID NO: 395905 - protein, 16 aa, Homo sapiens
  CDR3 for alpha chain variable domain of TCR clone 197953 (TRAV21, TRAJ45)
CAVSWGSGGGADGLTC

SEQ ID NO: 395906 - protein, 14 aa, Homo sapiens
  CDR3 for beta chain variable domain of TCR clone 197953 (TRBV4-2, TRBJ1-2)
CASSPGGSNYGYTF

SEQ ID NO: 395907 - protein, 12 aa, Homo sapiens
  CDR3 for alpha chain variable domain of TCR clone 197954 (TRAV3, TRAJ43)
CAVRDPNSDMRF

SEQ ID NO: 395908 - protein, 15 aa, Homo sapiens
  CDR3 for beta chain variable domain of TCR clone 197954 (TRBV27, TRBJ1-5)
CASSLGTGFDQPQHF

SEQ ID NO: 395909 - protein, 14 aa, Homo sapiens
  CDR3 for alpha chain variable domain of TCR clone 197955 (TRAV26-1, TRAJ34)
CIVRVAYNTDKLIF

SEQ ID NO: 395910 - protein, 14 aa, Homo sapiens
  CDR3 for beta chain variable domain of TCR clone 197955 (TRBV7-2, TRBJ2-5)
CASSLSGGGETQYF

SEQ ID NO: 395911 - protein, 13 aa, Homo sapiens
  CDR3 for alpha chain variable domain of TCR clone 197956 (TRAV12-3, TRAJ40)
CAMSDSGTYKYLF

SEQ ID NO: 395912 - protein, 22 aa, Homo sapiens
  CDR3 for beta chain variable domain of TCR clone 197956 (TRBV14, TRBJ1-5)
CASSQDGVTPYLPPIGNQPQHF

SEQ ID NO: 395913 - protein, 15 aa, Homo sapiens
  CDR3 for alpha chain variable domain of TCR clone 197957 (TRAV26-1, TRAJ44)
CIARVPFGTASKLTF

SEQ ID NO: 395914 - protein, 12 aa, Homo sapiens
  CDR3 for beta chain variable domain of TCR clone 197957 (TRBV12-4, TRBJ2-7)
CASSLGGYEQYL

SEQ ID NO: 395915 - protein, 15 aa, Homo sapiens
  CDR3 for alpha chain variable domain of TCR clone 197958 (TRAV2, TRAJ15)
CAVEDREQAGTALSF

SEQ ID NO: 395916 - protein, 14 aa, Homo sapiens
  CDR3 for beta chain variable domain of TCR clone 197958 (TRBV5-1, TRBJ2-7)
CASSRGESLYEQYF

SEQ ID NO: 395917 - protein, 15 aa, Homo sapiens
  CDR3 for alpha chain variable domain of TCR clone 197959 (TRAV23/DV6, TRAJ13)
CAAWPGGGGYQKVTF

SEQ ID NO: 395918 - protein, 16 aa, Homo sapiens
  CDR3 for beta chain variable domain of TCR clone 197959 (TRBV7-2, TRBJ2-7)
CASSLEAGGPWYEQYF

SEQ ID NO: 395919 - protein, 13 aa, Homo sapiens
  CDR3 for alpha chain variable domain of TCR clone 197960 (TRAV13-2, TRAJ31)
CAENLNNNARLMF

SEQ ID NO: 395920 - protein, 16 aa, Homo sapiens
  CDR3 for beta chain variable domain of TCR clone 197960 (TRBV12-5, TRBJ2-5)
CASGPRTSGNQETQYF

SEQ ID NO: 395921 - protein, 14 aa, Homo sapiens
  CDR3 for alpha chain variable domain of TCR clone 197961 (TRAV13-1, TRAJ35)
CAASKGGFGNVLHC

SEQ ID NO: 395922 - protein, 14 aa, Homo sapiens
  CDR3 for beta chain variable domain of TCR clone 197961 (TRBV2, TRBJ2-3)
CASTEGPPGDGQIR

SEQ ID NO: 395923 - protein, 14 aa, Homo sapiens
  CDR3 for alpha chain variable domain of TCR clone 197962 (TRAV17, TRAJ53)
CATEAGGSNYKLTF

SEQ ID NO: 395924 - protein, 16 aa, Homo sapiens
  CDR3 for beta chain variable domain of TCR clone 197962 (TRBV4-1, TRBJ1-1)
CASSQDAGMGNTEAFF

SEQ ID NO: 395925 - protein, 11 aa, Homo sapiens
  CDR3 for alpha chain variable domain of TCR clone 197963 (TRAV1-2, TRAJ20)
CAVANDYKLSF

SEQ ID NO: 395926 - protein, 18 aa, Homo sapiens
  CDR3 for beta chain variable domain of TCR clone 197963 (TRBV20-1, TRBJ2-6)
GSAETTPTHGSGANDLTF

SEQ ID NO: 395927 - protein, 11 aa, Homo sapiens
  CDR3 for alpha chain variable domain of TCR clone 197964 (TRAV16, TRAJ33)
CALHSNYQLIW

SEQ ID NO: 395928 - protein, 15 aa, Homo sapiens
  CDR3 for beta chain variable domain of TCR clone 197964 (TRBV2, TRBJ2-1)
CATLPSGLPYNEQFF

SEQ ID NO: 395929 - protein, 14 aa, Homo sapiens
  CDR3 for alpha chain variable domain of TCR clone 197965 (TRAV2, TRAJ9)
CAVEDRSGGFKTIF

SEQ ID NO: 395930 - protein, 15 aa, Homo sapiens
  CDR3 for beta chain variable domain of TCR clone 197965 (TRBV20-1, TRBJ2-7)
CSARGPLAGGREQYF

SEQ ID NO: 395931 - protein, 14 aa, Homo sapiens
  CDR3 for alpha chain variable domain of TCR clone 197966 (TRAV1-2, TRAJ16)
CAVNRFSDGQKLLF

SEQ ID NO: 395932 - protein, 16 aa, Homo sapiens
  CDR3 for beta chain variable domain of TCR clone 197966 (TRBV20-1, TRBJ1-4)
CSAAGQGLLTNEKLFF

SEQ ID NO: 395933 - protein, 14 aa, Homo sapiens
  CDR3 for alpha chain variable domain of TCR clone 197967 (TRAV1-2, TRAJ16)
CAVNRFSDGQKLIF

SEQ ID NO: 395934 - protein, 13 aa, Homo sapiens
  CDR3 for beta chain variable domain of TCR clone 197967 (TRBV20-1, TRBJ1-1)
CSARGGGNTEAFF

SEQ ID NO: 395935 - protein, 11 aa, Homo sapiens
  CDR3 for alpha chain variable domain of TCR clone 197968 (TRAV12-1, TRAJ34)
CVVNKGRELIF

SEQ ID NO: 395936 - protein, 12 aa, Homo sapiens
  CDR3 for beta chain variable domain of TCR clone 197968 (TRBV2, TRBJ2-1)
CAYGPPVNEQFF

SEQ ID NO: 395937 - protein, 15 aa, Homo sapiens
  CDR3 for alpha chain variable domain of TCR clone 197969 (TRAV13-1, TRAJ43)
RAASGGFGAGTRLTV

SEQ ID NO: 395938 - protein, 18 aa, Homo sapiens
  CDR3 for beta chain variable domain of TCR clone 197969 (TRBV11-2, TRBJ1-6)
CASSLAVQGLSLNSPLHF

SEQ ID NO: 395939 - protein, 13 aa, Homo sapiens
  CDR3 for alpha chain variable domain of TCR clone 197970 (TRAV27, TRAJ8)
CAGGPTGFQKLVF

SEQ ID NO: 395940 - protein, 15 aa, Homo sapiens
  CDR3 for beta chain variable domain of TCR clone 197970 (TRBV6-1, TRBJ2-7)
CASSEGMGDFYEQYF

SEQ ID NO: 395941 - protein, 13 aa, Homo sapiens
  CDR3 for alpha chain variable domain of TCR clone 197971 (TRAV12-3, TRAJ54)
CAMTLQGAQKLVF

SEQ ID NO: 395942 - protein, 15 aa, Homo sapiens
  CDR3 for beta chain variable domain of TCR clone 197971 (TRBV7-2, TRBJ1-2)
CASSLVSGGDYGYTF

SEQ ID NO: 395943 - protein, 14 aa, Homo sapiens
  CDR3 for alpha chain variable domain of TCR clone 197972 (TRAV12-3, TRAJ22)
CAMSLFGSARLLTF

SEQ ID NO: 395944 - protein, 11 aa, Homo sapiens
  CDR3 for beta chain variable domain of TCR clone 197972 (TRBV12-4, TRBJ2-2)
CASSSAGELFF

SEQ ID NO: 395945 - protein, 16 aa, Homo sapiens
  CDR3 for alpha chain variable domain of TCR clone 197973 (TRAV14/DV4, TRAJ53)
CAMREGGGGSNYKLTF

SEQ ID NO: 395946 - protein, 14 aa, Homo sapiens
  CDR3 for beta chain variable domain of TCR clone 197973 (TRBV2, TRBJ1-5)
CASSENRGGQPQHF

SEQ ID NO: 395947 - protein, 11 aa, Homo sapiens
  CDR3 for alpha chain variable domain of TCR clone 197974 (TRAV2, TRAJ13)
CASGGYQKVTF

SEQ ID NO: 395948 - protein, 15 aa, Homo sapiens
  CDR3 for beta chain variable domain of TCR clone 197974 (TRBV5-1, TRBJ1-1)
CASSLSDLGGTEAFF

SEQ ID NO: 395949 - protein, 11 aa, Homo sapiens
  CDR3 for alpha chain variable domain of TCR clone 197975 (TRAV3, TRAJ21)
CAVGNFNKFYF

SEQ ID NO: 395950 - protein, 14 aa, Homo sapiens
  CDR3 for beta chain variable domain of TCR clone 197975 (TRBV7-2, TRBJ2-5)
CASSPRGSSETQYF

SEQ ID NO: 395951 - protein, 15 aa, Homo sapiens
  CDR3 for alpha chain variable domain of TCR clone 197976 (TRAV2, TRAJ15)
CAGEDRNQAGTALIF

SEQ ID NO: 395952 - protein, 13 aa, Homo sapiens
  CDR3 for beta chain variable domain of TCR clone 197976 (TRBV10-2, TRBJ2-1)
CASGASGDAKQFF

SEQ ID NO: 395953 - protein, 10 aa, Homo sapiens
  CDR3 for alpha chain variable domain of TCR clone 197977 (TRAV12-2, TRAJ52)
RSTSDGKLTF

SEQ ID NO: 395954 - protein, 15 aa, Homo sapiens
  CDR3 for beta chain variable domain of TCR clone 197977 (TRBV6-3, TRBJ2-7)
CASSSPGTVFYEQYF

SEQ ID NO: 395955 - protein, 15 aa, Homo sapiens
  CDR3 for alpha chain variable domain of TCR clone 197978 (TRAV8-6, TRAJ6)
CAVSGESGGSYIPTF

SEQ ID NO: 395956 - protein, 14 aa, Homo sapiens
  CDR3 for beta chain variable domain of TCR clone 197978 (TRBV7-8, TRBJ2-7)
CASSPRDRVYEQYF

SEQ ID NO: 395957 - protein, 14 aa, Homo sapiens
  CDR3 for alpha chain variable domain of TCR clone 197979 (TRAV12-3, TRAJ58)
CAMSTETSGPRLTF

SEQ ID NO: 395958 - protein, 13 aa, Homo sapiens
  CDR3 for beta chain variable domain of TCR clone 197979 (TRBV27, TRBJ2-3)
CASSWGRKDTQYF

SEQ ID NO: 395959 - protein, 14 aa, Homo sapiens
  CDR3 for alpha chain variable domain of TCR clone 197980 (TRAV12-2, TRAJ3)
CSFSLYSSASKIIF

SEQ ID NO: 395960 - protein, 14 aa, Homo sapiens
  CDR3 for beta chain variable domain of TCR clone 197980 (TRBV27, TRBJ2-1)
CAGSIAETYNEQFF

SEQ ID NO: 395961 - protein, 18 aa, Homo sapiens
  CDR3 for alpha chain variable domain of TCR clone 197981 (TRAV26-1, TRAJ22)
CIVRVSFWFCKATDLCIW

SEQ ID NO: 395962 - protein, 14 aa, Homo sapiens
  CDR3 for beta chain variable domain of TCR clone 197981 (TRBV18, TRBJ2-7)
CASSPRGGAYEQYF

SEQ ID NO: 395963 - protein, 13 aa, Homo sapiens
  CDR3 for alpha chain variable domain of TCR clone 197982 (TRAV26-2, TRAJ33)
CILTLDSNYQLIW

SEQ ID NO: 395964 - protein, 14 aa, Homo sapiens
  CDR3 for beta chain variable domain of TCR clone 197982 (TRBV7-2, TRBJ2-7)
CASSPKTSFYEQYF

SEQ ID NO: 395965 - protein, 14 aa, Homo sapiens
  CDR3 for alpha chain variable domain of TCR clone 197983 (TRAV12-3, TRAJ58)
CAMSTETSGSRLTF

SEQ ID NO: 395966 - protein, 12 aa, Homo sapiens
  CDR3 for beta chain variable domain of TCR clone 197983 (TRBV7-8, TRBJ2-7)
CASSLGDRGQYF

SEQ ID NO: 395967 - protein, 14 aa, Homo sapiens
  CDR3 for alpha chain variable domain of TCR clone 197984 (TRAV8-2, TRAJ45)
CVVRAGGGAEGLTF

SEQ ID NO: 395968 - protein, 12 aa, Homo sapiens
  CDR3 for beta chain variable domain of TCR clone 197984 (TRBV12-4, TRBJ2-1)
CASSLVRVEQFF

SEQ ID NO: 395969 - protein, 21 aa, Homo sapiens
  CDR3 for alpha chain variable domain of TCR clone 197985 (TRAV12-1, TRAJ37)
CVVNGGLWQHRHTNLWARDNF

SEQ ID NO: 395970 - protein, 12 aa, Homo sapiens
  CDR3 for beta chain variable domain of TCR clone 197985 (TRBV20-1, TRBJ1-2)
CSAPGVNYGYTF

SEQ ID NO: 395971 - protein, 16 aa, Homo sapiens
  CDR3 for alpha chain variable domain of TCR clone 197986 (TRAV3, TRAJ3)
CAVRDRAKSSASKIIF

SEQ ID NO: 395972 - protein, 15 aa, Homo sapiens
  CDR3 for beta chain variable domain of TCR clone 197986 (TRBV20-1, TRBJ2-3)
CSASPPQVSTDTQYF

SEQ ID NO: 395973 - protein, 15 aa, Homo sapiens
  CDR3 for alpha chain variable domain of TCR clone 197987 (TRAV35, TRAJ48)
CAGPVRVFGNEKLTF

SEQ ID NO: 395974 - protein, 14 aa, Homo sapiens
  CDR3 for beta chain variable domain of TCR clone 197987 (TRBV20-1, TRBJ2-5)
CSALVPGYQETQYF

SEQ ID NO: 395975 - protein, 13 aa, Homo sapiens
  CDR3 for alpha chain variable domain of TCR clone 197988 (TRAV16, TRAJ28)
CALTGAGSYQLTF

SEQ ID NO: 395976 - protein, 14 aa, Homo sapiens
  CDR3 for beta chain variable domain of TCR clone 197988 (TRBV5-1, TRBJ2-3)
CASSASGGQDTQYF

SEQ ID NO: 395977 - protein, 18 aa, Homo sapiens
  CDR3 for alpha chain variable domain of TCR clone 197989 (TRAV21, TRAJ52)
CAVRPSPAGGTSYGKLTL

SEQ ID NO: 395978 - protein, 13 aa, Homo sapiens
  CDR3 for beta chain variable domain of TCR clone 197989 (TRBV20-1, TRBJ1-1)
CSARVGGSTEAAF

SEQ ID NO: 395979 - protein, 14 aa, Homo sapiens
  CDR3 for alpha chain variable domain of TCR clone 197990 (TRAV13-1, TRAJ35)
CAASKGGFGNVLHC

SEQ ID NO: 395980 - protein, 14 aa, Homo sapiens
  CDR3 for beta chain variable domain of TCR clone 197990 (TRBV11-2, TRBJ2-5)
CASRPLAGRETQYF

SEQ ID NO: 395981 - protein, 14 aa, Homo sapiens
  CDR3 for alpha chain variable domain of TCR clone 197991 (TRAV13-1, TRAJ35)
CAASKGGFGNVLHF

SEQ ID NO: 395982 - protein, 13 aa, Homo sapiens
  CDR3 for beta chain variable domain of TCR clone 197991 (TRBV7-3, TRBJ1-1)
CASSHDWGAEAFF

SEQ ID NO: 395983 - protein, 12 aa, Homo sapiens
  CDR3 for alpha chain variable domain of TCR clone 197992 (TRAV35, TRAJ39)
LAPNNAGNMLTF

SEQ ID NO: 395984 - protein, 14 aa, Homo sapiens
  CDR3 for beta chain variable domain of TCR clone 197992 (TRBV7-3, TRBJ1-1)
CASSLKGGNTEAFF

SEQ ID NO: 395985 - protein, 18 aa, Homo sapiens
  CDR3 for alpha chain variable domain of TCR clone 197993 (TRAV26-1, TRAJ30)
CCVLLHRQSTNRDDKIIF

SEQ ID NO: 395986 - protein, 18 aa, Homo sapiens
  CDR3 for beta chain variable domain of TCR clone 197993 (TRBV4-1, TRBJ1-5)
GASSQDPRGQGLNQPQHF

SEQ ID NO: 395987 - protein, 12 aa, Homo sapiens
  CDR3 for alpha chain variable domain of TCR clone 197994 (TRAV21, TRAJ33)
CANMDSNYQLIW

SEQ ID NO: 395988 - protein, 15 aa, Homo sapiens
  CDR3 for beta chain variable domain of TCR clone 197994 (TRBV9, TRBJ1-6)
CASSVAGTGDSPLHF

SEQ ID NO: 395989 - protein, 22 aa, Homo sapiens
  CDR3 for alpha chain variable domain of TCR clone 197995 (TRAV4, )
CLGGRVKPNIQNPDPAVYQLRD

SEQ ID NO: 395990 - protein, 16 aa, Homo sapiens
  CDR3 for beta chain variable domain of TCR clone 197995 (TRBV12-5, TRBJ2-5)
CASGPRTSGNQETQYF

SEQ ID NO: 395991 - protein, 15 aa, Homo sapiens
  CDR3 for alpha chain variable domain of TCR clone 197996 (TRAV12-3, TRAJ6)
CARSATTGGSYIPTF

SEQ ID NO: 395992 - protein, 16 aa, Homo sapiens
  CDR3 for beta chain variable domain of TCR clone 197996 (TRBV20-1, TRBJ1-2)
CSASMGQGVANYGYTF

SEQ ID NO: 395993 - protein, 12 aa, Homo sapiens
  CDR3 for alpha chain variable domain of TCR clone 197997 (TRAV1-2, TRAJ33)
CAALDSNYQLIW

SEQ ID NO: 395994 - protein, 14 aa, Homo sapiens
  CDR3 for beta chain variable domain of TCR clone 197997 (TRBV18, TRBJ2-5)
CASPPGVSQETQYF

SEQ ID NO: 395995 - protein, 13 aa, Homo sapiens
  CDR3 for alpha chain variable domain of TCR clone 197998 (TRAV6, TRAJ37)
CSHVSGNTGKLIF

SEQ ID NO: 395996 - protein, 16 aa, Homo sapiens
  CDR3 for beta chain variable domain of TCR clone 197998 (TRBV7-2, TRBJ2-5)
CASSLESAGGRETQYF

SEQ ID NO: 395997 - protein, 17 aa, Homo sapiens
  CDR3 for alpha chain variable domain of TCR clone 197999 (TRAV8-1, TRAJ42)
CAVKWGNYGGSQGNLIF

SEQ ID NO: 395998 - protein, 11 aa, Homo sapiens
  CDR3 for beta chain variable domain of TCR clone 197999 (TRBV6-5, TRBJ1-1)
CATGTGGAAFF

SEQ ID NO: 395999 - protein, 16 aa, Homo sapiens
  CDR3 for alpha chain variable domain of TCR clone 198000 (TRAV12-3, TRAJ53)
CAMSPGSGGSHYKLTF

SEQ ID NO: 396000 - protein, 11 aa, Homo sapiens
  CDR3 for beta chain variable domain of TCR clone 198000 (TRBV29-1, TRBJ2-5)
CSEDRTGTQFF

SEQ ID NO: 396001 - protein, 16 aa, Homo sapiens
  CDR3 for alpha chain variable domain of TCR clone 198001 (TRAV26-1, TRAJ50)
CIVRVEAGTSYDKVIV

SEQ ID NO: 396002 - protein, 13 aa, Homo sapiens
  CDR3 for beta chain variable domain of TCR clone 198001 (TRBV25-1, TRBJ1-2)
CASSENMGRGYTF

SEQ ID NO: 396003 - protein, 16 aa, Homo sapiens
  CDR3 for alpha chain variable domain of TCR clone 198002 (TRAV26-1, TRAJ52)
CFVSNAGGTSYGKLTF

SEQ ID NO: 396004 - protein, 16 aa, Homo sapiens
  CDR3 for beta chain variable domain of TCR clone 198002 (TRBV5-1, TRBJ2-1)
CASSLEGRGLYNEQFF

SEQ ID NO: 396005 - protein, 11 aa, Homo sapiens
  CDR3 for alpha chain variable domain of TCR clone 198003 (TRAV12-2, TRAJ49)
CAVTGGNQFYF

SEQ ID NO: 396006 - protein, 16 aa, Homo sapiens
  CDR3 for beta chain variable domain of TCR clone 198003 (TRBV19, TRBJ1-2)
CASSTGSNRDGYGYTF

SEQ ID NO: 396007 - protein, 15 aa, Homo sapiens
  CDR3 for alpha chain variable domain of TCR clone 198004 (TRAV3, TRAJ22)
CAVRDRGGSARQLTF

SEQ ID NO: 396008 - protein, 17 aa, Homo sapiens
  CDR3 for beta chain variable domain of TCR clone 198004 (TRBV13, TRBJ2-3)
CASSLSRVAGGRNTRYF

SEQ ID NO: 396009 - protein, 12 aa, Homo sapiens
  CDR3 for alpha chain variable domain of TCR clone 198005 (TRAV27, TRAJ37)
CADSGSTGKLIL

SEQ ID NO: 396010 - protein, 18 aa, Homo sapiens
  CDR3 for beta chain variable domain of TCR clone 198005 (TRBV7-9, TRBJ1-1)
CASSKPWDTMGMNTEAFF

SEQ ID NO: 396011 - protein, 19 aa, Homo sapiens
  CDR3 for alpha chain variable domain of TCR clone 198006 (TRAV26-1, TRAJ52)
CIGRAHRNAGGTSYGKLTF

SEQ ID NO: 396012 - protein, 13 aa, Homo sapiens
  CDR3 for beta chain variable domain of TCR clone 198006 (TRBV20-1, TRBJ1-6)
CSAPLGVGSPLHF

SEQ ID NO: 396013 - protein, 11 aa, Homo sapiens
  CDR3 for alpha chain variable domain of TCR clone 198007 (TRAV13-1, TRAJ20)
CAAKRRLQAQL

SEQ ID NO: 396014 - protein, 13 aa, Homo sapiens
  CDR3 for beta chain variable domain of TCR clone 198007 (TRBV12-4, TRBJ1-1)
CASSLIGVTEAFF

SEQ ID NO: 396015 - protein, 13 aa, Homo sapiens
  CDR3 for alpha chain variable domain of TCR clone 198008 (TRAV13-2, TRAJ48)
CAGMDLGNEKLTF

SEQ ID NO: 396016 - protein, 15 aa, Homo sapiens
  CDR3 for beta chain variable domain of TCR clone 198008 (TRBV7-9, TRBJ1-6)
CASSSPGRGNSPLHF

SEQ ID NO: 396017 - protein, 16 aa, Homo sapiens
  CDR3 for alpha chain variable domain of TCR clone 198009 (TRAV3, TRAJ18)
CAVRDGRGSTLGRLYF

SEQ ID NO: 396018 - protein, 14 aa, Homo sapiens
  CDR3 for beta chain variable domain of TCR clone 198009 (TRBV7-2, TRBJ1-1)
CASSVLTGTTEAFF

SEQ ID NO: 396019 - protein, 12 aa, Homo sapiens
  CDR3 for alpha chain variable domain of TCR clone 198010 (TRAV21, TRAJ33)
CAVQDSNYQLIW

SEQ ID NO: 396020 - protein, 14 aa, Homo sapiens
  CDR3 for beta chain variable domain of TCR clone 198010 (TRBV7-8, TRBJ1-3)
CASSSDRVRNTIYF

SEQ ID NO: 396021 - protein, 12 aa, Homo sapiens
  CDR3 for alpha chain variable domain of TCR clone 198011 (TRAV25, TRAJ38)
CAGTGNNRELIW

SEQ ID NO: 396022 - protein, 14 aa, Homo sapiens
  CDR3 for beta chain variable domain of TCR clone 198011 (TRBV19, TRBJ1-5)
CASSKMTGPQPQHF

SEQ ID NO: 396023 - protein, 12 aa, Homo sapiens
  CDR3 for alpha chain variable domain of TCR clone 198012 (TRAV3, TRAJ20)
CAVRDPDYMLSF

SEQ ID NO: 396024 - protein, 13 aa, Homo sapiens
  CDR3 for beta chain variable domain of TCR clone 198012 (TRBV9, TRBJ2-1)
CASSVGQGGEQFF

SEQ ID NO: 396025 - protein, 14 aa, Homo sapiens
  CDR3 for alpha chain variable domain of TCR clone 198013 (TRAV1-1, TRAJ27)
CAVIYNTNTGKSTF

SEQ ID NO: 396026 - protein, 14 aa, Homo sapiens
  CDR3 for beta chain variable domain of TCR clone 198013 (TRBV6-5, TRBJ1-2)
CASSYDGTGGGYTF

SEQ ID NO: 396027 - protein, 15 aa, Homo sapiens
  CDR3 for alpha chain variable domain of TCR clone 198014 (TRAV8-3, TRAJ37)
CAVGARASNTGKLIF

SEQ ID NO: 396028 - protein, 15 aa, Homo sapiens
  CDR3 for beta chain variable domain of TCR clone 198014 (TRBV5-4, TRBJ2-3)
CASSLSGRVTDTQYF

SEQ ID NO: 396029 - protein, 14 aa, Homo sapiens
  CDR3 for alpha chain variable domain of TCR clone 198015 (TRAV8-6, TRAJ29)
CAVSGWAGNTPLVF

SEQ ID NO: 396030 - protein, 15 aa, Homo sapiens
  CDR3 for beta chain variable domain of TCR clone 198015 (TRBV7-9, TRBJ1-4)
CASSARTGGNEKLFF

SEQ ID NO: 396031 - protein, 13 aa, Homo sapiens
  CDR3 for alpha chain variable domain of TCR clone 198016 (TRAV13-1, TRAJ5)
CAAEHTCRRALTF

SEQ ID NO: 396032 - protein, 15 aa, Homo sapiens
  CDR3 for beta chain variable domain of TCR clone 198016 (TRBV6-1, TRBJ2-1)
CASSELRGQYNEQFF

SEQ ID NO: 396033 - protein, 11 aa, Homo sapiens
  CDR3 for alpha chain variable domain of TCR clone 198017 (TRAV1-2, TRAJ40)
CAVPGTYKYIF

SEQ ID NO: 396034 - protein, 14 aa, Homo sapiens
  CDR3 for beta chain variable domain of TCR clone 198017 (TRBV28, TRBJ2-5)
CASSLGDRAETQYF

SEQ ID NO: 396035 - protein, 16 aa, Homo sapiens
  CDR3 for alpha chain variable domain of TCR clone 198018 (TRAV13-1, TRAJ17)
CAASKGVKAAGNKLTF

SEQ ID NO: 396036 - protein, 15 aa, Homo sapiens
  CDR3 for beta chain variable domain of TCR clone 198018 (TRBV20-1, TRBJ1-5)
CSAREGGYINQPQHF

SEQ ID NO: 396037 - protein, 14 aa, Homo sapiens
  CDR3 for alpha chain variable domain of TCR clone 198019 (TRAV1-2, TRAJ26)
CCERPDNYGQNFVF

SEQ ID NO: 396038 - protein, 13 aa, Homo sapiens
  CDR3 for beta chain variable domain of TCR clone 198019 (TRBV19, TRBJ1-2)
CASSQGQVYGYTF

SEQ ID NO: 396039 - protein, 13 aa, Homo sapiens
  CDR3 for alpha chain variable domain of TCR clone 198020 (TRAV27, TRAJ41)
CAGEGNSGYALNF

SEQ ID NO: 396040 - protein, 16 aa, Homo sapiens
  CDR3 for beta chain variable domain of TCR clone 198020 (TRBV7-2, TRBJ2-3)
CASSQELAGDTDTQYF

SEQ ID NO: 396041 - protein, 14 aa, Homo sapiens
  CDR3 for alpha chain variable domain of TCR clone 198021 (TRAV12-2, TRAJ24)
CAVTPADSWRKLQF

SEQ ID NO: 396042 - protein, 16 aa, Homo sapiens
  CDR3 for beta chain variable domain of TCR clone 198021 (TRBV6-4, TRBJ2-3)
APSEGGRAWGTDTQYF

SEQ ID NO: 396043 - protein, 17 aa, Homo sapiens
  CDR3 for alpha chain variable domain of TCR clone 198022 (TRAV13-2, TRAJ31)
CAENARLMFGDGNQLVV

SEQ ID NO: 396044 - protein, 14 aa, Homo sapiens
  CDR3 for beta chain variable domain of TCR clone 198022 (TRBV25-1, TRBJ1-1)
CASTHLGGNTEAFF

SEQ ID NO: 396045 - protein, 15 aa, Homo sapiens
  CDR3 for alpha chain variable domain of TCR clone 198023 (TRAV27, TRAJ38)
CAARRKAGNNRKLIW

SEQ ID NO: 396046 - protein, 15 aa, Homo sapiens
  CDR3 for beta chain variable domain of TCR clone 198023 (TRBV5-1, TRBJ2-1)
CASSPPRAPYNEQFF

SEQ ID NO: 396047 - protein, 13 aa, Homo sapiens
  CDR3 for alpha chain variable domain of TCR clone 198024 (TRAV21, TRAJ10)
CAVPTGGGNKLTF

SEQ ID NO: 396048 - protein, 15 aa, Homo sapiens
  CDR3 for beta chain variable domain of TCR clone 198024 (TRBV6-1, TRBJ2-3)
CASSERGGITDTQYF

SEQ ID NO: 396049 - protein, 15 aa, Homo sapiens
  CDR3 for alpha chain variable domain of TCR clone 198025 (TRAV17, TRAJ57)
CATGPSQGGSEKLVF

SEQ ID NO: 396050 - protein, 15 aa, Homo sapiens
  CDR3 for beta chain variable domain of TCR clone 198025 (TRBV7-3, TRBJ2-2)
CASSETGQGTGELFF

SEQ ID NO: 396051 - protein, 13 aa, Homo sapiens
  CDR3 for alpha chain variable domain of TCR clone 198026 (TRAV13-1, TRAJ20)
CAARVANDYKLSF

SEQ ID NO: 396052 - protein, 16 aa, Homo sapiens
  CDR3 for beta chain variable domain of TCR clone 198026 (TRBV11-1, TRBJ1-1)
CATNPRDRAFNTEAFF

SEQ ID NO: 396053 - protein, 10 aa, Homo sapiens
  CDR3 for alpha chain variable domain of TCR clone 198027 (TRAV1-2, TRAJ18)
CAVRGEAQPW

SEQ ID NO: 396054 - protein, 19 aa, Homo sapiens
  CDR3 for beta chain variable domain of TCR clone 198027 (TRBV6-3, TRBJ1-2)
CASSYSKGRTGPPKYGYTF

SEQ ID NO: 396055 - protein, 15 aa, Homo sapiens
  CDR3 for alpha chain variable domain of TCR clone 198028 (TRAV27, TRAJ53)
CRAINSGGSNYKLTF

SEQ ID NO: 396056 - protein, 17 aa, Homo sapiens
  CDR3 for beta chain variable domain of TCR clone 198028 (TRBV28, TRBJ2-1)
CASSSARQALTYNEQFF

SEQ ID NO: 396057 - protein, 10 aa, Homo sapiens
  CDR3 for alpha chain variable domain of TCR clone 198029 (TRAV12-1, TRAJ43)
CVVHNNDMRF

SEQ ID NO: 396058 - protein, 13 aa, Homo sapiens
  CDR3 for beta chain variable domain of TCR clone 198029 (TRBV12-4, TRBJ1-2)
CASSSELTGRSTF

SEQ ID NO: 396059 - protein, 14 aa, Homo sapiens
  CDR3 for alpha chain variable domain of TCR clone 198030 (TRAV27, TRAJ36)
CAGHPKRGANNLFF

SEQ ID NO: 396060 - protein, 15 aa, Homo sapiens
  CDR3 for beta chain variable domain of TCR clone 198030 (TRBV18, TRBJ2-7)
CASSPASTPNYEQYF

SEQ ID NO: 396061 - protein, 15 aa, Homo sapiens
  CDR3 for alpha chain variable domain of TCR clone 198031 (TRAV9-2, TRAJ8)
CALRGLNTGFQKLVF

SEQ ID NO: 396062 - protein, 13 aa, Homo sapiens
  CDR3 for beta chain variable domain of TCR clone 198031 (TRBV27, TRBJ2-1)
CARTPLAAGEQFF

SEQ ID NO: 396063 - protein, 11 aa, Homo sapiens
  CDR3 for alpha chain variable domain of TCR clone 198032 (TRAV21, TRAJ34)
CAVTNTDKLIF

SEQ ID NO: 396064 - protein, 16 aa, Homo sapiens
  CDR3 for beta chain variable domain of TCR clone 198032 (TRBV7-9, TRBJ1-2)
CASSLGSSSGEDGYTF

SEQ ID NO: 396065 - protein, 16 aa, Homo sapiens
  CDR3 for alpha chain variable domain of TCR clone 198033 (TRAV17, TRAJ28)
CATALDSGAGSYQLTF

SEQ ID NO: 396066 - protein, 17 aa, Homo sapiens
  CDR3 for beta chain variable domain of TCR clone 198033 (TRBV3-1, TRBJ2-2)
CASSQFRDKVDTGELFF

SEQ ID NO: 396067 - protein, 11 aa, Homo sapiens
  CDR3 for alpha chain variable domain of TCR clone 198034 (TRAV3, TRAJ21)
CAVGNFNKLYF

SEQ ID NO: 396068 - protein, 17 aa, Homo sapiens
  CDR3 for beta chain variable domain of TCR clone 198034 (TRBV24-1, TRBJ2-1)
CATSDVSTSRTYNEQFF

SEQ ID NO: 396069 - protein, 15 aa, Homo sapiens
  CDR3 for alpha chain variable domain of TCR clone 198035 (TRAV23/DV6, TRAJ16)
CAASPWFSDGQTLLF

SEQ ID NO: 396070 - protein, 13 aa, Homo sapiens
  CDR3 for beta chain variable domain of TCR clone 198035 (TRBV11-3, TRBJ2-3)
CASRPVLGDTQYF

SEQ ID NO: 396071 - protein, 14 aa, Homo sapiens
  CDR3 for alpha chain variable domain of TCR clone 198036 (TRAV35, TRAJ22)
CAGLRPGSARQLTF

SEQ ID NO: 396072 - protein, 14 aa, Homo sapiens
  CDR3 for beta chain variable domain of TCR clone 198036 (TRBV11-3, TRBJ2-3)
CASSSGHGPDTQYF

SEQ ID NO: 396073 - protein, 21 aa, Homo sapiens
  CDR3 for alpha chain variable domain of TCR clone 198037 (TRAV8-3, TRAJ6)
CSVGGEEATYLHLEEEPALLF

SEQ ID NO: 396074 - protein, 14 aa, Homo sapiens
  CDR3 for beta chain variable domain of TCR clone 198037 (TRBV5-1, TRBJ2-7)
CASSRGESLYEQYF

SEQ ID NO: 396075 - protein, 16 aa, Homo sapiens
  CDR3 for alpha chain variable domain of TCR clone 198038 (TRAV3, TRAJ21)
CAVRDIERGNFNKFYF

SEQ ID NO: 396076 - protein, 16 aa, Homo sapiens
  CDR3 for beta chain variable domain of TCR clone 198038 (TRBV4-1, TRBJ2-1)
CASSQEAGQGSDEQFF

SEQ ID NO: 396077 - protein, 13 aa, Homo sapiens
  CDR3 for alpha chain variable domain of TCR clone 198039 (TRAV8-3, TRAJ28)
CAVGAVGSYQFTF

SEQ ID NO: 396078 - protein, 13 aa, Homo sapiens
  CDR3 for beta chain variable domain of TCR clone 198039 (TRBV29-1, TRBJ2-1)
CSVEGGRVNEQFF

SEQ ID NO: 396079 - protein, 11 aa, Homo sapiens
  CDR3 for alpha chain variable domain of TCR clone 198040 (TRAV3, TRAJ49)
CAPITGNQFYF

SEQ ID NO: 396080 - protein, 13 aa, Homo sapiens
  CDR3 for beta chain variable domain of TCR clone 198040 (TRBV20-1, TRBJ1-1)
CSARGGGNTEAFF

SEQ ID NO: 396081 - protein, 15 aa, Homo sapiens
  CDR3 for alpha chain variable domain of TCR clone 198041 (TRAV3, TRAJ22)
CAVRDRGCSARQLTF

SEQ ID NO: 396082 - protein, 13 aa, Homo sapiens
  CDR3 for beta chain variable domain of TCR clone 198041 (TRBV2, TRBJ1-5)
CATAGPGNQPQHF

SEQ ID NO: 396083 - protein, 14 aa, Homo sapiens
  CDR3 for alpha chain variable domain of TCR clone 198042 (TRAV2, TRAJ37)
CAVDFTSHTGKLIF

SEQ ID NO: 396084 - protein, 13 aa, Homo sapiens
  CDR3 for beta chain variable domain of TCR clone 198042 (TRBV4-1, TRBJ2-2)
CASSQENTGELFF

SEQ ID NO: 396085 - protein, 15 aa, Homo sapiens
  CDR3 for alpha chain variable domain of TCR clone 198043 (TRAV38-1, TRAJ37)
CAFIHGSVNTGKLIF

SEQ ID NO: 396086 - protein, 12 aa, Homo sapiens
  CDR3 for beta chain variable domain of TCR clone 198043 (TRBV7-9, TRBJ2-7)
CASSSGSYEQYF

SEQ ID NO: 396087 - protein, 15 aa, Homo sapiens
  CDR3 for alpha chain variable domain of TCR clone 198044 (TRAV26-1, TRAJ29)
CIVRVEGSGNTPLVF

SEQ ID NO: 396088 - protein, 17 aa, Homo sapiens
  CDR3 for beta chain variable domain of TCR clone 198044 (TRBV18, TRBJ1-3)
CASSPYPTGPSGNTIYF

SEQ ID NO: 396089 - protein, 14 aa, Homo sapiens
  CDR3 for alpha chain variable domain of TCR clone 198045 (TRAV14/DV4, TRAJ54)
CAMREPQGAQKLVF

SEQ ID NO: 396090 - protein, 15 aa, Homo sapiens
  CDR3 for beta chain variable domain of TCR clone 198045 (TRBV11-3, TRBJ2-3)
CASLKDGREGDTQYF

SEQ ID NO: 396091 - protein, 14 aa, Homo sapiens
  CDR3 for alpha chain variable domain of TCR clone 198046 (TRAV10, TRAJ34)
CVVSGKHRQAPLWD

SEQ ID NO: 396092 - protein, 14 aa, Homo sapiens
  CDR3 for beta chain variable domain of TCR clone 198046 (TRBV19, TRBJ2-1)
CASPTFVLSGEQFF

SEQ ID NO: 396093 - protein, 12 aa, Homo sapiens
  CDR3 for alpha chain variable domain of TCR clone 198047 (TRAV2, TRAJ9)
CAVGAGGFKTIF

SEQ ID NO: 396094 - protein, 17 aa, Homo sapiens
  CDR3 for beta chain variable domain of TCR clone 198047 (TRBV19, TRBJ2-7)
CASSISFYDSYPYEQYF

SEQ ID NO: 396095 - protein, 15 aa, Homo sapiens
  CDR3 for alpha chain variable domain of TCR clone 198048 (TRAV14/DV4, TRAJ33)
CAMREGRDSNYQLIW

SEQ ID NO: 396096 - protein, 17 aa, Homo sapiens
  CDR3 for beta chain variable domain of TCR clone 198048 (TRBV11-2, TRBJ2-1)
CASSLALAEFGRNEQFF

SEQ ID NO: 396097 - protein, 13 aa, Homo sapiens
  CDR3 for alpha chain variable domain of TCR clone 198049 (TRAV22, TRAJ29)
CAVGGSGNTPLVF

SEQ ID NO: 396098 - protein, 13 aa, Homo sapiens
  CDR3 for beta chain variable domain of TCR clone 198049 (TRBV4-2, TRBJ1-1)
CASSQAGITEAFF

SEQ ID NO: 396099 - protein, 16 aa, Homo sapiens
  CDR3 for alpha chain variable domain of TCR clone 198050 (TRAV8-3, TRAJ48)
CDVGLISNFGNEKLTF

SEQ ID NO: 396100 - protein, 13 aa, Homo sapiens
  CDR3 for beta chain variable domain of TCR clone 198050 (TRBV20-1, TRBJ1-5)
CSASWGRSQPQHF

SEQ ID NO: 396101 - protein, 11 aa, Homo sapiens
  CDR3 for alpha chain variable domain of TCR clone 198051 (TRAV12-1, TRAJ30)
CVVNGQDKIIF

SEQ ID NO: 396102 - protein, 12 aa, Homo sapiens
  CDR3 for beta chain variable domain of TCR clone 198051 (TRBV25-1, TRBJ2-2)
CASKLFTGELFF

SEQ ID NO: 396103 - protein, 15 aa, Homo sapiens
  CDR3 for alpha chain variable domain of TCR clone 198052 (TRAV8-3, TRAJ27)
CSVGPSKTNAGKLTF

SEQ ID NO: 396104 - protein, 15 aa, Homo sapiens
  CDR3 for beta chain variable domain of TCR clone 198052 (TRBV7-2, TRBJ2-1)
CASSSGLAGGNEQFF

SEQ ID NO: 396105 - protein, 18 aa, Homo sapiens
  CDR3 for alpha chain variable domain of TCR clone 198053 (TRAV12-3, TRAJ52)
CAMSRTNAGGISYGKLTF

SEQ ID NO: 396106 - protein, 17 aa, Homo sapiens
  CDR3 for beta chain variable domain of TCR clone 198053 (TRBV7-3, TRBJ2-3)
CASSLMKRMRGADTQYF

SEQ ID NO: 396107 - protein, 14 aa, Homo sapiens
  CDR3 for alpha chain variable domain of TCR clone 198054 (TRAV21, TRAJ37)
CAVKGSSNTGKLIF

SEQ ID NO: 396108 - protein, 17 aa, Homo sapiens
  CDR3 for beta chain variable domain of TCR clone 198054 (TRBV20-1, TRBJ2-7)
CSATRAGGVAGVEEQYF

SEQ ID NO: 396109 - protein, 14 aa, Homo sapiens
  CDR3 for alpha chain variable domain of TCR clone 198055 (TRAV1-2, TRAJ8)
CAVREDTGFQKLVF

SEQ ID NO: 396110 - protein, 14 aa, Homo sapiens
  CDR3 for beta chain variable domain of TCR clone 198055 (TRBV28, TRBJ2-1)
CASSFDSVSNEQFF

SEQ ID NO: 396111 - protein, 11 aa, Homo sapiens
  CDR3 for alpha chain variable domain of TCR clone 198056 (TRAV2, TRAJ33)
CAVESNYQLIW

SEQ ID NO: 396112 - protein, 13 aa, Homo sapiens
  CDR3 for beta chain variable domain of TCR clone 198056 (TRBV18, TRBJ1-1)
CASSPETKPEAFF

SEQ ID NO: 396113 - protein, 13 aa, Homo sapiens
  CDR3 for alpha chain variable domain of TCR clone 198057 (TRAV12-3, TRAJ33)
CAMSVNSNYKLIW

SEQ ID NO: 396114 - protein, 13 aa, Homo sapiens
  CDR3 for beta chain variable domain of TCR clone 198057 (TRBV4-1, TRBJ2-2)
CASSQENTGELFF

SEQ ID NO: 396115 - protein, 17 aa, Homo sapiens
  CDR3 for alpha chain variable domain of TCR clone 198058 (TRAV3, TRAJ38)
CAVRDCLNAGNNRKLIW

SEQ ID NO: 396116 - protein, 18 aa, Homo sapiens
  CDR3 for beta chain variable domain of TCR clone 198058 (TRBV11-2, TRBJ2-6)
CASSLNPFLGTGANVLTF

SEQ ID NO: 396117 - protein, 12 aa, Homo sapiens
  CDR3 for alpha chain variable domain of TCR clone 198059 (TRAV13-2, TRAJ23)
CAERHRGGKVIF

SEQ ID NO: 396118 - protein, 15 aa, Homo sapiens
  CDR3 for beta chain variable domain of TCR clone 198059 (TRBV9, TRBJ1-6)
CASSVAGTGDSPLHF

SEQ ID NO: 396119 - protein, 11 aa, Homo sapiens
  CDR3 for alpha chain variable domain of TCR clone 198060 (TRAV3, TRAJ21)
CAVGNFNKFYF

SEQ ID NO: 396120 - protein, 15 aa, Homo sapiens
  CDR3 for beta chain variable domain of TCR clone 198060 (TRBV28, TRBJ1-2)
CASIPQGSDDYGYTF

SEQ ID NO: 396121 - protein, 11 aa, Homo sapiens
  CDR3 for alpha chain variable domain of TCR clone 198061 (TRAV21, TRAJ34)
CAHYNTDKLIF

SEQ ID NO: 396122 - protein, 13 aa, Homo sapiens
  CDR3 for beta chain variable domain of TCR clone 198061 (TRBV7-7, TRBJ2-3)
CASSLSRADTQYF

SEQ ID NO: 396123 - protein, 12 aa, Homo sapiens
  CDR3 for alpha chain variable domain of TCR clone 198062 (TRAV3, TRAJ20)
CAVRDHDYKLSF

SEQ ID NO: 396124 - protein, 15 aa, Homo sapiens
  CDR3 for beta chain variable domain of TCR clone 198062 (TRBV9, TRBJ1-6)
CASSVAWTGDSPLHF

SEQ ID NO: 396125 - protein, 14 aa, Homo sapiens
  CDR3 for alpha chain variable domain of TCR clone 198063 (TRAV12-1, TRAJ23)
CVVMIYNQGGKLIF

SEQ ID NO: 396126 - protein, 23 aa, Homo sapiens
  CDR3 for beta chain variable domain of TCR clone 198063 (TRBV7-3, TRBJ1-6)
CASSLTSRDEASDPSCYNSPLHF

SEQ ID NO: 396127 - protein, 12 aa, Homo sapiens
  CDR3 for alpha chain variable domain of TCR clone 198064 (TRAV17, TRAJ39)
CAAGAAGNMLTF

SEQ ID NO: 396128 - protein, 16 aa, Homo sapiens
  CDR3 for beta chain variable domain of TCR clone 198064 (TRBV7-3, TRBJ2-2)
CASSLKPGTLSGELFF

SEQ ID NO: 396129 - protein, 22 aa, Homo sapiens
  CDR3 for alpha chain variable domain of TCR clone 198065 (TRAV3, TRAJ38)
CAVRDCLNAGNNRKLIWGLEQA

SEQ ID NO: 396130 - protein, 14 aa, Homo sapiens
  CDR3 for beta chain variable domain of TCR clone 198065 (TRBV5-5, TRBJ1-5)
CASSGQGVDQPQHF

SEQ ID NO: 396131 - protein, 13 aa, Homo sapiens
  CDR3 for alpha chain variable domain of TCR clone 198066 (TRAV35, TRAJ42)
CAGFPGSQGNLIF

SEQ ID NO: 396132 - protein, 14 aa, Homo sapiens
  CDR3 for beta chain variable domain of TCR clone 198066 (TRBV19, TRBJ2-1)
CASPTFVFSGEQFF

SEQ ID NO: 396133 - protein, 14 aa, Homo sapiens
  CDR3 for alpha chain variable domain of TCR clone 198067 (TRAV13-1, TRAJ44)
CAAKATGTASKLTF

SEQ ID NO: 396134 - protein, 17 aa, Homo sapiens
  CDR3 for beta chain variable domain of TCR clone 198067 (TRBV25-1, TRBJ2-1)
CASSAYGQGRGAYEQFF

SEQ ID NO: 396135 - protein, 13 aa, Homo sapiens
  CDR3 for alpha chain variable domain of TCR clone 198068 (TRAV16, TRAJ58)
CALSNPSGSRLTF

SEQ ID NO: 396136 - protein, 14 aa, Homo sapiens
  CDR3 for beta chain variable domain of TCR clone 198068 (TRBV6-5, TRBJ2-7)
CASSPHRGLREQYF

SEQ ID NO: 396137 - protein, 14 aa, Homo sapiens
  CDR3 for alpha chain variable domain of TCR clone 198069 (TRAV2, TRAJ9)
CAVEDRSGGFKTIF

SEQ ID NO: 396138 - protein, 16 aa, Homo sapiens
  CDR3 for beta chain variable domain of TCR clone 198069 (TRBV27, TRBJ2-7)
CASSSERRDSAYEQYF

SEQ ID NO: 396139 - protein, 13 aa, Homo sapiens
  CDR3 for alpha chain variable domain of TCR clone 198070 (TRAV12-2, TRAJ20)
CAVYPSNDYKLSF

SEQ ID NO: 396140 - protein, 12 aa, Homo sapiens
  CDR3 for beta chain variable domain of TCR clone 198070 (TRBV11-2, TRBJ2-2)
CASSLGGGELSF

SEQ ID NO: 396141 - protein, 11 aa, Homo sapiens
  CDR3 for alpha chain variable domain of TCR clone 198071 (TRAV2, TRAJ13)
CASGGYQKVTF

SEQ ID NO: 396142 - protein, 12 aa, Homo sapiens
  CDR3 for beta chain variable domain of TCR clone 198071 (TRBV11-2, TRBJ2-2)
CASSLGGGEPFF

SEQ ID NO: 396143 - protein, 17 aa, Homo sapiens
  CDR3 for alpha chain variable domain of TCR clone 198072 (TRAV23/DV6, TRAJ3)
CSNHFCFGWGSASKIIF

SEQ ID NO: 396144 - protein, 15 aa, Homo sapiens
  CDR3 for beta chain variable domain of TCR clone 198072 (TRBV19, TRBJ1-6)
CASSTQGAVGSPLHF

SEQ ID NO: 396145 - protein, 10 aa, Homo sapiens
  CDR3 for alpha chain variable domain of TCR clone 198073 (TRAV12-1, TRAJ33)
CVASNYQLIW

SEQ ID NO: 396146 - protein, 16 aa, Homo sapiens
  CDR3 for beta chain variable domain of TCR clone 198073 (TRBV18, TRBJ1-4)
CASSLQTVATNEKLFF

SEQ ID NO: 396147 - protein, 14 aa, Homo sapiens
  CDR3 for alpha chain variable domain of TCR clone 198074 (TRAV12-2, TRAJ53)
CAVKGGGSNYKLTF

SEQ ID NO: 396148 - protein, 16 aa, Homo sapiens
  CDR3 for beta chain variable domain of TCR clone 198074 (TRBV10-3, TRBJ2-1)
CAIRGGGRGDYNEQFF

SEQ ID NO: 396149 - protein, 16 aa, Homo sapiens
  CDR3 for alpha chain variable domain of TCR clone 198075 (TRAV1-2, TRAJ10)
CAVRGVLTGGGNKLTF

SEQ ID NO: 396150 - protein, 15 aa, Homo sapiens
  CDR3 for beta chain variable domain of TCR clone 198075 (TRBV9, TRBJ1-6)
CASSVAGTGDSTLHF

SEQ ID NO: 396151 - protein, 11 aa, Homo sapiens
  CDR3 for alpha chain variable domain of TCR clone 198076 (TRAV1-2, TRAJ20)
CAVANDYKLSF

SEQ ID NO: 396152 - protein, 18 aa, Homo sapiens
  CDR3 for beta chain variable domain of TCR clone 198076 (TRBV20-1, TRBJ2-6)
CSAETTPTHGSGANVLTL

SEQ ID NO: 396153 - protein, 13 aa, Homo sapiens
  CDR3 for alpha chain variable domain of TCR clone 198077 (TRAV17, TRAJ9)
CATVYTGGFKTIF

SEQ ID NO: 396154 - protein, 16 aa, Homo sapiens
  CDR3 for beta chain variable domain of TCR clone 198077 (TRBV7-7, TRBJ2-1)
CASSLASGTSYNEQFF

SEQ ID NO: 396155 - protein, 13 aa, Homo sapiens
  CDR3 for alpha chain variable domain of TCR clone 198078 (TRAV8-3, TRAJ5)
CAVGPRGRRARTF

SEQ ID NO: 396156 - protein, 16 aa, Homo sapiens
  CDR3 for beta chain variable domain of TCR clone 198078 (TRBV11-3, TRBJ2-3)
CASSPGGLLGTDTQYF

SEQ ID NO: 396157 - protein, 14 aa, Homo sapiens
  CDR3 for alpha chain variable domain of TCR clone 198079 (TRAV8-1, TRAJ5)
CAVRTDTGRRALTF

SEQ ID NO: 396158 - protein, 15 aa, Homo sapiens
  CDR3 for beta chain variable domain of TCR clone 198079 (TRBV4-1, TRBJ1-4)
CASSDTGGTNEKLFF

SEQ ID NO: 396159 - protein, 14 aa, Homo sapiens
  CDR3 for alpha chain variable domain of TCR clone 198080 (TRAV20, TRAJ42)
CAVQAGGSQGNLIF

SEQ ID NO: 396160 - protein, 14 aa, Homo sapiens
  CDR3 for beta chain variable domain of TCR clone 198080 (TRBV19, TRBJ1-5)
CASRAPDSFLSQHF

SEQ ID NO: 396161 - protein, 13 aa, Homo sapiens
  CDR3 for alpha chain variable domain of TCR clone 198081 (TRAV3, TRAJ20)
CAVRDIGDYKLSV

SEQ ID NO: 396162 - protein, 12 aa, Homo sapiens
  CDR3 for beta chain variable domain of TCR clone 198081 (TRBV3-1, TRBJ1-2)
CASTSGLYGYTF

SEQ ID NO: 396163 - protein, 11 aa, Homo sapiens
  CDR3 for alpha chain variable domain of TCR clone 198082 (TRAV2, TRAJ13)
CASGGYQKVTF

SEQ ID NO: 396164 - protein, 12 aa, Homo sapiens
  CDR3 for beta chain variable domain of TCR clone 198082 (TRBV11-2, TRBJ2-3)
GASRGAPNTQYF

SEQ ID NO: 396165 - protein, 13 aa, Homo sapiens
  CDR3 for alpha chain variable domain of TCR clone 198083 (TRAV21, TRAJ15)
CAVANQAGTALII

SEQ ID NO: 396166 - protein, 14 aa, Homo sapiens
  CDR3 for beta chain variable domain of TCR clone 198083 (TRBV27, TRBJ2-2)
CASSLGAATGELFF

SEQ ID NO: 396167 - protein, 17 aa, Homo sapiens
  CDR3 for alpha chain variable domain of TCR clone 198084 (TRAV8-4, TRAJ11)
CAVSDRGENSGYSTLTF

SEQ ID NO: 396168 - protein, 13 aa, Homo sapiens
  CDR3 for beta chain variable domain of TCR clone 198084 (TRBV11-2, TRBJ2-5)
CASSSTGEETQYF

SEQ ID NO: 396169 - protein, 11 aa, Homo sapiens
  CDR3 for alpha chain variable domain of TCR clone 198085 (TRAV17, TRAJ9)
CATTGGCKTIF

SEQ ID NO: 396170 - protein, 14 aa, Homo sapiens
  CDR3 for beta chain variable domain of TCR clone 198085 (TRBV7-9, TRBJ2-2)
CASSGLADTEELFF

SEQ ID NO: 396171 - protein, 14 aa, Homo sapiens
  CDR3 for alpha chain variable domain of TCR clone 198086 (TRAV21, TRAJ15)
CAVSLNQAGTALIF

SEQ ID NO: 396172 - protein, 11 aa, Homo sapiens
  CDR3 for beta chain variable domain of TCR clone 198086 (TRBV20-1, TRBJ2-7)
CSARTGYEQYF

SEQ ID NO: 396173 - protein, 12 aa, Homo sapiens
  CDR3 for alpha chain variable domain of TCR clone 198087 (TRAV13-1, TRAJ9)
CASHTGGFKTIF

SEQ ID NO: 396174 - protein, 13 aa, Homo sapiens
  CDR3 for beta chain variable domain of TCR clone 198087 (TRBV7-2, TRBJ1-4)
CASSLAGLEKLFF

SEQ ID NO: 396175 - protein, 12 aa, Homo sapiens
  CDR3 for alpha chain variable domain of TCR clone 198088 (TRAV12-1, TRAJ40)
CVVYSGTYKYIF

SEQ ID NO: 396176 - protein, 13 aa, Homo sapiens
  CDR3 for beta chain variable domain of TCR clone 198088 (TRBV6-1, TRBJ1-1)
CASSRQVNTEAFF

SEQ ID NO: 396177 - protein, 13 aa, Homo sapiens
  CDR3 for alpha chain variable domain of TCR clone 198089 (TRAV35, TRAJ43)
CAGYPYNNNDMRF

SEQ ID NO: 396178 - protein, 15 aa, Homo sapiens
  CDR3 for beta chain variable domain of TCR clone 198089 (TRBV25-1, TRBJ1-4)
CASSKSIATNEKLFF

SEQ ID NO: 396179 - protein, 13 aa, Homo sapiens
  CDR3 for alpha chain variable domain of TCR clone 198090 (TRAV12-2, TRAJ12)
CAVNWDSSYKLIF

SEQ ID NO: 396180 - protein, 16 aa, Homo sapiens
  CDR3 for beta chain variable domain of TCR clone 198090 (TRBV20-1, TRBJ1-1)
CSARALTQGMNTEAFF

SEQ ID NO: 396181 - protein, 12 aa, Homo sapiens
  CDR3 for alpha chain variable domain of TCR clone 198091 (TRAV1-1, TRAJ39)
CAVPVVGNMLTF

SEQ ID NO: 396182 - protein, 18 aa, Homo sapiens
  CDR3 for beta chain variable domain of TCR clone 198091 (TRBV28, TRBJ2-7)
CASSPWVATGDLQSTSGR

SEQ ID NO: 396183 - protein, 13 aa, Homo sapiens
  CDR3 for alpha chain variable domain of TCR clone 198092 (TRAV36/DV7, TRAJ54)
CAVDIQGAQKLVF

SEQ ID NO: 396184 - protein, 15 aa, Homo sapiens
  CDR3 for beta chain variable domain of TCR clone 198092 (TRBV7-2, TRBJ2-7)
CASSLKGALTYEQYF

SEQ ID NO: 396185 - protein, 16 aa, Homo sapiens
  CDR3 for alpha chain variable domain of TCR clone 198093 (TRAV3, TRAJ42)
CAVRDIEGGSQGNLFF

SEQ ID NO: 396186 - protein, 15 aa, Homo sapiens
  CDR3 for beta chain variable domain of TCR clone 198093 (TRBV9, TRBJ2-2)
CASSDFAGASGELFF

SEQ ID NO: 396187 - protein, 18 aa, Homo sapiens
  CDR3 for alpha chain variable domain of TCR clone 198094 (TRAV21, TRAJ52)
CAVRPSPAGGTSYGKLTF

SEQ ID NO: 396188 - protein, 17 aa, Homo sapiens
  CDR3 for beta chain variable domain of TCR clone 198094 (TRBV7-3, TRBJ2-5)
CASSLGSGRSGSETQYF

SEQ ID NO: 396189 - protein, 17 aa, Homo sapiens
  CDR3 for alpha chain variable domain of TCR clone 198095 (TRAV1-2, TRAJ8)
CAVRGPDENTGFQKLVF

SEQ ID NO: 396190 - protein, 16 aa, Homo sapiens
  CDR3 for beta chain variable domain of TCR clone 198095 (TRBV7-9, TRBJ2-2)
CASSGFGGANTGELFF

SEQ ID NO: 396191 - protein, 10 aa, Homo sapiens
  CDR3 for alpha chain variable domain of TCR clone 198096 (TRAV21, TRAJ31)
CAVDNARLMF

SEQ ID NO: 396192 - protein, 14 aa, Homo sapiens
  CDR3 for beta chain variable domain of TCR clone 198096 (TRBV6-1, TRBJ1-3)
CASVQGGGGNTIYF

SEQ ID NO: 396193 - protein, 10 aa, Homo sapiens
  CDR3 for alpha chain variable domain of TCR clone 198097 (TRAV36/DV7, TRAJ56)
CAGPAVELTF

SEQ ID NO: 396194 - protein, 13 aa, Homo sapiens
  CDR3 for beta chain variable domain of TCR clone 198097 (TRBV7-9, TRBJ2-7)
CASSFWSCYEQYF

SEQ ID NO: 396195 - protein, 14 aa, Homo sapiens
  CDR3 for alpha chain variable domain of TCR clone 198098 (TRAV13-2, TRAJ43)
CAEIPTYNNNDMRF

SEQ ID NO: 396196 - protein, 15 aa, Homo sapiens
  CDR3 for beta chain variable domain of TCR clone 198098 (TRBV11-2, TRBJ1-2)
CASSLEGVQRNGYTF

SEQ ID NO: 396197 - protein, 14 aa, Homo sapiens
  CDR3 for alpha chain variable domain of TCR clone 198099 (TRAV2, TRAJ9)
CAVEYRSGGFKTIF

SEQ ID NO: 396198 - protein, 15 aa, Homo sapiens
  CDR3 for beta chain variable domain of TCR clone 198099 (TRBV20-1, TRBJ2-7)
CSARDRVSGMDEQYF

SEQ ID NO: 396199 - protein, 14 aa, Homo sapiens
  CDR3 for alpha chain variable domain of TCR clone 198100 (TRAV2, TRAJ9)
CAVEDRSVGFKTIF

SEQ ID NO: 396200 - protein, 11 aa, Homo sapiens
  CDR3 for beta chain variable domain of TCR clone 198100 (TRBV7-9, TRBJ2-5)
CASSLGETQYF

SEQ ID NO: 396201 - protein, 14 aa, Homo sapiens
  CDR3 for alpha chain variable domain of TCR clone 198101 (TRAV27, TRAJ23)
CAGLSYNQGGKLIF

SEQ ID NO: 396202 - protein, 15 aa, Homo sapiens
  CDR3 for beta chain variable domain of TCR clone 198101 (TRBV7-2, TRBJ2-2)
CASRRPGQNTGELFF

SEQ ID NO: 396203 - protein, 18 aa, Homo sapiens
  CDR3 for alpha chain variable domain of TCR clone 198102 (TRAV14/DV4, TRAJ3)
CAMREGSGGYSSASKIIF

SEQ ID NO: 396204 - protein, 12 aa, Homo sapiens
  CDR3 for beta chain variable domain of TCR clone 198102 (TRBV11-3, TRBJ1-1)
CASSHRQGEAFL

SEQ ID NO: 396205 - protein, 11 aa, Homo sapiens
  CDR3 for alpha chain variable domain of TCR clone 198103 (TRAV2, TRAJ33)
CAVESNYQLIW

SEQ ID NO: 396206 - protein, 22 aa, Homo sapiens
  CDR3 for beta chain variable domain of TCR clone 198103 (TRBV6-1, TRBJ1-3)
CASVQGGGWKHHIFWRGKLAHC

SEQ ID NO: 396207 - protein, 13 aa, Homo sapiens
  CDR3 for alpha chain variable domain of TCR clone 198104 (TRAV26-2, TRAJ45)
CIPYRRRCCRTHL

SEQ ID NO: 396208 - protein, 20 aa, Homo sapiens
  CDR3 for beta chain variable domain of TCR clone 198104 (TRBV28, TRBJ2-1)
CASTPIGRSPGLAGGNEQFF

SEQ ID NO: 396209 - protein, 12 aa, Homo sapiens
  CDR3 for alpha chain variable domain of TCR clone 198105 (TRAV13-1, TRAJ21)
CAAKEGFNKFDF

SEQ ID NO: 396210 - protein, 14 aa, Homo sapiens
  CDR3 for beta chain variable domain of TCR clone 198105 (TRBV18, TRBJ2-7)
CASSPRGVAYEQYF

SEQ ID NO: 396211 - protein, 15 aa, Homo sapiens
  CDR3 for alpha chain variable domain of TCR clone 198106 (TRAV13-1, TRAJ3)
YAATPGYSSASKIIF

SEQ ID NO: 396212 - protein, 15 aa, Homo sapiens
  CDR3 for beta chain variable domain of TCR clone 198106 (TRBV20-1, TRBJ2-7)
CSARDRVSGMDEQYF

SEQ ID NO: 396213 - protein, 16 aa, Homo sapiens
  CDR3 for alpha chain variable domain of TCR clone 198107 (TRAV26-1, TRAJ53)
CIVRVAMGGSNYKLTF

SEQ ID NO: 396214 - protein, 16 aa, Homo sapiens
  CDR3 for beta chain variable domain of TCR clone 198107 (TRBV5-5, TRBJ2-2)
CASSGRREGATGELFF

SEQ ID NO: 396215 - protein, 12 aa, Homo sapiens
  CDR3 for alpha chain variable domain of TCR clone 198108 (TRAV1-2, TRAJ26)
CAVRYYGKNFVF

SEQ ID NO: 396216 - protein, 13 aa, Homo sapiens
  CDR3 for beta chain variable domain of TCR clone 198108 (TRBV7-9, TRBJ1-2)
CASSLKQNYGYTF

SEQ ID NO: 396217 - protein, 14 aa, Homo sapiens
  CDR3 for alpha chain variable domain of TCR clone 198109 (TRAV12-3, TRAJ35)
CAMSLIGFGNVLHC

SEQ ID NO: 396218 - protein, 12 aa, Homo sapiens
  CDR3 for beta chain variable domain of TCR clone 198109 (TRBV12-4, TRBJ1-1)
CASSLAGLQPFF

SEQ ID NO: 396219 - protein, 14 aa, Homo sapiens
  CDR3 for alpha chain variable domain of TCR clone 198110 (TRAV23/DV6, TRAJ22)
CAASVSGSARQLTF

SEQ ID NO: 396220 - protein, 14 aa, Homo sapiens
  CDR3 for beta chain variable domain of TCR clone 198110 (TRBV4-2, TRBJ2-1)
CASGLDRAYNEQFF

SEQ ID NO: 396221 - protein, 15 aa, Homo sapiens
  CDR3 for alpha chain variable domain of TCR clone 198111 (TRAV2, TRAJ9)
CAVEDRGTGGFKTIF

SEQ ID NO: 396222 - protein, 14 aa, Homo sapiens
  CDR3 for beta chain variable domain of TCR clone 198111 (TRBV7-2, TRBJ1-5)
CASSTQGAGQPQHF

SEQ ID NO: 396223 - protein, 11 aa, Homo sapiens
  CDR3 for alpha chain variable domain of TCR clone 198112 (TRAV12-2, TRAJ31)
CAVTRWARLMF

SEQ ID NO: 396224 - protein, 17 aa, Homo sapiens
  CDR3 for beta chain variable domain of TCR clone 198112 (TRBV7-8, TRBJ2-6)
CASSAGTGGAGANVLTF

SEQ ID NO: 396225 - protein, 17 aa, Homo sapiens
  CDR3 for alpha chain variable domain of TCR clone 198113 (TRAV13-1, TRAJ28)
CAASPPYSGAGSYQLTL

SEQ ID NO: 396226 - protein, 15 aa, Homo sapiens
  CDR3 for beta chain variable domain of TCR clone 198113 (TRBV6-3, TRBJ2-2)
CASSFLATLTGELFF

SEQ ID NO: 396227 - protein, 17 aa, Homo sapiens
  CDR3 for alpha chain variable domain of TCR clone 198114 (TRAV26-2, TRAJ42)
CILRDVGYGGSQGNRIF

SEQ ID NO: 396228 - protein, 16 aa, Homo sapiens
  CDR3 for beta chain variable domain of TCR clone 198114 (TRBV12-4, TRBJ2-7)
CASSWIGGTGTYEQYF

SEQ ID NO: 396229 - protein, 12 aa, Homo sapiens
  CDR3 for alpha chain variable domain of TCR clone 198115 (TRAV3, TRAJ20)
CAVRDPDYKLSF

SEQ ID NO: 396230 - protein, 18 aa, Homo sapiens
  CDR3 for beta chain variable domain of TCR clone 198115 (TRBV20-1, TRBJ2-3)
CSASGLAGGPGTTDTQYF

SEQ ID NO: 396231 - protein, 14 aa, Homo sapiens
  CDR3 for alpha chain variable domain of TCR clone 198116 (TRAV26-1, TRAJ45)
CIAVTGGGADGLTF

SEQ ID NO: 396232 - protein, 16 aa, Homo sapiens
  CDR3 for beta chain variable domain of TCR clone 198116 (TRBV12-5, TRBJ2-5)
CASGPRTSGNQETQYF

SEQ ID NO: 396233 - protein, 14 aa, Homo sapiens
  CDR3 for alpha chain variable domain of TCR clone 198117 (TRAV1-2, TRAJ27)
CAVTNNTNAGKSTF

SEQ ID NO: 396234 - protein, 17 aa, Homo sapiens
  CDR3 for beta chain variable domain of TCR clone 198117 (TRBV11-2, TRBJ2-1)
CASSLYPPGVEYNEQFF

SEQ ID NO: 396235 - protein, 15 aa, Homo sapiens
  CDR3 for alpha chain variable domain of TCR clone 198118 (TRAV25, TRAJ52)
CAGRPGGSSYGKLTF

SEQ ID NO: 396236 - protein, 17 aa, Homo sapiens
  CDR3 for beta chain variable domain of TCR clone 198118 (TRBV7-8, TRBJ2-6)
CASGAGAGGAGANVLTF

SEQ ID NO: 396237 - protein, 11 aa, Homo sapiens
  CDR3 for alpha chain variable domain of TCR clone 198119 (TRAV21, TRAJ11)
CAVNGYSTLTF

SEQ ID NO: 396238 - protein, 15 aa, Homo sapiens
  CDR3 for beta chain variable domain of TCR clone 198119 (TRBV19, TRBJ2-1)
CASSSPGVPLDEQFF

SEQ ID NO: 396239 - protein, 11 aa, Homo sapiens
  CDR3 for alpha chain variable domain of TCR clone 198120 (TRAV12-3, TRAJ43)
CAMSVSNDMRF

SEQ ID NO: 396240 - protein, 14 aa, Homo sapiens
  CDR3 for beta chain variable domain of TCR clone 198120 (TRBV12-5, TRBJ2-5)
CASGSRTHQGTQYF

SEQ ID NO: 396241 - protein, 11 aa, Homo sapiens
  CDR3 for alpha chain variable domain of TCR clone 198121 (TRAV12-2, TRAJ23)
CARGRGGKLIF

SEQ ID NO: 396242 - protein, 13 aa, Homo sapiens
  CDR3 for beta chain variable domain of TCR clone 198121 (TRBV7-2, TRBJ2-2)
CQQRTGAAGELFF

SEQ ID NO: 396243 - protein, 13 aa, Homo sapiens
  CDR3 for alpha chain variable domain of TCR clone 198122 (TRAV35, TRAJ37)
CAGHAGNTGKLIF

SEQ ID NO: 396244 - protein, 13 aa, Homo sapiens
  CDR3 for beta chain variable domain of TCR clone 198122 (TRBV11-2, TRBJ1-6)
CASSLAGVSPLHF

SEQ ID NO: 396245 - protein, 18 aa, Homo sapiens
  CDR3 for alpha chain variable domain of TCR clone 198123 (TRAV21, TRAJ52)
CAVRPSPAGGTSYGKLTF

SEQ ID NO: 396246 - protein, 17 aa, Homo sapiens
  CDR3 for beta chain variable domain of TCR clone 198123 (TRBV13, TRBJ2-3)
WASSLSRGAGGRNTQYF

SEQ ID NO: 396247 - protein, 15 aa, Homo sapiens
  CDR3 for alpha chain variable domain of TCR clone 198124 (TRAV17, TRAJ56)
CATDANTGDNSKLTF

SEQ ID NO: 396248 - protein, 12 aa, Homo sapiens
  CDR3 for beta chain variable domain of TCR clone 198124 (TRBV7-8, TRBJ2-7)
CASSLGDREQYF

SEQ ID NO: 396249 - protein, 12 aa, Homo sapiens
  CDR3 for alpha chain variable domain of TCR clone 198125 (TRAV12-2, TRAJ49)
CAVLNTGNQFYF

SEQ ID NO: 396250 - protein, 15 aa, Homo sapiens
  CDR3 for beta chain variable domain of TCR clone 198125 (TRBV6-5, TRBJ2-1)
CASSYDAGAGNEQFF

SEQ ID NO: 396251 - protein, 13 aa, Homo sapiens
  CDR3 for alpha chain variable domain of TCR clone 198126 (TRAV17, TRAJ9)
CATDGTGGFKTIF

SEQ ID NO: 396252 - protein, 13 aa, Homo sapiens
  CDR3 for beta chain variable domain of TCR clone 198126 (TRBV27, TRBJ2-1)
CASRTLGVGEQFF

SEQ ID NO: 396253 - protein, 14 aa, Homo sapiens
  CDR3 for alpha chain variable domain of TCR clone 198127 (TRAV1-2, TRAJ8)
CAVREDSGFQKLVF

SEQ ID NO: 396254 - protein, 14 aa, Homo sapiens
  CDR3 for beta chain variable domain of TCR clone 198127 (TRBV11-2, TRBJ2-3)
CASSRLARTDTQYF

SEQ ID NO: 396255 - protein, 11 aa, Homo sapiens
  CDR3 for alpha chain variable domain of TCR clone 198128 (TRAV21, TRAJ39)
RPRNAGNMLTF

SEQ ID NO: 396256 - protein, 16 aa, Homo sapiens
  CDR3 for beta chain variable domain of TCR clone 198128 (TRBV11-2, TRBJ2-7)
CASSPTTGGVSYEQYF

SEQ ID NO: 396257 - protein, 16 aa, Homo sapiens
  CDR3 for alpha chain variable domain of TCR clone 198129 (TRAV26-1, TRAJ23)
CIVRVANSNQGGELIF

SEQ ID NO: 396258 - protein, 16 aa, Homo sapiens
  CDR3 for beta chain variable domain of TCR clone 198129 (TRBV10-3, TRBJ2-1)
CAISGVGDGGGGEQFF

SEQ ID NO: 396259 - protein, 14 aa, Homo sapiens
  CDR3 for alpha chain variable domain of TCR clone 198130 (TRAV1-2, TRAJ16)
CAVNRISDGQKLLF

SEQ ID NO: 396260 - protein, 16 aa, Homo sapiens
  CDR3 for beta chain variable domain of TCR clone 198130 (TRBV12-4, TRBJ1-5)
CASSRPVGGSNQPQHF

SEQ ID NO: 396261 - protein, 12 aa, Homo sapiens
  CDR3 for alpha chain variable domain of TCR clone 198131 (TRAV8-3, TRAJ41)
CAVVLSGYALNF

SEQ ID NO: 396262 - protein, 17 aa, Homo sapiens
  CDR3 for beta chain variable domain of TCR clone 198131 (TRBV7-3, TRBJ2-2)
CASSLSGTSGGTGELFF

SEQ ID NO: 396263 - protein, 15 aa, Homo sapiens
  CDR3 for alpha chain variable domain of TCR clone 198132 (TRAV3, TRAJ36)
CAVRASQTGATNLFF

SEQ ID NO: 396264 - protein, 13 aa, Homo sapiens
  CDR3 for beta chain variable domain of TCR clone 198132 (TRBV10-3, TRBJ1-2)
CAISERDSYGYTF

SEQ ID NO: 396265 - protein, 13 aa, Homo sapiens
  CDR3 for alpha chain variable domain of TCR clone 198133 (TRAV27, TRAJ53)
CAGQGGSNYKLTF

SEQ ID NO: 396266 - protein, 13 aa, Homo sapiens
  CDR3 for beta chain variable domain of TCR clone 198133 (TRBV29-1, TRBJ1-1)
CSVESGFGTEAFC

SEQ ID NO: 396267 - protein, 15 aa, Homo sapiens
  CDR3 for alpha chain variable domain of TCR clone 198134 (TRAV13-1, TRAJ32)
CAASIYGGATNKLIF

SEQ ID NO: 396268 - protein, 16 aa, Homo sapiens
  CDR3 for beta chain variable domain of TCR clone 198134 (TRBV7-9, TRBJ2-1)
CASSDVAGGSYNEQFF

SEQ ID NO: 396269 - protein, 15 aa, Homo sapiens
  CDR3 for alpha chain variable domain of TCR clone 198135 (TRAV3, TRAJ22)
CAVRDRGGSARHLTF

SEQ ID NO: 396270 - protein, 15 aa, Homo sapiens
  CDR3 for beta chain variable domain of TCR clone 198135 (TRBV19, TRBJ2-5)
CASSIVRASQETQYF

SEQ ID NO: 396271 - protein, 14 aa, Homo sapiens
  CDR3 for alpha chain variable domain of TCR clone 198136 (TRAV12-3, TRAJ10)
SHLPLTGGGNKLTF

SEQ ID NO: 396272 - protein, 15 aa, Homo sapiens
  CDR3 for beta chain variable domain of TCR clone 198136 (TRBV7-2, TRBJ2-1)
CASSFRESSYNEQFF

SEQ ID NO: 396273 - protein, 15 aa, Homo sapiens
  CDR3 for alpha chain variable domain of TCR clone 198137 (TRAV3, TRAJ9)
CAVRDSNTGGFKTSF

SEQ ID NO: 396274 - protein, 16 aa, Homo sapiens
  CDR3 for beta chain variable domain of TCR clone 198137 (TRBV15, TRBJ2-5)
CATSPTTGQGMETQYF

SEQ ID NO: 396275 - protein, 13 aa, Homo sapiens
  CDR3 for alpha chain variable domain of TCR clone 198138 (TRAV13-1, TRAJ21)
CAASIYNFNKFYF

SEQ ID NO: 396276 - protein, 20 aa, Homo sapiens
  CDR3 for beta chain variable domain of TCR clone 198138 (TRBV7-8, TRBJ2-2)
CAGSHLFPGPTIHITGELFF

SEQ ID NO: 396277 - protein, 13 aa, Homo sapiens
  CDR3 for alpha chain variable domain of TCR clone 198139 (TRAV13-1, TRAJ6)
CAASKGGSYIPTF

SEQ ID NO: 396278 - protein, 15 aa, Homo sapiens
  CDR3 for beta chain variable domain of TCR clone 198139 (TRBV12-4, TRBJ1-1)
CARSGRTGMNTEAFF

SEQ ID NO: 396279 - protein, 15 aa, Homo sapiens
  CDR3 for alpha chain variable domain of TCR clone 198140 (TRAV8-3, TRAJ28)
CAVAYSGAGSYQLTF

SEQ ID NO: 396280 - protein, 13 aa, Homo sapiens
  CDR3 for beta chain variable domain of TCR clone 198140 (TRBV7-8, TRBJ2-7)
RRVRLTEMGEQYF

SEQ ID NO: 396281 - protein, 14 aa, Homo sapiens
  CDR3 for alpha chain variable domain of TCR clone 198141 (TRAV17, TRAJ53)
CATDAGGSNYKLTF

SEQ ID NO: 396282 - protein, 14 aa, Homo sapiens
  CDR3 for beta chain variable domain of TCR clone 198141 (TRBV5-1, TRBJ2-2)
CASSLGGGSGELFF

SEQ ID NO: 396283 - protein, 18 aa, Homo sapiens
  CDR3 for alpha chain variable domain of TCR clone 198142 (TRAV13-1, TRAJ52)
CAASKRSAGGPSYGKRTF

SEQ ID NO: 396284 - protein, 13 aa, Homo sapiens
  CDR3 for beta chain variable domain of TCR clone 198142 (TRBV12-4, TRBJ1-2)
CASSLRQGKGYTF

SEQ ID NO: 396285 - protein, 11 aa, Homo sapiens
  CDR3 for alpha chain variable domain of TCR clone 198143 (TRAV1-2, TRAJ31)
CAVKNNARLMF

SEQ ID NO: 396286 - protein, 15 aa, Homo sapiens
  CDR3 for beta chain variable domain of TCR clone 198143 (TRBV12-4, TRBJ2-5)
CASSPPTGLQETQYF

SEQ ID NO: 396287 - protein, 17 aa, Homo sapiens
  CDR3 for alpha chain variable domain of TCR clone 198144 (TRAV3, TRAJ6)
CAVRDGPRAGGSYIHTF

SEQ ID NO: 396288 - protein, 15 aa, Homo sapiens
  CDR3 for beta chain variable domain of TCR clone 198144 (TRBV20-1, TRBJ1-1)
CSASWDRFLNTEAFF

SEQ ID NO: 396289 - protein, 15 aa, Homo sapiens
  CDR3 for alpha chain variable domain of TCR clone 198145 (TRAV8-3, TRAJ45)
CASSYSGGGADGLTF

SEQ ID NO: 396290 - protein, 14 aa, Homo sapiens
  CDR3 for beta chain variable domain of TCR clone 198145 (TRBV7-2, TRBJ2-7)
CASSGLAGRGEQYF

SEQ ID NO: 396291 - protein, 15 aa, Homo sapiens
  CDR3 for alpha chain variable domain of TCR clone 198146 (TRAV35, TRAJ50)
CAGQLRKTSYDKVIF

SEQ ID NO: 396292 - protein, 12 aa, Homo sapiens
  CDR3 for beta chain variable domain of TCR clone 198146 (TRBV5-1, TRBJ2-5)
CARSLGLETQYF

SEQ ID NO: 396293 - protein, 18 aa, Homo sapiens
  CDR3 for alpha chain variable domain of TCR clone 198147 (TRAV3, TRAJ17)
CAVRARRGGRSCRQQANF

SEQ ID NO: 396294 - protein, 15 aa, Homo sapiens
  CDR3 for beta chain variable domain of TCR clone 198147 (TRBV5-4, TRBJ1-1)
CASSSLGWANTEAFF

SEQ ID NO: 396295 - protein, 12 aa, Homo sapiens
  CDR3 for alpha chain variable domain of TCR clone 198148 (TRAV12-3, TRAJ17)
CAMTLTGNKLTF

SEQ ID NO: 396296 - protein, 15 aa, Homo sapiens
  CDR3 for beta chain variable domain of TCR clone 198148 (TRBV5-1, TRBJ2-1)
CASSPPRAPYSEQSF

SEQ ID NO: 396297 - protein, 11 aa, Homo sapiens
  CDR3 for alpha chain variable domain of TCR clone 198149 (TRAV12-3, TRAJ43)
CAMSVSNDMRF

SEQ ID NO: 396298 - protein, 15 aa, Homo sapiens
  CDR3 for beta chain variable domain of TCR clone 198149 (TRBV4-2, TRBJ1-2)
CASSQRTGGRDGYTC

SEQ ID NO: 396299 - protein, 16 aa, Homo sapiens
  CDR3 for alpha chain variable domain of TCR clone 198150 (TRAV30, TRAJ24)
CGTEIVEADSWGKFQF

SEQ ID NO: 396300 - protein, 15 aa, Homo sapiens
  CDR3 for beta chain variable domain of TCR clone 198150 (TRBV18, TRBJ2-1)
CASLPDRGRDNEQFF

SEQ ID NO: 396301 - protein, 11 aa, Homo sapiens
  CDR3 for alpha chain variable domain of TCR clone 198151 (TRAV3, TRAJ21)
CAVGNFNKFYF

SEQ ID NO: 396302 - protein, 14 aa, Homo sapiens
  CDR3 for beta chain variable domain of TCR clone 198151 (TRBV27, TRBJ2-1)
CAGSIAETYNEQFF

SEQ ID NO: 396303 - protein, 12 aa, Homo sapiens
  CDR3 for alpha chain variable domain of TCR clone 198152 (TRAV13-1, TRAJ49)
CAASPMGNQFYF

SEQ ID NO: 396304 - protein, 15 aa, Homo sapiens
  CDR3 for beta chain variable domain of TCR clone 198152 (TRBV29-1, TRBJ2-1)
CSGRDRKSSYNEQFF

SEQ ID NO: 396305 - protein, 13 aa, Homo sapiens
  CDR3 for alpha chain variable domain of TCR clone 198153 (TRAV21, TRAJ45)
CAAPGGGADGLTF

SEQ ID NO: 396306 - protein, 14 aa, Homo sapiens
  CDR3 for beta chain variable domain of TCR clone 198153 (TRBV7-8, TRBJ2-5)
CASSATGGQETQYF

SEQ ID NO: 396307 - protein, 13 aa, Homo sapiens
  CDR3 for alpha chain variable domain of TCR clone 198154 (TRAV21, TRAJ27)
CAARPGNAGKSTF

SEQ ID NO: 396308 - protein, 20 aa, Homo sapiens
  CDR3 for beta chain variable domain of TCR clone 198154 (TRBV7-8, TRBJ2-2)
CASSQLFPGPTIHITGELFF

SEQ ID NO: 396309 - protein, 16 aa, Homo sapiens
  CDR3 for alpha chain variable domain of TCR clone 198155 (TRAV12-2, TRAJ45)
CAVNRGSGGGADGPTF

SEQ ID NO: 396310 - protein, 14 aa, Homo sapiens
  CDR3 for beta chain variable domain of TCR clone 198155 (TRBV23-1, TRBJ2-2)
EDRGVEKDTGGLFF

SEQ ID NO: 396311 - protein, 14 aa, Homo sapiens
  CDR3 for alpha chain variable domain of TCR clone 198156 (TRAV8-3, TRAJ36)
CTVGPITGANNLFF

SEQ ID NO: 396312 - protein, 15 aa, Homo sapiens
  CDR3 for beta chain variable domain of TCR clone 198156 (TRBV4-1, TRBJ2-1)
CASSQDPGNYNEQFF

SEQ ID NO: 396313 - protein, 15 aa, Homo sapiens
  CDR3 for alpha chain variable domain of TCR clone 198157 (TRAV3, TRAJ22)
CALRDRGGSARQLTL

SEQ ID NO: 396314 - protein, 17 aa, Homo sapiens
  CDR3 for beta chain variable domain of TCR clone 198157 (TRBV13, TRBJ2-3)
CASSLSRVAGGRNTQYF

SEQ ID NO: 396315 - protein, 13 aa, Homo sapiens
  CDR3 for alpha chain variable domain of TCR clone 198158 (TRAV2, TRAJ5)
CAVPDTGRRALTF

SEQ ID NO: 396316 - protein, 15 aa, Homo sapiens
  CDR3 for beta chain variable domain of TCR clone 198158 (TRBV7-2, TRBJ2-2)
CASSTRTGYTGELCF

SEQ ID NO: 396317 - protein, 13 aa, Homo sapiens
  CDR3 for alpha chain variable domain of TCR clone 198159 (TRAV24, TRAJ37)
CAFSPGNTGKLIF

SEQ ID NO: 396318 - protein, 15 aa, Homo sapiens
  CDR3 for beta chain variable domain of TCR clone 198159 (TRBV7-6, TRBJ2-5)
CASSKQTGPQETQYF

SEQ ID NO: 396319 - protein, 20 aa, Homo sapiens
  CDR3 for alpha chain variable domain of TCR clone 198160 (TRAV12-3, TRAJ49)
SPVIQPPTSVQWFTGNQFYF

SEQ ID NO: 396320 - protein, 13 aa, Homo sapiens
  CDR3 for beta chain variable domain of TCR clone 198160 (TRBV6-5, TRBJ2-7)
CASSWQGASEQYF

SEQ ID NO: 396321 - protein, 14 aa, Homo sapiens
  CDR3 for alpha chain variable domain of TCR clone 198161 (TRAV12-2, TRAJ17)
CAVLFKAAGNKLTF

SEQ ID NO: 396322 - protein, 14 aa, Homo sapiens
  CDR3 for beta chain variable domain of TCR clone 198161 (TRBV7-2, TRBJ2-7)
YASRSQGAAYEQYF

SEQ ID NO: 396323 - protein, 14 aa, Homo sapiens
  CDR3 for alpha chain variable domain of TCR clone 198162 (TRAV12-3, TRAJ10)
NHLPLTGGGNKLTF

SEQ ID NO: 396324 - protein, 16 aa, Homo sapiens
  CDR3 for beta chain variable domain of TCR clone 198162 (TRBV7-3, TRBJ2-2)
CASSLKRGTLSGELFF

SEQ ID NO: 396325 - protein, 15 aa, Homo sapiens
  CDR3 for alpha chain variable domain of TCR clone 198163 (TRAV34, TRAJ38)
CGADFTPGNNRKLIW

SEQ ID NO: 396326 - protein, 16 aa, Homo sapiens
  CDR3 for beta chain variable domain of TCR clone 198163 (TRBV12-5, TRBJ2-5)
FASGPRTSGNQETQYF

SEQ ID NO: 396327 - protein, 14 aa, Homo sapiens
  CDR3 for alpha chain variable domain of TCR clone 198164 (TRAV8-2, TRAJ4)
CVVSPSGGYNKLIF

SEQ ID NO: 396328 - protein, 16 aa, Homo sapiens
  CDR3 for beta chain variable domain of TCR clone 198164 (TRBV7-3, TRBJ2-1)
CSSSLEGYRSYNEQFF

SEQ ID NO: 396329 - protein, 13 aa, Homo sapiens
  CDR3 for alpha chain variable domain of TCR clone 198165 (TRAV29/DV5, TRAJ31)
CAASRNNNARLMS

SEQ ID NO: 396330 - protein, 12 aa, Homo sapiens
  CDR3 for beta chain variable domain of TCR clone 198165 (TRBV14, TRBJ2-7)
CASSLYKDEQYF

SEQ ID NO: 396331 - protein, 15 aa, Homo sapiens
  CDR3 for alpha chain variable domain of TCR clone 198166 (TRAV3, TRAJ4)
CAVRDGTGGYNKLIF

SEQ ID NO: 396332 - protein, 13 aa, Homo sapiens
  CDR3 for beta chain variable domain of TCR clone 198166 (TRBV20-1, TRBJ1-2)
CSARDQGAYGYTF

SEQ ID NO: 396333 - protein, 11 aa, Homo sapiens
  CDR3 for alpha chain variable domain of TCR clone 198167 (TRAV2, TRAJ13)
CASGGYQKGTF

SEQ ID NO: 396334 - protein, 13 aa, Homo sapiens
  CDR3 for beta chain variable domain of TCR clone 198167 (TRBV10-3, TRBJ1-2)
CAISERDSYGYTF

SEQ ID NO: 396335 - protein, 10 aa, Homo sapiens
  CDR3 for alpha chain variable domain of TCR clone 198168 (TRAV12-1, TRAJ33)
CVASNCQLIW

SEQ ID NO: 396336 - protein, 15 aa, Homo sapiens
  CDR3 for beta chain variable domain of TCR clone 198168 (TRBV5-4, TRBJ1-4)
CASSHGDGENEKLFF

SEQ ID NO: 396337 - protein, 17 aa, Homo sapiens
  CDR3 for alpha chain variable domain of TCR clone 198169 (TRAV8-4, TRAJ8)
CAVSDGEANTGFKKLVF

SEQ ID NO: 396338 - protein, 16 aa, Homo sapiens
  CDR3 for beta chain variable domain of TCR clone 198169 (TRBV3-1, TRBJ2-2)
CASSHYSGRSTGELFF

SEQ ID NO: 396339 - protein, 16 aa, Homo sapiens
  CDR3 for alpha chain variable domain of TCR clone 198170 (TRAV23/DV6, TRAJ21)
CAASSGGGTTSTNFTL

SEQ ID NO: 396340 - protein, 11 aa, Homo sapiens
  CDR3 for beta chain variable domain of TCR clone 198170 (TRBV7-8, TRBJ2-7)
CASSVSLEQYF

SEQ ID NO: 396341 - protein, 14 aa, Homo sapiens
  CDR3 for alpha chain variable domain of TCR clone 198171 (TRAV17, TRAJ15)
CATGPNQAGTALIL

SEQ ID NO: 396342 - protein, 15 aa, Homo sapiens
  CDR3 for beta chain variable domain of TCR clone 198171 (TRBV11-2, TRBJ2-2)
CASSSDRVNAGELFF

SEQ ID NO: 396343 - protein, 14 aa, Homo sapiens
  CDR3 for alpha chain variable domain of TCR clone 198172 (TRAV12-2, TRAJ17)
CAVNIKAAGNKLTF

SEQ ID NO: 396344 - protein, 14 aa, Homo sapiens
  CDR3 for beta chain variable domain of TCR clone 198172 (TRBV27, TRBJ2-1)
CAGSIAETYNEQFF

SEQ ID NO: 396345 - protein, 12 aa, Homo sapiens
  CDR3 for alpha chain variable domain of TCR clone 198173 (TRAV21, TRAJ24)
CAVEPGWGKFQF

SEQ ID NO: 396346 - protein, 15 aa, Homo sapiens
  CDR3 for beta chain variable domain of TCR clone 198173 (TRBV10-3, TRBJ2-3)
CAISLTSGGTDTQYF

SEQ ID NO: 396347 - protein, 14 aa, Homo sapiens
  CDR3 for alpha chain variable domain of TCR clone 198174 (TRAV20, TRAJ22)
CAVQVSGSARQLTF

SEQ ID NO: 396348 - protein, 14 aa, Homo sapiens
  CDR3 for beta chain variable domain of TCR clone 198174 (TRBV7-9, TRBJ2-5)
CASSLAPDQETQYF

SEQ ID NO: 396349 - protein, 14 aa, Homo sapiens
  CDR3 for alpha chain variable domain of TCR clone 198175 (TRAV12-1, TRAJ9)
CVVTGYTGGFKTIF

SEQ ID NO: 396350 - protein, 14 aa, Homo sapiens
  CDR3 for beta chain variable domain of TCR clone 198175 (TRBV7-9, TRBJ2-3)
CASSLEDGTDTQYF

SEQ ID NO: 396351 - protein, 13 aa, Homo sapiens
  CDR3 for alpha chain variable domain of TCR clone 198176 (TRAV12-3, TRAJ54)
CAMTLQGAQKLVF

SEQ ID NO: 396352 - protein, 15 aa, Homo sapiens
  CDR3 for beta chain variable domain of TCR clone 198176 (TRBV27, TRBJ2-1)
CASSNGGGSSNEQFF

SEQ ID NO: 396353 - protein, 12 aa, Homo sapiens
  CDR3 for alpha chain variable domain of TCR clone 198177 (TRAV3, TRAJ31)
CAVRDGNARLMF

SEQ ID NO: 396354 - protein, 12 aa, Homo sapiens
  CDR3 for beta chain variable domain of TCR clone 198177 (TRBV28, TRBJ2-7)
CASSFSSYEQYF

SEQ ID NO: 396355 - protein, 14 aa, Homo sapiens
  CDR3 for alpha chain variable domain of TCR clone 198178 (TRAV12-3, TRAJ10)
SHLPLTGGGNKLTF

SEQ ID NO: 396356 - protein, 17 aa, Homo sapiens
  CDR3 for beta chain variable domain of TCR clone 198178 (TRBV20-1, TRBJ2-6)
CSATRDRGPSGANVLTF

SEQ ID NO: 396357 - protein, 13 aa, Homo sapiens
  CDR3 for alpha chain variable domain of TCR clone 198179 (TRAV17, TRAJ9)
CATAITGGFKTIF

SEQ ID NO: 396358 - protein, 16 aa, Homo sapiens
  CDR3 for beta chain variable domain of TCR clone 198179 (TRBV15, TRBJ2-1)
CATRRNLAGGYNEQFF

SEQ ID NO: 396359 - protein, 13 aa, Homo sapiens
  CDR3 for alpha chain variable domain of TCR clone 198180 (TRAV8-6, TRAJ13)
CAVSSGGYQKVTF

SEQ ID NO: 396360 - protein, 14 aa, Homo sapiens
  CDR3 for beta chain variable domain of TCR clone 198180 (TRBV7-2, TRBJ2-7)
CASSPKTSFYEQYF

SEQ ID NO: 396361 - protein, 15 aa, Homo sapiens
  CDR3 for alpha chain variable domain of TCR clone 198181 (TRAV8-3, TRAJ45)
CASSYSGGGADGLTF

SEQ ID NO: 396362 - protein, 15 aa, Homo sapiens
  CDR3 for beta chain variable domain of TCR clone 198181 (TRBV7-8, TRBJ1-2)
CASSLVRDGGLGYTF

SEQ ID NO: 396363 - protein, 13 aa, Homo sapiens
  CDR3 for alpha chain variable domain of TCR clone 198182 (TRAV27, TRAJ8)
CAGGPTGFQKLVF

SEQ ID NO: 396364 - protein, 13 aa, Homo sapiens
  CDR3 for beta chain variable domain of TCR clone 198182 (TRBV7-3, TRBJ2-5)
CASSLDSYNEQYF

SEQ ID NO: 396365 - protein, 11 aa, Homo sapiens
  CDR3 for alpha chain variable domain of TCR clone 198183 (TRAV17, TRAJ29)
CAKWRRTHLLS

SEQ ID NO: 396366 - protein, 12 aa, Homo sapiens
  CDR3 for beta chain variable domain of TCR clone 198183 (TRBV7-9, TRBJ2-7)
CASSIKREEQYF

SEQ ID NO: 396367 - protein, 13 aa, Homo sapiens
  CDR3 for alpha chain variable domain of TCR clone 198184 (TRAV35, TRAJ42)
CAGFPGSQGNLIF

SEQ ID NO: 396368 - protein, 15 aa, Homo sapiens
  CDR3 for beta chain variable domain of TCR clone 198184 (TRBV19, TRBJ1-5)
CASSIPGGAGQPQHF

SEQ ID NO: 396369 - protein, 23 aa, Homo sapiens
  CDR3 for alpha chain variable domain of TCR clone 198185 (TRAV8-6, TRAJ38)
CAVRNAGNNHIQNPDPAGYQLRD

SEQ ID NO: 396370 - protein, 15 aa, Homo sapiens
  CDR3 for beta chain variable domain of TCR clone 198185 (TRBV4-1, TRBJ2-2)
CASSEGQGITGELFF

SEQ ID NO: 396371 - protein, 14 aa, Homo sapiens
  CDR3 for alpha chain variable domain of TCR clone 198186 (TRAV1-2, TRAJ8)
CAVREDTGFQKLEF

SEQ ID NO: 396372 - protein, 15 aa, Homo sapiens
  CDR3 for beta chain variable domain of TCR clone 198186 (TRBV12-4, TRBJ2-5)
CASSPPTGLQETQYF

SEQ ID NO: 396373 - protein, 16 aa, Homo sapiens
  CDR3 for alpha chain variable domain of TCR clone 198187 (TRAV22, TRAJ45)
CAVERGKRGGADGLTF

SEQ ID NO: 396374 - protein, 16 aa, Homo sapiens
  CDR3 for beta chain variable domain of TCR clone 198187 (TRBV7-9, TRBJ2-3)
CASSPWREVGTDTQYF

SEQ ID NO: 396375 - protein, 10 aa, Homo sapiens
  CDR3 for alpha chain variable domain of TCR clone 198188 (TRAV2, TRAJ33)
CAGKQLSVNL

SEQ ID NO: 396376 - protein, 15 aa, Homo sapiens
  CDR3 for beta chain variable domain of TCR clone 198188 (TRBV19, TRBJ1-1)
CASTSGQIQNTEAFF

SEQ ID NO: 396377 - protein, 13 aa, Homo sapiens
  CDR3 for alpha chain variable domain of TCR clone 198189 (TRAV2, TRAJ15)
CAVASQAGTALIF

SEQ ID NO: 396378 - protein, 15 aa, Homo sapiens
  CDR3 for beta chain variable domain of TCR clone 198189 (TRBV28, TRBJ2-7)
CASKAGGYTCSTSGR

SEQ ID NO: 396379 - protein, 15 aa, Homo sapiens
  CDR3 for alpha chain variable domain of TCR clone 198190 (TRAV21, TRAJ53)
CATLNSGGSNYKLTF

SEQ ID NO: 396380 - protein, 16 aa, Homo sapiens
  CDR3 for beta chain variable domain of TCR clone 198190 (TRBV12-4, TRBJ2-3)
CAISLRLAETTDTQYF

SEQ ID NO: 396381 - protein, 14 aa, Homo sapiens
  CDR3 for alpha chain variable domain of TCR clone 198191 (TRAV13-1, TRAJ13)
CAASRVGGYQKVTF

SEQ ID NO: 396382 - protein, 17 aa, Homo sapiens
  CDR3 for beta chain variable domain of TCR clone 198191 (TRBV15, TRBJ1-5)
CATSRAPPGTQNQPQHF

SEQ ID NO: 396383 - protein, 14 aa, Homo sapiens
  CDR3 for alpha chain variable domain of TCR clone 198192 (TRAV35, TRAJ41)
CAGQASVRRNALNF

SEQ ID NO: 396384 - protein, 20 aa, Homo sapiens
  CDR3 for beta chain variable domain of TCR clone 198192 (TRBV7-8, TRBJ2-2)
CASSHLFPGPTIHITGELFF

SEQ ID NO: 396385 - protein, 11 aa, Homo sapiens
  CDR3 for alpha chain variable domain of TCR clone 198193 (TRAV2, TRAJ13)
CASGGYQKDTF

SEQ ID NO: 396386 - protein, 13 aa, Homo sapiens
  CDR3 for beta chain variable domain of TCR clone 198193 (TRBV27, TRBJ1-4)
CASSLMGDEKLFF

SEQ ID NO: 396387 - protein, 15 aa, Homo sapiens
  CDR3 for alpha chain variable domain of TCR clone 198194 (TRAV8-1, TRAJ6)
CSVNAGAGGSYIPTF

SEQ ID NO: 396388 - protein, 14 aa, Homo sapiens
  CDR3 for beta chain variable domain of TCR clone 198194 (TRBV25-1, TRBJ1-6)
CASSLSADISPLHF

SEQ ID NO: 396389 - protein, 15 aa, Homo sapiens
  CDR3 for alpha chain variable domain of TCR clone 198195 (TRAV12-3, TRAJ48)
CAMNAKNFGNEKLTF

SEQ ID NO: 396390 - protein, 14 aa, Homo sapiens
  CDR3 for beta chain variable domain of TCR clone 198195 (TRBV2, TRBJ1-6)
CAISESRNNSPLYF

SEQ ID NO: 396391 - protein, 17 aa, Homo sapiens
  CDR3 for alpha chain variable domain of TCR clone 198196 (TRAV23/DV6, TRAJ57)
CAASSTLSQGGSEKLVF

SEQ ID NO: 396392 - protein, 14 aa, Homo sapiens
  CDR3 for beta chain variable domain of TCR clone 198196 (TRBV7-3, TRBJ1-1)
CASSLKGGNTEAFF

SEQ ID NO: 396393 - protein, 13 aa, Homo sapiens
  CDR3 for alpha chain variable domain of TCR clone 198197 (TRAV8-3, TRAJ28)
CAVGAVGGYQLTF

SEQ ID NO: 396394 - protein, 13 aa, Homo sapiens
  CDR3 for beta chain variable domain of TCR clone 198197 (TRBV29-1, TRBJ2-1)
CSVEGGRVNEQFF

SEQ ID NO: 396395 - protein, 15 aa, Homo sapiens
  CDR3 for alpha chain variable domain of TCR clone 198198 (TRAV16, TRAJ4)
CALEDPSGGYHKLIF

SEQ ID NO: 396396 - protein, 13 aa, Homo sapiens
  CDR3 for beta chain variable domain of TCR clone 198198 (TRBV7-3, TRBJ2-7)
CASSQAGGYEQYF

SEQ ID NO: 396397 - protein, 17 aa, Homo sapiens
  CDR3 for alpha chain variable domain of TCR clone 198199 (TRAV4, TRAJ18)
CLVGERSVGSTLGRLYF

SEQ ID NO: 396398 - protein, 13 aa, Homo sapiens
  CDR3 for beta chain variable domain of TCR clone 198199 (TRBV19, TRBJ1-1)
CASSGQVNTEAFF

SEQ ID NO: 396399 - protein, 14 aa, Homo sapiens
  CDR3 for alpha chain variable domain of TCR clone 198200 (TRAV1-2, TRAJ16)
CAVNRFSDGKKLLF

SEQ ID NO: 396400 - protein, 16 aa, Homo sapiens
  CDR3 for beta chain variable domain of TCR clone 198200 (TRBV7-3, TRBJ2-2)
CASSLKRGTLSGELFF

SEQ ID NO: 396401 - protein, 11 aa, Homo sapiens
  CDR3 for alpha chain variable domain of TCR clone 198201 (TRAV2, TRAJ33)
CAVDSNYQLIW

SEQ ID NO: 396402 - protein, 15 aa, Homo sapiens
  CDR3 for beta chain variable domain of TCR clone 198201 (TRBV10-3, TRBJ2-1)
CATNGGPGQGDEQFF

SEQ ID NO: 396403 - protein, 10 aa, Homo sapiens
  CDR3 for alpha chain variable domain of TCR clone 198202 (TRAV8-4, TRAJ12)
WRDSSYQLIF

SEQ ID NO: 396404 - protein, 16 aa, Homo sapiens
  CDR3 for beta chain variable domain of TCR clone 198202 (TRBV28, TRBJ2-7)
CASSLFFETGGPEQYF

SEQ ID NO: 396405 - protein, 13 aa, Homo sapiens
  CDR3 for alpha chain variable domain of TCR clone 198203 (TRAV27, TRAJ6)
CAGGTRGSYIPTF

SEQ ID NO: 396406 - protein, 13 aa, Homo sapiens
  CDR3 for beta chain variable domain of TCR clone 198203 (TRBV11-2, TRBJ2-5)
CAGSRGPSETQYF

SEQ ID NO: 396407 - protein, 16 aa, Homo sapiens
  CDR3 for alpha chain variable domain of TCR clone 198204 (TRAV20, TRAJ26)
CAVQHRRDNYGQNFVF

SEQ ID NO: 396408 - protein, 15 aa, Homo sapiens
  CDR3 for beta chain variable domain of TCR clone 198204 (TRBV11-2, TRBJ1-6)
CASTLRGTGNSPLHF

SEQ ID NO: 396409 - protein, 14 aa, Homo sapiens
  CDR3 for alpha chain variable domain of TCR clone 198205 (TRAV3, TRAJ22)
CCERPGGSARQLTF

SEQ ID NO: 396410 - protein, 13 aa, Homo sapiens
  CDR3 for beta chain variable domain of TCR clone 198205 (TRBV12-4, TRBJ1-2)
CASSVRQGKGYTF

SEQ ID NO: 396411 - protein, 14 aa, Homo sapiens
  CDR3 for alpha chain variable domain of TCR clone 198206 (TRAV21, TRAJ37)
CAVKGSSNTGKLIF

SEQ ID NO: 396412 - protein, 14 aa, Homo sapiens
  CDR3 for beta chain variable domain of TCR clone 198206 (TRBV7-2, TRBJ2-1)
CASSRGGARNDQFF

SEQ ID NO: 396413 - protein, 15 aa, Homo sapiens
  CDR3 for alpha chain variable domain of TCR clone 198207 (TRAV8-4, TRAJ9)
CAVSDLEGGGFKTIF

SEQ ID NO: 396414 - protein, 14 aa, Homo sapiens
  CDR3 for beta chain variable domain of TCR clone 198207 (TRBV19, TRBJ2-1)
CASPTFVLSGEQFF

SEQ ID NO: 396415 - protein, 12 aa, Homo sapiens
  CDR3 for alpha chain variable domain of TCR clone 198208 (TRAV1-1, TRAJ33)
CAASDSNYQLIW

SEQ ID NO: 396416 - protein, 18 aa, Homo sapiens
  CDR3 for beta chain variable domain of TCR clone 198208 (TRBV20-1, TRBJ2-2)
CRARVQTARPSGTGELFF

SEQ ID NO: 396417 - protein, 13 aa, Homo sapiens
  CDR3 for alpha chain variable domain of TCR clone 198209 (TRAV12-2, TRAJ6)
CAVNVSRKLHTYI

SEQ ID NO: 396418 - protein, 15 aa, Homo sapiens
  CDR3 for beta chain variable domain of TCR clone 198209 (TRBV9, TRBJ1-6)
CASSVAGTGDSPLHF

SEQ ID NO: 396419 - protein, 15 aa, Homo sapiens
  CDR3 for alpha chain variable domain of TCR clone 198210 (TRAV21, TRAJ24)
CAARSSTDSWGKLQF

SEQ ID NO: 396420 - protein, 15 aa, Homo sapiens
  CDR3 for beta chain variable domain of TCR clone 198210 (TRBV2, TRBJ2-1)
CASSEARSAYNEQFF

SEQ ID NO: 396421 - protein, 14 aa, Homo sapiens
  CDR3 for alpha chain variable domain of TCR clone 198211 (TRAV26-1, TRAJ34)
CIVRVAYKTDKPIF

SEQ ID NO: 396422 - protein, 15 aa, Homo sapiens
  CDR3 for beta chain variable domain of TCR clone 198211 (TRBV20-1, TRBJ2-7)
CSARVPAAYFYEQYF

SEQ ID NO: 396423 - protein, 15 aa, Homo sapiens
  CDR3 for alpha chain variable domain of TCR clone 198212 (TRAV13-1, TRAJ5)
CAASKADTGRRALTF

SEQ ID NO: 396424 - protein, 15 aa, Homo sapiens
  CDR3 for beta chain variable domain of TCR clone 198212 (TRBV19, TRBJ2-1)
CASSMGWNSNNDQFF

SEQ ID NO: 396425 - protein, 15 aa, Homo sapiens
  CDR3 for alpha chain variable domain of TCR clone 198213 (TRAV21, TRAJ53)
CATLNSGGSNYKLTF

SEQ ID NO: 396426 - protein, 15 aa, Homo sapiens
  CDR3 for beta chain variable domain of TCR clone 198213 (TRBV5-1, TRBJ2-1)
CASSPPRATYNEQFF

SEQ ID NO: 396427 - protein, 15 aa, Homo sapiens
  CDR3 for alpha chain variable domain of TCR clone 198214 (TRAV29/DV5, TRAJ29)
CAASERSSGTTPLVF

SEQ ID NO: 396428 - protein, 17 aa, Homo sapiens
  CDR3 for beta chain variable domain of TCR clone 198214 (TRBV4-1, TRBJ1-4)
CASSQEGPRGVEEKLFC

SEQ ID NO: 396429 - protein, 15 aa, Homo sapiens
  CDR3 for alpha chain variable domain of TCR clone 198215 (TRAV21, TRAJ53)
CATLNSGGSNYKMTF

SEQ ID NO: 396430 - protein, 13 aa, Homo sapiens
  CDR3 for beta chain variable domain of TCR clone 198215 (TRBV11-2, TRBJ2-7)
CASSGTRPYEQYF

SEQ ID NO: 396431 - protein, 14 aa, Homo sapiens
  CDR3 for alpha chain variable domain of TCR clone 198216 (TRAV14/DV4, TRAJ34)
CAMRESRPHRQAHL

SEQ ID NO: 396432 - protein, 14 aa, Homo sapiens
  CDR3 for beta chain variable domain of TCR clone 198216 (TRBV19, TRBJ2-1)
CASPTFVLSGEQFF

SEQ ID NO: 396433 - protein, 13 aa, Homo sapiens
  CDR3 for alpha chain variable domain of TCR clone 198217 (TRAV12-3, TRAJ31)
CAMSANNNARLMF

SEQ ID NO: 396434 - protein, 16 aa, Homo sapiens
  CDR3 for beta chain variable domain of TCR clone 198217 (TRBV7-9, TRBJ1-2)
CACSLGFSSGEDGYTV

SEQ ID NO: 396435 - protein, 12 aa, Homo sapiens
  CDR3 for alpha chain variable domain of TCR clone 198218 (TRAV1-1, TRAJ33)
CAASDSNCQLIW

SEQ ID NO: 396436 - protein, 18 aa, Homo sapiens
  CDR3 for beta chain variable domain of TCR clone 198218 (TRBV20-1, TRBJ2-2)
CSARVQTARPSGTGELFF

SEQ ID NO: 396437 - protein, 14 aa, Homo sapiens
  CDR3 for alpha chain variable domain of TCR clone 198219 (TRAV13-1, TRAJ45)
CAAIGGGGADGLTF

SEQ ID NO: 396438 - protein, 14 aa, Homo sapiens
  CDR3 for beta chain variable domain of TCR clone 198219 (TRBV7-2, TRBJ2-7)
CASRSQGAAYEQYF

SEQ ID NO: 396439 - protein, 13 aa, Homo sapiens
  CDR3 for alpha chain variable domain of TCR clone 198220 (TRAV8-3, TRAJ28)
CAVGEVGSYELTF

SEQ ID NO: 396440 - protein, 14 aa, Homo sapiens
  CDR3 for beta chain variable domain of TCR clone 198220 (TRBV7-2, TRBJ2-7)
CASRSQGAAYEQYF

SEQ ID NO: 396441 - protein, 14 aa, Homo sapiens
  CDR3 for alpha chain variable domain of TCR clone 198221 (TRAV1-2, TRAJ16)
CAVNRFSDGQKLLF

SEQ ID NO: 396442 - protein, 12 aa, Homo sapiens
  CDR3 for beta chain variable domain of TCR clone 198221 (TRBV24-1, TRBJ2-7)
CATEGDSNEQYF

SEQ ID NO: 396443 - protein, 13 aa, Homo sapiens
  CDR3 for alpha chain variable domain of TCR clone 198222 (TRAV27, TRAJ45)
CRSSGGGVDGLTF

SEQ ID NO: 396444 - protein, 13 aa, Homo sapiens
  CDR3 for beta chain variable domain of TCR clone 198222 (TRBV4-1, TRBJ2-1)
CASSQAGGDEQFF

SEQ ID NO: 396445 - protein, 12 aa, Homo sapiens
  CDR3 for alpha chain variable domain of TCR clone 198223 (TRAV3, TRAJ27)
CAVRDKAGKSTC

SEQ ID NO: 396446 - protein, 14 aa, Homo sapiens
  CDR3 for beta chain variable domain of TCR clone 198223 (TRBV5-1, TRBJ1-2)
CASSVDSTNYGYTF

SEQ ID NO: 396447 - protein, 14 aa, Homo sapiens
  CDR3 for alpha chain variable domain of TCR clone 198224 (TRAV21, TRAJ10)
CAVMPIGFGNVLHC

SEQ ID NO: 396448 - protein, 12 aa, Homo sapiens
  CDR3 for beta chain variable domain of TCR clone 198224 (TRBV7-9, TRBJ2-7)
CASSIKREEQYF

SEQ ID NO: 396449 - protein, 13 aa, Homo sapiens
  CDR3 for alpha chain variable domain of TCR clone 198225 (TRAV30, TRAJ49)
CGTESQPVTSSIL

SEQ ID NO: 396450 - protein, 13 aa, Homo sapiens
  CDR3 for beta chain variable domain of TCR clone 198225 (TRBV4-1, TRBJ2-2)
CASSQENTGELFF

SEQ ID NO: 396451 - protein, 16 aa, Homo sapiens
  CDR3 for alpha chain variable domain of TCR clone 198226 (TRAV3, TRAJ37)
FAVRPHGSGTTGKLIF

SEQ ID NO: 396452 - protein, 16 aa, Homo sapiens
  CDR3 for beta chain variable domain of TCR clone 198226 (TRBV9, TRBJ1-2)
CASSVEEKVSPYGYTF

SEQ ID NO: 396453 - protein, 15 aa, Homo sapiens
  CDR3 for alpha chain variable domain of TCR clone 198227 (TRAV25, TRAJ53)
CPTSNSGGSNYKLTF

SEQ ID NO: 396454 - protein, 14 aa, Homo sapiens
  CDR3 for beta chain variable domain of TCR clone 198227 (TRBV7-2, TRBJ2-7)
CASSLRWEVNEQYF

SEQ ID NO: 396455 - protein, 13 aa, Homo sapiens
  CDR3 for alpha chain variable domain of TCR clone 198228 (TRAV27, TRAJ37)
CAGGPSNTGKLIF

SEQ ID NO: 396456 - protein, 14 aa, Homo sapiens
  CDR3 for beta chain variable domain of TCR clone 198228 (TRBV7-8, TRBJ1-5)
CASSLGACNQPQHF

SEQ ID NO: 396457 - protein, 12 aa, Homo sapiens
  CDR3 for alpha chain variable domain of TCR clone 198229 (TRAV38-1, TRAJ32)
CAPLGDTNKLIF

SEQ ID NO: 396458 - protein, 14 aa, Homo sapiens
  CDR3 for beta chain variable domain of TCR clone 198229 (TRBV29-1, TRBJ2-5)
CSVETSGSGETQYF

SEQ ID NO: 396459 - protein, 12 aa, Homo sapiens
  CDR3 for alpha chain variable domain of TCR clone 198230 (TRAV22, TRAJ22)
CAPGGSARQLTF

SEQ ID NO: 396460 - protein, 14 aa, Homo sapiens
  CDR3 for beta chain variable domain of TCR clone 198230 (TRBV12-5, TRBJ2-5)
CASGSRTHQETQYF

SEQ ID NO: 396461 - protein, 17 aa, Homo sapiens
  CDR3 for alpha chain variable domain of TCR clone 198231 (TRAV23/DV6, TRAJ58)
CAARLLRGETSGSRLTF

SEQ ID NO: 396462 - protein, 13 aa, Homo sapiens
  CDR3 for beta chain variable domain of TCR clone 198231 (TRBV6-4, TRBJ1-5)
CASSADLNQPHHF

SEQ ID NO: 396463 - protein, 15 aa, Homo sapiens
  CDR3 for alpha chain variable domain of TCR clone 198232 (TRAV12-3, TRAJ52)
CNGGAGGTSYGKLTF

SEQ ID NO: 396464 - protein, 12 aa, Homo sapiens
  CDR3 for beta chain variable domain of TCR clone 198232 (TRBV11-2, TRBJ2-2)
CASSLGGGELFF

SEQ ID NO: 396465 - protein, 16 aa, Homo sapiens
  CDR3 for alpha chain variable domain of TCR clone 198233 (TRAV30, TRAJ26)
CGTESVGDNYGQNFVF

SEQ ID NO: 396466 - protein, 13 aa, Homo sapiens
  CDR3 for beta chain variable domain of TCR clone 198233 (TRBV19, TRBJ1-2)
CASGISEDYGYTF

SEQ ID NO: 396467 - protein, 15 aa, Homo sapiens
  CDR3 for alpha chain variable domain of TCR clone 198234 (TRAV17, TRAJ57)
CATGPSQGGSEKLVF

SEQ ID NO: 396468 - protein, 15 aa, Homo sapiens
  CDR3 for beta chain variable domain of TCR clone 198234 (TRBV9, TRBJ1-6)
CASSVAGTEDSPLHF

SEQ ID NO: 396469 - protein, 14 aa, Homo sapiens
  CDR3 for alpha chain variable domain of TCR clone 198235 (TRAV12-2, TRAJ13)
CAVKKTGGYQKVTF

SEQ ID NO: 396470 - protein, 15 aa, Homo sapiens
  CDR3 for beta chain variable domain of TCR clone 198235 (TRBV28, TRBJ2-1)
CASRKTGTAYNEQFF

SEQ ID NO: 396471 - protein, 13 aa, Homo sapiens
  CDR3 for alpha chain variable domain of TCR clone 198236 (TRAV2, TRAJ40)
CAVVTSGTYKYIF

SEQ ID NO: 396472 - protein, 15 aa, Homo sapiens
  CDR3 for beta chain variable domain of TCR clone 198236 (TRBV7-2, TRBJ2-1)
CASRKTGSSYNEQFF

SEQ ID NO: 396473 - protein, 14 aa, Homo sapiens
  CDR3 for alpha chain variable domain of TCR clone 198237 (TRAV12-2, TRAJ13)
CAVKKTGGYQKVTF

SEQ ID NO: 396474 - protein, 15 aa, Homo sapiens
  CDR3 for beta chain variable domain of TCR clone 198237 (TRBV27, TRBJ2-1)
CASSNGGGSSSEQFF

SEQ ID NO: 396475 - protein, 13 aa, Homo sapiens
  CDR3 for alpha chain variable domain of TCR clone 198238 (TRAV23/DV6, TRAJ22)
CPPYSGSARQLTF

SEQ ID NO: 396476 - protein, 15 aa, Homo sapiens
  CDR3 for beta chain variable domain of TCR clone 198238 (TRBV20-1, TRBJ2-7)
CSARVPAAYFYEQYF

SEQ ID NO: 396477 - protein, 10 aa, Homo sapiens
  CDR3 for alpha chain variable domain of TCR clone 198239 (TRAV8-3, TRAJ43)
CAVALADTRF

SEQ ID NO: 396478 - protein, 14 aa, Homo sapiens
  CDR3 for beta chain variable domain of TCR clone 198239 (TRBV4-2, TRBJ2-1)
CASGLDRAYNEQFF

SEQ ID NO: 396479 - protein, 17 aa, Homo sapiens
  CDR3 for alpha chain variable domain of TCR clone 198240 (TRAV3, TRAJ6)
CAVRDGPRAGGSYIPTF

SEQ ID NO: 396480 - protein, 13 aa, Homo sapiens
  CDR3 for beta chain variable domain of TCR clone 198240 (TRBV7-9, TRBJ1-2)
CASSLKQNYGDTF

SEQ ID NO: 396481 - protein, 16 aa, Homo sapiens
  CDR3 for alpha chain variable domain of TCR clone 198241 (TRAV30, TRAJ24)
CGTEIVDADCWGKFQF

SEQ ID NO: 396482 - protein, 15 aa, Homo sapiens
  CDR3 for beta chain variable domain of TCR clone 198241 (TRBV6-3, TRBJ2-7)
CASSSPGTVFYEQYF

SEQ ID NO: 396483 - protein, 11 aa, Homo sapiens
  CDR3 for alpha chain variable domain of TCR clone 198242 (TRAV4, TRAJ23)
FLVAPGGKLIF

SEQ ID NO: 396484 - protein, 13 aa, Homo sapiens
  CDR3 for beta chain variable domain of TCR clone 198242 (TRBV7-9, TRBJ1-2)
CASSLKQNYGYTF

SEQ ID NO: 396485 - protein, 14 aa, Homo sapiens
  CDR3 for alpha chain variable domain of TCR clone 198243 (TRAV16, TRAJ58)
CALFKETSGSRLTL

SEQ ID NO: 396486 - protein, 15 aa, Homo sapiens
  CDR3 for beta chain variable domain of TCR clone 198243 (TRBV9, TRBJ1-6)
CASSVAGTGDSPLHF

SEQ ID NO: 396487 - protein, 19 aa, Homo sapiens
  CDR3 for alpha chain variable domain of TCR clone 198244 (TRAV1-1, TRAJ37)
CAVPCSGRYGSGNTGQLIF

SEQ ID NO: 396488 - protein, 14 aa, Homo sapiens
  CDR3 for beta chain variable domain of TCR clone 198244 (TRBV7-6, TRBJ2-7)
CASSLGDRGYEQYF

SEQ ID NO: 396489 - protein, 11 aa, Homo sapiens
  CDR3 for alpha chain variable domain of TCR clone 198245 (TRAV35, TRAJ34)
CWARNTDKLIF

SEQ ID NO: 396490 - protein, 13 aa, Homo sapiens
  CDR3 for beta chain variable domain of TCR clone 198245 (TRBV10-3, TRBJ2-7)
CASKLAVNCEQYF

SEQ ID NO: 396491 - protein, 23 aa, Homo sapiens
  CDR3 for alpha chain variable domain of TCR clone 198246 (TRAV26-1, TRAJ38)
CIADNAGNNRIQNPDPAAYQLRD

SEQ ID NO: 396492 - protein, 13 aa, Homo sapiens
  CDR3 for beta chain variable domain of TCR clone 198246 (TRBV20-1, TRBJ1-1)
CSARGGGNTEAFF

SEQ ID NO: 396493 - protein, 12 aa, Homo sapiens
  CDR3 for alpha chain variable domain of TCR clone 198247 (TRAV12-3, TRAJ17)
CALTLTGNQLTF

SEQ ID NO: 396494 - protein, 15 aa, Homo sapiens
  CDR3 for beta chain variable domain of TCR clone 198247 (TRBV20-1, TRBJ2-7)
CSARDRVSGMDEQYF

SEQ ID NO: 396495 - protein, 15 aa, Homo sapiens
  CDR3 for alpha chain variable domain of TCR clone 198248 (TRAV21, TRAJ32)
CAAAPYSGATNKLIF

SEQ ID NO: 396496 - protein, 17 aa, Homo sapiens
  CDR3 for beta chain variable domain of TCR clone 198248 (TRBV18, TRBJ2-3)
CASSPFGDGGFTDTQYF

SEQ ID NO: 396497 - protein, 14 aa, Homo sapiens
  CDR3 for alpha chain variable domain of TCR clone 198249 (TRAV1-2, TRAJ16)
CAVNRFSDGQKLLF

SEQ ID NO: 396498 - protein, 14 aa, Homo sapiens
  CDR3 for beta chain variable domain of TCR clone 198249 (TRBV20-1, TRBJ1-5)
CSAPGTGVGQTQHF

SEQ ID NO: 396499 - protein, 14 aa, Homo sapiens
  CDR3 for alpha chain variable domain of TCR clone 198250 (TRAV12-1, TRAJ22)
CVVTYRGSARQLTF

SEQ ID NO: 396500 - protein, 15 aa, Homo sapiens
  CDR3 for beta chain variable domain of TCR clone 198250 (TRBV12-4, TRBJ2-1)
CASSLGTSAVNEQFF

SEQ ID NO: 396501 - protein, 11 aa, Homo sapiens
  CDR3 for alpha chain variable domain of TCR clone 198251 (TRAV2, TRAJ33)
CAVDSNYQLIW

SEQ ID NO: 396502 - protein, 14 aa, Homo sapiens
  CDR3 for beta chain variable domain of TCR clone 198251 (TRBV2, TRBJ2-7)
CASTVGRSSYEQYF

SEQ ID NO: 396503 - protein, 14 aa, Homo sapiens
  CDR3 for alpha chain variable domain of TCR clone 198252 (TRAV13-2, TRAJ15)
CAENPNQAGTPLIF

SEQ ID NO: 396504 - protein, 16 aa, Homo sapiens
  CDR3 for beta chain variable domain of TCR clone 198252 (TRBV12-4, TRBJ1-2)
CASSPTATGKTRGYTF

SEQ ID NO: 396505 - protein, 13 aa, Homo sapiens
  CDR3 for alpha chain variable domain of TCR clone 198253 (TRAV1-2, TRAJ9)
CAALNTGGFKTIF

SEQ ID NO: 396506 - protein, 15 aa, Homo sapiens
  CDR3 for beta chain variable domain of TCR clone 198253 (TRBV6-1, TRBJ2-5)
CASSEGWGIQETQYF

SEQ ID NO: 396507 - protein, 13 aa, Homo sapiens
  CDR3 for alpha chain variable domain of TCR clone 198254 (TRAV3, TRAJ7)
CAVSSYGNNRLAF

SEQ ID NO: 396508 - protein, 11 aa, Homo sapiens
  CDR3 for beta chain variable domain of TCR clone 198254 (TRBV29-1, TRBJ2-5)
CSEDRTGTQYF

SEQ ID NO: 396509 - protein, 13 aa, Homo sapiens
  CDR3 for alpha chain variable domain of TCR clone 198255 (TRAV12-1, TRAJ26)
SATYLYYGQDFVF

SEQ ID NO: 396510 - protein, 15 aa, Homo sapiens
  CDR3 for beta chain variable domain of TCR clone 198255 (TRBV5-1, TRBJ2-6)
CASSLDPSGANVLTF

SEQ ID NO: 396511 - protein, 14 aa, Homo sapiens
  CDR3 for alpha chain variable domain of TCR clone 198256 (TRAV13-1, TRAJ35)
CAASKGCFGNVLHC

SEQ ID NO: 396512 - protein, 13 aa, Homo sapiens
  CDR3 for beta chain variable domain of TCR clone 198256 (TRBV7-3, TRBJ1-1)
CASSQDWGAKAFF

SEQ ID NO: 396513 - protein, 13 aa, Homo sapiens
  CDR3 for alpha chain variable domain of TCR clone 198257 (TRAV21, TRAJ47)
CAVSGLYGHKLVF

SEQ ID NO: 396514 - protein, 17 aa, Homo sapiens
  CDR3 for beta chain variable domain of TCR clone 198257 (TRBV15, TRBJ2-3)
CATSGTTGEEGTDTQYF

SEQ ID NO: 396515 - protein, 16 aa, Homo sapiens
  CDR3 for alpha chain variable domain of TCR clone 198258 (TRAV30, TRAJ24)
CGTEIVGAERWGKFQF

SEQ ID NO: 396516 - protein, 14 aa, Homo sapiens
  CDR3 for beta chain variable domain of TCR clone 198258 (TRBV12-5, TRBJ2-5)
CASGSRTHQETQYF

SEQ ID NO: 396517 - protein, 14 aa, Homo sapiens
  CDR3 for alpha chain variable domain of TCR clone 198259 (TRAV9-2, TRAJ39)
CALYIYNAGNMLTF

SEQ ID NO: 396518 - protein, 14 aa, Homo sapiens
  CDR3 for beta chain variable domain of TCR clone 198259 (TRBV7-2, TRBJ1-5)
CASSRDGSNQPQHF

SEQ ID NO: 396519 - protein, 12 aa, Homo sapiens
  CDR3 for alpha chain variable domain of TCR clone 198260 (TRAV12-3, TRAJ17)
CAMTLTGNKLTF

SEQ ID NO: 396520 - protein, 15 aa, Homo sapiens
  CDR3 for beta chain variable domain of TCR clone 198260 (TRBV7-9, TRBJ1-6)
CASSSPGRGNSPIHF

SEQ ID NO: 396521 - protein, 12 aa, Homo sapiens
  CDR3 for alpha chain variable domain of TCR clone 198261 (TRAV12-3, TRAJ34)
CSMGYNTDKLIF

SEQ ID NO: 396522 - protein, 14 aa, Homo sapiens
  CDR3 for beta chain variable domain of TCR clone 198261 (TRBV4-1, TRBJ2-2)
CASSQAVNTGELFF

SEQ ID NO: 396523 - protein, 11 aa, Homo sapiens
  CDR3 for alpha chain variable domain of TCR clone 198262 (TRAV1-2, TRAJ20)
CAVANDYKLSF

SEQ ID NO: 396524 - protein, 13 aa, Homo sapiens
  CDR3 for beta chain variable domain of TCR clone 198262 (TRBV19, TRBJ1-1)
CASSITGESEAFF

SEQ ID NO: 396525 - protein, 15 aa, Homo sapiens
  CDR3 for alpha chain variable domain of TCR clone 198263 (TRAV13-1, TRAJ32)
CTASIYGGATNKLIF

SEQ ID NO: 396526 - protein, 12 aa, Homo sapiens
  CDR3 for beta chain variable domain of TCR clone 198263 (TRBV7-6, TRBJ2-3)
CASSTGTDTQYF

SEQ ID NO: 396527 - protein, 12 aa, Homo sapiens
  CDR3 for alpha chain variable domain of TCR clone 198264 (TRAV12-3, TRAJ17)
CAMTLTGNKLTF

SEQ ID NO: 396528 - protein, 16 aa, Homo sapiens
  CDR3 for beta chain variable domain of TCR clone 198264 (TRBV19, TRBJ2-1)
CASSKAGPSSYNKQFF

SEQ ID NO: 396529 - protein, 16 aa, Homo sapiens
  CDR3 for alpha chain variable domain of TCR clone 198265 (TRAV30, TRAJ24)
CGTEIVDADSWGKFQF

SEQ ID NO: 396530 - protein, 13 aa, Homo sapiens
  CDR3 for beta chain variable domain of TCR clone 198265 (TRBV7-9, TRBJ2-3)
CASRPGSTDTQYF

SEQ ID NO: 396531 - protein, 14 aa, Homo sapiens
  CDR3 for alpha chain variable domain of TCR clone 198266 (TRAV26-1, TRAJ49)
CIVRPSNTGNKFYF

SEQ ID NO: 396532 - protein, 15 aa, Homo sapiens
  CDR3 for beta chain variable domain of TCR clone 198266 (TRBV19, TRBJ1-1)
CASMGFRDVNTEAFF

SEQ ID NO: 396533 - protein, 14 aa, Homo sapiens
  CDR3 for alpha chain variable domain of TCR clone 198267 (TRAV12-2, TRAJ5)
CAVNRSTGRRALTF

SEQ ID NO: 396534 - protein, 12 aa, Homo sapiens
  CDR3 for beta chain variable domain of TCR clone 198267 (TRBV19, TRBJ1-5)
CASSIAQQPQHF

SEQ ID NO: 396535 - protein, 11 aa, Homo sapiens
  CDR3 for alpha chain variable domain of TCR clone 198268 (TRAV2, TRAJ13)
CASGGYQKVTF

SEQ ID NO: 396536 - protein, 17 aa, Homo sapiens
  CDR3 for beta chain variable domain of TCR clone 198268 (TRBV7-3, TRBJ2-3)
CASSLMKRRRGADTQYF

SEQ ID NO: 396537 - protein, 13 aa, Homo sapiens
  CDR3 for alpha chain variable domain of TCR clone 198269 (TRAV12-3, TRAJ7)
CAMTPYGNNRLAF

SEQ ID NO: 396538 - protein, 13 aa, Homo sapiens
  CDR3 for beta chain variable domain of TCR clone 198269 (TRBV20-1, TRBJ1-1)
SSARVGGNTEAFF

SEQ ID NO: 396539 - protein, 11 aa, Homo sapiens
  CDR3 for alpha chain variable domain of TCR clone 198270 (TRAV8-2, TRAJ26)
CVVTLLLGSEF

SEQ ID NO: 396540 - protein, 14 aa, Homo sapiens
  CDR3 for beta chain variable domain of TCR clone 198270 (TRBV11-2, TRBJ2-2)
CQQRGQGECRELFF

SEQ ID NO: 396541 - protein, 14 aa, Homo sapiens
  CDR3 for alpha chain variable domain of TCR clone 198271 (TRAV2, TRAJ29)
CAGPFQYGNTPLVF

SEQ ID NO: 396542 - protein, 15 aa, Homo sapiens
  CDR3 for beta chain variable domain of TCR clone 198271 (TRBV7-9, TRBJ1-5)
CASSQGHQPNQPQHF

SEQ ID NO: 396543 - protein, 13 aa, Homo sapiens
  CDR3 for alpha chain variable domain of TCR clone 198272 (TRAV13-1, TRAJ21)
CAASIYNFNKFYF

SEQ ID NO: 396544 - protein, 15 aa, Homo sapiens
  CDR3 for beta chain variable domain of TCR clone 198272 (TRBV7-8, TRBJ2-1)
CASSLAGGLYNEQFF

SEQ ID NO: 396545 - protein, 15 aa, Homo sapiens
  CDR3 for alpha chain variable domain of TCR clone 198273 (TRAV8-3, TRAJ27)
CAVGPSKTNAGKSTL

SEQ ID NO: 396546 - protein, 15 aa, Homo sapiens
  CDR3 for beta chain variable domain of TCR clone 198273 (TRBV7-2, TRBJ2-1)
CASSSGLAGGNEQFL

SEQ ID NO: 396547 - protein, 17 aa, Homo sapiens
  CDR3 for alpha chain variable domain of TCR clone 198274 (TRAV17, TRAJ52)
CATDMNAGGTSYGKLTF

SEQ ID NO: 396548 - protein, 15 aa, Homo sapiens
  CDR3 for beta chain variable domain of TCR clone 198274 (TRBV28, TRBJ2-7)
CASSPGGRGFYEQYF

SEQ ID NO: 396549 - protein, 14 aa, Homo sapiens
  CDR3 for alpha chain variable domain of TCR clone 198275 (TRAV12-1, TRAJ46)
CVVTAKSSGDKLTF

SEQ ID NO: 396550 - protein, 17 aa, Homo sapiens
  CDR3 for beta chain variable domain of TCR clone 198275 (TRBV4-1, TRBJ2-3)
CASSQDPAGGPLETQYF

SEQ ID NO: 396551 - protein, 15 aa, Homo sapiens
  CDR3 for alpha chain variable domain of TCR clone 198276 (TRAV25, TRAJ53)
CAATGGGGSNYKLTF

SEQ ID NO: 396552 - protein, 12 aa, Homo sapiens
  CDR3 for beta chain variable domain of TCR clone 198276 (TRBV11-2, TRBJ2-2)
CASSLPTGELFF

SEQ ID NO: 396553 - protein, 16 aa, Homo sapiens
  CDR3 for alpha chain variable domain of TCR clone 198277 (TRAV3, TRAJ10)
CAVRDMHAGGGNKLTF

SEQ ID NO: 396554 - protein, 16 aa, Homo sapiens
  CDR3 for beta chain variable domain of TCR clone 198277 (TRBV6-3, TRBJ1-2)
CASSYSRRASNYGYTF

SEQ ID NO: 396555 - protein, 13 aa, Homo sapiens
  CDR3 for alpha chain variable domain of TCR clone 198278 (TRAV26-1, TRAJ33)
CIVRVEGNYQLIW

SEQ ID NO: 396556 - protein, 17 aa, Homo sapiens
  CDR3 for beta chain variable domain of TCR clone 198278 (TRBV7-6, TRBJ2-5)
CASSPGLADPWGETQYF

SEQ ID NO: 396557 - protein, 13 aa, Homo sapiens
  CDR3 for alpha chain variable domain of TCR clone 198279 (TRAV29/DV5, TRAJ31)
CAASRNNNASLMF

SEQ ID NO: 396558 - protein, 12 aa, Homo sapiens
  CDR3 for beta chain variable domain of TCR clone 198279 (TRBV11-2, TRBJ2-2)
CASSLGGGELFF

SEQ ID NO: 396559 - protein, 12 aa, Homo sapiens
  CDR3 for alpha chain variable domain of TCR clone 198280 (TRAV12-3, TRAJ17)
CAMTLTGNKLTF

SEQ ID NO: 396560 - protein, 12 aa, Homo sapiens
  CDR3 for beta chain variable domain of TCR clone 198280 (TRBV2, TRBJ2-1)
CAYGPPGNEKFF

SEQ ID NO: 396561 - protein, 13 aa, Homo sapiens
  CDR3 for alpha chain variable domain of TCR clone 198281 (TRAV35, TRAJ22)
CAGLSGSARQLTF

SEQ ID NO: 396562 - protein, 16 aa, Homo sapiens
  CDR3 for beta chain variable domain of TCR clone 198281 (TRBV7-9, TRBJ2-1)
CASSLVLTGQGNERFF

SEQ ID NO: 396563 - protein, 18 aa, Homo sapiens
  CDR3 for alpha chain variable domain of TCR clone 198282 (TRAV12-2, )
CAVEDIQNPDPAVYQLRD

SEQ ID NO: 396564 - protein, 18 aa, Homo sapiens
  CDR3 for beta chain variable domain of TCR clone 198282 (TRBV11-2, TRBJ2-3)
CASSLGGASRGAPNTQYL

SEQ ID NO: 396565 - protein, 16 aa, Homo sapiens
  CDR3 for alpha chain variable domain of TCR clone 198283 (TRAV30, TRAJ24)
CGTELVDADSWGKFQF

SEQ ID NO: 396566 - protein, 14 aa, Homo sapiens
  CDR3 for beta chain variable domain of TCR clone 198283 (TRBV12-5, TRBJ2-5)
CASGSRTHQETQYF

SEQ ID NO: 396567 - protein, 14 aa, Homo sapiens
  CDR3 for alpha chain variable domain of TCR clone 198284 (TRAV3, TRAJ7)
CAVREEEREQQTRF

SEQ ID NO: 396568 - protein, 11 aa, Homo sapiens
  CDR3 for beta chain variable domain of TCR clone 198284 (TRBV11-2, TRBJ1-1)
CASSINTEAFF

SEQ ID NO: 396569 - protein, 14 aa, Homo sapiens
  CDR3 for alpha chain variable domain of TCR clone 198285 (TRAV2, TRAJ22)
CAVGRVGSARQLTF

SEQ ID NO: 396570 - protein, 12 aa, Homo sapiens
  CDR3 for beta chain variable domain of TCR clone 198285 (TRBV19, TRBJ2-1)
CASSMQGTEQFF

SEQ ID NO: 396571 - protein, 15 aa, Homo sapiens
  CDR3 for alpha chain variable domain of TCR clone 198286 (TRAV4, TRAJ39)
CLVGPNNNASNMLTF

SEQ ID NO: 396572 - protein, 13 aa, Homo sapiens
  CDR3 for beta chain variable domain of TCR clone 198286 (TRBV11-2, TRBJ2-5)
CASGSTGEETQYF

SEQ ID NO: 396573 - protein, 12 aa, Homo sapiens
  CDR3 for alpha chain variable domain of TCR clone 198287 (TRAV12-3, TRAJ17)
CAMTLTGNKLTF

SEQ ID NO: 396574 - protein, 19 aa, Homo sapiens
  CDR3 for beta chain variable domain of TCR clone 198287 (TRBV7-2, TRBJ2-3)
CASSFLSRNWGGGTDTHYF

SEQ ID NO: 396575 - protein, 14 aa, Homo sapiens
  CDR3 for alpha chain variable domain of TCR clone 198288 (TRAV17, TRAJ32)
CATDPGGATNKLIF

SEQ ID NO: 396576 - protein, 12 aa, Homo sapiens
  CDR3 for beta chain variable domain of TCR clone 198288 (TRBV20-1, TRBJ2-5)
CSASLAEETQYF

SEQ ID NO: 396577 - protein, 12 aa, Homo sapiens
  CDR3 for alpha chain variable domain of TCR clone 198289 (TRAV13-1, TRAJ27)
CAAHTNAGKPTF

SEQ ID NO: 396578 - protein, 15 aa, Homo sapiens
  CDR3 for beta chain variable domain of TCR clone 198289 (TRBV4-1, TRBJ2-7)
CASSQEWGPSYEQYF

SEQ ID NO: 396579 - protein, 11 aa, Homo sapiens
  CDR3 for alpha chain variable domain of TCR clone 198290 (TRAV2, TRAJ13)
CASGRYQKVTF

SEQ ID NO: 396580 - protein, 13 aa, Homo sapiens
  CDR3 for beta chain variable domain of TCR clone 198290 (TRBV12-4, TRBJ1-2)
CASSLRQGKGYSF

SEQ ID NO: 396581 - protein, 14 aa, Homo sapiens
  CDR3 for alpha chain variable domain of TCR clone 198291 (TRAV38-1, TRAJ45)
CASHSGGGADGLTF

SEQ ID NO: 396582 - protein, 18 aa, Homo sapiens
  CDR3 for beta chain variable domain of TCR clone 198291 (TRBV7-9, TRBJ2-7)
CASSLTTSGSRTWYEQYF

SEQ ID NO: 396583 - protein, 13 aa, Homo sapiens
  CDR3 for alpha chain variable domain of TCR clone 198292 (TRAV12-1, TRAJ33)
CGDAPDSNYQLIW

SEQ ID NO: 396584 - protein, 17 aa, Homo sapiens
  CDR3 for beta chain variable domain of TCR clone 198292 (TRBV28, TRBJ2-5)
CASSRQGGLAGAETQYF

SEQ ID NO: 396585 - protein, 14 aa, Homo sapiens
  CDR3 for alpha chain variable domain of TCR clone 198293 (TRAV12-2, TRAJ17)
CAVLFKASGNKLTF

SEQ ID NO: 396586 - protein, 17 aa, Homo sapiens
  CDR3 for beta chain variable domain of TCR clone 198293 (TRBV20-1, TRBJ2-2)
CSASGSGQGGFTGELFF

SEQ ID NO: 396587 - protein, 14 aa, Homo sapiens
  CDR3 for alpha chain variable domain of TCR clone 198294 (TRAV1-2, TRAJ8)
CAVREDTGFQKLVF

SEQ ID NO: 396588 - protein, 16 aa, Homo sapiens
  CDR3 for beta chain variable domain of TCR clone 198294 (TRBV11-2, TRBJ2-5)
CASSPAVGERQETQYF

SEQ ID NO: 396589 - protein, 14 aa, Homo sapiens
  CDR3 for alpha chain variable domain of TCR clone 198295 (TRAV13-1, TRAJ21)
CAAKEGFNKFTLDL

SEQ ID NO: 396590 - protein, 14 aa, Homo sapiens
  CDR3 for beta chain variable domain of TCR clone 198295 (TRBV5-4, TRBJ1-1)
CASSLDSRRDEAFF

SEQ ID NO: 396591 - protein, 12 aa, Homo sapiens
  CDR3 for alpha chain variable domain of TCR clone 198296 (TRAV13-1, TRAJ15)
CAASQAGTALIF

SEQ ID NO: 396592 - protein, 14 aa, Homo sapiens
  CDR3 for beta chain variable domain of TCR clone 198296 (TRBV7-2, TRBJ2-7)
CASSPKTSFYEQYF

SEQ ID NO: 396593 - protein, 11 aa, Homo sapiens
  CDR3 for alpha chain variable domain of TCR clone 198297 (TRAV27, TRAJ20)
CAGADDYKLSF

SEQ ID NO: 396594 - protein, 13 aa, Homo sapiens
  CDR3 for beta chain variable domain of TCR clone 198297 (TRBV11-3, TRBJ1-2)
RASSQRTSRGYTF

SEQ ID NO: 396595 - protein, 13 aa, Homo sapiens
  CDR3 for alpha chain variable domain of TCR clone 198298 (TRAV27, TRAJ49)
CAPRPYTGNQLDF

SEQ ID NO: 396596 - protein, 16 aa, Homo sapiens
  CDR3 for beta chain variable domain of TCR clone 198298 (TRBV4-1, TRBJ1-2)
CASSQDAGQVLYGYTF

SEQ ID NO: 396597 - protein, 14 aa, Homo sapiens
  CDR3 for alpha chain variable domain of TCR clone 198299 (TRAV12-1, TRAJ17)
CVVNYKAAGNKLTF

SEQ ID NO: 396598 - protein, 15 aa, Homo sapiens
  CDR3 for beta chain variable domain of TCR clone 198299 (TRBV27, TRBJ1-4)
CASSAQQDLNEKLFF

SEQ ID NO: 396599 - protein, 10 aa, Homo sapiens
  CDR3 for alpha chain variable domain of TCR clone 198300 (TRAV12-3, TRAJ43)
CNERLNDMRF

SEQ ID NO: 396600 - protein, 16 aa, Homo sapiens
  CDR3 for beta chain variable domain of TCR clone 198300 (TRBV20-1, TRBJ2-1)
CSARDSLGAVYNEQLF

SEQ ID NO: 396601 - protein, 14 aa, Homo sapiens
  CDR3 for alpha chain variable domain of TCR clone 198301 (TRAV12-2, TRAJ13)
CAVKKTGGYQKVTF

SEQ ID NO: 396602 - protein, 15 aa, Homo sapiens
  CDR3 for beta chain variable domain of TCR clone 198301 (TRBV7-8, TRBJ2-7)
CASSLGTGNPYEQYF

SEQ ID NO: 396603 - protein, 15 aa, Homo sapiens
  CDR3 for alpha chain variable domain of TCR clone 198302 (TRAV2, TRAJ15)
CAVEDREQAGTALIF

SEQ ID NO: 396604 - protein, 18 aa, Homo sapiens
  CDR3 for beta chain variable domain of TCR clone 198302 (TRBV4-3, TRBJ1-6)
CASSQETPASSYNSPLHF

SEQ ID NO: 396605 - protein, 13 aa, Homo sapiens
  CDR3 for alpha chain variable domain of TCR clone 198303 (TRAV22, TRAJ29)
CAVGGSGNTPIVF

SEQ ID NO: 396606 - protein, 13 aa, Homo sapiens
  CDR3 for beta chain variable domain of TCR clone 198303 (TRBV19, TRBJ2-7)
CASRKAGGSEQYF

SEQ ID NO: 396607 - protein, 15 aa, Homo sapiens
  CDR3 for alpha chain variable domain of TCR clone 198304 (TRAV12-1, TRAJ45)
CVVLSGGGGADGPTF

SEQ ID NO: 396608 - protein, 16 aa, Homo sapiens
  CDR3 for beta chain variable domain of TCR clone 198304 (TRBV6-5, TRBJ2-1)
CASSETLAGHYNEQFF

SEQ ID NO: 396609 - protein, 12 aa, Homo sapiens
  CDR3 for alpha chain variable domain of TCR clone 198305 (TRAV13-1, TRAJ22)
CVPRGFCKATDL

SEQ ID NO: 396610 - protein, 13 aa, Homo sapiens
  CDR3 for beta chain variable domain of TCR clone 198305 (TRBV11-2, TRBJ2-5)
CASSFSSQETQNF

SEQ ID NO: 396611 - protein, 14 aa, Homo sapiens
  CDR3 for alpha chain variable domain of TCR clone 198306 (TRAV20, TRAJ22)
CAVQVSGSARQLTF

SEQ ID NO: 396612 - protein, 14 aa, Homo sapiens
  CDR3 for beta chain variable domain of TCR clone 198306 (TRBV7-2, TRBJ2-7)
CASSPKTSFYEQYF

SEQ ID NO: 396613 - protein, 12 aa, Homo sapiens
  CDR3 for alpha chain variable domain of TCR clone 198307 (TRAV21, TRAJ6)
CAVKGGSYIPTL

SEQ ID NO: 396614 - protein, 13 aa, Homo sapiens
  CDR3 for beta chain variable domain of TCR clone 198307 (TRBV11-2, TRBJ1-1)
CASSVTENTEAFF

SEQ ID NO: 396615 - protein, 13 aa, Homo sapiens
  CDR3 for alpha chain variable domain of TCR clone 198308 (TRAV1-2, TRAJ9)
CAALNTGGFKTIF

SEQ ID NO: 396616 - protein, 13 aa, Homo sapiens
  CDR3 for beta chain variable domain of TCR clone 198308 (TRBV19, TRBJ1-2)
CASSVGGQDGYTF

SEQ ID NO: 396617 - protein, 13 aa, Homo sapiens
  CDR3 for alpha chain variable domain of TCR clone 198309 (TRAV3, TRAJ21)
CAVREPDFNKFYF

SEQ ID NO: 396618 - protein, 15 aa, Homo sapiens
  CDR3 for beta chain variable domain of TCR clone 198309 (TRBV20-1, TRBJ1-1)
CSARGGGNTEAFLDK

SEQ ID NO: 396619 - protein, 13 aa, Homo sapiens
  CDR3 for alpha chain variable domain of TCR clone 198310 (TRAV8-6, TRAJ49)
CAVITNAGIQFYF

SEQ ID NO: 396620 - protein, 14 aa, Homo sapiens
  CDR3 for beta chain variable domain of TCR clone 198310 (TRBV5-1, TRBJ2-7)
CASSRGESLYEQYF

SEQ ID NO: 396621 - protein, 12 aa, Homo sapiens
  CDR3 for alpha chain variable domain of TCR clone 198311 (TRAV27, TRAJ9)
CAGESGGFKTIF

SEQ ID NO: 396622 - protein, 17 aa, Homo sapiens
  CDR3 for beta chain variable domain of TCR clone 198311 (TRBV7-3, TRBJ2-3)
CASSLMKRMRGADTQYF

SEQ ID NO: 396623 - protein, 14 aa, Homo sapiens
  CDR3 for alpha chain variable domain of TCR clone 198312 (TRAV1-2, TRAJ16)
CAVNRFSDGQKLLF

SEQ ID NO: 396624 - protein, 13 aa, Homo sapiens
  CDR3 for beta chain variable domain of TCR clone 198312 (TRBV7-3, TRBJ2-7)
CASSLAATYEQYF

SEQ ID NO: 396625 - protein, 13 aa, Homo sapiens
  CDR3 for alpha chain variable domain of TCR clone 198313 (TRAV13-2, TRAJ5)
CAESDTGWRALTF

SEQ ID NO: 396626 - protein, 14 aa, Homo sapiens
  CDR3 for beta chain variable domain of TCR clone 198313 (TRBV2, TRBJ1-1)
CASTQVGENTEAFF

SEQ ID NO: 396627 - protein, 13 aa, Homo sapiens
  CDR3 for alpha chain variable domain of TCR clone 198314 (TRAV1-1, TRAJ9)
CAAKNTGGFKTIF

SEQ ID NO: 396628 - protein, 14 aa, Homo sapiens
  CDR3 for beta chain variable domain of TCR clone 198314 (TRBV18, TRBJ2-7)
CASSLRGGAYEQYF

SEQ ID NO: 396629 - protein, 16 aa, Homo sapiens
  CDR3 for alpha chain variable domain of TCR clone 198315 (TRAV30, TRAJ24)
CGTEIVDAYSWGKFQF

SEQ ID NO: 396630 - protein, 14 aa, Homo sapiens
  CDR3 for beta chain variable domain of TCR clone 198315 (TRBV12-5, TRBJ2-5)
CASGSRTHQETQHF

SEQ ID NO: 396631 - protein, 15 aa, Homo sapiens
  CDR3 for alpha chain variable domain of TCR clone 198316 (TRAV12-1, TRAJ45)
CVVLSGGGGADGLTF

SEQ ID NO: 396632 - protein, 14 aa, Homo sapiens
  CDR3 for beta chain variable domain of TCR clone 198316 (TRBV11-2, TRBJ2-5)
CASSRTGGVETQYF

SEQ ID NO: 396633 - protein, 12 aa, Homo sapiens
  CDR3 for alpha chain variable domain of TCR clone 198317 (TRAV29/DV5, TRAJ49)
CAATDTGNQVYF

SEQ ID NO: 396634 - protein, 12 aa, Homo sapiens
  CDR3 for beta chain variable domain of TCR clone 198317 (TRBV12-4, TRBJ2-7)
CANSLGGYEQYF

SEQ ID NO: 396635 - protein, 18 aa, Homo sapiens
  CDR3 for alpha chain variable domain of TCR clone 198318 (TRAV26-2, TRAJ54)
CILRDVEVGIQGAQKLGF

SEQ ID NO: 396636 - protein, 20 aa, Homo sapiens
  CDR3 for beta chain variable domain of TCR clone 198318 (TRBV6-1, TRBJ2-5)
CASSETLDRERRPSTSGQAR

SEQ ID NO: 396637 - protein, 14 aa, Homo sapiens
  CDR3 for alpha chain variable domain of TCR clone 198319 (TRAV12-1, TRAJ4)
CVGDFSGGFNKLIF

SEQ ID NO: 396638 - protein, 14 aa, Homo sapiens
  CDR3 for beta chain variable domain of TCR clone 198319 (TRBV6-1, TRBJ1-3)
CASVQGGGGNTIYF

SEQ ID NO: 396639 - protein, 13 aa, Homo sapiens
  CDR3 for alpha chain variable domain of TCR clone 198320 (TRAV2, TRAJ40)
CAVVTSGTFKYIF

SEQ ID NO: 396640 - protein, 14 aa, Homo sapiens
  CDR3 for beta chain variable domain of TCR clone 198320 (TRBV19, TRBJ2-1)
CASPTFVLSGEQLF

SEQ ID NO: 396641 - protein, 15 aa, Homo sapiens
  CDR3 for alpha chain variable domain of TCR clone 198321 (TRAV29/DV5, TRAJ24)
CAASGATDSWGKFQF

SEQ ID NO: 396642 - protein, 12 aa, Homo sapiens
  CDR3 for beta chain variable domain of TCR clone 198321 (TRBV11-2, TRBJ2-2)
CASSLPTGELFF

SEQ ID NO: 396643 - protein, 13 aa, Homo sapiens
  CDR3 for alpha chain variable domain of TCR clone 198322 (TRAV9-2, TRAJ3)
CAPLYSSASKIIF

SEQ ID NO: 396644 - protein, 14 aa, Homo sapiens
  CDR3 for beta chain variable domain of TCR clone 198322 (TRBV7-9, TRBJ2-5)
CASSPAQDQETQYF

SEQ ID NO: 396645 - protein, 13 aa, Homo sapiens
  CDR3 for alpha chain variable domain of TCR clone 198323 (TRAV21, TRAJ27)
CAARPGNAGNSTV

SEQ ID NO: 396646 - protein, 14 aa, Homo sapiens
  CDR3 for beta chain variable domain of TCR clone 198323 (TRBV7-6, TRBJ2-3)
CASSLGTVTDTQYF

SEQ ID NO: 396647 - protein, 13 aa, Homo sapiens
  CDR3 for alpha chain variable domain of TCR clone 198324 (TRAV17, TRAJ54)
CATSWGGAQELVF

SEQ ID NO: 396648 - protein, 15 aa, Homo sapiens
  CDR3 for beta chain variable domain of TCR clone 198324 (TRBV4-3, TRBJ2-3)
CASSPSLLSTDTQYF

SEQ ID NO: 396649 - protein, 17 aa, Homo sapiens
  CDR3 for alpha chain variable domain of TCR clone 198325 (TRAV3, TRAJ6)
CAVRDGPRAGGSYIPTS

SEQ ID NO: 396650 - protein, 16 aa, Homo sapiens
  CDR3 for beta chain variable domain of TCR clone 198325 (TRBV5-1, TRBJ1-3)
CASSPWAPSSGNTIYV

SEQ ID NO: 396651 - protein, 13 aa, Homo sapiens
  CDR3 for alpha chain variable domain of TCR clone 198326 (TRAV17, TRAJ40)
CAGALGGTYKYIF

SEQ ID NO: 396652 - protein, 18 aa, Homo sapiens
  CDR3 for beta chain variable domain of TCR clone 198326 (TRBV7-2, TRBJ1-4)
CASSLAPGRRDKKLFLAV

SEQ ID NO: 396653 - protein, 16 aa, Homo sapiens
  CDR3 for alpha chain variable domain of TCR clone 198327 (TRAV21, TRAJ37)
CAVRTAGSSNTGKLIF

SEQ ID NO: 396654 - protein, 17 aa, Homo sapiens
  CDR3 for beta chain variable domain of TCR clone 198327 (TRBV20-1, TRBJ2-2)
CSASGSGQGGLTGELFF

SEQ ID NO: 396655 - protein, 16 aa, Homo sapiens
  CDR3 for alpha chain variable domain of TCR clone 198328 (TRAV16, TRAJ42)
CSRKMNYGGSQGKLIF

SEQ ID NO: 396656 - protein, 15 aa, Homo sapiens
  CDR3 for beta chain variable domain of TCR clone 198328 (TRBV20-1, TRBJ2-7)
CSAREGRDSLYEQYF

SEQ ID NO: 396657 - protein, 13 aa, Homo sapiens
  CDR3 for alpha chain variable domain of TCR clone 198329 (TRAV16, TRAJ58)
CALSIPSGSRLTF

SEQ ID NO: 396658 - protein, 13 aa, Homo sapiens
  CDR3 for beta chain variable domain of TCR clone 198329 (TRBV20-1, TRBJ1-1)
CSARGGGNTEAFF

SEQ ID NO: 396659 - protein, 18 aa, Homo sapiens
  CDR3 for alpha chain variable domain of TCR clone 198330 (TRAV23/DV6, )
CAVTALIPDIQNPDPAVY

SEQ ID NO: 396660 - protein, 16 aa, Homo sapiens
  CDR3 for beta chain variable domain of TCR clone 198330 (TRBV10-3, TRBJ2-7)
CAISPRGQEQTYEQYF

SEQ ID NO: 396661 - protein, 19 aa, Homo sapiens
  CDR3 for alpha chain variable domain of TCR clone 198331 (TRAV1-2, TRAJ26)
CLLPLCCERPDNYGQNVVF

SEQ ID NO: 396662 - protein, 12 aa, Homo sapiens
  CDR3 for beta chain variable domain of TCR clone 198331 (TRBV7-9, TRBJ2-1)
CASSLGHNEQFF

SEQ ID NO: 396663 - protein, 14 aa, Homo sapiens
  CDR3 for alpha chain variable domain of TCR clone 198332 (TRAV14/DV4, TRAJ42)
CPRGSLRRQGNLIF

SEQ ID NO: 396664 - protein, 18 aa, Homo sapiens
  CDR3 for beta chain variable domain of TCR clone 198332 (TRBV20-1, TRBJ2-3)
CSASGLAGGPGTTDTQYF

SEQ ID NO: 396665 - protein, 12 aa, Homo sapiens
  CDR3 for alpha chain variable domain of TCR clone 198333 (TRAV12-1, TRAJ40)
CVVTSGTYKYIF

SEQ ID NO: 396666 - protein, 16 aa, Homo sapiens
  CDR3 for beta chain variable domain of TCR clone 198333 (TRBV9, TRBJ2-2)
CASSGPSGTGIGELFF

SEQ ID NO: 396667 - protein, 17 aa, Homo sapiens
  CDR3 for alpha chain variable domain of TCR clone 198334 (TRAV2, TRAJ36)
CAVEDRGNWGKQPLLWD

SEQ ID NO: 396668 - protein, 14 aa, Homo sapiens
  CDR3 for beta chain variable domain of TCR clone 198334 (TRBV7-9, TRBJ2-5)
CAGSIDTAQETQYF

SEQ ID NO: 396669 - protein, 13 aa, Homo sapiens
  CDR3 for alpha chain variable domain of TCR clone 198335 (TRAV2, TRAJ29)
CAAGNSGNTPLVF

SEQ ID NO: 396670 - protein, 13 aa, Homo sapiens
  CDR3 for beta chain variable domain of TCR clone 198335 (TRBV7-7, TRBJ2-3)
CASSLSRADTQYF

SEQ ID NO: 396671 - protein, 15 aa, Homo sapiens
  CDR3 for alpha chain variable domain of TCR clone 198336 (TRAV8-4, TRAJ13)
CAVSDWGGGYQKVTF

SEQ ID NO: 396672 - protein, 15 aa, Homo sapiens
  CDR3 for beta chain variable domain of TCR clone 198336 (TRBV19, TRBJ2-1)
CASSSPGVPLDEQFF

SEQ ID NO: 396673 - protein, 16 aa, Homo sapiens
  CDR3 for alpha chain variable domain of TCR clone 198337 (TRAV8-3, TRAJ44)
CAVGASNTGTASKLTF

SEQ ID NO: 396674 - protein, 16 aa, Homo sapiens
  CDR3 for beta chain variable domain of TCR clone 198337 (TRBV27, TRBJ2-2)
CASSFRGLVRTGELFF

SEQ ID NO: 396675 - protein, 16 aa, Homo sapiens
  CDR3 for alpha chain variable domain of TCR clone 198338 (TRAV8-1, TRAJ42)
CAVTSRYGVSQGNLIF

SEQ ID NO: 396676 - protein, 12 aa, Homo sapiens
  CDR3 for beta chain variable domain of TCR clone 198338 (TRBV6-3, TRBJ2-7)
CASSLGRRGLYF

SEQ ID NO: 396677 - protein, 21 aa, Homo sapiens
  CDR3 for alpha chain variable domain of TCR clone 198339 (TRAV29/DV5, TRAJ42)
CSVLLCSKRGNYGGSQGNLIF

SEQ ID NO: 396678 - protein, 13 aa, Homo sapiens
  CDR3 for beta chain variable domain of TCR clone 198339 (TRBV19, TRBJ1-2)
CASSQGQVYGYTF

SEQ ID NO: 396679 - protein, 10 aa, Homo sapiens
  CDR3 for alpha chain variable domain of TCR clone 198340 (TRAV30, TRAJ48)
CGIGNEKLTF

SEQ ID NO: 396680 - protein, 14 aa, Homo sapiens
  CDR3 for beta chain variable domain of TCR clone 198340 (TRBV4-2, TRBJ2-7)
CASSHRTGEYEQYF

SEQ ID NO: 396681 - protein, 16 aa, Homo sapiens
  CDR3 for alpha chain variable domain of TCR clone 198341 (TRAV14/DV4, TRAJ53)
CAMREGGGGSNYKLTF

SEQ ID NO: 396682 - protein, 13 aa, Homo sapiens
  CDR3 for beta chain variable domain of TCR clone 198341 (TRBV18, TRBJ2-5)
CASSLQGQETQYF

SEQ ID NO: 396683 - protein, 12 aa, Homo sapiens
  CDR3 for alpha chain variable domain of TCR clone 198342 (TRAV12-2, TRAJ47)
CAVAEYGNKLVF

SEQ ID NO: 396684 - protein, 17 aa, Homo sapiens
  CDR3 for beta chain variable domain of TCR clone 198342 (TRBV20-1, TRBJ1-5)
CSASLSPGQGGNQPQHF

SEQ ID NO: 396685 - protein, 13 aa, Homo sapiens
  CDR3 for alpha chain variable domain of TCR clone 198343 (TRAV3, TRAJ21)
CAVREPDFNKFYF

SEQ ID NO: 396686 - protein, 13 aa, Homo sapiens
  CDR3 for beta chain variable domain of TCR clone 198343 (TRBV9, TRBJ2-1)
CASCPSGGNEQFF

SEQ ID NO: 396687 - protein, 14 aa, Homo sapiens
  CDR3 for alpha chain variable domain of TCR clone 198344 (TRAV12-2, TRAJ17)
CAVNIKAAGNKLTF

SEQ ID NO: 396688 - protein, 16 aa, Homo sapiens
  CDR3 for beta chain variable domain of TCR clone 198344 (TRBV20-1, TRBJ2-6)
CSASSRGYDGTNVLTF

SEQ ID NO: 396689 - protein, 16 aa, Homo sapiens
  CDR3 for alpha chain variable domain of TCR clone 198345 (TRAV16, TRAJ4)
CALSRMFPGGYNKLIF

SEQ ID NO: 396690 - protein, 12 aa, Homo sapiens
  CDR3 for beta chain variable domain of TCR clone 198345 (TRBV29-1, TRBJ2-3)
CSVTGGEDTQYF

SEQ ID NO: 396691 - protein, 17 aa, Homo sapiens
  CDR3 for alpha chain variable domain of TCR clone 198346 (TRAV8-6, TRAJ10)
CAVSDGGLTGGGNKLTF

SEQ ID NO: 396692 - protein, 14 aa, Homo sapiens
  CDR3 for beta chain variable domain of TCR clone 198346 (TRBV5-7, TRBJ1-5)
CASSLNRLNQPQHF

SEQ ID NO: 396693 - protein, 10 aa, Homo sapiens
  CDR3 for alpha chain variable domain of TCR clone 198347 (TRAV30, TRAJ48)
CGIGNEKLTF

SEQ ID NO: 396694 - protein, 13 aa, Homo sapiens
  CDR3 for beta chain variable domain of TCR clone 198347 (TRBV7-2, TRBJ2-2)
CASSLAVTGELFS

SEQ ID NO: 396695 - protein, 14 aa, Homo sapiens
  CDR3 for alpha chain variable domain of TCR clone 198348 (TRAV12-2, TRAJ17)
CAVLFKAAGNKLTF

SEQ ID NO: 396696 - protein, 16 aa, Homo sapiens
  CDR3 for beta chain variable domain of TCR clone 198348 (TRBV2, TRBJ2-3)
CASSTSVEGVTDTQYF

SEQ ID NO: 396697 - protein, 14 aa, Homo sapiens
  CDR3 for alpha chain variable domain of TCR clone 198349 (TRAV12-2, TRAJ29)
CAVRRNSGNAPLVF

SEQ ID NO: 396698 - protein, 13 aa, Homo sapiens
  CDR3 for beta chain variable domain of TCR clone 198349 (TRBV12-4, TRBJ2-1)
CASSHYTDNEQFF

SEQ ID NO: 396699 - protein, 16 aa, Homo sapiens
  CDR3 for alpha chain variable domain of TCR clone 198350 (TRAV3, TRAJ37)
CAVRPHGSGTTGKLIF

SEQ ID NO: 396700 - protein, 17 aa, Homo sapiens
  CDR3 for beta chain variable domain of TCR clone 198350 (TRBV7-2, TRBJ2-7)
CASSFETSGSTSSTSGR

SEQ ID NO: 396701 - protein, 13 aa, Homo sapiens
  CDR3 for alpha chain variable domain of TCR clone 198351 (TRAV21, TRAJ37)
CAVSSGNTGKLIF

SEQ ID NO: 396702 - protein, 13 aa, Homo sapiens
  CDR3 for beta chain variable domain of TCR clone 198351 (TRBV19, TRBJ2-7)
CASRKAGGSEQYF

SEQ ID NO: 396703 - protein, 14 aa, Homo sapiens
  CDR3 for alpha chain variable domain of TCR clone 198352 (TRAV12-2, TRAJ9)
CAVNMEGGCFKTIF

SEQ ID NO: 396704 - protein, 14 aa, Homo sapiens
  CDR3 for beta chain variable domain of TCR clone 198352 (TRBV2, TRBJ2-5)
CASSEVLAQETQYF

SEQ ID NO: 396705 - protein, 12 aa, Homo sapiens
  CDR3 for alpha chain variable domain of TCR clone 198353 (TRAV21, TRAJ41)
CAVREFRVCTQL

SEQ ID NO: 396706 - protein, 15 aa, Homo sapiens
  CDR3 for beta chain variable domain of TCR clone 198353 (TRBV18, TRBJ1-5)
CASSPQARGNQPQHF

SEQ ID NO: 396707 - protein, 13 aa, Homo sapiens
  CDR3 for alpha chain variable domain of TCR clone 198354 (TRAV12-2, TRAJ40)
CPVKGPGTYKYIF

SEQ ID NO: 396708 - protein, 15 aa, Homo sapiens
  CDR3 for beta chain variable domain of TCR clone 198354 (TRBV28, TRBJ1-2)
CASSFRDRPSYGYTF

SEQ ID NO: 396709 - protein, 14 aa, Homo sapiens
  CDR3 for alpha chain variable domain of TCR clone 198355 (TRAV26-1, TRAJ38)
CIADIAGNNRKLIW

SEQ ID NO: 396710 - protein, 13 aa, Homo sapiens
  CDR3 for beta chain variable domain of TCR clone 198355 (TRBV20-1, TRBJ1-1)
CSARGGGSTEAFF

SEQ ID NO: 396711 - protein, 16 aa, Homo sapiens
  CDR3 for alpha chain variable domain of TCR clone 198356 (TRAV13-1, TRAJ48)
CAASIFGNFGNEKLTF

SEQ ID NO: 396712 - protein, 16 aa, Homo sapiens
  CDR3 for beta chain variable domain of TCR clone 198356 (TRBV18, TRBJ1-5)
CASSPYRVEGDQPQHF

SEQ ID NO: 396713 - protein, 10 aa, Homo sapiens
  CDR3 for alpha chain variable domain of TCR clone 198357 (TRAV2, TRAJ40)
CAVVTWNLQI

SEQ ID NO: 396714 - protein, 14 aa, Homo sapiens
  CDR3 for beta chain variable domain of TCR clone 198357 (TRBV19, TRBJ2-1)
CASPTFVLSGEQFF

SEQ ID NO: 396715 - protein, 15 aa, Homo sapiens
  CDR3 for alpha chain variable domain of TCR clone 198358 (TRAV13-1, TRAJ10)
CAATILTGGGNKLTF

SEQ ID NO: 396716 - protein, 15 aa, Homo sapiens
  CDR3 for beta chain variable domain of TCR clone 198358 (TRBV2, TRBJ2-7)
CASTLRGSGATEQYF

SEQ ID NO: 396717 - protein, 13 aa, Homo sapiens
  CDR3 for alpha chain variable domain of TCR clone 198359 (TRAV3, TRAJ21)
CAVREPDFNKFYF

SEQ ID NO: 396718 - protein, 14 aa, Homo sapiens
  CDR3 for beta chain variable domain of TCR clone 198359 (TRBV5-1, TRBJ2-1)
CASSALWAGNEQFF

SEQ ID NO: 396719 - protein, 14 aa, Homo sapiens
  CDR3 for alpha chain variable domain of TCR clone 198360 (TRAV17, TRAJ39)
CATDPVRAGNMLTF

SEQ ID NO: 396720 - protein, 15 aa, Homo sapiens
  CDR3 for beta chain variable domain of TCR clone 198360 (TRBV13, TRBJ1-5)
CASSFGQGGVQRQHF

SEQ ID NO: 396721 - protein, 11 aa, Homo sapiens
  CDR3 for alpha chain variable domain of TCR clone 198361 (TRAV4, TRAJ28)
CLVGDNRAVTL

SEQ ID NO: 396722 - protein, 13 aa, Homo sapiens
  CDR3 for beta chain variable domain of TCR clone 198361 (TRBV20-1, TRBJ2-7)
CSATHTSGYEQYF

SEQ ID NO: 396723 - protein, 15 aa, Homo sapiens
  CDR3 for alpha chain variable domain of TCR clone 198362 (TRAV3, TRAJ21)
CAVRERTSTNFTLDL

SEQ ID NO: 396724 - protein, 18 aa, Homo sapiens
  CDR3 for beta chain variable domain of TCR clone 198362 (TRBV11-2, TRBJ2-3)
CASSLGGASRGAPNTQYF

SEQ ID NO: 396725 - protein, 17 aa, Homo sapiens
  CDR3 for alpha chain variable domain of TCR clone 198363 (TRAV3, TRAJ42)
CAVRDRDYGGSQGNLIF

SEQ ID NO: 396726 - protein, 15 aa, Homo sapiens
  CDR3 for beta chain variable domain of TCR clone 198363 (TRBV2, TRBJ1-1)
CASTEPGQGASGAFF

SEQ ID NO: 396727 - protein, 13 aa, Homo sapiens
  CDR3 for alpha chain variable domain of TCR clone 198364 (TRAV21, TRAJ6)
CAGGSGGSYIPTF

SEQ ID NO: 396728 - protein, 15 aa, Homo sapiens
  CDR3 for beta chain variable domain of TCR clone 198364 (TRBV5-1, TRBJ2-1)
CASSPPRAPYNEQFF

SEQ ID NO: 396729 - protein, 14 aa, Homo sapiens
  CDR3 for alpha chain variable domain of TCR clone 198365 (TRAV1-2, TRAJ8)
CAVREDTGFQRLVF

SEQ ID NO: 396730 - protein, 16 aa, Homo sapiens
  CDR3 for beta chain variable domain of TCR clone 198365 (TRBV7-9, TRBJ2-1)
CASSDVAGGSYNEQFF

SEQ ID NO: 396731 - protein, 14 aa, Homo sapiens
  CDR3 for alpha chain variable domain of TCR clone 198366 (TRAV12-3, TRAJ58)
CAMSTETSGYRLTF

SEQ ID NO: 396732 - protein, 15 aa, Homo sapiens
  CDR3 for beta chain variable domain of TCR clone 198366 (TRBV4-1, TRBJ1-4)
CASSDTGGTNEKLFF

SEQ ID NO: 396733 - protein, 14 aa, Homo sapiens
  CDR3 for alpha chain variable domain of TCR clone 198367 (TRAV12-1, TRAJ17)
CVVNYKAAGNKLTF

SEQ ID NO: 396734 - protein, 10 aa, Homo sapiens
  CDR3 for beta chain variable domain of TCR clone 198367 (TRBV28, TRBJ1-2)
CASSSGRAVF

SEQ ID NO: 396735 - protein, 13 aa, Homo sapiens
  CDR3 for alpha chain variable domain of TCR clone 198368 (TRAV17, TRAJ39)
CAISTNAGNMLTF

SEQ ID NO: 396736 - protein, 16 aa, Homo sapiens
  CDR3 for beta chain variable domain of TCR clone 198368 (TRBV4-1, TRBJ2-7)
CASRPSGGGADNEQYF

SEQ ID NO: 396737 - protein, 13 aa, Homo sapiens
  CDR3 for alpha chain variable domain of TCR clone 198369 (TRAV21, TRAJ45)
CAVMGGGADGLTF

SEQ ID NO: 396738 - protein, 13 aa, Homo sapiens
  CDR3 for beta chain variable domain of TCR clone 198369 (TRBV2, TRBJ1-5)
CASSVGWDQHQHF

SEQ ID NO: 396739 - protein, 13 aa, Homo sapiens
  CDR3 for alpha chain variable domain of TCR clone 198370 (TRAV20, TRAJ37)
CAGCSSNTGKLIF

SEQ ID NO: 396740 - protein, 14 aa, Homo sapiens
  CDR3 for beta chain variable domain of TCR clone 198370 (TRBV20-1, TRBJ2-5)
CSAIDGRAGETQYF

SEQ ID NO: 396741 - protein, 15 aa, Homo sapiens
  CDR3 for alpha chain variable domain of TCR clone 198371 (TRAV2, TRAJ11)
CAVEDPNSGYSTLTF

SEQ ID NO: 396742 - protein, 13 aa, Homo sapiens
  CDR3 for beta chain variable domain of TCR clone 198371 (TRBV7-9, TRBJ1-2)
CASSLKQNYGYTF

SEQ ID NO: 396743 - protein, 14 aa, Homo sapiens
  CDR3 for alpha chain variable domain of TCR clone 198372 (TRAV12-2, TRAJ5)
CAVKGDTGRRALTF

SEQ ID NO: 396744 - protein, 17 aa, Homo sapiens
  CDR3 for beta chain variable domain of TCR clone 198372 (TRBV15, TRBJ1-1)
CATSRVGGADGDTEAFF

SEQ ID NO: 396745 - protein, 13 aa, Homo sapiens
  CDR3 for alpha chain variable domain of TCR clone 198373 (TRAV38-2/DV8, TRAJ34)
CAYRTWNTDKLIF

SEQ ID NO: 396746 - protein, 14 aa, Homo sapiens
  CDR3 for beta chain variable domain of TCR clone 198373 (TRBV19, TRBJ2-1)
CASSSGRDYNEQFF

SEQ ID NO: 396747 - protein, 16 aa, Homo sapiens
  CDR3 for alpha chain variable domain of TCR clone 198374 (TRAV8-3, TRAJ10)
CAVGPGVTGGGNKITF

SEQ ID NO: 396748 - protein, 13 aa, Homo sapiens
  CDR3 for beta chain variable domain of TCR clone 198374 (TRBV18, TRBJ1-1)
CASSPGPSGEAFF

SEQ ID NO: 396749 - protein, 12 aa, Homo sapiens
  CDR3 for alpha chain variable domain of TCR clone 198375 (TRAV21, TRAJ37)
CAVRGNTGKLIF

SEQ ID NO: 396750 - protein, 14 aa, Homo sapiens
  CDR3 for beta chain variable domain of TCR clone 198375 (TRBV19, TRBJ2-1)
CASEVTGTRNEQFF

SEQ ID NO: 396751 - protein, 16 aa, Homo sapiens
  CDR3 for alpha chain variable domain of TCR clone 198376 (TRAV21, TRAJ45)
CAVSWGSGGGADGLTF

SEQ ID NO: 396752 - protein, 14 aa, Homo sapiens
  CDR3 for beta chain variable domain of TCR clone 198376 (TRBV2, TRBJ2-7)
CASSRDRSSYEQYF

SEQ ID NO: 396753 - protein, 13 aa, Homo sapiens
  CDR3 for alpha chain variable domain of TCR clone 198377 (TRAV3, TRAJ16)
CAVRDRNGQKLLF

SEQ ID NO: 396754 - protein, 15 aa, Homo sapiens
  CDR3 for beta chain variable domain of TCR clone 198377 (TRBV4-3, TRBJ2-3)
CASSQDGRATDTQYF

SEQ ID NO: 396755 - protein, 15 aa, Homo sapiens
  CDR3 for alpha chain variable domain of TCR clone 198378 (TRAV8-1, TRAJ6)
CAVNANPGGSYIPTF

SEQ ID NO: 396756 - protein, 12 aa, Homo sapiens
  CDR3 for beta chain variable domain of TCR clone 198378 (TRBV5-7, TRBJ2-7)
CASSVQGGEEYF

SEQ ID NO: 396757 - protein, 14 aa, Homo sapiens
  CDR3 for alpha chain variable domain of TCR clone 198379 (TRAV17, TRAJ5)
CATVALTGRRALTF

SEQ ID NO: 396758 - protein, 15 aa, Homo sapiens
  CDR3 for beta chain variable domain of TCR clone 198379 (TRBV11-3, TRBJ2-3)
CASLKDGREGDTQYF

SEQ ID NO: 396759 - protein, 11 aa, Homo sapiens
  CDR3 for alpha chain variable domain of TCR clone 198380 (TRAV2, TRAJ33)
CAVESNYQLVW

SEQ ID NO: 396760 - protein, 15 aa, Homo sapiens
  CDR3 for beta chain variable domain of TCR clone 198380 (TRBV19, TRBJ1-1)
CASTAGQIQNTEAFF

SEQ ID NO: 396761 - protein, 12 aa, Homo sapiens
  CDR3 for alpha chain variable domain of TCR clone 198381 (TRAV35, TRAJ49)
CAGWNTGNQFYF

SEQ ID NO: 396762 - protein, 16 aa, Homo sapiens
  CDR3 for beta chain variable domain of TCR clone 198381 (TRBV5-1, TRBJ2-2)
CASSLWDTTNTGELFF

SEQ ID NO: 396763 - protein, 13 aa, Homo sapiens
  CDR3 for alpha chain variable domain of TCR clone 198382 (TRAV8-3, TRAJ43)
CAVGIYNNNDMRF

SEQ ID NO: 396764 - protein, 16 aa, Homo sapiens
  CDR3 for beta chain variable domain of TCR clone 198382 (TRBV7-2, TRBJ2-5)
CAISLVLWTKQETQYF

SEQ ID NO: 396765 - protein, 10 aa, Homo sapiens
  CDR3 for alpha chain variable domain of TCR clone 198383 (TRAV30, TRAJ24)
DADSWGKFQF

SEQ ID NO: 396766 - protein, 15 aa, Homo sapiens
  CDR3 for beta chain variable domain of TCR clone 198383 (TRBV7-9, TRBJ1-4)
CASSARTGGNEKLFF

SEQ ID NO: 396767 - protein, 12 aa, Homo sapiens
  CDR3 for alpha chain variable domain of TCR clone 198384 (TRAV16, TRAJ26)
CALRSYDQNFVF

SEQ ID NO: 396768 - protein, 14 aa, Homo sapiens
  CDR3 for beta chain variable domain of TCR clone 198384 (TRBV10-3, TRBJ2-1)
CAISSDRAYNEQFF

SEQ ID NO: 396769 - protein, 14 aa, Homo sapiens
  CDR3 for alpha chain variable domain of TCR clone 198385 (TRAV1-2, TRAJ16)
CAVNRFSDGQRLLF

SEQ ID NO: 396770 - protein, 15 aa, Homo sapiens
  CDR3 for beta chain variable domain of TCR clone 198385 (TRBV11-2, TRBJ2-1)
CASSSPSTRYNEQFF

SEQ ID NO: 396771 - protein, 14 aa, Homo sapiens
  CDR3 for alpha chain variable domain of TCR clone 198386 (TRAV20, TRAJ29)
CVVQAWVGNTPLVF

SEQ ID NO: 396772 - protein, 15 aa, Homo sapiens
  CDR3 for beta chain variable domain of TCR clone 198386 (TRBV29-1, TRBJ2-7)
CSVEFFDRGSYEQYF

SEQ ID NO: 396773 - protein, 13 aa, Homo sapiens
  CDR3 for alpha chain variable domain of TCR clone 198387 (TRAV20, TRAJ37)
CAGCSSNTGKLIF

SEQ ID NO: 396774 - protein, 15 aa, Homo sapiens
  CDR3 for beta chain variable domain of TCR clone 198387 (TRBV7-9, TRBJ2-7)
CASGPGGGLTYEQYF

SEQ ID NO: 396775 - protein, 10 aa, Homo sapiens
  CDR3 for alpha chain variable domain of TCR clone 198388 (TRAV13-2, TRAJ20)
CAENICRLQA

SEQ ID NO: 396776 - protein, 14 aa, Homo sapiens
  CDR3 for beta chain variable domain of TCR clone 198388 (TRBV12-4, TRBJ1-1)
CASSLGTGGTEAFF

SEQ ID NO: 396777 - protein, 11 aa, Homo sapiens
  CDR3 for alpha chain variable domain of TCR clone 198389 (TRAV3, TRAJ21)
CAVGNFNKFYF

SEQ ID NO: 396778 - protein, 14 aa, Homo sapiens
  CDR3 for beta chain variable domain of TCR clone 198389 (TRBV19, TRBJ2-1)
CASSRLASINEQFF

SEQ ID NO: 396779 - protein, 13 aa, Homo sapiens
  CDR3 for alpha chain variable domain of TCR clone 198390 (TRAV12-1, TRAJ9)
RVVLNTGGFKTIF

SEQ ID NO: 396780 - protein, 13 aa, Homo sapiens
  CDR3 for beta chain variable domain of TCR clone 198390 (TRBV10-3, TRBJ2-7)
CASKLAVNYEQYF

SEQ ID NO: 396781 - protein, 15 aa, Homo sapiens
  CDR3 for alpha chain variable domain of TCR clone 198391 (TRAV3, TRAJ20)
CAVRDIKLSDYKLSF

SEQ ID NO: 396782 - protein, 15 aa, Homo sapiens
  CDR3 for beta chain variable domain of TCR clone 198391 (TRBV7-9, TRBJ1-6)
CASSSPGRGYSPLHF

SEQ ID NO: 396783 - protein, 14 aa, Homo sapiens
  CDR3 for alpha chain variable domain of TCR clone 198392 (TRAV12-2, TRAJ13)
CAVKKTGGYQKVTF

SEQ ID NO: 396784 - protein, 13 aa, Homo sapiens
  CDR3 for beta chain variable domain of TCR clone 198392 (TRBV15, TRBJ1-6)
CATSGGLNSPHHF

SEQ ID NO: 396785 - protein, 14 aa, Homo sapiens
  CDR3 for alpha chain variable domain of TCR clone 198393 (TRAV8-1, TRAJ5)
CAVFMDTGRRALTF

SEQ ID NO: 396786 - protein, 15 aa, Homo sapiens
  CDR3 for beta chain variable domain of TCR clone 198393 (TRBV19, TRBJ2-4)
CASRGPRRGENIQYF

SEQ ID NO: 396787 - protein, 14 aa, Homo sapiens
  CDR3 for alpha chain variable domain of TCR clone 198394 (TRAV12-1, TRAJ17)
CVVNYKAAGNELTF

SEQ ID NO: 396788 - protein, 14 aa, Homo sapiens
  CDR3 for beta chain variable domain of TCR clone 198394 (TRBV7-8, TRBJ2-3)
CASSLEAGTDTQYF

SEQ ID NO: 396789 - protein, 14 aa, Homo sapiens
  CDR3 for alpha chain variable domain of TCR clone 198395 (TRAV1-2, TRAJ16)
CAVNRFSDGQKLLF

SEQ ID NO: 396790 - protein, 17 aa, Homo sapiens
  CDR3 for beta chain variable domain of TCR clone 198395 (TRBV18, TRBJ2-1)
CASSPRVAGGSYNEQFF

SEQ ID NO: 396791 - protein, 13 aa, Homo sapiens
  CDR3 for alpha chain variable domain of TCR clone 198396 (TRAV27, TRAJ42)
FAGARGSQGNLIF

SEQ ID NO: 396792 - protein, 14 aa, Homo sapiens
  CDR3 for beta chain variable domain of TCR clone 198396 (TRBV20-1, TRBJ1-1)
CSAQTRIGGTEAFF

SEQ ID NO: 396793 - protein, 11 aa, Homo sapiens
  CDR3 for alpha chain variable domain of TCR clone 198397 (TRAV1-2, TRAJ40)
CAVPGTYKYIF

SEQ ID NO: 396794 - protein, 14 aa, Homo sapiens
  CDR3 for beta chain variable domain of TCR clone 198397 (TRBV7-3, TRBJ2-2)
CASSSGGYTGELFF

SEQ ID NO: 396795 - protein, 11 aa, Homo sapiens
  CDR3 for alpha chain variable domain of TCR clone 198398 (TRAV2, TRAJ13)
CASGGYQKVTF

SEQ ID NO: 396796 - protein, 15 aa, Homo sapiens
  CDR3 for beta chain variable domain of TCR clone 198398 (TRBV11-2, TRBJ2-2)
CASSSDRVNSGELFF

SEQ ID NO: 396797 - protein, 13 aa, Homo sapiens
  CDR3 for alpha chain variable domain of TCR clone 198399 (TRAV13-1, TRAJ9)
CAASGTGVFKTIF

SEQ ID NO: 396798 - protein, 13 aa, Homo sapiens
  CDR3 for beta chain variable domain of TCR clone 198399 (TRBV12-4, TRBJ2-7)
CASSLERVREQYF

SEQ ID NO: 396799 - protein, 13 aa, Homo sapiens
  CDR3 for alpha chain variable domain of TCR clone 198400 (TRAV8-6, TRAJ49)
CAVITNTGNQFYF

SEQ ID NO: 396800 - protein, 15 aa, Homo sapiens
  CDR3 for beta chain variable domain of TCR clone 198400 (TRBV28, TRBJ1-1)
CASRIKGGLNTEAFF

SEQ ID NO: 396801 - protein, 14 aa, Homo sapiens
  CDR3 for alpha chain variable domain of TCR clone 198401 (TRAV1-2, TRAJ16)
CAVNRFSDAHKLLF

SEQ ID NO: 396802 - protein, 14 aa, Homo sapiens
  CDR3 for beta chain variable domain of TCR clone 198401 (TRBV7-9, TRBJ2-3)
CASSLEDGTDTQYF

SEQ ID NO: 396803 - protein, 14 aa, Homo sapiens
  CDR3 for alpha chain variable domain of TCR clone 198402 (TRAV13-1, TRAJ35)
CAASKGGFGNLLHC

SEQ ID NO: 396804 - protein, 13 aa, Homo sapiens
  CDR3 for beta chain variable domain of TCR clone 198402 (TRBV7-3, TRBJ1-1)
CASSQDWEAEAFF

SEQ ID NO: 396805 - protein, 16 aa, Homo sapiens
  CDR3 for alpha chain variable domain of TCR clone 198403 (TRAV19, TRAJ42)
CALSVNYGGSQGNLIF

SEQ ID NO: 396806 - protein, 13 aa, Homo sapiens
  CDR3 for beta chain variable domain of TCR clone 198403 (TRBV7-3, TRBJ2-1)
CASSPVAYNEQFV

SEQ ID NO: 396807 - protein, 11 aa, Homo sapiens
  CDR3 for alpha chain variable domain of TCR clone 198404 (TRAV35, TRAJ34)
CWAWNTDKLIF

SEQ ID NO: 396808 - protein, 14 aa, Homo sapiens
  CDR3 for beta chain variable domain of TCR clone 198404 (TRBV5-1, TRBJ2-7)
CASSRGESLYEQYF

SEQ ID NO: 396809 - protein, 13 aa, Homo sapiens
  CDR3 for alpha chain variable domain of TCR clone 198405 (TRAV30, TRAJ6)
CGFIEGGSYIHTF

SEQ ID NO: 396810 - protein, 13 aa, Homo sapiens
  CDR3 for beta chain variable domain of TCR clone 198405 (TRBV5-4, TRBJ2-5)
CASSPVSQETQYF

SEQ ID NO: 396811 - protein, 14 aa, Homo sapiens
  CDR3 for alpha chain variable domain of TCR clone 198406 (TRAV1-2, TRAJ16)
CAVNRFSDGQKLLF

SEQ ID NO: 396812 - protein, 18 aa, Homo sapiens
  CDR3 for beta chain variable domain of TCR clone 198406 (TRBV20-1, TRBJ2-6)
CSAETTPTHGSGANVVTF

SEQ ID NO: 396813 - protein, 13 aa, Homo sapiens
  CDR3 for alpha chain variable domain of TCR clone 198407 (TRAV13-1, TRAJ43)
CAASLSNNNNMRF

SEQ ID NO: 396814 - protein, 14 aa, Homo sapiens
  CDR3 for beta chain variable domain of TCR clone 198407 (TRBV5-1, TRBJ2-5)
CASSLAGKQETQYF

SEQ ID NO: 396815 - protein, 13 aa, Homo sapiens
  CDR3 for alpha chain variable domain of TCR clone 198408 (TRAV8-3, TRAJ48)
CAVVPFGNEKLTF

SEQ ID NO: 396816 - protein, 18 aa, Homo sapiens
  CDR3 for beta chain variable domain of TCR clone 198408 (TRBV11-2, TRBJ2-3)
CASSLGGASRGAPNTQYF

SEQ ID NO: 396817 - protein, 14 aa, Homo sapiens
  CDR3 for alpha chain variable domain of TCR clone 198409 (TRAV1-2, TRAJ16)
CAVNRFSEGQKLLF

SEQ ID NO: 396818 - protein, 15 aa, Homo sapiens
  CDR3 for beta chain variable domain of TCR clone 198409 (TRBV9, TRBJ1-6)
YASSVAGTGDSPLHF

SEQ ID NO: 396819 - protein, 10 aa, Homo sapiens
  CDR3 for alpha chain variable domain of TCR clone 198410 (TRAV36/DV7, TRAJ48)
WAVGNEKLTF

SEQ ID NO: 396820 - protein, 12 aa, Homo sapiens
  CDR3 for beta chain variable domain of TCR clone 198410 (TRBV20-1, TRBJ2-5)
CSAGGAGETQYF

SEQ ID NO: 396821 - protein, 13 aa, Homo sapiens
  CDR3 for alpha chain variable domain of TCR clone 198411 (TRAV21, TRAJ3)
CCEPYSSASKVIF

SEQ ID NO: 396822 - protein, 15 aa, Homo sapiens
  CDR3 for beta chain variable domain of TCR clone 198411 (TRBV7-3, TRBJ2-1)
CASSPTGGGEVEQFF

SEQ ID NO: 396823 - protein, 11 aa, Homo sapiens
  CDR3 for alpha chain variable domain of TCR clone 198412 (TRAV2, TRAJ13)
CASGGYQKVTF

SEQ ID NO: 396824 - protein, 16 aa, Homo sapiens
  CDR3 for beta chain variable domain of TCR clone 198412 (TRBV27, TRBJ2-1)
SMNVEPGTSGDNEQFF

SEQ ID NO: 396825 - protein, 16 aa, Homo sapiens
  CDR3 for alpha chain variable domain of TCR clone 198413 (TRAV8-3, TRAJ13)
CAGGAYPSGGYQKVTF

SEQ ID NO: 396826 - protein, 14 aa, Homo sapiens
  CDR3 for beta chain variable domain of TCR clone 198413 (TRBV18, TRBJ2-5)
CASSPRASSETQYF

SEQ ID NO: 396827 - protein, 14 aa, Homo sapiens
  CDR3 for alpha chain variable domain of TCR clone 198414 (TRAV12-3, TRAJ58)
CAMITETSGPRLTF

SEQ ID NO: 396828 - protein, 15 aa, Homo sapiens
  CDR3 for beta chain variable domain of TCR clone 198414 (TRBV4-1, TRBJ1-4)
CASSDTGGTNEKLFF

SEQ ID NO: 396829 - protein, 14 aa, Homo sapiens
  CDR3 for alpha chain variable domain of TCR clone 198415 (TRAV16, TRAJ33)
CALSAMDSNYQLIW

SEQ ID NO: 396830 - protein, 16 aa, Homo sapiens
  CDR3 for beta chain variable domain of TCR clone 198415 (TRBV12-4, TRBJ2-3)
CASSFPSNTNTDTQYF

SEQ ID NO: 396831 - protein, 14 aa, Homo sapiens
  CDR3 for alpha chain variable domain of TCR clone 198416 (TRAV8-2, TRAJ11)
CVVSEKSGYSTLTF

SEQ ID NO: 396832 - protein, 14 aa, Homo sapiens
  CDR3 for beta chain variable domain of TCR clone 198416 (TRBV12-5, TRBJ2-5)
CASGSRTHQETQYF

SEQ ID NO: 396833 - protein, 16 aa, Homo sapiens
  CDR3 for alpha chain variable domain of TCR clone 198417 (TRAV16, TRAJ4)
CITVLPFSGGYNKLIF

SEQ ID NO: 396834 - protein, 14 aa, Homo sapiens
  CDR3 for beta chain variable domain of TCR clone 198417 (TRBV6-1, TRBJ1-3)
CASVQGGGGNTIYF

SEQ ID NO: 396835 - protein, 20 aa, Homo sapiens
  CDR3 for alpha chain variable domain of TCR clone 198418 (TRAV1-2, TRAJ8)
CAVREDTGFRKLVLELAPDF

SEQ ID NO: 396836 - protein, 16 aa, Homo sapiens
  CDR3 for beta chain variable domain of TCR clone 198418 (TRBV28, TRBJ1-4)
CASSPPYRGRSEKLFF

SEQ ID NO: 396837 - protein, 11 aa, Homo sapiens
  CDR3 for alpha chain variable domain of TCR clone 198419 (TRAV13-1, TRAJ39)
CASHAGNILTF

SEQ ID NO: 396838 - protein, 14 aa, Homo sapiens
  CDR3 for beta chain variable domain of TCR clone 198419 (TRBV11-2, TRBJ1-5)
CASSLDRGRQTQHF

SEQ ID NO: 396839 - protein, 11 aa, Homo sapiens
  CDR3 for alpha chain variable domain of TCR clone 198420 (TRAV3, TRAJ21)
CAAGNFNKFYF

SEQ ID NO: 396840 - protein, 16 aa, Homo sapiens
  CDR3 for beta chain variable domain of TCR clone 198420 (TRBV19, TRBJ2-1)
CASSTAGPSSYNEQFF

SEQ ID NO: 396841 - protein, 12 aa, Homo sapiens
  CDR3 for alpha chain variable domain of TCR clone 198421 (TRAV12-3, TRAJ17)
CAMTLTGNKLTF

SEQ ID NO: 396842 - protein, 15 aa, Homo sapiens
  CDR3 for beta chain variable domain of TCR clone 198421 (TRBV4-3, TRBJ2-1)
CASSQMRGAHNEQFF

SEQ ID NO: 396843 - protein, 13 aa, Homo sapiens
  CDR3 for alpha chain variable domain of TCR clone 198422 (TRAV21, TRAJ57)
CAVTQGGSEKLVF

SEQ ID NO: 396844 - protein, 15 aa, Homo sapiens
  CDR3 for beta chain variable domain of TCR clone 198422 (TRBV5-1, TRBJ2-3)
CASSVTSGSTDTQYF

SEQ ID NO: 396845 - protein, 12 aa, Homo sapiens
  CDR3 for alpha chain variable domain of TCR clone 198423 (TRAV8-3, TRAJ26)
CAGDNYCQNFVF

SEQ ID NO: 396846 - protein, 13 aa, Homo sapiens
  CDR3 for beta chain variable domain of TCR clone 198423 (TRBV20-1, TRBJ1-1)
CSAPLGGGTEAFF

SEQ ID NO: 396847 - protein, 22 aa, Homo sapiens
  CDR3 for alpha chain variable domain of TCR clone 198424 (TRAV27, TRAJ38)
CAARRNAGNNHIQNPAPAVYQL

SEQ ID NO: 396848 - protein, 17 aa, Homo sapiens
  CDR3 for beta chain variable domain of TCR clone 198424 (TRBV13, TRBJ2-3)
CASSLSRVAGGRNTQYF

SEQ ID NO: 396849 - protein, 12 aa, Homo sapiens
  CDR3 for alpha chain variable domain of TCR clone 198425 (TRAV27, TRAJ35)
CAGADFGNVLHC

SEQ ID NO: 396850 - protein, 15 aa, Homo sapiens
  CDR3 for beta chain variable domain of TCR clone 198425 (TRBV7-8, TRBJ2-1)
CASSLAGGLYNEQFF

SEQ ID NO: 396851 - protein, 14 aa, Homo sapiens
  CDR3 for alpha chain variable domain of TCR clone 198426 (TRAV8-4, TRAJ48)
CAVSETFGNEKLTF

SEQ ID NO: 396852 - protein, 14 aa, Homo sapiens
  CDR3 for beta chain variable domain of TCR clone 198426 (TRBV13, TRBJ2-7)
CASSLKGVSYEQYF

SEQ ID NO: 396853 - protein, 13 aa, Homo sapiens
  CDR3 for alpha chain variable domain of TCR clone 198427 (TRAV35, TRAJ49)
CAVRLNTGNQFYF

SEQ ID NO: 396854 - protein, 17 aa, Homo sapiens
  CDR3 for beta chain variable domain of TCR clone 198427 (TRBV6-1, TRBJ2-1)
CASSEGGWGQFYNEQFF

SEQ ID NO: 396855 - protein, 15 aa, Homo sapiens
  CDR3 for alpha chain variable domain of TCR clone 198428 (TRAV8-4, TRAJ47)
CAVSDPEEYGNKLVF

SEQ ID NO: 396856 - protein, 14 aa, Homo sapiens
  CDR3 for beta chain variable domain of TCR clone 198428 (TRBV6-1, TRBJ1-3)
CASVQGGGGNTIYF

SEQ ID NO: 396857 - protein, 14 aa, Homo sapiens
  CDR3 for alpha chain variable domain of TCR clone 198429 (TRAV20, TRAJ9)
CAVQASTGGFKTIF

SEQ ID NO: 396858 - protein, 15 aa, Homo sapiens
  CDR3 for beta chain variable domain of TCR clone 198429 (TRBV27, TRBJ2-1)
CASSNGGGSSNEQFF

SEQ ID NO: 396859 - protein, 15 aa, Homo sapiens
  CDR3 for alpha chain variable domain of TCR clone 198430 (TRAV3, TRAJ22)
CAVRDRGGPARQLTF

SEQ ID NO: 396860 - protein, 16 aa, Homo sapiens
  CDR3 for beta chain variable domain of TCR clone 198430 (TRBV5-4, TRBJ2-3)
CASQEPGAGGADTQYF

SEQ ID NO: 396861 - protein, 14 aa, Homo sapiens
  CDR3 for alpha chain variable domain of TCR clone 198431 (TRAV1-2, TRAJ8)
CAVREDTGFQKLVL

SEQ ID NO: 396862 - protein, 13 aa, Homo sapiens
  CDR3 for beta chain variable domain of TCR clone 198431 (TRBV12-4, TRBJ1-5)
CASSPDRAQPQHF

SEQ ID NO: 396863 - protein, 18 aa, Homo sapiens
  CDR3 for alpha chain variable domain of TCR clone 198432 (TRAV17, TRAJ45)
CATSLDLYSGGGAVGLTL

SEQ ID NO: 396864 - protein, 15 aa, Homo sapiens
  CDR3 for beta chain variable domain of TCR clone 198432 (TRBV11-2, TRBJ2-1)
CASSKNRGLIYKQFF

SEQ ID NO: 396865 - protein, 14 aa, Homo sapiens
  CDR3 for alpha chain variable domain of TCR clone 198433 (TRAV2, TRAJ9)
CAVEDRSGGVKTIF

SEQ ID NO: 396866 - protein, 19 aa, Homo sapiens
  CDR3 for beta chain variable domain of TCR clone 198433 (TRBV25-1, TRBJ2-2)
CAILVYRVDRGRKTGELFF

SEQ ID NO: 396867 - protein, 13 aa, Homo sapiens
  CDR3 for alpha chain variable domain of TCR clone 198434 (TRAV16, TRAJ28)
CALTGAGSYQLTF

SEQ ID NO: 396868 - protein, 16 aa, Homo sapiens
  CDR3 for beta chain variable domain of TCR clone 198434 (TRBV4-3, TRBJ2-2)
CASSHLQGSGTGELFF

SEQ ID NO: 396869 - protein, 12 aa, Homo sapiens
  CDR3 for alpha chain variable domain of TCR clone 198435 (TRAV1-2, TRAJ29)
CALPSGNTPLVF

SEQ ID NO: 396870 - protein, 13 aa, Homo sapiens
  CDR3 for beta chain variable domain of TCR clone 198435 (TRBV5-4, TRBJ1-1)
CASSVDLGTEAFF

SEQ ID NO: 396871 - protein, 16 aa, Homo sapiens
  CDR3 for alpha chain variable domain of TCR clone 198436 (TRAV12-2, TRAJ40)
YAVIRGGTSGTYKYIF

SEQ ID NO: 396872 - protein, 17 aa, Homo sapiens
  CDR3 for beta chain variable domain of TCR clone 198436 (TRBV11-2, TRBJ2-1)
CASSLYPPGVEYNEQFF

SEQ ID NO: 396873 - protein, 12 aa, Homo sapiens
  CDR3 for alpha chain variable domain of TCR clone 198437 (TRAV8-3, TRAJ26)
CAGDNYGQNFVF

SEQ ID NO: 396874 - protein, 12 aa, Homo sapiens
  CDR3 for beta chain variable domain of TCR clone 198437 (TRBV11-2, TRBJ2-1)
CASSPANNEQFF

SEQ ID NO: 396875 - protein, 16 aa, Homo sapiens
  CDR3 for alpha chain variable domain of TCR clone 198438 (TRAV8-3, TRAJ8)
CAVPRDGNTGFQKPVF

SEQ ID NO: 396876 - protein, 15 aa, Homo sapiens
  CDR3 for beta chain variable domain of TCR clone 198438 (TRBV6-1, TRBJ2-6)
CASSSRPSGANVLTF

SEQ ID NO: 396877 - protein, 15 aa, Homo sapiens
  CDR3 for alpha chain variable domain of TCR clone 198439 (TRAV36/DV7, TRAJ21)
CALKFYSGSGTKLNV

SEQ ID NO: 396878 - protein, 13 aa, Homo sapiens
  CDR3 for beta chain variable domain of TCR clone 198439 (TRBV11-3, TRBJ2-5)
CASSSGLQETQYF

SEQ ID NO: 396879 - protein, 10 aa, Homo sapiens
  CDR3 for alpha chain variable domain of TCR clone 198440 (TRAV36/DV7, TRAJ56)
CAGPAVELTV

SEQ ID NO: 396880 - protein, 13 aa, Homo sapiens
  CDR3 for beta chain variable domain of TCR clone 198440 (TRBV7-9, TRBJ2-7)
CASSFWSSYEQYF

SEQ ID NO: 396881 - protein, 13 aa, Homo sapiens
  CDR3 for alpha chain variable domain of TCR clone 198441 (TRAV12-1, TRAJ40)
CVVNSSGTYKYIL

SEQ ID NO: 396882 - protein, 14 aa, Homo sapiens
  CDR3 for beta chain variable domain of TCR clone 198441 (TRBV2, TRBJ1-6)
CASGVSSYNSPLHF

SEQ ID NO: 396883 - protein, 14 aa, Homo sapiens
  CDR3 for alpha chain variable domain of TCR clone 198442 (TRAV8-4, TRAJ40)
CAVIPTSGTSKYIF

SEQ ID NO: 396884 - protein, 15 aa, Homo sapiens
  CDR3 for beta chain variable domain of TCR clone 198442 (TRBV7-2, TRBJ2-1)
CASTSASGDYSEQFF

SEQ ID NO: 396885 - protein, 12 aa, Homo sapiens
  CDR3 for alpha chain variable domain of TCR clone 198443 (TRAV1-2, TRAJ29)
CAIPLGNTPLVF

SEQ ID NO: 396886 - protein, 12 aa, Homo sapiens
  CDR3 for beta chain variable domain of TCR clone 198443 (TRBV12-4, TRBJ2-7)
CASSLGGYEQYF

SEQ ID NO: 396887 - protein, 15 aa, Homo sapiens
  CDR3 for alpha chain variable domain of TCR clone 198444 (TRAV3, TRAJ22)
CAVRDRGGSARKLTF

SEQ ID NO: 396888 - protein, 13 aa, Homo sapiens
  CDR3 for beta chain variable domain of TCR clone 198444 (TRBV12-4, TRBJ2-7)
CASSPTETYEQYF

SEQ ID NO: 396889 - protein, 14 aa, Homo sapiens
  CDR3 for alpha chain variable domain of TCR clone 198445 (TRAV2, TRAJ22)
CAVEDSGSARQLTF

SEQ ID NO: 396890 - protein, 15 aa, Homo sapiens
  CDR3 for beta chain variable domain of TCR clone 198445 (TRBV28, TRBJ1-2)
CASSLPVGHGDSYTF

SEQ ID NO: 396891 - protein, 16 aa, Homo sapiens
  CDR3 for alpha chain variable domain of TCR clone 198446 (TRAV23/DV6, TRAJ9)
CAASIGGNTGGFKTIF

SEQ ID NO: 396892 - protein, 14 aa, Homo sapiens
  CDR3 for beta chain variable domain of TCR clone 198446 (TRBV9, TRBJ2-7)
CASSVGVGSCEHYF

SEQ ID NO: 396893 - protein, 15 aa, Homo sapiens
  CDR3 for alpha chain variable domain of TCR clone 198447 (TRAV12-2, TRAJ50)
CAVNGLETSYDKVIF

SEQ ID NO: 396894 - protein, 16 aa, Homo sapiens
  CDR3 for beta chain variable domain of TCR clone 198447 (TRBV5-4, TRBJ2-3)
CARQQPGAGGADTQYF

SEQ ID NO: 396895 - protein, 13 aa, Homo sapiens
  CDR3 for alpha chain variable domain of TCR clone 198448 (TRAV22, TRAJ26)
CAVEPNYGQNFVF

SEQ ID NO: 396896 - protein, 16 aa, Homo sapiens
  CDR3 for beta chain variable domain of TCR clone 198448 (TRBV7-2, TRBJ2-6)
CASSERRASGANVLTF

SEQ ID NO: 396897 - protein, 14 aa, Homo sapiens
  CDR3 for alpha chain variable domain of TCR clone 198449 (TRAV17, TRAJ54)
CATDANQGAQKLVF

SEQ ID NO: 396898 - protein, 12 aa, Homo sapiens
  CDR3 for beta chain variable domain of TCR clone 198449 (TRBV6-3, TRBJ2-1)
CASSGSNNEQFF

SEQ ID NO: 396899 - protein, 14 aa, Homo sapiens
  CDR3 for alpha chain variable domain of TCR clone 198450 (TRAV17, TRAJ16)
CATADFSDGQKLLF

SEQ ID NO: 396900 - protein, 12 aa, Homo sapiens
  CDR3 for beta chain variable domain of TCR clone 198450 (TRBV6-3, TRBJ2-1)
CASSGSYNEQFF

SEQ ID NO: 396901 - protein, 15 aa, Homo sapiens
  CDR3 for alpha chain variable domain of TCR clone 198451 (TRAV3, TRAJ22)
CAVRDRGGSARQLTF

SEQ ID NO: 396902 - protein, 18 aa, Homo sapiens
  CDR3 for beta chain variable domain of TCR clone 198451 (TRBV28, TRBJ2-1)
CASSSTSWRANSYNEQFF

SEQ ID NO: 396903 - protein, 15 aa, Homo sapiens
  CDR3 for alpha chain variable domain of TCR clone 198452 (TRAV35, TRAJ58)
CAGRRQETSGSRLTF

SEQ ID NO: 396904 - protein, 15 aa, Homo sapiens
  CDR3 for beta chain variable domain of TCR clone 198452 (TRBV5-1, TRBJ1-1)
CASSSTTGTNTEAFF

SEQ ID NO: 396905 - protein, 16 aa, Homo sapiens
  CDR3 for alpha chain variable domain of TCR clone 198453 (TRAV27, TRAJ52)
CAGARAGGTSYGKLTF

SEQ ID NO: 396906 - protein, 17 aa, Homo sapiens
  CDR3 for beta chain variable domain of TCR clone 198453 (TRBV24-1, TRBJ2-3)
CATSDLPSGEDTDTQYF

SEQ ID NO: 396907 - protein, 14 aa, Homo sapiens
  CDR3 for alpha chain variable domain of TCR clone 198454 (TRAV12-2, TRAJ40)
CAVKIPSGTYKYIF

SEQ ID NO: 396908 - protein, 15 aa, Homo sapiens
  CDR3 for beta chain variable domain of TCR clone 198454 (TRBV5-1, TRBJ2-3)
CASSVTSGSTDTQYF

SEQ ID NO: 396909 - protein, 13 aa, Homo sapiens
  CDR3 for alpha chain variable domain of TCR clone 198455 (TRAV8-3, TRAJ44)
CAVVPGTAIKLTF

SEQ ID NO: 396910 - protein, 14 aa, Homo sapiens
  CDR3 for beta chain variable domain of TCR clone 198455 (TRBV11-2, TRBJ2-3)
RASSRLARTDTQYF

SEQ ID NO: 396911 - protein, 15 aa, Homo sapiens
  CDR3 for alpha chain variable domain of TCR clone 198456 (TRAV21, TRAJ38)
CAVRQDAGNNRKLIL

SEQ ID NO: 396912 - protein, 11 aa, Homo sapiens
  CDR3 for beta chain variable domain of TCR clone 198456 (TRBV29-1, TRBJ2-5)
CSEDRTGTQYF

SEQ ID NO: 396913 - protein, 15 aa, Homo sapiens
  CDR3 for alpha chain variable domain of TCR clone 198457 (TRAV23/DV6, TRAJ13)
CAAWPGGGGYQKVTF

SEQ ID NO: 396914 - protein, 17 aa, Homo sapiens
  CDR3 for beta chain variable domain of TCR clone 198457 (TRBV19, TRBJ2-7)
CASSISFYDSYPCEQYF

SEQ ID NO: 396915 - protein, 12 aa, Homo sapiens
  CDR3 for alpha chain variable domain of TCR clone 198458 (TRAV35, TRAJ39)
LAPNNAGNMLTF

SEQ ID NO: 396916 - protein, 15 aa, Homo sapiens
  CDR3 for beta chain variable domain of TCR clone 198458 (TRBV7-3, TRBJ2-2)
CASSETGQGNGELFF

SEQ ID NO: 396917 - protein, 15 aa, Homo sapiens
  CDR3 for alpha chain variable domain of TCR clone 198459 (TRAV8-3, TRAJ10)
CAVAVLTGGGNKLTF

SEQ ID NO: 396918 - protein, 16 aa, Homo sapiens
  CDR3 for beta chain variable domain of TCR clone 198459 (TRBV4-1, TRBJ2-7)
CASSQEWTSGPLEQYF

SEQ ID NO: 396919 - protein, 15 aa, Homo sapiens
  CDR3 for alpha chain variable domain of TCR clone 198460 (TRAV1-2, TRAJ30)
CAVMPHGNRDDKIIF

SEQ ID NO: 396920 - protein, 13 aa, Homo sapiens
  CDR3 for beta chain variable domain of TCR clone 198460 (TRBV4-1, TRBJ2-7)
CASSQGQAYEQYF

SEQ ID NO: 396921 - protein, 11 aa, Homo sapiens
  CDR3 for alpha chain variable domain of TCR clone 198461 (TRAV13-1, TRAJ43)
CAASNLLTCAL

SEQ ID NO: 396922 - protein, 15 aa, Homo sapiens
  CDR3 for beta chain variable domain of TCR clone 198461 (TRBV9, TRBJ1-6)
CASSVTGTGDSPLHF

SEQ ID NO: 396923 - protein, 14 aa, Homo sapiens
  CDR3 for alpha chain variable domain of TCR clone 198462 (TRAV12-2, TRAJ13)
CAVKKTGGYQKVTF

SEQ ID NO: 396924 - protein, 14 aa, Homo sapiens
  CDR3 for beta chain variable domain of TCR clone 198462 (TRBV12-5, TRBJ2-5)
CASGSRTHEEAQYF

SEQ ID NO: 396925 - protein, 15 aa, Homo sapiens
  CDR3 for alpha chain variable domain of TCR clone 198463 (TRAV35, TRAJ53)
CAGQDSGGSNYKLTF

SEQ ID NO: 396926 - protein, 14 aa, Homo sapiens
  CDR3 for beta chain variable domain of TCR clone 198463 (TRBV7-2, TRBJ1-5)
CASSTQGAGQPQHF

SEQ ID NO: 396927 - protein, 16 aa, Homo sapiens
  CDR3 for alpha chain variable domain of TCR clone 198464 (TRAV12-3, TRAJ53)
CAMSPGSGGSNYKLTF

SEQ ID NO: 396928 - protein, 14 aa, Homo sapiens
  CDR3 for beta chain variable domain of TCR clone 198464 (TRBV4-2, TRBJ1-5)
CASSQEGGYQPQHF

SEQ ID NO: 396929 - protein, 13 aa, Homo sapiens
  CDR3 for alpha chain variable domain of TCR clone 198465 (TRAV2, TRAJ40)
CAVVTSGTYKYIS

SEQ ID NO: 396930 - protein, 15 aa, Homo sapiens
  CDR3 for beta chain variable domain of TCR clone 198465 (TRBV11-3, TRBJ2-3)
CASLKDRREGDTQYF

SEQ ID NO: 396931 - protein, 15 aa, Homo sapiens
  CDR3 for alpha chain variable domain of TCR clone 198466 (TRAV16, TRAJ50)
CALSGWETSYDKVIF

SEQ ID NO: 396932 - protein, 14 aa, Homo sapiens
  CDR3 for beta chain variable domain of TCR clone 198466 (TRBV18, TRBJ2-3)
CASSETSAADTQYF

SEQ ID NO: 396933 - protein, 15 aa, Homo sapiens
  CDR3 for alpha chain variable domain of TCR clone 198467 (TRAV8-3, TRAJ11)
CAVGRLNSGYSTITF

SEQ ID NO: 396934 - protein, 23 aa, Homo sapiens
  CDR3 for beta chain variable domain of TCR clone 198467 (TRBV7-9, TRBJ1-2)
EAQLEKSRLLSDRFSSGEDGYTF

SEQ ID NO: 396935 - protein, 14 aa, Homo sapiens
  CDR3 for alpha chain variable domain of TCR clone 198468 (TRAV2, TRAJ37)
CAVDFTSNTGKLIF

SEQ ID NO: 396936 - protein, 13 aa, Homo sapiens
  CDR3 for beta chain variable domain of TCR clone 198468 (TRBV20-1, TRBJ1-1)
CSAPLGGGTEDFF

SEQ ID NO: 396937 - protein, 14 aa, Homo sapiens
  CDR3 for alpha chain variable domain of TCR clone 198469 (TRAV21, TRAJ35)
CAVMPIGFGNVLHC

SEQ ID NO: 396938 - protein, 16 aa, Homo sapiens
  CDR3 for beta chain variable domain of TCR clone 198469 (TRBV3-1, TRBJ2-7)
CASSQGATGVAYEQYF

SEQ ID NO: 396939 - protein, 10 aa, Homo sapiens
  CDR3 for alpha chain variable domain of TCR clone 198470 (TRAV12-3, TRAJ34)
CAMSADKLTF

SEQ ID NO: 396940 - protein, 15 aa, Homo sapiens
  CDR3 for beta chain variable domain of TCR clone 198470 (TRBV20-1, TRBJ2-3)
CSARRGEAITDTQYF

SEQ ID NO: 396941 - protein, 14 aa, Homo sapiens
  CDR3 for alpha chain variable domain of TCR clone 198471 (TRAV27, TRAJ45)
CAGAQEEVLTDSPF

SEQ ID NO: 396942 - protein, 17 aa, Homo sapiens
  CDR3 for beta chain variable domain of TCR clone 198471 (TRBV10-3, TRBJ2-4)
CTSVPSVNKGSKNIQYF

SEQ ID NO: 396943 - protein, 15 aa, Homo sapiens
  CDR3 for alpha chain variable domain of TCR clone 198472 (TRAV12-2, TRAJ53)
CAVNGGGGSNYKLTF

SEQ ID NO: 396944 - protein, 13 aa, Homo sapiens
  CDR3 for beta chain variable domain of TCR clone 198472 (TRBV6-5, TRBJ1-1)
CASGPRENTEAFF

SEQ ID NO: 396945 - protein, 15 aa, Homo sapiens
  CDR3 for alpha chain variable domain of TCR clone 198473 (TRAV8-4, TRAJ31)
CAVSGEGNNNARLMF

SEQ ID NO: 396946 - protein, 16 aa, Homo sapiens
  CDR3 for beta chain variable domain of TCR clone 198473 (TRBV12-5, TRBJ2-5)
CASGPRTSGNQETQYF

SEQ ID NO: 396947 - protein, 12 aa, Homo sapiens
  CDR3 for alpha chain variable domain of TCR clone 198474 (TRAV29/DV5, TRAJ26)
CAAIPSGQNFVF

SEQ ID NO: 396948 - protein, 12 aa, Homo sapiens
  CDR3 for beta chain variable domain of TCR clone 198474 (TRBV6-3, TRBJ2-7)
CASSLTPYEQYF

SEQ ID NO: 396949 - protein, 14 aa, Homo sapiens
  CDR3 for alpha chain variable domain of TCR clone 198475 (TRAV1-2, TRAJ8)
CAVRVDTGFQKLVF

SEQ ID NO: 396950 - protein, 14 aa, Homo sapiens
  CDR3 for beta chain variable domain of TCR clone 198475 (TRBV7-9, TRBJ1-1)
CASSLGGANTEAFF

SEQ ID NO: 396951 - protein, 16 aa, Homo sapiens
  CDR3 for alpha chain variable domain of TCR clone 198476 (TRAV1-2, TRAJ10)
CAVRGVLTGGGTKLTF

SEQ ID NO: 396952 - protein, 13 aa, Homo sapiens
  CDR3 for beta chain variable domain of TCR clone 198476 (TRBV20-1, TRBJ1-1)
CSAGTVGNTEAFF

SEQ ID NO: 396953 - protein, 11 aa, Homo sapiens
  CDR3 for alpha chain variable domain of TCR clone 198477 (TRAV2, TRAJ13)
CASGVYQKVTF

SEQ ID NO: 396954 - protein, 15 aa, Homo sapiens
  CDR3 for beta chain variable domain of TCR clone 198477 (TRBV6-1, TRBJ2-2)
CASSRLRGDTGELFF

SEQ ID NO: 396955 - protein, 16 aa, Homo sapiens
  CDR3 for alpha chain variable domain of TCR clone 198478 (TRAV30, TRAJ44)
CGTEDKRTGTASKLTF

SEQ ID NO: 396956 - protein, 12 aa, Homo sapiens
  CDR3 for beta chain variable domain of TCR clone 198478 (TRBV20-1, TRBJ2-5)
CSAPRSQETQYF

SEQ ID NO: 396957 - protein, 14 aa, Homo sapiens
  CDR3 for alpha chain variable domain of TCR clone 198479 (TRAV8-6, TRAJ30)
CAVRPVNRDDKIIF

SEQ ID NO: 396958 - protein, 13 aa, Homo sapiens
  CDR3 for beta chain variable domain of TCR clone 198479 (TRBV7-3, TRBJ2-1)
CASSLDSYNEQFF

SEQ ID NO: 396959 - protein, 14 aa, Homo sapiens
  CDR3 for alpha chain variable domain of TCR clone 198480 (TRAV12-2, TRAJ36)
CALKISTGANNLFF

SEQ ID NO: 396960 - protein, 14 aa, Homo sapiens
  CDR3 for beta chain variable domain of TCR clone 198480 (TRBV25-1, TRBJ1-2)
CASSDTTGVVGYTF

SEQ ID NO: 396961 - protein, 14 aa, Homo sapiens
  CDR3 for alpha chain variable domain of TCR clone 198481 (TRAV8-1, TRAJ5)
CAVRTDTGRRALTF

SEQ ID NO: 396962 - protein, 14 aa, Homo sapiens
  CDR3 for beta chain variable domain of TCR clone 198481 (TRBV7-8, TRBJ2-3)
CASSFLDGQDTQHF

SEQ ID NO: 396963 - protein, 14 aa, Homo sapiens
  CDR3 for alpha chain variable domain of TCR clone 198482 (TRAV1-2, TRAJ16)
CAVNRFSDGQKLLF

SEQ ID NO: 396964 - protein, 16 aa, Homo sapiens
  CDR3 for beta chain variable domain of TCR clone 198482 (TRBV7-3, TRBJ2-2)
CASSPTGHALTGEPFF

SEQ ID NO: 396965 - protein, 11 aa, Homo sapiens
  CDR3 for alpha chain variable domain of TCR clone 198483 (TRAV26-1, TRAJ37)
CIVRVGRKLIF

SEQ ID NO: 396966 - protein, 15 aa, Homo sapiens
  CDR3 for beta chain variable domain of TCR clone 198483 (TRBV7-9, TRBJ2-2)
CASSPETGAGGELFF

SEQ ID NO: 396967 - protein, 17 aa, Homo sapiens
  CDR3 for alpha chain variable domain of TCR clone 198484 (TRAV23/DV6, TRAJ58)
CAARLLRGETSGSRLTF

SEQ ID NO: 396968 - protein, 13 aa, Homo sapiens
  CDR3 for beta chain variable domain of TCR clone 198484 (TRBV13, TRBJ2-7)
CASSSGLTHEQYF

SEQ ID NO: 396969 - protein, 21 aa, Homo sapiens
  CDR3 for alpha chain variable domain of TCR clone 198485 (TRAV3, TRAJ17)
CAVRARRGGRSCRQQANFCRR

SEQ ID NO: 396970 - protein, 15 aa, Homo sapiens
  CDR3 for beta chain variable domain of TCR clone 198485 (TRBV10-2, TRBJ2-6)
CASSEQGTGANVLTF

SEQ ID NO: 396971 - protein, 17 aa, Homo sapiens
  CDR3 for alpha chain variable domain of TCR clone 198486 (TRAV3, TRAJ42)
CAVRDRDYGGSQGNLIF

SEQ ID NO: 396972 - protein, 13 aa, Homo sapiens
  CDR3 for beta chain variable domain of TCR clone 198486 (TRBV10-2, TRBJ2-7)
CASGASGCYEQYF

SEQ ID NO: 396973 - protein, 14 aa, Homo sapiens
  CDR3 for alpha chain variable domain of TCR clone 198487 (TRAV3, TRAJ34)
CAVRGINNTDKLIF

SEQ ID NO: 396974 - protein, 14 aa, Homo sapiens
  CDR3 for beta chain variable domain of TCR clone 198487 (TRBV7-2, TRBJ2-2)
CASSLGQNTGELFF

SEQ ID NO: 396975 - protein, 13 aa, Homo sapiens
  CDR3 for alpha chain variable domain of TCR clone 198488 (TRAV39, TRAJ53)
CAVDKGSNYKLTF

SEQ ID NO: 396976 - protein, 20 aa, Homo sapiens
  CDR3 for beta chain variable domain of TCR clone 198488 (TRBV19, TRBJ2-1)
CASSISRTVTSTRLNNEQFF

SEQ ID NO: 396977 - protein, 12 aa, Homo sapiens
  CDR3 for alpha chain variable domain of TCR clone 198489 (TRAV38-1, TRAJ42)
CSVGRKQGNLIF

SEQ ID NO: 396978 - protein, 17 aa, Homo sapiens
  CDR3 for beta chain variable domain of TCR clone 198489 (TRBV20-1, TRBJ2-1)
CSARDPLAGVWDNEQFF

SEQ ID NO: 396979 - protein, 11 aa, Homo sapiens
  CDR3 for alpha chain variable domain of TCR clone 198490 (TRAV20, TRAJ40)
CAVRRNTSLEQ

SEQ ID NO: 396980 - protein, 15 aa, Homo sapiens
  CDR3 for beta chain variable domain of TCR clone 198490 (TRBV7-3, TRBJ2-2)
CASSLKRGTLSGELF

SEQ ID NO: 396981 - protein, 15 aa, Homo sapiens
  CDR3 for alpha chain variable domain of TCR clone 198491 (TRAV29/DV5, TRAJ53)
CAARYSGGSNYKLTF

SEQ ID NO: 396982 - protein, 15 aa, Homo sapiens
  CDR3 for beta chain variable domain of TCR clone 198491 (TRBV28, TRBJ2-1)
RASSLGTRLYNEQFF

SEQ ID NO: 396983 - protein, 16 aa, Homo sapiens
  CDR3 for alpha chain variable domain of TCR clone 198492 (TRAV2, TRAJ26)
TAVLGPPGDYGQNFVF

SEQ ID NO: 396984 - protein, 13 aa, Homo sapiens
  CDR3 for beta chain variable domain of TCR clone 198492 (TRBV7-9, TRBJ1-2)
CASSLKQNYGYTF

SEQ ID NO: 396985 - protein, 21 aa, Homo sapiens
  CDR3 for alpha chain variable domain of TCR clone 198493 (TRAV12-1, TRAJ37)
CVVNGGLWQHRQTNLWARVNF

SEQ ID NO: 396986 - protein, 12 aa, Homo sapiens
  CDR3 for beta chain variable domain of TCR clone 198493 (TRBV20-1, TRBJ1-2)
CSAPGFNYGYTF

SEQ ID NO: 396987 - protein, 13 aa, Homo sapiens
  CDR3 for alpha chain variable domain of TCR clone 198494 (TRAV29/DV5, TRAJ31)
CGASRNNNARLMF

SEQ ID NO: 396988 - protein, 14 aa, Homo sapiens
  CDR3 for beta chain variable domain of TCR clone 198494 (TRBV7-2, TRBJ2-7)
CASSPKTSFYEQYF

SEQ ID NO: 396989 - protein, 16 aa, Homo sapiens
  CDR3 for alpha chain variable domain of TCR clone 198495 (TRAV16, TRAJ4)
CALSRMCSVGYNKLIF

SEQ ID NO: 396990 - protein, 12 aa, Homo sapiens
  CDR3 for beta chain variable domain of TCR clone 198495 (TRBV29-1, TRBJ2-3)
CSVTGGADTQYF

SEQ ID NO: 396991 - protein, 13 aa, Homo sapiens
  CDR3 for alpha chain variable domain of TCR clone 198496 (TRAV17, TRAJ13)
CAADSGGYQKVTF

SEQ ID NO: 396992 - protein, 14 aa, Homo sapiens
  CDR3 for beta chain variable domain of TCR clone 198496 (TRBV6-1, TRBJ1-1)
CASTPLQMNTEAFF

SEQ ID NO: 396993 - protein, 20 aa, Homo sapiens
  CDR3 for alpha chain variable domain of TCR clone 198497 (TRAV25, TRAJ33)
TATQTTDVGTSRGSNYQLIW

SEQ ID NO: 396994 - protein, 18 aa, Homo sapiens
  CDR3 for beta chain variable domain of TCR clone 198497 (TRBV11-2, TRBJ2-3)
CASSLGGASRGAPNTQYF

SEQ ID NO: 396995 - protein, 16 aa, Homo sapiens
  CDR3 for alpha chain variable domain of TCR clone 198498 (TRAV30, TRAJ24)
CGTEIVDADSWGKFKF

SEQ ID NO: 396996 - protein, 14 aa, Homo sapiens
  CDR3 for beta chain variable domain of TCR clone 198498 (TRBV6-1, TRBJ1-3)
CASVQGGGGNTIYF

SEQ ID NO: 396997 - protein, 12 aa, Homo sapiens
  CDR3 for alpha chain variable domain of TCR clone 198499 (TRAV8-3, TRAJ20)
CAVGGGAYKLSF

SEQ ID NO: 396998 - protein, 14 aa, Homo sapiens
  CDR3 for beta chain variable domain of TCR clone 198499 (TRBV5-1, TRBJ2-7)
CASSRGESLYEQYF

SEQ ID NO: 396999 - protein, 13 aa, Homo sapiens
  CDR3 for alpha chain variable domain of TCR clone 198500 (TRAV20, TRAJ37)
CAGCSSNTGKLIF

SEQ ID NO: 397000 - protein, 12 aa, Homo sapiens
  CDR3 for beta chain variable domain of TCR clone 198500 (TRBV19, TRBJ2-7)
CASTDRGYEQYF

SEQ ID NO: 397001 - protein, 12 aa, Homo sapiens
  CDR3 for alpha chain variable domain of TCR clone 198501 (TRAV29/DV5, TRAJ43)
CAAPYNNNDMRF

SEQ ID NO: 397002 - protein, 12 aa, Homo sapiens
  CDR3 for beta chain variable domain of TCR clone 198501 (TRBV7-3, TRBJ2-5)
CASSSPGGTQYF

SEQ ID NO: 397003 - protein, 16 aa, Homo sapiens
  CDR3 for alpha chain variable domain of TCR clone 198502 (TRAV30, TRAJ24)
CGTEIVDADSWGKFQF

SEQ ID NO: 397004 - protein, 15 aa, Homo sapiens
  CDR3 for beta chain variable domain of TCR clone 198502 (TRBV28, TRBJ2-7)
GASSQLGAGGHEQYF

SEQ ID NO: 397005 - protein, 14 aa, Homo sapiens
  CDR3 for alpha chain variable domain of TCR clone 198503 (TRAV26-1, TRAJ48)
CIIRTNFGNDKLTF

SEQ ID NO: 397006 - protein, 12 aa, Homo sapiens
  CDR3 for beta chain variable domain of TCR clone 198503 (TRBV20-1, TRBJ2-7)
RSASSGANEQYF

SEQ ID NO: 397007 - protein, 13 aa, Homo sapiens
  CDR3 for alpha chain variable domain of TCR clone 198504 (TRAV2, TRAJ40)
CAVVTSGTYKYIF

SEQ ID NO: 397008 - protein, 14 aa, Homo sapiens
  CDR3 for beta chain variable domain of TCR clone 198504 (TRBV7-6, TRBJ2-3)
CANSLGTVTDTQYF

SEQ ID NO: 397009 - protein, 13 aa, Homo sapiens
  CDR3 for alpha chain variable domain of TCR clone 198505 (TRAV30, TRAJ6)
CGTEAGGSYIPTF

SEQ ID NO: 397010 - protein, 14 aa, Homo sapiens
  CDR3 for beta chain variable domain of TCR clone 198505 (TRBV7-2, TRBJ2-7)
CASSLYPGRYEQYF

SEQ ID NO: 397011 - protein, 11 aa, Homo sapiens
  CDR3 for alpha chain variable domain of TCR clone 198506 (TRAV12-2, TRAJ29)
CAVTLRSPLVF

SEQ ID NO: 397012 - protein, 16 aa, Homo sapiens
  CDR3 for beta chain variable domain of TCR clone 198506 (TRBV19, TRBJ2-3)
CASSPGAASRTDTQYF

SEQ ID NO: 397013 - protein, 14 aa, Homo sapiens
  CDR3 for alpha chain variable domain of TCR clone 198507 (TRAV39, TRAJ54)
CAVVLIQGAQKLLF

SEQ ID NO: 397014 - protein, 16 aa, Homo sapiens
  CDR3 for beta chain variable domain of TCR clone 198507 (TRBV3-1, TRBJ2-7)
CASSQGATGVAYEQYF

SEQ ID NO: 397015 - protein, 15 aa, Homo sapiens
  CDR3 for alpha chain variable domain of TCR clone 198508 (TRAV8-3, TRAJ44)
CAVGAGAGTASKLTF

SEQ ID NO: 397016 - protein, 12 aa, Homo sapiens
  CDR3 for beta chain variable domain of TCR clone 198508 (TRBV7-8, TRBJ2-4)
CASSLWGNIQYF

SEQ ID NO: 397017 - protein, 12 aa, Homo sapiens
  CDR3 for alpha chain variable domain of TCR clone 198509 (TRAV12-3, TRAJ17)
CAMTLTGNKLTF

SEQ ID NO: 397018 - protein, 12 aa, Homo sapiens
  CDR3 for beta chain variable domain of TCR clone 198509 (TRBV18, TRBJ1-4)
CASSPSREKLFF

SEQ ID NO: 397019 - protein, 14 aa, Homo sapiens
  CDR3 for alpha chain variable domain of TCR clone 198510 (TRAV20, TRAJ56)
CAVQFGGANSKLTF

SEQ ID NO: 397020 - protein, 17 aa, Homo sapiens
  CDR3 for beta chain variable domain of TCR clone 198510 (TRBV7-9, TRBJ2-6)
CASSFGAGYSGANVLTF

SEQ ID NO: 397021 - protein, 11 aa, Homo sapiens
  CDR3 for alpha chain variable domain of TCR clone 198511 (TRAV1-1, TRAJ23)
CAFRQGGKLIF

SEQ ID NO: 397022 - protein, 20 aa, Homo sapiens
  CDR3 for beta chain variable domain of TCR clone 198511 (TRBV7-8, TRBJ2-2)
CASSHLFPGPTIHITGELFF

SEQ ID NO: 397023 - protein, 16 aa, Homo sapiens
  CDR3 for alpha chain variable domain of TCR clone 198512 (TRAV21, TRAJ37)
CAVRTAGSSNTGKLIF

SEQ ID NO: 397024 - protein, 13 aa, Homo sapiens
  CDR3 for beta chain variable domain of TCR clone 198512 (TRBV7-3, TRBJ2-3)
CASSGGGTDTQYF

SEQ ID NO: 397025 - protein, 16 aa, Homo sapiens
  CDR3 for alpha chain variable domain of TCR clone 198513 (TRAV12-2, TRAJ28)
CAVITDSGAGSYQLTF

SEQ ID NO: 397026 - protein, 14 aa, Homo sapiens
  CDR3 for beta chain variable domain of TCR clone 198513 (TRBV25-1, TRBJ1-1)
CASTHVGGNTEAFF

SEQ ID NO: 397027 - protein, 18 aa, Homo sapiens
  CDR3 for alpha chain variable domain of TCR clone 198514 (TRAV21, TRAJ52)
CAVRPSPAGGTSYGKRTF

SEQ ID NO: 397028 - protein, 16 aa, Homo sapiens
  CDR3 for beta chain variable domain of TCR clone 198514 (TRBV4-3, TRBJ2-2)
CASSHLQGSGTGELFF

SEQ ID NO: 397029 - protein, 15 aa, Homo sapiens
  CDR3 for alpha chain variable domain of TCR clone 198515 (TRAV12-3, TRAJ11)
CAMSEENSGYSTLTF

SEQ ID NO: 397030 - protein, 12 aa, Homo sapiens
  CDR3 for beta chain variable domain of TCR clone 198515 (TRBV2, TRBJ2-1)
CAYGPPGDEQFF

SEQ ID NO: 397031 - protein, 14 aa, Homo sapiens
  CDR3 for alpha chain variable domain of TCR clone 198516 (TRAV17, TRAJ35)
CATDRPGFGNVLHC

SEQ ID NO: 397032 - protein, 15 aa, Homo sapiens
  CDR3 for beta chain variable domain of TCR clone 198516 (TRBV28, TRBJ2-5)
CASSSGRVIQETQSF

SEQ ID NO: 397033 - protein, 12 aa, Homo sapiens
  CDR3 for alpha chain variable domain of TCR clone 198517 (TRAV36/DV7, TRAJ50)
CAVEPENLLRQG

SEQ ID NO: 397034 - protein, 15 aa, Homo sapiens
  CDR3 for beta chain variable domain of TCR clone 198517 (TRBV7-9, TRBJ1-5)
CASSQGHQPNQPQHF

SEQ ID NO: 397035 - protein, 14 aa, Homo sapiens
  CDR3 for alpha chain variable domain of TCR clone 198518 (TRAV12-3, TRAJ29)
CAMILLSGNTPLVF

SEQ ID NO: 397036 - protein, 16 aa, Homo sapiens
  CDR3 for beta chain variable domain of TCR clone 198518 (TRBV28, TRBJ2-7)
CASSSGTSGRGYDQYF

SEQ ID NO: 397037 - protein, 17 aa, Homo sapiens
  CDR3 for alpha chain variable domain of TCR clone 198519 (TRAV4, TRAJ13)
CFVGVQGSPGGYRKVTF

SEQ ID NO: 397038 - protein, 18 aa, Homo sapiens
  CDR3 for beta chain variable domain of TCR clone 198519 (TRBV15, TRBJ2-3)
CATSRDGARSWDTDTQYF

SEQ ID NO: 397039 - protein, 12 aa, Homo sapiens
  CDR3 for alpha chain variable domain of TCR clone 198520 (TRAV29/DV5, TRAJ49)
CVATDTGNQFYF

SEQ ID NO: 397040 - protein, 12 aa, Homo sapiens
  CDR3 for beta chain variable domain of TCR clone 198520 (TRBV12-4, TRBJ2-7)
CASILGGYEQYF

SEQ ID NO: 397041 - protein, 17 aa, Homo sapiens
  CDR3 for alpha chain variable domain of TCR clone 198521 (TRAV26-1, TRAJ46)
IASSESEKKSSGDKLTF

SEQ ID NO: 397042 - protein, 16 aa, Homo sapiens
  CDR3 for beta chain variable domain of TCR clone 198521 (TRBV27, TRBJ2-2)
CARSFRGLVRTGELFF

SEQ ID NO: 397043 - protein, 12 aa, Homo sapiens
  CDR3 for alpha chain variable domain of TCR clone 198522 (TRAV21, TRAJ31)
CAVWGNNARLMF

SEQ ID NO: 397044 - protein, 16 aa, Homo sapiens
  CDR3 for beta chain variable domain of TCR clone 198522 (TRBV27, TRBJ2-5)
CASSYGPGGQKEDQYF

SEQ ID NO: 397045 - protein, 14 aa, Homo sapiens
  CDR3 for alpha chain variable domain of TCR clone 198523 (TRAV35, TRAJ42)
CCVPYGGSQGNIIF

SEQ ID NO: 397046 - protein, 18 aa, Homo sapiens
  CDR3 for beta chain variable domain of TCR clone 198523 (TRBV13, TRBJ2-6)
CASSPMTSGGSGANVLTF

SEQ ID NO: 397047 - protein, 14 aa, Homo sapiens
  CDR3 for alpha chain variable domain of TCR clone 198524 (TRAV12-2, TRAJ53)
CAVKGGGSNYELTF

SEQ ID NO: 397048 - protein, 14 aa, Homo sapiens
  CDR3 for beta chain variable domain of TCR clone 198524 (TRBV7-7, TRBJ2-2)
CATRQDSDTGELCF

SEQ ID NO: 397049 - protein, 11 aa, Homo sapiens
  CDR3 for alpha chain variable domain of TCR clone 198525 (TRAV21, TRAJ23)
CAPQRRGKLIF

SEQ ID NO: 397050 - protein, 17 aa, Homo sapiens
  CDR3 for beta chain variable domain of TCR clone 198525 (TRBV11-2, TRBJ2-1)
CASSLYPPGVEYNEQFF

SEQ ID NO: 397051 - protein, 14 aa, Homo sapiens
  CDR3 for alpha chain variable domain of TCR clone 198526 (TRAV17, TRAJ53)
RALNSGGSNYKLTF

SEQ ID NO: 397052 - protein, 12 aa, Homo sapiens
  CDR3 for beta chain variable domain of TCR clone 198526 (TRBV6-5, TRBJ2-5)
CASSEGSETQYF

SEQ ID NO: 397053 - protein, 14 aa, Homo sapiens
  CDR3 for alpha chain variable domain of TCR clone 198527 (TRAV8-2, TRAJ4)
CVVSPSGGYNKLVF

SEQ ID NO: 397054 - protein, 15 aa, Homo sapiens
  CDR3 for beta chain variable domain of TCR clone 198527 (TRBV4-1, TRBJ1-4)
CASSDTGGTNEKLFF

SEQ ID NO: 397055 - protein, 13 aa, Homo sapiens
  CDR3 for alpha chain variable domain of TCR clone 198528 (TRAV26-1, TRAJ31)
CIVRVDGNARLMF

SEQ ID NO: 397056 - protein, 15 aa, Homo sapiens
  CDR3 for beta chain variable domain of TCR clone 198528 (TRBV11-2, TRBJ2-1)
CASSSGLAGGNEQFF

SEQ ID NO: 397057 - protein, 13 aa, Homo sapiens
  CDR3 for alpha chain variable domain of TCR clone 198529 (TRAV2, TRAJ5)
CAVIDTGRRALTF

SEQ ID NO: 397058 - protein, 12 aa, Homo sapiens
  CDR3 for beta chain variable domain of TCR clone 198529 (TRBV14, TRBJ2-5)
CASSHLKETQYF

SEQ ID NO: 397059 - protein, 14 aa, Homo sapiens
  CDR3 for alpha chain variable domain of TCR clone 198530 (TRAV17, TRAJ35)
CATDRPGFGNVLHC

SEQ ID NO: 397060 - protein, 14 aa, Homo sapiens
  CDR3 for beta chain variable domain of TCR clone 198530 (TRBV7-7, TRBJ2-7)
CASSLVRGVGEQYF

SEQ ID NO: 397061 - protein, 12 aa, Homo sapiens
  CDR3 for alpha chain variable domain of TCR clone 198531 (TRAV12-3, TRAJ17)
CAMTLTGNKLTF

SEQ ID NO: 397062 - protein, 16 aa, Homo sapiens
  CDR3 for beta chain variable domain of TCR clone 198531 (TRBV5-1, TRBJ2-3)
CASSSQGRVGADTQYF

SEQ ID NO: 397063 - protein, 15 aa, Homo sapiens
  CDR3 for alpha chain variable domain of TCR clone 198532 (TRAV8-3, TRAJ27)
CAVGPSKTNAGKSTF

SEQ ID NO: 397064 - protein, 15 aa, Homo sapiens
  CDR3 for beta chain variable domain of TCR clone 198532 (TRBV7-2, TRBJ2-1)
CASSSGLAGGYEQFF

SEQ ID NO: 397065 - protein, 14 aa, Homo sapiens
  CDR3 for alpha chain variable domain of TCR clone 198533 (TRAV1-2, TRAJ8)
RAVREDTGFQKLVF

SEQ ID NO: 397066 - protein, 13 aa, Homo sapiens
  CDR3 for beta chain variable domain of TCR clone 198533 (TRBV7-7, TRBJ2-3)
CASSLSRADTQYF

SEQ ID NO: 397067 - protein, 14 aa, Homo sapiens
  CDR3 for alpha chain variable domain of TCR clone 198534 (TRAV1-2, TRAJ16)
CAVNRFSDGQKLLF

SEQ ID NO: 397068 - protein, 13 aa, Homo sapiens
  CDR3 for beta chain variable domain of TCR clone 198534 (TRBV7-6, TRBJ1-2)
CASSVVADYGYTF

SEQ ID NO: 397069 - protein, 15 aa, Homo sapiens
  CDR3 for alpha chain variable domain of TCR clone 198535 (TRAV13-1, )
CAANIQNPDTAVYQL

SEQ ID NO: 397070 - protein, 16 aa, Homo sapiens
  CDR3 for beta chain variable domain of TCR clone 198535 (TRBV5-4, TRBJ2-3)
CASSWGTSGGTDTQYF

SEQ ID NO: 397071 - protein, 13 aa, Homo sapiens
  CDR3 for alpha chain variable domain of TCR clone 198536 (TRAV29/DV5, TRAJ31)
RAASRNNNARLMF

SEQ ID NO: 397072 - protein, 12 aa, Homo sapiens
  CDR3 for beta chain variable domain of TCR clone 198536 (TRBV14, TRBJ1-1)
CASSQLKGLAFF

SEQ ID NO: 397073 - protein, 18 aa, Homo sapiens
  CDR3 for alpha chain variable domain of TCR clone 198537 (TRAV12-3, TRAJ52)
FSMSRTNAGGTSYGKLTF

SEQ ID NO: 397074 - protein, 17 aa, Homo sapiens
  CDR3 for beta chain variable domain of TCR clone 198537 (TRBV7-3, TRBJ2-3)
CASSLMKRMRGADTQYF

SEQ ID NO: 397075 - protein, 13 aa, Homo sapiens
  CDR3 for alpha chain variable domain of TCR clone 198538 (TRAV35, TRAJ53)
CAGQEISNYKLTF

SEQ ID NO: 397076 - protein, 11 aa, Homo sapiens
  CDR3 for beta chain variable domain of TCR clone 198538 (TRBV29-1, TRBJ2-5)
CSEDRTGTQYF

SEQ ID NO: 397077 - protein, 13 aa, Homo sapiens
  CDR3 for alpha chain variable domain of TCR clone 198539 (TRAV26-1, TRAJ34)
CIVRPWITDKLIF

SEQ ID NO: 397078 - protein, 13 aa, Homo sapiens
  CDR3 for beta chain variable domain of TCR clone 198539 (TRBV5-1, TRBJ2-1)
CASSLGSYNELFF

SEQ ID NO: 397079 - protein, 12 aa, Homo sapiens
  CDR3 for alpha chain variable domain of TCR clone 198540 (TRAV13-1, TRAJ49)
CAAPNTGNQFYF

SEQ ID NO: 397080 - protein, 17 aa, Homo sapiens
  CDR3 for beta chain variable domain of TCR clone 198540 (TRBV25-1, TRBJ2-7)
CASSDARVVFSAYEHYF

SEQ ID NO: 397081 - protein, 14 aa, Homo sapiens
  CDR3 for alpha chain variable domain of TCR clone 198541 (TRAV9-2, TRAJ39)
YALYIYNAGNMLTF

SEQ ID NO: 397082 - protein, 13 aa, Homo sapiens
  CDR3 for beta chain variable domain of TCR clone 198541 (TRBV10-3, TRBJ2-7)
CASKLAVNYEQYF

SEQ ID NO: 397083 - protein, 13 aa, Homo sapiens
  CDR3 for alpha chain variable domain of TCR clone 198542 (TRAV17, TRAJ9)
CATDGTGGFKTIF

SEQ ID NO: 397084 - protein, 14 aa, Homo sapiens
  CDR3 for beta chain variable domain of TCR clone 198542 (TRBV7-6, TRBJ1-6)
CASSQAGGGSPLHF

SEQ ID NO: 397085 - protein, 13 aa, Homo sapiens
  CDR3 for alpha chain variable domain of TCR clone 198543 (TRAV35, TRAJ36)
CAGPRIGANNLFF

SEQ ID NO: 397086 - protein, 15 aa, Homo sapiens
  CDR3 for beta chain variable domain of TCR clone 198543 (TRBV28, TRBJ2-5)
CASSPPWSYQATQYF

SEQ ID NO: 397087 - protein, 13 aa, Homo sapiens
  CDR3 for alpha chain variable domain of TCR clone 198544 (TRAV12-1, TRAJ21)
CVVIGDNVNKFYF

SEQ ID NO: 397088 - protein, 14 aa, Homo sapiens
  CDR3 for beta chain variable domain of TCR clone 198544 (TRBV7-3, TRBJ2-2)
CASSLYPLPGELFF

SEQ ID NO: 397089 - protein, 15 aa, Homo sapiens
  CDR3 for alpha chain variable domain of TCR clone 198545 (TRAV16, TRAJ17)
CALSGNKATGNKLTF

SEQ ID NO: 397090 - protein, 16 aa, Homo sapiens
  CDR3 for beta chain variable domain of TCR clone 198545 (TRBV7-6, TRBJ1-6)
CASSSLPAGEYSPLHF

SEQ ID NO: 397091 - protein, 14 aa, Homo sapiens
  CDR3 for alpha chain variable domain of TCR clone 198546 (TRAV1-2, TRAJ16)
CAVNRFSDGQKLLF

SEQ ID NO: 397092 - protein, 13 aa, Homo sapiens
  CDR3 for beta chain variable domain of TCR clone 198546 (TRBV20-1, TRBJ1-5)
CSASGRGNQPQHF

SEQ ID NO: 397093 - protein, 10 aa, Homo sapiens
  CDR3 for alpha chain variable domain of TCR clone 198547 (TRAV26-2, TRAJ45)
CILRLWGYSG

SEQ ID NO: 397094 - protein, 17 aa, Homo sapiens
  CDR3 for beta chain variable domain of TCR clone 198547 (TRBV28, TRBJ2-3)
CASSPTPAGGRVDTQYF

SEQ ID NO: 397095 - protein, 14 aa, Homo sapiens
  CDR3 for alpha chain variable domain of TCR clone 198548 (TRAV8-4, TRAJ9)
CAVRINTGGFKTIF

SEQ ID NO: 397096 - protein, 13 aa, Homo sapiens
  CDR3 for beta chain variable domain of TCR clone 198548 (TRBV12-4, TRBJ2-7)
CASSPTETYEQYF

SEQ ID NO: 397097 - protein, 18 aa, Homo sapiens
  CDR3 for alpha chain variable domain of TCR clone 198549 (TRAV1-2, TRAJ18)
CAVRDMGDRGSTLGRLYF

SEQ ID NO: 397098 - protein, 16 aa, Homo sapiens
  CDR3 for beta chain variable domain of TCR clone 198549 (TRBV29-1, TRBJ1-2)
CSVEANRDIANYGYTL

SEQ ID NO: 397099 - protein, 18 aa, Homo sapiens
  CDR3 for alpha chain variable domain of TCR clone 198550 (TRAV21, TRAJ52)
CAVRPSPAGGTSYGKLTF

SEQ ID NO: 397100 - protein, 14 aa, Homo sapiens
  CDR3 for beta chain variable domain of TCR clone 198550 (TRBV20-1, TRBJ2-1)
CSAQIGGYANEQFF

SEQ ID NO: 397101 - protein, 15 aa, Homo sapiens
  CDR3 for alpha chain variable domain of TCR clone 198551 (TRAV12-1, TRAJ4)
CLVNPFSGGYNKLIF

SEQ ID NO: 397102 - protein, 16 aa, Homo sapiens
  CDR3 for beta chain variable domain of TCR clone 198551 (TRBV5-1, TRBJ1-1)
CASSKTGTEVGTEAFF

SEQ ID NO: 397103 - protein, 13 aa, Homo sapiens
  CDR3 for alpha chain variable domain of TCR clone 198552 (TRAV12-1, TRAJ16)
FVVNGPDGQKLLF

SEQ ID NO: 397104 - protein, 12 aa, Homo sapiens
  CDR3 for beta chain variable domain of TCR clone 198552 (TRBV24-1, TRBJ2-2)
CATSDPGLTGLQ

SEQ ID NO: 397105 - protein, 11 aa, Homo sapiens
  CDR3 for alpha chain variable domain of TCR clone 198553 (TRAV24, TRAJ31)
CALRDNARLMF

SEQ ID NO: 397106 - protein, 15 aa, Homo sapiens
  CDR3 for beta chain variable domain of TCR clone 198553 (TRBV11-2, TRBJ1-3)
CASSAHSSSGNTIYF

SEQ ID NO: 397107 - protein, 16 aa, Homo sapiens
  CDR3 for alpha chain variable domain of TCR clone 198554 (TRAV30, TRAJ24)
CGTEIVDADCWGKFQF

SEQ ID NO: 397108 - protein, 12 aa, Homo sapiens
  CDR3 for beta chain variable domain of TCR clone 198554 (TRBV7-8, TRBJ2-7)
CASSLGDREQYF

SEQ ID NO: 397109 - protein, 12 aa, Homo sapiens
  CDR3 for alpha chain variable domain of TCR clone 198555 (TRAV2, TRAJ10)
CASTGGGNKLTF

SEQ ID NO: 397110 - protein, 14 aa, Homo sapiens
  CDR3 for beta chain variable domain of TCR clone 198555 (TRBV7-2, TRBJ2-2)
CASRGQGSAGELFF

SEQ ID NO: 397111 - protein, 11 aa, Homo sapiens
  CDR3 for alpha chain variable domain of TCR clone 198556 (TRAV3, TRAJ21)
CAVCNFSKFYF

SEQ ID NO: 397112 - protein, 16 aa, Homo sapiens
  CDR3 for beta chain variable domain of TCR clone 198556 (TRBV19, TRBJ2-1)
CASSKAGPSSYNEQFF

SEQ ID NO: 397113 - protein, 14 aa, Homo sapiens
  CDR3 for alpha chain variable domain of TCR clone 198557 (TRAV1-2, TRAJ8)
CAVREDTGFQKLVF

SEQ ID NO: 397114 - protein, 14 aa, Homo sapiens
  CDR3 for beta chain variable domain of TCR clone 198557 (TRBV4-1, TRBJ2-3)
CASSQDWSTDTQYF

SEQ ID NO: 397115 - protein, 11 aa, Homo sapiens
  CDR3 for alpha chain variable domain of TCR clone 198558 (TRAV14/DV4, TRAJ43)
CAMREREDMRF

SEQ ID NO: 397116 - protein, 16 aa, Homo sapiens
  CDR3 for beta chain variable domain of TCR clone 198558 (TRBV12-5, TRBJ2-5)
CASGPRTSGNQETQYF

SEQ ID NO: 397117 - protein, 10 aa, Homo sapiens
  CDR3 for alpha chain variable domain of TCR clone 198559 (TRAV16, TRAJ26)
CAPEELWSEF

SEQ ID NO: 397118 - protein, 15 aa, Homo sapiens
  CDR3 for beta chain variable domain of TCR clone 198559 (TRBV7-2, TRBJ2-3)
CAGSLTGTSTDTQYF

SEQ ID NO: 397119 - protein, 15 aa, Homo sapiens
  CDR3 for alpha chain variable domain of TCR clone 198560 (TRAV8-3, TRAJ15)
CAVGAPNQAGTALIF

SEQ ID NO: 397120 - protein, 14 aa, Homo sapiens
  CDR3 for beta chain variable domain of TCR clone 198560 (TRBV20-1, TRBJ2-7)
CSPNDEASYNEQFF

SEQ ID NO: 397121 - protein, 17 aa, Homo sapiens
  CDR3 for alpha chain variable domain of TCR clone 198561 (TRAV12-2, TRAJ6)
CAPQGPPRAGGNYIPTF

SEQ ID NO: 397122 - protein, 16 aa, Homo sapiens
  CDR3 for beta chain variable domain of TCR clone 198561 (TRBV19, TRBJ2-2)
CASSTARASNTGELFF

SEQ ID NO: 397123 - protein, 11 aa, Homo sapiens
  CDR3 for alpha chain variable domain of TCR clone 198562 (TRAV12-2, TRAJ6)
CAADVSRKLHT

SEQ ID NO: 397124 - protein, 15 aa, Homo sapiens
  CDR3 for beta chain variable domain of TCR clone 198562 (TRBV28, TRBJ2-1)
CASSIIAGGRSEQFF

SEQ ID NO: 397125 - protein, 14 aa, Homo sapiens
  CDR3 for alpha chain variable domain of TCR clone 198563 (TRAV20, TRAJ56)
CAVQFGGANSKLTF

SEQ ID NO: 397126 - protein, 12 aa, Homo sapiens
  CDR3 for beta chain variable domain of TCR clone 198563 (TRBV7-8, TRBJ2-7)
CASNLGDREQYF

SEQ ID NO: 397127 - protein, 16 aa, Homo sapiens
  CDR3 for alpha chain variable domain of TCR clone 198564 (TRAV3, TRAJ37)
CAVRGKGSGNTGKLIF

SEQ ID NO: 397128 - protein, 15 aa, Homo sapiens
  CDR3 for beta chain variable domain of TCR clone 198564 (TRBV11-3, TRBJ2-3)
CASLKDRREGDTQYF

SEQ ID NO: 397129 - protein, 17 aa, Homo sapiens
  CDR3 for alpha chain variable domain of TCR clone 198565 (TRAV9-2, TRAJ45)
CALSGYYSGGGADGLTF

SEQ ID NO: 397130 - protein, 13 aa, Homo sapiens
  CDR3 for beta chain variable domain of TCR clone 198565 (TRBV19, TRBJ1-2)
CASSVPGQDGYTF

SEQ ID NO: 397131 - protein, 14 aa, Homo sapiens
  CDR3 for alpha chain variable domain of TCR clone 198566 (TRAV35, TRAJ50)
CAGHRKTSYDKVIF

SEQ ID NO: 397132 - protein, 17 aa, Homo sapiens
  CDR3 for beta chain variable domain of TCR clone 198566 (TRBV7-8, TRBJ2-6)
CASSAGTGGAGANGLTF

SEQ ID NO: 397133 - protein, 13 aa, Homo sapiens
  CDR3 for alpha chain variable domain of TCR clone 198567 (TRAV2, TRAJ40)
CAVVSSGTYKYIF

SEQ ID NO: 397134 - protein, 14 aa, Homo sapiens
  CDR3 for beta chain variable domain of TCR clone 198567 (TRBV19, TRBJ2-1)
CASPTFVLSGGQFF

SEQ ID NO: 397135 - protein, 15 aa, Homo sapiens
  CDR3 for alpha chain variable domain of TCR clone 198568 (TRAV2, TRAJ45)
CAVDGTGGGADGLTF

SEQ ID NO: 397136 - protein, 13 aa, Homo sapiens
  CDR3 for beta chain variable domain of TCR clone 198568 (TRBV11-3, TRBJ2-3)
CASSHDTKDTQYF

SEQ ID NO: 397137 - protein, 14 aa, Homo sapiens
  CDR3 for alpha chain variable domain of TCR clone 198569 (TRAV12-1, TRAJ17)
CLVNYKAAGNKLTF

SEQ ID NO: 397138 - protein, 14 aa, Homo sapiens
  CDR3 for beta chain variable domain of TCR clone 198569 (TRBV7-2, TRBJ2-7)
CASRSQGAAYEQYF

SEQ ID NO: 397139 - protein, 14 aa, Homo sapiens
  CDR3 for alpha chain variable domain of TCR clone 198570 (TRAV12-2, TRAJ13)
CAVNPSGGYQKVTF

SEQ ID NO: 397140 - protein, 11 aa, Homo sapiens
  CDR3 for beta chain variable domain of TCR clone 198570 (TRBV7-2, TRBJ2-7)
CASSSGLWQYF

SEQ ID NO: 397141 - protein, 11 aa, Homo sapiens
  CDR3 for alpha chain variable domain of TCR clone 198571 (TRAV12-2, TRAJ43)
CASPIGNDMRF

SEQ ID NO: 397142 - protein, 12 aa, Homo sapiens
  CDR3 for beta chain variable domain of TCR clone 198571 (TRBV20-1, TRBJ2-7)
CSAGLKVGEQYF

SEQ ID NO: 397143 - protein, 19 aa, Homo sapiens
  CDR3 for alpha chain variable domain of TCR clone 198572 (TRAV21, TRAJ45)
CAVEAPRGDQEEVLTDSPF

SEQ ID NO: 397144 - protein, 13 aa, Homo sapiens
  CDR3 for beta chain variable domain of TCR clone 198572 (TRBV7-6, TRBJ1-2)
CQQQVDRDYGYTF

SEQ ID NO: 397145 - protein, 14 aa, Homo sapiens
  CDR3 for alpha chain variable domain of TCR clone 198573 (TRAV38-1, TRAJ40)
CALRPTSGTYKSIF

SEQ ID NO: 397146 - protein, 14 aa, Homo sapiens
  CDR3 for beta chain variable domain of TCR clone 198573 (TRBV25-1, TRBJ1-1)
CASTHLGGNTEAFL

SEQ ID NO: 397147 - protein, 14 aa, Homo sapiens
  CDR3 for alpha chain variable domain of TCR clone 198574 (TRAV13-1, TRAJ22)
CAASYSGSARQLTF

SEQ ID NO: 397148 - protein, 13 aa, Homo sapiens
  CDR3 for beta chain variable domain of TCR clone 198574 (TRBV6-3, TRBJ1-2)
CASSLTWDYGYTF

SEQ ID NO: 397149 - protein, 15 aa, Homo sapiens
  CDR3 for alpha chain variable domain of TCR clone 198575 (TRAV26-1, TRAJ44)
CIVRANTGTASKLAF

SEQ ID NO: 397150 - protein, 16 aa, Homo sapiens
  CDR3 for beta chain variable domain of TCR clone 198575 (TRBV7-7, TRBJ2-1)
CASSLASGTSYNEQFF

SEQ ID NO: 397151 - protein, 16 aa, Homo sapiens
  CDR3 for alpha chain variable domain of TCR clone 198576 (TRAV30, TRAJ24)
CGTEIVDADSWGKFQF

SEQ ID NO: 397152 - protein, 12 aa, Homo sapiens
  CDR3 for beta chain variable domain of TCR clone 198576 (TRBV7-6, TRBJ2-5)
CASSLSQETQYF

SEQ ID NO: 397153 - protein, 17 aa, Homo sapiens
  CDR3 for alpha chain variable domain of TCR clone 198577 (TRAV27, TRAJ26)
CAGARAPLDNYVQNFVF

SEQ ID NO: 397154 - protein, 15 aa, Homo sapiens
  CDR3 for beta chain variable domain of TCR clone 198577 (TRBV11-2, TRBJ2-5)
CASSPRSGGLETQYF

SEQ ID NO: 397155 - protein, 14 aa, Homo sapiens
  CDR3 for alpha chain variable domain of TCR clone 198578 (TRAV13-1, TRAJ35)
CAASKGGFGNVLHC

SEQ ID NO: 397156 - protein, 14 aa, Homo sapiens
  CDR3 for beta chain variable domain of TCR clone 198578 (TRBV11-1, TRBJ1-1)
CASSLPRGGTEAFF

SEQ ID NO: 397157 - protein, 19 aa, Homo sapiens
  CDR3 for alpha chain variable domain of TCR clone 198579 (TRAV2, TRAJ32)
TTVLSTHPSQGGATNKLIF

SEQ ID NO: 397158 - protein, 12 aa, Homo sapiens
  CDR3 for beta chain variable domain of TCR clone 198579 (TRBV20-1, TRBJ2-7)
CSAITPTKEQYF

SEQ ID NO: 397159 - protein, 18 aa, Homo sapiens
  CDR3 for alpha chain variable domain of TCR clone 198580 (TRAV21, TRAJ52)
CAVRPSPAGGTSYGRLPF

SEQ ID NO: 397160 - protein, 17 aa, Homo sapiens
  CDR3 for beta chain variable domain of TCR clone 198580 (TRBV13, TRBJ2-3)
CASSLSRVAGGRNTQYF

SEQ ID NO: 397161 - protein, 13 aa, Homo sapiens
  CDR3 for alpha chain variable domain of TCR clone 198581 (TRAV27, TRAJ54)
CAGAGQGAQKPVF

SEQ ID NO: 397162 - protein, 15 aa, Homo sapiens
  CDR3 for beta chain variable domain of TCR clone 198581 (TRBV18, TRBJ2-6)
CASSPSYAGANGLTF

SEQ ID NO: 397163 - protein, 12 aa, Homo sapiens
  CDR3 for alpha chain variable domain of TCR clone 198582 (TRAV12-3, TRAJ5)
CAMDTGRRDLTF

SEQ ID NO: 397164 - protein, 13 aa, Homo sapiens
  CDR3 for beta chain variable domain of TCR clone 198582 (TRBV7-7, TRBJ2-2)
CASSLTSAGELFF

SEQ ID NO: 397165 - protein, 23 aa, Homo sapiens
  CDR3 for alpha chain variable domain of TCR clone 198583 (TRAV26-1, )
CIADNAGDNHIQNPDPAVYQLRD

SEQ ID NO: 397166 - protein, 18 aa, Homo sapiens
  CDR3 for beta chain variable domain of TCR clone 198583 (TRBV20-1, TRBJ2-3)
CSASGLAGGPGTTDTQYF

SEQ ID NO: 397167 - protein, 14 aa, Homo sapiens
  CDR3 for alpha chain variable domain of TCR clone 198584 (TRAV12-1, TRAJ23)
CVLIVYNQGGKLIF

SEQ ID NO: 397168 - protein, 15 aa, Homo sapiens
  CDR3 for beta chain variable domain of TCR clone 198584 (TRBV20-1, TRBJ1-5)
CSAKPPGQGPQPQHF

SEQ ID NO: 397169 - protein, 21 aa, Homo sapiens
  CDR3 for alpha chain variable domain of TCR clone 198585 (TRAV2, TRAJ10)
CCFLLCCGGSTVTGGGNKLTF

SEQ ID NO: 397170 - protein, 16 aa, Homo sapiens
  CDR3 for beta chain variable domain of TCR clone 198585 (TRBV18, TRBJ1-5)
CASSPSTVNSNQPQHF

SEQ ID NO: 397171 - protein, 17 aa, Homo sapiens
  CDR3 for alpha chain variable domain of TCR clone 198586 (TRAV3, TRAJ42)
CAVRARDYGGSQGNPIF

SEQ ID NO: 397172 - protein, 14 aa, Homo sapiens
  CDR3 for beta chain variable domain of TCR clone 198586 (TRBV7-2, TRBJ2-7)
CASRSQGAAYEQYF

SEQ ID NO: 397173 - protein, 13 aa, Homo sapiens
  CDR3 for alpha chain variable domain of TCR clone 198587 (TRAV13-1, TRAJ6)
CAASSGGSYIPTF

SEQ ID NO: 397174 - protein, 15 aa, Homo sapiens
  CDR3 for beta chain variable domain of TCR clone 198587 (TRBV12-4, TRBJ2-5)
CASSPPTGLQDTQHF

SEQ ID NO: 397175 - protein, 15 aa, Homo sapiens
  CDR3 for alpha chain variable domain of TCR clone 198588 (TRAV16, TRAJ57)
CPLSGGQGGSEKLVF

SEQ ID NO: 397176 - protein, 17 aa, Homo sapiens
  CDR3 for beta chain variable domain of TCR clone 198588 (TRBV28, TRBJ2-5)
CASSRQGGLAGAETQYF

SEQ ID NO: 397177 - protein, 12 aa, Homo sapiens
  CDR3 for alpha chain variable domain of TCR clone 198589 (TRAV21, TRAJ42)
CAVGGSQGNLIF

SEQ ID NO: 397178 - protein, 19 aa, Homo sapiens
  CDR3 for beta chain variable domain of TCR clone 198589 (TRBV5-1, TRBJ2-3)
CASSLTRIAEDWSTDTQYF

SEQ ID NO: 397179 - protein, 13 aa, Homo sapiens
  CDR3 for alpha chain variable domain of TCR clone 198590 (TRAV34, TRAJ22)
CGAGAGSARQLTF

SEQ ID NO: 397180 - protein, 15 aa, Homo sapiens
  CDR3 for beta chain variable domain of TCR clone 198590 (TRBV19, TRBJ2-4)
CASRGPRRGENIQYF

SEQ ID NO: 397181 - protein, 15 aa, Homo sapiens
  CDR3 for alpha chain variable domain of TCR clone 198591 (TRAV17, TRAJ16)
CATALRFSDGQKLSL

SEQ ID NO: 397182 - protein, 15 aa, Homo sapiens
  CDR3 for beta chain variable domain of TCR clone 198591 (TRBV20-1, TRBJ1-1)
CSASRGVTGNTEAFF

SEQ ID NO: 397183 - protein, 14 aa, Homo sapiens
  CDR3 for alpha chain variable domain of TCR clone 198592 (TRAV1-2, TRAJ8)
CAVREDTGFQKLGF

SEQ ID NO: 397184 - protein, 12 aa, Homo sapiens
  CDR3 for beta chain variable domain of TCR clone 198592 (TRBV29-1, TRBJ2-3)
CSVTGGADTQYF

SEQ ID NO: 397185 - protein, 16 aa, Homo sapiens
  CDR3 for alpha chain variable domain of TCR clone 198593 (TRAV13-1, TRAJ22)
CAVKGGRSGSARQLTF

SEQ ID NO: 397186 - protein, 15 aa, Homo sapiens
  CDR3 for beta chain variable domain of TCR clone 198593 (TRBV9, TRBJ1-6)
CASSVAGTGDSPLHF

SEQ ID NO: 397187 - protein, 18 aa, Homo sapiens
  CDR3 for alpha chain variable domain of TCR clone 198594 (TRAV12-2, )
CAVEDIQNPDPAVYQLRD

SEQ ID NO: 397188 - protein, 13 aa, Homo sapiens
  CDR3 for beta chain variable domain of TCR clone 198594 (TRBV19, TRBJ2-1)
CASSMYRVNEQFF

SEQ ID NO: 397189 - protein, 14 aa, Homo sapiens
  CDR3 for alpha chain variable domain of TCR clone 198595 (TRAV12-2, TRAJ5)
CAVNRSTGRRALTF

SEQ ID NO: 397190 - protein, 18 aa, Homo sapiens
  CDR3 for beta chain variable domain of TCR clone 198595 (TRBV12-4, TRBJ2-2)
CASSLVAGTRGRTGELFF

SEQ ID NO: 397191 - protein, 12 aa, Homo sapiens
  CDR3 for alpha chain variable domain of TCR clone 198596 (TRAV10, TRAJ34)
CVVSGKHRQAHL

SEQ ID NO: 397192 - protein, 15 aa, Homo sapiens
  CDR3 for beta chain variable domain of TCR clone 198596 (TRBV19, TRBJ1-1)
CASTSGQIQNTEAFF

SEQ ID NO: 397193 - protein, 16 aa, Homo sapiens
  CDR3 for alpha chain variable domain of TCR clone 198597 (TRAV23/DV6, TRAJ9)
CAASIGGNTGGFKTIF

SEQ ID NO: 397194 - protein, 16 aa, Homo sapiens
  CDR3 for beta chain variable domain of TCR clone 198597 (TRBV20-1, TRBJ2-6)
CSASSQGYDGANVLTF

SEQ ID NO: 397195 - protein, 14 aa, Homo sapiens
  CDR3 for alpha chain variable domain of TCR clone 198598 (TRAV12-2, TRAJ3)
CAVSLYSSASKIIF

SEQ ID NO: 397196 - protein, 15 aa, Homo sapiens
  CDR3 for beta chain variable domain of TCR clone 198598 (TRBV24-1, TRBJ2-2)
TSVPPVIGPPGSCFF

SEQ ID NO: 397197 - protein, 16 aa, Homo sapiens
  CDR3 for alpha chain variable domain of TCR clone 198599 (TRAV38-1, TRAJ56)
CAFMKRQTGANSKLTF

SEQ ID NO: 397198 - protein, 14 aa, Homo sapiens
  CDR3 for beta chain variable domain of TCR clone 198599 (TRBV4-1, TRBJ2-5)
CASSQERGRETQYF

SEQ ID NO: 397199 - protein, 16 aa, Homo sapiens
  CDR3 for alpha chain variable domain of TCR clone 198600 (TRAV13-2, TRAJ28)
CAEKSYSGAGRYQLTF

SEQ ID NO: 397200 - protein, 16 aa, Homo sapiens
  CDR3 for beta chain variable domain of TCR clone 198600 (TRBV19, TRBJ2-1)
CASSKAGPSSYNEQFF

SEQ ID NO: 397201 - protein, 14 aa, Homo sapiens
  CDR3 for alpha chain variable domain of TCR clone 198601 (TRAV23/DV6, TRAJ22)
CAASVSGSGRQLTF

SEQ ID NO: 397202 - protein, 13 aa, Homo sapiens
  CDR3 for beta chain variable domain of TCR clone 198601 (TRBV11-2, TRBJ2-5)
CASSRGPSETQYF

SEQ ID NO: 397203 - protein, 14 aa, Homo sapiens
  CDR3 for alpha chain variable domain of TCR clone 198602 (TRAV12-3, TRAJ13)
CAMKNSGGYQKVTF

SEQ ID NO: 397204 - protein, 17 aa, Homo sapiens
  CDR3 for beta chain variable domain of TCR clone 198602 (TRBV18, TRBJ1-5)
CASSPTMGQGTNQPQHF

SEQ ID NO: 397205 - protein, 14 aa, Homo sapiens
  CDR3 for alpha chain variable domain of TCR clone 198603 (TRAV3, TRAJ16)
CAVSLFSDGQKLLF

SEQ ID NO: 397206 - protein, 12 aa, Homo sapiens
  CDR3 for beta chain variable domain of TCR clone 198603 (TRBV7-9, TRBJ2-7)
CASSIKREEQYF

SEQ ID NO: 397207 - protein, 14 aa, Homo sapiens
  CDR3 for alpha chain variable domain of TCR clone 198604 (TRAV1-1, TRAJ34)
CAVSPSYNTDKLIF

SEQ ID NO: 397208 - protein, 15 aa, Homo sapiens
  CDR3 for beta chain variable domain of TCR clone 198604 (TRBV7-2, TRBJ2-2)
CASRRPGQNTGELFF

SEQ ID NO: 397209 - protein, 15 aa, Homo sapiens
  CDR3 for alpha chain variable domain of TCR clone 198605 (TRAV36/DV7, TRAJ37)
CAVDPLSSNTGKLIF

SEQ ID NO: 397210 - protein, 15 aa, Homo sapiens
  CDR3 for beta chain variable domain of TCR clone 198605 (TRBV5-7, TRBJ2-7)
CASSLGPGRGHEQYF

SEQ ID NO: 397211 - protein, 16 aa, Homo sapiens
  CDR3 for alpha chain variable domain of TCR clone 198606 (TRAV29/DV5, TRAJ36)
CAASAHYQSGANNLFF

SEQ ID NO: 397212 - protein, 14 aa, Homo sapiens
  CDR3 for beta chain variable domain of TCR clone 198606 (TRBV7-2, TRBJ1-1)
CASSFLTGTTEAFF

SEQ ID NO: 397213 - protein, 11 aa, Homo sapiens
  CDR3 for alpha chain variable domain of TCR clone 198607 (TRAV12-3, TRAJ27)
CAMANAGKSTF

SEQ ID NO: 397214 - protein, 17 aa, Homo sapiens
  CDR3 for beta chain variable domain of TCR clone 198607 (TRBV5-1, TRBJ2-5)
CASAVTRQFGNKETQYF

SEQ ID NO: 397215 - protein, 14 aa, Homo sapiens
  CDR3 for alpha chain variable domain of TCR clone 198608 (TRAV14/DV4, TRAJ49)
CAFNRYLTGNQFYF

SEQ ID NO: 397216 - protein, 14 aa, Homo sapiens
  CDR3 for beta chain variable domain of TCR clone 198608 (TRBV28, TRBJ2-7)
CASSLLRISYQQYF

SEQ ID NO: 397217 - protein, 14 aa, Homo sapiens
  CDR3 for alpha chain variable domain of TCR clone 198609 (TRAV8-4, TRAJ17)
CAVSDQAAGNKLTF

SEQ ID NO: 397218 - protein, 15 aa, Homo sapiens
  CDR3 for beta chain variable domain of TCR clone 198609 (TRBV11-2, TRBJ2-2)
CASSSDRVNAGELFF

SEQ ID NO: 397219 - protein, 12 aa, Homo sapiens
  CDR3 for alpha chain variable domain of TCR clone 198610 (TRAV12-3, TRAJ17)
CAMTLTGNKLTF

SEQ ID NO: 397220 - protein, 13 aa, Homo sapiens
  CDR3 for beta chain variable domain of TCR clone 198610 (TRBV6-1, TRBJ2-7)
CAGSRDREYEQYF

SEQ ID NO: 397221 - protein, 16 aa, Homo sapiens
  CDR3 for alpha chain variable domain of TCR clone 198611 (TRAV12-2, TRAJ50)
CAVGAATRTSYDKVIF

SEQ ID NO: 397222 - protein, 12 aa, Homo sapiens
  CDR3 for beta chain variable domain of TCR clone 198611 (TRBV12-4, TRBJ1-5)
CASSLGRQPQHF

SEQ ID NO: 397223 - protein, 15 aa, Homo sapiens
  CDR3 for alpha chain variable domain of TCR clone 198612 (TRAV12-3, TRAJ6)
CAMSAVSGGSYIPTF

SEQ ID NO: 397224 - protein, 13 aa, Homo sapiens
  CDR3 for beta chain variable domain of TCR clone 198612 (TRBV20-1, TRBJ1-2)
CSASTERIYGYTF

SEQ ID NO: 397225 - protein, 14 aa, Homo sapiens
  CDR3 for alpha chain variable domain of TCR clone 198613 (TRAV12-2, TRAJ13)
CAVKKTGGYQKVTF

SEQ ID NO: 397226 - protein, 15 aa, Homo sapiens
  CDR3 for beta chain variable domain of TCR clone 198613 (TRBV27, TRBJ2-1)
CASSNVGGSSNGQFF

SEQ ID NO: 397227 - protein, 13 aa, Homo sapiens
  CDR3 for alpha chain variable domain of TCR clone 198614 (TRAV4, TRAJ9)
CLVAEGGGFKTIF

SEQ ID NO: 397228 - protein, 17 aa, Homo sapiens
  CDR3 for beta chain variable domain of TCR clone 198614 (TRBV27, TRBJ2-1)
CASSPMKWQGSYNEQFF

SEQ ID NO: 397229 - protein, 14 aa, Homo sapiens
  CDR3 for alpha chain variable domain of TCR clone 198615 (TRAV12-2, TRAJ13)
CAVKKTGGNQKVTF

SEQ ID NO: 397230 - protein, 16 aa, Homo sapiens
  CDR3 for beta chain variable domain of TCR clone 198615 (TRBV20-1, TRBJ1-4)
CSAPGQGLLTNEKLFF

SEQ ID NO: 397231 - protein, 12 aa, Homo sapiens
  CDR3 for alpha chain variable domain of TCR clone 198616 (TRAV12-3, TRAJ17)
CAMTLTGIKLTF

SEQ ID NO: 397232 - protein, 17 aa, Homo sapiens
  CDR3 for beta chain variable domain of TCR clone 198616 (TRBV11-2, TRBJ2-1)
CASSLYPPGVEYNEQFF

SEQ ID NO: 397233 - protein, 10 aa, Homo sapiens
  CDR3 for alpha chain variable domain of TCR clone 198617 (TRAV1-2, TRAJ18)
CAVRGEAQPW

SEQ ID NO: 397234 - protein, 13 aa, Homo sapiens
  CDR3 for beta chain variable domain of TCR clone 198617 (TRBV20-1, TRBJ1-1)
FSARVGGNTEAFF

SEQ ID NO: 397235 - protein, 11 aa, Homo sapiens
  CDR3 for alpha chain variable domain of TCR clone 198618 (TRAV2, TRAJ13)
CASGGYQKVTF

SEQ ID NO: 397236 - protein, 14 aa, Homo sapiens
  CDR3 for beta chain variable domain of TCR clone 198618 (TRBV5-7, TRBJ2-1)
CASSSVANYNEQFF

SEQ ID NO: 397237 - protein, 14 aa, Homo sapiens
  CDR3 for alpha chain variable domain of TCR clone 198619 (TRAV29/DV5, TRAJ36)
CAARRKTGANNLFF

SEQ ID NO: 397238 - protein, 15 aa, Homo sapiens
  CDR3 for beta chain variable domain of TCR clone 198619 (TRBV7-8, TRBJ2-7)
CASSLERAGSYEQYF

SEQ ID NO: 397239 - protein, 14 aa, Homo sapiens
  CDR3 for alpha chain variable domain of TCR clone 198620 (TRAV29/DV5, TRAJ26)
CAASVSPRVRLLSL

SEQ ID NO: 397240 - protein, 17 aa, Homo sapiens
  CDR3 for beta chain variable domain of TCR clone 198620 (TRBV20-1, TRBJ2-2)
CSASGSGQGGLTGELFF

SEQ ID NO: 397241 - protein, 17 aa, Homo sapiens
  CDR3 for alpha chain variable domain of TCR clone 198621 (TRAV3, TRAJ6)
CAVRDGPRAGGSYIPTF

SEQ ID NO: 397242 - protein, 15 aa, Homo sapiens
  CDR3 for beta chain variable domain of TCR clone 198621 (TRBV29-1, TRBJ2-1)
CSVPTGLALYNEQFF

SEQ ID NO: 397243 - protein, 14 aa, Homo sapiens
  CDR3 for alpha chain variable domain of TCR clone 198622 (TRAV25, TRAJ35)
CARRMEGFGNVLHW

SEQ ID NO: 397244 - protein, 13 aa, Homo sapiens
  CDR3 for beta chain variable domain of TCR clone 198622 (TRBV7-2, TRBJ1-4)
CASSLAGLEKLFF

SEQ ID NO: 397245 - protein, 15 aa, Homo sapiens
  CDR3 for alpha chain variable domain of TCR clone 198623 (TRAV3, TRAJ3)
CAVRDRDSSASKIIF

SEQ ID NO: 397246 - protein, 13 aa, Homo sapiens
  CDR3 for beta chain variable domain of TCR clone 198623 (TRBV7-2, TRBJ2-2)
CASSLAVTGELFF

SEQ ID NO: 397247 - protein, 12 aa, Homo sapiens
  CDR3 for alpha chain variable domain of TCR clone 198624 (TRAV17, TRAJ20)
CATDRYDYKLSF

SEQ ID NO: 397248 - protein, 13 aa, Homo sapiens
  CDR3 for beta chain variable domain of TCR clone 198624 (TRBV19, TRBJ1-2)
CASSVPGQDGYTF

SEQ ID NO: 397249 - protein, 15 aa, Homo sapiens
  CDR3 for alpha chain variable domain of TCR clone 198625 (TRAV35, TRAJ40)
CAGQLVTSGTYKYIF

SEQ ID NO: 397250 - protein, 14 aa, Homo sapiens
  CDR3 for beta chain variable domain of TCR clone 198625 (TRBV7-3, TRBJ2-1)
CAGSLAGGTNEQFF

SEQ ID NO: 397251 - protein, 13 aa, Homo sapiens
  CDR3 for alpha chain variable domain of TCR clone 198626 (TRAV30, TRAJ22)
CGTLSGSARQLTS

SEQ ID NO: 397252 - protein, 14 aa, Homo sapiens
  CDR3 for beta chain variable domain of TCR clone 198626 (TRBV6-1, TRBJ2-1)
CASSEATRVNEQFF

SEQ ID NO: 397253 - protein, 14 aa, Homo sapiens
  CDR3 for alpha chain variable domain of TCR clone 198627 (TRAV12-1, TRAJ43)
CVVNGRSNNNDMRF

SEQ ID NO: 397254 - protein, 12 aa, Homo sapiens
  CDR3 for beta chain variable domain of TCR clone 198627 (TRBV9, TRBJ2-2)
CASSARTGELFF

SEQ ID NO: 397255 - protein, 14 aa, Homo sapiens
  CDR3 for alpha chain variable domain of TCR clone 198628 (TRAV1-2, TRAJ16)
CAVNRFSDGQKLLF

SEQ ID NO: 397256 - protein, 14 aa, Homo sapiens
  CDR3 for beta chain variable domain of TCR clone 198628 (TRBV3-1, TRBJ2-5)
CTSSQGPDQETQYF

SEQ ID NO: 397257 - protein, 12 aa, Homo sapiens
  CDR3 for alpha chain variable domain of TCR clone 198629 (TRAV21, TRAJ49)
CAVTNTGNQFYF

SEQ ID NO: 397258 - protein, 17 aa, Homo sapiens
  CDR3 for beta chain variable domain of TCR clone 198629 (TRBV13, TRBJ2-3)
CASSLSRVAGGRSTQYF

SEQ ID NO: 397259 - protein, 14 aa, Homo sapiens
  CDR3 for alpha chain variable domain of TCR clone 198630 (TRAV36/DV7, TRAJ40)
YAVETTSGTYKYIF

SEQ ID NO: 397260 - protein, 13 aa, Homo sapiens
  CDR3 for beta chain variable domain of TCR clone 198630 (TRBV10-3, TRBJ2-5)
CAMTSGAGETQYF

SEQ ID NO: 397261 - protein, 15 aa, Homo sapiens
  CDR3 for alpha chain variable domain of TCR clone 198631 (TRAV16, TRAJ16)
CALQGGGSDGQKLLF

SEQ ID NO: 397262 - protein, 16 aa, Homo sapiens
  CDR3 for beta chain variable domain of TCR clone 198631 (TRBV27, TRBJ2-2)
CASSFRGLVRTGELFF

SEQ ID NO: 397263 - protein, 15 aa, Homo sapiens
  CDR3 for alpha chain variable domain of TCR clone 198632 (TRAV26-1, TRAJ42)
CIVRVKGGSQGNLIF

SEQ ID NO: 397264 - protein, 14 aa, Homo sapiens
  CDR3 for beta chain variable domain of TCR clone 198632 (TRBV19, TRBJ2-2)
CATTGHGNTGELFF

SEQ ID NO: 397265 - protein, 14 aa, Homo sapiens
  CDR3 for alpha chain variable domain of TCR clone 198633 (TRAV13-1, TRAJ44)
CAAKATGTASKLTF

SEQ ID NO: 397266 - protein, 16 aa, Homo sapiens
  CDR3 for beta chain variable domain of TCR clone 198633 (TRBV19, TRBJ2-1)
CASSKAGPSSHNEQFF

SEQ ID NO: 397267 - protein, 16 aa, Homo sapiens
  CDR3 for alpha chain variable domain of TCR clone 198634 (TRAV9-2, TRAJ6)
CALRGPASGGSYIPTS

SEQ ID NO: 397268 - protein, 13 aa, Homo sapiens
  CDR3 for beta chain variable domain of TCR clone 198634 (TRBV7-9, TRBJ2-7)
CASSAGLQYEQYF

SEQ ID NO: 397269 - protein, 16 aa, Homo sapiens
  CDR3 for alpha chain variable domain of TCR clone 198635 (TRAV27, TRAJ52)
CAGAPAGGTSYGKLTF

SEQ ID NO: 397270 - protein, 12 aa, Homo sapiens
  CDR3 for beta chain variable domain of TCR clone 198635 (TRBV27, TRBJ2-1)
YASRGFYNEQFF

SEQ ID NO: 397271 - protein, 16 aa, Homo sapiens
  CDR3 for alpha chain variable domain of TCR clone 198636 (TRAV12-2, TRAJ18)
CAVTTDRGSTLGRLYF

SEQ ID NO: 397272 - protein, 15 aa, Homo sapiens
  CDR3 for beta chain variable domain of TCR clone 198636 (TRBV4-1, TRBJ2-5)
CASSQWDLYQETQYF

SEQ ID NO: 397273 - protein, 11 aa, Homo sapiens
  CDR3 for alpha chain variable domain of TCR clone 198637 (TRAV21, TRAJ39)
LLVNAGNMLTF

SEQ ID NO: 397274 - protein, 13 aa, Homo sapiens
  CDR3 for beta chain variable domain of TCR clone 198637 (TRBV10-3, TRBJ2-7)
CTSKLAVNYEQYF

SEQ ID NO: 397275 - protein, 14 aa, Homo sapiens
  CDR3 for alpha chain variable domain of TCR clone 198638 (TRAV12-2, TRAJ13)
CAVKKTGGYQKVTF

SEQ ID NO: 397276 - protein, 15 aa, Homo sapiens
  CDR3 for beta chain variable domain of TCR clone 198638 (TRBV27, TRBJ2-1)
CAGSTGGGSSNEQFF

SEQ ID NO: 397277 - protein, 14 aa, Homo sapiens
  CDR3 for alpha chain variable domain of TCR clone 198639 (TRAV13-2, TRAJ6)
CAERGSGGSYIPTF

SEQ ID NO: 397278 - protein, 13 aa, Homo sapiens
  CDR3 for beta chain variable domain of TCR clone 198639 (TRBV19, TRBJ1-2)
CASSQGQVYGYTI

SEQ ID NO: 397279 - protein, 17 aa, Homo sapiens
  CDR3 for alpha chain variable domain of TCR clone 198640 (TRAV3, TRAJ6)
CAVRDGPRAGGSYIPTF

SEQ ID NO: 397280 - protein, 16 aa, Homo sapiens
  CDR3 for beta chain variable domain of TCR clone 198640 (TRBV7-3, TRBJ2-2)
CASSSRGGTSTGELFF

SEQ ID NO: 397281 - protein, 15 aa, Homo sapiens
  CDR3 for alpha chain variable domain of TCR clone 198641 (TRAV3, TRAJ47)
CAVRDIGEYGNKLVF

SEQ ID NO: 397282 - protein, 18 aa, Homo sapiens
  CDR3 for beta chain variable domain of TCR clone 198641 (TRBV11-2, TRBJ2-3)
CASSLGGASPGAPNTQYF

SEQ ID NO: 397283 - protein, 16 aa, Homo sapiens
  CDR3 for alpha chain variable domain of TCR clone 198642 (TRAV3, TRAJ37)
CAVRPHGSGNTGTLIL

SEQ ID NO: 397284 - protein, 14 aa, Homo sapiens
  CDR3 for beta chain variable domain of TCR clone 198642 (TRBV25-1, TRBJ1-1)
CASTHLGGNTEAFF

SEQ ID NO: 397285 - protein, 19 aa, Homo sapiens
  CDR3 for alpha chain variable domain of TCR clone 198643 (TRAV8-4, TRAJ38)
CARLNAGNNHIQNPDPAVY

SEQ ID NO: 397286 - protein, 12 aa, Homo sapiens
  CDR3 for beta chain variable domain of TCR clone 198643 (TRBV6-1, TRBJ2-7)
CASSEPLYEQYF

SEQ ID NO: 397287 - protein, 14 aa, Homo sapiens
  CDR3 for alpha chain variable domain of TCR clone 198644 (TRAV12-2, TRAJ13)
CAVKKTGGYQKVTF

SEQ ID NO: 397288 - protein, 15 aa, Homo sapiens
  CDR3 for beta chain variable domain of TCR clone 198644 (TRBV11-1, TRBJ2-1)
CASSNGGGSPNEQFF

SEQ ID NO: 397289 - protein, 12 aa, Homo sapiens
  CDR3 for alpha chain variable domain of TCR clone 198645 (TRAV8-3, TRAJ26)
CAGDNYGQNFVF

SEQ ID NO: 397290 - protein, 16 aa, Homo sapiens
  CDR3 for beta chain variable domain of TCR clone 198645 (TRBV7-7, TRBJ2-3)
CASSPGTSGSTDTQYF

SEQ ID NO: 397291 - protein, 12 aa, Homo sapiens
  CDR3 for alpha chain variable domain of TCR clone 198646 (TRAV29/DV5, TRAJ34)
CAASGNTDKLIF

SEQ ID NO: 397292 - protein, 17 aa, Homo sapiens
  CDR3 for beta chain variable domain of TCR clone 198646 (TRBV19, TRBJ2-7)
IAVPVPKWLRRVYEQYF

SEQ ID NO: 397293 - protein, 13 aa, Homo sapiens
  CDR3 for alpha chain variable domain of TCR clone 198647 (TRAV12-1, TRAJ6)
CVVFPGGRYIPTF

SEQ ID NO: 397294 - protein, 14 aa, Homo sapiens
  CDR3 for beta chain variable domain of TCR clone 198647 (TRBV20-1, TRBJ1-3)
RSASPTGAGNTIYF

SEQ ID NO: 397295 - protein, 16 aa, Homo sapiens
  CDR3 for alpha chain variable domain of TCR clone 198648 (TRAV12-3, TRAJ52)
YAVSNAGGTSYGKLTF

SEQ ID NO: 397296 - protein, 16 aa, Homo sapiens
  CDR3 for beta chain variable domain of TCR clone 198648 (TRBV6-6, TRBJ2-1)
CASSYSFSGSYNEQFY

SEQ ID NO: 397297 - protein, 13 aa, Homo sapiens
  CDR3 for alpha chain variable domain of TCR clone 198649 (TRAV16, TRAJ28)
CALTGAGSYQLTL

SEQ ID NO: 397298 - protein, 16 aa, Homo sapiens
  CDR3 for beta chain variable domain of TCR clone 198649 (TRBV28, TRBJ1-5)
CASSLTGQGWNQPQHF

SEQ ID NO: 397299 - protein, 13 aa, Homo sapiens
  CDR3 for alpha chain variable domain of TCR clone 198650 (TRAV2, TRAJ40)
CAVVTSGTYKYIF

SEQ ID NO: 397300 - protein, 14 aa, Homo sapiens
  CDR3 for beta chain variable domain of TCR clone 198650 (TRBV11-3, TRBJ2-3)
CASSLGTTSDTQYF

SEQ ID NO: 397301 - protein, 16 aa, Homo sapiens
  CDR3 for alpha chain variable domain of TCR clone 198651 (TRAV17, TRAJ53)
CATDALSGASNYKLTF

SEQ ID NO: 397302 - protein, 15 aa, Homo sapiens
  CDR3 for beta chain variable domain of TCR clone 198651 (TRBV20-1, TRBJ2-7)
CSARDRVSGMDEQYF

SEQ ID NO: 397303 - protein, 14 aa, Homo sapiens
  CDR3 for alpha chain variable domain of TCR clone 198652 (TRAV20, TRAJ29)
CAVQAWVGNTPLVF

SEQ ID NO: 397304 - protein, 15 aa, Homo sapiens
  CDR3 for beta chain variable domain of TCR clone 198652 (TRBV29-1, TRBJ2-7)
CSVEFFDRGTYEQYF

SEQ ID NO: 397305 - protein, 11 aa, Homo sapiens
  CDR3 for alpha chain variable domain of TCR clone 198653 (TRAV12-1, TRAJ43)
CVDYDNNDMRF

SEQ ID NO: 397306 - protein, 17 aa, Homo sapiens
  CDR3 for beta chain variable domain of TCR clone 198653 (TRBV20-1, TRBJ2-1)
CSARDPLAGVWDNEQFF

SEQ ID NO: 397307 - protein, 14 aa, Homo sapiens
  CDR3 for alpha chain variable domain of TCR clone 198654 (TRAV26-1, TRAJ21)
CIVSVVYNFNKFYF

SEQ ID NO: 397308 - protein, 17 aa, Homo sapiens
  CDR3 for beta chain variable domain of TCR clone 198654 (TRBV11-2, TRBJ2-1)
CASSLYPPGVEYNEQFF

SEQ ID NO: 397309 - protein, 14 aa, Homo sapiens
  CDR3 for alpha chain variable domain of TCR clone 198655 (TRAV16, TRAJ57)
CALPTQAGSEKLVF

SEQ ID NO: 397310 - protein, 15 aa, Homo sapiens
  CDR3 for beta chain variable domain of TCR clone 198655 (TRBV28, TRBJ1-3)
CASWGGHLSGNTIYF

SEQ ID NO: 397311 - protein, 11 aa, Homo sapiens
  CDR3 for alpha chain variable domain of TCR clone 198656 (TRAV2, TRAJ13)
CASGGYQKVTF

SEQ ID NO: 397312 - protein, 15 aa, Homo sapiens
  CDR3 for beta chain variable domain of TCR clone 198656 (TRBV20-1, TRBJ2-7)
CSARVPAVYFYEQYF

SEQ ID NO: 397313 - protein, 12 aa, Homo sapiens
  CDR3 for alpha chain variable domain of TCR clone 198657 (TRAV12-3, TRAJ17)
CAMTLTGNKLTF

SEQ ID NO: 397314 - protein, 15 aa, Homo sapiens
  CDR3 for beta chain variable domain of TCR clone 198657 (TRBV7-8, TRBJ2-1)
CASSLAGGLYNEQFF

SEQ ID NO: 397315 - protein, 17 aa, Homo sapiens
  CDR3 for alpha chain variable domain of TCR clone 198658 (TRAV27, TRAJ42)
CAERVIYYGGSQGDLIF

SEQ ID NO: 397316 - protein, 14 aa, Homo sapiens
  CDR3 for beta chain variable domain of TCR clone 198658 (TRBV6-6, TRBJ2-3)
CASRLQREADTQYF

SEQ ID NO: 397317 - protein, 14 aa, Homo sapiens
  CDR3 for alpha chain variable domain of TCR clone 198659 (TRAV8-4, TRAJ13)
CAVTLSGGYQKVTF

SEQ ID NO: 397318 - protein, 16 aa, Homo sapiens
  CDR3 for beta chain variable domain of TCR clone 198659 (TRBV5-7, TRBJ1-4)
CASSPSGGLKTEKLVF

SEQ ID NO: 397319 - protein, 22 aa, Homo sapiens
  CDR3 for alpha chain variable domain of TCR clone 198660 (TRAV27, TRAJ38)
CAARRNAGNNHIQNPDPAVYQL

SEQ ID NO: 397320 - protein, 15 aa, Homo sapiens
  CDR3 for beta chain variable domain of TCR clone 198660 (TRBV7-2, TRBJ1-5)
CASSSGQGHAQPQHF

SEQ ID NO: 397321 - protein, 16 aa, Homo sapiens
  CDR3 for alpha chain variable domain of TCR clone 198661 (TRAV12-1, TRAJ43)
CVVNPHRFGTGTRLTV

SEQ ID NO: 397322 - protein, 13 aa, Homo sapiens
  CDR3 for beta chain variable domain of TCR clone 198661 (TRBV20-1, TRBJ1-1)
CSARGGGNTEAFF

SEQ ID NO: 397323 - protein, 13 aa, Homo sapiens
  CDR3 for alpha chain variable domain of TCR clone 198662 (TRAV27, TRAJ49)
CAPRPYTGNQFCF

SEQ ID NO: 397324 - protein, 16 aa, Homo sapiens
  CDR3 for beta chain variable domain of TCR clone 198662 (TRBV4-1, TRBJ1-2)
CASSQDAGQVLYGYTY

SEQ ID NO: 397325 - protein, 11 aa, Homo sapiens
  CDR3 for alpha chain variable domain of TCR clone 198663 (TRAV8-6, TRAJ13)
CALGIYQKVTF

SEQ ID NO: 397326 - protein, 16 aa, Homo sapiens
  CDR3 for beta chain variable domain of TCR clone 198663 (TRBV4-2, TRBJ1-1)
CASSQAGFGMNTEAFF

SEQ ID NO: 397327 - protein, 16 aa, Homo sapiens
  CDR3 for alpha chain variable domain of TCR clone 198664 (TRAV13-1, TRAJ48)
CAASILGNFGNEKLTF

SEQ ID NO: 397328 - protein, 16 aa, Homo sapiens
  CDR3 for beta chain variable domain of TCR clone 198664 (TRBV18, TRBJ1-5)
CASSPYRVEGNQPQHF

SEQ ID NO: 397329 - protein, 14 aa, Homo sapiens
  CDR3 for alpha chain variable domain of TCR clone 198665 (TRAV29/DV5, TRAJ32)
CAAAYGGATNKLIF

SEQ ID NO: 397330 - protein, 15 aa, Homo sapiens
  CDR3 for beta chain variable domain of TCR clone 198665 (TRBV27, TRBJ2-7)
CASSTAGAGSYEQYF

SEQ ID NO: 397331 - protein, 15 aa, Homo sapiens
  CDR3 for alpha chain variable domain of TCR clone 198666 (TRAV27, TRAJ38)
CAARRNAGSNRKLIW

SEQ ID NO: 397332 - protein, 13 aa, Homo sapiens
  CDR3 for beta chain variable domain of TCR clone 198666 (TRBV12-5, TRBJ2-3)
CASGHRQSDTQYF

SEQ ID NO: 397333 - protein, 13 aa, Homo sapiens
  CDR3 for alpha chain variable domain of TCR clone 198667 (TRAV40, TRAJ41)
CLLGAQSGYALNF

SEQ ID NO: 397334 - protein, 16 aa, Homo sapiens
  CDR3 for beta chain variable domain of TCR clone 198667 (TRBV27, TRBJ2-2)
CASSFRGLVRTGELFF

SEQ ID NO: 397335 - protein, 12 aa, Homo sapiens
  CDR3 for alpha chain variable domain of TCR clone 198668 (TRAV29/DV5, TRAJ41)
CAASDSGYALTF

SEQ ID NO: 397336 - protein, 14 aa, Homo sapiens
  CDR3 for beta chain variable domain of TCR clone 198668 (TRBV2, TRBJ1-5)
CASHAGEGDQPQHF

SEQ ID NO: 397337 - protein, 13 aa, Homo sapiens
  CDR3 for alpha chain variable domain of TCR clone 198669 (TRAV27, TRAJ49)
CAPRPYTGNQFYF

SEQ ID NO: 397338 - protein, 16 aa, Homo sapiens
  CDR3 for beta chain variable domain of TCR clone 198669 (TRBV4-1, TRBJ1-2)
CASSQDAGQVLYRYTF

SEQ ID NO: 397339 - protein, 20 aa, Homo sapiens
  CDR3 for alpha chain variable domain of TCR clone 198670 (TRAV12-1, TRAJ42)
SSVIQPPTSVKGGSQGNLIF

SEQ ID NO: 397340 - protein, 18 aa, Homo sapiens
  CDR3 for beta chain variable domain of TCR clone 198670 (TRBV11-2, TRBJ2-3)
CASSLGVASRGAPNTQYF

SEQ ID NO: 397341 - protein, 14 aa, Homo sapiens
  CDR3 for alpha chain variable domain of TCR clone 198671 (TRAV17, TRAJ34)
CATGSLEGTDKLIF

SEQ ID NO: 397342 - protein, 13 aa, Homo sapiens
  CDR3 for beta chain variable domain of TCR clone 198671 (TRBV11-2, TRBJ2-7)
CTSSGTRPYEQYF

SEQ ID NO: 397343 - protein, 16 aa, Homo sapiens
  CDR3 for alpha chain variable domain of TCR clone 198672 (TRAV30, TRAJ24)
CGTEIVDVDSWGKFQF

SEQ ID NO: 397344 - protein, 15 aa, Homo sapiens
  CDR3 for beta chain variable domain of TCR clone 198672 (TRBV20-1, TRBJ2-7)
CSARDRVSGMDEQYF

SEQ ID NO: 397345 - protein, 16 aa, Homo sapiens
  CDR3 for alpha chain variable domain of TCR clone 198673 (TRAV3, TRAJ37)
CAVRGKGSGNTGKLIF

SEQ ID NO: 397346 - protein, 17 aa, Homo sapiens
  CDR3 for beta chain variable domain of TCR clone 198673 (TRBV4-1, TRBJ2-7)
CASSRDPLGVRGGEQYF

SEQ ID NO: 397347 - protein, 12 aa, Homo sapiens
  CDR3 for alpha chain variable domain of TCR clone 198674 (TRAV23/DV6, TRAJ12)
CAVMDSSYKLIF

SEQ ID NO: 397348 - protein, 17 aa, Homo sapiens
  CDR3 for beta chain variable domain of TCR clone 198674 (TRBV7-3, TRBJ2-3)
CASSLMKRMRGADTQYF

SEQ ID NO: 397349 - protein, 13 aa, Homo sapiens
  CDR3 for alpha chain variable domain of TCR clone 198675 (TRAV23/DV6, TRAJ22)
CAPYYGSARQLTF

SEQ ID NO: 397350 - protein, 15 aa, Homo sapiens
  CDR3 for beta chain variable domain of TCR clone 198675 (TRBV11-2, TRBJ1-6)
CASSLDPWAVSPLHF

SEQ ID NO: 397351 - protein, 11 aa, Homo sapiens
  CDR3 for alpha chain variable domain of TCR clone 198676 (TRAV17, TRAJ31)
CATSNNARLMF

SEQ ID NO: 397352 - protein, 15 aa, Homo sapiens
  CDR3 for beta chain variable domain of TCR clone 198676 (TRBV7-2, TRBJ2-1)
CASSSGLAGGNEQFF

SEQ ID NO: 397353 - protein, 14 aa, Homo sapiens
  CDR3 for alpha chain variable domain of TCR clone 198677 (TRAV12-2, TRAJ24)
CAVTPADGWGNLQF

SEQ ID NO: 397354 - protein, 16 aa, Homo sapiens
  CDR3 for beta chain variable domain of TCR clone 198677 (TRBV6-4, TRBJ2-3)
APSEGGRAWGTDTQYF

SEQ ID NO: 397355 - protein, 13 aa, Homo sapiens
  CDR3 for alpha chain variable domain of TCR clone 198678 (TRAV13-2, TRAJ48)
CSEMDFVNEKLTF

SEQ ID NO: 397356 - protein, 15 aa, Homo sapiens
  CDR3 for beta chain variable domain of TCR clone 198678 (TRBV7-9, TRBJ1-6)
CASSSPGRGNSPLHF

SEQ ID NO: 397357 - protein, 11 aa, Homo sapiens
  CDR3 for alpha chain variable domain of TCR clone 198679 (TRAV2, TRAJ13)
CASGGDQKVTF

SEQ ID NO: 397358 - protein, 12 aa, Homo sapiens
  CDR3 for beta chain variable domain of TCR clone 198679 (TRBV5-1, TRBJ2-7)
CASSFRGYEQYF

SEQ ID NO: 397359 - protein, 11 aa, Homo sapiens
  CDR3 for alpha chain variable domain of TCR clone 198680 (TRAV1-1, TRAJ23)
CAVRQGGKLIF

SEQ ID NO: 397360 - protein, 13 aa, Homo sapiens
  CDR3 for beta chain variable domain of TCR clone 198680 (TRBV28, TRBJ2-7)
CAGAQQGLDEQYF

SEQ ID NO: 397361 - protein, 15 aa, Homo sapiens
  CDR3 for alpha chain variable domain of TCR clone 198681 (TRAV26-1, TRAJ29)
CIVRVEGSGNTPLVF

SEQ ID NO: 397362 - protein, 15 aa, Homo sapiens
  CDR3 for beta chain variable domain of TCR clone 198681 (TRBV2, TRBJ1-2)
CASSESRTVNYGYTF

SEQ ID NO: 397363 - protein, 12 aa, Homo sapiens
  CDR3 for alpha chain variable domain of TCR clone 198682 (TRAV27, TRAJ48)
CAGARGNAKLTF

SEQ ID NO: 397364 - protein, 14 aa, Homo sapiens
  CDR3 for beta chain variable domain of TCR clone 198682 (TRBV12-5, TRBJ2-5)
CASGSRTHQETQYF

SEQ ID NO: 397365 - protein, 13 aa, Homo sapiens
  CDR3 for alpha chain variable domain of TCR clone 198683 (TRAV27, TRAJ45)
CRSSGGGADGLTF

SEQ ID NO: 397366 - protein, 15 aa, Homo sapiens
  CDR3 for beta chain variable domain of TCR clone 198683 (TRBV7-2, TRBJ2-1)
CASSLVGSSYNEQFF

SEQ ID NO: 397367 - protein, 16 aa, Homo sapiens
  CDR3 for alpha chain variable domain of TCR clone 198684 (TRAV3, TRAJ37)
CAVRPHGSGNPGKLIF

SEQ ID NO: 397368 - protein, 17 aa, Homo sapiens
  CDR3 for beta chain variable domain of TCR clone 198684 (TRBV20-1, TRBJ2-1)
CSASSSGLAGSYNEQFF

SEQ ID NO: 397369 - protein, 12 aa, Homo sapiens
  CDR3 for alpha chain variable domain of TCR clone 198685 (TRAV8-3, TRAJ26)
CAGDNYGQNFVF

SEQ ID NO: 397370 - protein, 11 aa, Homo sapiens
  CDR3 for beta chain variable domain of TCR clone 198685 (TRBV29-1, TRBJ2-5)
CSEDRAGTQYF

SEQ ID NO: 397371 - protein, 15 aa, Homo sapiens
  CDR3 for alpha chain variable domain of TCR clone 198686 (TRAV29/DV5, TRAJ12)
CAAAPRMDSSYKLIF

SEQ ID NO: 397372 - protein, 15 aa, Homo sapiens
  CDR3 for beta chain variable domain of TCR clone 198686 (TRBV28, TRBJ1-2)
CASSSHSIANYGYTF

SEQ ID NO: 397373 - protein, 11 aa, Homo sapiens
  CDR3 for alpha chain variable domain of TCR clone 198687 (TRAV17, TRAJ43)
CATPRSNDMRF

SEQ ID NO: 397374 - protein, 15 aa, Homo sapiens
  CDR3 for beta chain variable domain of TCR clone 198687 (TRBV11-2, TRBJ2-1)
CASSLGTSGLNEQFF

SEQ ID NO: 397375 - protein, 18 aa, Homo sapiens
  CDR3 for alpha chain variable domain of TCR clone 198688 (TRAV1-2, TRAJ18)
CAVRDMGDRGSTLGRLYF

SEQ ID NO: 397376 - protein, 14 aa, Homo sapiens
  CDR3 for beta chain variable domain of TCR clone 198688 (TRBV5-4, TRBJ2-1)
CASSLDQGLNEQFF

SEQ ID NO: 397377 - protein, 13 aa, Homo sapiens
  CDR3 for alpha chain variable domain of TCR clone 198689 (TRAV13-1, TRAJ6)
CAASSGGSYIPTF

SEQ ID NO: 397378 - protein, 12 aa, Homo sapiens
  CDR3 for beta chain variable domain of TCR clone 198689 (TRBV11-2, TRBJ2-2)
CASSLGGGELFF

SEQ ID NO: 397379 - protein, 14 aa, Homo sapiens
  CDR3 for alpha chain variable domain of TCR clone 198690 (TRAV8-1, TRAJ4)
CAVPFSGGYNKLIF

SEQ ID NO: 397380 - protein, 16 aa, Homo sapiens
  CDR3 for beta chain variable domain of TCR clone 198690 (TRBV6-1, TRBJ1-2)
CASGGAWQGRSHGYTF

SEQ ID NO: 397381 - protein, 14 aa, Homo sapiens
  CDR3 for alpha chain variable domain of TCR clone 198691 (TRAV13-1, TRAJ35)
CAASKGGFGNVMHC

SEQ ID NO: 397382 - protein, 16 aa, Homo sapiens
  CDR3 for beta chain variable domain of TCR clone 198691 (TRBV7-9, TRBJ2-1)
CASSDVAGGSYNEQFF

SEQ ID NO: 397383 - protein, 15 aa, Homo sapiens
  CDR3 for alpha chain variable domain of TCR clone 198692 (TRAV16, TRAJ48)
CALFISNFGNEKLTF

SEQ ID NO: 397384 - protein, 13 aa, Homo sapiens
  CDR3 for beta chain variable domain of TCR clone 198692 (TRBV20-1, TRBJ2-7)
CSSKRRGSYEQYF

SEQ ID NO: 397385 - protein, 21 aa, Homo sapiens
  CDR3 for alpha chain variable domain of TCR clone 198693 (TRAV10, TRAJ34)
CVVSGKHRQAHLWDWYQITSL

SEQ ID NO: 397386 - protein, 14 aa, Homo sapiens
  CDR3 for beta chain variable domain of TCR clone 198693 (TRBV19, TRBJ2-1)
CASPTFVLSGEQFF

SEQ ID NO: 397387 - protein, 12 aa, Homo sapiens
  CDR3 for alpha chain variable domain of TCR clone 198694 (TRAV13-1, TRAJ49)
CEASPMGNQFYF

SEQ ID NO: 397388 - protein, 17 aa, Homo sapiens
  CDR3 for beta chain variable domain of TCR clone 198694 (TRBV11-2, TRBJ2-1)
CASSLYPPGVEYNEQFF

SEQ ID NO: 397389 - protein, 13 aa, Homo sapiens
  CDR3 for alpha chain variable domain of TCR clone 198695 (TRAV26-1, TRAJ30)
CIVRVESNDKIIF

SEQ ID NO: 397390 - protein, 15 aa, Homo sapiens
  CDR3 for beta chain variable domain of TCR clone 198695 (TRBV6-1, TRBJ2-3)
CASRERGGITDTQYF

SEQ ID NO: 397391 - protein, 11 aa, Homo sapiens
  CDR3 for alpha chain variable domain of TCR clone 198696 (TRAV12-1, TRAJ21)
CVVYNFNKFYF

SEQ ID NO: 397392 - protein, 19 aa, Homo sapiens
  CDR3 for beta chain variable domain of TCR clone 198696 (TRBV9, TRBJ2-2)
CISVPAATWEKGTPGSCFF

SEQ ID NO: 397393 - protein, 12 aa, Homo sapiens
  CDR3 for alpha chain variable domain of TCR clone 198697 (TRAV13-2, TRAJ23)
CAERHRGGKLNF

SEQ ID NO: 397394 - protein, 11 aa, Homo sapiens
  CDR3 for beta chain variable domain of TCR clone 198697 (TRBV29-1, TRBJ2-5)
CSEDRTGTQYF

SEQ ID NO: 397395 - protein, 14 aa, Homo sapiens
  CDR3 for alpha chain variable domain of TCR clone 198698 (TRAV1-1, TRAJ27)
CAVIYSTNAGKSAF

SEQ ID NO: 397396 - protein, 15 aa, Homo sapiens
  CDR3 for beta chain variable domain of TCR clone 198698 (TRBV7-2, TRBJ2-1)
CASSSGLAGGNEQFF

SEQ ID NO: 397397 - protein, 18 aa, Homo sapiens
  CDR3 for alpha chain variable domain of TCR clone 198699 (TRAV1-2, TRAJ18)
CAVRDMGDRGSTLGMLYF

SEQ ID NO: 397398 - protein, 17 aa, Homo sapiens
  CDR3 for beta chain variable domain of TCR clone 198699 (TRBV12-4, TRBJ2-2)
CASSLGVGRGGTGELFF

SEQ ID NO: 397399 - protein, 16 aa, Homo sapiens
  CDR3 for alpha chain variable domain of TCR clone 198700 (TRAV3, TRAJ18)
CAVRDGGGSTLGRLYL

SEQ ID NO: 397400 - protein, 15 aa, Homo sapiens
  CDR3 for beta chain variable domain of TCR clone 198700 (TRBV7-9, TRBJ1-6)
CASSSPGRGNSPLHF

SEQ ID NO: 397401 - protein, 17 aa, Homo sapiens
  CDR3 for alpha chain variable domain of TCR clone 198701 (TRAV8-2, TRAJ17)
CVVSDRRFKAAGNKLTF

SEQ ID NO: 397402 - protein, 18 aa, Homo sapiens
  CDR3 for beta chain variable domain of TCR clone 198701 (TRBV7-9, TRBJ2-7)
CASSLTTSGSSTWYEQYF

SEQ ID NO: 397403 - protein, 11 aa, Homo sapiens
  CDR3 for alpha chain variable domain of TCR clone 198702 (TRAV27, TRAJ20)
CAGADDYKLSF

SEQ ID NO: 397404 - protein, 14 aa, Homo sapiens
  CDR3 for beta chain variable domain of TCR clone 198702 (TRBV7-9, TRBJ1-4)
CAIAEGEANEKLFF

SEQ ID NO: 397405 - protein, 14 aa, Homo sapiens
  CDR3 for alpha chain variable domain of TCR clone 198703 (TRAV12-3, TRAJ41)
CAMSAGNSGYALNF

SEQ ID NO: 397406 - protein, 11 aa, Homo sapiens
  CDR3 for beta chain variable domain of TCR clone 198703 (TRBV7-2, TRBJ2-3)
CARSSSDTQYF

SEQ ID NO: 397407 - protein, 15 aa, Homo sapiens
  CDR3 for alpha chain variable domain of TCR clone 198704 (TRAV8-3, TRAJ11)
CAVGLLNSGYSTLTF

SEQ ID NO: 397408 - protein, 14 aa, Homo sapiens
  CDR3 for beta chain variable domain of TCR clone 198704 (TRBV19, TRBJ2-1)
CASPTFVLSGKQFF

SEQ ID NO: 397409 - protein, 14 aa, Homo sapiens
  CDR3 for alpha chain variable domain of TCR clone 198705 (TRAV26-1, TRAJ38)
CIADNAGINRKLIW

SEQ ID NO: 397410 - protein, 17 aa, Homo sapiens
  CDR3 for beta chain variable domain of TCR clone 198705 (TRBV7-9, TRBJ2-3)
CASSPTVAGDLTDTQYF

SEQ ID NO: 397411 - protein, 13 aa, Homo sapiens
  CDR3 for alpha chain variable domain of TCR clone 198706 (TRAV38-2/DV8, TRAJ45)
CAYVGGGADGLTF

SEQ ID NO: 397412 - protein, 14 aa, Homo sapiens
  CDR3 for beta chain variable domain of TCR clone 198706 (TRBV7-2, TRBJ2-7)
CASSPKTSFYEQYF

SEQ ID NO: 397413 - protein, 15 aa, Homo sapiens
  CDR3 for alpha chain variable domain of TCR clone 198707 (TRAV13-2, TRAJ32)
CAENTHGGATNKLIF

SEQ ID NO: 397414 - protein, 13 aa, Homo sapiens
  CDR3 for beta chain variable domain of TCR clone 198707 (TRBV7-9, TRBJ1-2)
CASSLKQNYGYTF

SEQ ID NO: 397415 - protein, 14 aa, Homo sapiens
  CDR3 for alpha chain variable domain of TCR clone 198708 (TRAV13-1, TRAJ35)
CAASKGGCGNVLHC

SEQ ID NO: 397416 - protein, 13 aa, Homo sapiens
  CDR3 for beta chain variable domain of TCR clone 198708 (TRBV7-3, TRBJ1-1)
CASSQDWGAEAFF

SEQ ID NO: 397417 - protein, 14 aa, Homo sapiens
  CDR3 for alpha chain variable domain of TCR clone 198709 (TRAV17, TRAJ31)
CATVLRNNHARLMF

SEQ ID NO: 397418 - protein, 11 aa, Homo sapiens
  CDR3 for beta chain variable domain of TCR clone 198709 (TRBV7-9, TRBJ2-3)
CASSPTDTQYF

SEQ ID NO: 397419 - protein, 15 aa, Homo sapiens
  CDR3 for alpha chain variable domain of TCR clone 198710 (TRAV8-3, TRAJ27)
CAVGPSKTNAGKSTF

SEQ ID NO: 397420 - protein, 16 aa, Homo sapiens
  CDR3 for beta chain variable domain of TCR clone 198710 (TRBV5-4, TRBJ2-7)
CASSSKMTSGTYEQYF

SEQ ID NO: 397421 - protein, 14 aa, Homo sapiens
  CDR3 for alpha chain variable domain of TCR clone 198711 (TRAV8-3, TRAJ35)
CAVGARGFGNVLHC

SEQ ID NO: 397422 - protein, 15 aa, Homo sapiens
  CDR3 for beta chain variable domain of TCR clone 198711 (TRBV7-3, TRBJ2-2)
CASKANGANTGELFF

SEQ ID NO: 397423 - protein, 22 aa, Homo sapiens
  CDR3 for alpha chain variable domain of TCR clone 198712 (TRAV12-2, TRAJ53)
SPVIQPPTSLPPILRSNYKLTF

SEQ ID NO: 397424 - protein, 13 aa, Homo sapiens
  CDR3 for beta chain variable domain of TCR clone 198712 (TRBV7-7, TRBJ2-3)
CASSLSRADTQYF

SEQ ID NO: 397425 - protein, 18 aa, Homo sapiens
  CDR3 for alpha chain variable domain of TCR clone 198713 (TRAV21, TRAJ52)
CAVRPSPAGGTSYGKLTF

SEQ ID NO: 397426 - protein, 15 aa, Homo sapiens
  CDR3 for beta chain variable domain of TCR clone 198713 (TRBV20-1, TRBJ2-1)
CSATSSGTSVGEQFF

SEQ ID NO: 397427 - protein, 13 aa, Homo sapiens
  CDR3 for alpha chain variable domain of TCR clone 198714 (TRAV12-3, TRAJ9)
CAMRNTGGFKTIF

SEQ ID NO: 397428 - protein, 14 aa, Homo sapiens
  CDR3 for beta chain variable domain of TCR clone 198714 (TRBV5-1, TRBJ2-7)
CASSRGESLYEQYF

SEQ ID NO: 397429 - protein, 15 aa, Homo sapiens
  CDR3 for alpha chain variable domain of TCR clone 198715 (TRAV2, TRAJ28)
CAVPYSVAGSYQLTF

SEQ ID NO: 397430 - protein, 10 aa, Homo sapiens
  CDR3 for beta chain variable domain of TCR clone 198715 (TRBV23-1, TRBJ2-1)
KWSSYNEQFF

SEQ ID NO: 397431 - protein, 17 aa, Homo sapiens
  CDR3 for alpha chain variable domain of TCR clone 198716 (TRAV38-2/DV8, TRAJ57)
CAYRSVLTQGGSEKLGF

SEQ ID NO: 397432 - protein, 16 aa, Homo sapiens
  CDR3 for beta chain variable domain of TCR clone 198716 (TRBV7-3, TRBJ2-2)
CASSLKRGTLSGELFF

SEQ ID NO: 397433 - protein, 14 aa, Homo sapiens
  CDR3 for alpha chain variable domain of TCR clone 198717 (TRAV1-2, TRAJ16)
CAVNRFSDGQKLLF

SEQ ID NO: 397434 - protein, 14 aa, Homo sapiens
  CDR3 for beta chain variable domain of TCR clone 198717 (TRBV12-4, TRBJ1-2)
CASSSSAAGSSYTF

SEQ ID NO: 397435 - protein, 11 aa, Homo sapiens
  CDR3 for alpha chain variable domain of TCR clone 198718 (TRAV21, TRAJ23)
FAPQRRGKLIF

SEQ ID NO: 397436 - protein, 14 aa, Homo sapiens
  CDR3 for beta chain variable domain of TCR clone 198718 (TRBV12-4, TRBJ1-1)
CASTWTGHDTEAFF

SEQ ID NO: 397437 - protein, 16 aa, Homo sapiens
  CDR3 for alpha chain variable domain of TCR clone 198719 (TRAV26-1, TRAJ37)
CIVRGDGSGNTGKLIF

SEQ ID NO: 397438 - protein, 17 aa, Homo sapiens
  CDR3 for beta chain variable domain of TCR clone 198719 (TRBV4-1, TRBJ2-7)
CASSRDPPGVRGGEQYF

SEQ ID NO: 397439 - protein, 14 aa, Homo sapiens
  CDR3 for alpha chain variable domain of TCR clone 198720 (TRAV38-2/DV8, TRAJ57)
CARNTQGGSEKLVF

SEQ ID NO: 397440 - protein, 15 aa, Homo sapiens
  CDR3 for beta chain variable domain of TCR clone 198720 (TRBV2, TRBJ2-1)
CASSEEREGDNEQFF

SEQ ID NO: 397441 - protein, 14 aa, Homo sapiens
  CDR3 for alpha chain variable domain of TCR clone 198721 (TRAV23/DV6, TRAJ17)
CAASIGAAGNKLTL

SEQ ID NO: 397442 - protein, 15 aa, Homo sapiens
  CDR3 for beta chain variable domain of TCR clone 198721 (TRBV7-9, TRBJ1-6)
CASSSPGRGNSPLHF

SEQ ID NO: 397443 - protein, 14 aa, Homo sapiens
  CDR3 for alpha chain variable domain of TCR clone 198722 (TRAV27, TRAJ45)
CAGAQAEVLTDFPL

SEQ ID NO: 397444 - protein, 14 aa, Homo sapiens
  CDR3 for beta chain variable domain of TCR clone 198722 (TRBV7-2, TRBJ2-7)
CASSPKTSFYEQYF

SEQ ID NO: 397445 - protein, 16 aa, Homo sapiens
  CDR3 for alpha chain variable domain of TCR clone 198723 (TRAV16, TRAJ4)
CALSRMFSGGYNTLIF

SEQ ID NO: 397446 - protein, 12 aa, Homo sapiens
  CDR3 for beta chain variable domain of TCR clone 198723 (TRBV29-1, TRBJ2-3)
CSVTGGADTQYF

SEQ ID NO: 397447 - protein, 13 aa, Homo sapiens
  CDR3 for alpha chain variable domain of TCR clone 198724 (TRAV12-2, TRAJ10)
CAVPTGGGNKLTF

SEQ ID NO: 397448 - protein, 14 aa, Homo sapiens
  CDR3 for beta chain variable domain of TCR clone 198724 (TRBV25-1, TRBJ1-1)
CASTHLGGNTEAFV

SEQ ID NO: 397449 - protein, 12 aa, Homo sapiens
  CDR3 for alpha chain variable domain of TCR clone 198725 (TRAV38-2/DV8, TRAJ48)
CALLRGNEKLTF

SEQ ID NO: 397450 - protein, 15 aa, Homo sapiens
  CDR3 for beta chain variable domain of TCR clone 198725 (TRBV6-1, TRBJ2-1)
CASSELRGQYNEQFF

SEQ ID NO: 397451 - protein, 22 aa, Homo sapiens
  CDR3 for alpha chain variable domain of TCR clone 198726 (TRAV27, TRAJ38)
CAARRNAGNNHIQNPDPAVYQL

SEQ ID NO: 397452 - protein, 17 aa, Homo sapiens
  CDR3 for beta chain variable domain of TCR clone 198726 (TRBV20-1, TRBJ2-2)
CSASGSGQGGLTGELFF

SEQ ID NO: 397453 - protein, 13 aa, Homo sapiens
  CDR3 for alpha chain variable domain of TCR clone 198727 (TRAV21, TRAJ27)
CAARPGNAGKSTF

SEQ ID NO: 397454 - protein, 17 aa, Homo sapiens
  CDR3 for beta chain variable domain of TCR clone 198727 (TRBV7-8, TRBJ2-6)
CASSAGTGGAGDNVLTF

SEQ ID NO: 397455 - protein, 15 aa, Homo sapiens
  CDR3 for alpha chain variable domain of TCR clone 198728 (TRAV21, TRAJ52)
CAVRGGGTSYGKLTF

SEQ ID NO: 397456 - protein, 13 aa, Homo sapiens
  CDR3 for beta chain variable domain of TCR clone 198728 (TRBV9, TRBJ2-1)
CASSPSGGSEQFF

SEQ ID NO: 397457 - protein, 11 aa, Homo sapiens
  CDR3 for alpha chain variable domain of TCR clone 198729 (TRAV21, TRAJ9)
CAVPGGFKTLF

SEQ ID NO: 397458 - protein, 12 aa, Homo sapiens
  CDR3 for beta chain variable domain of TCR clone 198729 (TRBV20-1, TRBJ2-3)
CSARAGTDTQYF

SEQ ID NO: 397459 - protein, 15 aa, Homo sapiens
  CDR3 for alpha chain variable domain of TCR clone 198730 (TRAV13-1, TRAJ11)
CAASNRNSGYSTLTF

SEQ ID NO: 397460 - protein, 11 aa, Homo sapiens
  CDR3 for beta chain variable domain of TCR clone 198730 (TRBV20-1, TRBJ2-7)
FSARLSYEQYF

SEQ ID NO: 397461 - protein, 14 aa, Homo sapiens
  CDR3 for alpha chain variable domain of TCR clone 198731 (TRAV26-1, TRAJ38)
CIAVNAGNNRKLFW

SEQ ID NO: 397462 - protein, 13 aa, Homo sapiens
  CDR3 for beta chain variable domain of TCR clone 198731 (TRBV20-1, TRBJ1-1)
CSARGGGNTEAFF

SEQ ID NO: 397463 - protein, 15 aa, Homo sapiens
  CDR3 for alpha chain variable domain of TCR clone 198732 (TRAV10, TRAJ6)
CVVSGGSGGSYIPTF

SEQ ID NO: 397464 - protein, 16 aa, Homo sapiens
  CDR3 for beta chain variable domain of TCR clone 198732 (TRBV5-4, TRBJ2-3)
CASQQPGAGGADTQYF

SEQ ID NO: 397465 - protein, 12 aa, Homo sapiens
  CDR3 for alpha chain variable domain of TCR clone 198733 (TRAV1-1, TRAJ8)
CAGGTGFQKLVC

SEQ ID NO: 397466 - protein, 16 aa, Homo sapiens
  CDR3 for beta chain variable domain of TCR clone 198733 (TRBV12-5, TRBJ2-5)
CASGTRTSGNQETQYF

SEQ ID NO: 397467 - protein, 13 aa, Homo sapiens
  CDR3 for alpha chain variable domain of TCR clone 198734 (TRAV17, TRAJ5)
CALRGTGRRAVTF

SEQ ID NO: 397468 - protein, 13 aa, Homo sapiens
  CDR3 for beta chain variable domain of TCR clone 198734 (TRBV4-2, TRBJ1-1)
CASSQAGNTEAFF

SEQ ID NO: 397469 - protein, 14 aa, Homo sapiens
  CDR3 for alpha chain variable domain of TCR clone 198735 (TRAV8-2, TRAJ37)
CVVSISGNTGKLIV

SEQ ID NO: 397470 - protein, 11 aa, Homo sapiens
  CDR3 for beta chain variable domain of TCR clone 198735 (TRBV18, TRBJ2-5)
CASSPRETQYF

SEQ ID NO: 397471 - protein, 16 aa, Homo sapiens
  CDR3 for alpha chain variable domain of TCR clone 198736 (TRAV12-3, TRAJ53)
CAMSPGSGVCNYKLTF

SEQ ID NO: 397472 - protein, 11 aa, Homo sapiens
  CDR3 for beta chain variable domain of TCR clone 198736 (TRBV29-1, TRBJ2-5)
CSEDRTGTQYF

SEQ ID NO: 397473 - protein, 18 aa, Homo sapiens
  CDR3 for alpha chain variable domain of TCR clone 198737 (TRAV29/DV5, TRAJ52)
CAAGFRGAGGTSYGKLTF

SEQ ID NO: 397474 - protein, 16 aa, Homo sapiens
  CDR3 for beta chain variable domain of TCR clone 198737 (TRBV7-3, TRBJ2-2)
CASSLKRGTMSGELFF

SEQ ID NO: 397475 - protein, 12 aa, Homo sapiens
  CDR3 for alpha chain variable domain of TCR clone 198738 (TRAV8-3, TRAJ26)
CAGDNYGQNFVF

SEQ ID NO: 397476 - protein, 14 aa, Homo sapiens
  CDR3 for beta chain variable domain of TCR clone 198738 (TRBV2, TRBJ2-1)
CASSEARQGVSEFF

SEQ ID NO: 397477 - protein, 13 aa, Homo sapiens
  CDR3 for alpha chain variable domain of TCR clone 198739 (TRAV1-2, TRAJ9)
CAALNTGGFKTIF

SEQ ID NO: 397478 - protein, 12 aa, Homo sapiens
  CDR3 for beta chain variable domain of TCR clone 198739 (TRBV19, TRBJ1-2)
CASSVGQDGYTF

SEQ ID NO: 397479 - protein, 15 aa, Homo sapiens
  CDR3 for alpha chain variable domain of TCR clone 198740 (TRAV10, TRAJ6)
CVVSGGSGGSYIPTF

SEQ ID NO: 397480 - protein, 15 aa, Homo sapiens
  CDR3 for beta chain variable domain of TCR clone 198740 (TRBV28, TRBJ2-1)
CASSIIAGGRSEQFF

SEQ ID NO: 397481 - protein, 17 aa, Homo sapiens
  CDR3 for alpha chain variable domain of TCR clone 198741 (TRAV3, TRAJ12)
CAVRDGGRMDSSYKLIF

SEQ ID NO: 397482 - protein, 14 aa, Homo sapiens
  CDR3 for beta chain variable domain of TCR clone 198741 (TRBV19, TRBJ2-2)
CASTPGYSGGELFF

SEQ ID NO: 397483 - protein, 12 aa, Homo sapiens
  CDR3 for alpha chain variable domain of TCR clone 198742 (TRAV21, TRAJ33)
CAKMDSNYQLIW

SEQ ID NO: 397484 - protein, 14 aa, Homo sapiens
  CDR3 for beta chain variable domain of TCR clone 198742 (TRBV2, TRBJ2-2)
CASSLTSGGYEQYF

SEQ ID NO: 397485 - protein, 13 aa, Homo sapiens
  CDR3 for alpha chain variable domain of TCR clone 198743 (TRAV17, TRAJ9)
CATFLTGGFKTIF

SEQ ID NO: 397486 - protein, 16 aa, Homo sapiens
  CDR3 for beta chain variable domain of TCR clone 198743 (TRBV5-7, TRBJ1-4)
CASSLSGGLKTEKLFF

SEQ ID NO: 397487 - protein, 14 aa, Homo sapiens
  CDR3 for alpha chain variable domain of TCR clone 198744 (TRAV26-1, TRAJ38)
CIADNAGNNRKRIW

SEQ ID NO: 397488 - protein, 15 aa, Homo sapiens
  CDR3 for beta chain variable domain of TCR clone 198744 (TRBV11-3, TRBJ2-7)
CASSPGPASSYEQYF

SEQ ID NO: 397489 - protein, 14 aa, Homo sapiens
  CDR3 for alpha chain variable domain of TCR clone 198745 (TRAV12-1, TRAJ29)
WVVNEGSGNTPLVF

SEQ ID NO: 397490 - protein, 13 aa, Homo sapiens
  CDR3 for beta chain variable domain of TCR clone 198745 (TRBV7-9, TRBJ2-3)
CASSPGSTDTQYF

SEQ ID NO: 397491 - protein, 13 aa, Homo sapiens
  CDR3 for alpha chain variable domain of TCR clone 198746 (TRAV8-3, TRAJ28)
CAVGAVGSYQLTF

SEQ ID NO: 397492 - protein, 14 aa, Homo sapiens
  CDR3 for beta chain variable domain of TCR clone 198746 (TRBV7-2, TRBJ2-7)
CAGRSQGAAYEQYV

SEQ ID NO: 397493 - protein, 13 aa, Homo sapiens
  CDR3 for alpha chain variable domain of TCR clone 198747 (TRAV8-1, TRAJ32)
CAADGGATNKLIF

SEQ ID NO: 397494 - protein, 13 aa, Homo sapiens
  CDR3 for beta chain variable domain of TCR clone 198747 (TRBV4-2, TRBJ1-1)
CASSQAGNTEAFF

SEQ ID NO: 397495 - protein, 12 aa, Homo sapiens
  CDR3 for alpha chain variable domain of TCR clone 198748 (TRAV29/DV5, TRAJ49)
CAAADTGNQFYF

SEQ ID NO: 397496 - protein, 19 aa, Homo sapiens
  CDR3 for beta chain variable domain of TCR clone 198748 (TRBV25-1, TRBJ2-2)
CAILVYRVDRGRKTGELFF

SEQ ID NO: 397497 - protein, 21 aa, Homo sapiens
  CDR3 for alpha chain variable domain of TCR clone 198749 (TRAV17, TRAJ53)
TASRAADTASQGGGSNYKLTF

SEQ ID NO: 397498 - protein, 14 aa, Homo sapiens
  CDR3 for beta chain variable domain of TCR clone 198749 (TRBV15, TRBJ2-5)
CATSIGGLGETQYF

SEQ ID NO: 397499 - protein, 13 aa, Homo sapiens
  CDR3 for alpha chain variable domain of TCR clone 198750 (TRAV38-2/DV8, TRAJ34)
CAYRTWNTDKLIF

SEQ ID NO: 397500 - protein, 15 aa, Homo sapiens
  CDR3 for beta chain variable domain of TCR clone 198750 (TRBV5-7, TRBJ2-3)
CASSPWDRATDTQYF

SEQ ID NO: 397501 - protein, 11 aa, Homo sapiens
  CDR3 for alpha chain variable domain of TCR clone 198751 (TRAV1-1, TRAJ23)
FAVRQGGKLIF

SEQ ID NO: 397502 - protein, 20 aa, Homo sapiens
  CDR3 for beta chain variable domain of TCR clone 198751 (TRBV7-8, TRBJ2-2)
CASSHLFPGPTIHITGEVFF

SEQ ID NO: 397503 - protein, 13 aa, Homo sapiens
  CDR3 for alpha chain variable domain of TCR clone 198752 (TRAV8-2, TRAJ43)
GVVSDQGDNDMRF

SEQ ID NO: 397504 - protein, 12 aa, Homo sapiens
  CDR3 for beta chain variable domain of TCR clone 198752 (TRBV7-9, TRBJ2-7)
CASRTGFDEQYF

SEQ ID NO: 397505 - protein, 13 aa, Homo sapiens
  CDR3 for alpha chain variable domain of TCR clone 198753 (TRAV21, TRAJ27)
CAARPGNAGKSTF

SEQ ID NO: 397506 - protein, 17 aa, Homo sapiens
  CDR3 for beta chain variable domain of TCR clone 198753 (TRBV4-2, TRBJ2-5)
CASSPGRWRNFQETQYF

SEQ ID NO: 397507 - protein, 15 aa, Homo sapiens
  CDR3 for alpha chain variable domain of TCR clone 198754 (TRAV3, TRAJ15)
CAVRPANQAGTALIL

SEQ ID NO: 397508 - protein, 14 aa, Homo sapiens
  CDR3 for beta chain variable domain of TCR clone 198754 (TRBV4-1, TRBJ2-2)
CASSQAVNTGELFF

SEQ ID NO: 397509 - protein, 13 aa, Homo sapiens
  CDR3 for alpha chain variable domain of TCR clone 198755 (TRAV12-2, TRAJ9)
CAVLETGGFKTIF

SEQ ID NO: 397510 - protein, 15 aa, Homo sapiens
  CDR3 for beta chain variable domain of TCR clone 198755 (TRBV6-3, TRBJ2-7)
CASSRTGVNLYELYF

SEQ ID NO: 397511 - protein, 14 aa, Homo sapiens
  CDR3 for alpha chain variable domain of TCR clone 198756 (TRAV12-2, TRAJ45)
CAVYSGGGADGLTF

SEQ ID NO: 397512 - protein, 16 aa, Homo sapiens
  CDR3 for beta chain variable domain of TCR clone 198756 (TRBV19, TRBJ2-1)
CASSSKGTRSYNEQFF

SEQ ID NO: 397513 - protein, 15 aa, Homo sapiens
  CDR3 for alpha chain variable domain of TCR clone 198757 (TRAV12-1, TRAJ45)
CGEPKTGGGADGLTF

SEQ ID NO: 397514 - protein, 16 aa, Homo sapiens
  CDR3 for beta chain variable domain of TCR clone 198757 (TRBV3-1, TRBJ2-3)
CASSQGTGGATDTQYF

SEQ ID NO: 397515 - protein, 19 aa, Homo sapiens
  CDR3 for alpha chain variable domain of TCR clone 198758 (TRAV21, TRAJ20)
SLVTQPPTSVLPNDYKLSF

SEQ ID NO: 397516 - protein, 16 aa, Homo sapiens
  CDR3 for beta chain variable domain of TCR clone 198758 (TRBV12-5, TRBJ2-5)
CASGPRTSGNQDTQYF

SEQ ID NO: 397517 - protein, 19 aa, Homo sapiens
  CDR3 for alpha chain variable domain of TCR clone 198759 (TRAV12-2, TRAJ4)
PPTSVPVGWPEGGYNKLIF

SEQ ID NO: 397518 - protein, 16 aa, Homo sapiens
  CDR3 for beta chain variable domain of TCR clone 198759 (TRBV6-1, TRBJ2-5)
CASSETLDRGAETQYF

SEQ ID NO: 397519 - protein, 13 aa, Homo sapiens
  CDR3 for alpha chain variable domain of TCR clone 198760 (TRAV3, TRAJ20)
CAVRDTPRYKLSF

SEQ ID NO: 397520 - protein, 16 aa, Homo sapiens
  CDR3 for beta chain variable domain of TCR clone 198760 (TRBV20-1, TRBJ2-7)
CSATAPGLALSYEQYF

SEQ ID NO: 397521 - protein, 14 aa, Homo sapiens
  CDR3 for alpha chain variable domain of TCR clone 198761 (TRAV14/DV4, TRAJ34)
CAMREGRPHRRAHL

SEQ ID NO: 397522 - protein, 14 aa, Homo sapiens
  CDR3 for beta chain variable domain of TCR clone 198761 (TRBV19, TRBJ2-1)
CASPTFVLSGEQFF

SEQ ID NO: 397523 - protein, 12 aa, Homo sapiens
  CDR3 for alpha chain variable domain of TCR clone 198762 (TRAV12-3, TRAJ17)
CAMTLAGNKLTF

SEQ ID NO: 397524 - protein, 15 aa, Homo sapiens
  CDR3 for beta chain variable domain of TCR clone 198762 (TRBV20-1, TRBJ2-7)
CSARDRVSGMDEQFF

SEQ ID NO: 397525 - protein, 15 aa, Homo sapiens
  CDR3 for alpha chain variable domain of TCR clone 198763 (TRAV3, TRAJ3)
CAVRDRDSSASKIIF

SEQ ID NO: 397526 - protein, 14 aa, Homo sapiens
  CDR3 for beta chain variable domain of TCR clone 198763 (TRBV19, TRBJ2-2)
CASSTLHRSGELFF

SEQ ID NO: 397527 - protein, 12 aa, Homo sapiens
  CDR3 for alpha chain variable domain of TCR clone 198764 (TRAV8-3, TRAJ26)
CAGDNYGQNFVF

SEQ ID NO: 397528 - protein, 16 aa, Homo sapiens
  CDR3 for beta chain variable domain of TCR clone 198764 (TRBV28, TRBJ1-2)
CASSHGQGVYKDGYTF

SEQ ID NO: 397529 - protein, 18 aa, Homo sapiens
  CDR3 for alpha chain variable domain of TCR clone 198765 (TRAV21, TRAJ52)
RAVRPSPAGGTSYGKLTF

SEQ ID NO: 397530 - protein, 17 aa, Homo sapiens
  CDR3 for beta chain variable domain of TCR clone 198765 (TRBV13, TRBJ2-3)
CASSLSGVAGGRNTQYF

SEQ ID NO: 397531 - protein, 16 aa, Homo sapiens
  CDR3 for alpha chain variable domain of TCR clone 198766 (TRAV3, TRAJ37)
CAVRPHGSGNTGKLFF

SEQ ID NO: 397532 - protein, 14 aa, Homo sapiens
  CDR3 for beta chain variable domain of TCR clone 198766 (TRBV25-1, TRBJ1-1)
CASTHLGGNTEAFF

SEQ ID NO: 397533 - protein, 14 aa, Homo sapiens
  CDR3 for alpha chain variable domain of TCR clone 198767 (TRAV23/DV6, TRAJ45)
CAVYSGGGADGLTF

SEQ ID NO: 397534 - protein, 16 aa, Homo sapiens
  CDR3 for beta chain variable domain of TCR clone 198767 (TRBV13, TRBJ2-5)
CARSRGAGIRQETQYF

SEQ ID NO: 397535 - protein, 14 aa, Homo sapiens
  CDR3 for alpha chain variable domain of TCR clone 198768 (TRAV1-2, TRAJ16)
CAVNRFSDGQKLLF

SEQ ID NO: 397536 - protein, 17 aa, Homo sapiens
  CDR3 for beta chain variable domain of TCR clone 198768 (TRBV3-1, TRBJ2-5)
CASSNWGGTSGQETQYF

SEQ ID NO: 397537 - protein, 15 aa, Homo sapiens
  CDR3 for alpha chain variable domain of TCR clone 198769 (TRAV12-3, TRAJ49)
CAMTAPGNTGNQFYF

SEQ ID NO: 397538 - protein, 15 aa, Homo sapiens
  CDR3 for beta chain variable domain of TCR clone 198769 (TRBV11-3, TRBJ2-3)
CASLKDGREGDTQYF

SEQ ID NO: 397539 - protein, 14 aa, Homo sapiens
  CDR3 for alpha chain variable domain of TCR clone 198770 (TRAV12-2, TRAJ13)
CAVKKTGGYQKVTF

SEQ ID NO: 397540 - protein, 13 aa, Homo sapiens
  CDR3 for beta chain variable domain of TCR clone 198770 (TRBV29-1, TRBJ1-1)
CSVGDSRNTEAFF

SEQ ID NO: 397541 - protein, 15 aa, Homo sapiens
  CDR3 for alpha chain variable domain of TCR clone 198771 (TRAV30, TRAJ32)
CGTEILGGATNELIF

SEQ ID NO: 397542 - protein, 17 aa, Homo sapiens
  CDR3 for beta chain variable domain of TCR clone 198771 (TRBV5-4, TRBJ2-1)
CASSSAGGRGPYNEQFF

SEQ ID NO: 397543 - protein, 13 aa, Homo sapiens
  CDR3 for alpha chain variable domain of TCR clone 198772 (TRAV8-3, TRAJ44)
CAVVPGTASKLTL

SEQ ID NO: 397544 - protein, 13 aa, Homo sapiens
  CDR3 for beta chain variable domain of TCR clone 198772 (TRBV7-3, TRBJ1-1)
CASSQDWGAEAFF

SEQ ID NO: 397545 - protein, 14 aa, Homo sapiens
  CDR3 for alpha chain variable domain of TCR clone 198773 (TRAV12-1, TRAJ17)
CVVNYKAAVNKRTF

SEQ ID NO: 397546 - protein, 16 aa, Homo sapiens
  CDR3 for beta chain variable domain of TCR clone 198773 (TRBV12-4, TRBJ1-5)
CASSRPVGGSNQPQHF

SEQ ID NO: 397547 - protein, 13 aa, Homo sapiens
  CDR3 for alpha chain variable domain of TCR clone 198774 (TRAV16, TRAJ11)
CALTQSGYSTLTF

SEQ ID NO: 397548 - protein, 17 aa, Homo sapiens
  CDR3 for beta chain variable domain of TCR clone 198774 (TRBV5-1, TRBJ1-5)
CASSLASLTRGNQPQHF

SEQ ID NO: 397549 - protein, 13 aa, Homo sapiens
  CDR3 for alpha chain variable domain of TCR clone 198775 (TRAV30, TRAJ29)
CGTEDSGNTPLVF

SEQ ID NO: 397550 - protein, 12 aa, Homo sapiens
  CDR3 for beta chain variable domain of TCR clone 198775 (TRBV7-9, TRBJ2-7)
CATRTDAYEQYF

SEQ ID NO: 397551 - protein, 16 aa, Homo sapiens
  CDR3 for alpha chain variable domain of TCR clone 198776 (TRAV3, TRAJ3)
CAVRDRAKSSASKIIF

SEQ ID NO: 397552 - protein, 13 aa, Homo sapiens
  CDR3 for beta chain variable domain of TCR clone 198776 (TRBV2, TRBJ1-1)
CASSVLMNTEAFF

SEQ ID NO: 397553 - protein, 10 aa, Homo sapiens
  CDR3 for alpha chain variable domain of TCR clone 198777 (TRAV25, TRAJ20)
CAVNDYKLSF

SEQ ID NO: 397554 - protein, 13 aa, Homo sapiens
  CDR3 for beta chain variable domain of TCR clone 198777 (TRBV6-3, TRBJ2-7)
CASRFSGGYEQYF

SEQ ID NO: 397555 - protein, 15 aa, Homo sapiens
  CDR3 for alpha chain variable domain of TCR clone 198778 (TRAV23/DV6, TRAJ28)
CPALLAYSGAGSYQL

SEQ ID NO: 397556 - protein, 15 aa, Homo sapiens
  CDR3 for beta chain variable domain of TCR clone 198778 (TRBV12-4, TRBJ2-5)
CASSPPTGLQETQYF

SEQ ID NO: 397557 - protein, 13 aa, Homo sapiens
  CDR3 for alpha chain variable domain of TCR clone 198779 (TRAV21, TRAJ27)
CAARPGNAGKSTF

SEQ ID NO: 397558 - protein, 15 aa, Homo sapiens
  CDR3 for beta chain variable domain of TCR clone 198779 (TRBV20-1, TRBJ2-7)
CSAGDRVSGMDERYF

SEQ ID NO: 397559 - protein, 14 aa, Homo sapiens
  CDR3 for alpha chain variable domain of TCR clone 198780 (TRAV12-3, TRAJ40)
CAVKIPSGTYKYIF

SEQ ID NO: 397560 - protein, 12 aa, Homo sapiens
  CDR3 for beta chain variable domain of TCR clone 198780 (TRBV11-2, TRBJ2-1)
CASSPGNNEQFF

SEQ ID NO: 397561 - protein, 15 aa, Homo sapiens
  CDR3 for alpha chain variable domain of TCR clone 198781 (TRAV13-2, TRAJ40)
CAENRSRQGTYKYIF

SEQ ID NO: 397562 - protein, 16 aa, Homo sapiens
  CDR3 for beta chain variable domain of TCR clone 198781 (TRBV19, TRBJ1-1)
CASRPRSEALNTEAFF

SEQ ID NO: 397563 - protein, 16 aa, Homo sapiens
  CDR3 for alpha chain variable domain of TCR clone 198782 (TRAV8-3, TRAJ10)
CAVGPILTGGGNKLTF

SEQ ID NO: 397564 - protein, 16 aa, Homo sapiens
  CDR3 for beta chain variable domain of TCR clone 198782 (TRBV7-2, TRBJ2-5)
CASNSKWLSGQETQYF

SEQ ID NO: 397565 - protein, 12 aa, Homo sapiens
  CDR3 for alpha chain variable domain of TCR clone 198783 (TRAV16, TRAJ27)
CALNHQCRQIDL

SEQ ID NO: 397566 - protein, 14 aa, Homo sapiens
  CDR3 for beta chain variable domain of TCR clone 198783 (TRBV11-2, TRBJ1-5)
CASSLDRGRQPQHF

SEQ ID NO: 397567 - protein, 14 aa, Homo sapiens
  CDR3 for alpha chain variable domain of TCR clone 198784 (TRAV21, TRAJ17)
CAVRSKAAGNKLTF

SEQ ID NO: 397568 - protein, 13 aa, Homo sapiens
  CDR3 for beta chain variable domain of TCR clone 198784 (TRBV20-1, TRBJ1-6)
CSAPLGVGSPLHF

SEQ ID NO: 397569 - protein, 14 aa, Homo sapiens
  CDR3 for alpha chain variable domain of TCR clone 198785 (TRAV1-2, TRAJ8)
CAVREDTGFQKLVF

SEQ ID NO: 397570 - protein, 15 aa, Homo sapiens
  CDR3 for beta chain variable domain of TCR clone 198785 (TRBV5-1, TRBJ2-1)
CASSLASPYSNEQFF

SEQ ID NO: 397571 - protein, 17 aa, Homo sapiens
  CDR3 for alpha chain variable domain of TCR clone 198786 (TRAV13-1, TRAJ28)
CAASPPYSGAGSYQLTF

SEQ ID NO: 397572 - protein, 14 aa, Homo sapiens
  CDR3 for beta chain variable domain of TCR clone 198786 (TRBV11-2, TRBJ2-2)
CASSQAVNTGELFF

SEQ ID NO: 397573 - protein, 18 aa, Homo sapiens
  CDR3 for alpha chain variable domain of TCR clone 198787 (TRAV21, TRAJ52)
CAVRPSSAGGTSYGKLTF

SEQ ID NO: 397574 - protein, 16 aa, Homo sapiens
  CDR3 for beta chain variable domain of TCR clone 198787 (TRBV19, TRBJ2-1)
CASSKAGPSSYNEQFF

SEQ ID NO: 397575 - protein, 14 aa, Homo sapiens
  CDR3 for alpha chain variable domain of TCR clone 198788 (TRAV35, TRAJ50)
CAGHRKTSYDKVIF

SEQ ID NO: 397576 - protein, 13 aa, Homo sapiens
  CDR3 for beta chain variable domain of TCR clone 198788 (TRBV7-7, TRBJ2-3)
CDSSLSRADTQYF

SEQ ID NO: 397577 - protein, 18 aa, Homo sapiens
  CDR3 for alpha chain variable domain of TCR clone 198789 (TRAV26-2, TRAJ45)
CILRVDNYSGGGADGLTF

SEQ ID NO: 397578 - protein, 16 aa, Homo sapiens
  CDR3 for beta chain variable domain of TCR clone 198789 (TRBV2, TRBJ1-4)
CASNLVQGATNEKLFF

SEQ ID NO: 397579 - protein, 12 aa, Homo sapiens
  CDR3 for alpha chain variable domain of TCR clone 198790 (TRAV13-2, TRAJ23)
CAERHMGGKLIF

SEQ ID NO: 397580 - protein, 13 aa, Homo sapiens
  CDR3 for beta chain variable domain of TCR clone 198790 (TRBV15, TRBJ1-6)
CATSGGLNSPLHF

SEQ ID NO: 397581 - protein, 11 aa, Homo sapiens
  CDR3 for alpha chain variable domain of TCR clone 198791 (TRAV12-2, TRAJ33)
CAVGSNYQLIW

SEQ ID NO: 397582 - protein, 14 aa, Homo sapiens
  CDR3 for beta chain variable domain of TCR clone 198791 (TRBV7-8, TRBJ2-3)
CASSLEAGTDTQYF

SEQ ID NO: 397583 - protein, 13 aa, Homo sapiens
  CDR3 for alpha chain variable domain of TCR clone 198792 (TRAV21, TRAJ27)
CAARPGNAGKSTF

SEQ ID NO: 397584 - protein, 17 aa, Homo sapiens
  CDR3 for beta chain variable domain of TCR clone 198792 (TRBV7-7, TRBJ2-3)
CASSLGGGITSTDTQYF

SEQ ID NO: 397585 - protein, 13 aa, Homo sapiens
  CDR3 for alpha chain variable domain of TCR clone 198793 (TRAV1-2, TRAJ9)
CAALNTGGFKTIF

SEQ ID NO: 397586 - protein, 16 aa, Homo sapiens
  CDR3 for beta chain variable domain of TCR clone 198793 (TRBV7-6, TRBJ2-7)
CASSGGTGALSYEQYF

SEQ ID NO: 397587 - protein, 15 aa, Homo sapiens
  CDR3 for alpha chain variable domain of TCR clone 198794 (TRAV21, TRAJ53)
CATLNSGGSNYKLTF

SEQ ID NO: 397588 - protein, 10 aa, Homo sapiens
  CDR3 for beta chain variable domain of TCR clone 198794 (TRBV7-9, TRBJ1-1)
CASSFTEAFF

SEQ ID NO: 397589 - protein, 13 aa, Homo sapiens
  CDR3 for alpha chain variable domain of TCR clone 198795 (TRAV13-1, TRAJ20)
CAARVSNDYKLSF

SEQ ID NO: 397590 - protein, 13 aa, Homo sapiens
  CDR3 for beta chain variable domain of TCR clone 198795 (TRBV27, TRBJ2-7)
CASSFSQGYEQYF

SEQ ID NO: 397591 - protein, 17 aa, Homo sapiens
  CDR3 for alpha chain variable domain of TCR clone 198796 (TRAV2, TRAJ22)
ILQVREADAAEQRQLTF

SEQ ID NO: 397592 - protein, 16 aa, Homo sapiens
  CDR3 for beta chain variable domain of TCR clone 198796 (TRBV2, TRBJ2-5)
CASSVTQGVGEETQYF

SEQ ID NO: 397593 - protein, 14 aa, Homo sapiens
  CDR3 for alpha chain variable domain of TCR clone 198797 (TRAV3, TRAJ21)
CALGRGSTNFTLDL

SEQ ID NO: 397594 - protein, 14 aa, Homo sapiens
  CDR3 for beta chain variable domain of TCR clone 198797 (TRBV7-9, TRBJ2-7)
CASSLAMGGNIQYF

SEQ ID NO: 397595 - protein, 13 aa, Homo sapiens
  CDR3 for alpha chain variable domain of TCR clone 198798 (TRAV3, TRAJ27)
SAVRPLGAGKSTF

SEQ ID NO: 397596 - protein, 15 aa, Homo sapiens
  CDR3 for beta chain variable domain of TCR clone 198798 (TRBV20-1, TRBJ2-7)
CSARDRVSGMDEQYF

SEQ ID NO: 397597 - protein, 14 aa, Homo sapiens
  CDR3 for alpha chain variable domain of TCR clone 198799 (TRAV12-2, TRAJ36)
CAAHTLTGANNLFF

SEQ ID NO: 397598 - protein, 11 aa, Homo sapiens
  CDR3 for beta chain variable domain of TCR clone 198799 (TRBV20-1, TRBJ2-7)
CSALDREEQYF

SEQ ID NO: 397599 - protein, 15 aa, Homo sapiens
  CDR3 for alpha chain variable domain of TCR clone 198800 (TRAV26-1, TRAJ48)
CITRWSWFGNEKLTF

SEQ ID NO: 397600 - protein, 12 aa, Homo sapiens
  CDR3 for beta chain variable domain of TCR clone 198800 (TRBV19, TRBJ2-5)
CASSISEETQYF

SEQ ID NO: 397601 - protein, 12 aa, Homo sapiens
  CDR3 for alpha chain variable domain of TCR clone 198801 (TRAV13-2, TRAJ23)
CAERHRGGKLIF

SEQ ID NO: 397602 - protein, 15 aa, Homo sapiens
  CDR3 for beta chain variable domain of TCR clone 198801 (TRBV7-9, TRBJ1-6)
CASSSLGRVNSPLHF

SEQ ID NO: 397603 - protein, 15 aa, Homo sapiens
  CDR3 for alpha chain variable domain of TCR clone 198802 (TRAV26-1, TRAJ44)
CIARVPFGTASKLTF

SEQ ID NO: 397604 - protein, 17 aa, Homo sapiens
  CDR3 for beta chain variable domain of TCR clone 198802 (TRBV24-1, TRBJ2-4)
CATSDAEARGVKNIQYF

SEQ ID NO: 397605 - protein, 15 aa, Homo sapiens
  CDR3 for alpha chain variable domain of TCR clone 198803 (TRAV13-1, TRAJ50)
CAAKGSETSYHKVIF

SEQ ID NO: 397606 - protein, 13 aa, Homo sapiens
  CDR3 for beta chain variable domain of TCR clone 198803 (TRBV20-1, TRBJ2-3)
CSARAGGRDTQYF

SEQ ID NO: 397607 - protein, 14 aa, Homo sapiens
  CDR3 for alpha chain variable domain of TCR clone 198804 (TRAV8-4, TRAJ17)
CAVSDQASGNKLTF

SEQ ID NO: 397608 - protein, 15 aa, Homo sapiens
  CDR3 for beta chain variable domain of TCR clone 198804 (TRBV7-2, TRBJ1-2)
CASSLAPDRGLGYTF

SEQ ID NO: 397609 - protein, 10 aa, Homo sapiens
  CDR3 for alpha chain variable domain of TCR clone 198805 (TRAV38-2/DV8, TRAJ21)
CAYRGNKFYF

SEQ ID NO: 397610 - protein, 12 aa, Homo sapiens
  CDR3 for beta chain variable domain of TCR clone 198805 (TRBV11-3, TRBJ2-3)
CASSLWEDTQYF

SEQ ID NO: 397611 - protein, 14 aa, Homo sapiens
  CDR3 for alpha chain variable domain of TCR clone 198806 (TRAV12-2, TRAJ17)
CAVLFKAAGHKLTF

SEQ ID NO: 397612 - protein, 15 aa, Homo sapiens
  CDR3 for beta chain variable domain of TCR clone 198806 (TRBV20-1, TRBJ2-7)
CSARDRVSGMDEQYF

SEQ ID NO: 397613 - protein, 15 aa, Homo sapiens
  CDR3 for alpha chain variable domain of TCR clone 198807 (TRAV35, TRAJ42)
CAGQLRGGSQGNLIF

SEQ ID NO: 397614 - protein, 15 aa, Homo sapiens
  CDR3 for beta chain variable domain of TCR clone 198807 (TRBV5-1, TRBJ2-2)
CASSSQGGNTGELFF

SEQ ID NO: 397615 - protein, 14 aa, Homo sapiens
  CDR3 for alpha chain variable domain of TCR clone 198808 (TRAV12-1, TRAJ17)
CVVNYKAAGNQLTF

SEQ ID NO: 397616 - protein, 15 aa, Homo sapiens
  CDR3 for beta chain variable domain of TCR clone 198808 (TRBV7-2, TRBJ2-1)
CASTHGTGIYNEQFF

SEQ ID NO: 397617 - protein, 11 aa, Homo sapiens
  CDR3 for alpha chain variable domain of TCR clone 198809 (TRAV13-1, TRAJ27)
CAAIFAGKSTF

SEQ ID NO: 397618 - protein, 16 aa, Homo sapiens
  CDR3 for beta chain variable domain of TCR clone 198809 (TRBV27, TRBJ2-7)
CASSLWVPTGGYEQYF

SEQ ID NO: 397619 - protein, 12 aa, Homo sapiens
  CDR3 for alpha chain variable domain of TCR clone 198810 (TRAV12-3, TRAJ20)
CAMVRGAYKLSF

SEQ ID NO: 397620 - protein, 14 aa, Homo sapiens
  CDR3 for beta chain variable domain of TCR clone 198810 (TRBV5-5, TRBJ1-5)
CASSGQGVDQPQHF

SEQ ID NO: 397621 - protein, 15 aa, Homo sapiens
  CDR3 for alpha chain variable domain of TCR clone 198811 (TRAV25, TRAJ52)
CAGRPGGTSYGNLTF

SEQ ID NO: 397622 - protein, 16 aa, Homo sapiens
  CDR3 for beta chain variable domain of TCR clone 198811 (TRBV12-4, TRBJ1-5)
CASSSGPRGSNQPQHF

SEQ ID NO: 397623 - protein, 20 aa, Homo sapiens
  CDR3 for alpha chain variable domain of TCR clone 198812 (TRAV12-1, TRAJ42)
SSVIQPPTSVKGGSQGNLTF

SEQ ID NO: 397624 - protein, 18 aa, Homo sapiens
  CDR3 for beta chain variable domain of TCR clone 198812 (TRBV11-2, TRBJ2-3)
CAGGLGGASRGAPNTQYF

SEQ ID NO: 397625 - protein, 16 aa, Homo sapiens
  CDR3 for alpha chain variable domain of TCR clone 198813 (TRAV19, TRAJ42)
CALSGNYGGSKGNLIF

SEQ ID NO: 397626 - protein, 13 aa, Homo sapiens
  CDR3 for beta chain variable domain of TCR clone 198813 (TRBV7-3, TRBJ2-1)
CASSPVAYNEQFF

SEQ ID NO: 397627 - protein, 12 aa, Homo sapiens
  CDR3 for alpha chain variable domain of TCR clone 198814 (TRAV17, TRAJ39)
CATGAAGNMLTF

SEQ ID NO: 397628 - protein, 14 aa, Homo sapiens
  CDR3 for beta chain variable domain of TCR clone 198814 (TRBV7-9, TRBJ1-2)
CASSRQGANYGYTS

SEQ ID NO: 397629 - protein, 12 aa, Homo sapiens
  CDR3 for alpha chain variable domain of TCR clone 198815 (TRAV35, TRAJ28)
GVEGAGSYQLTF

SEQ ID NO: 397630 - protein, 13 aa, Homo sapiens
  CDR3 for beta chain variable domain of TCR clone 198815 (TRBV19, TRBJ1-2)
CASSVPGQDGYTF

SEQ ID NO: 397631 - protein, 13 aa, Homo sapiens
  CDR3 for alpha chain variable domain of TCR clone 198816 (TRAV2, TRAJ40)
CAAVTSGTYKYIF

SEQ ID NO: 397632 - protein, 14 aa, Homo sapiens
  CDR3 for beta chain variable domain of TCR clone 198816 (TRBV7-2, TRBJ1-1)
CASSFLTGTTEAFF

SEQ ID NO: 397633 - protein, 14 aa, Homo sapiens
  CDR3 for alpha chain variable domain of TCR clone 198817 (TRAV8-4, TRAJ39)
CAVSLNNAGNMLTF

SEQ ID NO: 397634 - protein, 16 aa, Homo sapiens
  CDR3 for beta chain variable domain of TCR clone 198817 (TRBV13, TRBJ2-7)
CASSSRESGRPYEQYF

SEQ ID NO: 397635 - protein, 13 aa, Homo sapiens
  CDR3 for alpha chain variable domain of TCR clone 198818 (TRAV12-2, TRAJ20)
CAVYPSNDYKLSF

SEQ ID NO: 397636 - protein, 14 aa, Homo sapiens
  CDR3 for beta chain variable domain of TCR clone 198818 (TRBV20-1, TRBJ2-7)
CSAKRGRSSYEQYF

SEQ ID NO: 397637 - protein, 15 aa, Homo sapiens
  CDR3 for alpha chain variable domain of TCR clone 198819 (TRAV3, TRAJ4)
CAVRDGTGGYNKLIF

SEQ ID NO: 397638 - protein, 15 aa, Homo sapiens
  CDR3 for beta chain variable domain of TCR clone 198819 (TRBV27, TRBJ2-1)
CASSNGGGSSNEQFS

SEQ ID NO: 397639 - protein, 14 aa, Homo sapiens
  CDR3 for alpha chain variable domain of TCR clone 198820 (TRAV12-2, TRAJ5)
CAVNRSTGRRALTF

SEQ ID NO: 397640 - protein, 12 aa, Homo sapiens
  CDR3 for beta chain variable domain of TCR clone 198820 (TRBV11-2, TRBJ2-2)
CASSLPTGELFF

SEQ ID NO: 397641 - protein, 12 aa, Homo sapiens
  CDR3 for alpha chain variable domain of TCR clone 198821 (TRAV12-2, TRAJ44)
CADTGTASKLTF

SEQ ID NO: 397642 - protein, 17 aa, Homo sapiens
  CDR3 for beta chain variable domain of TCR clone 198821 (TRBV20-1, TRBJ1-1)
CSARVTGGSYGNTGAFF

SEQ ID NO: 397643 - protein, 15 aa, Homo sapiens
  CDR3 for alpha chain variable domain of TCR clone 198822 (TRAV17, TRAJ13)
CATDAGAGGYQRVTF

SEQ ID NO: 397644 - protein, 17 aa, Homo sapiens
  CDR3 for beta chain variable domain of TCR clone 198822 (TRBV11-2, TRBJ2-1)
CASSLYPPGVEYNEQFF

SEQ ID NO: 397645 - protein, 12 aa, Homo sapiens
  CDR3 for alpha chain variable domain of TCR clone 198823 (TRAV3, TRAJ26)
CAVRDYGQNFVF

SEQ ID NO: 397646 - protein, 16 aa, Homo sapiens
  CDR3 for beta chain variable domain of TCR clone 198823 (TRBV15, TRBJ2-5)
CATSPTTGQGMETQYF

SEQ ID NO: 397647 - protein, 18 aa, Homo sapiens
  CDR3 for alpha chain variable domain of TCR clone 198824 (TRAV26-2, TRAJ54)
CILRDVEVGIQGAQKLLF

SEQ ID NO: 397648 - protein, 13 aa, Homo sapiens
  CDR3 for beta chain variable domain of TCR clone 198824 (TRBV19, TRBJ1-3)
CASRLSLGNTIYF

SEQ ID NO: 397649 - protein, 14 aa, Homo sapiens
  CDR3 for alpha chain variable domain of TCR clone 198825 (TRAV23/DV6, TRAJ58)
CAASKETSGSRLTF

SEQ ID NO: 397650 - protein, 15 aa, Homo sapiens
  CDR3 for beta chain variable domain of TCR clone 198825 (TRBV4-2, TRBJ1-2)
CASSQRTGGRDGYTF

SEQ ID NO: 397651 - protein, 11 aa, Homo sapiens
  CDR3 for alpha chain variable domain of TCR clone 198826 (TRAV2, TRAJ33)
CAVESNYQLIW

SEQ ID NO: 397652 - protein, 14 aa, Homo sapiens
  CDR3 for beta chain variable domain of TCR clone 198826 (TRBV28, TRBJ2-7)
CASREGPISYEQYF

SEQ ID NO: 397653 - protein, 14 aa, Homo sapiens
  CDR3 for alpha chain variable domain of TCR clone 198827 (TRAV26-2, TRAJ38)
CILYNAGNNRKLIW

SEQ ID NO: 397654 - protein, 13 aa, Homo sapiens
  CDR3 for beta chain variable domain of TCR clone 198827 (TRBV10-3, TRBJ2-7)
CASKLAVNYEQYF

SEQ ID NO: 397655 - protein, 14 aa, Homo sapiens
  CDR3 for alpha chain variable domain of TCR clone 198828 (TRAV17, TRAJ39)
CATDPGRAGNMLTF

SEQ ID NO: 397656 - protein, 15 aa, Homo sapiens
  CDR3 for beta chain variable domain of TCR clone 198828 (TRBV13, TRBJ1-5)
CASSFGQRGVQPQHF

SEQ ID NO: 397657 - protein, 13 aa, Homo sapiens
  CDR3 for alpha chain variable domain of TCR clone 198829 (TRAV2, TRAJ15)
CAVASQSGTALIF

SEQ ID NO: 397658 - protein, 16 aa, Homo sapiens
  CDR3 for beta chain variable domain of TCR clone 198829 (TRBV20-1, TRBJ1-4)
CSARPYGGELNEKLFF

SEQ ID NO: 397659 - protein, 14 aa, Homo sapiens
  CDR3 for alpha chain variable domain of TCR clone 198830 (TRAV12-2, TRAJ24)
CAVTPADSWGKLQF

SEQ ID NO: 397660 - protein, 16 aa, Homo sapiens
  CDR3 for beta chain variable domain of TCR clone 198830 (TRBV6-4, TRBJ2-3)
APSEGARAWGTDTQYF

SEQ ID NO: 397661 - protein, 14 aa, Homo sapiens
  CDR3 for alpha chain variable domain of TCR clone 198831 (TRAV26-1, TRAJ40)
CIVRLLSGTYKYIF

SEQ ID NO: 397662 - protein, 10 aa, Homo sapiens
  CDR3 for beta chain variable domain of TCR clone 198831 (TRBV15, TRBJ2-7)
AETGGYEQFF

SEQ ID NO: 397663 - protein, 17 aa, Homo sapiens
  CDR3 for alpha chain variable domain of TCR clone 198832 (TRAV13-2, TRAJ42)
CAETGKNYGGSQGNLIF

SEQ ID NO: 397664 - protein, 16 aa, Homo sapiens
  CDR3 for beta chain variable domain of TCR clone 198832 (TRBV7-9, TRBJ2-1)
CASSLGTGWDYNEQFF

SEQ ID NO: 397665 - protein, 15 aa, Homo sapiens
  CDR3 for alpha chain variable domain of TCR clone 198833 (TRAV3, TRAJ22)
CAVRDRGGSARQLTF

SEQ ID NO: 397666 - protein, 16 aa, Homo sapiens
  CDR3 for beta chain variable domain of TCR clone 198833 (TRBV4-1, TRBJ1-3)
CASSQDELLAGNTIYF

SEQ ID NO: 397667 - protein, 15 aa, Homo sapiens
  CDR3 for alpha chain variable domain of TCR clone 198834 (TRAV1-2, TRAJ30)
CAVRPHGHRDDKIIS

SEQ ID NO: 397668 - protein, 13 aa, Homo sapiens
  CDR3 for beta chain variable domain of TCR clone 198834 (TRBV4-1, TRBJ2-7)
CASSQGQAYEQYF

SEQ ID NO: 397669 - protein, 10 aa, Homo sapiens
  CDR3 for alpha chain variable domain of TCR clone 198835 (TRAV1-2, TRAJ18)
CAVRGEAQPW

SEQ ID NO: 397670 - protein, 15 aa, Homo sapiens
  CDR3 for beta chain variable domain of TCR clone 198835 (TRBV4-1, TRBJ2-5)
CASSQWDLYQETQYF

SEQ ID NO: 397671 - protein, 16 aa, Homo sapiens
  CDR3 for alpha chain variable domain of TCR clone 198836 (TRAV1-2, TRAJ10)
CAVRGVLTGGGNKLTF

SEQ ID NO: 397672 - protein, 15 aa, Homo sapiens
  CDR3 for beta chain variable domain of TCR clone 198836 (TRBV7-8, TRBJ2-7)
CASSLGTGNPYEQYF

SEQ ID NO: 397673 - protein, 15 aa, Homo sapiens
  CDR3 for alpha chain variable domain of TCR clone 198837 (TRAV23/DV6, TRAJ18)
CAARYRGSTLGRLYF

SEQ ID NO: 397674 - protein, 16 aa, Homo sapiens
  CDR3 for beta chain variable domain of TCR clone 198837 (TRBV20-1, TRBJ1-2)
CSASMGQRVANYGYTF

SEQ ID NO: 397675 - protein, 12 aa, Homo sapiens
  CDR3 for alpha chain variable domain of TCR clone 198838 (TRAV27, TRAJ35)
CAGADFGNVLHC

SEQ ID NO: 397676 - protein, 14 aa, Homo sapiens
  CDR3 for beta chain variable domain of TCR clone 198838 (TRBV20-1, TRBJ2-7)
CSAKTGTGGYEQYF

SEQ ID NO: 397677 - protein, 15 aa, Homo sapiens
  CDR3 for alpha chain variable domain of TCR clone 198839 (TRAV26-1, TRAJ29)
CIVRVEGSGNTPLVF

SEQ ID NO: 397678 - protein, 12 aa, Homo sapiens
  CDR3 for beta chain variable domain of TCR clone 198839 (TRBV9, TRBJ2-2)
CASSLVTGELFF

SEQ ID NO: 397679 - protein, 13 aa, Homo sapiens
  CDR3 for alpha chain variable domain of TCR clone 198840 (TRAV23/DV6, TRAJ36)
CAAGQTGANNLFF

SEQ ID NO: 397680 - protein, 15 aa, Homo sapiens
  CDR3 for beta chain variable domain of TCR clone 198840 (TRBV7-3, TRBJ2-1)
CASSPTGGGEVEQFF

SEQ ID NO: 397681 - protein, 15 aa, Homo sapiens
  CDR3 for alpha chain variable domain of TCR clone 198841 (TRAV12-2, TRAJ8)
CAVREENTGFQKLVF

SEQ ID NO: 397682 - protein, 16 aa, Homo sapiens
  CDR3 for beta chain variable domain of TCR clone 198841 (TRBV7-3, TRBJ2-2)
CASSLKRGTLSGELFV

SEQ ID NO: 397683 - protein, 14 aa, Homo sapiens
  CDR3 for alpha chain variable domain of TCR clone 198842 (TRAV12-2, TRAJ45)
CAVNKGGGADGLTF

SEQ ID NO: 397684 - protein, 12 aa, Homo sapiens
  CDR3 for beta chain variable domain of TCR clone 198842 (TRBV11-2, TRBJ2-1)
CASSPGNNEQFF

SEQ ID NO: 397685 - protein, 13 aa, Homo sapiens
  CDR3 for alpha chain variable domain of TCR clone 198843 (TRAV3, TRAJ21)
CAVREPYFNNFYF

SEQ ID NO: 397686 - protein, 18 aa, Homo sapiens
  CDR3 for beta chain variable domain of TCR clone 198843 (TRBV11-2, TRBJ2-3)
CASSLGGASRGAPNTQYF

SEQ ID NO: 397687 - protein, 14 aa, Homo sapiens
  CDR3 for alpha chain variable domain of TCR clone 198844 (TRAV1-2, TRAJ8)
CAVREDTGFQKLVF

SEQ ID NO: 397688 - protein, 12 aa, Homo sapiens
  CDR3 for beta chain variable domain of TCR clone 198844 (TRBV27, TRBJ2-7)
CASSGGFYEQYF

SEQ ID NO: 397689 - protein, 15 aa, Homo sapiens
  CDR3 for alpha chain variable domain of TCR clone 198845 (TRAV26-1, TRAJ44)
CIVRIGTGTASKLTF

SEQ ID NO: 397690 - protein, 13 aa, Homo sapiens
  CDR3 for beta chain variable domain of TCR clone 198845 (TRBV11-3, TRBJ1-1)
CASSSSGGTEAFF

SEQ ID NO: 397691 - protein, 12 aa, Homo sapiens
  CDR3 for alpha chain variable domain of TCR clone 198846 (TRAV8-3, TRAJ20)
CAVGANDYKLSF

SEQ ID NO: 397692 - protein, 15 aa, Homo sapiens
  CDR3 for beta chain variable domain of TCR clone 198846 (TRBV19, TRBJ2-2)
CQPISRDRGHWELFF

SEQ ID NO: 397693 - protein, 14 aa, Homo sapiens
  CDR3 for alpha chain variable domain of TCR clone 198847 (TRAV6, TRAJ37)
CALGSQGNTGKLIF

SEQ ID NO: 397694 - protein, 15 aa, Homo sapiens
  CDR3 for beta chain variable domain of TCR clone 198847 (TRBV2, TRBJ2-1)
CASSEGREWDNEQFF

SEQ ID NO: 397695 - protein, 12 aa, Homo sapiens
  CDR3 for alpha chain variable domain of TCR clone 198848 (TRAV21, TRAJ35)
CAVVGFGNVLHC

SEQ ID NO: 397696 - protein, 16 aa, Homo sapiens
  CDR3 for beta chain variable domain of TCR clone 198848 (TRBV6-1, TRBJ2-5)
CASSETLDRGAETQYF

SEQ ID NO: 397697 - protein, 13 aa, Homo sapiens
  CDR3 for alpha chain variable domain of TCR clone 198849 (TRAV2, TRAJ40)
CAVVTSGTYKYIF

SEQ ID NO: 397698 - protein, 17 aa, Homo sapiens
  CDR3 for beta chain variable domain of TCR clone 198849 (TRBV7-3, TRBJ2-5)
CASSLGSGRSGSETQYF

SEQ ID NO: 397699 - protein, 16 aa, Homo sapiens
  CDR3 for alpha chain variable domain of TCR clone 198850 (TRAV14/DV4, TRAJ15)
CAMREGPAQAGTALIF

SEQ ID NO: 397700 - protein, 12 aa, Homo sapiens
  CDR3 for beta chain variable domain of TCR clone 198850 (TRBV28, TRBJ2-6)
CAIQAGANALTF

SEQ ID NO: 397701 - protein, 13 aa, Homo sapiens
  CDR3 for alpha chain variable domain of TCR clone 198851 (TRAV21, TRAJ20)
CAVGLRVDYKPSF

SEQ ID NO: 397702 - protein, 14 aa, Homo sapiens
  CDR3 for beta chain variable domain of TCR clone 198851 (TRBV4-1, TRBJ2-2)
CASSQAVNTGELFF

SEQ ID NO: 397703 - protein, 16 aa, Homo sapiens
  CDR3 for alpha chain variable domain of TCR clone 198852 (TRAV20, TRAJ38)
CAVQASNAGNNRKLIW

SEQ ID NO: 397704 - protein, 16 aa, Homo sapiens
  CDR3 for beta chain variable domain of TCR clone 198852 (TRBV7-3, TRBJ2-2)
CASSLKRGTLSGELFF

SEQ ID NO: 397705 - protein, 16 aa, Homo sapiens
  CDR3 for alpha chain variable domain of TCR clone 198853 (TRAV1-2, TRAJ31)
CAFFRCQSHVWRWNSA

SEQ ID NO: 397706 - protein, 13 aa, Homo sapiens
  CDR3 for beta chain variable domain of TCR clone 198853 (TRBV7-9, TRBJ1-2)
CASSLKQNYGYTF

SEQ ID NO: 397707 - protein, 13 aa, Homo sapiens
  CDR3 for alpha chain variable domain of TCR clone 198854 (TRAV1-1, TRAJ9)
CAAKNTGGFKTIF

SEQ ID NO: 397708 - protein, 15 aa, Homo sapiens
  CDR3 for beta chain variable domain of TCR clone 198854 (TRBV7-2, TRBJ2-1)
CASSFSGGIYNEQFF

SEQ ID NO: 397709 - protein, 14 aa, Homo sapiens
  CDR3 for alpha chain variable domain of TCR clone 198855 (TRAV12-2, TRAJ33)
CPVKRARSNYQLIW

SEQ ID NO: 397710 - protein, 15 aa, Homo sapiens
  CDR3 for beta chain variable domain of TCR clone 198855 (TRBV20-1, TRBJ2-7)
CSARDRVSGMDEQYF

SEQ ID NO: 397711 - protein, 14 aa, Homo sapiens
  CDR3 for alpha chain variable domain of TCR clone 198856 (TRAV13-1, TRAJ37)
CAAADSSNTGKLIF

SEQ ID NO: 397712 - protein, 13 aa, Homo sapiens
  CDR3 for beta chain variable domain of TCR clone 198856 (TRBV12-4, TRBJ1-2)
CASSLRQGKGYTF

SEQ ID NO: 397713 - protein, 12 aa, Homo sapiens
  CDR3 for alpha chain variable domain of TCR clone 198857 (TRAV17, TRAJ53)
CAFGGSNYKLTF

SEQ ID NO: 397714 - protein, 16 aa, Homo sapiens
  CDR3 for beta chain variable domain of TCR clone 198857 (TRBV11-2, TRBJ2-4)
GASSQEGRGGLDIQYF

SEQ ID NO: 397715 - protein, 14 aa, Homo sapiens
  CDR3 for alpha chain variable domain of TCR clone 198858 (TRAV12-3, TRAJ10)
SHLPLTGGGNKLTF

SEQ ID NO: 397716 - protein, 15 aa, Homo sapiens
  CDR3 for beta chain variable domain of TCR clone 198858 (TRBV5-6, TRBJ2-7)
CASSGGRPVPYEQYF

SEQ ID NO: 397717 - protein, 14 aa, Homo sapiens
  CDR3 for alpha chain variable domain of TCR clone 198859 (TRAV13-1, TRAJ35)
CSASKGGFGNVLHC

SEQ ID NO: 397718 - protein, 12 aa, Homo sapiens
  CDR3 for beta chain variable domain of TCR clone 198859 (TRBV12-4, TRBJ2-7)
CASSLGGYEQYF

SEQ ID NO: 397719 - protein, 15 aa, Homo sapiens
  CDR3 for alpha chain variable domain of TCR clone 198860 (TRAV17, TRAJ45)
TSVLRTGGGADGLTF

SEQ ID NO: 397720 - protein, 15 aa, Homo sapiens
  CDR3 for beta chain variable domain of TCR clone 198860 (TRBV5-7, TRBJ1-5)
CASSYGKLWDQPQDF

SEQ ID NO: 397721 - protein, 10 aa, Homo sapiens
  CDR3 for alpha chain variable domain of TCR clone 198861 (TRAV36/DV7, TRAJ48)
CAVGNEKLTF

SEQ ID NO: 397722 - protein, 14 aa, Homo sapiens
  CDR3 for beta chain variable domain of TCR clone 198861 (TRBV2, TRBJ2-7)
CASSLTSGGYEQYF

SEQ ID NO: 397723 - protein, 16 aa, Homo sapiens
  CDR3 for alpha chain variable domain of TCR clone 198862 (TRAV26-1, TRAJ50)
CIVRVEAGSFHDKGIF

SEQ ID NO: 397724 - protein, 13 aa, Homo sapiens
  CDR3 for beta chain variable domain of TCR clone 198862 (TRBV25-1, TRBJ1-2)
CASSENMGRGYTF

SEQ ID NO: 397725 - protein, 14 aa, Homo sapiens
  CDR3 for alpha chain variable domain of TCR clone 198863 (TRAV1-2, TRAJ8)
CAVREDTGLQKLVF

SEQ ID NO: 397726 - protein, 22 aa, Homo sapiens
  CDR3 for beta chain variable domain of TCR clone 198863 (TRBV7-3, TRBJ2-2)
GGTQPCISVPAAQEDTPGSCFF

SEQ ID NO: 397727 - protein, 14 aa, Homo sapiens
  CDR3 for alpha chain variable domain of TCR clone 198864 (TRAV23/DV6, TRAJ27)
CAASRETNAGKSTF

SEQ ID NO: 397728 - protein, 13 aa, Homo sapiens
  CDR3 for beta chain variable domain of TCR clone 198864 (TRBV20-1, TRBJ1-5)
CSASGRGNQPQHF

SEQ ID NO: 397729 - protein, 12 aa, Homo sapiens
  CDR3 for alpha chain variable domain of TCR clone 198865 (TRAV8-3, TRAJ43)
CAVGAGNKDMRF

SEQ ID NO: 397730 - protein, 14 aa, Homo sapiens
  CDR3 for beta chain variable domain of TCR clone 198865 (TRBV4-2, TRBJ1-5)
CASSRDRGNQPQHF

SEQ ID NO: 397731 - protein, 15 aa, Homo sapiens
  CDR3 for alpha chain variable domain of TCR clone 198866 (TRAV21, TRAJ53)
CATLNSGGSNYKLTF

SEQ ID NO: 397732 - protein, 14 aa, Homo sapiens
  CDR3 for beta chain variable domain of TCR clone 198866 (TRBV15, TRBJ1-2)
CATSRASVNYGYTL

SEQ ID NO: 397733 - protein, 17 aa, Homo sapiens
  CDR3 for alpha chain variable domain of TCR clone 198867 (TRAV3, TRAJ6)
CALRAGPRAGGSYIPTF

SEQ ID NO: 397734 - protein, 14 aa, Homo sapiens
  CDR3 for beta chain variable domain of TCR clone 198867 (TRBV7-2, TRBJ2-7)
CASSPKTSFYEQYF

SEQ ID NO: 397735 - protein, 17 aa, Homo sapiens
  CDR3 for alpha chain variable domain of TCR clone 198868 (TRAV3, TRAJ6)
CAVRDCPRAGGSYIPTF

SEQ ID NO: 397736 - protein, 18 aa, Homo sapiens
  CDR3 for beta chain variable domain of TCR clone 198868 (TRBV7-3, TRBJ2-3)
CASSSTGTYPGSTDTQYF

SEQ ID NO: 397737 - protein, 14 aa, Homo sapiens
  CDR3 for alpha chain variable domain of TCR clone 198869 (TRAV1-2, TRAJ16)
CAVNRFSDGQKLLF

SEQ ID NO: 397738 - protein, 14 aa, Homo sapiens
  CDR3 for beta chain variable domain of TCR clone 198869 (TRBV6-1, TRBJ1-4)
CASIRGGGEEKLFF

SEQ ID NO: 397739 - protein, 16 aa, Homo sapiens
  CDR3 for alpha chain variable domain of TCR clone 198870 (TRAV13-2, TRAJ32)
CAENMNYGGATNKLIF

SEQ ID NO: 397740 - protein, 17 aa, Homo sapiens
  CDR3 for beta chain variable domain of TCR clone 198870 (TRBV15, TRBJ1-1)
CATSRVGGADGDTEAFF

SEQ ID NO: 397741 - protein, 13 aa, Homo sapiens
  CDR3 for alpha chain variable domain of TCR clone 198871 (TRAV12-3, TRAJ40)
CAMSARGTDKYIF

SEQ ID NO: 397742 - protein, 16 aa, Homo sapiens
  CDR3 for beta chain variable domain of TCR clone 198871 (TRBV20-1, TRBJ2-3)
CSGEAGLAGGQDTQYF

SEQ ID NO: 397743 - protein, 13 aa, Homo sapiens
  CDR3 for alpha chain variable domain of TCR clone 198872 (TRAV13-2, TRAJ49)
CAEAPQTGNQFYF

SEQ ID NO: 397744 - protein, 14 aa, Homo sapiens
  CDR3 for beta chain variable domain of TCR clone 198872 (TRBV7-2, TRBJ2-7)
CASSPKTSFYEQYF

SEQ ID NO: 397745 - protein, 15 aa, Homo sapiens
  CDR3 for alpha chain variable domain of TCR clone 198873 (TRAV12-3, TRAJ49)
CTMAVTPNTGNQFYF

SEQ ID NO: 397746 - protein, 18 aa, Homo sapiens
  CDR3 for beta chain variable domain of TCR clone 198873 (TRBV4-1, TRBJ1-5)
CASSQDPRGQGLNQPQHF

SEQ ID NO: 397747 - protein, 16 aa, Homo sapiens
  CDR3 for alpha chain variable domain of TCR clone 198874 (TRAV3, TRAJ10)
CAVRDVRAGGGNKLTF

SEQ ID NO: 397748 - protein, 13 aa, Homo sapiens
  CDR3 for beta chain variable domain of TCR clone 198874 (TRBV10-2, TRBJ2-7)
CASGASGGYEQYF

SEQ ID NO: 397749 - protein, 14 aa, Homo sapiens
  CDR3 for alpha chain variable domain of TCR clone 198875 (TRAV12-2, TRAJ40)
CAVKIPPGTYKYIF

SEQ ID NO: 397750 - protein, 14 aa, Homo sapiens
  CDR3 for beta chain variable domain of TCR clone 198875 (TRBV20-1, TRBJ1-1)
CSAETRIGGTEAFF

SEQ ID NO: 397751 - protein, 15 aa, Homo sapiens
  CDR3 for alpha chain variable domain of TCR clone 198876 (TRAV27, TRAJ24)
CAGGTSADSWGKLQF

SEQ ID NO: 397752 - protein, 17 aa, Homo sapiens
  CDR3 for beta chain variable domain of TCR clone 198876 (TRBV4-1, TRBJ1-4)
CASSQEGPRGVEEKLFF

SEQ ID NO: 397753 - protein, 13 aa, Homo sapiens
  CDR3 for alpha chain variable domain of TCR clone 198877 (TRAV12-3, TRAJ13)
CAMSSGGYQKVTF

SEQ ID NO: 397754 - protein, 14 aa, Homo sapiens
  CDR3 for beta chain variable domain of TCR clone 198877 (TRBV6-1, TRBJ1-3)
CASVQGGGGNTIYF

SEQ ID NO: 397755 - protein, 12 aa, Homo sapiens
  CDR3 for alpha chain variable domain of TCR clone 198878 (TRAV12-3, TRAJ17)
CAMTLTGNKLTF

SEQ ID NO: 397756 - protein, 12 aa, Homo sapiens
  CDR3 for beta chain variable domain of TCR clone 198878 (TRBV7-2, TRBJ2-1)
CASSQQDIEQFF

SEQ ID NO: 397757 - protein, 14 aa, Homo sapiens
  CDR3 for alpha chain variable domain of TCR clone 198879 (TRAV1-1, TRAJ23)
CAVSIYNQGGKLIF

SEQ ID NO: 397758 - protein, 12 aa, Homo sapiens
  CDR3 for beta chain variable domain of TCR clone 198879 (TRBV11-2, TRBJ2-2)
CASSLGGGELFF

SEQ ID NO: 397759 - protein, 14 aa, Homo sapiens
  CDR3 for alpha chain variable domain of TCR clone 198880 (TRAV8-3, TRAJ44)
CAVGVGGTASKLTF

SEQ ID NO: 397760 - protein, 15 aa, Homo sapiens
  CDR3 for beta chain variable domain of TCR clone 198880 (TRBV20-1, TRBJ2-7)
CSARDRVSGMDEQYF

SEQ ID NO: 397761 - protein, 14 aa, Homo sapiens
  CDR3 for alpha chain variable domain of TCR clone 198881 (TRAV12-2, TRAJ40)
CAVKIPSGTYNYIF

SEQ ID NO: 397762 - protein, 15 aa, Homo sapiens
  CDR3 for beta chain variable domain of TCR clone 198881 (TRBV7-2, TRBJ2-1)
CASTHGTGIYNEQFF

SEQ ID NO: 397763 - protein, 14 aa, Homo sapiens
  CDR3 for alpha chain variable domain of TCR clone 198882 (TRAV8-3, TRAJ4)
CAVGAAGGYSKLIF

SEQ ID NO: 397764 - protein, 11 aa, Homo sapiens
  CDR3 for beta chain variable domain of TCR clone 198882 (TRBV12-4, TRBJ2-3)
CASTATDTQYF

SEQ ID NO: 397765 - protein, 15 aa, Homo sapiens
  CDR3 for alpha chain variable domain of TCR clone 198883 (TRAV23/DV6, TRAJ28)
CAASQGGAGSYQLTF

SEQ ID NO: 397766 - protein, 14 aa, Homo sapiens
  CDR3 for beta chain variable domain of TCR clone 198883 (TRBV7-8, TRBJ2-5)
CASSATGGQETQYF

SEQ ID NO: 397767 - protein, 14 aa, Homo sapiens
  CDR3 for alpha chain variable domain of TCR clone 198884 (TRAV8-4, TRAJ23)
CAVSATGSGGKLIF

SEQ ID NO: 397768 - protein, 17 aa, Homo sapiens
  CDR3 for beta chain variable domain of TCR clone 198884 (TRBV4-3, TRBJ2-3)
CASSQDPLAGAVDTQYF

SEQ ID NO: 397769 - protein, 12 aa, Homo sapiens
  CDR3 for alpha chain variable domain of TCR clone 198885 (TRAV21, TRAJ33)
CAKMDSNYQLIW

SEQ ID NO: 397770 - protein, 14 aa, Homo sapiens
  CDR3 for beta chain variable domain of TCR clone 198885 (TRBV19, TRBJ2-1)
CATSQGDTYNEQFF

SEQ ID NO: 397771 - protein, 18 aa, Homo sapiens
  CDR3 for alpha chain variable domain of TCR clone 198886 (TRAV9-2, TRAJ52)
CALSRHNAGGTSYGKLTF

SEQ ID NO: 397772 - protein, 12 aa, Homo sapiens
  CDR3 for beta chain variable domain of TCR clone 198886 (TRBV27, TRBJ2-1)
CASRGFYNEQFF

SEQ ID NO: 397773 - protein, 12 aa, Homo sapiens
  CDR3 for alpha chain variable domain of TCR clone 198887 (TRAV26-2, TRAJ21)
CILKGNFNKFYF

SEQ ID NO: 397774 - protein, 12 aa, Homo sapiens
  CDR3 for beta chain variable domain of TCR clone 198887 (TRBV6-3, TRBJ2-1)
CASSGSYNEQFF

SEQ ID NO: 397775 - protein, 13 aa, Homo sapiens
  CDR3 for alpha chain variable domain of TCR clone 198888 (TRAV21, TRAJ57)
CAVTQGGSEKLVF

SEQ ID NO: 397776 - protein, 14 aa, Homo sapiens
  CDR3 for beta chain variable domain of TCR clone 198888 (TRBV7-3, TRBJ2-1)
CASSLAGGTNEHFF

SEQ ID NO: 397777 - protein, 14 aa, Homo sapiens
  CDR3 for alpha chain variable domain of TCR clone 198889 (TRAV3, TRAJ28)
CAVRRGAGSYQLTF

SEQ ID NO: 397778 - protein, 16 aa, Homo sapiens
  CDR3 for beta chain variable domain of TCR clone 198889 (TRBV4-1, TRBJ2-7)
CASSQEWTSGPLEQYS

SEQ ID NO: 397779 - protein, 14 aa, Homo sapiens
  CDR3 for alpha chain variable domain of TCR clone 198890 (TRAV13-2, TRAJ11)
CAETGNSGYSTLTF

SEQ ID NO: 397780 - protein, 15 aa, Homo sapiens
  CDR3 for beta chain variable domain of TCR clone 198890 (TRBV7-8, TRBJ1-5)
CASSLERRGLEPQHF

SEQ ID NO: 397781 - protein, 18 aa, Homo sapiens
  CDR3 for alpha chain variable domain of TCR clone 198891 (TRAV21, TRAJ52)
CAVRPSPAGGTSYGKLTF

SEQ ID NO: 397782 - protein, 15 aa, Homo sapiens
  CDR3 for beta chain variable domain of TCR clone 198891 (TRBV11-2, TRBJ1-1)
CASSFSTRMNTEAFF

SEQ ID NO: 397783 - protein, 14 aa, Homo sapiens
  CDR3 for alpha chain variable domain of TCR clone 198892 (TRAV12-2, TRAJ33)
CAVKGARSNYQLIW

SEQ ID NO: 397784 - protein, 12 aa, Homo sapiens
  CDR3 for beta chain variable domain of TCR clone 198892 (TRBV24-1, TRBJ2-3)
CATSDSTDTQYF

SEQ ID NO: 397785 - protein, 15 aa, Homo sapiens
  CDR3 for alpha chain variable domain of TCR clone 198893 (TRAV13-1, TRAJ44)
CAASRGGGTASKLTF

SEQ ID NO: 397786 - protein, 12 aa, Homo sapiens
  CDR3 for beta chain variable domain of TCR clone 198893 (TRBV11-2, TRBJ2-2)
CASSLGGGELFC

SEQ ID NO: 397787 - protein, 14 aa, Homo sapiens
  CDR3 for alpha chain variable domain of TCR clone 198894 (TRAV12-1, TRAJ34)
CVVNLDYNTDKPIF

SEQ ID NO: 397788 - protein, 17 aa, Homo sapiens
  CDR3 for beta chain variable domain of TCR clone 198894 (TRBV20-1, TRBJ2-7)
CSAAGTSGGGSSYEQYF

SEQ ID NO: 397789 - protein, 13 aa, Homo sapiens
  CDR3 for alpha chain variable domain of TCR clone 198895 (TRAV2, TRAJ40)
CAVVTSGTYKYIF

SEQ ID NO: 397790 - protein, 12 aa, Homo sapiens
  CDR3 for beta chain variable domain of TCR clone 198895 (TRBV7-3, TRBJ2-1)
CASSFQSGTQFF

SEQ ID NO: 397791 - protein, 13 aa, Homo sapiens
  CDR3 for alpha chain variable domain of TCR clone 198896 (TRAV21, TRAJ27)
CAALNTNAGKSTF

SEQ ID NO: 397792 - protein, 15 aa, Homo sapiens
  CDR3 for beta chain variable domain of TCR clone 198896 (TRBV27, TRBJ2-3)
CASSLGLAATDTQYF

SEQ ID NO: 397793 - protein, 14 aa, Homo sapiens
  CDR3 for alpha chain variable domain of TCR clone 198897 (TRAV16, TRAJ33)
CALSTMDSNYQLIW

SEQ ID NO: 397794 - protein, 12 aa, Homo sapiens
  CDR3 for beta chain variable domain of TCR clone 198897 (TRBV5-1, TRBJ1-2)
CASSQDTYGYTF

SEQ ID NO: 397795 - protein, 13 aa, Homo sapiens
  CDR3 for alpha chain variable domain of TCR clone 198898 (TRAV29/DV5, TRAJ16)
CAATRVGGQKLLF

SEQ ID NO: 397796 - protein, 17 aa, Homo sapiens
  CDR3 for beta chain variable domain of TCR clone 198898 (TRBV20-1, TRBJ2-1)
CSAPPRLAGTRYNEQFF

SEQ ID NO: 397797 - protein, 14 aa, Homo sapiens
  CDR3 for alpha chain variable domain of TCR clone 198899 (TRAV29/DV5, TRAJ36)
CAARRKTGAHNLFF

SEQ ID NO: 397798 - protein, 14 aa, Homo sapiens
  CDR3 for beta chain variable domain of TCR clone 198899 (TRBV4-2, TRBJ2-1)
CASGLDRAYNEQFF

SEQ ID NO: 397799 - protein, 11 aa, Homo sapiens
  CDR3 for alpha chain variable domain of TCR clone 198900 (TRAV35, TRAJ30)
CAGPGDDKIIF

SEQ ID NO: 397800 - protein, 18 aa, Homo sapiens
  CDR3 for beta chain variable domain of TCR clone 198900 (TRBV7-6, TRBJ2-1)
CASSPRTSGMSSYKEQFF

SEQ ID NO: 397801 - protein, 13 aa, Homo sapiens
  CDR3 for alpha chain variable domain of TCR clone 198901 (TRAV29/DV5, TRAJ31)
CAASLNNNARLMF

SEQ ID NO: 397802 - protein, 15 aa, Homo sapiens
  CDR3 for beta chain variable domain of TCR clone 198901 (TRBV27, TRBJ2-1)
CASSNGGGSSNEQFF

SEQ ID NO: 397803 - protein, 10 aa, Homo sapiens
  CDR3 for alpha chain variable domain of TCR clone 198902 (TRAV30, TRAJ48)
CGIGNEKLTF

SEQ ID NO: 397804 - protein, 13 aa, Homo sapiens
  CDR3 for beta chain variable domain of TCR clone 198902 (TRBV7-6, TRBJ2-3)
CSSVAGGTDTQYF

SEQ ID NO: 397805 - protein, 11 aa, Homo sapiens
  CDR3 for alpha chain variable domain of TCR clone 198903 (TRAV3, TRAJ21)
CAVGNFNKSYF

SEQ ID NO: 397806 - protein, 15 aa, Homo sapiens
  CDR3 for beta chain variable domain of TCR clone 198903 (TRBV20-1, TRBJ2-7)
CSARDRVSGMDEQYF

SEQ ID NO: 397807 - protein, 11 aa, Homo sapiens
  CDR3 for alpha chain variable domain of TCR clone 198904 (TRAV12-2, TRAJ36)
CAVDGANNLFF

SEQ ID NO: 397808 - protein, 14 aa, Homo sapiens
  CDR3 for beta chain variable domain of TCR clone 198904 (TRBV7-3, TRBJ2-2)
CASSSGGYTGELFF

SEQ ID NO: 397809 - protein, 14 aa, Homo sapiens
  CDR3 for alpha chain variable domain of TCR clone 198905 (TRAV3, TRAJ16)
CCERLKSDGQKLLF

SEQ ID NO: 397810 - protein, 15 aa, Homo sapiens
  CDR3 for beta chain variable domain of TCR clone 198905 (TRBV28, TRBJ2-7)
CASSPGGSGFYEQYF

SEQ ID NO: 397811 - protein, 14 aa, Homo sapiens
  CDR3 for alpha chain variable domain of TCR clone 198906 (TRAV12-1, TRAJ17)
CVGNYKAAGNKLTF

SEQ ID NO: 397812 - protein, 13 aa, Homo sapiens
  CDR3 for beta chain variable domain of TCR clone 198906 (TRBV11-2, TRBJ2-5)
CASSFSSQETQYF

SEQ ID NO: 397813 - protein, 15 aa, Homo sapiens
  CDR3 for alpha chain variable domain of TCR clone 198907 (TRAV12-3, TRAJ49)
CAMAVTPNTGNEFYF

SEQ ID NO: 397814 - protein, 14 aa, Homo sapiens
  CDR3 for beta chain variable domain of TCR clone 198907 (TRBV7-8, TRBJ2-3)
CASSLEAGTDTQYF

SEQ ID NO: 397815 - protein, 12 aa, Homo sapiens
  CDR3 for alpha chain variable domain of TCR clone 198908 (TRAV12-3, TRAJ20)
CAMVRGDYKLSF

SEQ ID NO: 397816 - protein, 16 aa, Homo sapiens
  CDR3 for beta chain variable domain of TCR clone 198908 (TRBV27, TRBJ2-5)
CASSYGPGGQKETQYF

SEQ ID NO: 397817 - protein, 11 aa, Homo sapiens
  CDR3 for alpha chain variable domain of TCR clone 198909 (TRAV21, TRAJ21)
CAVGNFNKFYF

SEQ ID NO: 397818 - protein, 16 aa, Homo sapiens
  CDR3 for beta chain variable domain of TCR clone 198909 (TRBV19, TRBJ2-1)
CASSKAGPSSYNEQFF

SEQ ID NO: 397819 - protein, 14 aa, Homo sapiens
  CDR3 for alpha chain variable domain of TCR clone 198910 (TRAV9-2, TRAJ39)
CALYIYNAGNMLTF

SEQ ID NO: 397820 - protein, 13 aa, Homo sapiens
  CDR3 for beta chain variable domain of TCR clone 198910 (TRBV12-4, TRBJ2-1)
CASSFQGYNEQFF

SEQ ID NO: 397821 - protein, 20 aa, Homo sapiens
  CDR3 for alpha chain variable domain of TCR clone 198911 (TRAV8-3, )
CAVGAGDIQNPDPAVYQLRD

SEQ ID NO: 397822 - protein, 14 aa, Homo sapiens
  CDR3 for beta chain variable domain of TCR clone 198911 (TRBV5-1, TRBJ1-5)
CASSLGRGAQPQHF

SEQ ID NO: 397823 - protein, 14 aa, Homo sapiens
  CDR3 for alpha chain variable domain of TCR clone 198912 (TRAV12-1, TRAJ17)
CVVNYNAAGTKLTF

SEQ ID NO: 397824 - protein, 17 aa, Homo sapiens
  CDR3 for beta chain variable domain of TCR clone 198912 (TRBV20-1, TRBJ2-1)
CSASSSGLAGSYNEQFF

SEQ ID NO: 397825 - protein, 15 aa, Homo sapiens
  CDR3 for alpha chain variable domain of TCR clone 198913 (TRAV3, TRAJ4)
CAVRDGTGGYNKLIF

SEQ ID NO: 397826 - protein, 13 aa, Homo sapiens
  CDR3 for beta chain variable domain of TCR clone 198913 (TRBV27, TRBJ1-1)
CASSLSIGAEAFF

SEQ ID NO: 397827 - protein, 15 aa, Homo sapiens
  CDR3 for alpha chain variable domain of TCR clone 198914 (TRAV2, TRAJ15)
CAVEDRGQAGTALIF

SEQ ID NO: 397828 - protein, 15 aa, Homo sapiens
  CDR3 for beta chain variable domain of TCR clone 198914 (TRBV20-1, TRBJ1-5)
CSATSDRGLGQLQHF

SEQ ID NO: 397829 - protein, 12 aa, Homo sapiens
  CDR3 for alpha chain variable domain of TCR clone 198915 (TRAV17, TRAJ12)
RATLRSSYKLIF

SEQ ID NO: 397830 - protein, 16 aa, Homo sapiens
  CDR3 for beta chain variable domain of TCR clone 198915 (TRBV28, TRBJ2-7)
CASSLFFETGGPEQYF

SEQ ID NO: 397831 - protein, 12 aa, Homo sapiens
  CDR3 for alpha chain variable domain of TCR clone 198916 (TRAV22, TRAJ22)
CAPGGSARQLTF

SEQ ID NO: 397832 - protein, 13 aa, Homo sapiens
  CDR3 for beta chain variable domain of TCR clone 198916 (TRBV12-5, TRBJ2-3)
CASGDRQSDTQYF

SEQ ID NO: 397833 - protein, 14 aa, Homo sapiens
  CDR3 for alpha chain variable domain of TCR clone 198917 (TRAV2, TRAJ9)
CAVEDRSGGFKTIF

SEQ ID NO: 397834 - protein, 14 aa, Homo sapiens
  CDR3 for beta chain variable domain of TCR clone 198917 (TRBV20-1, TRBJ2-1)
CSGQIGGSANEQFF

SEQ ID NO: 397835 - protein, 11 aa, Homo sapiens
  CDR3 for alpha chain variable domain of TCR clone 198918 (TRAV4, TRAJ31)
CLVGDHARLMF

SEQ ID NO: 397836 - protein, 16 aa, Homo sapiens
  CDR3 for beta chain variable domain of TCR clone 198918 (TRBV7-2, TRBJ2-5)
CASSSKWLSGQETQYF

SEQ ID NO: 397837 - protein, 14 aa, Homo sapiens
  CDR3 for alpha chain variable domain of TCR clone 198919 (TRAV4, TRAJ20)
CLVGRRSNDYKLSF

SEQ ID NO: 397838 - protein, 18 aa, Homo sapiens
  CDR3 for beta chain variable domain of TCR clone 198919 (TRBV2, TRBJ2-5)
CASSGDPQGRGAQETQDF

SEQ ID NO: 397839 - protein, 13 aa, Homo sapiens
  CDR3 for alpha chain variable domain of TCR clone 198920 (TRAV13-2, TRAJ13)
CAERPGGYQKVTF

SEQ ID NO: 397840 - protein, 13 aa, Homo sapiens
  CDR3 for beta chain variable domain of TCR clone 198920 (TRBV20-1, TRBJ2-7)
CSATHTSGYEQYF

SEQ ID NO: 397841 - protein, 15 aa, Homo sapiens
  CDR3 for alpha chain variable domain of TCR clone 198921 (TRAV3, TRAJ47)
CAVRDIGEYGNKLVF

SEQ ID NO: 397842 - protein, 13 aa, Homo sapiens
  CDR3 for beta chain variable domain of TCR clone 198921 (TRBV7-7, TRBJ1-1)
CASSLGANTEAFF

SEQ ID NO: 397843 - protein, 14 aa, Homo sapiens
  CDR3 for alpha chain variable domain of TCR clone 198922 (TRAV38-1, TRAJ45)
CASHSGGGADGLTF

SEQ ID NO: 397844 - protein, 17 aa, Homo sapiens
  CDR3 for beta chain variable domain of TCR clone 198922 (TRBV11-3, TRBJ2-3)
CASSPGSSGGRTDTQYF

SEQ ID NO: 397845 - protein, 13 aa, Homo sapiens
  CDR3 for alpha chain variable domain of TCR clone 198923 (TRAV12-1, TRAJ33)
CGDAPDSNYQLIW

SEQ ID NO: 397846 - protein, 16 aa, Homo sapiens
  CDR3 for beta chain variable domain of TCR clone 198923 (TRBV28, TRBJ2-7)
CASSSGTSGRGYEQYF

SEQ ID NO: 397847 - protein, 17 aa, Homo sapiens
  CDR3 for alpha chain variable domain of TCR clone 198924 (TRAV3, TRAJ38)
CAVRDCLNAGNNRKLIW

SEQ ID NO: 397848 - protein, 16 aa, Homo sapiens
  CDR3 for beta chain variable domain of TCR clone 198924 (TRBV19, TRBJ2-3)
CASSPGAASRTDTQYF

SEQ ID NO: 397849 - protein, 15 aa, Homo sapiens
  CDR3 for alpha chain variable domain of TCR clone 198925 (TRAV19, TRAJ23)
CALSEGRNQGGKLIF

SEQ ID NO: 397850 - protein, 16 aa, Homo sapiens
  CDR3 for beta chain variable domain of TCR clone 198925 (TRBV7-2, TRBJ2-7)
CASSLVLSGGAYEQYF

SEQ ID NO: 397851 - protein, 14 aa, Homo sapiens
  CDR3 for alpha chain variable domain of TCR clone 198926 (TRAV38-1, TRAJ39)
CAFACNNAGNMLTF

SEQ ID NO: 397852 - protein, 15 aa, Homo sapiens
  CDR3 for beta chain variable domain of TCR clone 198926 (TRBV19, TRBJ2-6)
CASSIGPSGANVLTF

SEQ ID NO: 397853 - protein, 13 aa, Homo sapiens
  CDR3 for alpha chain variable domain of TCR clone 198927 (TRAV27, TRAJ45)
CRSSGGGADGLTF

SEQ ID NO: 397854 - protein, 13 aa, Homo sapiens
  CDR3 for beta chain variable domain of TCR clone 198927 (TRBV4-2, TRBJ2-3)
CASSQGNTDTQYF

SEQ ID NO: 397855 - protein, 13 aa, Homo sapiens
  CDR3 for alpha chain variable domain of TCR clone 198928 (TRAV16, TRAJ34)
CALSPYNTDKLIF

SEQ ID NO: 397856 - protein, 15 aa, Homo sapiens
  CDR3 for beta chain variable domain of TCR clone 198928 (TRBV10-2, TRBJ2-6)
CASSEQGTGANDLTF

SEQ ID NO: 397857 - protein, 10 aa, Homo sapiens
  CDR3 for alpha chain variable domain of TCR clone 198929 (TRAV12-2, TRAJ22)
CAVNEKQLTF

SEQ ID NO: 397858 - protein, 13 aa, Homo sapiens
  CDR3 for beta chain variable domain of TCR clone 198929 (TRBV6-5, TRBJ2-6)
CASSTSGPLRLDF

SEQ ID NO: 397859 - protein, 17 aa, Homo sapiens
  CDR3 for alpha chain variable domain of TCR clone 198930 (TRAV3, TRAJ6)
CAVRDGPRAGGSYIPTV

SEQ ID NO: 397860 - protein, 14 aa, Homo sapiens
  CDR3 for beta chain variable domain of TCR clone 198930 (TRBV19, TRBJ2-1)
CASPTFVLSGEQFF

SEQ ID NO: 397861 - protein, 15 aa, Homo sapiens
  CDR3 for alpha chain variable domain of TCR clone 198931 (TRAV27, TRAJ38)
CAARRNAGNNRKLIW

SEQ ID NO: 397862 - protein, 16 aa, Homo sapiens
  CDR3 for beta chain variable domain of TCR clone 198931 (TRBV11-2, TRBJ1-2)
CASSLDTGGADYGYTF

SEQ ID NO: 397863 - protein, 14 aa, Homo sapiens
  CDR3 for alpha chain variable domain of TCR clone 198932 (TRAV12-2, TRAJ5)
CAVNRSTRRRALTF

SEQ ID NO: 397864 - protein, 12 aa, Homo sapiens
  CDR3 for beta chain variable domain of TCR clone 198932 (TRBV19, TRBJ1-5)
CASSIAQQPQHF

SEQ ID NO: 397865 - protein, 14 aa, Homo sapiens
  CDR3 for alpha chain variable domain of TCR clone 198933 (TRAV16, TRAJ54)
CALSLIQGAQKLVF

SEQ ID NO: 397866 - protein, 17 aa, Homo sapiens
  CDR3 for beta chain variable domain of TCR clone 198933 (TRBV13, TRBJ2-3)
CASSLSRVAGGRNTQYF

SEQ ID NO: 397867 - protein, 15 aa, Homo sapiens
  CDR3 for alpha chain variable domain of TCR clone 198934 (TRAV14/DV4, TRAJ10)
CAMRELTGGGNKLTF

SEQ ID NO: 397868 - protein, 17 aa, Homo sapiens
  CDR3 for beta chain variable domain of TCR clone 198934 (TRBV15, TRBJ1-2)
CATSGREIDVVNYGYSF

SEQ ID NO: 397869 - protein, 14 aa, Homo sapiens
  CDR3 for alpha chain variable domain of TCR clone 198935 (TRAV12-2, TRAJ5)
CAVKGDTGRRALTF

SEQ ID NO: 397870 - protein, 15 aa, Homo sapiens
  CDR3 for beta chain variable domain of TCR clone 198935 (TRBV9, TRBJ1-6)
CASSVAGTGDSPLHF

SEQ ID NO: 397871 - protein, 12 aa, Homo sapiens
  CDR3 for alpha chain variable domain of TCR clone 198936 (TRAV13-2, TRAJ23)
CAERLRGGKLIF

SEQ ID NO: 397872 - protein, 15 aa, Homo sapiens
  CDR3 for beta chain variable domain of TCR clone 198936 (TRBV19, TRBJ1-2)
CASSVGQVLNYGYTF

SEQ ID NO: 397873 - protein, 14 aa, Homo sapiens
  CDR3 for alpha chain variable domain of TCR clone 198937 (TRAV10, TRAJ15)
CVVSASKAGTALIF

SEQ ID NO: 397874 - protein, 12 aa, Homo sapiens
  CDR3 for beta chain variable domain of TCR clone 198937 (TRBV29-1, TRBJ2-3)
CSVTGGADTQYF

SEQ ID NO: 397875 - protein, 16 aa, Homo sapiens
  CDR3 for alpha chain variable domain of TCR clone 198938 (TRAV8-3, TRAJ42)
CAVGEGNGGSQGNLIF

SEQ ID NO: 397876 - protein, 13 aa, Homo sapiens
  CDR3 for beta chain variable domain of TCR clone 198938 (TRBV18, TRBJ2-5)
CASSLQGQETQYF

SEQ ID NO: 397877 - protein, 14 aa, Homo sapiens
  CDR3 for alpha chain variable domain of TCR clone 198939 (TRAV1-2, TRAJ16)
CAVNRFSDGQKLFF

SEQ ID NO: 397878 - protein, 16 aa, Homo sapiens
  CDR3 for beta chain variable domain of TCR clone 198939 (TRBV19, TRBJ2-1)
CASSKAGPSSHNEQFF

SEQ ID NO: 397879 - protein, 18 aa, Homo sapiens
  CDR3 for alpha chain variable domain of TCR clone 198940 (TRAV12-3, TRAJ52)
CAMSVGGAGGNSYGKLTF

SEQ ID NO: 397880 - protein, 14 aa, Homo sapiens
  CDR3 for beta chain variable domain of TCR clone 198940 (TRBV7-2, TRBJ2-7)
CASRSQGAAYEQYF

SEQ ID NO: 397881 - protein, 15 aa, Homo sapiens
  CDR3 for alpha chain variable domain of TCR clone 198941 (TRAV3, TRAJ38)
CAARRNAGNNRKLIW

SEQ ID NO: 397882 - protein, 13 aa, Homo sapiens
  CDR3 for beta chain variable domain of TCR clone 198941 (TRBV12-5, TRBJ2-3)
CASGDRQSDTQYF

SEQ ID NO: 397883 - protein, 15 aa, Homo sapiens
  CDR3 for alpha chain variable domain of TCR clone 198942 (TRAV13-1, TRAJ32)
CAASIYGGATNKHIF

SEQ ID NO: 397884 - protein, 14 aa, Homo sapiens
  CDR3 for beta chain variable domain of TCR clone 198942 (TRBV7-9, TRBJ2-1)
CASSLASGSNEQFF

SEQ ID NO: 397885 - protein, 16 aa, Homo sapiens
  CDR3 for alpha chain variable domain of TCR clone 198943 (TRAV26-1, TRAJ31)
CIVRPPVLNNNARLMF

SEQ ID NO: 397886 - protein, 17 aa, Homo sapiens
  CDR3 for beta chain variable domain of TCR clone 198943 (TRBV5-1, TRBJ1-5)
CASGLVGREEGNQPQHF

SEQ ID NO: 397887 - protein, 18 aa, Homo sapiens
  CDR3 for alpha chain variable domain of TCR clone 198944 (TRAV13-1, TRAJ39)
CAASIVMQATCSPLEGEP

SEQ ID NO: 397888 - protein, 16 aa, Homo sapiens
  CDR3 for beta chain variable domain of TCR clone 198944 (TRBV20-1, TRBJ1-4)
CSAPGQGLLTNEKLFF

SEQ ID NO: 397889 - protein, 13 aa, Homo sapiens
  CDR3 for alpha chain variable domain of TCR clone 198945 (TRAV27, TRAJ8)
CAGGPTGFQKLVF

SEQ ID NO: 397890 - protein, 11 aa, Homo sapiens
  CDR3 for beta chain variable domain of TCR clone 198945 (TRBV11-2, TRBJ2-2)
CASSLPGELFF

SEQ ID NO: 397891 - protein, 14 aa, Homo sapiens
  CDR3 for alpha chain variable domain of TCR clone 198946 (TRAV1-2, TRAJ16)
CAVNRCSDGQKLLF

SEQ ID NO: 397892 - protein, 15 aa, Homo sapiens
  CDR3 for beta chain variable domain of TCR clone 198946 (TRBV27, TRBJ2-1)
CASSNGGGSSNEQFF

SEQ ID NO: 397893 - protein, 12 aa, Homo sapiens
  CDR3 for alpha chain variable domain of TCR clone 198947 (TRAV21, TRAJ31)
CAVWGNNARLMF

SEQ ID NO: 397894 - protein, 16 aa, Homo sapiens
  CDR3 for beta chain variable domain of TCR clone 198947 (TRBV27, TRBJ2-1)
CASSYGPGGQKETQYF

SEQ ID NO: 397895 - protein, 12 aa, Homo sapiens
  CDR3 for alpha chain variable domain of TCR clone 198948 (TRAV3, TRAJ26)
CAVRDYGQNFVF

SEQ ID NO: 397896 - protein, 16 aa, Homo sapiens
  CDR3 for beta chain variable domain of TCR clone 198948 (TRBV11-2, TRBJ1-2)
CARSPSGREANYGYTF

SEQ ID NO: 397897 - protein, 12 aa, Homo sapiens
  CDR3 for alpha chain variable domain of TCR clone 198949 (TRAV3, TRAJ34)
CAVLGNTYKLIF

SEQ ID NO: 397898 - protein, 13 aa, Homo sapiens
  CDR3 for beta chain variable domain of TCR clone 198949 (TRBV19, TRBJ2-1)
CASSIGTGNEQFF

SEQ ID NO: 397899 - protein, 14 aa, Homo sapiens
  CDR3 for alpha chain variable domain of TCR clone 198950 (TRAV30, TRAJ33)
CGTVAPRSNYQLIW

SEQ ID NO: 397900 - protein, 12 aa, Homo sapiens
  CDR3 for beta chain variable domain of TCR clone 198950 (TRBV28, TRBJ1-6)
CASLSVPGPLHF

SEQ ID NO: 397901 - protein, 12 aa, Homo sapiens
  CDR3 for alpha chain variable domain of TCR clone 198951 (TRAV21, TRAJ23)
CAVMLQGGKLIF

SEQ ID NO: 397902 - protein, 14 aa, Homo sapiens
  CDR3 for beta chain variable domain of TCR clone 198951 (TRBV4-1, TRBJ2-2)
CASSQAVNTGELFF

SEQ ID NO: 397903 - protein, 10 aa, Homo sapiens
  CDR3 for alpha chain variable domain of TCR clone 198952 (TRAV5, TRAJ34)
CAEDTDKLIF

SEQ ID NO: 397904 - protein, 12 aa, Homo sapiens
  CDR3 for beta chain variable domain of TCR clone 198952 (TRBV3-1, TRBJ2-7)
CASSQEAAARHF

SEQ ID NO: 397905 - protein, 12 aa, Homo sapiens
  CDR3 for alpha chain variable domain of TCR clone 198953 (TRAV2, TRAJ9)
CAVGAGGSKTIF

SEQ ID NO: 397906 - protein, 13 aa, Homo sapiens
  CDR3 for beta chain variable domain of TCR clone 198953 (TRBV12-4, TRBJ2-2)
CASSITGSGELFF

SEQ ID NO: 397907 - protein, 12 aa, Homo sapiens
  CDR3 for alpha chain variable domain of TCR clone 198954 (TRAV12-3, TRAJ40)
CAMSSGTCKYIF

SEQ ID NO: 397908 - protein, 15 aa, Homo sapiens
  CDR3 for beta chain variable domain of TCR clone 198954 (TRBV7-3, TRBJ2-2)
CASSETGQGTGELFF

SEQ ID NO: 397909 - protein, 11 aa, Homo sapiens
  CDR3 for alpha chain variable domain of TCR clone 198955 (TRAV21, TRAJ11)
CAVNEYSTLTF

SEQ ID NO: 397910 - protein, 16 aa, Homo sapiens
  CDR3 for beta chain variable domain of TCR clone 198955 (TRBV12-5, TRBJ2-5)
CASGPRTSGNQETQYF

SEQ ID NO: 397911 - protein, 12 aa, Homo sapiens
  CDR3 for alpha chain variable domain of TCR clone 198956 (TRAV26-2, TRAJ21)
CILKGNFNKSYF

SEQ ID NO: 397912 - protein, 14 aa, Homo sapiens
  CDR3 for beta chain variable domain of TCR clone 198956 (TRBV7-9, TRBJ1-1)
CASTPLQSYTDAFF

SEQ ID NO: 397913 - protein, 18 aa, Homo sapiens
  CDR3 for alpha chain variable domain of TCR clone 198957 (TRAV12-3, TRAJ52)
CAMSVGGAGGTSYGKLTF

SEQ ID NO: 397914 - protein, 14 aa, Homo sapiens
  CDR3 for beta chain variable domain of TCR clone 198957 (TRBV7-3, TRBJ1-1)
CASSLGTGYTEAFF

SEQ ID NO: 397915 - protein, 12 aa, Homo sapiens
  CDR3 for alpha chain variable domain of TCR clone 198958 (TRAV27, TRAJ58)
CAGARDTSRLTF

SEQ ID NO: 397916 - protein, 14 aa, Homo sapiens
  CDR3 for beta chain variable domain of TCR clone 198958 (TRBV7-3, TRBJ2-1)
CASSLGTSTNEQFF

SEQ ID NO: 397917 - protein, 11 aa, Homo sapiens
  CDR3 for alpha chain variable domain of TCR clone 198959 (TRAV29/DV5, TRAJ31)
CAASYRDRLMF

SEQ ID NO: 397918 - protein, 19 aa, Homo sapiens
  CDR3 for beta chain variable domain of TCR clone 198959 (TRBV19, TRBJ2-5)
CASCIGQVTDFFLGETQYF

SEQ ID NO: 397919 - protein, 16 aa, Homo sapiens
  CDR3 for alpha chain variable domain of TCR clone 198960 (TRAV12-2, TRAJ28)
CAVITDSGAGSYQLTF

SEQ ID NO: 397920 - protein, 16 aa, Homo sapiens
  CDR3 for beta chain variable domain of TCR clone 198960 (TRBV27, TRBJ2-2)
CASSFRGLVRTGELFF

SEQ ID NO: 397921 - protein, 11 aa, Homo sapiens
  CDR3 for alpha chain variable domain of TCR clone 198961 (TRAV23/DV6, TRAJ9)
CAASLSPPNTG

SEQ ID NO: 397922 - protein, 14 aa, Homo sapiens
  CDR3 for beta chain variable domain of TCR clone 198961 (TRBV11-2, TRBJ2-5)
CASSRTGGIETQHF

SEQ ID NO: 397923 - protein, 15 aa, Homo sapiens
  CDR3 for alpha chain variable domain of TCR clone 198962 (TRAV38-1, TRAJ57)
CAFMDSQGGSEKLVF

SEQ ID NO: 397924 - protein, 16 aa, Homo sapiens
  CDR3 for beta chain variable domain of TCR clone 198962 (TRBV10-3, TRBJ2-1)
CVIRGGGRGDYNEQFF

SEQ ID NO: 397925 - protein, 12 aa, Homo sapiens
  CDR3 for alpha chain variable domain of TCR clone 198963 (TRAV8-3, TRAJ20)
CAGGANDYKLSF

SEQ ID NO: 397926 - protein, 16 aa, Homo sapiens
  CDR3 for beta chain variable domain of TCR clone 198963 (TRBV19, TRBJ2-2)
CARRSPGTGATGELFF

SEQ ID NO: 397927 - protein, 17 aa, Homo sapiens
  CDR3 for alpha chain variable domain of TCR clone 198964 (TRAV17, TRAJ52)
CATERPSGVTSYGKLTF

SEQ ID NO: 397928 - protein, 15 aa, Homo sapiens
  CDR3 for beta chain variable domain of TCR clone 198964 (TRBV5-1, TRBJ2-1)
CASSLVANSYNEQFF

SEQ ID NO: 397929 - protein, 13 aa, Homo sapiens
  CDR3 for alpha chain variable domain of TCR clone 198965 (TRAV35, TRAJ44)
CAGLSGTASKLTF

SEQ ID NO: 397930 - protein, 17 aa, Homo sapiens
  CDR3 for beta chain variable domain of TCR clone 198965 (TRBV7-8, TRBJ1-2)
CGSSLRPLQGHLYGYTF

SEQ ID NO: 397931 - protein, 14 aa, Homo sapiens
  CDR3 for alpha chain variable domain of TCR clone 198966 (TRAV8-2, TRAJ23)
CVVSDDNQGGKLIF

SEQ ID NO: 397932 - protein, 14 aa, Homo sapiens
  CDR3 for beta chain variable domain of TCR clone 198966 (TRBV19, TRBJ2-1)
CASGKSTQYNGQFF

SEQ ID NO: 397933 - protein, 14 aa, Homo sapiens
  CDR3 for alpha chain variable domain of TCR clone 198967 (TRAV12-2, TRAJ11)
CAVNMNSGYSTLTF

SEQ ID NO: 397934 - protein, 13 aa, Homo sapiens
  CDR3 for beta chain variable domain of TCR clone 198967 (TRBV20-1, TRBJ2-5)
CSAATELQETQYF

SEQ ID NO: 397935 - protein, 14 aa, Homo sapiens
  CDR3 for alpha chain variable domain of TCR clone 198968 (TRAV38-1, TRAJ45)
CAYYSGGGSDGLTF

SEQ ID NO: 397936 - protein, 20 aa, Homo sapiens
  CDR3 for beta chain variable domain of TCR clone 198968 (TRBV28, TRBJ2-1)
CASTPIGRSPGIAGGNEQFF

SEQ ID NO: 397937 - protein, 13 aa, Homo sapiens
  CDR3 for alpha chain variable domain of TCR clone 198969 (TRAV12-2, TRAJ30)
CAVNLNRDDKIIF

SEQ ID NO: 397938 - protein, 14 aa, Homo sapiens
  CDR3 for beta chain variable domain of TCR clone 198969 (TRBV20-1, TRBJ2-3)
CSASSGGRTDTQYF

SEQ ID NO: 397939 - protein, 14 aa, Homo sapiens
  CDR3 for alpha chain variable domain of TCR clone 198970 (TRAV26-1, TRAJ45)
CIEVTGGGADGLTF

SEQ ID NO: 397940 - protein, 15 aa, Homo sapiens
  CDR3 for beta chain variable domain of TCR clone 198970 (TRBV9, TRBJ2-1)
CASSLAGSSYNEQFF

SEQ ID NO: 397941 - protein, 18 aa, Homo sapiens
  CDR3 for alpha chain variable domain of TCR clone 198971 (TRAV21, TRAJ52)
CAVRPSPAGGTSYGKLTF

SEQ ID NO: 397942 - protein, 17 aa, Homo sapiens
  CDR3 for beta chain variable domain of TCR clone 198971 (TRBV13, TRBJ2-3)
GASSLSRVAGGSNTRYF

SEQ ID NO: 397943 - protein, 14 aa, Homo sapiens
  CDR3 for alpha chain variable domain of TCR clone 198972 (TRAV26-1, TRAJ38)
CIANNAGNNRKLIW

SEQ ID NO: 397944 - protein, 15 aa, Homo sapiens
  CDR3 for beta chain variable domain of TCR clone 198972 (TRBV7-6, TRBJ1-4)
CASSLGAGAGEKLFF

SEQ ID NO: 397945 - protein, 14 aa, Homo sapiens
  CDR3 for alpha chain variable domain of TCR clone 198973 (TRAV13-1, TRAJ35)
CAASKGGFGNVLHW

SEQ ID NO: 397946 - protein, 14 aa, Homo sapiens
  CDR3 for beta chain variable domain of TCR clone 198973 (TRBV4-1, TRBJ2-2)
CASSQAVNTGELFF

SEQ ID NO: 397947 - protein, 11 aa, Homo sapiens
  CDR3 for alpha chain variable domain of TCR clone 198974 (TRAV1-1, TRAJ23)
CAVRQGGKLIF

SEQ ID NO: 397948 - protein, 20 aa, Homo sapiens
  CDR3 for beta chain variable domain of TCR clone 198974 (TRBV7-8, TRBJ2-2)
CASSHLFHGPTVHITGELFF

SEQ ID NO: 397949 - protein, 14 aa, Homo sapiens
  CDR3 for alpha chain variable domain of TCR clone 198975 (TRAV3, TRAJ9)
CAVRLNTGGFKTIF

SEQ ID NO: 397950 - protein, 15 aa, Homo sapiens
  CDR3 for beta chain variable domain of TCR clone 198975 (TRBV7-2, TRBJ2-7)
CASSQDLGSSYEQYF

SEQ ID NO: 397951 - protein, 14 aa, Homo sapiens
  CDR3 for alpha chain variable domain of TCR clone 198976 (TRAV1-2, TRAJ16)
WAVNRFSDGQKLLF

SEQ ID NO: 397952 - protein, 14 aa, Homo sapiens
  CDR3 for beta chain variable domain of TCR clone 198976 (TRBV7-2, TRBJ1-1)
CASSFLTGTTEAFF

SEQ ID NO: 397953 - protein, 13 aa, Homo sapiens
  CDR3 for alpha chain variable domain of TCR clone 198977 (TRAV12-1, TRAJ37)
CAVNAGNTGELIF

SEQ ID NO: 397954 - protein, 14 aa, Homo sapiens
  CDR3 for beta chain variable domain of TCR clone 198977 (TRBV7-2, TRBJ2-3)
CASRRGLAADTQYF

SEQ ID NO: 397955 - protein, 16 aa, Homo sapiens
  CDR3 for alpha chain variable domain of TCR clone 198978 (TRAV21, TRAJ17)
CAVRPGEEAAGNRLTF

SEQ ID NO: 397956 - protein, 16 aa, Homo sapiens
  CDR3 for beta chain variable domain of TCR clone 198978 (TRBV2, TRBJ2-7)
CASSEPWTGPSYEQYF

SEQ ID NO: 397957 - protein, 13 aa, Homo sapiens
  CDR3 for alpha chain variable domain of TCR clone 198979 (TRAV12-3, TRAJ15)
CAMSDQAGTALIF

SEQ ID NO: 397958 - protein, 13 aa, Homo sapiens
  CDR3 for beta chain variable domain of TCR clone 198979 (TRBV7-9, TRBJ1-1)
CTSSLVSASEAFF

SEQ ID NO: 397959 - protein, 13 aa, Homo sapiens
  CDR3 for alpha chain variable domain of TCR clone 198980 (TRAV12-3, TRAJ5)
CAMIYTGRRALTF

SEQ ID NO: 397960 - protein, 17 aa, Homo sapiens
  CDR3 for beta chain variable domain of TCR clone 198980 (TRBV7-8, TRBJ2-6)
CASSAGTGGAGANVLTF

SEQ ID NO: 397961 - protein, 13 aa, Homo sapiens
  CDR3 for alpha chain variable domain of TCR clone 198981 (TRAV12-2, TRAJ9)
CAVKWAGGFKTIF

SEQ ID NO: 397962 - protein, 15 aa, Homo sapiens
  CDR3 for beta chain variable domain of TCR clone 198981 (TRBV5-1, TRAJ18)
CASSLTADSDEKLFF

SEQ ID NO: 397963 - protein, 15 aa, Homo sapiens
  CDR3 for alpha chain variable domain of TCR clone 198982 (TRAV35, TRAJ58)
CAGRRQETSGSRLTF

SEQ ID NO: 397964 - protein, 15 aa, Homo sapiens
  CDR3 for beta chain variable domain of TCR clone 198982 (TRBV28, TRBJ2-1)
CASSIIAGGRSEQFF

SEQ ID NO: 397965 - protein, 12 aa, Homo sapiens
  CDR3 for alpha chain variable domain of TCR clone 198983 (TRAV1-2, TRAJ33)
SAALDSNYQLIW

SEQ ID NO: 397966 - protein, 14 aa, Homo sapiens
  CDR3 for beta chain variable domain of TCR clone 198983 (TRBV20-1, TRBJ2-7)
CSAKRGRSSYEQYF

SEQ ID NO: 397967 - protein, 12 aa, Homo sapiens
  CDR3 for alpha chain variable domain of TCR clone 198984 (TRAV12-1, TRAJ40)
CVVYSGTYKYIF

SEQ ID NO: 397968 - protein, 14 aa, Homo sapiens
  CDR3 for beta chain variable domain of TCR clone 198984 (TRBV7-9, TRBJ2-5)
CASSLDTAQETQFF

SEQ ID NO: 397969 - protein, 14 aa, Homo sapiens
  CDR3 for alpha chain variable domain of TCR clone 198985 (TRAV8-1, TRAJ47)
CAVNAVGYGNELVF

SEQ ID NO: 397970 - protein, 15 aa, Homo sapiens
  CDR3 for beta chain variable domain of TCR clone 198985 (TRBV3-1, TRBJ2-2)
CASSTTTGPTGELFF

SEQ ID NO: 397971 - protein, 14 aa, Homo sapiens
  CDR3 for alpha chain variable domain of TCR clone 198986 (TRAV1-2, TRAJ16)
CAVNQFSDGQKLLF

SEQ ID NO: 397972 - protein, 14 aa, Homo sapiens
  CDR3 for beta chain variable domain of TCR clone 198986 (TRBV7-2, TRBJ2-7)
CASSPKTSFYEQYF

SEQ ID NO: 397973 - protein, 17 aa, Homo sapiens
  CDR3 for alpha chain variable domain of TCR clone 198987 (TRAV36/DV7, TRAJ52)
CAVAQRAGGTSYGKLTF

SEQ ID NO: 397974 - protein, 17 aa, Homo sapiens
  CDR3 for beta chain variable domain of TCR clone 198987 (TRBV28, TRBJ2-5)
CASSTPEGDALQETQYL

SEQ ID NO: 397975 - protein, 13 aa, Homo sapiens
  CDR3 for alpha chain variable domain of TCR clone 198988 (TRAV13-1, TRAJ21)
CAASIYNFNKFYF

SEQ ID NO: 397976 - protein, 12 aa, Homo sapiens
  CDR3 for beta chain variable domain of TCR clone 198988 (TRBV5-1, TRBJ2-7)
CASSLDSYEQYF

SEQ ID NO: 397977 - protein, 12 aa, Homo sapiens
  CDR3 for alpha chain variable domain of TCR clone 198989 (TRAV21, TRAJ13)
PGPSGGYQKVTF

SEQ ID NO: 397978 - protein, 13 aa, Homo sapiens
  CDR3 for beta chain variable domain of TCR clone 198989 (TRBV7-2, TRBJ2-2)
CASSLAVTGELFF

SEQ ID NO: 397979 - protein, 11 aa, Homo sapiens
  CDR3 for alpha chain variable domain of TCR clone 198990 (TRAV1-2, TRAJ20)
CAVANDYKLSF

SEQ ID NO: 397980 - protein, 14 aa, Homo sapiens
  CDR3 for beta chain variable domain of TCR clone 198990 (TRBV7-2, TRBJ1-2)
CASSQTGSTYGYTF

SEQ ID NO: 397981 - protein, 15 aa, Homo sapiens
  CDR3 for alpha chain variable domain of TCR clone 198991 (TRAV3, TRAJ4)
RAVRDGTGGYNKLIF

SEQ ID NO: 397982 - protein, 15 aa, Homo sapiens
  CDR3 for beta chain variable domain of TCR clone 198991 (TRBV27, TRBJ2-7)
CASSPDQGRLYEQYF

SEQ ID NO: 397983 - protein, 11 aa, Homo sapiens
  CDR3 for alpha chain variable domain of TCR clone 198992 (TRAV1-2, TRAJ20)
CAVSNDYKLSF

SEQ ID NO: 397984 - protein, 16 aa, Homo sapiens
  CDR3 for beta chain variable domain of TCR clone 198992 (TRBV29-1, TRBJ2-6)
CSAEGITYSGANDLTF

SEQ ID NO: 397985 - protein, 14 aa, Homo sapiens
  CDR3 for alpha chain variable domain of TCR clone 198993 (TRAV8-4, TRAJ54)
CAVSEVLGAQKLVF

SEQ ID NO: 397986 - protein, 14 aa, Homo sapiens
  CDR3 for beta chain variable domain of TCR clone 198993 (TRBV7-2, TRBJ2-7)
CASSLYPGRYEQYF

SEQ ID NO: 397987 - protein, 17 aa, Homo sapiens
  CDR3 for alpha chain variable domain of TCR clone 198994 (TRAV8-6, TRAJ58)
CAGSSWVGETSGSRLTF

SEQ ID NO: 397988 - protein, 14 aa, Homo sapiens
  CDR3 for beta chain variable domain of TCR clone 198994 (TRBV4-2, TRBJ2-1)
CASSLDRAYNEQFF

SEQ ID NO: 397989 - protein, 12 aa, Homo sapiens
  CDR3 for alpha chain variable domain of TCR clone 198995 (TRAV13-1, TRAJ21)
CAAKEGFNKFYF

SEQ ID NO: 397990 - protein, 15 aa, Homo sapiens
  CDR3 for beta chain variable domain of TCR clone 198995 (TRBV3-1, TRBJ2-2)
CASSQDWTRAGELFF

SEQ ID NO: 397991 - protein, 14 aa, Homo sapiens
  CDR3 for alpha chain variable domain of TCR clone 198996 (TRAV26-1, TRAJ21)
CIVRPPYNFNKFYF

SEQ ID NO: 397992 - protein, 14 aa, Homo sapiens
  CDR3 for beta chain variable domain of TCR clone 198996 (TRBV4-1, TRBJ2-2)
CASSQAVNTEELFF

SEQ ID NO: 397993 - protein, 15 aa, Homo sapiens
  CDR3 for alpha chain variable domain of TCR clone 198997 (TRAV3, TRAJ22)
CAVRDRGGSARQLTF

SEQ ID NO: 397994 - protein, 13 aa, Homo sapiens
  CDR3 for beta chain variable domain of TCR clone 198997 (TRBV2, TRBJ2-7)
CASSVGGSGEQYF

SEQ ID NO: 397995 - protein, 11 aa, Homo sapiens
  CDR3 for alpha chain variable domain of TCR clone 198998 (TRAV3, TRAJ31)
CAALPGARLMF

SEQ ID NO: 397996 - protein, 13 aa, Homo sapiens
  CDR3 for beta chain variable domain of TCR clone 198998 (TRBV7-3, TRBJ2-1)
CASSPVAYNEQFF

SEQ ID NO: 397997 - protein, 16 aa, Homo sapiens
  CDR3 for alpha chain variable domain of TCR clone 198999 (TRAV30, TRAJ24)
CGTEIVDADSWGKLQF

SEQ ID NO: 397998 - protein, 15 aa, Homo sapiens
  CDR3 for beta chain variable domain of TCR clone 198999 (TRBV18, TRBJ2-1)
CASLPDRGRDNEQFF

SEQ ID NO: 397999 - protein, 16 aa, Homo sapiens
  CDR3 for alpha chain variable domain of TCR clone 199000 (TRAV30, TRAJ24)
FGTEIVDADSWGKFKF

SEQ ID NO: 398000 - protein, 14 aa, Homo sapiens
  CDR3 for beta chain variable domain of TCR clone 199000 (TRBV12-5, TRBJ2-5)
CASGSRTQQETQYF

SEQ ID NO: 398001 - protein, 12 aa, Homo sapiens
  CDR3 for alpha chain variable domain of TCR clone 199001 (TRAV29/DV5, TRAJ43)
CAAPYNNNDMRF

SEQ ID NO: 398002 - protein, 17 aa, Homo sapiens
  CDR3 for beta chain variable domain of TCR clone 199001 (TRBV19, TRBJ2-6)
CASSTGQVCSGANVLTF

SEQ ID NO: 398003 - protein, 12 aa, Homo sapiens
  CDR3 for alpha chain variable domain of TCR clone 199002 (TRAV21, TRAJ40)
CATEPGTYKYIF

SEQ ID NO: 398004 - protein, 12 aa, Homo sapiens
  CDR3 for beta chain variable domain of TCR clone 199002 (TRBV7-9, TRBJ2-1)
CASRAGVDEQFF

SEQ ID NO: 398005 - protein, 11 aa, Homo sapiens
  CDR3 for alpha chain variable domain of TCR clone 199003 (TRAV17, TRAJ9)
CGFTGGFKTIC

SEQ ID NO: 398006 - protein, 14 aa, Homo sapiens
  CDR3 for beta chain variable domain of TCR clone 199003 (TRBV7-9, TRBJ2-2)
CASSLVQDTGELFF

SEQ ID NO: 398007 - protein, 12 aa, Homo sapiens
  CDR3 for alpha chain variable domain of TCR clone 199004 (TRAV8-4, TRAJ43)
CAVSVNNNDMRF

SEQ ID NO: 398008 - protein, 14 aa, Homo sapiens
  CDR3 for beta chain variable domain of TCR clone 199004 (TRBV11-2, TRBJ1-2)
CANSLGTANYGYTF

SEQ ID NO: 398009 - protein, 12 aa, Homo sapiens
  CDR3 for alpha chain variable domain of TCR clone 199005 (TRAV21, TRAJ58)
CAAETGGSRLTF

SEQ ID NO: 398010 - protein, 15 aa, Homo sapiens
  CDR3 for beta chain variable domain of TCR clone 199005 (TRBV20-1, TRBJ2-7)
CSARDPVKGEGEQYF

SEQ ID NO: 398011 - protein, 17 aa, Homo sapiens
  CDR3 for alpha chain variable domain of TCR clone 199006 (TRAV3, TRAJ6)
CAVRDGPRAGGSYIPTF

SEQ ID NO: 398012 - protein, 14 aa, Homo sapiens
  CDR3 for beta chain variable domain of TCR clone 199006 (TRBV7-8, TRBJ2-5)
CDSSATGGQETQYF

SEQ ID NO: 398013 - protein, 18 aa, Homo sapiens
  CDR3 for alpha chain variable domain of TCR clone 199007 (TRAV12-3, TRAJ52)
CAMSVGGAGGTSYGKLTF

SEQ ID NO: 398014 - protein, 16 aa, Homo sapiens
  CDR3 for beta chain variable domain of TCR clone 199007 (TRBV18, TRBJ1-4)
CASSPLVGDRAEKLFF

SEQ ID NO: 398015 - protein, 14 aa, Homo sapiens
  CDR3 for alpha chain variable domain of TCR clone 199008 (TRAV13-1, TRAJ9)
WAASALTGGFKTIF

SEQ ID NO: 398016 - protein, 16 aa, Homo sapiens
  CDR3 for beta chain variable domain of TCR clone 199008 (TRBV12-4, TRBJ1-5)
CASSRPVGGSNQPQHF

SEQ ID NO: 398017 - protein, 15 aa, Homo sapiens
  CDR3 for alpha chain variable domain of TCR clone 199009 (TRAV3, TRAJ20)
CAVRDPRSNDYKLSF

SEQ ID NO: 398018 - protein, 14 aa, Homo sapiens
  CDR3 for beta chain variable domain of TCR clone 199009 (TRBV20-1, TRBJ2-7)
CSARRGNGIYEQYF

SEQ ID NO: 398019 - protein, 18 aa, Homo sapiens
  CDR3 for alpha chain variable domain of TCR clone 199010 (TRAV8-3, TRAJ4)
WVRDPTSNDPGGYNKLIF

SEQ ID NO: 398020 - protein, 15 aa, Homo sapiens
  CDR3 for beta chain variable domain of TCR clone 199010 (TRBV10-2, TRBJ2-5)
CASKPEDRRQETQYF

SEQ ID NO: 398021 - protein, 12 aa, Homo sapiens
  CDR3 for alpha chain variable domain of TCR clone 199011 (TRAV41, TRAJ58)
CAVETSGSRLTF

SEQ ID NO: 398022 - protein, 15 aa, Homo sapiens
  CDR3 for beta chain variable domain of TCR clone 199011 (TRBV29-1, TRBJ2-6)
CSVGDRCSGANVLTF

SEQ ID NO: 398023 - protein, 14 aa, Homo sapiens
  CDR3 for alpha chain variable domain of TCR clone 199012 (TRAV14/DV4, TRAJ34)
CAMRVGRPHRQAHL

SEQ ID NO: 398024 - protein, 15 aa, Homo sapiens
  CDR3 for beta chain variable domain of TCR clone 199012 (TRBV11-3, TRBJ2-3)
CASLKDGREGDTQYF

SEQ ID NO: 398025 - protein, 19 aa, Homo sapiens
  CDR3 for alpha chain variable domain of TCR clone 199013 (TRAV29/DV5, TRAJ49)
CSVLLCSKLTVDTGNQFYF

SEQ ID NO: 398026 - protein, 16 aa, Homo sapiens
  CDR3 for beta chain variable domain of TCR clone 199013 (TRBV7-9, TRBJ1-2)
CASSLGFSSGEDGYTF

SEQ ID NO: 398027 - protein, 14 aa, Homo sapiens
  CDR3 for alpha chain variable domain of TCR clone 199014 (TRAV13-1, TRAJ44)
CAAEATGTASILTF

SEQ ID NO: 398028 - protein, 17 aa, Homo sapiens
  CDR3 for beta chain variable domain of TCR clone 199014 (TRBV7-3, TRBJ2-3)
CASSLMKRMRGADTQYF

SEQ ID NO: 398029 - protein, 12 aa, Homo sapiens
  CDR3 for alpha chain variable domain of TCR clone 199015 (TRAV8-3, TRAJ22)
FGGQSSARQLTF

SEQ ID NO: 398030 - protein, 15 aa, Homo sapiens
  CDR3 for beta chain variable domain of TCR clone 199015 (TRBV20-1, TRBJ1-1)
CSASRGVTGNTEDFF

SEQ ID NO: 398031 - protein, 11 aa, Homo sapiens
  CDR3 for alpha chain variable domain of TCR clone 199016 (TRAV8-1, TRAJ8)
CAITGFQRLVF

SEQ ID NO: 398032 - protein, 14 aa, Homo sapiens
  CDR3 for beta chain variable domain of TCR clone 199016 (TRBV5-4, TRBJ1-2)
CASTRQTGNYGYTF

SEQ ID NO: 398033 - protein, 17 aa, Homo sapiens
  CDR3 for alpha chain variable domain of TCR clone 199017 (TRAV36/DV7, TRAJ52)
CAVAQRAGGTSYGKLTF

SEQ ID NO: 398034 - protein, 14 aa, Homo sapiens
  CDR3 for beta chain variable domain of TCR clone 199017 (TRBV7-6, TRBJ2-3)
CASSLGTVTDTQYF

SEQ ID NO: 398035 - protein, 12 aa, Homo sapiens
  CDR3 for alpha chain variable domain of TCR clone 199018 (TRAV21, TRAJ58)
CAAETRGSRLTF

SEQ ID NO: 398036 - protein, 15 aa, Homo sapiens
  CDR3 for beta chain variable domain of TCR clone 199018 (TRBV20-1, TRBJ2-7)
CSARDPVKGEGEQYF

SEQ ID NO: 398037 - protein, 15 aa, Homo sapiens
  CDR3 for alpha chain variable domain of TCR clone 199019 (TRAV8-3, TRAJ15)
CAVGAPNQAGTALIF

SEQ ID NO: 398038 - protein, 14 aa, Homo sapiens
  CDR3 for beta chain variable domain of TCR clone 199019 (TRBV20-1, TRBJ2-1)
CSPNDKASYNEQFF

SEQ ID NO: 398039 - protein, 14 aa, Homo sapiens
  CDR3 for alpha chain variable domain of TCR clone 199020 (TRAV8-2, TRAJ37)
CVVSLTGNTGKLIF

SEQ ID NO: 398040 - protein, 13 aa, Homo sapiens
  CDR3 for beta chain variable domain of TCR clone 199020 (TRBV2, TRBJ1-5)
CASSQGGSQPQHF

SEQ ID NO: 398041 - protein, 16 aa, Homo sapiens
  CDR3 for alpha chain variable domain of TCR clone 199021 (TRAV19, TRAJ4)
CALSGPLLGGYNKLIF

SEQ ID NO: 398042 - protein, 12 aa, Homo sapiens
  CDR3 for beta chain variable domain of TCR clone 199021 (TRBV6-3, TRBJ2-3)
CASGDWTDTQYF

SEQ ID NO: 398043 - protein, 15 aa, Homo sapiens
  CDR3 for alpha chain variable domain of TCR clone 199022 (TRAV12-1, TRAJ15)
CVVTRANQAGTALIF

SEQ ID NO: 398044 - protein, 14 aa, Homo sapiens
  CDR3 for beta chain variable domain of TCR clone 199022 (TRBV5-1, TRBJ1-1)
CASSLVSINTEALF

SEQ ID NO: 398045 - protein, 12 aa, Homo sapiens
  CDR3 for alpha chain variable domain of TCR clone 199023 (TRAV27, TRAJ13)
CAGVRGYQTVTF

SEQ ID NO: 398046 - protein, 16 aa, Homo sapiens
  CDR3 for beta chain variable domain of TCR clone 199023 (TRBV28, TRBJ2-1)
CASSSAYSRSLNEHFF

SEQ ID NO: 398047 - protein, 14 aa, Homo sapiens
  CDR3 for alpha chain variable domain of TCR clone 199024 (TRAV1-2, TRAJ16)
CAVNRFSDGQKRLF

SEQ ID NO: 398048 - protein, 13 aa, Homo sapiens
  CDR3 for beta chain variable domain of TCR clone 199024 (TRBV12-4, TRBJ2-5)
CASSLGGSRTQSF

SEQ ID NO: 398049 - protein, 13 aa, Homo sapiens
  CDR3 for alpha chain variable domain of TCR clone 199025 (TRAV8-3, TRAJ21)
CAMAPVDFNKFYF

SEQ ID NO: 398050 - protein, 15 aa, Homo sapiens
  CDR3 for beta chain variable domain of TCR clone 199025 (TRBV7-2, TRBJ1-4)
CASSLGLRGREKLFF

SEQ ID NO: 398051 - protein, 15 aa, Homo sapiens
  CDR3 for alpha chain variable domain of TCR clone 199026 (TRAV1-2, TRAJ28)
CAVQYSGAGSYQLTF

SEQ ID NO: 398052 - protein, 16 aa, Homo sapiens
  CDR3 for beta chain variable domain of TCR clone 199026 (TRBV4-2, TRBJ2-3)
CASSQELAGDTDTQYF

SEQ ID NO: 398053 - protein, 17 aa, Homo sapiens
  CDR3 for alpha chain variable domain of TCR clone 199027 (TRAV23/DV6, TRAJ57)
CAASSTLSQGGSEKLVF

SEQ ID NO: 398054 - protein, 14 aa, Homo sapiens
  CDR3 for beta chain variable domain of TCR clone 199027 (TRBV25-1, TRBJ1-1)
CASTHLVGNTEAFF

SEQ ID NO: 398055 - protein, 12 aa, Homo sapiens
  CDR3 for alpha chain variable domain of TCR clone 199028 (TRAV17, TRAJ39)
CATEGAGNMPTF

SEQ ID NO: 398056 - protein, 15 aa, Homo sapiens
  CDR3 for beta chain variable domain of TCR clone 199028 (TRBV12-4, TRBJ2-1)
CASSLLATGNNEQFF

SEQ ID NO: 398057 - protein, 12 aa, Homo sapiens
  CDR3 for alpha chain variable domain of TCR clone 199029 (TRAV17, TRAJ36)
CATLTGANNLFL

SEQ ID NO: 398058 - protein, 15 aa, Homo sapiens
  CDR3 for beta chain variable domain of TCR clone 199029 (TRBV19, TRBJ1-2)
CASSTKTDTNYGYTF

SEQ ID NO: 398059 - protein, 13 aa, Homo sapiens
  CDR3 for alpha chain variable domain of TCR clone 199030 (TRAV3, TRAJ30)
SAVRDRGDDKIIF

SEQ ID NO: 398060 - protein, 14 aa, Homo sapiens
  CDR3 for beta chain variable domain of TCR clone 199030 (TRBV5-1, TRBJ1-1)
CASSRTTGDTEAFF

SEQ ID NO: 398061 - protein, 13 aa, Homo sapiens
  CDR3 for alpha chain variable domain of TCR clone 199031 (TRAV21, TRAJ27)
CAALNTNAGKSTF

SEQ ID NO: 398062 - protein, 13 aa, Homo sapiens
  CDR3 for beta chain variable domain of TCR clone 199031 (TRBV19, TRBJ1-5)
CASSIGGNQPQHF

SEQ ID NO: 398063 - protein, 17 aa, Homo sapiens
  CDR3 for alpha chain variable domain of TCR clone 199032 (TRAV4, TRAJ13)
CLVGVQGSSGGYQKVTF

SEQ ID NO: 398064 - protein, 16 aa, Homo sapiens
  CDR3 for beta chain variable domain of TCR clone 199032 (TRBV28, TRBJ2-7)
CASSLFFETGGPEQYS

SEQ ID NO: 398065 - protein, 14 aa, Homo sapiens
  CDR3 for alpha chain variable domain of TCR clone 199033 (TRAV27, TRAJ23)
CAGPSYNQGGKLIF

SEQ ID NO: 398066 - protein, 15 aa, Homo sapiens
  CDR3 for beta chain variable domain of TCR clone 199033 (TRBV20-1, TRBJ2-7)
CSARDRVSGMDEQYF

SEQ ID NO: 398067 - protein, 14 aa, Homo sapiens
  CDR3 for alpha chain variable domain of TCR clone 199034 (TRAV12-3, TRAJ10)
SHLPLTGGGKKLTF

SEQ ID NO: 398068 - protein, 15 aa, Homo sapiens
  CDR3 for beta chain variable domain of TCR clone 199034 (TRBV11-2, TRBJ2-2)
CASSSDRVNAGELFF

SEQ ID NO: 398069 - protein, 15 aa, Homo sapiens
  CDR3 for alpha chain variable domain of TCR clone 199035 (TRAV13-1, TRAJ16)
CAARYQMARSCSLQG

SEQ ID NO: 398070 - protein, 16 aa, Homo sapiens
  CDR3 for beta chain variable domain of TCR clone 199035 (TRBV7-2, TRBJ2-7)
CASSLGSAGSSYEQYF

SEQ ID NO: 398071 - protein, 14 aa, Homo sapiens
  CDR3 for alpha chain variable domain of TCR clone 199036 (TRAV13-1, TRAJ5)
CAASPGSSRRALTF

SEQ ID NO: 398072 - protein, 17 aa, Homo sapiens
  CDR3 for beta chain variable domain of TCR clone 199036 (TRBV20-1, TRBJ2-1)
CSASSSGLAGSYNEQFF

SEQ ID NO: 398073 - protein, 14 aa, Homo sapiens
  CDR3 for alpha chain variable domain of TCR clone 199037 (TRAV38-1, TRAJ40)
CALRPTSGPYKYIF

SEQ ID NO: 398074 - protein, 14 aa, Homo sapiens
  CDR3 for beta chain variable domain of TCR clone 199037 (TRBV5-4, TRBJ1-1)
CASSLDSRRDEAFF

SEQ ID NO: 398075 - protein, 13 aa, Homo sapiens
  CDR3 for alpha chain variable domain of TCR clone 199038 (TRAV24, TRAJ31)
CASLAGNNARLMF

SEQ ID NO: 398076 - protein, 15 aa, Homo sapiens
  CDR3 for beta chain variable domain of TCR clone 199038 (TRBV5-1, TRBJ2-3)
CASSLETASTDTQYF

SEQ ID NO: 398077 - protein, 12 aa, Homo sapiens
  CDR3 for alpha chain variable domain of TCR clone 199039 (TRAV8-4, TRAJ43)
CAVSVNNNDMRF

SEQ ID NO: 398078 - protein, 14 aa, Homo sapiens
  CDR3 for beta chain variable domain of TCR clone 199039 (TRBV6-5, TRBJ1-1)
CASSKQGVNTEAFF

SEQ ID NO: 398079 - protein, 13 aa, Homo sapiens
  CDR3 for alpha chain variable domain of TCR clone 199040 (TRAV26-2, TRAJ43)
CILRAVNNNDMRF

SEQ ID NO: 398080 - protein, 15 aa, Homo sapiens
  CDR3 for beta chain variable domain of TCR clone 199040 (TRBV11-3, TRBJ1-1)
CASSSKGTLKLSLDK

SEQ ID NO: 398081 - protein, 18 aa, Homo sapiens
  CDR3 for alpha chain variable domain of TCR clone 199041 (TRAV26-2, TRAJ45)
CILRVDEYSGGGADGLTF

SEQ ID NO: 398082 - protein, 11 aa, Homo sapiens
  CDR3 for beta chain variable domain of TCR clone 199041 (TRBV29-1, TRBJ2-5)
CSEDRTGTQYF

SEQ ID NO: 398083 - protein, 12 aa, Homo sapiens
  CDR3 for alpha chain variable domain of TCR clone 199042 (TRAV30, TRAJ43)
CGTEERGNDMRF

SEQ ID NO: 398084 - protein, 14 aa, Homo sapiens
  CDR3 for beta chain variable domain of TCR clone 199042 (TRBV20-1, TRBJ1-1)
CSAQTRIGGTEAFF

SEQ ID NO: 398085 - protein, 13 aa, Homo sapiens
  CDR3 for alpha chain variable domain of TCR clone 199043 (TRAV2, TRAJ15)
CAVASQAGTALIF

SEQ ID NO: 398086 - protein, 16 aa, Homo sapiens
  CDR3 for beta chain variable domain of TCR clone 199043 (TRBV20-1, TRGJ1)
CSAPGQGLLTNEKLFF

SEQ ID NO: 398087 - protein, 16 aa, Homo sapiens
  CDR3 for alpha chain variable domain of TCR clone 199044 (TRAV3, TRAJ21)
CAVRDIERGNFNKFYF

SEQ ID NO: 398088 - protein, 20 aa, Homo sapiens
  CDR3 for beta chain variable domain of TCR clone 199044 (TRBV4-1, TRBJ2-2)
CASSQASPSGLASNTGELFF

SEQ ID NO: 398089 - protein, 17 aa, Homo sapiens
  CDR3 for alpha chain variable domain of TCR clone 199045 (TRAV26-2, TRAJ42)
CNLRDESYGGSQGNLIF

SEQ ID NO: 398090 - protein, 15 aa, Homo sapiens
  CDR3 for beta chain variable domain of TCR clone 199045 (TRBV6-6, TRBJ2-7)
CASSYSYGGSYEQYF

SEQ ID NO: 398091 - protein, 12 aa, Homo sapiens
  CDR3 for alpha chain variable domain of TCR clone 199046 (TRAV21, TRAJ47)
CAAMEYGNKLVF

SEQ ID NO: 398092 - protein, 16 aa, Homo sapiens
  CDR3 for beta chain variable domain of TCR clone 199046 (TRBV11-1, TRBJ1-1)
CASSPRGAHMNSEAFF

SEQ ID NO: 398093 - protein, 11 aa, Homo sapiens
  CDR3 for alpha chain variable domain of TCR clone 199047 (TRAV12-1, TRAJ3)
CVVSSASKIIF

SEQ ID NO: 398094 - protein, 12 aa, Homo sapiens
  CDR3 for beta chain variable domain of TCR clone 199047 (TRBV4-1, TRBJ2-3)
CASSQGTDTQYF

SEQ ID NO: 398095 - protein, 14 aa, Homo sapiens
  CDR3 for alpha chain variable domain of TCR clone 199048 (TRAV1-2, TRAJ8)
CAVREDTSFQKLVF

SEQ ID NO: 398096 - protein, 15 aa, Homo sapiens
  CDR3 for beta chain variable domain of TCR clone 199048 (TRBV6-3, TRBJ2-7)
RASSSPGTVFYEQYF

SEQ ID NO: 398097 - protein, 12 aa, Homo sapiens
  CDR3 for alpha chain variable domain of TCR clone 199049 (TRAV1-2, TRAJ33)
CAALDSNYQLIW

SEQ ID NO: 398098 - protein, 19 aa, Homo sapiens
  CDR3 for beta chain variable domain of TCR clone 199049 (TRBV7-2, TRBJ2-3)
CASSFLSRNWGGGTDTQYF

SEQ ID NO: 398099 - protein, 12 aa, Homo sapiens
  CDR3 for alpha chain variable domain of TCR clone 199050 (TRAV1-2, TRAJ33)
CAALDSNYQLIW

SEQ ID NO: 398100 - protein, 19 aa, Homo sapiens
  CDR3 for beta chain variable domain of TCR clone 199050 (TRBV19, TRBJ2-5)
CASSIGQVTDFFLGETQYF

SEQ ID NO: 398101 - protein, 12 aa, Homo sapiens
  CDR3 for alpha chain variable domain of TCR clone 199051 (TRAV16, TRAJ26)
CALRSYGQNFVF

SEQ ID NO: 398102 - protein, 14 aa, Homo sapiens
  CDR3 for beta chain variable domain of TCR clone 199051 (TRBV7-3, TRBJ2-1)
CASSLAGGTNEQFF

SEQ ID NO: 398103 - protein, 16 aa, Homo sapiens
  CDR3 for alpha chain variable domain of TCR clone 199052 (TRAV20, TRAJ53)
CAVRRGSGGSNYKLTF

SEQ ID NO: 398104 - protein, 12 aa, Homo sapiens
  CDR3 for beta chain variable domain of TCR clone 199052 (TRBV29-1, TRBJ2-3)
CGVVLGADTQYF

SEQ ID NO: 398105 - protein, 13 aa, Homo sapiens
  CDR3 for alpha chain variable domain of TCR clone 199053 (TRAV8-1, TRAJ32)
CAADGGATNKLIF

SEQ ID NO: 398106 - protein, 16 aa, Homo sapiens
  CDR3 for beta chain variable domain of TCR clone 199053 (TRBV7-3, TRBJ2-2)
CASSLKRGTLSGELFF

SEQ ID NO: 398107 - protein, 16 aa, Homo sapiens
  CDR3 for alpha chain variable domain of TCR clone 199054 (TRAV8-3, TRAJ10)
CAVGPILTGGGNKLTF

SEQ ID NO: 398108 - protein, 15 aa, Homo sapiens
  CDR3 for beta chain variable domain of TCR clone 199054 (TRBV5-1, TRBJ2-5)
CASSSGREMVETQYF

SEQ ID NO: 398109 - protein, 19 aa, Homo sapiens
  CDR3 for alpha chain variable domain of TCR clone 199055 (TRAV17, TRAJ17)
CATDGRPGVIKAAGNQLTF

SEQ ID NO: 398110 - protein, 17 aa, Homo sapiens
  CDR3 for beta chain variable domain of TCR clone 199055 (TRBV12-4, TRBJ1-1)
CASSLSGFRTMNTEAFF

SEQ ID NO: 398111 - protein, 13 aa, Homo sapiens
  CDR3 for alpha chain variable domain of TCR clone 199056 (TRAV12-2, TRAJ6)
CAVNVSRKLHTYI

SEQ ID NO: 398112 - protein, 12 aa, Homo sapiens
  CDR3 for beta chain variable domain of TCR clone 199056 (TRBV29-1, TRBJ2-3)
CSVTGGADTHYF

SEQ ID NO: 398113 - protein, 15 aa, Homo sapiens
  CDR3 for alpha chain variable domain of TCR clone 199057 (TRAV12-1, TRAJ44)
CVVDTPQGTASKLTF

SEQ ID NO: 398114 - protein, 14 aa, Homo sapiens
  CDR3 for beta chain variable domain of TCR clone 199057 (TRBV7-9, TRBJ2-1)
CASSPRDSLYEQLF

SEQ ID NO: 398115 - protein, 15 aa, Homo sapiens
  CDR3 for alpha chain variable domain of TCR clone 199058 (TRAV26-2, TRAJ54)
CILRDVGQGAQKLVF

SEQ ID NO: 398116 - protein, 13 aa, Homo sapiens
  CDR3 for beta chain variable domain of TCR clone 199058 (TRBV7-9, TRBJ1-1)
CASSLAGVTEAFC

SEQ ID NO: 398117 - protein, 16 aa, Homo sapiens
  CDR3 for alpha chain variable domain of TCR clone 199059 (TRAV30, TRAJ24)
CGTEIVDAVSWGKFQF

SEQ ID NO: 398118 - protein, 14 aa, Homo sapiens
  CDR3 for beta chain variable domain of TCR clone 199059 (TRBV12-5, TRBJ2-5)
CASGSRTHQETQYL

SEQ ID NO: 398119 - protein, 15 aa, Homo sapiens
  CDR3 for alpha chain variable domain of TCR clone 199060 (TRAV8-2, TRAJ16)
CVVSDGFSDGQKLLF

SEQ ID NO: 398120 - protein, 14 aa, Homo sapiens
  CDR3 for beta chain variable domain of TCR clone 199060 (TRBV7-3, TRBJ1-1)
CANSLGTGYTEAFF

SEQ ID NO: 398121 - protein, 22 aa, Homo sapiens
  CDR3 for alpha chain variable domain of TCR clone 199061 (TRAV2, TRAJ10)
ILQVREADAAVYYTGGGNKLTF

SEQ ID NO: 398122 - protein, 16 aa, Homo sapiens
  CDR3 for beta chain variable domain of TCR clone 199061 (TRBV7-8, TRBJ2-4)
CASSAERTLAKNIQYF

SEQ ID NO: 398123 - protein, 19 aa, Homo sapiens
  CDR3 for alpha chain variable domain of TCR clone 199062 (TRAV35, TRAJ30)
CAPGGMTRSSLEKGRDFIF

SEQ ID NO: 398124 - protein, 17 aa, Homo sapiens
  CDR3 for beta chain variable domain of TCR clone 199062 (TRBV7-6, TRBJ2-1)
CIAVPAAWGGGADEQFF

SEQ ID NO: 398125 - protein, 13 aa, Homo sapiens
  CDR3 for alpha chain variable domain of TCR clone 199063 (TRAV8-3, TRAJ48)
CAVGPFGNEKLTF

SEQ ID NO: 398126 - protein, 14 aa, Homo sapiens
  CDR3 for beta chain variable domain of TCR clone 199063 (TRBV18, TRBJ2-7)
CASSPRGGAYEQYF

SEQ ID NO: 398127 - protein, 14 aa, Homo sapiens
  CDR3 for alpha chain variable domain of TCR clone 199064 (TRAV1-2, TRAJ16)
CAVNRFSDGQKLLF

SEQ ID NO: 398128 - protein, 15 aa, Homo sapiens
  CDR3 for beta chain variable domain of TCR clone 199064 (TRBV7-2, TRBJ1-5)
CASSFSAGINQPQHF

SEQ ID NO: 398129 - protein, 14 aa, Homo sapiens
  CDR3 for alpha chain variable domain of TCR clone 199065 (TRAV12-1, TRAJ42)
CVVIYGGSQGNLIF

SEQ ID NO: 398130 - protein, 12 aa, Homo sapiens
  CDR3 for beta chain variable domain of TCR clone 199065 (TRBV7-9, TRBJ2-3)
CASSFITDTQYF

SEQ ID NO: 398131 - protein, 14 aa, Homo sapiens
  CDR3 for alpha chain variable domain of TCR clone 199066 (TRAV8-6, TRAJ12)
CAVKAADSSYKLIF

SEQ ID NO: 398132 - protein, 13 aa, Homo sapiens
  CDR3 for beta chain variable domain of TCR clone 199066 (TRBV12-4, TRBJ2-5)
CASRLAVQETQYF

SEQ ID NO: 398133 - protein, 15 aa, Homo sapiens
  CDR3 for alpha chain variable domain of TCR clone 199067 (TRAV3, TRAJ29)
CAVRDLYSGNTPLVF

SEQ ID NO: 398134 - protein, 12 aa, Homo sapiens
  CDR3 for beta chain variable domain of TCR clone 199067 (TRBV11-2, TRBJ2-2)
CASSRGGGELFF

SEQ ID NO: 398135 - protein, 19 aa, Homo sapiens
  CDR3 for alpha chain variable domain of TCR clone 199068 (TRAV3, TRAJ6)
CAVRDGQGQEEATYLHLEE

SEQ ID NO: 398136 - protein, 20 aa, Homo sapiens
  CDR3 for beta chain variable domain of TCR clone 199068 (TRBV28, TRBJ2-1)
CASTPIGRSPGLAGGNEQFF

SEQ ID NO: 398137 - protein, 17 aa, Homo sapiens
  CDR3 for alpha chain variable domain of TCR clone 199069 (TRAV3, TRAJ6)
CAVRDGPRAGGSYIPTF

SEQ ID NO: 398138 - protein, 15 aa, Homo sapiens
  CDR3 for beta chain variable domain of TCR clone 199069 (TRBV2, TRBJ2-3)
CASSDFEKATDTQYF

SEQ ID NO: 398139 - protein, 13 aa, Homo sapiens
  CDR3 for alpha chain variable domain of TCR clone 199070 (TRAV12-2, TRAJ18)
CAVRGSTLGGYTL

SEQ ID NO: 398140 - protein, 20 aa, Homo sapiens
  CDR3 for beta chain variable domain of TCR clone 199070 (TRBV7-8, TRBJ2-2)
CASSHLFPGPTIHITGELFF

SEQ ID NO: 398141 - protein, 14 aa, Homo sapiens
  CDR3 for alpha chain variable domain of TCR clone 199071 (TRAV1-2, TRAJ16)
CAVNRFSDGQKLLF

SEQ ID NO: 398142 - protein, 16 aa, Homo sapiens
  CDR3 for beta chain variable domain of TCR clone 199071 (TRBV19, TRBJ1-5)
CASSTWTGGGNQPQHF

SEQ ID NO: 398143 - protein, 14 aa, Homo sapiens
  CDR3 for alpha chain variable domain of TCR clone 199072 (TRAV3, TRAJ33)
CAVRDRGSNYQLIW

SEQ ID NO: 398144 - protein, 17 aa, Homo sapiens
  CDR3 for beta chain variable domain of TCR clone 199072 (TRBV19, TRBJ2-1)
CASSIWSAQPTHNEQFF

SEQ ID NO: 398145 - protein, 11 aa, Homo sapiens
  CDR3 for alpha chain variable domain of TCR clone 199073 (TRAV21, TRAJ34)
CAVTNTDKLIF

SEQ ID NO: 398146 - protein, 13 aa, Homo sapiens
  CDR3 for beta chain variable domain of TCR clone 199073 (TRBV2, TRBJ2-7)
CASSVGGSGEQYF

SEQ ID NO: 398147 - protein, 13 aa, Homo sapiens
  CDR3 for alpha chain variable domain of TCR clone 199074 (TRAV8-3, TRAJ28)
CAVGAVGSYQLTF

SEQ ID NO: 398148 - protein, 16 aa, Homo sapiens
  CDR3 for beta chain variable domain of TCR clone 199074 (TRBV4-3, TRBJ1-6)
CASSQDPGVYNSPLHF

SEQ ID NO: 398149 - protein, 11 aa, Homo sapiens
  CDR3 for alpha chain variable domain of TCR clone 199075 (TRAV23/DV6, TRAJ58)
CAARLLRGETS

SEQ ID NO: 398150 - protein, 16 aa, Homo sapiens
  CDR3 for beta chain variable domain of TCR clone 199075 (TRBV7-3, TRBJ2-1)
CASSKPLAGVYNEQFF

SEQ ID NO: 398151 - protein, 16 aa, Homo sapiens
  CDR3 for alpha chain variable domain of TCR clone 199076 (TRAV8-3, TRAJ44)
CAVGPLNTGTASKLTF

SEQ ID NO: 398152 - protein, 18 aa, Homo sapiens
  CDR3 for beta chain variable domain of TCR clone 199076 (TRBV3-1, TRBJ2-1)
WASSHDLPGRPLFDEQFF

SEQ ID NO: 398153 - protein, 11 aa, Homo sapiens
  CDR3 for alpha chain variable domain of TCR clone 199077 (TRAV6, TRAJ41)
CALNSGYALNF

SEQ ID NO: 398154 - protein, 15 aa, Homo sapiens
  CDR3 for beta chain variable domain of TCR clone 199077 (TRBV20-1, TRBJ1-5)
CSAFKDGQRNQPQHF

SEQ ID NO: 398155 - protein, 18 aa, Homo sapiens
  CDR3 for alpha chain variable domain of TCR clone 199078 (TRAV26-2, TRAJ45)
CILRVDKYSGGGADVLTF

SEQ ID NO: 398156 - protein, 16 aa, Homo sapiens
  CDR3 for beta chain variable domain of TCR clone 199078 (TRBV2, TRBJ1-4)
CASNLLQGATNEKLFF

SEQ ID NO: 398157 - protein, 14 aa, Homo sapiens
  CDR3 for alpha chain variable domain of TCR clone 199079 (TRAV8-6, TRAJ9)
CAVRSYTGGFKTIF

SEQ ID NO: 398158 - protein, 15 aa, Homo sapiens
  CDR3 for beta chain variable domain of TCR clone 199079 (TRBV2, TRBJ1-2)
CASSESRTVNYGYTF

SEQ ID NO: 398159 - protein, 14 aa, Homo sapiens
  CDR3 for alpha chain variable domain of TCR clone 199080 (TRAV1-1, TRAJ27)
CAVIYNHTAGKSTF

SEQ ID NO: 398160 - protein, 13 aa, Homo sapiens
  CDR3 for beta chain variable domain of TCR clone 199080 (TRBV12-5, TRBJ1-2)
CASGVRTGNGYTF

SEQ ID NO: 398161 - protein, 14 aa, Homo sapiens
  CDR3 for alpha chain variable domain of TCR clone 199081 (TRAV12-2, TRAJ52)
CRCSGGTSYGKLTF

SEQ ID NO: 398162 - protein, 13 aa, Homo sapiens
  CDR3 for beta chain variable domain of TCR clone 199081 (TRBV11-2, TRBJ2-1)
CASSLRLTHEQFF

SEQ ID NO: 398163 - protein, 14 aa, Homo sapiens
  CDR3 for alpha chain variable domain of TCR clone 199082 (TRAV8-6, TRAJ29)
CAVSRASGNTPLFF

SEQ ID NO: 398164 - protein, 13 aa, Homo sapiens
  CDR3 for beta chain variable domain of TCR clone 199082 (TRBV19, TRBJ1-5)
CASSEGSNQPQHF

SEQ ID NO: 398165 - protein, 14 aa, Homo sapiens
  CDR3 for alpha chain variable domain of TCR clone 199083 (TRAV3, TRAJ16)
CAVSLSSDGQKLLF

SEQ ID NO: 398166 - protein, 13 aa, Homo sapiens
  CDR3 for beta chain variable domain of TCR clone 199083 (TRBV19, TRBJ2-7)
CASRKAGGSEQYF

SEQ ID NO: 398167 - protein, 12 aa, Homo sapiens
  CDR3 for alpha chain variable domain of TCR clone 199084 (TRAV1-1, TRAJ24)
CAVRGSWGKVQF

SEQ ID NO: 398168 - protein, 14 aa, Homo sapiens
  CDR3 for beta chain variable domain of TCR clone 199084 (TRBV20-1, TRBJ2-3)
CSARGGTSTDTQYF

SEQ ID NO: 398169 - protein, 14 aa, Homo sapiens
  CDR3 for alpha chain variable domain of TCR clone 199085 (TRAV13-2, TRAJ10)
CAETLPGGGNKLTF

SEQ ID NO: 398170 - protein, 14 aa, Homo sapiens
  CDR3 for beta chain variable domain of TCR clone 199085 (TRBV19, TRBJ2-7)
CASSIFAGTYEQYF

SEQ ID NO: 398171 - protein, 12 aa, Homo sapiens
  CDR3 for alpha chain variable domain of TCR clone 199086 (TRAV8-3, TRAJ26)
CAGDNYGQNFVF

SEQ ID NO: 398172 - protein, 15 aa, Homo sapiens
  CDR3 for beta chain variable domain of TCR clone 199086 (TRBV6-3, TRBJ2-2)
CASRGMTVDTGELFF

SEQ ID NO: 398173 - protein, 11 aa, Homo sapiens
  CDR3 for alpha chain variable domain of TCR clone 199087 (TRAV3, TRAJ21)
CAVGNFNNFYF

SEQ ID NO: 398174 - protein, 16 aa, Homo sapiens
  CDR3 for beta chain variable domain of TCR clone 199087 (TRBV19, TRBJ2-1)
CASSKTGPSSYNEQFF

SEQ ID NO: 398175 - protein, 10 aa, Homo sapiens
  CDR3 for alpha chain variable domain of TCR clone 199088 (TRAV21, TRAJ49)
CAVTGNQFYF

SEQ ID NO: 398176 - protein, 15 aa, Homo sapiens
  CDR3 for beta chain variable domain of TCR clone 199088 (TRBV6-1, TRBJ2-3)
GASTTLAGHTDTQYF

SEQ ID NO: 398177 - protein, 14 aa, Homo sapiens
  CDR3 for alpha chain variable domain of TCR clone 199089 (TRAV12-3, TRAJ10)
SHLPLTGGGNKLTF

SEQ ID NO: 398178 - protein, 15 aa, Homo sapiens
  CDR3 for beta chain variable domain of TCR clone 199089 (TRBV5-4, TRBJ2-1)
CASSFSGGSYNEQFF

SEQ ID NO: 398179 - protein, 14 aa, Homo sapiens
  CDR3 for alpha chain variable domain of TCR clone 199090 (TRAV20, TRAJ39)
CAVQAGNAGNMLTF

SEQ ID NO: 398180 - protein, 14 aa, Homo sapiens
  CDR3 for beta chain variable domain of TCR clone 199090 (TRBV4-1, TRBJ2-2)
CASSQAVNTGELFF

SEQ ID NO: 398181 - protein, 14 aa, Homo sapiens
  CDR3 for alpha chain variable domain of TCR clone 199091 (TRAV12-2, TRAJ53)
CAVKGGGSNHKLTF

SEQ ID NO: 398182 - protein, 14 aa, Homo sapiens
  CDR3 for beta chain variable domain of TCR clone 199091 (TRBV7-7, TRBJ2-2)
CATRQDSDTGELFF

SEQ ID NO: 398183 - protein, 15 aa, Homo sapiens
  CDR3 for alpha chain variable domain of TCR clone 199092 (TRAV21, TRAJ53)
CATLNSGGSNYKLTF

SEQ ID NO: 398184 - protein, 15 aa, Homo sapiens
  CDR3 for beta chain variable domain of TCR clone 199092 (TRBV7-9, TRBJ1-4)
CASSRIGGFNEKLFF

SEQ ID NO: 398185 - protein, 14 aa, Homo sapiens
  CDR3 for alpha chain variable domain of TCR clone 199093 (TRAV23/DV6, TRAJ11)
CAASLESGYSTLTF

SEQ ID NO: 398186 - protein, 14 aa, Homo sapiens
  CDR3 for beta chain variable domain of TCR clone 199093 (TRBV12-4, TRBJ2-3)
CASSLQSSTDTQYF

SEQ ID NO: 398187 - protein, 15 aa, Homo sapiens
  CDR3 for alpha chain variable domain of TCR clone 199094 (TRAV16, TRAJ16)
CALQGGGSDGQKLLF

SEQ ID NO: 398188 - protein, 15 aa, Homo sapiens
  CDR3 for beta chain variable domain of TCR clone 199094 (TRBV20-1, TRBJ2-7)
CSARDRVSCMDEQYF

SEQ ID NO: 398189 - protein, 13 aa, Homo sapiens
  CDR3 for alpha chain variable domain of TCR clone 199095 (TRAV12-1, TRAJ39)
CVARSGAGNMLTF

SEQ ID NO: 398190 - protein, 19 aa, Homo sapiens
  CDR3 for beta chain variable domain of TCR clone 199095 (TRBV11-3, TRBJ2-2)
CASSTRPGAKTTNTGELFF

SEQ ID NO: 398191 - protein, 15 aa, Homo sapiens
  CDR3 for alpha chain variable domain of TCR clone 199096 (TRAV8-2, TRAJ24)
CVVSDRTDSWGKLQF

SEQ ID NO: 398192 - protein, 13 aa, Homo sapiens
  CDR3 for beta chain variable domain of TCR clone 199096 (TRBV7-9, TRBJ1-2)
CDSSLKQNYGYTF

SEQ ID NO: 398193 - protein, 16 aa, Homo sapiens
  CDR3 for alpha chain variable domain of TCR clone 199097 (TRAV12-3, TRAJ53)
CAMSPGSGGSNYKLTF

SEQ ID NO: 398194 - protein, 12 aa, Homo sapiens
  CDR3 for beta chain variable domain of TCR clone 199097 (TRBV12-4, TRBJ2-3)
CASSTLPDTQYF

SEQ ID NO: 398195 - protein, 13 aa, Homo sapiens
  CDR3 for alpha chain variable domain of TCR clone 199098 (TRAV9-2, TRAJ53)
CALSGGSNYKLTF

SEQ ID NO: 398196 - protein, 16 aa, Homo sapiens
  CDR3 for beta chain variable domain of TCR clone 199098 (TRBV20-1, TRBJ2-1)
GSALTWTSGSYNEQFF

SEQ ID NO: 398197 - protein, 14 aa, Homo sapiens
  CDR3 for alpha chain variable domain of TCR clone 199099 (TRAV3, TRAJ33)
CAVRDMASNYQLIW

SEQ ID NO: 398198 - protein, 19 aa, Homo sapiens
  CDR3 for beta chain variable domain of TCR clone 199099 (TRBV7-3, TRBJ1-2)
CASSFPQGNDGELWLHLRF

SEQ ID NO: 398199 - protein, 14 aa, Homo sapiens
  CDR3 for alpha chain variable domain of TCR clone 199100 (TRAV26-1, TRAJ21)
CIVRPPYNFNKFYF

SEQ ID NO: 398200 - protein, 14 aa, Homo sapiens
  CDR3 for beta chain variable domain of TCR clone 199100 (TRBV11-3, TRBJ2-1)
CAISATTSGSIQFF

SEQ ID NO: 398201 - protein, 13 aa, Homo sapiens
  CDR3 for alpha chain variable domain of TCR clone 199101 (TRAV17, TRAJ13)
RATDSGGYQKVTF

SEQ ID NO: 398202 - protein, 14 aa, Homo sapiens
  CDR3 for beta chain variable domain of TCR clone 199101 (TRBV7-2, TRBJ1-1)
CASSFLTGTTEAFF

SEQ ID NO: 398203 - protein, 14 aa, Homo sapiens
  CDR3 for alpha chain variable domain of TCR clone 199102 (TRAV12-1, TRAJ13)
CVVIDSGGHQNVTF

SEQ ID NO: 398204 - protein, 17 aa, Homo sapiens
  CDR3 for beta chain variable domain of TCR clone 199102 (TRBV15, TRBJ1-5)
CATSRAPPGTRNQPQHF

SEQ ID NO: 398205 - protein, 14 aa, Homo sapiens
  CDR3 for alpha chain variable domain of TCR clone 199103 (TRAV1-2, TRAJ6)
CAVSLSGGSYIPTF

SEQ ID NO: 398206 - protein, 19 aa, Homo sapiens
  CDR3 for beta chain variable domain of TCR clone 199103 (TRBV7-9, TRBJ2-7)
CASSPGGGLTYEVLRAGHQ

SEQ ID NO: 398207 - protein, 13 aa, Homo sapiens
  CDR3 for alpha chain variable domain of TCR clone 199104 (TRAV17, TRAJ26)
CATVDNYGQNFVF

SEQ ID NO: 398208 - protein, 15 aa, Homo sapiens
  CDR3 for beta chain variable domain of TCR clone 199104 (TRBV19, TRBJ2-3)
CASRETMGSRNTQYF

SEQ ID NO: 398209 - protein, 14 aa, Homo sapiens
  CDR3 for alpha chain variable domain of TCR clone 199105 (TRAV13-1, TRAJ30)
CAASPQNRDDKITF

SEQ ID NO: 398210 - protein, 16 aa, Homo sapiens
  CDR3 for beta chain variable domain of TCR clone 199105 (TRBV3-1, TRBJ2-7)
CASSQGATGVAYEQYF

SEQ ID NO: 398211 - protein, 15 aa, Homo sapiens
  CDR3 for alpha chain variable domain of TCR clone 199106 (TRAV26-1, TRAJ18)
CIVRVMSSTLGRLYF

SEQ ID NO: 398212 - protein, 15 aa, Homo sapiens
  CDR3 for beta chain variable domain of TCR clone 199106 (TRBV6-3, TRBJ2-6)
CASNPGGSGANDLTF

SEQ ID NO: 398213 - protein, 16 aa, Homo sapiens
  CDR3 for alpha chain variable domain of TCR clone 199107 (TRAV30, TRAJ24)
CGTEIVDADSWGKFQF

SEQ ID NO: 398214 - protein, 15 aa, Homo sapiens
  CDR3 for beta chain variable domain of TCR clone 199107 (TRBV9, TRBJ1-6)
CASSVAETGDSPLHF

SEQ ID NO: 398215 - protein, 10 aa, Homo sapiens
  CDR3 for alpha chain variable domain of TCR clone 199108 (TRAV27, TRAJ37)
CAGGVGRLVF

SEQ ID NO: 398216 - protein, 13 aa, Homo sapiens
  CDR3 for beta chain variable domain of TCR clone 199108 (TRBV27, TRBJ1-2)
CASSRGLVYGYTF

SEQ ID NO: 398217 - protein, 13 aa, Homo sapiens
  CDR3 for alpha chain variable domain of TCR clone 199109 (TRAV17, TRAJ26)
CATVDNSGQNFVF

SEQ ID NO: 398218 - protein, 16 aa, Homo sapiens
  CDR3 for beta chain variable domain of TCR clone 199109 (TRBV2, TRBJ2-1)
CASSGGGSQSYNEQFF

SEQ ID NO: 398219 - protein, 11 aa, Homo sapiens
  CDR3 for alpha chain variable domain of TCR clone 199110 (TRAV1-2, TRAJ20)
CAVANDYKLSF

SEQ ID NO: 398220 - protein, 18 aa, Homo sapiens
  CDR3 for beta chain variable domain of TCR clone 199110 (TRBV20-1, TRBJ2-6)
CSAETTPTHGFGANVLTF

SEQ ID NO: 398221 - protein, 11 aa, Homo sapiens
  CDR3 for alpha chain variable domain of TCR clone 199111 (TRAV2, TRAJ21)
CAVFNFNKFYF

SEQ ID NO: 398222 - protein, 16 aa, Homo sapiens
  CDR3 for beta chain variable domain of TCR clone 199111 (TRBV5-4, TRBJ1-1)
CASSLDSRGMKLSLDK

SEQ ID NO: 398223 - protein, 10 aa, Homo sapiens
  CDR3 for alpha chain variable domain of TCR clone 199112 (TRAV1-2, TRAJ18)
CAVRGEAQPW

SEQ ID NO: 398224 - protein, 16 aa, Homo sapiens
  CDR3 for beta chain variable domain of TCR clone 199112 (TRBV15, TRBJ2-1)
CATSRERLAGAYEQFF

SEQ ID NO: 398225 - protein, 12 aa, Homo sapiens
  CDR3 for alpha chain variable domain of TCR clone 199113 (TRAV2, TRAJ26)
CAGSPGRLWSEF

SEQ ID NO: 398226 - protein, 13 aa, Homo sapiens
  CDR3 for beta chain variable domain of TCR clone 199113 (TRBV7-9, TRBJ1-2)
CASSLKQNYDYTF

SEQ ID NO: 398227 - protein, 13 aa, Homo sapiens
  CDR3 for alpha chain variable domain of TCR clone 199114 (TRAV21, TRAJ27)
CAARPGYAGKSTF

SEQ ID NO: 398228 - protein, 12 aa, Homo sapiens
  CDR3 for beta chain variable domain of TCR clone 199114 (TRBV6-3, TRBJ2-7)
CASSLTPYEQYF

SEQ ID NO: 398229 - protein, 17 aa, Homo sapiens
  CDR3 for alpha chain variable domain of TCR clone 199115 (TRAV17, TRAJ7)
CATLGRLAFGKGNQVVV

SEQ ID NO: 398230 - protein, 16 aa, Homo sapiens
  CDR3 for beta chain variable domain of TCR clone 199115 (TRBV19, TRBJ2-1)
CASSKAGPSSYNEQFF

SEQ ID NO: 398231 - protein, 15 aa, Homo sapiens
  CDR3 for alpha chain variable domain of TCR clone 199116 (TRAV8-1, TRAJ6)
CAVNAGAGGSYIPTF

SEQ ID NO: 398232 - protein, 14 aa, Homo sapiens
  CDR3 for beta chain variable domain of TCR clone 199116 (TRBV25-1, TRBJ1-6)
CASSLAADISTHHF

SEQ ID NO: 398233 - protein, 13 aa, Homo sapiens
  CDR3 for alpha chain variable domain of TCR clone 199117 (TRAV30, TRAJ49)
CGTEPHTGNQFYF

SEQ ID NO: 398234 - protein, 14 aa, Homo sapiens
  CDR3 for beta chain variable domain of TCR clone 199117 (TRBV29-1, TRBJ2-1)
CSVEFRGIPFEQFF

SEQ ID NO: 398235 - protein, 12 aa, Homo sapiens
  CDR3 for alpha chain variable domain of TCR clone 199118 (TRAV21, TRAJ42)
CAVGGSQGNLIF

SEQ ID NO: 398236 - protein, 19 aa, Homo sapiens
  CDR3 for beta chain variable domain of TCR clone 199118 (TRBV5-1, TRBJ2-3)
CASSLTWIAADWSTDTQYF

SEQ ID NO: 398237 - protein, 17 aa, Homo sapiens
  CDR3 for alpha chain variable domain of TCR clone 199119 (TRAV3, TRAJ39)
CAVRDLPIDSRGQHAHL

SEQ ID NO: 398238 - protein, 13 aa, Homo sapiens
  CDR3 for beta chain variable domain of TCR clone 199119 (TRBV11-2, TRBJ2-2)
CASSLQNTGELFF

SEQ ID NO: 398239 - protein, 16 aa, Homo sapiens
  CDR3 for alpha chain variable domain of TCR clone 199120 (TRAV12-1, TRAJ43)
CVVNPHRFGAGTSLTV

SEQ ID NO: 398240 - protein, 13 aa, Homo sapiens
  CDR3 for beta chain variable domain of TCR clone 199120 (TRBV12-4, TRBJ1-2)
CASSSGPNYRYTF

SEQ ID NO: 398241 - protein, 14 aa, Homo sapiens
  CDR3 for alpha chain variable domain of TCR clone 199121 (TRAV12-3, TRAJ43)
CAMSLGGVGTRLTV

SEQ ID NO: 398242 - protein, 13 aa, Homo sapiens
  CDR3 for beta chain variable domain of TCR clone 199121 (TRBV7-9, TRBJ1-2)
CVSSLKQNYGYTF

SEQ ID NO: 398243 - protein, 14 aa, Homo sapiens
  CDR3 for alpha chain variable domain of TCR clone 199122 (TRAV23/DV6, TRAJ17)
CAARGRAAGNKLHF

SEQ ID NO: 398244 - protein, 13 aa, Homo sapiens
  CDR3 for beta chain variable domain of TCR clone 199122 (TRBV7-6, TRBJ1-2)
CASSLVADYGYTF

SEQ ID NO: 398245 - protein, 11 aa, Homo sapiens
  CDR3 for alpha chain variable domain of TCR clone 199123 (TRAV12-2, TRAJ39)
CAVNNMLTFGG

SEQ ID NO: 398246 - protein, 15 aa, Homo sapiens
  CDR3 for beta chain variable domain of TCR clone 199123 (TRBV7-9, TRBJ2-7)
CDSSPGGGLTYEQYF

SEQ ID NO: 398247 - protein, 14 aa, Homo sapiens
  CDR3 for alpha chain variable domain of TCR clone 199124 (TRAV13-1, TRAJ3)
CAASKSSSASKIIF

SEQ ID NO: 398248 - protein, 12 aa, Homo sapiens
  CDR3 for beta chain variable domain of TCR clone 199124 (TRBV12-4, TRBJ2-1)
CASSLVRVEQFF

SEQ ID NO: 398249 - protein, 14 aa, Homo sapiens
  CDR3 for alpha chain variable domain of TCR clone 199125 (TRAV12-2, TRAJ24)
CAVTPADSWGKLPF

SEQ ID NO: 398250 - protein, 13 aa, Homo sapiens
  CDR3 for beta chain variable domain of TCR clone 199125 (TRBV6-4, TRBJ1-5)
CASSADLNQPQHF

SEQ ID NO: 398251 - protein, 15 aa, Homo sapiens
  CDR3 for alpha chain variable domain of TCR clone 199126 (TRAV23/DV6, TRAJ18)
CAARYRASTLGRLYF

SEQ ID NO: 398252 - protein, 13 aa, Homo sapiens
  CDR3 for beta chain variable domain of TCR clone 199126 (TRBV7-2, TRBJ2-7)
CASSAPSGSEQYF

SEQ ID NO: 398253 - protein, 17 aa, Homo sapiens
  CDR3 for alpha chain variable domain of TCR clone 199127 (TRAV19, TRAJ32)
CALSERPYGGATNKLIF

SEQ ID NO: 398254 - protein, 14 aa, Homo sapiens
  CDR3 for beta chain variable domain of TCR clone 199127 (TRBV7-2, TRBJ2-7)
CASSPKTSFYEQYF

SEQ ID NO: 398255 - protein, 14 aa, Homo sapiens
  CDR3 for alpha chain variable domain of TCR clone 199128 (TRAV12-3, TRAJ10)
SHLPLRGGGNKLTF

SEQ ID NO: 398256 - protein, 16 aa, Homo sapiens
  CDR3 for beta chain variable domain of TCR clone 199128 (TRBV7-9, TRBJ2-2)
CASSLATGVGTGELFF

SEQ ID NO: 398257 - protein, 14 aa, Homo sapiens
  CDR3 for alpha chain variable domain of TCR clone 199129 (TRAV2, TRAJ9)
CAVEDRSGGFKTIF

SEQ ID NO: 398258 - protein, 15 aa, Homo sapiens
  CDR3 for beta chain variable domain of TCR clone 199129 (TRBV28, TRBJ1-3)
CAGSMGWASGNTIYF

SEQ ID NO: 398259 - protein, 17 aa, Homo sapiens
  CDR3 for alpha chain variable domain of TCR clone 199130 (TRAV3, TRAJ6)
CAVRDGPRAGGSDIPTF

SEQ ID NO: 398260 - protein, 14 aa, Homo sapiens
  CDR3 for beta chain variable domain of TCR clone 199130 (TRBV27, TRBJ2-2)
CASRPGVNTGELFF

SEQ ID NO: 398261 - protein, 14 aa, Homo sapiens
  CDR3 for alpha chain variable domain of TCR clone 199131 (TRAV17, TRAJ22)
CATVLSGSARQLTF

SEQ ID NO: 398262 - protein, 16 aa, Homo sapiens
  CDR3 for beta chain variable domain of TCR clone 199131 (TRBV20-1, TRBJ2-1)
CSASASGYSSYNEQFF

SEQ ID NO: 398263 - protein, 11 aa, Homo sapiens
  CDR3 for alpha chain variable domain of TCR clone 199132 (TRAV12-1, TRAJ21)
CVVNNFNKFYF

SEQ ID NO: 398264 - protein, 14 aa, Homo sapiens
  CDR3 for beta chain variable domain of TCR clone 199132 (TRBV15, TRBJ1-5)
CATSREQSNKPQHF

SEQ ID NO: 398265 - protein, 16 aa, Homo sapiens
  CDR3 for alpha chain variable domain of TCR clone 199133 (TRAV23/DV6, TRAJ9)
CAASIGGNTGGFKTIF

SEQ ID NO: 398266 - protein, 15 aa, Homo sapiens
  CDR3 for beta chain variable domain of TCR clone 199133 (TRBV19, TRBJ2-1)
CASSSPGVPLDEQFF

SEQ ID NO: 398267 - protein, 12 aa, Homo sapiens
  CDR3 for alpha chain variable domain of TCR clone 199134 (TRAV3, TRAJ43)
CAVRNPNNDMRF

SEQ ID NO: 398268 - protein, 15 aa, Homo sapiens
  CDR3 for beta chain variable domain of TCR clone 199134 (TRBV6-5, TRBJ2-1)
CASSYDAGAGNEQFF

SEQ ID NO: 398269 - protein, 14 aa, Homo sapiens
  CDR3 for alpha chain variable domain of TCR clone 199135 (TRAV8-6, TRAJ49)
CAVSVRYTGNQFYF

SEQ ID NO: 398270 - protein, 19 aa, Homo sapiens
  CDR3 for beta chain variable domain of TCR clone 199135 (TRBV28, TRBJ2-1)
CASSFSIRGSVRTRYEQFF

SEQ ID NO: 398271 - protein, 22 aa, Homo sapiens
  CDR3 for alpha chain variable domain of TCR clone 199136 (TRAV16, )
CALRTHIPDIQNPDPAVYQLRD

SEQ ID NO: 398272 - protein, 16 aa, Homo sapiens
  CDR3 for beta chain variable domain of TCR clone 199136 (TRBV7-2, TRBJ1-2)
CASSSNQDRRGHGYTF

SEQ ID NO: 398273 - protein, 12 aa, Homo sapiens
  CDR3 for alpha chain variable domain of TCR clone 199137 (TRAV13-2, TRAJ8)
CAPWLGFQKLVF

SEQ ID NO: 398274 - protein, 14 aa, Homo sapiens
  CDR3 for beta chain variable domain of TCR clone 199137 (TRBV7-3, TRBJ1-1)
CASSRQGGDTEAFF

SEQ ID NO: 398275 - protein, 14 aa, Homo sapiens
  CDR3 for alpha chain variable domain of TCR clone 199138 (TRAV12-2, TRAJ45)
CAVNKGGGADGLTF

SEQ ID NO: 398276 - protein, 19 aa, Homo sapiens
  CDR3 for beta chain variable domain of TCR clone 199138 (TRBV7-2, TRBJ2-3)
CASSLVLSAYISRPGTQYF

SEQ ID NO: 398277 - protein, 16 aa, Homo sapiens
  CDR3 for alpha chain variable domain of TCR clone 199139 (TRAV12-1, TRAJ4)
CVVNMGPLGGYNKLIF

SEQ ID NO: 398278 - protein, 12 aa, Homo sapiens
  CDR3 for beta chain variable domain of TCR clone 199139 (TRBV20-1, TRBJ2-7)
CSAGLKMGEQYF

SEQ ID NO: 398279 - protein, 17 aa, Homo sapiens
  CDR3 for alpha chain variable domain of TCR clone 199140 (TRAV12-2, TRAJ52)
CAVNPYAGGTNYGKLTF

SEQ ID NO: 398280 - protein, 16 aa, Homo sapiens
  CDR3 for beta chain variable domain of TCR clone 199140 (TRBV5-5, TRBJ2-2)
CASSGRREGATGELFF

SEQ ID NO: 398281 - protein, 14 aa, Homo sapiens
  CDR3 for alpha chain variable domain of TCR clone 199141 (TRAV17, TRAJ56)
CATVPAGAHSKLTF

SEQ ID NO: 398282 - protein, 13 aa, Homo sapiens
  CDR3 for beta chain variable domain of TCR clone 199141 (TRBV12-4, TRBJ2-2)
CASSITGSGELFF

SEQ ID NO: 398283 - protein, 13 aa, Homo sapiens
  CDR3 for alpha chain variable domain of TCR clone 199142 (TRAV38-1, TRAJ42)
CARWGGSQGNLIF

SEQ ID NO: 398284 - protein, 17 aa, Homo sapiens
  CDR3 for beta chain variable domain of TCR clone 199142 (TRBV20-1, TRBJ2-1)
CSARHPLAGVWDNEQFF

SEQ ID NO: 398285 - protein, 14 aa, Homo sapiens
  CDR3 for alpha chain variable domain of TCR clone 199143 (TRAV20, TRAJ42)
CAVQAGGSQGNILF

SEQ ID NO: 398286 - protein, 14 aa, Homo sapiens
  CDR3 for beta chain variable domain of TCR clone 199143 (TRBV28, TRBJ1-2)
CASRIQGANYGYTF

SEQ ID NO: 398287 - protein, 14 aa, Homo sapiens
  CDR3 for alpha chain variable domain of TCR clone 199144 (TRAV12-1, TRAJ3)
CVVNPGSSATKIIF

SEQ ID NO: 398288 - protein, 14 aa, Homo sapiens
  CDR3 for beta chain variable domain of TCR clone 199144 (TRBV20-1, TRBJ2-3)
CSARGGTSTDTQYF

SEQ ID NO: 398289 - protein, 13 aa, Homo sapiens
  CDR3 for alpha chain variable domain of TCR clone 199145 (TRAV16, TRAJ34)
CALRTWNTDKLIF

SEQ ID NO: 398290 - protein, 13 aa, Homo sapiens
  CDR3 for beta chain variable domain of TCR clone 199145 (TRBV4-1, TRBJ2-2)
CASSQENTGELFF

SEQ ID NO: 398291 - protein, 13 aa, Homo sapiens
  CDR3 for alpha chain variable domain of TCR clone 199146 (TRAV35, TRAJ48)
CAGHEFGNEQLAF

SEQ ID NO: 398292 - protein, 14 aa, Homo sapiens
  CDR3 for beta chain variable domain of TCR clone 199146 (TRBV19, TRBJ2-1)
CASPTFVLSGEQFF

SEQ ID NO: 398293 - protein, 14 aa, Homo sapiens
  CDR3 for alpha chain variable domain of TCR clone 199147 (TRAV9-2, TRAJ38)
CALSNAGNNRKLSW

SEQ ID NO: 398294 - protein, 15 aa, Homo sapiens
  CDR3 for beta chain variable domain of TCR clone 199147 (TRBV9, TRBJ2-1)
CASSLAGSSYNEQFF

SEQ ID NO: 398295 - protein, 13 aa, Homo sapiens
  CDR3 for alpha chain variable domain of TCR clone 199148 (TRAV13-1, TRAJ40)
GAARTSGTYKYIF

SEQ ID NO: 398296 - protein, 17 aa, Homo sapiens
  CDR3 for beta chain variable domain of TCR clone 199148 (TRBV4-1, TRBJ2-3)
CASSQGYVSGGTDTQYF

SEQ ID NO: 398297 - protein, 14 aa, Homo sapiens
  CDR3 for alpha chain variable domain of TCR clone 199149 (TRAV1-2, TRAJ16)
CAVNRFSDGQKPLF

SEQ ID NO: 398298 - protein, 18 aa, Homo sapiens
  CDR3 for beta chain variable domain of TCR clone 199149 (TRBV20-1, TRBJ2-3)
CSASGLAGGPGTTDTQYF

SEQ ID NO: 398299 - protein, 14 aa, Homo sapiens
  CDR3 for alpha chain variable domain of TCR clone 199150 (TRAV8-1, TRAJ5)
CAVRTDTGRRALTF

SEQ ID NO: 398300 - protein, 14 aa, Homo sapiens
  CDR3 for beta chain variable domain of TCR clone 199150 (TRBV7-8, TRBJ2-3)
CASSFTDGQDTQYF

SEQ ID NO: 398301 - protein, 14 aa, Homo sapiens
  CDR3 for alpha chain variable domain of TCR clone 199151 (TRAV17, TRAJ57)
CATDPQGGSEKLGF

SEQ ID NO: 398302 - protein, 14 aa, Homo sapiens
  CDR3 for beta chain variable domain of TCR clone 199151 (TRBV5-8, TRBJ2-3)
CASSLGQGTDTQYF

SEQ ID NO: 398303 - protein, 19 aa, Homo sapiens
  CDR3 for alpha chain variable domain of TCR clone 199152 (TRAV2, TRAJ20)
ILQVREADAAVYRDCKLSF

SEQ ID NO: 398304 - protein, 15 aa, Homo sapiens
  CDR3 for beta chain variable domain of TCR clone 199152 (TRBV11-1, TRBJ2-7)
CASSLNYGASYEQYF

SEQ ID NO: 398305 - protein, 12 aa, Homo sapiens
  CDR3 for alpha chain variable domain of TCR clone 199153 (TRAV12-2, TRAJ3)
CAVHSSASKIIF

SEQ ID NO: 398306 - protein, 13 aa, Homo sapiens
  CDR3 for beta chain variable domain of TCR clone 199153 (TRBV20-1, TRBJ1-6)
CSAPTGLGSPLHF

SEQ ID NO: 398307 - protein, 13 aa, Homo sapiens
  CDR3 for alpha chain variable domain of TCR clone 199154 (TRAV13-1, TRAJ37)
CAARSGNTGKLIF

SEQ ID NO: 398308 - protein, 13 aa, Homo sapiens
  CDR3 for beta chain variable domain of TCR clone 199154 (TRBV7-2, TRBJ1-4)
CASSLAGLEKLFF

SEQ ID NO: 398309 - protein, 12 aa, Homo sapiens
  CDR3 for alpha chain variable domain of TCR clone 199155 (TRAV21, TRAJ3)
CCFYSSASKVIF

SEQ ID NO: 398310 - protein, 16 aa, Homo sapiens
  CDR3 for beta chain variable domain of TCR clone 199155 (TRBV19, TRBJ2-1)
CASSKAGPSSYNEQFF

SEQ ID NO: 398311 - protein, 14 aa, Homo sapiens
  CDR3 for alpha chain variable domain of TCR clone 199156 (TRAV12-3, TRAJ42)
CAMNYGGSQGNLIF

SEQ ID NO: 398312 - protein, 15 aa, Homo sapiens
  CDR3 for beta chain variable domain of TCR clone 199156 (TRBV5-7, TRBJ1-5)
CASSYSKLWDQPQHF

SEQ ID NO: 398313 - protein, 13 aa, Homo sapiens
  CDR3 for alpha chain variable domain of TCR clone 199157 (TRAV3, TRAJ30)
CAVRDRGDDKIIF

SEQ ID NO: 398314 - protein, 15 aa, Homo sapiens
  CDR3 for beta chain variable domain of TCR clone 199157 (TRBV28, TRBJ2-1)
CASSIIAGGRSEQFF

SEQ ID NO: 398315 - protein, 13 aa, Homo sapiens
  CDR3 for alpha chain variable domain of TCR clone 199158 (TRAV2, TRAJ40)
CAVVTSGAYKYIF

SEQ ID NO: 398316 - protein, 15 aa, Homo sapiens
  CDR3 for beta chain variable domain of TCR clone 199158 (TRBV7-9, TRBJ1-5)
CASSLAGGGRQPQHF

SEQ ID NO: 398317 - protein, 15 aa, Homo sapiens
  CDR3 for alpha chain variable domain of TCR clone 199159 (TRAV3, TRAJ3)
CAVRDMSSSASKIIF

SEQ ID NO: 398318 - protein, 14 aa, Homo sapiens
  CDR3 for beta chain variable domain of TCR clone 199159 (TRBV7-9, TRBJ2-1)
CASSLASGSNEQFF

SEQ ID NO: 398319 - protein, 15 aa, Homo sapiens
  CDR3 for alpha chain variable domain of TCR clone 199160 (TRAV26-2, TRAJ13)
CILRDLSGGYQKVTF

SEQ ID NO: 398320 - protein, 11 aa, Homo sapiens
  CDR3 for beta chain variable domain of TCR clone 199160 (TRBV7-9, TRBJ2-5)
CASSLMETQYF

SEQ ID NO: 398321 - protein, 17 aa, Homo sapiens
  CDR3 for alpha chain variable domain of TCR clone 199161 (TRAV3, TRAJ6)
CAARDGPRAGGSYLPTF

SEQ ID NO: 398322 - protein, 16 aa, Homo sapiens
  CDR3 for beta chain variable domain of TCR clone 199161 (TRBV7-8, TRBJ2-3)
CASSTEGQRETDTQYF

SEQ ID NO: 398323 - protein, 18 aa, Homo sapiens
  CDR3 for alpha chain variable domain of TCR clone 199162 (TRAV12-3, TRAJ52)
CAMSVGGAGGTSYGKLTF

SEQ ID NO: 398324 - protein, 15 aa, Homo sapiens
  CDR3 for beta chain variable domain of TCR clone 199162 (TRBV4-1, TRBJ2-3)
CASSRGQGIPDTQYF

SEQ ID NO: 398325 - protein, 13 aa, Homo sapiens
  CDR3 for alpha chain variable domain of TCR clone 199163 (TRAV12-3, TRAJ7)
CAMTPYGNNRLAF

SEQ ID NO: 398326 - protein, 14 aa, Homo sapiens
  CDR3 for beta chain variable domain of TCR clone 199163 (TRBV9, TRBJ1-1)
CQQRSSKDGTEDFF

SEQ ID NO: 398327 - protein, 14 aa, Homo sapiens
  CDR3 for alpha chain variable domain of TCR clone 199164 (TRAV16, TRAJ26)
CALSSANYGQTFAF

SEQ ID NO: 398328 - protein, 16 aa, Homo sapiens
  CDR3 for beta chain variable domain of TCR clone 199164 (TRBV20-1, TRBJ1-4)
CSAPGQGLLTNEKLFF

SEQ ID NO: 398329 - protein, 15 aa, Homo sapiens
  CDR3 for alpha chain variable domain of TCR clone 199165 (TRAV13-1, TRAJ15)
CAASIERQAGTALIF

SEQ ID NO: 398330 - protein, 13 aa, Homo sapiens
  CDR3 for beta chain variable domain of TCR clone 199165 (TRBV4-2, TRBJ1-1)
CASSQAGNTEAFF

SEQ ID NO: 398331 - protein, 14 aa, Homo sapiens
  CDR3 for alpha chain variable domain of TCR clone 199166 (TRAV12-3, TRAJ10)
SHLPLTGGGNKLTF

SEQ ID NO: 398332 - protein, 13 aa, Homo sapiens
  CDR3 for beta chain variable domain of TCR clone 199166 (TRBV9, TRBJ2-5)
CASSPAGLGTQYF

SEQ ID NO: 398333 - protein, 12 aa, Homo sapiens
  CDR3 for alpha chain variable domain of TCR clone 199167 (TRAV13-1, TRAJ20)
SVQQVNDYKLSF

SEQ ID NO: 398334 - protein, 14 aa, Homo sapiens
  CDR3 for beta chain variable domain of TCR clone 199167 (TRBV7-6, TRBJ2-3)
CASSLTGGTDTQYL

SEQ ID NO: 398335 - protein, 15 aa, Homo sapiens
  CDR3 for alpha chain variable domain of TCR clone 199168 (TRAV3, TRAJ9)
CAVRARNTGGFKTIF

SEQ ID NO: 398336 - protein, 15 aa, Homo sapiens
  CDR3 for beta chain variable domain of TCR clone 199168 (TRBV12-4, TRBJ2-5)
CASSPPTGLQETQYF

SEQ ID NO: 398337 - protein, 13 aa, Homo sapiens
  CDR3 for alpha chain variable domain of TCR clone 199169 (TRAV12-2, TRAJ42)
CAVKRGSQGNLIF

SEQ ID NO: 398338 - protein, 17 aa, Homo sapiens
  CDR3 for beta chain variable domain of TCR clone 199169 (TRBV4-1, TRBJ2-2)
CASSQEARAQNTGELFF

SEQ ID NO: 398339 - protein, 14 aa, Homo sapiens
  CDR3 for alpha chain variable domain of TCR clone 199170 (TRAV17, TRAJ39)
CAMDPVRAGNMLTF

SEQ ID NO: 398340 - protein, 13 aa, Homo sapiens
  CDR3 for beta chain variable domain of TCR clone 199170 (TRBV19, TRBJ1-2)
CASSVPGQDGYTF

SEQ ID NO: 398341 - protein, 17 aa, Homo sapiens
  CDR3 for alpha chain variable domain of TCR clone 199171 (TRAV3, TRAJ38)
CAVRDCLNAGNNRKLIW

SEQ ID NO: 398342 - protein, 14 aa, Homo sapiens
  CDR3 for beta chain variable domain of TCR clone 199171 (TRBV5-7, TRBJ1-1)
CASSLAGDWTEAFF

SEQ ID NO: 398343 - protein, 14 aa, Homo sapiens
  CDR3 for alpha chain variable domain of TCR clone 199172 (TRAV38-1, TRAJ40)
CALRPTSGTYKYVF

SEQ ID NO: 398344 - protein, 16 aa, Homo sapiens
  CDR3 for beta chain variable domain of TCR clone 199172 (TRBV6-1, TRBJ1-2)
CASSGAWQGRSHGYTF

SEQ ID NO: 398345 - protein, 16 aa, Homo sapiens
  CDR3 for alpha chain variable domain of TCR clone 199173 (TRAV3, TRAJ18)
CAVIDGRGSTLGRRYF

SEQ ID NO: 398346 - protein, 15 aa, Homo sapiens
  CDR3 for beta chain variable domain of TCR clone 199173 (TRBV7-9, TRBJ1-6)
CASSSPGRGNSPLHF

SEQ ID NO: 398347 - protein, 14 aa, Homo sapiens
  CDR3 for alpha chain variable domain of TCR clone 199174 (TRAV12-3, TRAJ13)
CAMKISGGYQKVTF

SEQ ID NO: 398348 - protein, 13 aa, Homo sapiens
  CDR3 for beta chain variable domain of TCR clone 199174 (TRBV29-1, TRBJ2-5)
CSARDRVEETQYF

SEQ ID NO: 398349 - protein, 15 aa, Homo sapiens
  CDR3 for alpha chain variable domain of TCR clone 199175 (TRAV12-3, TRAJ6)
CAMSATTGGSYIPTF

SEQ ID NO: 398350 - protein, 13 aa, Homo sapiens
  CDR3 for beta chain variable domain of TCR clone 199175 (TRBV20-1, TRBJ2-3)
CSADQGVSDTQYF

SEQ ID NO: 398351 - protein, 14 aa, Homo sapiens
  CDR3 for alpha chain variable domain of TCR clone 199176 (TRAV12-3, TRAJ13)
CAMKNSGGYQTVTF

SEQ ID NO: 398352 - protein, 13 aa, Homo sapiens
  CDR3 for beta chain variable domain of TCR clone 199176 (TRBV29-1, TRBJ2-5)
CSARDRVEETQYF

SEQ ID NO: 398353 - protein, 16 aa, Homo sapiens
  CDR3 for alpha chain variable domain of TCR clone 199177 (TRAV30, TRAJ24)
CGTEIVDADSWGKFQF

SEQ ID NO: 398354 - protein, 15 aa, Homo sapiens
  CDR3 for beta chain variable domain of TCR clone 199177 (TRBV19, TRBJ2-7)
CASSIASGGFYEQYF

SEQ ID NO: 398355 - protein, 15 aa, Homo sapiens
  CDR3 for alpha chain variable domain of TCR clone 199178 (TRAV3, TRAJ3)
CAVRDRDSSDSKIIF

SEQ ID NO: 398356 - protein, 15 aa, Homo sapiens
  CDR3 for beta chain variable domain of TCR clone 199178 (TRBV29-1, TRBJ2-7)
CSVEFFDRGSYEQYF

SEQ ID NO: 398357 - protein, 15 aa, Homo sapiens
  CDR3 for alpha chain variable domain of TCR clone 199179 (TRAV35, TRAJ53)
CGGLTQAGSNYKLTF

SEQ ID NO: 398358 - protein, 11 aa, Homo sapiens
  CDR3 for beta chain variable domain of TCR clone 199179 (TRBV20-1, TRBJ1-2)
CSIWASYGYTF

SEQ ID NO: 398359 - protein, 16 aa, Homo sapiens
  CDR3 for alpha chain variable domain of TCR clone 199180 (TRAV38-1, TRAJ32)
CAFMKGGGGATNKLIF

SEQ ID NO: 398360 - protein, 13 aa, Homo sapiens
  CDR3 for beta chain variable domain of TCR clone 199180 (TRBV20-1, TRBJ2-5)
CSAREAFQATQYF

SEQ ID NO: 398361 - protein, 16 aa, Homo sapiens
  CDR3 for alpha chain variable domain of TCR clone 199181 (TRAV23/DV6, TRAJ9)
CAASIGGNTGGSKTIF

SEQ ID NO: 398362 - protein, 13 aa, Homo sapiens
  CDR3 for beta chain variable domain of TCR clone 199181 (TRBV7-9, TRBJ1-2)
CASSLKQNYGYTF

SEQ ID NO: 398363 - protein, 13 aa, Homo sapiens
  CDR3 for alpha chain variable domain of TCR clone 199182 (TRAV3, TRAJ30)
YAVRDRGDDKIIF

SEQ ID NO: 398364 - protein, 16 aa, Homo sapiens
  CDR3 for beta chain variable domain of TCR clone 199182 (TRBV7-3, TRBJ2-2)
CASSLKRGTLSGELFF

SEQ ID NO: 398365 - protein, 17 aa, Homo sapiens
  CDR3 for alpha chain variable domain of TCR clone 199183 (TRAV26-1, TRAJ36)
CIVRPPGDQTGANNLFF

SEQ ID NO: 398366 - protein, 14 aa, Homo sapiens
  CDR3 for beta chain variable domain of TCR clone 199183 (TRBV7-3, TRBJ2-7)
CASSLKADSYEQYF

SEQ ID NO: 398367 - protein, 12 aa, Homo sapiens
  CDR3 for alpha chain variable domain of TCR clone 199184 (TRAV1-2, TRAJ9)
CAGYTGGLKTIF

SEQ ID NO: 398368 - protein, 15 aa, Homo sapiens
  CDR3 for beta chain variable domain of TCR clone 199184 (TRBV11-2, TRBJ2-1)
CASSPAGQALNEQFF

SEQ ID NO: 398369 - protein, 14 aa, Homo sapiens
  CDR3 for alpha chain variable domain of TCR clone 199185 (TRAV12-2, TRAJ33)
WAVKRARSNYQLIW

SEQ ID NO: 398370 - protein, 19 aa, Homo sapiens
  CDR3 for beta chain variable domain of TCR clone 199185 (TRBV25-1, TRBJ2-2)
CAILVYRVDRGRKTGELFF

SEQ ID NO: 398371 - protein, 14 aa, Homo sapiens
  CDR3 for alpha chain variable domain of TCR clone 199186 (TRAV12-1, TRAJ43)
CVVNGRSNNNGMRF

SEQ ID NO: 398372 - protein, 13 aa, Homo sapiens
  CDR3 for beta chain variable domain of TCR clone 199186 (TRBV27, TRBJ1-1)
CARSLSIGAEAFF

SEQ ID NO: 398373 - protein, 13 aa, Homo sapiens
  CDR3 for alpha chain variable domain of TCR clone 199187 (TRAV3, TRAJ29)
CAVRDIIDTPLVF

SEQ ID NO: 398374 - protein, 13 aa, Homo sapiens
  CDR3 for beta chain variable domain of TCR clone 199187 (TRBV27, TRBJ2-7)
CASSLTTGYEQYF

SEQ ID NO: 398375 - protein, 12 aa, Homo sapiens
  CDR3 for alpha chain variable domain of TCR clone 199188 (TRAV1-2, TRAJ29)
CAVPSGNPPLVF

SEQ ID NO: 398376 - protein, 12 aa, Homo sapiens
  CDR3 for beta chain variable domain of TCR clone 199188 (TRBV12-4, TRBJ2-7)
CASSLGGYEQYF

SEQ ID NO: 398377 - protein, 12 aa, Homo sapiens
  CDR3 for alpha chain variable domain of TCR clone 199189 (TRAV3, TRAJ43)
CAVRDPNNDMRF

SEQ ID NO: 398378 - protein, 14 aa, Homo sapiens
  CDR3 for beta chain variable domain of TCR clone 199189 (TRBV7-6, TRBJ2-3)
CASSLGTVTDTQYF

SEQ ID NO: 398379 - protein, 11 aa, Homo sapiens
  CDR3 for alpha chain variable domain of TCR clone 199190 (TRAV2, TRAJ21)
CAVFNFNKFYF

SEQ ID NO: 398380 - protein, 14 aa, Homo sapiens
  CDR3 for beta chain variable domain of TCR clone 199190 (TRBV4-1, TRBJ1-2)
CASSQDGQVRGYTF

SEQ ID NO: 398381 - protein, 18 aa, Homo sapiens
  CDR3 for alpha chain variable domain of TCR clone 199191 (TRAV13-2, TRAJ52)
CAETPLNAGGTSYGKLTF

SEQ ID NO: 398382 - protein, 14 aa, Homo sapiens
  CDR3 for beta chain variable domain of TCR clone 199191 (TRBV7-9, TRBJ2-1)
CASSSMVGFGEQFV

SEQ ID NO: 398383 - protein, 14 aa, Homo sapiens
  CDR3 for alpha chain variable domain of TCR clone 199192 (TRAV1-2, TRAJ16)
CAVNRFSDGQKLLS

SEQ ID NO: 398384 - protein, 15 aa, Homo sapiens
  CDR3 for beta chain variable domain of TCR clone 199192 (TRBV20-1, TRBJ2-7)
CSARDRVSGMDEQYF

SEQ ID NO: 398385 - protein, 15 aa, Homo sapiens
  CDR3 for alpha chain variable domain of TCR clone 199193 (TRAV3, TRAJ37)
CCETTWLWQQGKLIF

SEQ ID NO: 398386 - protein, 16 aa, Homo sapiens
  CDR3 for beta chain variable domain of TCR clone 199193 (TRBV9, TRBJ1-2)
CASSVEEKVSPYGYTF

SEQ ID NO: 398387 - protein, 12 aa, Homo sapiens
  CDR3 for alpha chain variable domain of TCR clone 199194 (TRAV13-1, TRAJ26)
CAASLYGQNFVF

SEQ ID NO: 398388 - protein, 15 aa, Homo sapiens
  CDR3 for beta chain variable domain of TCR clone 199194 (TRBV5-1, TRBJ2-1)
CASSPPRAPYNEQFF

SEQ ID NO: 398389 - protein, 16 aa, Homo sapiens
  CDR3 for alpha chain variable domain of TCR clone 199195 (TRAV17, TRAJ53)
CATDALSGGSNYKLTF

SEQ ID NO: 398390 - protein, 16 aa, Homo sapiens
  CDR3 for beta chain variable domain of TCR clone 199195 (TRBV7-9, TRBJ1-2)
CASSLGFSSGEDGYTF

SEQ ID NO: 398391 - protein, 16 aa, Homo sapiens
  CDR3 for alpha chain variable domain of TCR clone 199196 (TRAV4, TRAJ22)
CLVGDLYSGSARQLTF

SEQ ID NO: 398392 - protein, 14 aa, Homo sapiens
  CDR3 for beta chain variable domain of TCR clone 199196 (TRBV11-2, TRBJ1-2)
CASSLGTANYGYTF

SEQ ID NO: 398393 - protein, 13 aa, Homo sapiens
  CDR3 for alpha chain variable domain of TCR clone 199197 (TRAV1-2, TRAJ9)
CAALNTGGFKTIF

SEQ ID NO: 398394 - protein, 14 aa, Homo sapiens
  CDR3 for beta chain variable domain of TCR clone 199197 (TRBV7-9, TRBJ2-5)
CASSPAQDQETQYF

SEQ ID NO: 398395 - protein, 11 aa, Homo sapiens
  CDR3 for alpha chain variable domain of TCR clone 199198 (TRAV1-2, TRAJ40)
CAVPGTYKYIF

SEQ ID NO: 398396 - protein, 17 aa, Homo sapiens
  CDR3 for beta chain variable domain of TCR clone 199198 (TRBV6-1, TRBJ2-3)
CASSEFVTGGPTDTQYF

SEQ ID NO: 398397 - protein, 14 aa, Homo sapiens
  CDR3 for alpha chain variable domain of TCR clone 199199 (TRAV8-4, TRAJ9)
CAGRINTGGFKTIF

SEQ ID NO: 398398 - protein, 15 aa, Homo sapiens
  CDR3 for beta chain variable domain of TCR clone 199199 (TRBV10-2, TRBJ2-6)
CASSEQGTGANVLNF

SEQ ID NO: 398399 - protein, 15 aa, Homo sapiens
  CDR3 for alpha chain variable domain of TCR clone 199200 (TRAV4, TRAJ36)
CLVGDRQTGANNLFF

SEQ ID NO: 398400 - protein, 15 aa, Homo sapiens
  CDR3 for beta chain variable domain of TCR clone 199200 (TRBV6-3, TRBJ2-7)
CASSSPGTVFYEQYF

SEQ ID NO: 398401 - protein, 14 aa, Homo sapiens
  CDR3 for alpha chain variable domain of TCR clone 199201 (TRAV17, TRAJ5)
CATVALTASRALTF

SEQ ID NO: 398402 - protein, 14 aa, Homo sapiens
  CDR3 for beta chain variable domain of TCR clone 199201 (TRBV28, TRBJ2-7)
CASSPYGMAYEQYF

SEQ ID NO: 398403 - protein, 15 aa, Homo sapiens
  CDR3 for alpha chain variable domain of TCR clone 199202 (TRAV12-1, TRAJ44)
CVADLPTGTASKLTF

SEQ ID NO: 398404 - protein, 11 aa, Homo sapiens
  CDR3 for beta chain variable domain of TCR clone 199202 (TRBV6-3, TRBJ2-3)
CATGQADTQYF

SEQ ID NO: 398405 - protein, 15 aa, Homo sapiens
  CDR3 for alpha chain variable domain of TCR clone 199203 (TRAV21, TRAJ22)
CAVRLFFWFCKATDL

SEQ ID NO: 398406 - protein, 15 aa, Homo sapiens
  CDR3 for beta chain variable domain of TCR clone 199203 (TRBV19, TRBJ2-2)
CASSPRTGWTGELFF

SEQ ID NO: 398407 - protein, 13 aa, Homo sapiens
  CDR3 for alpha chain variable domain of TCR clone 199204 (TRAV2, TRAJ15)
CAVASQAGTALIF

SEQ ID NO: 398408 - protein, 16 aa, Homo sapiens
  CDR3 for beta chain variable domain of TCR clone 199204 (TRBV7-2, TRBJ2-3)
CASSLVALYSTDTQYF

SEQ ID NO: 398409 - protein, 14 aa, Homo sapiens
  CDR3 for alpha chain variable domain of TCR clone 199205 (TRAV8-6, TRAJ8)
CAVNENTGFQKLVF

SEQ ID NO: 398410 - protein, 11 aa, Homo sapiens
  CDR3 for beta chain variable domain of TCR clone 199205 (TRBV29-1, TRBJ2-5)
RSEDRTGTQYF

SEQ ID NO: 398411 - protein, 13 aa, Homo sapiens
  CDR3 for alpha chain variable domain of TCR clone 199206 (TRAV13-2, TRAJ5)
CAVMDTGRRALTF

SEQ ID NO: 398412 - protein, 13 aa, Homo sapiens
  CDR3 for beta chain variable domain of TCR clone 199206 (TRBV20-1, TRBJ1-1)
CSARGGGNTEAFF

SEQ ID NO: 398413 - protein, 17 aa, Homo sapiens
  CDR3 for alpha chain variable domain of TCR clone 199207 (TRAV3, TRAJ42)
CAVRDRDYGGSQGNRIF

SEQ ID NO: 398414 - protein, 15 aa, Homo sapiens
  CDR3 for beta chain variable domain of TCR clone 199207 (TRBV6-6, TRBJ2-7)
CASSYSYGGSYEQYF

SEQ ID NO: 398415 - protein, 14 aa, Homo sapiens
  CDR3 for alpha chain variable domain of TCR clone 199208 (TRAV34, TRAJ44)
CGADGTGTASKLTF

SEQ ID NO: 398416 - protein, 12 aa, Homo sapiens
  CDR3 for beta chain variable domain of TCR clone 199208 (TRBV11-2, TRBJ2-2)
CASSLGGGEPFF

SEQ ID NO: 398417 - protein, 13 aa, Homo sapiens
  CDR3 for alpha chain variable domain of TCR clone 199209 (TRAV16, TRAJ52)
CALRGTSYGKLTF

SEQ ID NO: 398418 - protein, 14 aa, Homo sapiens
  CDR3 for beta chain variable domain of TCR clone 199209 (TRBV7-2, TRBJ2-7)
CASSLPPGQGPQYF

SEQ ID NO: 398419 - protein, 14 aa, Homo sapiens
  CDR3 for alpha chain variable domain of TCR clone 199210 (TRAV8-1, TRAJ5)
CAVRTDTGRRALTF

SEQ ID NO: 398420 - protein, 14 aa, Homo sapiens
  CDR3 for beta chain variable domain of TCR clone 199210 (TRBV7-8, TRBJ2-3)
CASSFPDGRDTQYF

SEQ ID NO: 398421 - protein, 13 aa, Homo sapiens
  CDR3 for alpha chain variable domain of TCR clone 199211 (TRAV20, TRAJ48)
CAVHPFGNEKLTF

SEQ ID NO: 398422 - protein, 15 aa, Homo sapiens
  CDR3 for beta chain variable domain of TCR clone 199211 (TRBV6-5, TRBJ2-6)
CASSQWEAGANVLTF

SEQ ID NO: 398423 - protein, 16 aa, Homo sapiens
  CDR3 for alpha chain variable domain of TCR clone 199212 (TRAV8-3, TRAJ13)
CAVGAYPSGGYQKVTF

SEQ ID NO: 398424 - protein, 15 aa, Homo sapiens
  CDR3 for beta chain variable domain of TCR clone 199212 (TRBV19, TRBJ1-5)
CASRIVWADNQPQHF

SEQ ID NO: 398425 - protein, 12 aa, Homo sapiens
  CDR3 for alpha chain variable domain of TCR clone 199213 (TRAV13-1, TRAJ53)
AASGGSNYKLTF

SEQ ID NO: 398426 - protein, 13 aa, Homo sapiens
  CDR3 for beta chain variable domain of TCR clone 199213 (TRBV7-9, TRBJ2-2)
CASSLDPTGELFF

SEQ ID NO: 398427 - protein, 15 aa, Homo sapiens
  CDR3 for alpha chain variable domain of TCR clone 199214 (TRAV16, TRAJ12)
CSKWPLRDSSYKLIF

SEQ ID NO: 398428 - protein, 13 aa, Homo sapiens
  CDR3 for beta chain variable domain of TCR clone 199214 (TRBV4-2, TRBJ1-1)
CASSQARNTEAFF

SEQ ID NO: 398429 - protein, 15 aa, Homo sapiens
  CDR3 for alpha chain variable domain of TCR clone 199215 (TRAV3, TRAJ5)
WSVRDLDTGRRALTF

SEQ ID NO: 398430 - protein, 13 aa, Homo sapiens
  CDR3 for beta chain variable domain of TCR clone 199215 (TRBV12-4, TRBJ2-7)
CASSPTETYEQYF

SEQ ID NO: 398431 - protein, 13 aa, Homo sapiens
  CDR3 for alpha chain variable domain of TCR clone 199216 (TRAV38-2/DV8, TRAJ34)
CAYRWGNTDKLIF

SEQ ID NO: 398432 - protein, 15 aa, Homo sapiens
  CDR3 for beta chain variable domain of TCR clone 199216 (TRBV11-3, TRBJ2-3)
CASLKDGREGDTQYF

SEQ ID NO: 398433 - protein, 15 aa, Homo sapiens
  CDR3 for alpha chain variable domain of TCR clone 199217 (TRAV8-4, TRAJ6)
CAVSAPSGGRHIPTF

SEQ ID NO: 398434 - protein, 15 aa, Homo sapiens
  CDR3 for beta chain variable domain of TCR clone 199217 (TRBV7-3, TRBJ2-2)
CASKANGADTGELFF

SEQ ID NO: 398435 - protein, 12 aa, Homo sapiens
  CDR3 for alpha chain variable domain of TCR clone 199218 (TRAV12-3, TRAJ40)
CAMISGTYKYIF

SEQ ID NO: 398436 - protein, 15 aa, Homo sapiens
  CDR3 for beta chain variable domain of TCR clone 199218 (TRBV7-3, TRBJ2-2)
CASSETGQGTGELFF

SEQ ID NO: 398437 - protein, 12 aa, Homo sapiens
  CDR3 for alpha chain variable domain of TCR clone 199219 (TRAV23/DV6, TRAJ30)
CAASKGDDKLIF

SEQ ID NO: 398438 - protein, 15 aa, Homo sapiens
  CDR3 for beta chain variable domain of TCR clone 199219 (TRBV29-1, TRBJ2-1)
CSGRDRKSSYNEQFF

SEQ ID NO: 398439 - protein, 12 aa, Homo sapiens
  CDR3 for alpha chain variable domain of TCR clone 199220 (TRAV12-3, TRAJ17)
CAMALTGNKLTF

SEQ ID NO: 398440 - protein, 16 aa, Homo sapiens
  CDR3 for beta chain variable domain of TCR clone 199220 (TRBV5-1, TRBJ2-3)
CASSLGLAVYTDTQYF

SEQ ID NO: 398441 - protein, 18 aa, Homo sapiens
  CDR3 for alpha chain variable domain of TCR clone 199221 (TRAV8-3, TRAJ4)
WVRDPTSNDPGGYNNLIF

SEQ ID NO: 398442 - protein, 13 aa, Homo sapiens
  CDR3 for beta chain variable domain of TCR clone 199221 (TRBV20-1, TRBJ1-2)
CSATGIQGSGYTF

SEQ ID NO: 398443 - protein, 17 aa, Homo sapiens
  CDR3 for alpha chain variable domain of TCR clone 199222 (TRAV17, TRAJ7)
CATLGRLAFGKGNQVVV

SEQ ID NO: 398444 - protein, 15 aa, Homo sapiens
  CDR3 for beta chain variable domain of TCR clone 199222 (TRBV6-1, TRBJ2-1)
CASSELRGQYNEQFF

SEQ ID NO: 398445 - protein, 14 aa, Homo sapiens
  CDR3 for alpha chain variable domain of TCR clone 199223 (TRAV2, TRAJ9)
CAVEDRSGGFKTIF

SEQ ID NO: 398446 - protein, 14 aa, Homo sapiens
  CDR3 for beta chain variable domain of TCR clone 199223 (TRBV4-1, TRBJ2-2)
CASSQAVNTGELSF

SEQ ID NO: 398447 - protein, 12 aa, Homo sapiens
  CDR3 for alpha chain variable domain of TCR clone 199224 (TRAV12-3, TRAJ17)
WAMTLTGNKLTL

SEQ ID NO: 398448 - protein, 15 aa, Homo sapiens
  CDR3 for beta chain variable domain of TCR clone 199224 (TRBV20-1, TRBJ2-7)
CSARDRVSGMDEQYF

SEQ ID NO: 398449 - protein, 17 aa, Homo sapiens
  CDR3 for alpha chain variable domain of TCR clone 199225 (TRAV3, TRAJ42)
CAVRDRDYGGSQGNLIF

SEQ ID NO: 398450 - protein, 15 aa, Homo sapiens
  CDR3 for beta chain variable domain of TCR clone 199225 (TRBV19, TRBJ2-7)
CASSTGLAGTYEQYF

SEQ ID NO: 398451 - protein, 14 aa, Homo sapiens
  CDR3 for alpha chain variable domain of TCR clone 199226 (TRAV17, TRAJ40)
CATALTSGTYKYIF

SEQ ID NO: 398452 - protein, 13 aa, Homo sapiens
  CDR3 for beta chain variable domain of TCR clone 199226 (TRBV27, TRBJ2-1)
CASSSGSDNEQFF

SEQ ID NO: 398453 - protein, 13 aa, Homo sapiens
  CDR3 for alpha chain variable domain of TCR clone 199227 (TRAV3, TRAJ20)
CAVRDICDYKLSF

SEQ ID NO: 398454 - protein, 12 aa, Homo sapiens
  CDR3 for beta chain variable domain of TCR clone 199227 (TRBV3-1, TRBJ1-2)
CASTSGLYGYTF

SEQ ID NO: 398455 - protein, 13 aa, Homo sapiens
  CDR3 for alpha chain variable domain of TCR clone 199228 (TRAV10, TRAJ43)
CVVSATNNNDMRF

SEQ ID NO: 398456 - protein, 14 aa, Homo sapiens
  CDR3 for beta chain variable domain of TCR clone 199228 (TRBV28, TRBJ2-7)
CASSLLRISYEQYF

SEQ ID NO: 398457 - protein, 18 aa, Homo sapiens
  CDR3 for alpha chain variable domain of TCR clone 199229 (TRAV13-1, TRAJ52)
CAAKNPNAGGTSYGKLTF

SEQ ID NO: 398458 - protein, 15 aa, Homo sapiens
  CDR3 for beta chain variable domain of TCR clone 199229 (TRBV7-2, TRBJ2-1)
CASRNTGSSYNEQFF

SEQ ID NO: 398459 - protein, 13 aa, Homo sapiens
  CDR3 for alpha chain variable domain of TCR clone 199230 (TRAV27, TRAJ45)
CRSSGGGADGLTF

SEQ ID NO: 398460 - protein, 14 aa, Homo sapiens
  CDR3 for beta chain variable domain of TCR clone 199230 (TRBV20-1, TRBJ2-1)
CSAQIGGSANEQFF

SEQ ID NO: 398461 - protein, 14 aa, Homo sapiens
  CDR3 for alpha chain variable domain of TCR clone 199231 (TRAV12-1, TRAJ41)
CVVLNSNSGYALNF

SEQ ID NO: 398462 - protein, 14 aa, Homo sapiens
  CDR3 for beta chain variable domain of TCR clone 199231 (TRBV5-1, TRBJ2-7)
CASSRGESVYEQYF

SEQ ID NO: 398463 - protein, 14 aa, Homo sapiens
  CDR3 for alpha chain variable domain of TCR clone 199232 (TRAV12-2, TRAJ24)
CAVAPADSWGKLQF

SEQ ID NO: 398464 - protein, 14 aa, Homo sapiens
  CDR3 for beta chain variable domain of TCR clone 199232 (TRBV25-1, TRBJ1-4)
CASSGGGQPEKLFF

SEQ ID NO: 398465 - protein, 11 aa, Homo sapiens
  CDR3 for alpha chain variable domain of TCR clone 199233 (TRAV12-2, TRAJ39)
CAVNNMLTFGG

SEQ ID NO: 398466 - protein, 16 aa, Homo sapiens
  CDR3 for beta chain variable domain of TCR clone 199233 (TRBV5-3, TRBJ2-2)
CARSFVTGTNTGELFF

SEQ ID NO: 398467 - protein, 17 aa, Homo sapiens
  CDR3 for alpha chain variable domain of TCR clone 199234 (TRAV8-6, TRAJ58)
CAVSSWVGETSGSRLTF

SEQ ID NO: 398468 - protein, 13 aa, Homo sapiens
  CDR3 for beta chain variable domain of TCR clone 199234 (TRBV11-2, TRBJ2-2)
CASGRDREEELFF

SEQ ID NO: 398469 - protein, 16 aa, Homo sapiens
  CDR3 for alpha chain variable domain of TCR clone 199235 (TRAV3, TRAJ13)
CAVRVPNSGGYQKVTF

SEQ ID NO: 398470 - protein, 13 aa, Homo sapiens
  CDR3 for beta chain variable domain of TCR clone 199235 (TRBV7-9, TRBJ2-7)
CASSLQGSYEQYF

SEQ ID NO: 398471 - protein, 13 aa, Homo sapiens
  CDR3 for alpha chain variable domain of TCR clone 199236 (TRAV39, TRAJ48)
CAAVNFGNEKLTL

SEQ ID NO: 398472 - protein, 12 aa, Homo sapiens
  CDR3 for beta chain variable domain of TCR clone 199236 (TRBV5-5, TRBJ2-5)
CASSYFGETQYF

SEQ ID NO: 398473 - protein, 16 aa, Homo sapiens
  CDR3 for alpha chain variable domain of TCR clone 199237 (TRAV3, TRAJ21)
CAVRDIERGNFNKFSF

SEQ ID NO: 398474 - protein, 16 aa, Homo sapiens
  CDR3 for beta chain variable domain of TCR clone 199237 (TRBV12-4, TRBJ1-5)
CASSRPVGGSNQPQHF

SEQ ID NO: 398475 - protein, 13 aa, Homo sapiens
  CDR3 for alpha chain variable domain of TCR clone 199238 (TRAV12-1, TRAJ9)
CVVRNTGGFKTNF

SEQ ID NO: 398476 - protein, 14 aa, Homo sapiens
  CDR3 for beta chain variable domain of TCR clone 199238 (TRBV20-1, TRBJ2-1)
CSAQIGGSANEQFF

SEQ ID NO: 398477 - protein, 14 aa, Homo sapiens
  CDR3 for alpha chain variable domain of TCR clone 199239 (TRAV21, TRAJ45)
CAVSSGGGADGLTF

SEQ ID NO: 398478 - protein, 14 aa, Homo sapiens
  CDR3 for beta chain variable domain of TCR clone 199239 (TRBV2, TRBJ2-1)
CASSEALIYNEQFF

SEQ ID NO: 398479 - protein, 16 aa, Homo sapiens
  CDR3 for alpha chain variable domain of TCR clone 199240 (TRAV12-2, TRAJ39)
CAVIRGPNNAGNMLTF

SEQ ID NO: 398480 - protein, 10 aa, Homo sapiens
  CDR3 for beta chain variable domain of TCR clone 199240 (TRBV2, TRBJ2-4)
CASRGSIQYF

SEQ ID NO: 398481 - protein, 11 aa, Homo sapiens
  CDR3 for alpha chain variable domain of TCR clone 199241 (TRAV2, TRAJ13)
CASVGYQKVTF

SEQ ID NO: 398482 - protein, 11 aa, Homo sapiens
  CDR3 for beta chain variable domain of TCR clone 199241 (TRBV29-1, TRBJ2-5)
CSEDRTGTQYF

SEQ ID NO: 398483 - protein, 14 aa, Homo sapiens
  CDR3 for alpha chain variable domain of TCR clone 199242 (TRAV17, TRAJ57)
CATDPQGGSEKLGF

SEQ ID NO: 398484 - protein, 13 aa, Homo sapiens
  CDR3 for beta chain variable domain of TCR clone 199242 (TRBV10-3, TRBJ2-7)
CASKLAVNYEQYF

SEQ ID NO: 398485 - protein, 13 aa, Homo sapiens
  CDR3 for alpha chain variable domain of TCR clone 199243 (TRAV25, TRAJ10)
CAGRTGRGHKLTF

SEQ ID NO: 398486 - protein, 15 aa, Homo sapiens
  CDR3 for beta chain variable domain of TCR clone 199243 (TRBV19, TRBJ2-1)
CASSSPGVPLDEQFF

SEQ ID NO: 398487 - protein, 16 aa, Homo sapiens
  CDR3 for alpha chain variable domain of TCR clone 199244 (TRAV12-1, TRAJ43)
CVVNPHRFGAGTRLTV

SEQ ID NO: 398488 - protein, 13 aa, Homo sapiens
  CDR3 for beta chain variable domain of TCR clone 199244 (TRBV20-1, TRBJ1-1)
CSARGGGNTVAFF

SEQ ID NO: 398489 - protein, 14 aa, Homo sapiens
  CDR3 for alpha chain variable domain of TCR clone 199245 (TRAV2, TRAJ9)
CAVEDRSGGFKTIF

SEQ ID NO: 398490 - protein, 14 aa, Homo sapiens
  CDR3 for beta chain variable domain of TCR clone 199245 (TRBV19, TRBJ2-1)
CASPTVVLSGEQFF

SEQ ID NO: 398491 - protein, 16 aa, Homo sapiens
  CDR3 for alpha chain variable domain of TCR clone 199246 (TRAV30, TRAJ24)
CGTEIVDADSWGKFQF

SEQ ID NO: 398492 - protein, 16 aa, Homo sapiens
  CDR3 for beta chain variable domain of TCR clone 199246 (TRBV6-6, TRBJ2-1)
CASSLLSDSSYNEQFF

SEQ ID NO: 398493 - protein, 15 aa, Homo sapiens
  CDR3 for alpha chain variable domain of TCR clone 199247 (TRAV13-1, TRAJ43)
CAATPELGGNNDMRF

SEQ ID NO: 398494 - protein, 15 aa, Homo sapiens
  CDR3 for beta chain variable domain of TCR clone 199247 (TRBV10-2, TRBJ2-6)
CASSGQGTGANVLTF

SEQ ID NO: 398495 - protein, 13 aa, Homo sapiens
  CDR3 for alpha chain variable domain of TCR clone 199248 (TRAV12-2, TRAJ9)
CAGGNTGGFKTIF

SEQ ID NO: 398496 - protein, 15 aa, Homo sapiens
  CDR3 for beta chain variable domain of TCR clone 199248 (TRBV3-1, TRBJ2-7)
CASSQEWTGSYEQYF

SEQ ID NO: 398497 - protein, 13 aa, Homo sapiens
  CDR3 for alpha chain variable domain of TCR clone 199249 (TRAV8-2, TRAJ13)
CVVIDLRYQKVTF

SEQ ID NO: 398498 - protein, 14 aa, Homo sapiens
  CDR3 for beta chain variable domain of TCR clone 199249 (TRBV25-1, TRBJ1-1)
CASTHLGGNTEAFF

SEQ ID NO: 398499 - protein, 14 aa, Homo sapiens
  CDR3 for alpha chain variable domain of TCR clone 199250 (TRAV13-1, TRAJ17)
CAASRDAAGNKLTF

SEQ ID NO: 398500 - protein, 18 aa, Homo sapiens
  CDR3 for beta chain variable domain of TCR clone 199250 (TRBV10-2, TRBJ2-2)
CISAPAVHRQADAGELFF

SEQ ID NO: 398501 - protein, 13 aa, Homo sapiens
  CDR3 for alpha chain variable domain of TCR clone 199251 (TRAV21, TRAJ27)
WAARPGNAGKSTF

SEQ ID NO: 398502 - protein, 14 aa, Homo sapiens
  CDR3 for beta chain variable domain of TCR clone 199251 (TRBV7-6, TRBJ2-3)
CASSLVTVTDTQYF

SEQ ID NO: 398503 - protein, 16 aa, Homo sapiens
  CDR3 for alpha chain variable domain of TCR clone 199252 (TRAV14/DV4, TRAJ53)
CAMREGGGGSNYKLTF

SEQ ID NO: 398504 - protein, 16 aa, Homo sapiens
  CDR3 for beta chain variable domain of TCR clone 199252 (TRBV6-1, TRBJ2-5)
CASSETLDRGAETQYF

SEQ ID NO: 398505 - protein, 15 aa, Homo sapiens
  CDR3 for alpha chain variable domain of TCR clone 199253 (TRAV29/DV5, TRAJ24)
CAASGATDSWGKFQF

SEQ ID NO: 398506 - protein, 13 aa, Homo sapiens
  CDR3 for beta chain variable domain of TCR clone 199253 (TRBV7-3, TRBJ2-1)
CASSPVAYNEQFF

SEQ ID NO: 398507 - protein, 15 aa, Homo sapiens
  CDR3 for alpha chain variable domain of TCR clone 199254 (TRAV8-3, TRAJ45)
CALSYSGGGADGLTF

SEQ ID NO: 398508 - protein, 13 aa, Homo sapiens
  CDR3 for beta chain variable domain of TCR clone 199254 (TRBV10-3, TRBJ2-7)
CAFKLAVNYEQYF

SEQ ID NO: 398509 - protein, 12 aa, Homo sapiens
  CDR3 for alpha chain variable domain of TCR clone 199255 (TRAV39, TRAJ33)
CAANPDSNYQLI

SEQ ID NO: 398510 - protein, 13 aa, Homo sapiens
  CDR3 for beta chain variable domain of TCR clone 199255 (TRBV18, TRBJ1-1)
CASSGGRNTEAFF

SEQ ID NO: 398511 - protein, 12 aa, Homo sapiens
  CDR3 for alpha chain variable domain of TCR clone 199256 (TRAV13-1, TRAJ9)
CASHTGGFKTIF

SEQ ID NO: 398512 - protein, 14 aa, Homo sapiens
  CDR3 for beta chain variable domain of TCR clone 199256 (TRBV19, TRBJ2-7)
CASSMGQGAIEQYF

SEQ ID NO: 398513 - protein, 17 aa, Homo sapiens
  CDR3 for alpha chain variable domain of TCR clone 199257 (TRAV38-1, TRAJ45)
RAFMKHYMGGGADGLTF

SEQ ID NO: 398514 - protein, 19 aa, Homo sapiens
  CDR3 for beta chain variable domain of TCR clone 199257 (TRBV6-1, TRBJ2-5)
CASSEQGLAGGLYQETQYF

SEQ ID NO: 398515 - protein, 15 aa, Homo sapiens
  CDR3 for alpha chain variable domain of TCR clone 199258 (TRAV38-2/DV8, TRAJ45)
CAYWDSGGGADGLTF

SEQ ID NO: 398516 - protein, 14 aa, Homo sapiens
  CDR3 for beta chain variable domain of TCR clone 199258 (TRBV7-3, TRBJ2-1)
CASSLAGGTNEQFF

SEQ ID NO: 398517 - protein, 16 aa, Homo sapiens
  CDR3 for alpha chain variable domain of TCR clone 199259 (TRAV26-1, TRAJ52)
CIVSNAGGTSYGKLTF

SEQ ID NO: 398518 - protein, 13 aa, Homo sapiens
  CDR3 for beta chain variable domain of TCR clone 199259 (TRBV5-4, TRBJ2-5)
CASSPVSQETQYF

SEQ ID NO: 398519 - protein, 12 aa, Homo sapiens
  CDR3 for alpha chain variable domain of TCR clone 199260 (TRAV2, TRAJ9)
CAVGAGGFKTIF

SEQ ID NO: 398520 - protein, 16 aa, Homo sapiens
  CDR3 for beta chain variable domain of TCR clone 199260 (TRBV13, TRBJ2-2)
CASGPRTGENTGELFF

SEQ ID NO: 398521 - protein, 12 aa, Homo sapiens
  CDR3 for alpha chain variable domain of TCR clone 199261 (TRAV30, TRAJ43)
CGTEERGNDRRF

SEQ ID NO: 398522 - protein, 13 aa, Homo sapiens
  CDR3 for beta chain variable domain of TCR clone 199261 (TRBV7-9, TRBJ2-3)
CASSPGSTDTQYF

SEQ ID NO: 398523 - protein, 13 aa, Homo sapiens
  CDR3 for alpha chain variable domain of TCR clone 199262 (TRAV2, TRAJ15)
CAVASQAGTALIF

SEQ ID NO: 398524 - protein, 16 aa, Homo sapiens
  CDR3 for beta chain variable domain of TCR clone 199262 (TRBV19, TRBJ1-1)
CASSPTRFWPGTEAFF

SEQ ID NO: 398525 - protein, 12 aa, Homo sapiens
  CDR3 for alpha chain variable domain of TCR clone 199263 (TRAV12-3, TRAJ17)
CAMTLTGNKLTF

SEQ ID NO: 398526 - protein, 20 aa, Homo sapiens
  CDR3 for beta chain variable domain of TCR clone 199263 (TRBV7-8, TRBJ2-2)
CASSNLFPGPTIHITGELFF

SEQ ID NO: 398527 - protein, 13 aa, Homo sapiens
  CDR3 for alpha chain variable domain of TCR clone 199264 (TRAV3, TRAJ20)
CCEAFCNDSKLSF

SEQ ID NO: 398528 - protein, 15 aa, Homo sapiens
  CDR3 for beta chain variable domain of TCR clone 199264 (TRBV19, TRBJ2-6)
CASVRRDSGANVLTF

SEQ ID NO: 398529 - protein, 13 aa, Homo sapiens
  CDR3 for alpha chain variable domain of TCR clone 199265 (TRAV17, TRAJ15)
CATDARAGTALIF

SEQ ID NO: 398530 - protein, 15 aa, Homo sapiens
  CDR3 for beta chain variable domain of TCR clone 199265 (TRBV20-1, TRBJ2-7)
CSARDRVSGMDEQYL

SEQ ID NO: 398531 - protein, 18 aa, Homo sapiens
  CDR3 for alpha chain variable domain of TCR clone 199266 (TRAV12-2, TRAJ13)
CAVKKTGGYQSYLWNWNK

SEQ ID NO: 398532 - protein, 15 aa, Homo sapiens
  CDR3 for beta chain variable domain of TCR clone 199266 (TRBV27, TRBJ2-1)
CASSNGGGSSNEQFF

SEQ ID NO: 398533 - protein, 15 aa, Homo sapiens
  CDR3 for alpha chain variable domain of TCR clone 199267 (TRAV17, TRAJ56)
CATDANTGANSKLTF

SEQ ID NO: 398534 - protein, 14 aa, Homo sapiens
  CDR3 for beta chain variable domain of TCR clone 199267 (TRBV19, TRBJ1-5)
CASSLGTGGQPHHF

SEQ ID NO: 398535 - protein, 13 aa, Homo sapiens
  CDR3 for alpha chain variable domain of TCR clone 199268 (TRAV12-2, TRAJ52)
CAVGGTSYGKLTF

SEQ ID NO: 398536 - protein, 14 aa, Homo sapiens
  CDR3 for beta chain variable domain of TCR clone 199268 (TRBV7-2, TRBJ2-1)
CASSLVAGRNEQFF

SEQ ID NO: 398537 - protein, 13 aa, Homo sapiens
  CDR3 for alpha chain variable domain of TCR clone 199269 (TRAV17, TRAJ9)
CATDYTGGFKTIF

SEQ ID NO: 398538 - protein, 16 aa, Homo sapiens
  CDR3 for beta chain variable domain of TCR clone 199269 (TRBV7-6, TRBJ1-6)
CASSLSSRIGDSPLHF

SEQ ID NO: 398539 - protein, 16 aa, Homo sapiens
  CDR3 for alpha chain variable domain of TCR clone 199270 (TRAV30, TRAJ24)
CGTVIVDADSWGKFQF

SEQ ID NO: 398540 - protein, 13 aa, Homo sapiens
  CDR3 for beta chain variable domain of TCR clone 199270 (TRBV20-1, TRBJ1-1)
CSARGGGDTEAFF

SEQ ID NO: 398541 - protein, 14 aa, Homo sapiens
  CDR3 for alpha chain variable domain of TCR clone 199271 (TRAV38-1, TRAJ40)
CDLRPTSGTYKYIF

SEQ ID NO: 398542 - protein, 14 aa, Homo sapiens
  CDR3 for beta chain variable domain of TCR clone 199271 (TRBV25-1, TRBJ1-1)
CAGTHLGGNTEAFF

SEQ ID NO: 398543 - protein, 14 aa, Homo sapiens
  CDR3 for alpha chain variable domain of TCR clone 199272 (TRAV3, TRAJ21)
CALGRGSTNFTLDL

SEQ ID NO: 398544 - protein, 14 aa, Homo sapiens
  CDR3 for beta chain variable domain of TCR clone 199272 (TRBV7-9, TRBJ2-2)
CASSLVQDTGELFF

SEQ ID NO: 398545 - protein, 16 aa, Homo sapiens
  CDR3 for alpha chain variable domain of TCR clone 199273 (TRAV12-1, TRAJ10)
CVVEKDSGGGRNKLTF

SEQ ID NO: 398546 - protein, 15 aa, Homo sapiens
  CDR3 for beta chain variable domain of TCR clone 199273 (TRBV10-3, TRBJ1-5)
CAISESSDSNQPQHF

SEQ ID NO: 398547 - protein, 14 aa, Homo sapiens
  CDR3 for alpha chain variable domain of TCR clone 199274 (TRAV12-1, TRAJ17)
CVVNYKAAGNKLTF

SEQ ID NO: 398548 - protein, 15 aa, Homo sapiens
  CDR3 for beta chain variable domain of TCR clone 199274 (TRBV4-1, TRBJ2-7)
CASSQQGQGFDEQYF

SEQ ID NO: 398549 - protein, 13 aa, Homo sapiens
  CDR3 for alpha chain variable domain of TCR clone 199275 (TRAV8-3, TRAJ28)
CAVGAVGSSQLTF

SEQ ID NO: 398550 - protein, 14 aa, Homo sapiens
  CDR3 for beta chain variable domain of TCR clone 199275 (TRBV25-1, TRBJ1-1)
CASTHLGGNTEAFF

SEQ ID NO: 398551 - protein, 16 aa, Homo sapiens
  CDR3 for alpha chain variable domain of TCR clone 199276 (TRAV26-1, TRAJ37)
CIVRGDGSGNTGKLIF

SEQ ID NO: 398552 - protein, 15 aa, Homo sapiens
  CDR3 for beta chain variable domain of TCR clone 199276 (TRBV7-3, TRBJ2-1)
CARSPTGGGEVEQFF

SEQ ID NO: 398553 - protein, 15 aa, Homo sapiens
  CDR3 for alpha chain variable domain of TCR clone 199277 (TRAV8-3, TRAJ45)
CASSYSGGCADGITF

SEQ ID NO: 398554 - protein, 15 aa, Homo sapiens
  CDR3 for beta chain variable domain of TCR clone 199277 (TRBV10-3, TRBJ1-1)
CAISDLGRANTEAFF

SEQ ID NO: 398555 - protein, 14 aa, Homo sapiens
  CDR3 for alpha chain variable domain of TCR clone 199278 (TRAV26-1, TRAJ21)
CIVRPPYNFNKFYF

SEQ ID NO: 398556 - protein, 15 aa, Homo sapiens
  CDR3 for beta chain variable domain of TCR clone 199278 (TRBV7-2, TRBJ2-7)
CASSTPGLTRGEQYF

SEQ ID NO: 398557 - protein, 14 aa, Homo sapiens
  CDR3 for alpha chain variable domain of TCR clone 199279 (TRAV26-1, TRAJ45)
CIEVTGGGADGLTF

SEQ ID NO: 398558 - protein, 16 aa, Homo sapiens
  CDR3 for beta chain variable domain of TCR clone 199279 (TRBV7-6, TRBJ2-3)
CASSDSRGEGTDTQYF

SEQ ID NO: 398559 - protein, 16 aa, Homo sapiens
  CDR3 for alpha chain variable domain of TCR clone 199280 (TRAV3, TRAJ37)
CAVRVRGSGNTGKLIF

SEQ ID NO: 398560 - protein, 14 aa, Homo sapiens
  CDR3 for beta chain variable domain of TCR clone 199280 (TRBV6-1, TRBJ1-3)
CASVQGGGGNTIYF

SEQ ID NO: 398561 - protein, 14 aa, Homo sapiens
  CDR3 for alpha chain variable domain of TCR clone 199281 (TRAV1-2, TRAJ16)
CAVNRFSDGRKLLF

SEQ ID NO: 398562 - protein, 14 aa, Homo sapiens
  CDR3 for beta chain variable domain of TCR clone 199281 (TRBV4-1, TRBJ2-2)
CASSQAVNTGELFF

SEQ ID NO: 398563 - protein, 13 aa, Homo sapiens
  CDR3 for alpha chain variable domain of TCR clone 199282 (TRAV2, TRAJ40)
CAVVPSGTYKYIS

SEQ ID NO: 398564 - protein, 14 aa, Homo sapiens
  CDR3 for beta chain variable domain of TCR clone 199282 (TRBV19, TRBJ2-1)
CASPTFVLSGEQFF

SEQ ID NO: 398565 - protein, 14 aa, Homo sapiens
  CDR3 for alpha chain variable domain of TCR clone 199283 (TRAV35, TRAJ22)
CAGLRPGSARQLTF

SEQ ID NO: 398566 - protein, 15 aa, Homo sapiens
  CDR3 for beta chain variable domain of TCR clone 199283 (TRBV11-2, TRBJ2-1)
CASSLGTSGLNEQFF

SEQ ID NO: 398567 - protein, 20 aa, Homo sapiens
  CDR3 for alpha chain variable domain of TCR clone 199284 (TRAV12-1, TRAJ42)
SSVIQPPTSVKGGSQGNLIF

SEQ ID NO: 398568 - protein, 14 aa, Homo sapiens
  CDR3 for beta chain variable domain of TCR clone 199284 (TRBV18, TRBJ2-5)
CASSPGVSQETQYF

SEQ ID NO: 398569 - protein, 14 aa, Homo sapiens
  CDR3 for alpha chain variable domain of TCR clone 199285 (TRAV21, TRAJ37)
YAVKGSSNTGKLIC

SEQ ID NO: 398570 - protein, 14 aa, Homo sapiens
  CDR3 for beta chain variable domain of TCR clone 199285 (TRBV7-2, TRBJ2-1)
CASSRGGARNEQFF

SEQ ID NO: 398571 - protein, 13 aa, Homo sapiens
  CDR3 for alpha chain variable domain of TCR clone 199286 (TRAV27, TRAJ41)
CAGEVNSGFALNF

SEQ ID NO: 398572 - protein, 14 aa, Homo sapiens
  CDR3 for beta chain variable domain of TCR clone 199286 (TRBV7-2, TRBJ1-1)
CASSFLTGTTEAFF

SEQ ID NO: 398573 - protein, 17 aa, Homo sapiens
  CDR3 for alpha chain variable domain of TCR clone 199287 (TRAV3, TRAJ6)
CAVRDGPRAGGSYIPTF

SEQ ID NO: 398574 - protein, 13 aa, Homo sapiens
  CDR3 for beta chain variable domain of TCR clone 199287 (TRBV7-3, TRBJ2-3)
CASSSWSTDTQYF

SEQ ID NO: 398575 - protein, 13 aa, Homo sapiens
  CDR3 for alpha chain variable domain of TCR clone 199288 (TRAV3, TRAJ27)
CAVRPLGAGKSTF

SEQ ID NO: 398576 - protein, 20 aa, Homo sapiens
  CDR3 for beta chain variable domain of TCR clone 199288 (TRBV5-1, TRBJ1-1)
CASSQRKTNRDGRPNTEAFF

SEQ ID NO: 398577 - protein, 13 aa, Homo sapiens
  CDR3 for alpha chain variable domain of TCR clone 199289 (TRAV13-1, TRAJ6)
CAASSGGSYIPTF

SEQ ID NO: 398578 - protein, 15 aa, Homo sapiens
  CDR3 for beta chain variable domain of TCR clone 199289 (TRBV6-6, TRBJ2-7)
CASSYSYGGSYEQYF

SEQ ID NO: 398579 - protein, 12 aa, Homo sapiens
  CDR3 for alpha chain variable domain of TCR clone 199290 (TRAV1-2, TRAJ33)
CAALDSNYQLIW

SEQ ID NO: 398580 - protein, 16 aa, Homo sapiens
  CDR3 for beta chain variable domain of TCR clone 199290 (TRBV6-4, TRBJ1-2)
CASSEAVGDPNSGYTF

SEQ ID NO: 398581 - protein, 13 aa, Homo sapiens
  CDR3 for alpha chain variable domain of TCR clone 199291 (TRAV12-3, TRAJ33)
CAMSVNSNYQLIW

SEQ ID NO: 398582 - protein, 16 aa, Homo sapiens
  CDR3 for beta chain variable domain of TCR clone 199291 (TRBV7-3, TRBJ2-3)
CASSLSGYRPGDTQYF

SEQ ID NO: 398583 - protein, 13 aa, Homo sapiens
  CDR3 for alpha chain variable domain of TCR clone 199292 (TRAV8-3, TRAJ43)
CAVGPDNNNDMRF

SEQ ID NO: 398584 - protein, 17 aa, Homo sapiens
  CDR3 for beta chain variable domain of TCR clone 199292 (TRBV13, TRBJ2-3)
CASSLSRVAGGRNTQYF

SEQ ID NO: 398585 - protein, 16 aa, Homo sapiens
  CDR3 for alpha chain variable domain of TCR clone 199293 (TRAV13-2, TRAJ53)
CAENANSGGSKYKLTF

SEQ ID NO: 398586 - protein, 19 aa, Homo sapiens
  CDR3 for beta chain variable domain of TCR clone 199293 (TRBV28, TRBJ2-7)
CASSYSGTSRLGWVYEQYF

SEQ ID NO: 398587 - protein, 14 aa, Homo sapiens
  CDR3 for alpha chain variable domain of TCR clone 199294 (TRAV2, TRAJ9)
CAVDPNTGGFKTIF

SEQ ID NO: 398588 - protein, 15 aa, Homo sapiens
  CDR3 for beta chain variable domain of TCR clone 199294 (TRBV11-3, TRBJ2-7)
CASSPGPASSHEQYF

SEQ ID NO: 398589 - protein, 12 aa, Homo sapiens
  CDR3 for alpha chain variable domain of TCR clone 199295 (TRAV8-3, TRAJ45)
CASSYSEEVLTD

SEQ ID NO: 398590 - protein, 13 aa, Homo sapiens
  CDR3 for beta chain variable domain of TCR clone 199295 (TRBV10-3, TRBJ2-7)
CASNLAVNYEQYF

SEQ ID NO: 398591 - protein, 13 aa, Homo sapiens
  CDR3 for alpha chain variable domain of TCR clone 199296 (TRAV17, TRAJ5)
CALRGTGSRALTF

SEQ ID NO: 398592 - protein, 14 aa, Homo sapiens
  CDR3 for beta chain variable domain of TCR clone 199296 (TRBV12-5, TRBJ2-5)
CASGSRTHQETQYV

SEQ ID NO: 398593 - protein, 16 aa, Homo sapiens
  CDR3 for alpha chain variable domain of TCR clone 199297 (TRAV1-2, TRAJ10)
CAVRGVLTGVGNKLTF

SEQ ID NO: 398594 - protein, 16 aa, Homo sapiens
  CDR3 for beta chain variable domain of TCR clone 199297 (TRBV4-3, TRBJ2-2)
CASSHLQGSGTGELFF

SEQ ID NO: 398595 - protein, 10 aa, Homo sapiens
  CDR3 for alpha chain variable domain of TCR clone 199298 (TRAV23/DV6, TRAJ57)
CAASSTLSQG

SEQ ID NO: 398596 - protein, 13 aa, Homo sapiens
  CDR3 for beta chain variable domain of TCR clone 199298 (TRBV20-1, TRBJ2-3)
CSARLAGTDTQYF

SEQ ID NO: 398597 - protein, 12 aa, Homo sapiens
  CDR3 for alpha chain variable domain of TCR clone 199299 (TRAV21, TRAJ33)
CAKTDSNYQLIW

SEQ ID NO: 398598 - protein, 14 aa, Homo sapiens
  CDR3 for beta chain variable domain of TCR clone 199299 (TRBV2, TRBJ2-7)
RASSLTSGGYEQYF

SEQ ID NO: 398599 - protein, 13 aa, Homo sapiens
  CDR3 for alpha chain variable domain of TCR clone 199300 (TRAV2, TRAJ15)
CAVASQAGTALIF

SEQ ID NO: 398600 - protein, 14 aa, Homo sapiens
  CDR3 for beta chain variable domain of TCR clone 199300 (TRBV25-1, TRBJ1-1)
CASTHLGGNTQAFF

SEQ ID NO: 398601 - protein, 13 aa, Homo sapiens
  CDR3 for alpha chain variable domain of TCR clone 199301 (TRAV12-1, TRAJ26)
CVVRRNYGQNFVF

SEQ ID NO: 398602 - protein, 16 aa, Homo sapiens
  CDR3 for beta chain variable domain of TCR clone 199301 (TRBV11-2, TRBJ2-7)
CASSPTTGGVSYEQYF

SEQ ID NO: 398603 - protein, 13 aa, Homo sapiens
  CDR3 for alpha chain variable domain of TCR clone 199302 (TRAV12-2, TRAJ34)
CAVRGYNTDKLIF

SEQ ID NO: 398604 - protein, 18 aa, Homo sapiens
  CDR3 for beta chain variable domain of TCR clone 199302 (TRBV11-2, TRBJ2-3)
CASSLGGAARGAPNTQYF

SEQ ID NO: 398605 - protein, 14 aa, Homo sapiens
  CDR3 for alpha chain variable domain of TCR clone 199303 (TRAV1-2, TRAJ16)
CAVNRFSDGQKLLF

SEQ ID NO: 398606 - protein, 15 aa, Homo sapiens
  CDR3 for beta chain variable domain of TCR clone 199303 (TRBV12-4, TRBJ2-1)
CASSLSGGASNEQFF

SEQ ID NO: 398607 - protein, 15 aa, Homo sapiens
  CDR3 for alpha chain variable domain of TCR clone 199304 (TRAV8-4, TRAJ36)
CAVRKSWTGANNLFF

SEQ ID NO: 398608 - protein, 17 aa, Homo sapiens
  CDR3 for beta chain variable domain of TCR clone 199304 (TRBV28, TRBJ2-7)
CASSPLRGRRWKGGQYF

SEQ ID NO: 398609 - protein, 12 aa, Homo sapiens
  CDR3 for alpha chain variable domain of TCR clone 199305 (TRAV13-1, TRAJ15)
SAASQAGTALIF

SEQ ID NO: 398610 - protein, 18 aa, Homo sapiens
  CDR3 for beta chain variable domain of TCR clone 199305 (TRBV7-9, TRBJ2-3)
CASSLPINGQISTDTQYF

SEQ ID NO: 398611 - protein, 14 aa, Homo sapiens
  CDR3 for alpha chain variable domain of TCR clone 199306 (TRAV41, TRAJ48)
CAVISNFGNEKLTF

SEQ ID NO: 398612 - protein, 12 aa, Homo sapiens
  CDR3 for beta chain variable domain of TCR clone 199306 (TRBV5-1, TRBJ2-5)
CASSLGLETQYF

SEQ ID NO: 398613 - protein, 13 aa, Homo sapiens
  CDR3 for alpha chain variable domain of TCR clone 199307 (TRAV38-2/DV8, TRAJ34)
CAYRSYNNDKLIF

SEQ ID NO: 398614 - protein, 15 aa, Homo sapiens
  CDR3 for beta chain variable domain of TCR clone 199307 (TRBV20-1, TRBJ2-5)
CSAEGTGGLQETQYF

SEQ ID NO: 398615 - protein, 18 aa, Homo sapiens
  CDR3 for alpha chain variable domain of TCR clone 199308 (TRAV17, TRAJ45)
CATSLDFYSGGCADGLTF

SEQ ID NO: 398616 - protein, 15 aa, Homo sapiens
  CDR3 for beta chain variable domain of TCR clone 199308 (TRBV11-2, TRBJ2-1)
CASSKNRGLIYEQFF

SEQ ID NO: 398617 - protein, 15 aa, Homo sapiens
  CDR3 for alpha chain variable domain of TCR clone 199309 (TRAV3, TRAJ29)
CAVRDIHSGNTPLVF

SEQ ID NO: 398618 - protein, 16 aa, Homo sapiens
  CDR3 for beta chain variable domain of TCR clone 199309 (TRBV4-1, TRBJ2-5)
CASSQTFYGDQETQYF

SEQ ID NO: 398619 - protein, 13 aa, Homo sapiens
  CDR3 for alpha chain variable domain of TCR clone 199310 (TRAV38-1, TRAJ42)
CARWGGSQGNLIF

SEQ ID NO: 398620 - protein, 17 aa, Homo sapiens
  CDR3 for beta chain variable domain of TCR clone 199310 (TRBV20-1, TRBJ2-1)
CSARDQLAGVWDNEQFF

SEQ ID NO: 398621 - protein, 18 aa, Homo sapiens
  CDR3 for alpha chain variable domain of TCR clone 199311 (TRAV26-1, TRAJ23)
CIVRVGLEGWNQGGQLIF

SEQ ID NO: 398622 - protein, 16 aa, Homo sapiens
  CDR3 for beta chain variable domain of TCR clone 199311 (TRBV12-4, TRBJ2-5)
CASSFFVRGRQETQYF

SEQ ID NO: 398623 - protein, 12 aa, Homo sapiens
  CDR3 for alpha chain variable domain of TCR clone 199312 (TRAV23/DV6, TRAJ49)
CAATYTGNQFYF

SEQ ID NO: 398624 - protein, 16 aa, Homo sapiens
  CDR3 for beta chain variable domain of TCR clone 199312 (TRBV11-2, TRBJ1-2)
CASSLDTGGVDYGYTF

SEQ ID NO: 398625 - protein, 17 aa, Homo sapiens
  CDR3 for alpha chain variable domain of TCR clone 199313 (TRAV38-1, TRAJ28)
CAFMKPTSGAGSYQLTF

SEQ ID NO: 398626 - protein, 14 aa, Homo sapiens
  CDR3 for beta chain variable domain of TCR clone 199313 (TRBV25-1, TRBJ1-1)
CASTHLGGNTEAFF

SEQ ID NO: 398627 - protein, 14 aa, Homo sapiens
  CDR3 for alpha chain variable domain of TCR clone 199314 (TRAV12-3, TRAJ10)
SHLPLTGGGNKLTF

SEQ ID NO: 398628 - protein, 16 aa, Homo sapiens
  CDR3 for beta chain variable domain of TCR clone 199314 (TRBV12-4, TRBJ2-5)
CASSWRPAGDLETQYF

SEQ ID NO: 398629 - protein, 21 aa, Homo sapiens
  CDR3 for alpha chain variable domain of TCR clone 199315 (TRAV3, TRAJ37)
CAVRKGVWQHRQTNLWARDNF

SEQ ID NO: 398630 - protein, 13 aa, Homo sapiens
  CDR3 for beta chain variable domain of TCR clone 199315 (TRBV7-3, TRBJ1-1)
CASSQDWGAEAFF

SEQ ID NO: 398631 - protein, 14 aa, Homo sapiens
  CDR3 for alpha chain variable domain of TCR clone 199316 (TRAV17, TRAJ33)
CATDARRSNYQLIG

SEQ ID NO: 398632 - protein, 14 aa, Homo sapiens
  CDR3 for beta chain variable domain of TCR clone 199316 (TRBV25-1, TRBJ1-4)
CASSGGGQPEKLFF

SEQ ID NO: 398633 - protein, 15 aa, Homo sapiens
  CDR3 for alpha chain variable domain of TCR clone 199317 (TRAV12-1, TRAJ44)
CVADLPTGTASKLTF

SEQ ID NO: 398634 - protein, 15 aa, Homo sapiens
  CDR3 for beta chain variable domain of TCR clone 199317 (TRBV5-5, TRBJ1-5)
CASSSTPGSNQPQHF

SEQ ID NO: 398635 - protein, 15 aa, Homo sapiens
  CDR3 for alpha chain variable domain of TCR clone 199318 (TRAV22, TRAJ28)
CAARRSGAGSYQLTF

SEQ ID NO: 398636 - protein, 15 aa, Homo sapiens
  CDR3 for beta chain variable domain of TCR clone 199318 (TRBV20-1, TRBJ2-5)
CSAEGTGGLQETQYF

SEQ ID NO: 398637 - protein, 14 aa, Homo sapiens
  CDR3 for alpha chain variable domain of TCR clone 199319 (TRAV2, TRAJ37)
CAVDFTSSTGKLIF

SEQ ID NO: 398638 - protein, 15 aa, Homo sapiens
  CDR3 for beta chain variable domain of TCR clone 199319 (TRBV20-1, TRBJ1-1)
CSASRGETGNTEAFF

SEQ ID NO: 398639 - protein, 12 aa, Homo sapiens
  CDR3 for alpha chain variable domain of TCR clone 199320 (TRAV1-2, TRAJ17)
CAVRAAGNKLTF

SEQ ID NO: 398640 - protein, 16 aa, Homo sapiens
  CDR3 for beta chain variable domain of TCR clone 199320 (TRBV20-1, TRBJ2-1)
CSAPGLAGSYSDEQFC

SEQ ID NO: 398641 - protein, 12 aa, Homo sapiens
  CDR3 for alpha chain variable domain of TCR clone 199321 (TRAV13-1, TRAJ21)
CAATEGFNKFYF

SEQ ID NO: 398642 - protein, 15 aa, Homo sapiens
  CDR3 for beta chain variable domain of TCR clone 199321 (TRBV15, TRBJ1-5)
CATSRDPVSNQHQHF

SEQ ID NO: 398643 - protein, 15 aa, Homo sapiens
  CDR3 for alpha chain variable domain of TCR clone 199322 (TRAV21, TRAJ57)
CAVIITQGGSEKLVF

SEQ ID NO: 398644 - protein, 12 aa, Homo sapiens
  CDR3 for beta chain variable domain of TCR clone 199322 (TRBV7-8, TRBJ2-7)
CASSLGDREQYF

SEQ ID NO: 398645 - protein, 16 aa, Homo sapiens
  CDR3 for alpha chain variable domain of TCR clone 199323 (TRAV12-2, TRAJ10)
CAVNRVLTGGGNKLTF

SEQ ID NO: 398646 - protein, 12 aa, Homo sapiens
  CDR3 for beta chain variable domain of TCR clone 199323 (TRBV28, TRBJ2-7)
CASIFSSYEQYF

SEQ ID NO: 398647 - protein, 13 aa, Homo sapiens
  CDR3 for alpha chain variable domain of TCR clone 199324 (TRAV8-3, TRAJ48)
CAVVSFGNEKLTF

SEQ ID NO: 398648 - protein, 19 aa, Homo sapiens
  CDR3 for beta chain variable domain of TCR clone 199324 (TRBV25-1, TRBJ2-2)
CAILVYRVDRGRKTGELFF

SEQ ID NO: 398649 - protein, 14 aa, Homo sapiens
  CDR3 for alpha chain variable domain of TCR clone 199325 (TRAV1-2, TRAJ16)
CAVNRFSDGQKLLF

SEQ ID NO: 398650 - protein, 16 aa, Homo sapiens
  CDR3 for beta chain variable domain of TCR clone 199325 (TRBV6-5, TRBJ2-6)
CASSYPLSSGANVLTF

SEQ ID NO: 398651 - protein, 12 aa, Homo sapiens
  CDR3 for alpha chain variable domain of TCR clone 199326 (TRAV13-2, TRAJ48)
SEMDFGNEKLTV

SEQ ID NO: 398652 - protein, 15 aa, Homo sapiens
  CDR3 for beta chain variable domain of TCR clone 199326 (TRBV7-9, TRBJ1-6)
CASSSPGRGNSPLHF

SEQ ID NO: 398653 - protein, 18 aa, Homo sapiens
  CDR3 for alpha chain variable domain of TCR clone 199327 (TRAV13-1, TRAJ52)
CAASKRSAGGTSYGKLTF

SEQ ID NO: 398654 - protein, 14 aa, Homo sapiens
  CDR3 for beta chain variable domain of TCR clone 199327 (TRBV7-2, TRBJ2-5)
CASSFTQGQETQYF

SEQ ID NO: 398655 - protein, 15 aa, Homo sapiens
  CDR3 for alpha chain variable domain of TCR clone 199328 (TRAV2, TRAJ9)
CAVEDRGTGGFKTIF

SEQ ID NO: 398656 - protein, 17 aa, Homo sapiens
  CDR3 for beta chain variable domain of TCR clone 199328 (TRBV4-3, TRBJ2-1)
CASSQCSSGRASGEQFF

SEQ ID NO: 398657 - protein, 14 aa, Homo sapiens
  CDR3 for alpha chain variable domain of TCR clone 199329 (TRAV2, TRAJ23)
CAVIIYNQGGKLIF

SEQ ID NO: 398658 - protein, 13 aa, Homo sapiens
  CDR3 for beta chain variable domain of TCR clone 199329 (TRBV20-1, TRBJ2-3)
FSATSGGAGTQYF

SEQ ID NO: 398659 - protein, 17 aa, Homo sapiens
  CDR3 for alpha chain variable domain of TCR clone 199330 (TRAV24, TRAJ42)
CAFRVKNYGGSQGNLIF

SEQ ID NO: 398660 - protein, 15 aa, Homo sapiens
  CDR3 for beta chain variable domain of TCR clone 199330 (TRBV4-3, TRBJ2-7)
CASNQGDWGDYEQYF

SEQ ID NO: 398661 - protein, 15 aa, Homo sapiens
  CDR3 for alpha chain variable domain of TCR clone 199331 (TRAV29/DV5, TRAJ29)
CAASERRSGNTPLVL

SEQ ID NO: 398662 - protein, 17 aa, Homo sapiens
  CDR3 for beta chain variable domain of TCR clone 199331 (TRBV4-1, TRBJ1-4)
CASSQEGPRGVEEKLFF

SEQ ID NO: 398663 - protein, 12 aa, Homo sapiens
  CDR3 for alpha chain variable domain of TCR clone 199332 (TRAV12-3, TRAJ34)
CAMGYNTDKLIF

SEQ ID NO: 398664 - protein, 14 aa, Homo sapiens
  CDR3 for beta chain variable domain of TCR clone 199332 (TRBV5-7, TRBJ1-5)
CTSSRTGGGQPQHF

SEQ ID NO: 398665 - protein, 13 aa, Homo sapiens
  CDR3 for alpha chain variable domain of TCR clone 199333 (TRAV21, TRAJ57)
CAVTQGGSEKLVF

SEQ ID NO: 398666 - protein, 14 aa, Homo sapiens
  CDR3 for beta chain variable domain of TCR clone 199333 (TRBV13, TRBJ2-7)
CASSGLAGLYEQYF

SEQ ID NO: 398667 - protein, 13 aa, Homo sapiens
  CDR3 for alpha chain variable domain of TCR clone 199334 (TRAV13-1, TRAJ39)
CSASIWAGNMLTF

SEQ ID NO: 398668 - protein, 15 aa, Homo sapiens
  CDR3 for beta chain variable domain of TCR clone 199334 (TRBV7-9, TRBJ1-1)
CASSLLEQGGTEAFF

SEQ ID NO: 398669 - protein, 15 aa, Homo sapiens
  CDR3 for alpha chain variable domain of TCR clone 199335 (TRAV8-3, TRAJ6)
CAVGPLGGGSYIPTF

SEQ ID NO: 398670 - protein, 14 aa, Homo sapiens
  CDR3 for beta chain variable domain of TCR clone 199335 (TRBV19, TRBJ2-2)
CASSTGQGAGELVF

SEQ ID NO: 398671 - protein, 11 aa, Homo sapiens
  CDR3 for alpha chain variable domain of TCR clone 199336 (TRAV12-3, TRAJ27)
CAMANAGKSTF

SEQ ID NO: 398672 - protein, 13 aa, Homo sapiens
  CDR3 for beta chain variable domain of TCR clone 199336 (TRBV18, TRBJ2-7)
CASSRSGSYEQYF

SEQ ID NO: 398673 - protein, 11 aa, Homo sapiens
  CDR3 for alpha chain variable domain of TCR clone 199337 (TRAV3, TRAJ21)
CAVGDFNKFYF

SEQ ID NO: 398674 - protein, 15 aa, Homo sapiens
  CDR3 for beta chain variable domain of TCR clone 199337 (TRBV7-9, TRBJ1-1)
CASSLLEQGGTEAFF

SEQ ID NO: 398675 - protein, 16 aa, Homo sapiens
  CDR3 for alpha chain variable domain of TCR clone 199338 (TRAV3, TRAJ37)
CAVRGKGSGNTGKLIF

SEQ ID NO: 398676 - protein, 15 aa, Homo sapiens
  CDR3 for beta chain variable domain of TCR clone 199338 (TRBV7-2, TRBJ2-5)
CASSFQGGDQETQYF

SEQ ID NO: 398677 - protein, 14 aa, Homo sapiens
  CDR3 for alpha chain variable domain of TCR clone 199339 (TRAV1-2, TRAJ16)
CAVNRFSDGQKLLF

SEQ ID NO: 398678 - protein, 14 aa, Homo sapiens
  CDR3 for beta chain variable domain of TCR clone 199339 (TRBV12-4, TRBJ2-7)
CASSPRQDLYEQYF

SEQ ID NO: 398679 - protein, 16 aa, Homo sapiens
  CDR3 for alpha chain variable domain of TCR clone 199340 (TRAV12-1, TRAJ42)
CVVTPYYGGSQGNLIF

SEQ ID NO: 398680 - protein, 15 aa, Homo sapiens
  CDR3 for beta chain variable domain of TCR clone 199340 (TRBV4-3, TRBJ2-7)
CASSQGGIGIYEQYF

SEQ ID NO: 398681 - protein, 17 aa, Homo sapiens
  CDR3 for alpha chain variable domain of TCR clone 199341 (TRAV13-1, TRAJ5)
CSNPSLSRDTGRRALTF

SEQ ID NO: 398682 - protein, 17 aa, Homo sapiens
  CDR3 for beta chain variable domain of TCR clone 199341 (TRBV24-1, TRBJ2-1)
RATSDVSTSGTYNEQFF

SEQ ID NO: 398683 - protein, 11 aa, Homo sapiens
  CDR3 for alpha chain variable domain of TCR clone 199342 (TRAV12-2, TRAJ48)
CASNAKLTFGT

SEQ ID NO: 398684 - protein, 16 aa, Homo sapiens
  CDR3 for beta chain variable domain of TCR clone 199342 (TRBV7-3, TRBJ2-2)
CASSLKRGTLSGELFF

SEQ ID NO: 398685 - protein, 13 aa, Homo sapiens
  CDR3 for alpha chain variable domain of TCR clone 199343 (TRAV21, TRAJ57)
CAVTHGGSEKLVF

SEQ ID NO: 398686 - protein, 14 aa, Homo sapiens
  CDR3 for beta chain variable domain of TCR clone 199343 (TRBV5-1, TRBJ2-1)
CASSALWAGNEQFF

SEQ ID NO: 398687 - protein, 14 aa, Homo sapiens
  CDR3 for alpha chain variable domain of TCR clone 199344 (TRAV12-2, TRAJ53)
CAVKGGGSNYKLTL

SEQ ID NO: 398688 - protein, 14 aa, Homo sapiens
  CDR3 for beta chain variable domain of TCR clone 199344 (TRBV19, TRBJ2-1)
CASPTFVLSGEQFF

SEQ ID NO: 398689 - protein, 14 aa, Homo sapiens
  CDR3 for alpha chain variable domain of TCR clone 199345 (TRAV13-1, TRAJ3)
GAASKSSSASKIIF

SEQ ID NO: 398690 - protein, 13 aa, Homo sapiens
  CDR3 for beta chain variable domain of TCR clone 199345 (TRBV25-1, TRBJ2-5)
CASSESGRETQYF

SEQ ID NO: 398691 - protein, 15 aa, Homo sapiens
  CDR3 for alpha chain variable domain of TCR clone 199346 (TRAV35, TRAJ40)
YAGQLGQAGTYKYIF

SEQ ID NO: 398692 - protein, 14 aa, Homo sapiens
  CDR3 for beta chain variable domain of TCR clone 199346 (TRBV7-3, TRBJ2-1)
CASSLTGGANEQFF

SEQ ID NO: 398693 - protein, 16 aa, Homo sapiens
  CDR3 for alpha chain variable domain of TCR clone 199347 (TRAV2, TRAJ10)
CCGGSTVTGGGNKLTF

SEQ ID NO: 398694 - protein, 15 aa, Homo sapiens
  CDR3 for beta chain variable domain of TCR clone 199347 (TRBV7-2, TRBJ2-3)
CASSLAGAFIDTQYF

SEQ ID NO: 398695 - protein, 13 aa, Homo sapiens
  CDR3 for alpha chain variable domain of TCR clone 199348 (TRAV2, TRAJ15)
CAVASQAGTALIF

SEQ ID NO: 398696 - protein, 16 aa, Homo sapiens
  CDR3 for beta chain variable domain of TCR clone 199348 (TRBV7-2, TRBJ2-5)
CASSPFPTGGEETQYF

SEQ ID NO: 398697 - protein, 15 aa, Homo sapiens
  CDR3 for alpha chain variable domain of TCR clone 199349 (TRAV8-4, TRAJ6)
CAVSAPSGGSYIPTF

SEQ ID NO: 398698 - protein, 15 aa, Homo sapiens
  CDR3 for beta chain variable domain of TCR clone 199349 (TRBV4-1, TRBJ1-4)
CASSDTGGTNEKLFF

SEQ ID NO: 398699 - protein, 12 aa, Homo sapiens
  CDR3 for alpha chain variable domain of TCR clone 199350 (TRAV13-2, TRAJ8)
CTPWLGFQKLVF

SEQ ID NO: 398700 - protein, 15 aa, Homo sapiens
  CDR3 for beta chain variable domain of TCR clone 199350 (TRBV7-2, TRBJ2-1)
CSSSSGLAGGNEQFF

SEQ ID NO: 398701 - protein, 15 aa, Homo sapiens
  CDR3 for alpha chain variable domain of TCR clone 199351 (TRAV12-2, TRAJ24)
CAARSSTDSWGKLQF

SEQ ID NO: 398702 - protein, 13 aa, Homo sapiens
  CDR3 for beta chain variable domain of TCR clone 199351 (TRBV12-4, TRBJ1-5)
CASSPDRAQPQHF

SEQ ID NO: 398703 - protein, 11 aa, Homo sapiens
  CDR3 for alpha chain variable domain of TCR clone 199352 (TRAV2, TRAJ21)
RAVCNFNKFYF

SEQ ID NO: 398704 - protein, 14 aa, Homo sapiens
  CDR3 for beta chain variable domain of TCR clone 199352 (TRBV6-1, TRBJ1-3)
CASVQGGGGNTIYF

SEQ ID NO: 398705 - protein, 13 aa, Homo sapiens
  CDR3 for alpha chain variable domain of TCR clone 199353 (TRAV1-2, TRAJ9)
CAALNTVGFKTIF

SEQ ID NO: 398706 - protein, 15 aa, Homo sapiens
  CDR3 for beta chain variable domain of TCR clone 199353 (TRBV19, TRBJ1-1)
CASTSGQIQNTEAFF

SEQ ID NO: 398707 - protein, 13 aa, Homo sapiens
  CDR3 for alpha chain variable domain of TCR clone 199354 (TRAV27, TRAJ39)
CAGAQGAGNMLTF

SEQ ID NO: 398708 - protein, 13 aa, Homo sapiens
  CDR3 for beta chain variable domain of TCR clone 199354 (TRBV7-2, TRBJ2-1)
CASSLGVYNEQFF

SEQ ID NO: 398709 - protein, 14 aa, Homo sapiens
  CDR3 for alpha chain variable domain of TCR clone 199355 (TRAV12-2, TRAJ6)
CAVIASGGSYIPTF

SEQ ID NO: 398710 - protein, 15 aa, Homo sapiens
  CDR3 for beta chain variable domain of TCR clone 199355 (TRBV20-1, TRBJ2-7)
CSARDRVSGMDEQYF

SEQ ID NO: 398711 - protein, 13 aa, Homo sapiens
  CDR3 for alpha chain variable domain of TCR clone 199356 (TRAV8-3, TRAJ28)
YAVCAVGGYQLTF

SEQ ID NO: 398712 - protein, 14 aa, Homo sapiens
  CDR3 for beta chain variable domain of TCR clone 199356 (TRBV7-2, TRBJ2-7)
CASRSQGAAYEQYF

SEQ ID NO: 398713 - protein, 14 aa, Homo sapiens
  CDR3 for alpha chain variable domain of TCR clone 199357 (TRAV3, TRAJ34)
CAVRAPGNTDKLIF

SEQ ID NO: 398714 - protein, 17 aa, Homo sapiens
  CDR3 for beta chain variable domain of TCR clone 199357 (TRBV20-1, TRBJ1-1)
CSARGTGGSYGNTGAFF

SEQ ID NO: 398715 - protein, 14 aa, Homo sapiens
  CDR3 for alpha chain variable domain of TCR clone 199358 (TRAV12-2, TRAJ40)
CAVKIPSGTYKYIF

SEQ ID NO: 398716 - protein, 14 aa, Homo sapiens
  CDR3 for beta chain variable domain of TCR clone 199358 (TRBV18, TRBJ2-5)
CASSPFRVQETQYF

SEQ ID NO: 398717 - protein, 14 aa, Homo sapiens
  CDR3 for alpha chain variable domain of TCR clone 199359 (TRAV13-2, TRAJ16)
CAENNWEDGQKRLF

SEQ ID NO: 398718 - protein, 14 aa, Homo sapiens
  CDR3 for beta chain variable domain of TCR clone 199359 (TRBV7-9, TRBJ1-1)
CASSLGGLKTEAFF

SEQ ID NO: 398719 - protein, 13 aa, Homo sapiens
  CDR3 for alpha chain variable domain of TCR clone 199360 (TRAV2, TRAJ40)
CAVVTSGTYKYIF

SEQ ID NO: 398720 - protein, 16 aa, Homo sapiens
  CDR3 for beta chain variable domain of TCR clone 199360 (TRBV7-9, TRBJ2-1)
CASSDVAGGSYNEQFS

SEQ ID NO: 398721 - protein, 14 aa, Homo sapiens
  CDR3 for alpha chain variable domain of TCR clone 199361 (TRAV12-3, TRAJ22)
CAMSLFGSARQLTF

SEQ ID NO: 398722 - protein, 14 aa, Homo sapiens
  CDR3 for beta chain variable domain of TCR clone 199361 (TRBV7-6, TRBJ2-1)
CASSLGGGADEQFF

SEQ ID NO: 398723 - protein, 13 aa, Homo sapiens
  CDR3 for alpha chain variable domain of TCR clone 199362 (TRAV2, TRAJ40)
CAVVTSGTYKYIF

SEQ ID NO: 398724 - protein, 12 aa, Homo sapiens
  CDR3 for beta chain variable domain of TCR clone 199362 (TRBV12-4, TRBJ2-3)
CASSTLPDTQYF

SEQ ID NO: 398725 - protein, 10 aa, Homo sapiens
  CDR3 for alpha chain variable domain of TCR clone 199363 (TRAV23/DV6, TRAJ57)
CAASSTLSQG

SEQ ID NO: 398726 - protein, 14 aa, Homo sapiens
  CDR3 for beta chain variable domain of TCR clone 199363 (TRBV7-2, TRBJ2-7)
CASSSISGFSEQYF

SEQ ID NO: 398727 - protein, 14 aa, Homo sapiens
  CDR3 for alpha chain variable domain of TCR clone 199364 (TRAV26-1, TRAJ57)
CIRAGQGGSEKMVF

SEQ ID NO: 398728 - protein, 13 aa, Homo sapiens
  CDR3 for beta chain variable domain of TCR clone 199364 (TRBV19, TRBJ2-7)
CASSLTTSYEQYF

SEQ ID NO: 398729 - protein, 11 aa, Homo sapiens
  CDR3 for alpha chain variable domain of TCR clone 199365 (TRAV30, TRAJ24)
WMMTAGGKFQF

SEQ ID NO: 398730 - protein, 14 aa, Homo sapiens
  CDR3 for beta chain variable domain of TCR clone 199365 (TRBV12-5, TRBJ2-5)
CASGSRTHQETQYF

SEQ ID NO: 398731 - protein, 14 aa, Homo sapiens
  CDR3 for alpha chain variable domain of TCR clone 199366 (TRAV38-1, TRAJ45)
CAYYSGGGADILTF

SEQ ID NO: 398732 - protein, 20 aa, Homo sapiens
  CDR3 for beta chain variable domain of TCR clone 199366 (TRBV28, TRBJ2-1)
CASTPIGRSPGLAGGNEQFF

SEQ ID NO: 398733 - protein, 13 aa, Homo sapiens
  CDR3 for alpha chain variable domain of TCR clone 199367 (TRAV20, TRAJ20)
CAVQAGSGYKLSF

SEQ ID NO: 398734 - protein, 20 aa, Homo sapiens
  CDR3 for beta chain variable domain of TCR clone 199367 (TRBV7-8, TRBJ2-2)
CASSHLFPGPTIHITGELFF

SEQ ID NO: 398735 - protein, 15 aa, Homo sapiens
  CDR3 for alpha chain variable domain of TCR clone 199368 (TRAV26-1, TRAJ42)
CIVRVKGGSQGNPIF

SEQ ID NO: 398736 - protein, 15 aa, Homo sapiens
  CDR3 for beta chain variable domain of TCR clone 199368 (TRBV27, TRBJ1-6)
CSSSFDRGLGSPLHF

SEQ ID NO: 398737 - protein, 12 aa, Homo sapiens
  CDR3 for alpha chain variable domain of TCR clone 199369 (TRAV16, TRAJ10)
CSRTGAGNKLTF

SEQ ID NO: 398738 - protein, 15 aa, Homo sapiens
  CDR3 for beta chain variable domain of TCR clone 199369 (TRBV6-3, TRBJ2-7)
CASSSPGTVFYEQYF

SEQ ID NO: 398739 - protein, 15 aa, Homo sapiens
  CDR3 for alpha chain variable domain of TCR clone 199370 (TRAV21, TRAJ24)
CAARSSTDSWGKLQF

SEQ ID NO: 398740 - protein, 12 aa, Homo sapiens
  CDR3 for beta chain variable domain of TCR clone 199370 (TRBV11-2, TRBJ2-5)
CQQLDREETQYF

SEQ ID NO: 398741 - protein, 16 aa, Homo sapiens
  CDR3 for alpha chain variable domain of TCR clone 199371 (TRAV3, TRAJ32)
CAVRDIGGGATNKLIF

SEQ ID NO: 398742 - protein, 15 aa, Homo sapiens
  CDR3 for beta chain variable domain of TCR clone 199371 (TRBV5-1, TRBJ2-7)
CASSLNGGPAREQYF

SEQ ID NO: 398743 - protein, 15 aa, Homo sapiens
  CDR3 for alpha chain variable domain of TCR clone 199372 (TRAV3, TRAJ5)
CAVRDRKTGRRALTF

SEQ ID NO: 398744 - protein, 14 aa, Homo sapiens
  CDR3 for beta chain variable domain of TCR clone 199372 (TRBV4-1, TRBJ2-7)
CASSPVAGGDEQYF

SEQ ID NO: 398745 - protein, 12 aa, Homo sapiens
  CDR3 for alpha chain variable domain of TCR clone 199373 (TRAV8-1, TRAJ6)
CASSGGSYIPTF

SEQ ID NO: 398746 - protein, 12 aa, Homo sapiens
  CDR3 for beta chain variable domain of TCR clone 199373 (TRBV19, TRBJ1-1)
CASMNRYTEAFF

SEQ ID NO: 398747 - protein, 23 aa, Homo sapiens
  CDR3 for alpha chain variable domain of TCR clone 199374 (TRAV2, TRAJ9)
CAVRIEVLEASKLSLEQEQDYLL

SEQ ID NO: 398748 - protein, 16 aa, Homo sapiens
  CDR3 for beta chain variable domain of TCR clone 199374 (TRBV24-1, TRBJ2-3)
CATSDPGTGATDTQYF

SEQ ID NO: 398749 - protein, 15 aa, Homo sapiens
  CDR3 for alpha chain variable domain of TCR clone 199375 (TRAV3, TRAJ4)
GAVRDGTGGYNKLIF

SEQ ID NO: 398750 - protein, 16 aa, Homo sapiens
  CDR3 for beta chain variable domain of TCR clone 199375 (TRBV27, TRBJ2-2)
CASSSSGVSNTGELFF

SEQ ID NO: 398751 - protein, 14 aa, Homo sapiens
  CDR3 for alpha chain variable domain of TCR clone 199376 (TRAV13-1, TRAJ24)
CAARRTDSWGKLQF

SEQ ID NO: 398752 - protein, 15 aa, Homo sapiens
  CDR3 for beta chain variable domain of TCR clone 199376 (TRBV7-9, TRBJ1-5)
CASSQGHQPKQPQHF

SEQ ID NO: 398753 - protein, 12 aa, Homo sapiens
  CDR3 for alpha chain variable domain of TCR clone 199377 (TRAV13-2, TRAJ8)
CAPWLGFQKLVF

SEQ ID NO: 398754 - protein, 14 aa, Homo sapiens
  CDR3 for beta chain variable domain of TCR clone 199377 (TRBV7-8, TRBJ2-3)
CASSFKSSTDTQYF

SEQ ID NO: 398755 - protein, 12 aa, Homo sapiens
  CDR3 for alpha chain variable domain of TCR clone 199378 (TRAV1-2, TRAJ4)
CAVKGGYNKLIF

SEQ ID NO: 398756 - protein, 16 aa, Homo sapiens
  CDR3 for beta chain variable domain of TCR clone 199378 (TRBV19, TRBJ2-2)
CASRSPGTGATGELFF

SEQ ID NO: 398757 - protein, 14 aa, Homo sapiens
  CDR3 for alpha chain variable domain of TCR clone 199379 (TRAV3, TRAJ21)
CALGRGSTNFPLDL

SEQ ID NO: 398758 - protein, 14 aa, Homo sapiens
  CDR3 for beta chain variable domain of TCR clone 199379 (TRBV7-9, TRBJ2-4)
CASSLAMGGNIQYF

SEQ ID NO: 398759 - protein, 15 aa, Homo sapiens
  CDR3 for alpha chain variable domain of TCR clone 199380 (TRAV21, TRAJ32)
CAVNSYGGATNKLIF

SEQ ID NO: 398760 - protein, 18 aa, Homo sapiens
  CDR3 for beta chain variable domain of TCR clone 199380 (TRBV7-9, TRBJ2-1)
CASSTGLAEGSSYNEQYF

SEQ ID NO: 398761 - protein, 15 aa, Homo sapiens
  CDR3 for alpha chain variable domain of TCR clone 199381 (TRAV8-4, TRAJ37)
CAVSRGSGNTGKLIF

SEQ ID NO: 398762 - protein, 15 aa, Homo sapiens
  CDR3 for beta chain variable domain of TCR clone 199381 (TRBV20-1, TRBJ2-7)
CSARDRVSGMDEQYF

SEQ ID NO: 398763 - protein, 11 aa, Homo sapiens
  CDR3 for alpha chain variable domain of TCR clone 199382 (TRAV2, TRAJ33)
CAVESNYQLIW

SEQ ID NO: 398764 - protein, 16 aa, Homo sapiens
  CDR3 for beta chain variable domain of TCR clone 199382 (TRBV11-1, TRBJ1-1)
CASSPRGAHMNSEAFF

SEQ ID NO: 398765 - protein, 12 aa, Homo sapiens
  CDR3 for alpha chain variable domain of TCR clone 199383 (TRAV29/DV5, TRAJ49)
YAATDTGNQFYF

SEQ ID NO: 398766 - protein, 19 aa, Homo sapiens
  CDR3 for beta chain variable domain of TCR clone 199383 (TRBV25-1, TRBJ2-2)
CAILVYRVDRGRKTGELFF

SEQ ID NO: 398767 - protein, 12 aa, Homo sapiens
  CDR3 for alpha chain variable domain of TCR clone 199384 (TRAV8-3, TRAJ20)
CAVGGGDYKLSF

SEQ ID NO: 398768 - protein, 14 aa, Homo sapiens
  CDR3 for beta chain variable domain of TCR clone 199384 (TRBV5-1, TRBJ2-7)
CASSRGESLYEQYC

SEQ ID NO: 398769 - protein, 13 aa, Homo sapiens
  CDR3 for alpha chain variable domain of TCR clone 199385 (TRAV12-2, TRAJ6)
CAVNVSRKLHTYI

SEQ ID NO: 398770 - protein, 16 aa, Homo sapiens
  CDR3 for beta chain variable domain of TCR clone 199385 (TRBV7-3, TRBJ2-2)
SASSLKRGTLSGELFF

SEQ ID NO: 398771 - protein, 11 aa, Homo sapiens
  CDR3 for alpha chain variable domain of TCR clone 199386 (TRAV8-6, TRAJ23)
CAVISGGKLIF

SEQ ID NO: 398772 - protein, 17 aa, Homo sapiens
  CDR3 for beta chain variable domain of TCR clone 199386 (TRBV13, TRBJ2-3)
CASSLSRVAGGRNTQYF

SEQ ID NO: 398773 - protein, 12 aa, Homo sapiens
  CDR3 for alpha chain variable domain of TCR clone 199387 (TRAV8-3, TRAJ26)
CAGDNYVQNFVF

SEQ ID NO: 398774 - protein, 16 aa, Homo sapiens
  CDR3 for beta chain variable domain of TCR clone 199387 (TRBV4-3, TRBJ2-1)
CASSPALDRGVNEQFF

SEQ ID NO: 398775 - protein, 12 aa, Homo sapiens
  CDR3 for alpha chain variable domain of TCR clone 199388 (TRAV21, TRAJ8)
CALNTGFQKLVF

SEQ ID NO: 398776 - protein, 15 aa, Homo sapiens
  CDR3 for beta chain variable domain of TCR clone 199388 (TRBV11-2, TRBJ2-1)
CASSLTSGGYNEQFF

SEQ ID NO: 398777 - protein, 17 aa, Homo sapiens
  CDR3 for alpha chain variable domain of TCR clone 199389 (TRAV3, TRAJ42)
CAVRDRDYGGSQGTLIF

SEQ ID NO: 398778 - protein, 15 aa, Homo sapiens
  CDR3 for beta chain variable domain of TCR clone 199389 (TRBV6-3, TRBJ2-7)
CASSSPGTVFYEQYF

SEQ ID NO: 398779 - protein, 15 aa, Homo sapiens
  CDR3 for alpha chain variable domain of TCR clone 199390 (TRAV27, TRAJ50)
CAGVGRGTSYDKVIF

SEQ ID NO: 398780 - protein, 14 aa, Homo sapiens
  CDR3 for beta chain variable domain of TCR clone 199390 (TRBV19, TRBJ1-1)
CASSRDRDATEAFF

SEQ ID NO: 398781 - protein, 13 aa, Homo sapiens
  CDR3 for alpha chain variable domain of TCR clone 199391 (TRAV8-3, TRAJ48)
CAVVPFENEKLTF

SEQ ID NO: 398782 - protein, 15 aa, Homo sapiens
  CDR3 for beta chain variable domain of TCR clone 199391 (TRBV11-2, TRBJ2-1)
CASSSPSTRYNEQFF

SEQ ID NO: 398783 - protein, 14 aa, Homo sapiens
  CDR3 for alpha chain variable domain of TCR clone 199392 (TRAV8-3, TRAJ4)
CAEGAAGGYNKLIF

SEQ ID NO: 398784 - protein, 17 aa, Homo sapiens
  CDR3 for beta chain variable domain of TCR clone 199392 (TRBV13, TRBJ2-3)
CASSLSRVAGGRNTQYF

SEQ ID NO: 398785 - protein, 14 aa, Homo sapiens
  CDR3 for alpha chain variable domain of TCR clone 199393 (TRAV3, TRAJ36)
CAVRDGTGVNNLFF

SEQ ID NO: 398786 - protein, 16 aa, Homo sapiens
  CDR3 for beta chain variable domain of TCR clone 199393 (TRBV7-3, TRBJ2-5)
CASIQPGGSVQETQYF

SEQ ID NO: 398787 - protein, 15 aa, Homo sapiens
  CDR3 for alpha chain variable domain of TCR clone 199394 (TRAV21, TRAJ40)
CAVRPQTSGTYKYIF

SEQ ID NO: 398788 - protein, 15 aa, Homo sapiens
  CDR3 for beta chain variable domain of TCR clone 199394 (TRBV6-3, TRBJ2-2)
CASSFLATLTGELFF

SEQ ID NO: 398789 - protein, 13 aa, Homo sapiens
  CDR3 for alpha chain variable domain of TCR clone 199395 (TRAV12-1, TRAJ13)
CVVALLGYQKVTF

SEQ ID NO: 398790 - protein, 13 aa, Homo sapiens
  CDR3 for beta chain variable domain of TCR clone 199395 (TRBV20-1, TRBJ2-5)
CSAILTGQETQYV

SEQ ID NO: 398791 - protein, 14 aa, Homo sapiens
  CDR3 for alpha chain variable domain of TCR clone 199396 (TRAV23/DV6, TRAJ11)
CAALIGGGYSTLTF

SEQ ID NO: 398792 - protein, 13 aa, Homo sapiens
  CDR3 for beta chain variable domain of TCR clone 199396 (TRBV11-3, TRBJ1-1)
RASSLGGNTEAFF

SEQ ID NO: 398793 - protein, 16 aa, Homo sapiens
  CDR3 for alpha chain variable domain of TCR clone 199397 (TRAV3, TRAJ37)
CAVRGKGSGNTGKLIF

SEQ ID NO: 398794 - protein, 15 aa, Homo sapiens
  CDR3 for beta chain variable domain of TCR clone 199397 (TRBV18, TRBJ2-1)
CASSPPRASYNEQFF

SEQ ID NO: 398795 - protein, 14 aa, Homo sapiens
  CDR3 for alpha chain variable domain of TCR clone 199398 (TRAV26-1, TRAJ57)
CIRAGQGGAEKLVF

SEQ ID NO: 398796 - protein, 13 aa, Homo sapiens
  CDR3 for beta chain variable domain of TCR clone 199398 (TRBV19, TRBJ2-7)
CASSLTTSYEQYF

SEQ ID NO: 398797 - protein, 12 aa, Homo sapiens
  CDR3 for alpha chain variable domain of TCR clone 199399 (TRAV12-3, TRAJ40)
CAMSSGTYKYIF

SEQ ID NO: 398798 - protein, 15 aa, Homo sapiens
  CDR3 for beta chain variable domain of TCR clone 199399 (TRBV7-3, TRBJ2-2)
CPSSETGQGTGELFF

SEQ ID NO: 398799 - protein, 15 aa, Homo sapiens
  CDR3 for alpha chain variable domain of TCR clone 199400 (TRAV4, TRAJ39)
CLVGPNNNAGNRLTF

SEQ ID NO: 398800 - protein, 16 aa, Homo sapiens
  CDR3 for beta chain variable domain of TCR clone 199400 (TRBV27, TRBJ2-2)
CASSFRGLVRTGELFF

SEQ ID NO: 398801 - protein, 13 aa, Homo sapiens
  CDR3 for alpha chain variable domain of TCR clone 199401 (TRAV4, TRAJ31)
CLVYRNNNARLMF

SEQ ID NO: 398802 - protein, 15 aa, Homo sapiens
  CDR3 for beta chain variable domain of TCR clone 199401 (TRBV28, TRBJ2-5)
CASSPPWSYQETQYF

SEQ ID NO: 398803 - protein, 20 aa, Homo sapiens
  CDR3 for alpha chain variable domain of TCR clone 199402 (TRAV12-1, TRAJ32)
SVIQPPTSMNYGGATNKLIF

SEQ ID NO: 398804 - protein, 18 aa, Homo sapiens
  CDR3 for beta chain variable domain of TCR clone 199402 (TRBV20-1, TRBJ2-3)
CSASGLAGGPGTTDTQYF

SEQ ID NO: 398805 - protein, 15 aa, Homo sapiens
  CDR3 for alpha chain variable domain of TCR clone 199403 (TRAV23/DV6, TRAJ18)
CAARYRGSTLGRLYF

SEQ ID NO: 398806 - protein, 17 aa, Homo sapiens
  CDR3 for beta chain variable domain of TCR clone 199403 (TRBV24-1, TRBJ2-1)
CATSDVSTSGTYNEQFF

SEQ ID NO: 398807 - protein, 14 aa, Homo sapiens
  CDR3 for alpha chain variable domain of TCR clone 199404 (TRAV9-2, TRAJ11)
CALSFSSGYSTLTF

SEQ ID NO: 398808 - protein, 14 aa, Homo sapiens
  CDR3 for beta chain variable domain of TCR clone 199404 (TRBV11-2, TRBJ2-5)
CASRPLAGRETQYF

SEQ ID NO: 398809 - protein, 14 aa, Homo sapiens
  CDR3 for alpha chain variable domain of TCR clone 199405 (TRAV3, TRAJ21)
CAVESQANFKKFYF

SEQ ID NO: 398810 - protein, 18 aa, Homo sapiens
  CDR3 for beta chain variable domain of TCR clone 199405 (TRBV7-9, TRBJ2-1)
CASSLAVSGTSGRNEQFF

SEQ ID NO: 398811 - protein, 11 aa, Homo sapiens
  CDR3 for alpha chain variable domain of TCR clone 199406 (TRAV17, TRAJ29)
CYVATDTPLVF

SEQ ID NO: 398812 - protein, 12 aa, Homo sapiens
  CDR3 for beta chain variable domain of TCR clone 199406 (TRBV7-9, TRBJ2-7)
CASSSKREEQYF

SEQ ID NO: 398813 - protein, 18 aa, Homo sapiens
  CDR3 for alpha chain variable domain of TCR clone 199407 (TRAV29/DV5, TRAJ52)
CAAGFRGAGGTSYGKLTF

SEQ ID NO: 398814 - protein, 15 aa, Homo sapiens
  CDR3 for beta chain variable domain of TCR clone 199407 (TRBV11-3, TRBJ2-3)
CASLKDGREGDTQYF

SEQ ID NO: 398815 - protein, 17 aa, Homo sapiens
  CDR3 for alpha chain variable domain of TCR clone 199408 (TRAV4, TRAJ13)
CLVGVQGSSGGYQKVTF

SEQ ID NO: 398816 - protein, 13 aa, Homo sapiens
  CDR3 for beta chain variable domain of TCR clone 199408 (TRBV10-3, TRBJ2-7)
CASKLAVNYEQYV

SEQ ID NO: 398817 - protein, 16 aa, Homo sapiens
  CDR3 for alpha chain variable domain of TCR clone 199409 (TRAV8-4, TRAJ9)
CAVTFNPGGFKNYLLS

SEQ ID NO: 398818 - protein, 15 aa, Homo sapiens
  CDR3 for beta chain variable domain of TCR clone 199409 (TRBV7-9, TRBJ2-2)
CASSPEAGAGGELFF

SEQ ID NO: 398819 - protein, 12 aa, Homo sapiens
  CDR3 for alpha chain variable domain of TCR clone 199410 (TRAV13-1, TRAJ21)
CAAKEGFNKFYF

SEQ ID NO: 398820 - protein, 13 aa, Homo sapiens
  CDR3 for beta chain variable domain of TCR clone 199410 (TRBV19, TRBJ2-1)
CQSDFRLSGEQFF

SEQ ID NO: 398821 - protein, 17 aa, Homo sapiens
  CDR3 for alpha chain variable domain of TCR clone 199411 (TRAV8-6, TRAJ58)
CAVSSWGGETSGPRLTF

SEQ ID NO: 398822 - protein, 14 aa, Homo sapiens
  CDR3 for beta chain variable domain of TCR clone 199411 (TRBV4-2, TRBJ2-1)
CASGLDRAYNEQFF

SEQ ID NO: 398823 - protein, 14 aa, Homo sapiens
  CDR3 for alpha chain variable domain of TCR clone 199412 (TRAV20, TRAJ56)
CAVQFGGANSKLTF

SEQ ID NO: 398824 - protein, 14 aa, Homo sapiens
  CDR3 for beta chain variable domain of TCR clone 199412 (TRBV11-2, TRBJ2-7)
CASSLGAGAYEQYF

SEQ ID NO: 398825 - protein, 15 aa, Homo sapiens
  CDR3 for alpha chain variable domain of TCR clone 199413 (TRAV8-3, TRAJ45)
CASSYSGGGADGLTF

SEQ ID NO: 398826 - protein, 12 aa, Homo sapiens
  CDR3 for beta chain variable domain of TCR clone 199413 (TRBV7-2, TRBJ2-1)
CASSLRQNEQFF

SEQ ID NO: 398827 - protein, 13 aa, Homo sapiens
  CDR3 for alpha chain variable domain of TCR clone 199414 (TRAV24, TRAJ22)
CAFGSGSARQLTF

SEQ ID NO: 398828 - protein, 16 aa, Homo sapiens
  CDR3 for beta chain variable domain of TCR clone 199414 (TRBV4-2, TRBJ2-5)
CASSQELVGSQETQYF

SEQ ID NO: 398829 - protein, 12 aa, Homo sapiens
  CDR3 for alpha chain variable domain of TCR clone 199415 (TRAV30, TRAJ43)
CGTEERGNDMRF

SEQ ID NO: 398830 - protein, 16 aa, Homo sapiens
  CDR3 for beta chain variable domain of TCR clone 199415 (TRBV2, TRBJ2-1)
CASRSPAGGKYNEQFF

SEQ ID NO: 398831 - protein, 13 aa, Homo sapiens
  CDR3 for alpha chain variable domain of TCR clone 199416 (TRAV13-1, TRAJ5)
RAASDTGRRALTF

SEQ ID NO: 398832 - protein, 20 aa, Homo sapiens
  CDR3 for beta chain variable domain of TCR clone 199416 (TRBV4-2, TRBJ2-7)
CASSQASGGNLRAVLRAGHQ

SEQ ID NO: 398833 - protein, 14 aa, Homo sapiens
  CDR3 for alpha chain variable domain of TCR clone 199417 (TRAV20, TRAJ29)
CAVQAWVGNTPLVF

SEQ ID NO: 398834 - protein, 12 aa, Homo sapiens
  CDR3 for beta chain variable domain of TCR clone 199417 (TRBV7-8, TRBJ2-7)
CASSLGDREQYF

SEQ ID NO: 398835 - protein, 12 aa, Homo sapiens
  CDR3 for alpha chain variable domain of TCR clone 199418 (TRAV13-1, TRAJ20)
CAASRGDYKLSF

SEQ ID NO: 398836 - protein, 14 aa, Homo sapiens
  CDR3 for beta chain variable domain of TCR clone 199418 (TRBV12-4, TRBJ1-1)
CASSLGTGGTEAFS

SEQ ID NO: 398837 - protein, 14 aa, Homo sapiens
  CDR3 for alpha chain variable domain of TCR clone 199419 (TRAV38-1, TRAJ29)
CAFITPSGNTPLVF

SEQ ID NO: 398838 - protein, 12 aa, Homo sapiens
  CDR3 for beta chain variable domain of TCR clone 199419 (TRBV24-1, TRBJ1-1)
CATSDSDRGAFF

SEQ ID NO: 398839 - protein, 14 aa, Homo sapiens
  CDR3 for alpha chain variable domain of TCR clone 199420 (TRAV23/DV6, TRAJ8)
CAASKATGFQKLVI

SEQ ID NO: 398840 - protein, 15 aa, Homo sapiens
  CDR3 for beta chain variable domain of TCR clone 199420 (TRBV28, TRBJ2-3)
CASSPDRQGANTQYF

SEQ ID NO: 398841 - protein, 22 aa, Homo sapiens
  CDR3 for alpha chain variable domain of TCR clone 199421 (TRAV12-2, TRAJ53)
SPVIQPPTSVPPILSRNYKLTF

SEQ ID NO: 398842 - protein, 13 aa, Homo sapiens
  CDR3 for beta chain variable domain of TCR clone 199421 (TRBV7-7, TRBJ2-3)
CASSLSRADTQYF

SEQ ID NO: 398843 - protein, 12 aa, Homo sapiens
  CDR3 for alpha chain variable domain of TCR clone 199422 (TRAV12-1, TRAJ40)
CVFYSGTYKYIF

SEQ ID NO: 398844 - protein, 18 aa, Homo sapiens
  CDR3 for beta chain variable domain of TCR clone 199422 (TRBV12-4, TRBJ2-2)
CASSLVASTRGRTGELFF

SEQ ID NO: 398845 - protein, 17 aa, Homo sapiens
  CDR3 for alpha chain variable domain of TCR clone 199423 (TRAV38-1, TRAJ28)
CAFMKPTSGAGSYQLTF

SEQ ID NO: 398846 - protein, 14 aa, Homo sapiens
  CDR3 for beta chain variable domain of TCR clone 199423 (TRBV19, TRBJ2-1)
CASPTFVLSGEQFF

SEQ ID NO: 398847 - protein, 15 aa, Homo sapiens
  CDR3 for alpha chain variable domain of TCR clone 199424 (TRAV2, TRAJ9)
CAVEDRGTGGFKTIF

SEQ ID NO: 398848 - protein, 11 aa, Homo sapiens
  CDR3 for beta chain variable domain of TCR clone 199424 (TRBV11-2, TRBJ2-2)
CASSLPGELFF

SEQ ID NO: 398849 - protein, 20 aa, Homo sapiens
  CDR3 for alpha chain variable domain of TCR clone 199425 (TRAV1-1, TRAJ4)
CLLLLRCEGFLSGGYNKLIF

SEQ ID NO: 398850 - protein, 14 aa, Homo sapiens
  CDR3 for beta chain variable domain of TCR clone 199425 (TRBV19, TRBJ2-7)
CASSVDSESYEQYF

SEQ ID NO: 398851 - protein, 17 aa, Homo sapiens
  CDR3 for alpha chain variable domain of TCR clone 199426 (TRAV3, TRAJ6)
CAVSDGPRAGGSSIPTF

SEQ ID NO: 398852 - protein, 14 aa, Homo sapiens
  CDR3 for beta chain variable domain of TCR clone 199426 (TRBV19, TRBJ2-1)
CASPTFVLSGEQFF

SEQ ID NO: 398853 - protein, 16 aa, Homo sapiens
  CDR3 for alpha chain variable domain of TCR clone 199427 (TRAV26-1, TRAJ37)
CIVRGDGSGNTGKLIF

SEQ ID NO: 398854 - protein, 15 aa, Homo sapiens
  CDR3 for beta chain variable domain of TCR clone 199427 (TRBV7-3, TRBJ2-1)
CASSPTAGGEVEQFF

SEQ ID NO: 398855 - protein, 16 aa, Homo sapiens
  CDR3 for alpha chain variable domain of TCR clone 199428 (TRAV23/DV6, TRAJ9)
CAASIGGNTGGFKTIF

SEQ ID NO: 398856 - protein, 13 aa, Homo sapiens
  CDR3 for beta chain variable domain of TCR clone 199428 (TRBV7-9, TRBJ1-2)
CASILKQNYGYTF

SEQ ID NO: 398857 - protein, 15 aa, Homo sapiens
  CDR3 for alpha chain variable domain of TCR clone 199429 (TRAV26-1, TRAJ39)
CIVRDGSNAGNMLTF

SEQ ID NO: 398858 - protein, 14 aa, Homo sapiens
  CDR3 for beta chain variable domain of TCR clone 199429 (TRBV10-3, TRBJ1-2)
CDIRAGTGDYGYTF

SEQ ID NO: 398859 - protein, 13 aa, Homo sapiens
  CDR3 for alpha chain variable domain of TCR clone 199430 (TRAV26-1, )
CIVSHRVEGFWNQ

SEQ ID NO: 398860 - protein, 14 aa, Homo sapiens
  CDR3 for beta chain variable domain of TCR clone 199430 (TRBV20-1, TRBJ2-7)
CSAWTALSSSEQYF

SEQ ID NO: 398861 - protein, 11 aa, Homo sapiens
  CDR3 for alpha chain variable domain of TCR clone 199431 (TRAV13-2, TRAJ43)
CAVPDPNDMRF

SEQ ID NO: 398862 - protein, 15 aa, Homo sapiens
  CDR3 for beta chain variable domain of TCR clone 199431 (TRBV6-5, TRBJ1-2)
CASSYSQAFNYGYTF

SEQ ID NO: 398863 - protein, 12 aa, Homo sapiens
  CDR3 for alpha chain variable domain of TCR clone 199432 (TRAV21, TRAJ33)
CAKMVSNYQLIW

SEQ ID NO: 398864 - protein, 14 aa, Homo sapiens
  CDR3 for beta chain variable domain of TCR clone 199432 (TRBV2, TRBJ2-7)
CASSLTSGGYEQYF

SEQ ID NO: 398865 - protein, 13 aa, Homo sapiens
  CDR3 for alpha chain variable domain of TCR clone 199433 (TRAV8-6, TRAJ5)
CALLDTGRRALTF

SEQ ID NO: 398866 - protein, 12 aa, Homo sapiens
  CDR3 for beta chain variable domain of TCR clone 199433 (TRBV7-9, TRBJ1-6)
CASSASESPLHF

SEQ ID NO: 398867 - protein, 13 aa, Homo sapiens
  CDR3 for alpha chain variable domain of TCR clone 199434 (TRAV13-1, TRAJ52)
CAAGGTSYGKLTF

SEQ ID NO: 398868 - protein, 13 aa, Homo sapiens
  CDR3 for beta chain variable domain of TCR clone 199434 (TRBV7-9, TRBJ1-2)
CASSLKQNYGYTF

SEQ ID NO: 398869 - protein, 13 aa, Homo sapiens
  CDR3 for alpha chain variable domain of TCR clone 199435 (TRAV8-1, TRAJ28)
CAVSGAGSYQLTF

SEQ ID NO: 398870 - protein, 14 aa, Homo sapiens
  CDR3 for beta chain variable domain of TCR clone 199435 (TRBV7-2, TRBJ2-2)
CAGRGQGAAGELFF

SEQ ID NO: 398871 - protein, 14 aa, Homo sapiens
  CDR3 for alpha chain variable domain of TCR clone 199436 (TRAV17, TRAJ42)
CATAGGGSKGNLIF

SEQ ID NO: 398872 - protein, 14 aa, Homo sapiens
  CDR3 for beta chain variable domain of TCR clone 199436 (TRBV7-2, TRBJ2-3)
CASRFSRPSDTQYF

SEQ ID NO: 398873 - protein, 18 aa, Homo sapiens
  CDR3 for alpha chain variable domain of TCR clone 199437 (TRAV17, TRAJ45)
CATSLDLYSGGGADGLTF

SEQ ID NO: 398874 - protein, 11 aa, Homo sapiens
  CDR3 for beta chain variable domain of TCR clone 199437 (TRBV11-2, TRBJ2-2)
CASSLPGELFF

SEQ ID NO: 398875 - protein, 13 aa, Homo sapiens
  CDR3 for alpha chain variable domain of TCR clone 199438 (TRAV8-3, TRAJ9)
CCGLNTGGFKTIF

SEQ ID NO: 398876 - protein, 14 aa, Homo sapiens
  CDR3 for beta chain variable domain of TCR clone 199438 (TRBV7-3, TRBJ2-2)
CASSSGGYTGELFF

SEQ ID NO: 398877 - protein, 17 aa, Homo sapiens
  CDR3 for alpha chain variable domain of TCR clone 199439 (TRAV13-1, TRAJ31)
CAPRDRPMLGDGTQLVV

SEQ ID NO: 398878 - protein, 12 aa, Homo sapiens
  CDR3 for beta chain variable domain of TCR clone 199439 (TRBV7-9, TRBJ2-7)
CASSLEGYEQYF

SEQ ID NO: 398879 - protein, 13 aa, Homo sapiens
  CDR3 for alpha chain variable domain of TCR clone 199440 (TRAV8-3, TRAJ36)
CAVGATGANNLFF

SEQ ID NO: 398880 - protein, 15 aa, Homo sapiens
  CDR3 for beta chain variable domain of TCR clone 199440 (TRBV7-2, TRBJ1-2)
CASSPRAGWNCGYTF

SEQ ID NO: 398881 - protein, 16 aa, Homo sapiens
  CDR3 for alpha chain variable domain of TCR clone 199441 (TRAV2, TRAJ4)
CAVEDRFSGGYNKLIF

SEQ ID NO: 398882 - protein, 17 aa, Homo sapiens
  CDR3 for beta chain variable domain of TCR clone 199441 (TRBV13, TRBJ2-3)
CASSLSRVAGGRNTQYF

SEQ ID NO: 398883 - protein, 10 aa, Homo sapiens
  CDR3 for alpha chain variable domain of TCR clone 199442 (TRAV36/DV7, TRAJ37)
SSSNTGKLIF

SEQ ID NO: 398884 - protein, 16 aa, Homo sapiens
  CDR3 for beta chain variable domain of TCR clone 199442 (TRBV3-1, TRBJ2-5)
CASSPGQFNGFGTQYF

SEQ ID NO: 398885 - protein, 17 aa, Homo sapiens
  CDR3 for alpha chain variable domain of TCR clone 199443 (TRAV14/DV4, TRAJ28)
CAMRGTSSGAGSYQFTF

SEQ ID NO: 398886 - protein, 13 aa, Homo sapiens
  CDR3 for beta chain variable domain of TCR clone 199443 (TRBV28, TRBJ2-5)
CASSFAGGETQYF

SEQ ID NO: 398887 - protein, 14 aa, Homo sapiens
  CDR3 for alpha chain variable domain of TCR clone 199444 (TRAV13-2, TRAJ17)
CAENSKAAGHKLTF

SEQ ID NO: 398888 - protein, 11 aa, Homo sapiens
  CDR3 for beta chain variable domain of TCR clone 199444 (TRBV6-3, TRBJ2-3)
CATGQADTQYF

SEQ ID NO: 398889 - protein, 14 aa, Homo sapiens
  CDR3 for alpha chain variable domain of TCR clone 199445 (TRAV29/DV5, TRAJ36)
CAARRKTGANNLLL

SEQ ID NO: 398890 - protein, 14 aa, Homo sapiens
  CDR3 for beta chain variable domain of TCR clone 199445 (TRBV12-5, TRBJ2-5)
CASGSRTHQETQYF

SEQ ID NO: 398891 - protein, 11 aa, Homo sapiens
  CDR3 for alpha chain variable domain of TCR clone 199446 (TRAV1-2, TRAJ40)
CAVPGTYKYIF

SEQ ID NO: 398892 - protein, 11 aa, Homo sapiens
  CDR3 for beta chain variable domain of TCR clone 199446 (TRBV29-1, TRBJ2-7)
VGTSGSYEKYF

SEQ ID NO: 398893 - protein, 14 aa, Homo sapiens
  CDR3 for alpha chain variable domain of TCR clone 199447 (TRAV13-1, TRAJ35)
CAASKGGFGNVLHF

SEQ ID NO: 398894 - protein, 15 aa, Homo sapiens
  CDR3 for beta chain variable domain of TCR clone 199447 (TRBV20-1, TRBJ2-7)
CSARDRVSGMDEQYF

SEQ ID NO: 398895 - protein, 15 aa, Homo sapiens
  CDR3 for alpha chain variable domain of TCR clone 199448 (TRAV2, TRAJ44)
CAVEAYTGSASKLTF

SEQ ID NO: 398896 - protein, 14 aa, Homo sapiens
  CDR3 for beta chain variable domain of TCR clone 199448 (TRBV11-2, TRBJ2-1)
CASSPGSRDNEQFF

SEQ ID NO: 398897 - protein, 13 aa, Homo sapiens
  CDR3 for alpha chain variable domain of TCR clone 199449 (TRAV21, TRAJ15)
CAVRNQAGTALIF

SEQ ID NO: 398898 - protein, 16 aa, Homo sapiens
  CDR3 for beta chain variable domain of TCR clone 199449 (TRBV20-1, TRBJ2-5)
CSPGVTSGGYMETQYF

SEQ ID NO: 398899 - protein, 13 aa, Homo sapiens
  CDR3 for alpha chain variable domain of TCR clone 199450 (TRAV2, TRAJ40)
CAVVTSGTYKYIF

SEQ ID NO: 398900 - protein, 16 aa, Homo sapiens
  CDR3 for beta chain variable domain of TCR clone 199450 (TRBV18, TRBJ1-3)
CASSLGILNGENTIYF

SEQ ID NO: 398901 - protein, 13 aa, Homo sapiens
  CDR3 for alpha chain variable domain of TCR clone 199451 (TRAV17, TRAJ31)
CATDENNNARLMF

SEQ ID NO: 398902 - protein, 14 aa, Homo sapiens
  CDR3 for beta chain variable domain of TCR clone 199451 (TRBV11-2, TRBJ2-1)
CASGPSRQGGGQFF

SEQ ID NO: 398903 - protein, 12 aa, Homo sapiens
  CDR3 for alpha chain variable domain of TCR clone 199452 (TRAV3, TRAJ43)
CAVRDPNNDVRF

SEQ ID NO: 398904 - protein, 13 aa, Homo sapiens
  CDR3 for beta chain variable domain of TCR clone 199452 (TRBV7-9, TRBJ1-2)
CASSLKQNYGYTF

SEQ ID NO: 398905 - protein, 12 aa, Homo sapiens
  CDR3 for alpha chain variable domain of TCR clone 199453 (TRAV8-3, TRAJ20)
CAVGANDYKLSF

SEQ ID NO: 398906 - protein, 13 aa, Homo sapiens
  CDR3 for beta chain variable domain of TCR clone 199453 (TRBV24-1, TRBJ2-1)
CATSAGPYNEQFC

SEQ ID NO: 398907 - protein, 13 aa, Homo sapiens
  CDR3 for alpha chain variable domain of TCR clone 199454 (TRAV2, TRAJ40)
CAVVTSGTYKYIF

SEQ ID NO: 398908 - protein, 14 aa, Homo sapiens
  CDR3 for beta chain variable domain of TCR clone 199454 (TRBV19, TRBJ2-1)
CASPTFDLGGEQFF

SEQ ID NO: 398909 - protein, 18 aa, Homo sapiens
  CDR3 for alpha chain variable domain of TCR clone 199455 (TRAV12-3, TRAJ52)
CAMSRTNAGGTSYGKLTF

SEQ ID NO: 398910 - protein, 12 aa, Homo sapiens
  CDR3 for beta chain variable domain of TCR clone 199455 (TRBV7-9, TRBJ2-7)
CAISIKREEQYF

SEQ ID NO: 398911 - protein, 14 aa, Homo sapiens
  CDR3 for alpha chain variable domain of TCR clone 199456 (TRAV17, TRAJ57)
CATDPQGGSAKLVF

SEQ ID NO: 398912 - protein, 14 aa, Homo sapiens
  CDR3 for beta chain variable domain of TCR clone 199456 (TRBV5-8, TRBJ2-3)
CASSLGQGTDTQYF

SEQ ID NO: 398913 - protein, 13 aa, Homo sapiens
  CDR3 for alpha chain variable domain of TCR clone 199457 (TRAV2, TRAJ21)
CAVDSYNFNKFYF

SEQ ID NO: 398914 - protein, 13 aa, Homo sapiens
  CDR3 for beta chain variable domain of TCR clone 199457 (TRBV4-1, TRBJ2-1)
CASSQAGGDEQFF

SEQ ID NO: 398915 - protein, 14 aa, Homo sapiens
  CDR3 for alpha chain variable domain of TCR clone 199458 (TRAV12-3, TRAJ9)
CAMSVETGGFKTIF

SEQ ID NO: 398916 - protein, 14 aa, Homo sapiens
  CDR3 for beta chain variable domain of TCR clone 199458 (TRBV7-3, TRBJ2-7)
CASRSQGAAYEQYF

SEQ ID NO: 398917 - protein, 13 aa, Homo sapiens
  CDR3 for alpha chain variable domain of TCR clone 199459 (TRAV8-3, TRAJ5)
CAVGPRGRRALTF

SEQ ID NO: 398918 - protein, 16 aa, Homo sapiens
  CDR3 for beta chain variable domain of TCR clone 199459 (TRBV11-3, TRBJ2-3)
CASSPGGLLGIDTQYF

SEQ ID NO: 398919 - protein, 15 aa, Homo sapiens
  CDR3 for alpha chain variable domain of TCR clone 199460 (TRAV26-1, TRAJ44)
CIVRSGTGTASKLTF

SEQ ID NO: 398920 - protein, 15 aa, Homo sapiens
  CDR3 for beta chain variable domain of TCR clone 199460 (TRBV7-6, TRBJ2-1)
CASSSLAGEGNEQFF

SEQ ID NO: 398921 - protein, 15 aa, Homo sapiens
  CDR3 for alpha chain variable domain of TCR clone 199461 (TRAV2, TRAJ9)
CAVAALNTGGFKTIF

SEQ ID NO: 398922 - protein, 11 aa, Homo sapiens
  CDR3 for beta chain variable domain of TCR clone 199461 (TRBV11-2, TRBJ2-2)
CASSLPGELFF

SEQ ID NO: 398923 - protein, 13 aa, Homo sapiens
  CDR3 for alpha chain variable domain of TCR clone 199462 (TRAV29/DV5, TRAJ31)
CAASRNSNARLMF

SEQ ID NO: 398924 - protein, 12 aa, Homo sapiens
  CDR3 for beta chain variable domain of TCR clone 199462 (TRBV14, TRBJ2-7)
CASSSLKGEQYF

SEQ ID NO: 398925 - protein, 12 aa, Homo sapiens
  CDR3 for alpha chain variable domain of TCR clone 199463 (TRAV8-3, TRAJ34)
LASGYSTDKLIF

SEQ ID NO: 398926 - protein, 13 aa, Homo sapiens
  CDR3 for beta chain variable domain of TCR clone 199463 (TRBV6-4, TRBJ2-3)
CASSVSWADTQYF

SEQ ID NO: 398927 - protein, 13 aa, Homo sapiens
  CDR3 for alpha chain variable domain of TCR clone 199464 (TRAV12-2, TRAJ47)
CAVTMEYGNKLVF

SEQ ID NO: 398928 - protein, 13 aa, Homo sapiens
  CDR3 for beta chain variable domain of TCR clone 199464 (TRBV4-2, TRBJ1-1)
CASSQAGNTEAFF

SEQ ID NO: 398929 - protein, 13 aa, Homo sapiens
  CDR3 for alpha chain variable domain of TCR clone 199465 (TRAV26-1, TRAJ54)
CIVRVKGAQKLVF

SEQ ID NO: 398930 - protein, 17 aa, Homo sapiens
  CDR3 for beta chain variable domain of TCR clone 199465 (TRBV7-8, TRBJ2-6)
CASSAGTGGAGANVLTF

SEQ ID NO: 398931 - protein, 15 aa, Homo sapiens
  CDR3 for alpha chain variable domain of TCR clone 199466 (TRAV3, TRAJ17)
CAVRDTGAAGNKLTF

SEQ ID NO: 398932 - protein, 14 aa, Homo sapiens
  CDR3 for beta chain variable domain of TCR clone 199466 (TRBV7-6, TRBJ2-3)
CASSLGTVTDTQYF

SEQ ID NO: 398933 - protein, 18 aa, Homo sapiens
  CDR3 for alpha chain variable domain of TCR clone 199467 (TRAV8-4, TRAJ52)
CAVTRANAGGTSYGKLTF

SEQ ID NO: 398934 - protein, 15 aa, Homo sapiens
  CDR3 for beta chain variable domain of TCR clone 199467 (TRBV20-1, TRBJ2-7)
CSARDRVSGMDEQYF

SEQ ID NO: 398935 - protein, 17 aa, Homo sapiens
  CDR3 for alpha chain variable domain of TCR clone 199468 (TRAV12-1, TRAJ13)
CVVNKRGEFWGLPESYL

SEQ ID NO: 398936 - protein, 16 aa, Homo sapiens
  CDR3 for beta chain variable domain of TCR clone 199468 (TRBV7-3, TRBJ2-2)
CASSLKRGTLSGELFF

SEQ ID NO: 398937 - protein, 14 aa, Homo sapiens
  CDR3 for alpha chain variable domain of TCR clone 199469 (TRAV8-3, TRAJ21)
CAVDARDNFNKLYF

SEQ ID NO: 398938 - protein, 16 aa, Homo sapiens
  CDR3 for beta chain variable domain of TCR clone 199469 (TRBV20-1, TRBJ2-1)
CSARDLAGHSYNEQFF

SEQ ID NO: 398939 - protein, 12 aa, Homo sapiens
  CDR3 for alpha chain variable domain of TCR clone 199470 (TRAV12-1, TRAJ40)
CVFYSGTYKYIF

SEQ ID NO: 398940 - protein, 12 aa, Homo sapiens
  CDR3 for beta chain variable domain of TCR clone 199470 (TRBV7-3, TRBJ2-1)
WASSCINNEQFF

SEQ ID NO: 398941 - protein, 14 aa, Homo sapiens
  CDR3 for alpha chain variable domain of TCR clone 199471 (TRAV1-2, TRAJ16)
CAVNRFSDGQKLLF

SEQ ID NO: 398942 - protein, 14 aa, Homo sapiens
  CDR3 for beta chain variable domain of TCR clone 199471 (TRBV7-9, TRBJ2-7)
CASSLAPSLGEQYV

SEQ ID NO: 398943 - protein, 16 aa, Homo sapiens
  CDR3 for alpha chain variable domain of TCR clone 199472 (TRAV30, TRAJ24)
CGIEMVDADSWGKFQF

SEQ ID NO: 398944 - protein, 14 aa, Homo sapiens
  CDR3 for beta chain variable domain of TCR clone 199472 (TRBV12-5, TRBJ2-5)
CASGSRTHQETQYF

SEQ ID NO: 398945 - protein, 15 aa, Homo sapiens
  CDR3 for alpha chain variable domain of TCR clone 199473 (TRAV3, TRAJ5)
CAVRDLDTGRRALTF

SEQ ID NO: 398946 - protein, 19 aa, Homo sapiens
  CDR3 for beta chain variable domain of TCR clone 199473 (TRBV28, TRBJ2-7)
CASSYSGTSRLGWVYEQYF

SEQ ID NO: 398947 - protein, 12 aa, Homo sapiens
  CDR3 for alpha chain variable domain of TCR clone 199474 (TRAV12-3, TRAJ17)
CAMTLTGNKLTF

SEQ ID NO: 398948 - protein, 14 aa, Homo sapiens
  CDR3 for beta chain variable domain of TCR clone 199474 (TRBV20-1, TRBJ2-1)
CSAHPGLPYNEQFF

SEQ ID NO: 398949 - protein, 14 aa, Homo sapiens
  CDR3 for alpha chain variable domain of TCR clone 199475 (TRAV10, TRAJ6)
CVVSFSGGSYIPTF

SEQ ID NO: 398950 - protein, 14 aa, Homo sapiens
  CDR3 for beta chain variable domain of TCR clone 199475 (TRBV7-2, TRBJ2-5)
CASSFTQGQETQYF

SEQ ID NO: 398951 - protein, 17 aa, Homo sapiens
  CDR3 for alpha chain variable domain of TCR clone 199476 (TRAV3, TRAJ6)
CAVRDGPRAGGSYITTF

SEQ ID NO: 398952 - protein, 16 aa, Homo sapiens
  CDR3 for beta chain variable domain of TCR clone 199476 (TRBV7-2, TRBJ2-1)
CASSLEGYRSYNEQFF

SEQ ID NO: 398953 - protein, 13 aa, Homo sapiens
  CDR3 for alpha chain variable domain of TCR clone 199477 (TRAV8-4, TRAJ49)
CAVRTLTGNQFYF

SEQ ID NO: 398954 - protein, 16 aa, Homo sapiens
  CDR3 for beta chain variable domain of TCR clone 199477 (TRBV4-1, TRBJ2-3)
CASSQSTSGAEDTQYF

SEQ ID NO: 398955 - protein, 14 aa, Homo sapiens
  CDR3 for alpha chain variable domain of TCR clone 199478 (TRAV12-1, TRAJ17)
CVVNYKAAGNKLTF

SEQ ID NO: 398956 - protein, 15 aa, Homo sapiens
  CDR3 for beta chain variable domain of TCR clone 199478 (TRBV19, TRBJ2-4)
CASHGGGATKNIQYF

SEQ ID NO: 398957 - protein, 12 aa, Homo sapiens
  CDR3 for alpha chain variable domain of TCR clone 199479 (TRAV3, TRAJ3)
CAERQGQQCFQD

SEQ ID NO: 398958 - protein, 18 aa, Homo sapiens
  CDR3 for beta chain variable domain of TCR clone 199479 (TRBV25-1, TRBJ1-2)
CASSGLQNGQGLIFGYTF

SEQ ID NO: 398959 - protein, 13 aa, Homo sapiens
  CDR3 for alpha chain variable domain of TCR clone 199480 (TRAV35, TRAJ57)
CARSQGGAEKLVF

SEQ ID NO: 398960 - protein, 14 aa, Homo sapiens
  CDR3 for beta chain variable domain of TCR clone 199480 (TRBV25-1, TRBJ1-1)
CASTHLGGNTEAFF

SEQ ID NO: 398961 - protein, 15 aa, Homo sapiens
  CDR3 for alpha chain variable domain of TCR clone 199481 (TRAV26-1, TRAJ44)
CIVRIGTGTASKLTF

SEQ ID NO: 398962 - protein, 16 aa, Homo sapiens
  CDR3 for beta chain variable domain of TCR clone 199481 (TRBV11-2, TRBJ2-2)
CASSLRTGNLIGELFF

SEQ ID NO: 398963 - protein, 14 aa, Homo sapiens
  CDR3 for alpha chain variable domain of TCR clone 199482 (TRAV3, TRAJ5)
CCEGQENGRRALTF

SEQ ID NO: 398964 - protein, 15 aa, Homo sapiens
  CDR3 for beta chain variable domain of TCR clone 199482 (TRBV7-8, TRBJ2-1)
CASSLADSLYNEQFF

SEQ ID NO: 398965 - protein, 15 aa, Homo sapiens
  CDR3 for alpha chain variable domain of TCR clone 199483 (TRAV8-3, TRAJ37)
CAVGAASGNKGKLIF

SEQ ID NO: 398966 - protein, 15 aa, Homo sapiens
  CDR3 for beta chain variable domain of TCR clone 199483 (TRBV20-1, TRBJ2-3)
CSATGNRGPADTQYF

SEQ ID NO: 398967 - protein, 14 aa, Homo sapiens
  CDR3 for alpha chain variable domain of TCR clone 199484 (TRAV12-1, TRAJ17)
CVVNYKAAGNKLTF

SEQ ID NO: 398968 - protein, 15 aa, Homo sapiens
  CDR3 for beta chain variable domain of TCR clone 199484 (TRBV7-9, TRBJ1-4)
RASSRTGGFNEKLFF

SEQ ID NO: 398969 - protein, 12 aa, Homo sapiens
  CDR3 for alpha chain variable domain of TCR clone 199485 (TRAV1-1, TRAJ39)
CAVPVVGNMLTF

SEQ ID NO: 398970 - protein, 15 aa, Homo sapiens
  CDR3 for beta chain variable domain of TCR clone 199485 (TRBV19, TRBJ1-6)
CASSTQGAVGLPLHF

SEQ ID NO: 398971 - protein, 12 aa, Homo sapiens
  CDR3 for alpha chain variable domain of TCR clone 199486 (TRAV27, TRAJ9)
CAGDSGGFKTIF

SEQ ID NO: 398972 - protein, 18 aa, Homo sapiens
  CDR3 for beta chain variable domain of TCR clone 199486 (TRBV10-2, TRBJ2-2)
CISAPAVHRQADAGELFF

SEQ ID NO: 398973 - protein, 15 aa, Homo sapiens
  CDR3 for alpha chain variable domain of TCR clone 199487 (TRAV35, TRAJ40)
SAGQLGTSGTYKYIF

SEQ ID NO: 398974 - protein, 14 aa, Homo sapiens
  CDR3 for beta chain variable domain of TCR clone 199487 (TRBV7-3, TRBJ2-1)
CASSLAGGTNEQFF

SEQ ID NO: 398975 - protein, 10 aa, Homo sapiens
  CDR3 for alpha chain variable domain of TCR clone 199488 (TRAV12-2, TRAJ43)
FAVKILSMRF

SEQ ID NO: 398976 - protein, 14 aa, Homo sapiens
  CDR3 for beta chain variable domain of TCR clone 199488 (TRBV11-2, TRBJ2-7)
CASSLGNSLYEQYF

SEQ ID NO: 398977 - protein, 13 aa, Homo sapiens
  CDR3 for alpha chain variable domain of TCR clone 199489 (TRAV12-1, TRAJ16)
CVVNGPDGQKLLF

SEQ ID NO: 398978 - protein, 13 aa, Homo sapiens
  CDR3 for beta chain variable domain of TCR clone 199489 (TRBV2, TRBJ1-1)
RARNPTGGFHAFI

SEQ ID NO: 398979 - protein, 13 aa, Homo sapiens
  CDR3 for alpha chain variable domain of TCR clone 199490 (TRAV12-2, TRAJ24)
CAVSTDSWGKLEF

SEQ ID NO: 398980 - protein, 14 aa, Homo sapiens
  CDR3 for beta chain variable domain of TCR clone 199490 (TRBV25-1, TRBJ1-1)
CASTHLGGNTEAFF

SEQ ID NO: 398981 - protein, 16 aa, Homo sapiens
  CDR3 for alpha chain variable domain of TCR clone 199491 (TRAV3, TRAJ10)
CAVRDMRAGGGNKLTF

SEQ ID NO: 398982 - protein, 15 aa, Homo sapiens
  CDR3 for beta chain variable domain of TCR clone 199491 (TRBV20-1, TRBJ2-1)
CSASSAGCSYNEQFF

SEQ ID NO: 398983 - protein, 14 aa, Homo sapiens
  CDR3 for alpha chain variable domain of TCR clone 199492 (TRAV14/DV4, TRAJ34)
CEMREGRPHRQAHL

SEQ ID NO: 398984 - protein, 14 aa, Homo sapiens
  CDR3 for beta chain variable domain of TCR clone 199492 (TRBV19, TRBJ2-1)
CASPTVVLSGEQFF

SEQ ID NO: 398985 - protein, 14 aa, Homo sapiens
  CDR3 for alpha chain variable domain of TCR clone 199493 (TRAV17, TRAJ57)
CAADPQGGSEKLVF

SEQ ID NO: 398986 - protein, 18 aa, Homo sapiens
  CDR3 for beta chain variable domain of TCR clone 199493 (TRBV6-6, TRBJ1-3)
CASSYSKWDSISGNTIYF

SEQ ID NO: 398987 - protein, 12 aa, Homo sapiens
  CDR3 for alpha chain variable domain of TCR clone 199494 (TRAV16, TRAJ26)
CALRSYGQNFVF

SEQ ID NO: 398988 - protein, 12 aa, Homo sapiens
  CDR3 for beta chain variable domain of TCR clone 199494 (TRBV29-1, TRBJ2-3)
CSVTGGADTQYF

SEQ ID NO: 398989 - protein, 11 aa, Homo sapiens
  CDR3 for alpha chain variable domain of TCR clone 199495 (TRAV2, TRAJ13)
CASGGYQKVTF

SEQ ID NO: 398990 - protein, 13 aa, Homo sapiens
  CDR3 for beta chain variable domain of TCR clone 199495 (TRBV20-1, TRBJ1-1)
CSARGGANTEAFF

SEQ ID NO: 398991 - protein, 14 aa, Homo sapiens
  CDR3 for alpha chain variable domain of TCR clone 199496 (TRAV12-1, TRAJ30)
CVVNIRGRDDKIIF

SEQ ID NO: 398992 - protein, 14 aa, Homo sapiens
  CDR3 for beta chain variable domain of TCR clone 199496 (TRBV20-1, TRBJ2-1)
CSAQIGGSANEQFF

SEQ ID NO: 398993 - protein, 12 aa, Homo sapiens
  CDR3 for alpha chain variable domain of TCR clone 199497 (TRAV21, TRAJ37)
CAVRGNTGKLIF

SEQ ID NO: 398994 - protein, 15 aa, Homo sapiens
  CDR3 for beta chain variable domain of TCR clone 199497 (TRBV20-1, TRBJ2-1)
CSASGGTRYYNEQFF

SEQ ID NO: 398995 - protein, 13 aa, Homo sapiens
  CDR3 for alpha chain variable domain of TCR clone 199498 (TRAV8-1, TRAJ15)
CAVNNQAGTALIF

SEQ ID NO: 398996 - protein, 15 aa, Homo sapiens
  CDR3 for beta chain variable domain of TCR clone 199498 (TRBV7-3, TRBJ2-7)
CASSLTPTGYDEQYF

SEQ ID NO: 398997 - protein, 12 aa, Homo sapiens
  CDR3 for alpha chain variable domain of TCR clone 199499 (TRAV12-2, TRAJ16)
CAVAPDGQKLLF

SEQ ID NO: 398998 - protein, 13 aa, Homo sapiens
  CDR3 for beta chain variable domain of TCR clone 199499 (TRBV6-1, TRBJ1-1)
CASSVTGRLGAFF

SEQ ID NO: 398999 - protein, 17 aa, Homo sapiens
  CDR3 for alpha chain variable domain of TCR clone 199500 (TRAV3, TRAJ6)
CAVRDGPRAGGSYIPKF

SEQ ID NO: 399000 - protein, 17 aa, Homo sapiens
  CDR3 for beta chain variable domain of TCR clone 199500 (TRBV20-1, TRBJ2-1)
CSAPPRLAGTRYNEQFF

SEQ ID NO: 399001 - protein, 16 aa, Homo sapiens
  CDR3 for alpha chain variable domain of TCR clone 199501 (TRAV38-2/DV8, TRAJ10)
CAYTNILTGGGNKLTF

SEQ ID NO: 399002 - protein, 14 aa, Homo sapiens
  CDR3 for beta chain variable domain of TCR clone 199501 (TRBV7-2, TRBJ1-1)
CASSFLTGTTEAFF

SEQ ID NO: 399003 - protein, 14 aa, Homo sapiens
  CDR3 for alpha chain variable domain of TCR clone 199502 (TRAV26-1, TRAJ26)
CIVRVASYGQNFVF

SEQ ID NO: 399004 - protein, 13 aa, Homo sapiens
  CDR3 for beta chain variable domain of TCR clone 199502 (TRBV20-1, TRBJ1-1)
CSAPLGGGTEAFF

SEQ ID NO: 399005 - protein, 14 aa, Homo sapiens
  CDR3 for alpha chain variable domain of TCR clone 199503 (TRAV8-6, TRAJ4)
CAVTVSGGYNKLIF

SEQ ID NO: 399006 - protein, 15 aa, Homo sapiens
  CDR3 for beta chain variable domain of TCR clone 199503 (TRBV7-3, TRBJ2-1)
CASSPTGGGEVEQFF

SEQ ID NO: 399007 - protein, 14 aa, Homo sapiens
  CDR3 for alpha chain variable domain of TCR clone 199504 (TRAV13-1, TRAJ44)
CAAKATGTASKLTF

SEQ ID NO: 399008 - protein, 16 aa, Homo sapiens
  CDR3 for beta chain variable domain of TCR clone 199504 (TRBV7-9, TRBJ2-6)
CASSWKGPLRANILTF

SEQ ID NO: 399009 - protein, 14 aa, Homo sapiens
  CDR3 for alpha chain variable domain of TCR clone 199505 (TRAV9-2, TRAJ39)
CARYIYNAGNMLTF

SEQ ID NO: 399010 - protein, 14 aa, Homo sapiens
  CDR3 for beta chain variable domain of TCR clone 199505 (TRBV12-5, TRBJ2-5)
CASGSRTHQETQYF

SEQ ID NO: 399011 - protein, 15 aa, Homo sapiens
  CDR3 for alpha chain variable domain of TCR clone 199506 (TRAV17, TRAJ6)
CATDLPSGGSYIHTF

SEQ ID NO: 399012 - protein, 16 aa, Homo sapiens
  CDR3 for beta chain variable domain of TCR clone 199506 (TRBV4-1, TRBJ2-7)
CASSQDPTGYSYEQYL

SEQ ID NO: 399013 - protein, 16 aa, Homo sapiens
  CDR3 for alpha chain variable domain of TCR clone 199507 (TRAV8-1, TRAJ42)
CAVTSRYGGSQGNLIF

SEQ ID NO: 399014 - protein, 14 aa, Homo sapiens
  CDR3 for beta chain variable domain of TCR clone 199507 (TRBV7-6, TRBJ2-3)
CASSLGTVTDTQYF

SEQ ID NO: 399015 - protein, 13 aa, Homo sapiens
  CDR3 for alpha chain variable domain of TCR clone 199508 (TRAV12-1, TRAJ26)
SATYLYYGQNSVF

SEQ ID NO: 399016 - protein, 12 aa, Homo sapiens
  CDR3 for beta chain variable domain of TCR clone 199508 (TRBV11-2, TRBJ2-2)
CASSLGGGELFF

SEQ ID NO: 399017 - protein, 16 aa, Homo sapiens
  CDR3 for alpha chain variable domain of TCR clone 199509 (TRAV30, TRAJ24)
CGTEIVDADSWGKFQF

SEQ ID NO: 399018 - protein, 14 aa, Homo sapiens
  CDR3 for beta chain variable domain of TCR clone 199509 (TRBV7-2, TRBJ1-2)
CASSQAGSTYGYAF

SEQ ID NO: 399019 - protein, 14 aa, Homo sapiens
  CDR3 for alpha chain variable domain of TCR clone 199510 (TRAV1-2, TRAJ8)
CAVRDDTGFQKLVF

SEQ ID NO: 399020 - protein, 14 aa, Homo sapiens
  CDR3 for beta chain variable domain of TCR clone 199510 (TRBV11-2, TRBJ2-3)
CASSRLARTDTQYF

SEQ ID NO: 399021 - protein, 15 aa, Homo sapiens
  CDR3 for alpha chain variable domain of TCR clone 199511 (TRAV26-2, TRAJ57)
CILRDIRGGSEKLVF

SEQ ID NO: 399022 - protein, 15 aa, Homo sapiens
  CDR3 for beta chain variable domain of TCR clone 199511 (TRBV2, TRBJ2-1)
CASDIGLAGEGEQFF

SEQ ID NO: 399023 - protein, 17 aa, Homo sapiens
  CDR3 for alpha chain variable domain of TCR clone 199512 (TRAV4, TRAJ42)
CLVGVLNYGGIQGNLIF

SEQ ID NO: 399024 - protein, 12 aa, Homo sapiens
  CDR3 for beta chain variable domain of TCR clone 199512 (TRBV20-1, TRBJ2-1)
CSAQYTYNEQFF

SEQ ID NO: 399025 - protein, 10 aa, Homo sapiens
  CDR3 for alpha chain variable domain of TCR clone 199513 (TRAV27, TRAJ58)
SETSGSRLTF

SEQ ID NO: 399026 - protein, 16 aa, Homo sapiens
  CDR3 for beta chain variable domain of TCR clone 199513 (TRBV7-3, TRBJ2-1)
CASSLVSGSSNNEQFF

SEQ ID NO: 399027 - protein, 15 aa, Homo sapiens
  CDR3 for alpha chain variable domain of TCR clone 199514 (TRAV12-1, TRAJ44)
CVVFVNTGTASKLTF

SEQ ID NO: 399028 - protein, 16 aa, Homo sapiens
  CDR3 for beta chain variable domain of TCR clone 199514 (TRBV20-1, TRBJ2-5)
CSPGGTSGGYMETQSF

SEQ ID NO: 399029 - protein, 13 aa, Homo sapiens
  CDR3 for alpha chain variable domain of TCR clone 199515 (TRAV16, TRAJ27)
CALSRTNAGKSTF

SEQ ID NO: 399030 - protein, 15 aa, Homo sapiens
  CDR3 for beta chain variable domain of TCR clone 199515 (TRBV18, TRBJ2-1)
CASSPPSASYNEQFF

SEQ ID NO: 399031 - protein, 14 aa, Homo sapiens
  CDR3 for alpha chain variable domain of TCR clone 199516 (TRAV2, TRAJ9)
CAVEDRSGGFKTIF

SEQ ID NO: 399032 - protein, 18 aa, Homo sapiens
  CDR3 for beta chain variable domain of TCR clone 199516 (TRBV11-2, TRBJ2-6)
CASSLNPFLGTGANVLTF

SEQ ID NO: 399033 - protein, 15 aa, Homo sapiens
  CDR3 for alpha chain variable domain of TCR clone 199517 (TRAV26-1, TRAJ29)
CIVRVEGSGNTPLVF

SEQ ID NO: 399034 - protein, 17 aa, Homo sapiens
  CDR3 for beta chain variable domain of TCR clone 199517 (TRBV5-7, TRBJ1-5)
CASSLTGTGGYNQPQHF

SEQ ID NO: 399035 - protein, 16 aa, Homo sapiens
  CDR3 for alpha chain variable domain of TCR clone 199518 (TRAV1-2, TRAJ10)
CAVRGVLTGGGNKLTS

SEQ ID NO: 399036 - protein, 14 aa, Homo sapiens
  CDR3 for beta chain variable domain of TCR clone 199518 (TRBV25-1, TRBJ1-1)
CASTHLGGNTEAFF

SEQ ID NO: 399037 - protein, 11 aa, Homo sapiens
  CDR3 for alpha chain variable domain of TCR clone 199519 (TRAV35, TRAJ34)
CWASNTDKLIF

SEQ ID NO: 399038 - protein, 14 aa, Homo sapiens
  CDR3 for beta chain variable domain of TCR clone 199519 (TRBV5-1, TRBJ2-7)
CASSRGESLYEQYF

SEQ ID NO: 399039 - protein, 14 aa, Homo sapiens
  CDR3 for alpha chain variable domain of TCR clone 199520 (TRAV12-3, TRAJ29)
CAMSPYSGNTPLVF

SEQ ID NO: 399040 - protein, 14 aa, Homo sapiens
  CDR3 for beta chain variable domain of TCR clone 199520 (TRBV7-2, TRBJ2-7)
CASSPKTSFYEQYF

SEQ ID NO: 399041 - protein, 12 aa, Homo sapiens
  CDR3 for alpha chain variable domain of TCR clone 199521 (TRAV12-2, TRAJ31)
CAVNTPDARLMF

SEQ ID NO: 399042 - protein, 12 aa, Homo sapiens
  CDR3 for beta chain variable domain of TCR clone 199521 (TRBV4-1, TRBJ2-3)
CASSQGTDTQYF

SEQ ID NO: 399043 - protein, 13 aa, Homo sapiens
  CDR3 for alpha chain variable domain of TCR clone 199522 (TRAV13-1, TRAJ11)
CAAVLAGYSTLTF

SEQ ID NO: 399044 - protein, 19 aa, Homo sapiens
  CDR3 for beta chain variable domain of TCR clone 199522 (TRBV25-1, TRBJ2-7)
CASSDARVVFHPTSSTSGR

SEQ ID NO: 399045 - protein, 12 aa, Homo sapiens
  CDR3 for alpha chain variable domain of TCR clone 199523 (TRAV1-1, TRAJ24)
CAATDSWGKLQF

SEQ ID NO: 399046 - protein, 14 aa, Homo sapiens
  CDR3 for beta chain variable domain of TCR clone 199523 (TRBV10-3, TRBJ1-6)
CAISVDGDESPLHF

SEQ ID NO: 399047 - protein, 18 aa, Homo sapiens
  CDR3 for alpha chain variable domain of TCR clone 199524 (TRAV21, TRAJ52)
CAVRPSPVGGTCYGKLTF

SEQ ID NO: 399048 - protein, 15 aa, Homo sapiens
  CDR3 for beta chain variable domain of TCR clone 199524 (TRBV11-3, TRBJ2-3)
CARLKDGREGGTQYF

SEQ ID NO: 399049 - protein, 14 aa, Homo sapiens
  CDR3 for alpha chain variable domain of TCR clone 199525 (TRAV1-2, TRAJ8)
CAVREDTGFQKLVF

SEQ ID NO: 399050 - protein, 16 aa, Homo sapiens
  CDR3 for beta chain variable domain of TCR clone 199525 (TRBV20-1, TRBJ2-1)
CSVRDLKQGMNNEQFF

SEQ ID NO: 399051 - protein, 14 aa, Homo sapiens
  CDR3 for alpha chain variable domain of TCR clone 199526 (TRAV8-4, TRAJ13)
CAVTLSGGYQKVTF

SEQ ID NO: 399052 - protein, 14 aa, Homo sapiens
  CDR3 for beta chain variable domain of TCR clone 199526 (TRBV7-2, TRBJ1-2)
WASSQTGSTYGYTF

SEQ ID NO: 399053 - protein, 20 aa, Homo sapiens
  CDR3 for alpha chain variable domain of TCR clone 199527 (TRAV25, TRAJ21)
TATQTTDVGNYPLSFNKFYF

SEQ ID NO: 399054 - protein, 14 aa, Homo sapiens
  CDR3 for beta chain variable domain of TCR clone 199527 (TRBV20-1, TRBJ2-7)
CSAPELAGVGEQYF

SEQ ID NO: 399055 - protein, 14 aa, Homo sapiens
  CDR3 for alpha chain variable domain of TCR clone 199528 (TRAV4, TRAJ30)
CLVGDMNRDDKNIF

SEQ ID NO: 399056 - protein, 16 aa, Homo sapiens
  CDR3 for beta chain variable domain of TCR clone 199528 (TRBV20-1, TRBJ1-4)
CSAPGQGLLTNEKLFF

SEQ ID NO: 399057 - protein, 17 aa, Homo sapiens
  CDR3 for alpha chain variable domain of TCR clone 199529 (TRAV12-2, TRAJ22)
CAVNRIPFSGSARQLTF

SEQ ID NO: 399058 - protein, 11 aa, Homo sapiens
  CDR3 for beta chain variable domain of TCR clone 199529 (TRBV7-6, TRBJ2-2)
CACSPGLADYT

SEQ ID NO: 399059 - protein, 11 aa, Homo sapiens
  CDR3 for alpha chain variable domain of TCR clone 199530 (TRAV3, TRAJ21)
CAVGNFNKFYF

SEQ ID NO: 399060 - protein, 15 aa, Homo sapiens
  CDR3 for beta chain variable domain of TCR clone 199530 (TRBV28, TRBJ2-5)
CASSPPWSYQETQYF

SEQ ID NO: 399061 - protein, 14 aa, Homo sapiens
  CDR3 for alpha chain variable domain of TCR clone 199531 (TRAV1-2, TRAJ16)
CAGNRFSDGQKLLF

SEQ ID NO: 399062 - protein, 11 aa, Homo sapiens
  CDR3 for beta chain variable domain of TCR clone 199531 (TRBV7-9, TRBJ2-3)
CASSPTDTQYF

SEQ ID NO: 399063 - protein, 16 aa, Homo sapiens
  CDR3 for alpha chain variable domain of TCR clone 199532 (TRAV14/DV4, TRAJ17)
CAMREAGRAAGYKLTF

SEQ ID NO: 399064 - protein, 17 aa, Homo sapiens
  CDR3 for beta chain variable domain of TCR clone 199532 (TRBV13, TRBJ2-3)
CASSLSRVAGGRNTQYF

SEQ ID NO: 399065 - protein, 16 aa, Homo sapiens
  CDR3 for alpha chain variable domain of TCR clone 199533 (TRAV30, TRAJ24)
CGTEIVDADSWGKFQF

SEQ ID NO: 399066 - protein, 13 aa, Homo sapiens
  CDR3 for beta chain variable domain of TCR clone 199533 (TRBV10-3, TRBJ1-2)
CAISEWDSYGYTF

SEQ ID NO: 399067 - protein, 15 aa, Homo sapiens
  CDR3 for alpha chain variable domain of TCR clone 199534 (TRAV1-1, TRAJ24)
CALSGGTDIWGKFQF

SEQ ID NO: 399068 - protein, 16 aa, Homo sapiens
  CDR3 for beta chain variable domain of TCR clone 199534 (TRBV2, TRBJ2-7)
CASSEPWTGPSYEQYF

SEQ ID NO: 399069 - protein, 18 aa, Homo sapiens
  CDR3 for alpha chain variable domain of TCR clone 199535 (TRAV13-1, TRAJ52)
CVAKNPNAGCTSYGKLTF

SEQ ID NO: 399070 - protein, 15 aa, Homo sapiens
  CDR3 for beta chain variable domain of TCR clone 199535 (TRBV6-1, TRBJ2-3)
CASSERGGITDTQYF

SEQ ID NO: 399071 - protein, 16 aa, Homo sapiens
  CDR3 for alpha chain variable domain of TCR clone 199536 (TRAV8-3, TRAJ44)
CAVGTLMTGTASKLTF

SEQ ID NO: 399072 - protein, 13 aa, Homo sapiens
  CDR3 for beta chain variable domain of TCR clone 199536 (TRBV11-2, TRBJ2-1)
CGSSLRLTHEQFF

SEQ ID NO: 399073 - protein, 15 aa, Homo sapiens
  CDR3 for alpha chain variable domain of TCR clone 199537 (TRAV27, TRAJ45)
CAPVDSGGGADGLTF

SEQ ID NO: 399074 - protein, 15 aa, Homo sapiens
  CDR3 for beta chain variable domain of TCR clone 199537 (TRBV23-1, TRBJ1-5)
CASSQSRGQVWGAYI

SEQ ID NO: 399075 - protein, 11 aa, Homo sapiens
  CDR3 for alpha chain variable domain of TCR clone 199538 (TRAV2, TRAJ33)
CAVEINYQLIW

SEQ ID NO: 399076 - protein, 17 aa, Homo sapiens
  CDR3 for beta chain variable domain of TCR clone 199538 (TRBV19, TRBJ2-7)
CASSISFYDSYPYEQYF

SEQ ID NO: 399077 - protein, 16 aa, Homo sapiens
  CDR3 for alpha chain variable domain of TCR clone 199539 (TRAV21, TRAJ37)
CAVRTAGSRNTGTLIF

SEQ ID NO: 399078 - protein, 13 aa, Homo sapiens
  CDR3 for beta chain variable domain of TCR clone 199539 (TRBV7-9, TRBJ2-5)
CASLPSGRETQYF

SEQ ID NO: 399079 - protein, 16 aa, Homo sapiens
  CDR3 for alpha chain variable domain of TCR clone 199540 (TRAV14/DV4, TRAJ53)
CVMREGGGGSNYKLTF

SEQ ID NO: 399080 - protein, 14 aa, Homo sapiens
  CDR3 for beta chain variable domain of TCR clone 199540 (TRBV20-1, TRBJ2-7)
CSAKTGTGGYEQYF

SEQ ID NO: 399081 - protein, 14 aa, Homo sapiens
  CDR3 for alpha chain variable domain of TCR clone 199541 (TRAV9-2, TRAJ39)
CALYIYNAGNMLTF

SEQ ID NO: 399082 - protein, 15 aa, Homo sapiens
  CDR3 for beta chain variable domain of TCR clone 199541 (TRBV28, TRBJ2-3)
CAPTFRDWSTDTQYF

SEQ ID NO: 399083 - protein, 11 aa, Homo sapiens
  CDR3 for alpha chain variable domain of TCR clone 199542 (TRAV26-1, TRAJ37)
CIVRVGGKLIF

SEQ ID NO: 399084 - protein, 14 aa, Homo sapiens
  CDR3 for beta chain variable domain of TCR clone 199542 (TRBV7-9, TRBJ2-1)
CASSSDRGLDEQFF

SEQ ID NO: 399085 - protein, 16 aa, Homo sapiens
  CDR3 for alpha chain variable domain of TCR clone 199543 (TRAV13-1, TRAJ48)
CAASIFGNFGNEKLTF

SEQ ID NO: 399086 - protein, 14 aa, Homo sapiens
  CDR3 for beta chain variable domain of TCR clone 199543 (TRBV7-3, TRBJ1-1)
CASSLKGGSTEAFF

SEQ ID NO: 399087 - protein, 13 aa, Homo sapiens
  CDR3 for alpha chain variable domain of TCR clone 199544 (TRAV17, TRAJ29)
CATDPFRKHTSCL

SEQ ID NO: 399088 - protein, 13 aa, Homo sapiens
  CDR3 for beta chain variable domain of TCR clone 199544 (TRBV5-7, TRBJ2-6)
CASTSSGANVLTF

SEQ ID NO: 399089 - protein, 13 aa, Homo sapiens
  CDR3 for alpha chain variable domain of TCR clone 199545 (TRAV26-1, TRAJ9)
CIATYTGGFKTIF

SEQ ID NO: 399090 - protein, 15 aa, Homo sapiens
  CDR3 for beta chain variable domain of TCR clone 199545 (TRBV5-7, TRBJ1-5)
CASSYGKLWDQPQHF

SEQ ID NO: 399091 - protein, 16 aa, Homo sapiens
  CDR3 for alpha chain variable domain of TCR clone 199546 (TRAV30, TRAJ24)
CGTEIVDADSWGKFQF

SEQ ID NO: 399092 - protein, 18 aa, Homo sapiens
  CDR3 for beta chain variable domain of TCR clone 199546 (TRBV7-9, TRBJ2-7)
CASSLTTSGSRTWYEQYS

SEQ ID NO: 399093 - protein, 10 aa, Homo sapiens
  CDR3 for alpha chain variable domain of TCR clone 199547 (TRAV8-4, TRAJ43)
CAVSADDMRF

SEQ ID NO: 399094 - protein, 15 aa, Homo sapiens
  CDR3 for beta chain variable domain of TCR clone 199547 (TRBV2, TRBJ2-5)
CASSAQGGYRETQYF

SEQ ID NO: 399095 - protein, 16 aa, Homo sapiens
  CDR3 for alpha chain variable domain of TCR clone 199548 (TRAV3, TRAJ37)
CAVRGKGSGNTGKIIF

SEQ ID NO: 399096 - protein, 12 aa, Homo sapiens
  CDR3 for beta chain variable domain of TCR clone 199548 (TRBV11-2, TRBJ2-2)
CASSLGGGELFF

SEQ ID NO: 399097 - protein, 16 aa, Homo sapiens
  CDR3 for alpha chain variable domain of TCR clone 199549 (TRAV4, TRAJ22)
CLVGDLYSGSARQLTF

SEQ ID NO: 399098 - protein, 15 aa, Homo sapiens
  CDR3 for beta chain variable domain of TCR clone 199549 (TRBV6-5, TRBJ1-2)
CASSYSQAFNYGYTF

SEQ ID NO: 399099 - protein, 14 aa, Homo sapiens
  CDR3 for alpha chain variable domain of TCR clone 199550 (TRAV2, TRAJ37)
CAADFTSNTGKLIF

SEQ ID NO: 399100 - protein, 14 aa, Homo sapiens
  CDR3 for beta chain variable domain of TCR clone 199550 (TRBV7-2, TRBJ2-7)
CASRSQGAAYEQYF

SEQ ID NO: 399101 - protein, 15 aa, Homo sapiens
  CDR3 for alpha chain variable domain of TCR clone 199551 (TRAV8-4, TRAJ37)
CSVSRGSGNTGKLIF

SEQ ID NO: 399102 - protein, 15 aa, Homo sapiens
  CDR3 for beta chain variable domain of TCR clone 199551 (TRBV5-1, TRBJ2-7)
CASSLDLTSSYEQYF

SEQ ID NO: 399103 - protein, 16 aa, Homo sapiens
  CDR3 for alpha chain variable domain of TCR clone 199552 (TRAV26-1, TRAJ40)
CIVRGYPTSGTYKYIL

SEQ ID NO: 399104 - protein, 14 aa, Homo sapiens
  CDR3 for beta chain variable domain of TCR clone 199552 (TRBV5-1, TRBJ1-4)
CASSSGQGGEKLFF

SEQ ID NO: 399105 - protein, 15 aa, Homo sapiens
  CDR3 for alpha chain variable domain of TCR clone 199553 (TRAV12-3, TRAJ5)
CAMSGLGTGRRSLTF

SEQ ID NO: 399106 - protein, 16 aa, Homo sapiens
  CDR3 for beta chain variable domain of TCR clone 199553 (TRBV20-1, TRBJ2-3)
CSARLHSAGAIDTQYF

SEQ ID NO: 399107 - protein, 17 aa, Homo sapiens
  CDR3 for alpha chain variable domain of TCR clone 199554 (TRAV26-2, TRAJ43)
CCVLLHPESLNNNDMRF

SEQ ID NO: 399108 - protein, 13 aa, Homo sapiens
  CDR3 for beta chain variable domain of TCR clone 199554 (TRBV14, TRBJ2-1)
CASSQDRRNEQFF

SEQ ID NO: 399109 - protein, 13 aa, Homo sapiens
  CDR3 for alpha chain variable domain of TCR clone 199555 (TRAV21, TRAJ27)
CDARPGNAGKSTF

SEQ ID NO: 399110 - protein, 14 aa, Homo sapiens
  CDR3 for beta chain variable domain of TCR clone 199555 (TRBV7-6, TRBJ2-3)
CASSLGTVTGTQYF

SEQ ID NO: 399111 - protein, 13 aa, Homo sapiens
  CDR3 for alpha chain variable domain of TCR clone 199556 (TRAV26-1, TRAJ40)
CIVRVEGTYKYIF

SEQ ID NO: 399112 - protein, 15 aa, Homo sapiens
  CDR3 for beta chain variable domain of TCR clone 199556 (TRBV12-4, TRBJ1-2)
CASSLAHLDGQAYTF

SEQ ID NO: 399113 - protein, 14 aa, Homo sapiens
  CDR3 for alpha chain variable domain of TCR clone 199557 (TRAV8-2, TRAJ37)
CVVSDLGNTGKLIF

SEQ ID NO: 399114 - protein, 19 aa, Homo sapiens
  CDR3 for beta chain variable domain of TCR clone 199557 (TRBV11-3, TRBJ2-1)
CASSLGTRKARSSYNEQFF

SEQ ID NO: 399115 - protein, 12 aa, Homo sapiens
  CDR3 for alpha chain variable domain of TCR clone 199558 (TRAV12-1, TRAJ40)
CVFYSGTYKYIF

SEQ ID NO: 399116 - protein, 18 aa, Homo sapiens
  CDR3 for beta chain variable domain of TCR clone 199558 (TRBV12-4, TRBJ2-2)
CASSLVAGTRGRTGKLFF

SEQ ID NO: 399117 - protein, 13 aa, Homo sapiens
  CDR3 for alpha chain variable domain of TCR clone 199559 (TRAV27, TRAJ49)
CAPRPYTGNQFYF

SEQ ID NO: 399118 - protein, 14 aa, Homo sapiens
  CDR3 for beta chain variable domain of TCR clone 199559 (TRBV18, TRBJ2-5)
CASSPLRVQETRYF

SEQ ID NO: 399119 - protein, 13 aa, Homo sapiens
  CDR3 for alpha chain variable domain of TCR clone 199560 (TRAV12-3, TRAJ13)
CAMGTGGYQKVTF

SEQ ID NO: 399120 - protein, 17 aa, Homo sapiens
  CDR3 for beta chain variable domain of TCR clone 199560 (TRBV13, TRBJ2-3)
CASSLSRVAGGSNTQYF

SEQ ID NO: 399121 - protein, 15 aa, Homo sapiens
  CDR3 for alpha chain variable domain of TCR clone 199561 (TRAV13-1, TRAJ27)
CAARELNTNAGKSTF

SEQ ID NO: 399122 - protein, 14 aa, Homo sapiens
  CDR3 for beta chain variable domain of TCR clone 199561 (TRBV12-4, TRBJ1-1)
CASSLGTGGTEAFF

SEQ ID NO: 399123 - protein, 11 aa, Homo sapiens
  CDR3 for alpha chain variable domain of TCR clone 199562 (TRAV20, TRAJ34)
CTRDNTDKLIF

SEQ ID NO: 399124 - protein, 15 aa, Homo sapiens
  CDR3 for beta chain variable domain of TCR clone 199562 (TRBV2, TRBJ2-1)
CASSVTSEGTDERFF

SEQ ID NO: 399125 - protein, 17 aa, Homo sapiens
  CDR3 for alpha chain variable domain of TCR clone 199563 (TRAV3, TRAJ42)
CAVRDRDYGGSQGNLIF

SEQ ID NO: 399126 - protein, 14 aa, Homo sapiens
  CDR3 for beta chain variable domain of TCR clone 199563 (TRBV19, TRBJ2-2)
STSSGQGIAGELFF

SEQ ID NO: 399127 - protein, 13 aa, Homo sapiens
  CDR3 for alpha chain variable domain of TCR clone 199564 (TRAV8-4, TRAJ30)
CAVSVNRDDQIIF

SEQ ID NO: 399128 - protein, 13 aa, Homo sapiens
  CDR3 for beta chain variable domain of TCR clone 199564 (TRBV3-1, TRBJ2-2)
CASLARGSGELFF

SEQ ID NO: 399129 - protein, 16 aa, Homo sapiens
  CDR3 for alpha chain variable domain of TCR clone 199565 (TRAV8-1, TRAJ39)
CAVNVPSYNAGNMLTF

SEQ ID NO: 399130 - protein, 15 aa, Homo sapiens
  CDR3 for beta chain variable domain of TCR clone 199565 (TRBV12-4, TRBJ1-2)
CASSPITGGGYGYTF

SEQ ID NO: 399131 - protein, 13 aa, Homo sapiens
  CDR3 for alpha chain variable domain of TCR clone 199566 (TRAV38-2/DV8, TRAJ34)
CAYRTWNTYKLIF

SEQ ID NO: 399132 - protein, 15 aa, Homo sapiens
  CDR3 for beta chain variable domain of TCR clone 199566 (TRBV6-1, TRBJ2-1)
CASSELRGQYNEQFF

SEQ ID NO: 399133 - protein, 12 aa, Homo sapiens
  CDR3 for alpha chain variable domain of TCR clone 199567 (TRAV27, TRAJ37)
CADSGNTGKLIF

SEQ ID NO: 399134 - protein, 18 aa, Homo sapiens
  CDR3 for beta chain variable domain of TCR clone 199567 (TRBV7-9, TRBJ1-1)
CASSKPWDTMGINTEAFF

SEQ ID NO: 399135 - protein, 18 aa, Homo sapiens
  CDR3 for alpha chain variable domain of TCR clone 199568 (TRAV26-1, TRAJ23)
CIVRVGLEVWNQGGELIF

SEQ ID NO: 399136 - protein, 14 aa, Homo sapiens
  CDR3 for beta chain variable domain of TCR clone 199568 (TRBV7-6, TRBJ2-3)
CASSLGTVTDTQYF

SEQ ID NO: 399137 - protein, 13 aa, Homo sapiens
  CDR3 for alpha chain variable domain of TCR clone 199569 (TRAV21, TRAJ27)
CAARPGNAGKSTF

SEQ ID NO: 399138 - protein, 15 aa, Homo sapiens
  CDR3 for beta chain variable domain of TCR clone 199569 (TRBV27, TRBJ1-5)
CASSLGTGFDQTQRF

SEQ ID NO: 399139 - protein, 14 aa, Homo sapiens
  CDR3 for alpha chain variable domain of TCR clone 199570 (TRAV12-2, TRAJ13)
CAVKKTGGYQKVTF

SEQ ID NO: 399140 - protein, 13 aa, Homo sapiens
  CDR3 for beta chain variable domain of TCR clone 199570 (TRBV7-2, TRBJ1-1)
CASSSQGVTEAFF

SEQ ID NO: 399141 - protein, 15 aa, Homo sapiens
  CDR3 for alpha chain variable domain of TCR clone 199571 (TRAV8-3, TRAJ34)
CAVAPHGGNTDKLIF

SEQ ID NO: 399142 - protein, 16 aa, Homo sapiens
  CDR3 for beta chain variable domain of TCR clone 199571 (TRBV19, TRBJ2-1)
CASSKAGPSSYNEQFF

SEQ ID NO: 399143 - protein, 14 aa, Homo sapiens
  CDR3 for alpha chain variable domain of TCR clone 199572 (TRAV12-2, TRAJ9)
CAVNALDGGFKTIF

SEQ ID NO: 399144 - protein, 16 aa, Homo sapiens
  CDR3 for beta chain variable domain of TCR clone 199572 (TRBV19, TRBJ1-6)
CASSVAPVAGNSPLLF

SEQ ID NO: 399145 - protein, 14 aa, Homo sapiens
  CDR3 for alpha chain variable domain of TCR clone 199573 (TRAV13-1, TRAJ44)
CAAKATGTASKLTF

SEQ ID NO: 399146 - protein, 13 aa, Homo sapiens
  CDR3 for beta chain variable domain of TCR clone 199573 (TRBV10-3, TRBJ2-7)
CAIRPTEAYEQYF

SEQ ID NO: 399147 - protein, 16 aa, Homo sapiens
  CDR3 for alpha chain variable domain of TCR clone 199574 (TRAV3, TRAJ40)
CSVRDRIASGTYKYIF

SEQ ID NO: 399148 - protein, 16 aa, Homo sapiens
  CDR3 for beta chain variable domain of TCR clone 199574 (TRBV6-1, TRBJ1-2)
CASSEANSIINYGYTF

SEQ ID NO: 399149 - protein, 12 aa, Homo sapiens
  CDR3 for alpha chain variable domain of TCR clone 199575 (TRAV13-1, TRAJ48)
CAARVGGEKLTF

SEQ ID NO: 399150 - protein, 14 aa, Homo sapiens
  CDR3 for beta chain variable domain of TCR clone 199575 (TRBV20-1, TRBJ2-7)
CSASPTSGTYEQYF

SEQ ID NO: 399151 - protein, 15 aa, Homo sapiens
  CDR3 for alpha chain variable domain of TCR clone 199576 (TRAV23/DV6, TRAJ37)
CAASRGSSNTGTLIF

SEQ ID NO: 399152 - protein, 15 aa, Homo sapiens
  CDR3 for beta chain variable domain of TCR clone 199576 (TRBV6-5, TRBJ2-7)
CASSARRGSDNEQYF

SEQ ID NO: 399153 - protein, 20 aa, Homo sapiens
  CDR3 for alpha chain variable domain of TCR clone 199577 (TRAV26-1, TRAJ42)
CCVLLHRQTYYGGSQRNLIF

SEQ ID NO: 399154 - protein, 16 aa, Homo sapiens
  CDR3 for beta chain variable domain of TCR clone 199577 (TRBV7-3, TRBJ2-2)
CASSLKRGTSSGELFF

SEQ ID NO: 399155 - protein, 14 aa, Homo sapiens
  CDR3 for alpha chain variable domain of TCR clone 199578 (TRAV17, TRAJ39)
CATDPVRAGNMLTF

SEQ ID NO: 399156 - protein, 15 aa, Homo sapiens
  CDR3 for beta chain variable domain of TCR clone 199578 (TRBV7-3, TRBJ2-1)
CASSPTGGGEVEQFF

SEQ ID NO: 399157 - protein, 13 aa, Homo sapiens
  CDR3 for alpha chain variable domain of TCR clone 199579 (TRAV8-3, TRAJ48)
CAVVPVGNEKLTF

SEQ ID NO: 399158 - protein, 12 aa, Homo sapiens
  CDR3 for beta chain variable domain of TCR clone 199579 (TRBV11-2, TRBJ2-2)
CASSLGGGELFF

SEQ ID NO: 399159 - protein, 11 aa, Homo sapiens
  CDR3 for alpha chain variable domain of TCR clone 199580 (TRAV4, TRAJ28)
CLVGDNRAETR

SEQ ID NO: 399160 - protein, 13 aa, Homo sapiens
  CDR3 for beta chain variable domain of TCR clone 199580 (TRBV20-1, TRBJ2-7)
CSAAHTSGYEQYF

SEQ ID NO: 399161 - protein, 15 aa, Homo sapiens
  CDR3 for alpha chain variable domain of TCR clone 199581 (TRAV8-1, TRAJ23)
CAVNSHYNQGGKLIF

SEQ ID NO: 399162 - protein, 16 aa, Homo sapiens
  CDR3 for beta chain variable domain of TCR clone 199581 (TRBV7-3, TRBJ2-2)
CASSLKRGTLSGELFF

SEQ ID NO: 399163 - protein, 17 aa, Homo sapiens
  CDR3 for alpha chain variable domain of TCR clone 199582 (TRAV3, TRAJ6)
CAVRDGPRAGGNYIPTF

SEQ ID NO: 399164 - protein, 14 aa, Homo sapiens
  CDR3 for beta chain variable domain of TCR clone 199582 (TRBV7-2, TRBJ2-7)
GASSPKTSFYEQYF

SEQ ID NO: 399165 - protein, 10 aa, Homo sapiens
  CDR3 for alpha chain variable domain of TCR clone 199583 (TRAV13-2, TRAJ49)
CADTGNQFYF

SEQ ID NO: 399166 - protein, 12 aa, Homo sapiens
  CDR3 for beta chain variable domain of TCR clone 199583 (TRBV5-1, TRBJ2-7)
CASSLDSYEQYF

SEQ ID NO: 399167 - protein, 17 aa, Homo sapiens
  CDR3 for alpha chain variable domain of TCR clone 199584 (TRAV2, TRAJ22)
ILQVREADAAEQRGLTF

SEQ ID NO: 399168 - protein, 16 aa, Homo sapiens
  CDR3 for beta chain variable domain of TCR clone 199584 (TRBV2, TRBJ2-5)
CASSETQGVGEETQYF

SEQ ID NO: 399169 - protein, 15 aa, Homo sapiens
  CDR3 for alpha chain variable domain of TCR clone 199585 (TRAV26-1, TRAJ29)
CIVRGEGSGNTPLVF

SEQ ID NO: 399170 - protein, 13 aa, Homo sapiens
  CDR3 for beta chain variable domain of TCR clone 199585 (TRBV28, TRBJ1-1)
CASSKQGWTEAFF

SEQ ID NO: 399171 - protein, 17 aa, Homo sapiens
  CDR3 for alpha chain variable domain of TCR clone 199586 (TRAV13-1, TRAJ52)
CAASSGAGGTSYGKLKV

SEQ ID NO: 399172 - protein, 15 aa, Homo sapiens
  CDR3 for beta chain variable domain of TCR clone 199586 (TRBV2, TRBJ2-1)
CASSELAGNYNEQFF

SEQ ID NO: 399173 - protein, 13 aa, Homo sapiens
  CDR3 for alpha chain variable domain of TCR clone 199587 (TRAV12-2, TRAJ18)
CAVRGSTLGRLYF

SEQ ID NO: 399174 - protein, 11 aa, Homo sapiens
  CDR3 for beta chain variable domain of TCR clone 199587 (TRBV12-4, TRBJ2-3)
CASTATDTQYF

SEQ ID NO: 399175 - protein, 17 aa, Homo sapiens
  CDR3 for alpha chain variable domain of TCR clone 199588 (TRAV17, TRAJ28)
CATDPRRGGAGSYQLTF

SEQ ID NO: 399176 - protein, 15 aa, Homo sapiens
  CDR3 for beta chain variable domain of TCR clone 199588 (TRBV6-1, TRBJ2-1)
CASSELRGQYNEQFF

SEQ ID NO: 399177 - protein, 14 aa, Homo sapiens
  CDR3 for alpha chain variable domain of TCR clone 199589 (TRAV12-2, TRAJ13)
CAVKKTGGNQKVTF

SEQ ID NO: 399178 - protein, 13 aa, Homo sapiens
  CDR3 for beta chain variable domain of TCR clone 199589 (TRBV7-9, TRBJ1-2)
CASSLKQNYGYTF

SEQ ID NO: 399179 - protein, 13 aa, Homo sapiens
  CDR3 for alpha chain variable domain of TCR clone 199590 (TRAV2, TRAJ24)
CAVTTDIWGKLQF

SEQ ID NO: 399180 - protein, 14 aa, Homo sapiens
  CDR3 for beta chain variable domain of TCR clone 199590 (TRBV13, TRBJ2-5)
CASSLGRGQETQYF

SEQ ID NO: 399181 - protein, 14 aa, Homo sapiens
  CDR3 for alpha chain variable domain of TCR clone 199591 (TRAV12-2, TRAJ8)
CAVREDTGFQKLVF

SEQ ID NO: 399182 - protein, 14 aa, Homo sapiens
  CDR3 for beta chain variable domain of TCR clone 199591 (TRBV11-2, TRBJ2-3)
CASSRLARTDTQYF

SEQ ID NO: 399183 - protein, 14 aa, Homo sapiens
  CDR3 for alpha chain variable domain of TCR clone 199592 (TRAV2, TRAJ37)
CAVDFTSNTGKLIF

SEQ ID NO: 399184 - protein, 13 aa, Homo sapiens
  CDR3 for beta chain variable domain of TCR clone 199592 (TRBV20-1, TRBJ1-1)
CSAPLGGGTEAIF

SEQ ID NO: 399185 - protein, 11 aa, Homo sapiens
  CDR3 for alpha chain variable domain of TCR clone 199593 (TRAV3, TRAJ21)
CAVGYFNKFYF

SEQ ID NO: 399186 - protein, 14 aa, Homo sapiens
  CDR3 for beta chain variable domain of TCR clone 199593 (TRBV29-1, TRBJ2-2)
CSGRGSGKTGELFF

SEQ ID NO: 399187 - protein, 14 aa, Homo sapiens
  CDR3 for alpha chain variable domain of TCR clone 199594 (TRAV35, TRAJ22)
CAGLRPGSARKLTF

SEQ ID NO: 399188 - protein, 14 aa, Homo sapiens
  CDR3 for beta chain variable domain of TCR clone 199594 (TRBV11-3, TRBJ2-3)
CASSSGQGPDTQYF

SEQ ID NO: 399189 - protein, 17 aa, Homo sapiens
  CDR3 for alpha chain variable domain of TCR clone 199595 (TRAV26-1, TRAJ53)
CIVRVDDSGGSNYKLTF

SEQ ID NO: 399190 - protein, 14 aa, Homo sapiens
  CDR3 for beta chain variable domain of TCR clone 199595 (TRBV7-2, TRBJ2-7)
CASRSQGAAYEQYF

SEQ ID NO: 399191 - protein, 12 aa, Homo sapiens
  CDR3 for alpha chain variable domain of TCR clone 199596 (TRAV8-4, TRAJ31)
CAVSDSNARLMF

SEQ ID NO: 399192 - protein, 15 aa, Homo sapiens
  CDR3 for beta chain variable domain of TCR clone 199596 (TRBV27, TRBJ2-7)
CASRFWGQGADEKYF

SEQ ID NO: 399193 - protein, 15 aa, Homo sapiens
  CDR3 for alpha chain variable domain of TCR clone 199597 (TRAV20, TRAJ43)
CAVQAGKSSNNDMRF

SEQ ID NO: 399194 - protein, 14 aa, Homo sapiens
  CDR3 for beta chain variable domain of TCR clone 199597 (TRBV27, TRBJ2-1)
CASRHLGGGKEQFL

SEQ ID NO: 399195 - protein, 14 aa, Homo sapiens
  CDR3 for alpha chain variable domain of TCR clone 199598 (TRAV1-2, TRAJ16)
CAVNRFSDGQKLLF

SEQ ID NO: 399196 - protein, 18 aa, Homo sapiens
  CDR3 for beta chain variable domain of TCR clone 199598 (TRBV28, TRBJ2-3)
CASSSGLAEATSTDTQYF

SEQ ID NO: 399197 - protein, 15 aa, Homo sapiens
  CDR3 for alpha chain variable domain of TCR clone 199599 (TRAV12-3, TRAJ6)
CAMSATTGGSYIPTF

SEQ ID NO: 399198 - protein, 14 aa, Homo sapiens
  CDR3 for beta chain variable domain of TCR clone 199599 (TRBV7-9, TRBJ2-7)
CASSLDYGGLGQYF

SEQ ID NO: 399199 - protein, 13 aa, Homo sapiens
  CDR3 for alpha chain variable domain of TCR clone 199600 (TRAV22, TRAJ26)
FALEHNYGQNFVF

SEQ ID NO: 399200 - protein, 16 aa, Homo sapiens
  CDR3 for beta chain variable domain of TCR clone 199600 (TRBV7-2, TRBJ2-6)
CASSERRASGANVLTF

SEQ ID NO: 399201 - protein, 13 aa, Homo sapiens
  CDR3 for alpha chain variable domain of TCR clone 199601 (TRAV1-1, TRAJ9)
CASKNTGGFKTIF

SEQ ID NO: 399202 - protein, 14 aa, Homo sapiens
  CDR3 for beta chain variable domain of TCR clone 199601 (TRBV20-1, TRBJ2-1)
CSAQIGGSANEQFL

SEQ ID NO: 399203 - protein, 10 aa, Homo sapiens
  CDR3 for alpha chain variable domain of TCR clone 199602 (TRAV23/DV6, TRAJ4)
CAARDFWSRE

SEQ ID NO: 399204 - protein, 13 aa, Homo sapiens
  CDR3 for beta chain variable domain of TCR clone 199602 (TRBV7-2, TRBJ1-1)
CASSRNTNTEAFF

SEQ ID NO: 399205 - protein, 15 aa, Homo sapiens
  CDR3 for alpha chain variable domain of TCR clone 199603 (TRAV8-6, TRAJ10)
CAVSDQAGGGNKLTF

SEQ ID NO: 399206 - protein, 15 aa, Homo sapiens
  CDR3 for beta chain variable domain of TCR clone 199603 (TRBV7-8, TRBJ2-3)
CASSPRTGSTDTQYF

SEQ ID NO: 399207 - protein, 17 aa, Homo sapiens
  CDR3 for alpha chain variable domain of TCR clone 199604 (TRAV3, TRAJ38)
CAVRGCLNAVNNRKLIW

SEQ ID NO: 399208 - protein, 14 aa, Homo sapiens
  CDR3 for beta chain variable domain of TCR clone 199604 (TRBV7-2, TRBJ1-2)
CASSQTGSTYGYTF

SEQ ID NO: 399209 - protein, 11 aa, Homo sapiens
  CDR3 for alpha chain variable domain of TCR clone 199605 (TRAV12-3, TRAJ16)
LTGGDGRKLLF

SEQ ID NO: 399210 - protein, 13 aa, Homo sapiens
  CDR3 for beta chain variable domain of TCR clone 199605 (TRBV12-4, TRBJ1-4)
CASAMGHNEKLFF

SEQ ID NO: 399211 - protein, 14 aa, Homo sapiens
  CDR3 for alpha chain variable domain of TCR clone 199606 (TRAV13-1, TRAJ12)
CSNYPMDSSSKLIF

SEQ ID NO: 399212 - protein, 11 aa, Homo sapiens
  CDR3 for beta chain variable domain of TCR clone 199606 (TRBV20-1, TRBJ2-1)
CSLSSGSEQFF

SEQ ID NO: 399213 - protein, 14 aa, Homo sapiens
  CDR3 for alpha chain variable domain of TCR clone 199607 (TRAV26-1, TRAJ38)
CLADNAGNNRKLIW

SEQ ID NO: 399214 - protein, 16 aa, Homo sapiens
  CDR3 for beta chain variable domain of TCR clone 199607 (TRBV19, TRBJ2-1)
CASSKAGPSSYNEQFF

SEQ ID NO: 399215 - protein, 14 aa, Homo sapiens
  CDR3 for alpha chain variable domain of TCR clone 199608 (TRAV12-2, TRAJ40)
CAVKIPSGTYKYIF

SEQ ID NO: 399216 - protein, 15 aa, Homo sapiens
  CDR3 for beta chain variable domain of TCR clone 199608 (TRBV20-1, TRBJ2-7)
CSARDRVSGRDEQYF

SEQ ID NO: 399217 - protein, 12 aa, Homo sapiens
  CDR3 for alpha chain variable domain of TCR clone 199609 (TRAV1-1, TRAJ8)
CAGGTGFQKLVF

SEQ ID NO: 399218 - protein, 13 aa, Homo sapiens
  CDR3 for beta chain variable domain of TCR clone 199609 (TRBV11-2, TRBJ2-5)
CASSSTGEETQYF

SEQ ID NO: 399219 - protein, 19 aa, Homo sapiens
  CDR3 for alpha chain variable domain of TCR clone 199610 (TRAV26-1, TRAJ52)
CIVRAHRNAGGTSYGKLTI

SEQ ID NO: 399220 - protein, 15 aa, Homo sapiens
  CDR3 for beta chain variable domain of TCR clone 199610 (TRBV29-1, TRBJ2-1)
CSGRDRKSSYNEQFF

SEQ ID NO: 399221 - protein, 18 aa, Homo sapiens
  CDR3 for alpha chain variable domain of TCR clone 199611 (TRAV26-1, TRAJ22)
CIVRVSFWFCEATDLLIW

SEQ ID NO: 399222 - protein, 13 aa, Homo sapiens
  CDR3 for beta chain variable domain of TCR clone 199611 (TRBV7-9, TRBJ1-2)
CASSLKQNYGYTF

SEQ ID NO: 399223 - protein, 16 aa, Homo sapiens
  CDR3 for alpha chain variable domain of TCR clone 199612 (TRAV30, TRAJ24)
CGTEIVDADSWGKFQF

SEQ ID NO: 399224 - protein, 14 aa, Homo sapiens
  CDR3 for beta chain variable domain of TCR clone 199612 (TRBV12-5, TRBJ2-5)
GASGSRTHQETQYV

SEQ ID NO: 399225 - protein, 16 aa, Homo sapiens
  CDR3 for alpha chain variable domain of TCR clone 199613 (TRAV13-1, TRAJ52)
CSKFRCCGTSYGKLTF

SEQ ID NO: 399226 - protein, 15 aa, Homo sapiens
  CDR3 for beta chain variable domain of TCR clone 199613 (TRBV2, TRBJ2-1)
CASSELAGSYNEQFF

SEQ ID NO: 399227 - protein, 13 aa, Homo sapiens
  CDR3 for alpha chain variable domain of TCR clone 199614 (TRAV3, TRAJ20)
CAVRDGGDYKLSC

SEQ ID NO: 399228 - protein, 16 aa, Homo sapiens
  CDR3 for beta chain variable domain of TCR clone 199614 (TRBV4-1, TRBJ2-5)
CASSQTSGGPLETQYF

SEQ ID NO: 399229 - protein, 15 aa, Homo sapiens
  CDR3 for alpha chain variable domain of TCR clone 199615 (TRAV8-3, TRAJ23)
CAVGDRYNQGGKLIC

SEQ ID NO: 399230 - protein, 17 aa, Homo sapiens
  CDR3 for beta chain variable domain of TCR clone 199615 (TRBV4-1, TRBJ1-4)
CASSQEGPRGVEEKLFF

SEQ ID NO: 399231 - protein, 13 aa, Homo sapiens
  CDR3 for alpha chain variable domain of TCR clone 199616 (TRAV16, TRAJ48)
CSPLNFGNEKSTF

SEQ ID NO: 399232 - protein, 11 aa, Homo sapiens
  CDR3 for beta chain variable domain of TCR clone 199616 (TRBV7-9, TRBJ2-3)
CASSPTDTQYF

SEQ ID NO: 399233 - protein, 15 aa, Homo sapiens
  CDR3 for alpha chain variable domain of TCR clone 199617 (TRAV20, TRAJ50)
CAVRQMKTSCDKVIF

SEQ ID NO: 399234 - protein, 16 aa, Homo sapiens
  CDR3 for beta chain variable domain of TCR clone 199617 (TRBV15, TRBJ1-2)
CATSRGPRTGGGGYTF

SEQ ID NO: 399235 - protein, 14 aa, Homo sapiens
  CDR3 for alpha chain variable domain of TCR clone 199618 (TRAV8-3, TRAJ35)
CAVVPQGFGNVLHF

SEQ ID NO: 399236 - protein, 13 aa, Homo sapiens
  CDR3 for beta chain variable domain of TCR clone 199618 (TRBV7-9, TRBJ1-2)
CASSLKQNYGYTF

SEQ ID NO: 399237 - protein, 13 aa, Homo sapiens
  CDR3 for alpha chain variable domain of TCR clone 199619 (TRAV12-2, TRAJ17)
CRAFQSCRQQANF

SEQ ID NO: 399238 - protein, 17 aa, Homo sapiens
  CDR3 for beta chain variable domain of TCR clone 199619 (TRBV20-1, TRBJ2-2)
CSASGSGQGGLTGELFF

SEQ ID NO: 399239 - protein, 11 aa, Homo sapiens
  CDR3 for alpha chain variable domain of TCR clone 199620 (TRAV12-1, TRAJ30)
CVVNGQDKIIF

SEQ ID NO: 399240 - protein, 12 aa, Homo sapiens
  CDR3 for beta chain variable domain of TCR clone 199620 (TRBV11-1, TRBJ2-2)
CASKRFTGELFF

SEQ ID NO: 399241 - protein, 12 aa, Homo sapiens
  CDR3 for alpha chain variable domain of TCR clone 199621 (TRAV1-2, TRAJ33)
CAALDSNYQLIW

SEQ ID NO: 399242 - protein, 16 aa, Homo sapiens
  CDR3 for beta chain variable domain of TCR clone 199621 (TRBV12-5, TRBJ2-5)
CASGPRTSGSQETQYF

SEQ ID NO: 399243 - protein, 14 aa, Homo sapiens
  CDR3 for alpha chain variable domain of TCR clone 199622 (TRAV2, TRAJ22)
CAVGRGGSARHLTF

SEQ ID NO: 399244 - protein, 14 aa, Homo sapiens
  CDR3 for beta chain variable domain of TCR clone 199622 (TRBV7-6, TRBJ2-3)
CASSVAGGTDTQYF

SEQ ID NO: 399245 - protein, 10 aa, Homo sapiens
  CDR3 for alpha chain variable domain of TCR clone 199623 (TRAV26-1, TRAJ40)
CIAGTYKYIF

SEQ ID NO: 399246 - protein, 13 aa, Homo sapiens
  CDR3 for beta chain variable domain of TCR clone 199623 (TRBV7-6, TRBJ1-2)
CASSLVADYGYTF

SEQ ID NO: 399247 - protein, 15 aa, Homo sapiens
  CDR3 for alpha chain variable domain of TCR clone 199624 (TRAV27, TRAJ38)
CAARRNAGNNRKLIW

SEQ ID NO: 399248 - protein, 12 aa, Homo sapiens
  CDR3 for beta chain variable domain of TCR clone 199624 (TRBV7-9, TRBJ2-7)
CASSFGSYEQYF

SEQ ID NO: 399249 - protein, 11 aa, Homo sapiens
  CDR3 for alpha chain variable domain of TCR clone 199625 (TRAV21, TRAJ34)
CAVTNTDKLIF

SEQ ID NO: 399250 - protein, 15 aa, Homo sapiens
  CDR3 for beta chain variable domain of TCR clone 199625 (TRBV7-2, TRBJ2-1)
CASSSGLAGGNEQVF

SEQ ID NO: 399251 - protein, 14 aa, Homo sapiens
  CDR3 for alpha chain variable domain of TCR clone 199626 (TRAV12-2, TRAJ11)
CAVNRESGYSTLTF

SEQ ID NO: 399252 - protein, 10 aa, Homo sapiens
  CDR3 for beta chain variable domain of TCR clone 199626 (TRBV20-1, TRBJ2-5)
CSARCETQYF

SEQ ID NO: 399253 - protein, 15 aa, Homo sapiens
  CDR3 for alpha chain variable domain of TCR clone 199627 (TRAV12-2, TRAJ53)
CAVNGGGGSNYKLTF

SEQ ID NO: 399254 - protein, 18 aa, Homo sapiens
  CDR3 for beta chain variable domain of TCR clone 199627 (TRBV7-6, TRBJ2-1)
CASSPRTSGMSSYNEQFF

SEQ ID NO: 399255 - protein, 14 aa, Homo sapiens
  CDR3 for alpha chain variable domain of TCR clone 199628 (TRAV1-2, TRAJ16)
CAVNRFSDGQKLLF

SEQ ID NO: 399256 - protein, 11 aa, Homo sapiens
  CDR3 for beta chain variable domain of TCR clone 199628 (TRBV20-1, TRBJ2-3)
CSGTSSTTQYF

SEQ ID NO: 399257 - protein, 14 aa, Homo sapiens
  CDR3 for alpha chain variable domain of TCR clone 199629 (TRAV16, TRAJ8)
CALLINTGFQKLVF

SEQ ID NO: 399258 - protein, 15 aa, Homo sapiens
  CDR3 for beta chain variable domain of TCR clone 199629 (TRBV19, TRBJ2-4)
CASRGPRRGENIQYF

SEQ ID NO: 399259 - protein, 17 aa, Homo sapiens
  CDR3 for alpha chain variable domain of TCR clone 199630 (TRAV3, TRAJ6)
CAVRDGPRAGGSYLPTF

SEQ ID NO: 399260 - protein, 20 aa, Homo sapiens
  CDR3 for beta chain variable domain of TCR clone 199630 (TRBV28, TRBJ2-1)
CASTPIGRSPGLAGGNEQFL

SEQ ID NO: 399261 - protein, 15 aa, Homo sapiens
  CDR3 for alpha chain variable domain of TCR clone 199631 (TRAV3, TRAJ42)
CAVRGGTGSQGNLIF

SEQ ID NO: 399262 - protein, 13 aa, Homo sapiens
  CDR3 for beta chain variable domain of TCR clone 199631 (TRBV19, TRBJ1-2)
CASIVPGQDGYTF

SEQ ID NO: 399263 - protein, 16 aa, Homo sapiens
  CDR3 for alpha chain variable domain of TCR clone 199632 (TRAV12-1, TRAJ22)
CVVNTISSSSARKLTF

SEQ ID NO: 399264 - protein, 13 aa, Homo sapiens
  CDR3 for beta chain variable domain of TCR clone 199632 (TRBV19, TRBJ2-1)
CASNGGVFSEQFF

SEQ ID NO: 399265 - protein, 14 aa, Homo sapiens
  CDR3 for alpha chain variable domain of TCR clone 199633 (TRAV8-1, TRAJ5)
CAARTDTGRRALTF

SEQ ID NO: 399266 - protein, 12 aa, Homo sapiens
  CDR3 for beta chain variable domain of TCR clone 199633 (TRBV11-2, TRBJ2-1)
CASSPGNNEQFF

SEQ ID NO: 399267 - protein, 23 aa, Homo sapiens
  CDR3 for alpha chain variable domain of TCR clone 199634 (TRAV26-1, TRAJ22)
CIVRVSFWFCKATDLWIWDIITV

SEQ ID NO: 399268 - protein, 13 aa, Homo sapiens
  CDR3 for beta chain variable domain of TCR clone 199634 (TRBV7-9, TRBJ1-2)
CASSLKQNYGYTF

SEQ ID NO: 399269 - protein, 15 aa, Homo sapiens
  CDR3 for alpha chain variable domain of TCR clone 199635 (TRAV8-2, TRAJ24)
FVVSDRTDSRGKLQF

SEQ ID NO: 399270 - protein, 11 aa, Homo sapiens
  CDR3 for beta chain variable domain of TCR clone 199635 (TRBV20-1, TRBJ1-2)
CSVQGAGGYTF

SEQ ID NO: 399271 - protein, 13 aa, Homo sapiens
  CDR3 for alpha chain variable domain of TCR clone 199636 (TRAV12-1, TRAJ20)
CVVNIEHDYKLSF

SEQ ID NO: 399272 - protein, 12 aa, Homo sapiens
  CDR3 for beta chain variable domain of TCR clone 199636 (TRBV29-1, TRBJ2-3)
CSVTGGADTQYF

SEQ ID NO: 399273 - protein, 14 aa, Homo sapiens
  CDR3 for alpha chain variable domain of TCR clone 199637 (TRAV12-3, TRAJ42)
CAMNYGGSQGNLIF

SEQ ID NO: 399274 - protein, 17 aa, Homo sapiens
  CDR3 for beta chain variable domain of TCR clone 199637 (TRBV20-1, TRBJ2-1)
CSASSSGLAGSYNEQFF

SEQ ID NO: 399275 - protein, 15 aa, Homo sapiens
  CDR3 for alpha chain variable domain of TCR clone 199638 (TRAV12-3, TRAJ13)
CAMSARSGGYQKVTF

SEQ ID NO: 399276 - protein, 21 aa, Homo sapiens
  CDR3 for beta chain variable domain of TCR clone 199638 (TRBV3-1, TRBJ2-7)
CSSGPAAKKGGGRSWHYEQYF

SEQ ID NO: 399277 - protein, 14 aa, Homo sapiens
  CDR3 for alpha chain variable domain of TCR clone 199639 (TRAV12-3, TRAJ10)
SHLPLTGGGNKLTF

SEQ ID NO: 399278 - protein, 15 aa, Homo sapiens
  CDR3 for beta chain variable domain of TCR clone 199639 (TRBV11-2, TRBJ2-5)
CASSLTGAGGKTQYF

SEQ ID NO: 399279 - protein, 13 aa, Homo sapiens
  CDR3 for alpha chain variable domain of TCR clone 199640 (TRAV21, TRAJ27)
CAARPGNAGKSTF

SEQ ID NO: 399280 - protein, 14 aa, Homo sapiens
  CDR3 for beta chain variable domain of TCR clone 199640 (TRBV7-6, TRBJ2-3)
CASSLGTVSDTRYF

SEQ ID NO: 399281 - protein, 13 aa, Homo sapiens
  CDR3 for alpha chain variable domain of TCR clone 199641 (TRAV12-2, TRAJ52)
CRAGCTSYGKLTF

SEQ ID NO: 399282 - protein, 12 aa, Homo sapiens
  CDR3 for beta chain variable domain of TCR clone 199641 (TRBV18, TRBJ2-1)
CASSPGTSEGFF

SEQ ID NO: 399283 - protein, 14 aa, Homo sapiens
  CDR3 for alpha chain variable domain of TCR clone 199642 (TRAV2, TRAJ30)
CAVEGSNRDDKIIF

SEQ ID NO: 399284 - protein, 14 aa, Homo sapiens
  CDR3 for beta chain variable domain of TCR clone 199642 (TRBV19, TRBJ2-3)
CASSIDLGGDTQYF

SEQ ID NO: 399285 - protein, 12 aa, Homo sapiens
  CDR3 for alpha chain variable domain of TCR clone 199643 (TRAV2, TRAJ33)
CAVWGSNYQLIW

SEQ ID NO: 399286 - protein, 16 aa, Homo sapiens
  CDR3 for beta chain variable domain of TCR clone 199643 (TRBV20-1, TRBJ1-4)
CSAPGQGLFTNEKLFF

SEQ ID NO: 399287 - protein, 16 aa, Homo sapiens
  CDR3 for alpha chain variable domain of TCR clone 199644 (TRAV30, TRAJ24)
CGTEIVDADSWGKFQF

SEQ ID NO: 399288 - protein, 14 aa, Homo sapiens
  CDR3 for beta chain variable domain of TCR clone 199644 (TRBV7-2, TRBJ2-7)
CASSSISGFSEQYF

SEQ ID NO: 399289 - protein, 18 aa, Homo sapiens
  CDR3 for alpha chain variable domain of TCR clone 199645 (TRAV21, TRAJ52)
CAVRPSPAGGTSYGKLTF

SEQ ID NO: 399290 - protein, 16 aa, Homo sapiens
  CDR3 for beta chain variable domain of TCR clone 199645 (TRBV19, TRBJ2-1)
CASSKAGPSSNSEQFF

SEQ ID NO: 399291 - protein, 13 aa, Homo sapiens
  CDR3 for alpha chain variable domain of TCR clone 199646 (TRAV27, TRAJ41)
CAGEGNSWYAPNF

SEQ ID NO: 399292 - protein, 14 aa, Homo sapiens
  CDR3 for beta chain variable domain of TCR clone 199646 (TRBV7-2, TRBJ1-1)
CASSFLTGTTEAFF

SEQ ID NO: 399293 - protein, 12 aa, Homo sapiens
  CDR3 for alpha chain variable domain of TCR clone 199647 (TRAV9-2, TRAJ9)
CAMNTGGFKTIF

SEQ ID NO: 399294 - protein, 13 aa, Homo sapiens
  CDR3 for beta chain variable domain of TCR clone 199647 (TRBV27, TRBJ2-7)
CASSFVSSYEQYF

SEQ ID NO: 399295 - protein, 14 aa, Homo sapiens
  CDR3 for alpha chain variable domain of TCR clone 199648 (TRAV1-2, TRAJ15)
CVVRDRQAGTALIF

SEQ ID NO: 399296 - protein, 17 aa, Homo sapiens
  CDR3 for beta chain variable domain of TCR clone 199648 (TRBV5-5, TRBJ1-2)
CASSLGSLDGQSEGYTF

SEQ ID NO: 399297 - protein, 12 aa, Homo sapiens
  CDR3 for alpha chain variable domain of TCR clone 199649 (TRAV8-1, TRAJ26)
CAVNNYGQTFVF

SEQ ID NO: 399298 - protein, 12 aa, Homo sapiens
  CDR3 for beta chain variable domain of TCR clone 199649 (TRBV5-5, TRBJ2-5)
CASSYFGETQYF

SEQ ID NO: 399299 - protein, 15 aa, Homo sapiens
  CDR3 for alpha chain variable domain of TCR clone 199650 (TRAV13-1, TRAJ57)
QVPPLSQGGSEKLVF

SEQ ID NO: 399300 - protein, 17 aa, Homo sapiens
  CDR3 for beta chain variable domain of TCR clone 199650 (TRBV7-3, TRBJ2-3)
CASSLMKRMGGADTQYF

SEQ ID NO: 399301 - protein, 14 aa, Homo sapiens
  CDR3 for alpha chain variable domain of TCR clone 199651 (TRAV12-3, TRAJ42)
CAMNYGGSQGNLIF

SEQ ID NO: 399302 - protein, 15 aa, Homo sapiens
  CDR3 for beta chain variable domain of TCR clone 199651 (TRBV5-7, TRBJ1-5)
CASSYGELWDQPQHF

SEQ ID NO: 399303 - protein, 15 aa, Homo sapiens
  CDR3 for alpha chain variable domain of TCR clone 199652 (TRAV21, TRAJ53)
RATLNSGGSNYKLTF

SEQ ID NO: 399304 - protein, 17 aa, Homo sapiens
  CDR3 for beta chain variable domain of TCR clone 199652 (TRBV7-8, TRBJ2-6)
CASSAGTGGAGANVLTF

SEQ ID NO: 399305 - protein, 11 aa, Homo sapiens
  CDR3 for alpha chain variable domain of TCR clone 199653 (TRAV3, TRAJ21)
CAVGNFDKFHF

SEQ ID NO: 399306 - protein, 16 aa, Homo sapiens
  CDR3 for beta chain variable domain of TCR clone 199653 (TRBV19, TRBJ2-1)
CASSKAGPSSYNEQFF

SEQ ID NO: 399307 - protein, 14 aa, Homo sapiens
  CDR3 for alpha chain variable domain of TCR clone 199654 (TRAV17, TRAJ34)
CATDSLEGTDKLIF

SEQ ID NO: 399308 - protein, 12 aa, Homo sapiens
  CDR3 for beta chain variable domain of TCR clone 199654 (TRBV11-2, TRBJ2-7)
CSSGTRPYEQYF

SEQ ID NO: 399309 - protein, 12 aa, Homo sapiens
  CDR3 for alpha chain variable domain of TCR clone 199655 (TRAV13-1, TRAJ48)
CAANFGNEKLTF

SEQ ID NO: 399310 - protein, 16 aa, Homo sapiens
  CDR3 for beta chain variable domain of TCR clone 199655 (TRBV19, TRBJ2-2)
CASRSPGTGATGELFF

SEQ ID NO: 399311 - protein, 14 aa, Homo sapiens
  CDR3 for alpha chain variable domain of TCR clone 199656 (TRAV8-4, TRAJ13)
CAVTLSGGYQKVTF

SEQ ID NO: 399312 - protein, 16 aa, Homo sapiens
  CDR3 for beta chain variable domain of TCR clone 199656 (TRBV19, TRBJ2-1)
CASSKAGPSSYNERFF

SEQ ID NO: 399313 - protein, 14 aa, Homo sapiens
  CDR3 for alpha chain variable domain of TCR clone 199657 (TRAV23/DV6, TRAJ54)
CAASSGQGAQKLVF

SEQ ID NO: 399314 - protein, 14 aa, Homo sapiens
  CDR3 for beta chain variable domain of TCR clone 199657 (TRBV7-9, TRBJ2-1)
CASSQGQAEAEQFF

SEQ ID NO: 399315 - protein, 12 aa, Homo sapiens
  CDR3 for alpha chain variable domain of TCR clone 199658 (TRAV12-3, TRAJ20)
CAMVSGDYKLSF

SEQ ID NO: 399316 - protein, 14 aa, Homo sapiens
  CDR3 for beta chain variable domain of TCR clone 199658 (TRBV5-5, TRBJ1-5)
CASSGQGVDQPQHF

SEQ ID NO: 399317 - protein, 13 aa, Homo sapiens
  CDR3 for alpha chain variable domain of TCR clone 199659 (TRAV12-2, TRAJ9)
CAVCNTGGFKTIF

SEQ ID NO: 399318 - protein, 14 aa, Homo sapiens
  CDR3 for beta chain variable domain of TCR clone 199659 (TRBV7-2, TRBJ2-7)
CASRSRGAAYEQYF

SEQ ID NO: 399319 - protein, 11 aa, Homo sapiens
  CDR3 for alpha chain variable domain of TCR clone 199660 (TRAV12-2, TRAJ33)
CAVTSNYQLIW

SEQ ID NO: 399320 - protein, 14 aa, Homo sapiens
  CDR3 for beta chain variable domain of TCR clone 199660 (TRBV12-4, TRBJ2-2)
CASNQGATTGELFF

SEQ ID NO: 399321 - protein, 13 aa, Homo sapiens
  CDR3 for alpha chain variable domain of TCR clone 199661 (TRAV12-1, TRAJ26)
SATYLYYGQNFVF

SEQ ID NO: 399322 - protein, 18 aa, Homo sapiens
  CDR3 for beta chain variable domain of TCR clone 199661 (TRBV18, TRBJ2-3)
CASSYTSGAAGGTDTQYF

SEQ ID NO: 399323 - protein, 15 aa, Homo sapiens
  CDR3 for alpha chain variable domain of TCR clone 199662 (TRAV21, TRAJ13)
CAVRPTSGGYQKVNF

SEQ ID NO: 399324 - protein, 18 aa, Homo sapiens
  CDR3 for beta chain variable domain of TCR clone 199662 (TRBV11-3, TRBJ2-1)
CASSSYPGGRDSYNEQFF

SEQ ID NO: 399325 - protein, 16 aa, Homo sapiens
  CDR3 for alpha chain variable domain of TCR clone 199663 (TRAV12-3, TRAJ53)
CAMSPGSGCSNYKLTF

SEQ ID NO: 399326 - protein, 14 aa, Homo sapiens
  CDR3 for beta chain variable domain of TCR clone 199663 (TRBV19, TRBJ2-1)
CASPTFVLSGEQFF

SEQ ID NO: 399327 - protein, 14 aa, Homo sapiens
  CDR3 for alpha chain variable domain of TCR clone 199664 (TRAV8-3, TRAJ27)
CAGGRNTNAGKSTF

SEQ ID NO: 399328 - protein, 16 aa, Homo sapiens
  CDR3 for beta chain variable domain of TCR clone 199664 (TRBV12-5, TRBJ2-5)
CASGPRTSGKQETQYF

SEQ ID NO: 399329 - protein, 14 aa, Homo sapiens
  CDR3 for alpha chain variable domain of TCR clone 199665 (TRAV23/DV6, TRAJ3)
CAASMASSASKIIF

SEQ ID NO: 399330 - protein, 13 aa, Homo sapiens
  CDR3 for beta chain variable domain of TCR clone 199665 (TRBV27, TRBJ2-5)
CASFSRGLETQYC

SEQ ID NO: 399331 - protein, 12 aa, Homo sapiens
  CDR3 for alpha chain variable domain of TCR clone 199666 (TRAV13-2, TRAJ23)
CAERHRGGKLIF

SEQ ID NO: 399332 - protein, 16 aa, Homo sapiens
  CDR3 for beta chain variable domain of TCR clone 199666 (TRBV20-1, TRBJ1-4)
CSAPGQGFLANEKLFF

SEQ ID NO: 399333 - protein, 14 aa, Homo sapiens
  CDR3 for alpha chain variable domain of TCR clone 199667 (TRAV12-2, TRAJ40)
CAVKIPSGTYKYIF

SEQ ID NO: 399334 - protein, 14 aa, Homo sapiens
  CDR3 for beta chain variable domain of TCR clone 199667 (TRBV27, TRBJ2-2)
CASSSRLVPGELFF

SEQ ID NO: 399335 - protein, 14 aa, Homo sapiens
  CDR3 for alpha chain variable domain of TCR clone 199668 (TRAV13-1, TRAJ35)
CAASKGGFGNVLHC

SEQ ID NO: 399336 - protein, 15 aa, Homo sapiens
  CDR3 for beta chain variable domain of TCR clone 199668 (TRBV12-4, TRBJ2-5)
RASSPPTGLQETQYF

SEQ ID NO: 399337 - protein, 13 aa, Homo sapiens
  CDR3 for alpha chain variable domain of TCR clone 199669 (TRAV13-1, TRAJ12)
CAASPDSSYKLIF

SEQ ID NO: 399338 - protein, 20 aa, Homo sapiens
  CDR3 for beta chain variable domain of TCR clone 199669 (TRBV7-8, TRBJ2-2)
CASSHLFPGPTIHITGELFF

SEQ ID NO: 399339 - protein, 13 aa, Homo sapiens
  CDR3 for alpha chain variable domain of TCR clone 199670 (TRAV8-3, TRAJ23)
CAGIYNQGGKLIF

SEQ ID NO: 399340 - protein, 14 aa, Homo sapiens
  CDR3 for beta chain variable domain of TCR clone 199670 (TRBV12-4, TRBJ1-6)
CASNLQGKGSPLHF

SEQ ID NO: 399341 - protein, 14 aa, Homo sapiens
  CDR3 for alpha chain variable domain of TCR clone 199671 (TRAV14/DV4, TRAJ34)
CAMREGRPHRQAHL

SEQ ID NO: 399342 - protein, 14 aa, Homo sapiens
  CDR3 for beta chain variable domain of TCR clone 199671 (TRBV19, TRBJ2-1)
CASPTFVLSGEQSF

SEQ ID NO: 399343 - protein, 14 aa, Homo sapiens
  CDR3 for alpha chain variable domain of TCR clone 199672 (TRAV12-2, TRAJ13)
CAVKKTGGYQKATF

SEQ ID NO: 399344 - protein, 15 aa, Homo sapiens
  CDR3 for beta chain variable domain of TCR clone 199672 (TRBV27, TRBJ2-1)
CASSNGEGSSNEQFF

SEQ ID NO: 399345 - protein, 15 aa, Homo sapiens
  CDR3 for alpha chain variable domain of TCR clone 199673 (TRAV3, TRAJ3)
CAVRDRDSSASKIIF

SEQ ID NO: 399346 - protein, 14 aa, Homo sapiens
  CDR3 for beta chain variable domain of TCR clone 199673 (TRBV13, TRBJ2-5)
CASSLEWVGETQYF

SEQ ID NO: 399347 - protein, 12 aa, Homo sapiens
  CDR3 for alpha chain variable domain of TCR clone 199674 (TRAV8-3, TRAJ26)
CAGDNYGQNFVF

SEQ ID NO: 399348 - protein, 12 aa, Homo sapiens
  CDR3 for beta chain variable domain of TCR clone 199674 (TRBV11-2, TRBJ2-2)
CAGSLGGGELFF

SEQ ID NO: 399349 - protein, 13 aa, Homo sapiens
  CDR3 for alpha chain variable domain of TCR clone 199675 (TRAV2, TRAJ40)
CAVVTSGTYNNVF

SEQ ID NO: 399350 - protein, 14 aa, Homo sapiens
  CDR3 for beta chain variable domain of TCR clone 199675 (TRBV19, TRBJ2-1)
CASPTFVLSGEQFF

SEQ ID NO: 399351 - protein, 14 aa, Homo sapiens
  CDR3 for alpha chain variable domain of TCR clone 199676 (TRAV26-1, TRAJ40)
CIVRVARGTYKYIF

SEQ ID NO: 399352 - protein, 14 aa, Homo sapiens
  CDR3 for beta chain variable domain of TCR clone 199676 (TRBV7-3, TRBJ2-7)
CASSLKAGSDEQYF

SEQ ID NO: 399353 - protein, 14 aa, Homo sapiens
  CDR3 for alpha chain variable domain of TCR clone 199677 (TRAV1-2, TRAJ8)
CAVREDTGFQKLVF

SEQ ID NO: 399354 - protein, 15 aa, Homo sapiens
  CDR3 for beta chain variable domain of TCR clone 199677 (TRBV5-1, TRBJ2-7)
CASSLVDFTTYEQYF

SEQ ID NO: 399355 - protein, 17 aa, Homo sapiens
  CDR3 for alpha chain variable domain of TCR clone 199678 (TRAV26-1, TRAJ37)
CIVRGITVSSNTGKLIF

SEQ ID NO: 399356 - protein, 15 aa, Homo sapiens
  CDR3 for beta chain variable domain of TCR clone 199678 (TRBV6-1, TRBJ2-1)
CASSEAAYSYNEQFF

SEQ ID NO: 399357 - protein, 15 aa, Homo sapiens
  CDR3 for alpha chain variable domain of TCR clone 199679 (TRAV12-3, TRAJ42)
CAMSGHGGSQGNLIF

SEQ ID NO: 399358 - protein, 19 aa, Homo sapiens
  CDR3 for beta chain variable domain of TCR clone 199679 (TRBV7-2, TRBJ2-7)
CASSQRAAGPGTSFYEQYF

SEQ ID NO: 399359 - protein, 14 aa, Homo sapiens
  CDR3 for alpha chain variable domain of TCR clone 199680 (TRAV9-2, TRAJ39)
CALYIYNAGNMLTF

SEQ ID NO: 399360 - protein, 14 aa, Homo sapiens
  CDR3 for beta chain variable domain of TCR clone 199680 (TRBV5-8, TRBJ2-3)
CASSLGQGTDTQYF

SEQ ID NO: 399361 - protein, 14 aa, Homo sapiens
  CDR3 for alpha chain variable domain of TCR clone 199681 (TRAV12-2, TRAJ13)
CAVKKTGGYQKVTF

SEQ ID NO: 399362 - protein, 14 aa, Homo sapiens
  CDR3 for beta chain variable domain of TCR clone 199681 (TRBV25-1, TRBJ1-1)
CASTHLGGNTESFF

SEQ ID NO: 399363 - protein, 14 aa, Homo sapiens
  CDR3 for alpha chain variable domain of TCR clone 199682 (TRAV2, TRAJ9)
CAVEDRSGGFKTIF

SEQ ID NO: 399364 - protein, 13 aa, Homo sapiens
  CDR3 for beta chain variable domain of TCR clone 199682 (TRBV7-3, TRBJ1-1)
CASSQYWGAEAFF

SEQ ID NO: 399365 - protein, 12 aa, Homo sapiens
  CDR3 for alpha chain variable domain of TCR clone 199683 (TRAV12-1, TRAJ23)
CVVNIPGGKLIF

SEQ ID NO: 399366 - protein, 15 aa, Homo sapiens
  CDR3 for beta chain variable domain of TCR clone 199683 (TRBV7-2, TRBJ2-7)
CASSLVSSGSYEQYS

SEQ ID NO: 399367 - protein, 14 aa, Homo sapiens
  CDR3 for alpha chain variable domain of TCR clone 199684 (TRAV14/DV4, TRAJ34)
CAMREGRPPRQAHL

SEQ ID NO: 399368 - protein, 14 aa, Homo sapiens
  CDR3 for beta chain variable domain of TCR clone 199684 (TRBV19, TRBJ2-1)
CASPTFVLSGEQFF

SEQ ID NO: 399369 - protein, 14 aa, Homo sapiens
  CDR3 for alpha chain variable domain of TCR clone 199685 (TRAV38-1, TRAJ45)
CAYYSGGGADGLTF

SEQ ID NO: 399370 - protein, 12 aa, Homo sapiens
  CDR3 for beta chain variable domain of TCR clone 199685 (TRBV7-2, TRBJ1-6)
CASSLSSSPLHF

SEQ ID NO: 399371 - protein, 12 aa, Homo sapiens
  CDR3 for alpha chain variable domain of TCR clone 199686 (TRAV26-1, TRAJ26)
CIVFIYGQNFVF

SEQ ID NO: 399372 - protein, 11 aa, Homo sapiens
  CDR3 for beta chain variable domain of TCR clone 199686 (TRBV12-4, TRBJ2-3)
CASTATDTQYF

SEQ ID NO: 399373 - protein, 13 aa, Homo sapiens
  CDR3 for alpha chain variable domain of TCR clone 199687 (TRAV29/DV5, TRAJ48)
CAASDFGNEKLTF

SEQ ID NO: 399374 - protein, 16 aa, Homo sapiens
  CDR3 for beta chain variable domain of TCR clone 199687 (TRBV12-5, TRBJ2-5)
CASGPRTSGNQETQYF

SEQ ID NO: 399375 - protein, 12 aa, Homo sapiens
  CDR3 for alpha chain variable domain of TCR clone 199688 (TRAV21, TRAJ33)
CAKMDSNYQLIW

SEQ ID NO: 399376 - protein, 12 aa, Homo sapiens
  CDR3 for beta chain variable domain of TCR clone 199688 (TRBV18, TRBJ2-1)
CASSSDEDEQFF

SEQ ID NO: 399377 - protein, 16 aa, Homo sapiens
  CDR3 for alpha chain variable domain of TCR clone 199689 (TRAV16, TRAJ52)
CALSGVGGTSYGKLTF

SEQ ID NO: 399378 - protein, 13 aa, Homo sapiens
  CDR3 for beta chain variable domain of TCR clone 199689 (TRBV19, TRBJ1-2)
CASSLKQNYGYTF

SEQ ID NO: 399379 - protein, 13 aa, Homo sapiens
  CDR3 for alpha chain variable domain of TCR clone 199690 (TRAV20, TRAJ54)
CAVQAGGAQKLVF

SEQ ID NO: 399380 - protein, 14 aa, Homo sapiens
  CDR3 for beta chain variable domain of TCR clone 199690 (TRBV20-1, TRBJ2-7)
CSAKTGTGSYEQYF

SEQ ID NO: 399381 - protein, 13 aa, Homo sapiens
  CDR3 for alpha chain variable domain of TCR clone 199691 (TRAV12-2, TRAJ49)
CAVKPNTGNKFYF

SEQ ID NO: 399382 - protein, 14 aa, Homo sapiens
  CDR3 for beta chain variable domain of TCR clone 199691 (TRBV7-3, TRBJ1-1)
CASSLKGGNTEAFF

SEQ ID NO: 399383 - protein, 15 aa, Homo sapiens
  CDR3 for alpha chain variable domain of TCR clone 199692 (TRAV21, TRAJ53)
CATLNSGVSNYKLTF

SEQ ID NO: 399384 - protein, 14 aa, Homo sapiens
  CDR3 for beta chain variable domain of TCR clone 199692 (TRBV15, TRBJ2-5)
CATSIGGLGETQYF

SEQ ID NO: 399385 - protein, 15 aa, Homo sapiens
  CDR3 for alpha chain variable domain of TCR clone 199693 (TRAV8-3, TRAJ45)
CASSYSGGVADALTF

SEQ ID NO: 399386 - protein, 13 aa, Homo sapiens
  CDR3 for beta chain variable domain of TCR clone 199693 (TRBV10-3, TRBJ2-7)
CASKLAVNYEQYF

SEQ ID NO: 399387 - protein, 12 aa, Homo sapiens
  CDR3 for alpha chain variable domain of TCR clone 199694 (TRAV2, TRAJ31)
CAVQDNNARLMF

SEQ ID NO: 399388 - protein, 16 aa, Homo sapiens
  CDR3 for beta chain variable domain of TCR clone 199694 (TRBV10-3, TRBJ2-1)
CAISGVGDGGGGEQFF

SEQ ID NO: 399389 - protein, 12 aa, Homo sapiens
  CDR3 for alpha chain variable domain of TCR clone 199695 (TRAV3, TRAJ20)
CAVRDPDYKLSF

SEQ ID NO: 399390 - protein, 13 aa, Homo sapiens
  CDR3 for beta chain variable domain of TCR clone 199695 (TRBV9, TRBJ2-1)
CASSVGQRGEQFF

SEQ ID NO: 399391 - protein, 15 aa, Homo sapiens
  CDR3 for alpha chain variable domain of TCR clone 199696 (TRAV26-1, TRAJ24)
CIVREDTDSWGKLQF

SEQ ID NO: 399392 - protein, 14 aa, Homo sapiens
  CDR3 for beta chain variable domain of TCR clone 199696 (TRBV6-1, TRBJ1-3)
CASVQGGGGNTIYF

SEQ ID NO: 399393 - protein, 13 aa, Homo sapiens
  CDR3 for alpha chain variable domain of TCR clone 199697 (TRAV8-6, TRAJ24)
CAVSSDSWGKLQF

SEQ ID NO: 399394 - protein, 12 aa, Homo sapiens
  CDR3 for beta chain variable domain of TCR clone 199697 (TRBV3-1, TRBJ2-1)
CASSQGSSGQFF

SEQ ID NO: 399395 - protein, 16 aa, Homo sapiens
  CDR3 for alpha chain variable domain of TCR clone 199698 (TRAV16, TRAJ52)
CALSAAVGTSYGKLTF

SEQ ID NO: 399396 - protein, 13 aa, Homo sapiens
  CDR3 for beta chain variable domain of TCR clone 199698 (TRBV11-2, TRBJ2-5)
CASSRGPSETQYF

SEQ ID NO: 399397 - protein, 15 aa, Homo sapiens
  CDR3 for alpha chain variable domain of TCR clone 199699 (TRAV3, TRAJ13)
CAVRDIAGGYQKDTF

SEQ ID NO: 399398 - protein, 13 aa, Homo sapiens
  CDR3 for beta chain variable domain of TCR clone 199699 (TRBV2, TRBJ2-2)
CASSKKNTGELFF

SEQ ID NO: 399399 - protein, 17 aa, Homo sapiens
  CDR3 for alpha chain variable domain of TCR clone 199700 (TRAV12-3, TRAJ26)
CAMRGGRWDNYGQNFVF

SEQ ID NO: 399400 - protein, 12 aa, Homo sapiens
  CDR3 for beta chain variable domain of TCR clone 199700 (TRBV19, TRBJ1-1)
CASSTTGIEAFF

SEQ ID NO: 399401 - protein, 12 aa, Homo sapiens
  CDR3 for alpha chain variable domain of TCR clone 199701 (TRAV12-3, TRAJ17)
CAMTLTGNKLTF

SEQ ID NO: 399402 - protein, 15 aa, Homo sapiens
  CDR3 for beta chain variable domain of TCR clone 199701 (TRBV20-1, TRBJ2-7)
CNARDWVSGMDEQYF

SEQ ID NO: 399403 - protein, 15 aa, Homo sapiens
  CDR3 for alpha chain variable domain of TCR clone 199702 (TRAV26-1, TRAJ42)
CIVRVKGGSQGNLFF

SEQ ID NO: 399404 - protein, 14 aa, Homo sapiens
  CDR3 for beta chain variable domain of TCR clone 199702 (TRBV19, TRBJ2-2)
CATTGHANAGELFF

SEQ ID NO: 399405 - protein, 13 aa, Homo sapiens
  CDR3 for alpha chain variable domain of TCR clone 199703 (TRAV17, TRAJ5)
CAPMDTDRRALTF

SEQ ID NO: 399406 - protein, 15 aa, Homo sapiens
  CDR3 for beta chain variable domain of TCR clone 199703 (TRBV6-6, TRBJ2-5)
CASSPGGGLEETQYF

SEQ ID NO: 399407 - protein, 15 aa, Homo sapiens
  CDR3 for alpha chain variable domain of TCR clone 199704 (TRAV26-1, TRAJ12)
IASSGLMDSSYKLIF

SEQ ID NO: 399408 - protein, 11 aa, Homo sapiens
  CDR3 for beta chain variable domain of TCR clone 199704 (TRBV7-9, TRBJ2-3)
CASSPPDTQYF

SEQ ID NO: 399409 - protein, 21 aa, Homo sapiens
  CDR3 for alpha chain variable domain of TCR clone 199705 (TRAV36/DV7, TRAJ39)
TATQTGDSAIYLPNAGNMLTF

SEQ ID NO: 399410 - protein, 20 aa, Homo sapiens
  CDR3 for beta chain variable domain of TCR clone 199705 (TRBV7-8, TRBJ2-2)
CASSHLFPGPTIHITGELFF

SEQ ID NO: 399411 - protein, 16 aa, Homo sapiens
  CDR3 for alpha chain variable domain of TCR clone 199706 (TRAV3, TRAJ37)
CAVRGRGAGNAGKLIF

SEQ ID NO: 399412 - protein, 13 aa, Homo sapiens
  CDR3 for beta chain variable domain of TCR clone 199706 (TRBV14, TRBJ2-7)
CASSQDRRGEQYF

SEQ ID NO: 399413 - protein, 15 aa, Homo sapiens
  CDR3 for alpha chain variable domain of TCR clone 199707 (TRAV12-1, TRAJ45)
CVVLSGGGGADGLTC

SEQ ID NO: 399414 - protein, 13 aa, Homo sapiens
  CDR3 for beta chain variable domain of TCR clone 199707 (TRBV7-3, TRBJ1-1)
CASSQDWGAEAVF

SEQ ID NO: 399415 - protein, 14 aa, Homo sapiens
  CDR3 for alpha chain variable domain of TCR clone 199708 (TRAV1-2, TRAJ16)
CAVNRFSDGQKLLF

SEQ ID NO: 399416 - protein, 16 aa, Homo sapiens
  CDR3 for beta chain variable domain of TCR clone 199708 (TRBV12-4, TRBJ1-5)
CASSRPGGGSNQPQHS

SEQ ID NO: 399417 - protein, 12 aa, Homo sapiens
  CDR3 for alpha chain variable domain of TCR clone 199709 (TRAV17, TRAJ12)
CATLRSSYKLIF

SEQ ID NO: 399418 - protein, 16 aa, Homo sapiens
  CDR3 for beta chain variable domain of TCR clone 199709 (TRBV15, TRBJ2-3)
CATSRDLGIVTDTQYF

SEQ ID NO: 399419 - protein, 13 aa, Homo sapiens
  CDR3 for alpha chain variable domain of TCR clone 199710 (TRAV13-1, TRAJ5)
CAASDTGRRALTF

SEQ ID NO: 399420 - protein, 14 aa, Homo sapiens
  CDR3 for beta chain variable domain of TCR clone 199710 (TRBV28, TRBJ2-3)
CTSVPAVYRDTQYF

SEQ ID NO: 399421 - protein, 16 aa, Homo sapiens
  CDR3 for alpha chain variable domain of TCR clone 199711 (TRAV13-1, TRAJ10)
CAASNALTGGGNELTF

SEQ ID NO: 399422 - protein, 20 aa, Homo sapiens
  CDR3 for beta chain variable domain of TCR clone 199711 (TRBV19, TRBJ2-1)
CASSISRTVTSTRLNNEQFF

SEQ ID NO: 399423 - protein, 14 aa, Homo sapiens
  CDR3 for alpha chain variable domain of TCR clone 199712 (TRAV29/DV5, TRAJ45)
CAASFRGGADGLTF

SEQ ID NO: 399424 - protein, 15 aa, Homo sapiens
  CDR3 for beta chain variable domain of TCR clone 199712 (TRBV5-1, TRBJ1-1)
CASSSTTGTNTEAFF

SEQ ID NO: 399425 - protein, 12 aa, Homo sapiens
  CDR3 for alpha chain variable domain of TCR clone 199713 (TRAV8-3, TRAJ26)
CAGDNYGQNFVF

SEQ ID NO: 399426 - protein, 16 aa, Homo sapiens
  CDR3 for beta chain variable domain of TCR clone 199713 (TRBV20-1, TRBJ1-4)
CSAPVQGLLTNEKLFF

SEQ ID NO: 399427 - protein, 14 aa, Homo sapiens
  CDR3 for alpha chain variable domain of TCR clone 199714 (TRAV16, TRAJ26)
CALSSANYGHNFVF

SEQ ID NO: 399428 - protein, 16 aa, Homo sapiens
  CDR3 for beta chain variable domain of TCR clone 199714 (TRBV20-1, TRBJ1-4)
CSAPGQGLLTNEKLIF

SEQ ID NO: 399429 - protein, 12 aa, Homo sapiens
  CDR3 for alpha chain variable domain of TCR clone 199715 (TRAV1-2, TRAJ33)
CAALDRNYRLIW

SEQ ID NO: 399430 - protein, 15 aa, Homo sapiens
  CDR3 for beta chain variable domain of TCR clone 199715 (TRBV27, TRBJ2-1)
CASSNGGGSSNEQFF

SEQ ID NO: 399431 - protein, 14 aa, Homo sapiens
  CDR3 for alpha chain variable domain of TCR clone 199716 (TRAV26-2, TRAJ31)
CILIPGNNNARLMF

SEQ ID NO: 399432 - protein, 16 aa, Homo sapiens
  CDR3 for beta chain variable domain of TCR clone 199716 (TRBV7-3, TRBJ2-1)
CASSLVSGSANNEQFF

SEQ ID NO: 399433 - protein, 18 aa, Homo sapiens
  CDR3 for alpha chain variable domain of TCR clone 199717 (TRAV21, TRAJ52)
CAVRPSPAGGTSYGTLTF

SEQ ID NO: 399434 - protein, 14 aa, Homo sapiens
  CDR3 for beta chain variable domain of TCR clone 199717 (TRBV4-2, TRBJ2-1)
CASGLDRAYNEQFF

SEQ ID NO: 399435 - protein, 16 aa, Homo sapiens
  CDR3 for alpha chain variable domain of TCR clone 199718 (TRAV3, TRAJ10)
CAVRDMRAGGGNKLPF

SEQ ID NO: 399436 - protein, 16 aa, Homo sapiens
  CDR3 for beta chain variable domain of TCR clone 199718 (TRBV19, TRBJ2-2)
CASSFPGQGLAGELFF

SEQ ID NO: 399437 - protein, 12 aa, Homo sapiens
  CDR3 for alpha chain variable domain of TCR clone 199719 (TRAV29/DV5, TRAJ30)
CAASARDDKIIF

SEQ ID NO: 399438 - protein, 14 aa, Homo sapiens
  CDR3 for beta chain variable domain of TCR clone 199719 (TRBV7-2, TRBJ1-1)
CASSFLTGTTEAFF

SEQ ID NO: 399439 - protein, 12 aa, Homo sapiens
  CDR3 for alpha chain variable domain of TCR clone 199720 (TRAV29/DV5, TRAJ31)
CAASSHNARLMF

SEQ ID NO: 399440 - protein, 17 aa, Homo sapiens
  CDR3 for beta chain variable domain of TCR clone 199720 (TRBV18, TRBJ2-6)
CASSPRQGAVGANVLTF

SEQ ID NO: 399441 - protein, 14 aa, Homo sapiens
  CDR3 for alpha chain variable domain of TCR clone 199721 (TRAV13-1, TRAJ35)
CAASKGGFWNVLHC

SEQ ID NO: 399442 - protein, 13 aa, Homo sapiens
  CDR3 for beta chain variable domain of TCR clone 199721 (TRBV7-3, TRBJ1-1)
CERREDWGDEDLF

SEQ ID NO: 399443 - protein, 17 aa, Homo sapiens
  CDR3 for alpha chain variable domain of TCR clone 199722 (TRAV13-1, TRAJ52)
CAASSGAGGTSYGKLTF

SEQ ID NO: 399444 - protein, 15 aa, Homo sapiens
  CDR3 for beta chain variable domain of TCR clone 199722 (TRBV2, TRBJ2-1)
CASSELAGSYNDQFF

SEQ ID NO: 399445 - protein, 14 aa, Homo sapiens
  CDR3 for alpha chain variable domain of TCR clone 199723 (TRAV36/DV7, TRAJ16)
CAVEADSDGQKLLF

SEQ ID NO: 399446 - protein, 13 aa, Homo sapiens
  CDR3 for beta chain variable domain of TCR clone 199723 (TRBV12-4, TRBJ2-7)
CASSPTETYEQYF

SEQ ID NO: 399447 - protein, 15 aa, Homo sapiens
  CDR3 for alpha chain variable domain of TCR clone 199724 (TRAV13-2, TRAJ10)
CAENRDTGGGNKLTF

SEQ ID NO: 399448 - protein, 16 aa, Homo sapiens
  CDR3 for beta chain variable domain of TCR clone 199724 (TRBV2, TRBJ1-3)
CASSRTGVSTGNTIYF

SEQ ID NO: 399449 - protein, 14 aa, Homo sapiens
  CDR3 for alpha chain variable domain of TCR clone 199725 (TRAV8-3, TRAJ39)
CAVGAYNAGNMLTF

SEQ ID NO: 399450 - protein, 16 aa, Homo sapiens
  CDR3 for beta chain variable domain of TCR clone 199725 (TRBV2, TRBJ2-7)
CASSEPWTGPSYEQYF

SEQ ID NO: 399451 - protein, 11 aa, Homo sapiens
  CDR3 for alpha chain variable domain of TCR clone 199726 (TRAV21, TRAJ33)
CQNDSNYQLIW

SEQ ID NO: 399452 - protein, 14 aa, Homo sapiens
  CDR3 for beta chain variable domain of TCR clone 199726 (TRBV2, TRBJ2-7)
CASSLTSGGYEQYF

SEQ ID NO: 399453 - protein, 14 aa, Homo sapiens
  CDR3 for alpha chain variable domain of TCR clone 199727 (TRAV38-1, TRAJ45)
CASHSGGGADGLTV

SEQ ID NO: 399454 - protein, 15 aa, Homo sapiens
  CDR3 for beta chain variable domain of TCR clone 199727 (TRBV10-2, TRBJ2-6)
CASSEQGTGANVLTF

SEQ ID NO: 399455 - protein, 11 aa, Homo sapiens
  CDR3 for alpha chain variable domain of TCR clone 199728 (TRAV27, TRAJ45)
CAGAQEEVLTD

SEQ ID NO: 399456 - protein, 15 aa, Homo sapiens
  CDR3 for beta chain variable domain of TCR clone 199728 (TRBV11-2, TRBJ2-3)
CASLKDGREGDTQYF

SEQ ID NO: 399457 - protein, 17 aa, Homo sapiens
  CDR3 for alpha chain variable domain of TCR clone 199729 (TRAV4, TRAJ13)
CLVGVQGSSGGYQKVTF

SEQ ID NO: 399458 - protein, 18 aa, Homo sapiens
  CDR3 for beta chain variable domain of TCR clone 199729 (TRBV15, TRBJ2-3)
CATSRDGARSWNTDTQYF

SEQ ID NO: 399459 - protein, 15 aa, Homo sapiens
  CDR3 for alpha chain variable domain of TCR clone 199730 (TRAV3, TRAJ20)
CAVRDIKLSDYKLSF

SEQ ID NO: 399460 - protein, 15 aa, Homo sapiens
  CDR3 for beta chain variable domain of TCR clone 199730 (TRBV7-9, TRBJ1-6)
CASSSPGRANSPLHF

SEQ ID NO: 399461 - protein, 16 aa, Homo sapiens
  CDR3 for alpha chain variable domain of TCR clone 199731 (TRAV23/DV6, TRAJ9)
CAASIGGNTGGFKTIF

SEQ ID NO: 399462 - protein, 12 aa, Homo sapiens
  CDR3 for beta chain variable domain of TCR clone 199731 (TRBV7-8, TRBJ2-7)
CASSLGDRKQYF

SEQ ID NO: 399463 - protein, 15 aa, Homo sapiens
  CDR3 for alpha chain variable domain of TCR clone 199732 (TRAV2, TRAJ44)
CAVEAYTGTASKLTF

SEQ ID NO: 399464 - protein, 17 aa, Homo sapiens
  CDR3 for beta chain variable domain of TCR clone 199732 (TRBV13, TRBJ2-3)
CASSLSRVAGGRNTQYF

SEQ ID NO: 399465 - protein, 14 aa, Homo sapiens
  CDR3 for alpha chain variable domain of TCR clone 199733 (TRAV1-2, TRAJ8)
CAVREDAGFQKLVF

SEQ ID NO: 399466 - protein, 14 aa, Homo sapiens
  CDR3 for beta chain variable domain of TCR clone 199733 (TRBV7-9, TRBJ1-1)
CASTPLQSYTEAFF

SEQ ID NO: 399467 - protein, 15 aa, Homo sapiens
  CDR3 for alpha chain variable domain of TCR clone 199734 (TRAV12-2, TRAJ53)
CAVKGGGGSNYKLTF

SEQ ID NO: 399468 - protein, 17 aa, Homo sapiens
  CDR3 for beta chain variable domain of TCR clone 199734 (TRBV7-3, TRBJ2-3)
CASSLMKRMRGADTQYF

SEQ ID NO: 399469 - protein, 12 aa, Homo sapiens
  CDR3 for alpha chain variable domain of TCR clone 199735 (TRAV12-2, TRAJ10)
WGVTGGGKKLTF

SEQ ID NO: 399470 - protein, 14 aa, Homo sapiens
  CDR3 for beta chain variable domain of TCR clone 199735 (TRBV27, TRBJ2-7)
CASATGTERREQYF

SEQ ID NO: 399471 - protein, 11 aa, Homo sapiens
  CDR3 for alpha chain variable domain of TCR clone 199736 (TRAV26-1, TRAJ37)
CIVRVGRKLIF

SEQ ID NO: 399472 - protein, 15 aa, Homo sapiens
  CDR3 for beta chain variable domain of TCR clone 199736 (TRBV28, TRBJ2-5)
CASSSGRTIQETQYF

SEQ ID NO: 399473 - protein, 14 aa, Homo sapiens
  CDR3 for alpha chain variable domain of TCR clone 199737 (TRAV26-1, TRAJ38)
CIADNAGNNRKLIW

SEQ ID NO: 399474 - protein, 12 aa, Homo sapiens
  CDR3 for beta chain variable domain of TCR clone 199737 (TRBV19, TRBJ1-2)
CASSPDVYGYTF

SEQ ID NO: 399475 - protein, 13 aa, Homo sapiens
  CDR3 for alpha chain variable domain of TCR clone 199738 (TRAV21, TRAJ57)
CAVTQGGSEKLVF

SEQ ID NO: 399476 - protein, 18 aa, Homo sapiens
  CDR3 for beta chain variable domain of TCR clone 199738 (TRBV5-7, TRBJ2-1)
CASSLDFRRLTGGNEQFF

SEQ ID NO: 399477 - protein, 14 aa, Homo sapiens
  CDR3 for alpha chain variable domain of TCR clone 199739 (TRAV8-3, TRAJ4)
CAVGAAGGDNKLIF

SEQ ID NO: 399478 - protein, 15 aa, Homo sapiens
  CDR3 for beta chain variable domain of TCR clone 199739 (TRBV5-1, TRBJ2-1)
CASSPPRAPYNEQFF

SEQ ID NO: 399479 - protein, 14 aa, Homo sapiens
  CDR3 for alpha chain variable domain of TCR clone 199740 (TRAV1-2, TRAJ16)
CAVNRFSDGQNLLF

SEQ ID NO: 399480 - protein, 13 aa, Homo sapiens
  CDR3 for beta chain variable domain of TCR clone 199740 (TRBV3-1, TRBJ2-5)
CASISVARETQYF

SEQ ID NO: 399481 - protein, 17 aa, Homo sapiens
  CDR3 for alpha chain variable domain of TCR clone 199741 (TRAV13-1, TRAJ52)
CAASSGAGGTRYGKLTF

SEQ ID NO: 399482 - protein, 12 aa, Homo sapiens
  CDR3 for beta chain variable domain of TCR clone 199741 (TRBV11-2, TRBJ2-2)
CASSLGGGELFF

SEQ ID NO: 399483 - protein, 12 aa, Homo sapiens
  CDR3 for alpha chain variable domain of TCR clone 199742 (TRAV12-3, TRAJ17)
CAMTLTGNKLTF

SEQ ID NO: 399484 - protein, 15 aa, Homo sapiens
  CDR3 for beta chain variable domain of TCR clone 199742 (TRBV11-3, TRBJ2-3)
CASLKDRREGDTQYF

SEQ ID NO: 399485 - protein, 18 aa, Homo sapiens
  CDR3 for alpha chain variable domain of TCR clone 199743 (TRAV21, TRAJ52)
CAVRPSPAGGTSYGKLTL

SEQ ID NO: 399486 - protein, 15 aa, Homo sapiens
  CDR3 for beta chain variable domain of TCR clone 199743 (TRBV27, TRBJ2-1)
CASSNGGGSSNEQFF

SEQ ID NO: 399487 - protein, 16 aa, Homo sapiens
  CDR3 for alpha chain variable domain of TCR clone 199744 (TRAV30, TRAJ24)
CGTEIVDADSWGKFQL

SEQ ID NO: 399488 - protein, 14 aa, Homo sapiens
  CDR3 for beta chain variable domain of TCR clone 199744 (TRBV12-5, TRBJ2-5)
CASGSREHQETQYF

SEQ ID NO: 399489 - protein, 17 aa, Homo sapiens
  CDR3 for alpha chain variable domain of TCR clone 199745 (TRAV14/DV4, TRAJ53)
CNERGPSSGGSNYKLTF

SEQ ID NO: 399490 - protein, 14 aa, Homo sapiens
  CDR3 for beta chain variable domain of TCR clone 199745 (TRBV7-6, TRBJ2-3)
SASSVAGGTDTQYF

SEQ ID NO: 399491 - protein, 14 aa, Homo sapiens
  CDR3 for alpha chain variable domain of TCR clone 199746 (TRAV1-2, TRAJ16)
CAVNRFSDGQKLLF

SEQ ID NO: 399492 - protein, 14 aa, Homo sapiens
  CDR3 for beta chain variable domain of TCR clone 199746 (TRBV11-1, TRBJ2-7)
CASSFRKGSYEQYF

SEQ ID NO: 399493 - protein, 14 aa, Homo sapiens
  CDR3 for alpha chain variable domain of TCR clone 199747 (TRAV20, TRAJ3)
CAVQGYSSASKIIF

SEQ ID NO: 399494 - protein, 14 aa, Homo sapiens
  CDR3 for beta chain variable domain of TCR clone 199747 (TRBV12-5, TRBJ2-5)
CASGSRTHQETQYF

SEQ ID NO: 399495 - protein, 11 aa, Homo sapiens
  CDR3 for alpha chain variable domain of TCR clone 199748 (TRAV1-2, TRAJ40)
CAVPGTYKYIF

SEQ ID NO: 399496 - protein, 19 aa, Homo sapiens
  CDR3 for beta chain variable domain of TCR clone 199748 (TRBV29-1, TRBJ2-7)
SAALKSWGLEGATSSTSDR

SEQ ID NO: 399497 - protein, 12 aa, Homo sapiens
  CDR3 for alpha chain variable domain of TCR clone 199749 (TRAV13-1, TRAJ49)
CAASIRSNQFYF

SEQ ID NO: 399498 - protein, 14 aa, Homo sapiens
  CDR3 for beta chain variable domain of TCR clone 199749 (TRBV5-1, TRBJ2-3)
CASSRGQGGGTQYF

SEQ ID NO: 399499 - protein, 12 aa, Homo sapiens
  CDR3 for alpha chain variable domain of TCR clone 199750 (TRAV12-3, TRAJ41)
CAMSYSGYALNF

SEQ ID NO: 399500 - protein, 13 aa, Homo sapiens
  CDR3 for beta chain variable domain of TCR clone 199750 (TRBV7-3, TRBJ2-1)
CASSVDSYKEQFF

SEQ ID NO: 399501 - protein, 13 aa, Homo sapiens
  CDR3 for alpha chain variable domain of TCR clone 199751 (TRAV35, TRAJ53)
CAGQESSNYKLTF

SEQ ID NO: 399502 - protein, 11 aa, Homo sapiens
  CDR3 for beta chain variable domain of TCR clone 199751 (TRBV29-1, TRBJ2-5)
CSEERTGTQYF

SEQ ID NO: 399503 - protein, 13 aa, Homo sapiens
  CDR3 for alpha chain variable domain of TCR clone 199752 (TRAV12-3, TRAJ54)
CAMSVQGAQKLVF

SEQ ID NO: 399504 - protein, 16 aa, Homo sapiens
  CDR3 for beta chain variable domain of TCR clone 199752 (TRBV6-1, TRBJ2-5)
CASSETLDRGAETQYF

SEQ ID NO: 399505 - protein, 16 aa, Homo sapiens
  CDR3 for alpha chain variable domain of TCR clone 199753 (TRAV23/DV6, TRAJ9)
CAASIGGNTGGFKTIF

SEQ ID NO: 399506 - protein, 12 aa, Homo sapiens
  CDR3 for beta chain variable domain of TCR clone 199753 (TRBV6-3, TRBJ2-7)
CASSETGFEQYF

SEQ ID NO: 399507 - protein, 11 aa, Homo sapiens
  CDR3 for alpha chain variable domain of TCR clone 199754 (TRAV13-2, TRAJ54)
RAVQGAQKLVF

SEQ ID NO: 399508 - protein, 16 aa, Homo sapiens
  CDR3 for beta chain variable domain of TCR clone 199754 (TRBV10-3, TRBJ2-1)
CAIRGGGRGDYNEQFF

SEQ ID NO: 399509 - protein, 14 aa, Homo sapiens
  CDR3 for alpha chain variable domain of TCR clone 199755 (TRAV4, TRAJ13)
CLVGYSGGYQKDTF

SEQ ID NO: 399510 - protein, 13 aa, Homo sapiens
  CDR3 for beta chain variable domain of TCR clone 199755 (TRBV18, TRBJ1-1)
CASSGGRNTEAFF

SEQ ID NO: 399511 - protein, 13 aa, Homo sapiens
  CDR3 for alpha chain variable domain of TCR clone 199756 (TRAV8-6, TRAJ20)
CAVRTADDYKLSF

SEQ ID NO: 399512 - protein, 17 aa, Homo sapiens
  CDR3 for beta chain variable domain of TCR clone 199756 (TRBV5-1, TRBJ2-1)
CASSLGQISFSYNEQFF

SEQ ID NO: 399513 - protein, 12 aa, Homo sapiens
  CDR3 for alpha chain variable domain of TCR clone 199757 (TRAV12-2, TRAJ31)
CAVNTPDARLMF

SEQ ID NO: 399514 - protein, 15 aa, Homo sapiens
  CDR3 for beta chain variable domain of TCR clone 199757 (TRBV7-2, TRBJ2-1)
CASSSGLAGGNEQFF

SEQ ID NO: 399515 - protein, 15 aa, Homo sapiens
  CDR3 for alpha chain variable domain of TCR clone 199758 (TRAV1-2, TRAJ30)
FAVRPHGNRDDKSIF

SEQ ID NO: 399516 - protein, 13 aa, Homo sapiens
  CDR3 for beta chain variable domain of TCR clone 199758 (TRBV4-1, TRBJ2-7)
CASSQGQAYEQYF

SEQ ID NO: 399517 - protein, 13 aa, Homo sapiens
  CDR3 for alpha chain variable domain of TCR clone 199759 (TRAV12-2, TRAJ6)
CAVNVSRKLHTYI

SEQ ID NO: 399518 - protein, 12 aa, Homo sapiens
  CDR3 for beta chain variable domain of TCR clone 199759 (TRBV29-1, TRBJ2-3)
CSVTGGADTQYL

SEQ ID NO: 399519 - protein, 14 aa, Homo sapiens
  CDR3 for alpha chain variable domain of TCR clone 199760 (TRAV4, TRAJ6)
CLGPASGGSYIPTF

SEQ ID NO: 399520 - protein, 12 aa, Homo sapiens
  CDR3 for beta chain variable domain of TCR clone 199760 (TRBV6-5, TRBJ2-3)
CASSPSTDTKYF

SEQ ID NO: 399521 - protein, 17 aa, Homo sapiens
  CDR3 for alpha chain variable domain of TCR clone 199761 (TRAV12-3, TRAJ6)
CAMSARGGAGGSYIPTF

SEQ ID NO: 399522 - protein, 15 aa, Homo sapiens
  CDR3 for beta chain variable domain of TCR clone 199761 (TRBV28, TRBJ2-2)
CASRLQGVGTGELFF

SEQ ID NO: 399523 - protein, 22 aa, Homo sapiens
  CDR3 for alpha chain variable domain of TCR clone 199762 (TRAV23/DV6, TRAJ43)
CISWIPSLETQQPLLCSRRCSF

SEQ ID NO: 399524 - protein, 13 aa, Homo sapiens
  CDR3 for beta chain variable domain of TCR clone 199762 (TRBV12-4, TRBJ1-2)
CASSLRQGKGYTF

SEQ ID NO: 399525 - protein, 14 aa, Homo sapiens
  CDR3 for alpha chain variable domain of TCR clone 199763 (TRAV12-2, TRAJ13)
CAVKKTGGYQKVTF

SEQ ID NO: 399526 - protein, 15 aa, Homo sapiens
  CDR3 for beta chain variable domain of TCR clone 199763 (TRBV6-3, TRBJ2-2)
RASSFLATLAGELFF

SEQ ID NO: 399527 - protein, 17 aa, Homo sapiens
  CDR3 for alpha chain variable domain of TCR clone 199764 (TRAV1-2, TRAJ26)
CAVRDLITMVRILSLVP

SEQ ID NO: 399528 - protein, 14 aa, Homo sapiens
  CDR3 for beta chain variable domain of TCR clone 199764 (TRBV18, TRBJ2-7)
CASSPRGGAYEQYF

SEQ ID NO: 399529 - protein, 15 aa, Homo sapiens
  CDR3 for alpha chain variable domain of TCR clone 199765 (TRAV17, TRAJ56)
CATDANTGANSKLTF

SEQ ID NO: 399530 - protein, 16 aa, Homo sapiens
  CDR3 for beta chain variable domain of TCR clone 199765 (TRBV13, TRBJ2-7)
CASSSRESGRTYEQYF

SEQ ID NO: 399531 - protein, 12 aa, Homo sapiens
  CDR3 for alpha chain variable domain of TCR clone 199766 (TRAV13-2, TRAJ23)
CAERHREGKLIF

SEQ ID NO: 399532 - protein, 15 aa, Homo sapiens
  CDR3 for beta chain variable domain of TCR clone 199766 (TRBV9, TRBJ1-6)
CASSVAGTGDSPLHF

SEQ ID NO: 399533 - protein, 11 aa, Homo sapiens
  CDR3 for alpha chain variable domain of TCR clone 199767 (TRAV20, TRAJ31)
CAVQMRARLMF

SEQ ID NO: 399534 - protein, 15 aa, Homo sapiens
  CDR3 for beta chain variable domain of TCR clone 199767 (TRBV18, TRBJ2-7)
CASSPSSTGNYEQYF

SEQ ID NO: 399535 - protein, 11 aa, Homo sapiens
  CDR3 for alpha chain variable domain of TCR clone 199768 (TRAV2, TRAJ13)
CASGGHQKVTF

SEQ ID NO: 399536 - protein, 15 aa, Homo sapiens
  CDR3 for beta chain variable domain of TCR clone 199768 (TRBV7-9, TRBJ1-6)
CASSSPGRGNSHLHF

SEQ ID NO: 399537 - protein, 18 aa, Homo sapiens
  CDR3 for alpha chain variable domain of TCR clone 199769 (TRAV26-2, TRAJ45)
CILRDDKYSGGGADGLTF

SEQ ID NO: 399538 - protein, 11 aa, Homo sapiens
  CDR3 for beta chain variable domain of TCR clone 199769 (TRBV29-1, TRBJ2-5)
CSEDRTGTQYF

SEQ ID NO: 399539 - protein, 13 aa, Homo sapiens
  CDR3 for alpha chain variable domain of TCR clone 199770 (TRAV3, TRAJ30)
CAVRDRGVDKIIF

SEQ ID NO: 399540 - protein, 16 aa, Homo sapiens
  CDR3 for beta chain variable domain of TCR clone 199770 (TRBV7-3, TRBJ2-2)
CASSLKRGTLSGELFF

SEQ ID NO: 399541 - protein, 15 aa, Homo sapiens
  CDR3 for alpha chain variable domain of TCR clone 199771 (TRAV8-3, TRAJ45)
CASSYSGGGADGHTF

SEQ ID NO: 399542 - protein, 16 aa, Homo sapiens
  CDR3 for beta chain variable domain of TCR clone 199771 (TRBV7-9, TRBJ2-2)
CASSGFGGANTGELFF

SEQ ID NO: 399543 - protein, 13 aa, Homo sapiens
  CDR3 for alpha chain variable domain of TCR clone 199772 (TRAV6, TRAJ16)
CALDDSDGQTLLF

SEQ ID NO: 399544 - protein, 15 aa, Homo sapiens
  CDR3 for beta chain variable domain of TCR clone 199772 (TRBV20-1, TRBJ2-7)
CSARDRVSGMDEQYF

SEQ ID NO: 399545 - protein, 14 aa, Homo sapiens
  CDR3 for alpha chain variable domain of TCR clone 199773 (TRAV12-1, TRAJ12)
CVVTRMDSSSKLIF

SEQ ID NO: 399546 - protein, 14 aa, Homo sapiens
  CDR3 for beta chain variable domain of TCR clone 199773 (TRBV4-1, TRBJ2-7)
CASSPVAGGDEQYF

SEQ ID NO: 399547 - protein, 14 aa, Homo sapiens
  CDR3 for alpha chain variable domain of TCR clone 199774 (TRAV13-2, TRAJ29)
CAEGTFETNTPLVF

SEQ ID NO: 399548 - protein, 13 aa, Homo sapiens
  CDR3 for beta chain variable domain of TCR clone 199774 (TRBV2, TRBJ1-1)
CASNLVRNTEAFF

SEQ ID NO: 399549 - protein, 18 aa, Homo sapiens
  CDR3 for alpha chain variable domain of TCR clone 199775 (TRAV21, TRAJ52)
CAGRPSPAGGTSYGKLTF

SEQ ID NO: 399550 - protein, 16 aa, Homo sapiens
  CDR3 for beta chain variable domain of TCR clone 199775 (TRBV7-3, TRBJ2-1)
CASSLEGYRSYNEQFF

SEQ ID NO: 399551 - protein, 14 aa, Homo sapiens
  CDR3 for alpha chain variable domain of TCR clone 199776 (TRAV3, TRAJ8)
CAVSLSTGFQKLVF

SEQ ID NO: 399552 - protein, 14 aa, Homo sapiens
  CDR3 for beta chain variable domain of TCR clone 199776 (TRBV6-6, TRBJ1-5)
CASVDSGFNQPQHF

SEQ ID NO: 399553 - protein, 15 aa, Homo sapiens
  CDR3 for alpha chain variable domain of TCR clone 199777 (TRAV8-3, TRAJ45)
CAASYSGGGAAGLTF

SEQ ID NO: 399554 - protein, 13 aa, Homo sapiens
  CDR3 for beta chain variable domain of TCR clone 199777 (TRBV10-3, TRBJ2-7)
CASKLAVNYEQYF

SEQ ID NO: 399555 - protein, 15 aa, Homo sapiens
  CDR3 for alpha chain variable domain of TCR clone 199778 (TRAV8-1, TRAJ8)
CAVNAMNTGFQILVF

SEQ ID NO: 399556 - protein, 15 aa, Homo sapiens
  CDR3 for beta chain variable domain of TCR clone 199778 (TRBV5-8, TRBJ1-1)
CASSFSGTSLKGAFF

SEQ ID NO: 399557 - protein, 14 aa, Homo sapiens
  CDR3 for alpha chain variable domain of TCR clone 199779 (TRAV26-2, TRAJ32)
CCVGYGGAKNKLIF

SEQ ID NO: 399558 - protein, 13 aa, Homo sapiens
  CDR3 for beta chain variable domain of TCR clone 199779 (TRBV12-5, TRBJ2-3)
CASGDRQSDTQYF

SEQ ID NO: 399559 - protein, 13 aa, Homo sapiens
  CDR3 for alpha chain variable domain of TCR clone 199780 (TRAV8-6, TRAJ49)
CAVITNTGNRFYF

SEQ ID NO: 399560 - protein, 15 aa, Homo sapiens
  CDR3 for beta chain variable domain of TCR clone 199780 (TRBV9, TRBJ1-6)
CASSVAVTGDSPLHF

SEQ ID NO: 399561 - protein, 12 aa, Homo sapiens
  CDR3 for alpha chain variable domain of TCR clone 199781 (TRAV13-2, TRAJ23)
RAERHRGGKLIF

SEQ ID NO: 399562 - protein, 16 aa, Homo sapiens
  CDR3 for beta chain variable domain of TCR clone 199781 (TRBV20-1, TRBJ1-4)
CSAPGQGLLTNERLFF

SEQ ID NO: 399563 - protein, 14 aa, Homo sapiens
  CDR3 for alpha chain variable domain of TCR clone 199782 (TRAV22, TRAJ6)
CAGVGPGGSYRPTF

SEQ ID NO: 399564 - protein, 14 aa, Homo sapiens
  CDR3 for beta chain variable domain of TCR clone 199782 (TRBV9, TRBJ2-7)
CASSVGVGSYEQYF

SEQ ID NO: 399565 - protein, 10 aa, Homo sapiens
  CDR3 for alpha chain variable domain of TCR clone 199783 (TRAV20, TRAJ22)
CAAPARQLTF

SEQ ID NO: 399566 - protein, 16 aa, Homo sapiens
  CDR3 for beta chain variable domain of TCR clone 199783 (TRBV12-4, TRBJ2-5)
CASSFFVRGRQETQYF

SEQ ID NO: 399567 - protein, 14 aa, Homo sapiens
  CDR3 for alpha chain variable domain of TCR clone 199784 (TRAV8-4, TRAJ8)
CAVAMNTGFQKLVF

SEQ ID NO: 399568 - protein, 16 aa, Homo sapiens
  CDR3 for beta chain variable domain of TCR clone 199784 (TRBV5-4, TRBJ2-1)
CASSLALAGAYNEQLF

SEQ ID NO: 399569 - protein, 14 aa, Homo sapiens
  CDR3 for alpha chain variable domain of TCR clone 199785 (TRAV1-1, TRAJ27)
CAGIDNTNEGKSTF

SEQ ID NO: 399570 - protein, 13 aa, Homo sapiens
  CDR3 for beta chain variable domain of TCR clone 199785 (TRBV6-3, TRBJ2-3)
CASGGTDPDTQYF

SEQ ID NO: 399571 - protein, 12 aa, Homo sapiens
  CDR3 for alpha chain variable domain of TCR clone 199786 (TRAV2, TRAJ5)
CALDTGRRALTF

SEQ ID NO: 399572 - protein, 13 aa, Homo sapiens
  CDR3 for beta chain variable domain of TCR clone 199786 (TRBV7-3, TRBJ1-1)
CASSQDWGAEAFF

SEQ ID NO: 399573 - protein, 16 aa, Homo sapiens
  CDR3 for alpha chain variable domain of TCR clone 199787 (TRAV12-3, TRAJ53)
RAMSPGSGGSNYKLTF

SEQ ID NO: 399574 - protein, 17 aa, Homo sapiens
  CDR3 for beta chain variable domain of TCR clone 199787 (TRBV28, TRBJ2-5)
CASSTPEGDALQETQYF

SEQ ID NO: 399575 - protein, 14 aa, Homo sapiens
  CDR3 for alpha chain variable domain of TCR clone 199788 (TRAV23/DV6, TRAJ24)
CAASLSDSWGKLQF

SEQ ID NO: 399576 - protein, 16 aa, Homo sapiens
  CDR3 for beta chain variable domain of TCR clone 199788 (TRBV7-9, TRBJ2-6)
CTSSLKGPLRANVLTF

SEQ ID NO: 399577 - protein, 14 aa, Homo sapiens
  CDR3 for alpha chain variable domain of TCR clone 199789 (TRAV8-4, TRAJ13)
CAVSECWGLPESYL

SEQ ID NO: 399578 - protein, 15 aa, Homo sapiens
  CDR3 for beta chain variable domain of TCR clone 199789 (TRBV12-4, TRBJ1-1)
CASSLAVSRGAEAFF

SEQ ID NO: 399579 - protein, 15 aa, Homo sapiens
  CDR3 for alpha chain variable domain of TCR clone 199790 (TRAV1-2, TRAJ34)
CLLPLCSPYTDKLIF

SEQ ID NO: 399580 - protein, 14 aa, Homo sapiens
  CDR3 for beta chain variable domain of TCR clone 199790 (TRBV4-1, TRBJ2-2)
CASSQAVNTGELFF

SEQ ID NO: 399581 - protein, 11 aa, Homo sapiens
  CDR3 for alpha chain variable domain of TCR clone 199791 (TRAV12-3, TRAJ27)
CAMANAGNSTV

SEQ ID NO: 399582 - protein, 13 aa, Homo sapiens
  CDR3 for beta chain variable domain of TCR clone 199791 (TRBV20-1, TRBJ1-1)
CSARVGGNTEAFF

SEQ ID NO: 399583 - protein, 16 aa, Homo sapiens
  CDR3 for alpha chain variable domain of TCR clone 199792 (TRAV23/DV6, TRAJ9)
CAASIGGNTGCFKTIF

SEQ ID NO: 399584 - protein, 15 aa, Homo sapiens
  CDR3 for beta chain variable domain of TCR clone 199792 (TRBV7-9, TRBJ1-4)
CASSARTGGNEKLFF

SEQ ID NO: 399585 - protein, 16 aa, Homo sapiens
  CDR3 for alpha chain variable domain of TCR clone 199793 (TRAV30, TRAJ32)
CGTESSYGGATNKLIF

SEQ ID NO: 399586 - protein, 14 aa, Homo sapiens
  CDR3 for beta chain variable domain of TCR clone 199793 (TRBV4-1, TRBJ2-2)
CASSQAVNTGELFF

SEQ ID NO: 399587 - protein, 13 aa, Homo sapiens
  CDR3 for alpha chain variable domain of TCR clone 199794 (TRAV13-2, TRAJ13)
CAERPGGYQRVTF

SEQ ID NO: 399588 - protein, 16 aa, Homo sapiens
  CDR3 for beta chain variable domain of TCR clone 199794 (TRBV18, TRBJ2-5)
CASSPPAGGGAKTQYF

SEQ ID NO: 399589 - protein, 17 aa, Homo sapiens
  CDR3 for alpha chain variable domain of TCR clone 199795 (TRAV17, TRAJ28)
CATDPRRGGAGSYQLTF

SEQ ID NO: 399590 - protein, 15 aa, Homo sapiens
  CDR3 for beta chain variable domain of TCR clone 199795 (TRBV7-2, TRBJ2-1)
CASSSGLAGGNEQFF

SEQ ID NO: 399591 - protein, 14 aa, Homo sapiens
  CDR3 for alpha chain variable domain of TCR clone 199796 (TRAV13-1, TRAJ24)
CAASPADSWGKFQF

SEQ ID NO: 399592 - protein, 17 aa, Homo sapiens
  CDR3 for beta chain variable domain of TCR clone 199796 (TRBV13, TRBJ2-3)
CASSLSRVAGGRNTQYF

SEQ ID NO: 399593 - protein, 18 aa, Homo sapiens
  CDR3 for alpha chain variable domain of TCR clone 199797 (TRAV21, TRAJ52)
CAVRASPAGGTSYGKLTF

SEQ ID NO: 399594 - protein, 15 aa, Homo sapiens
  CDR3 for beta chain variable domain of TCR clone 199797 (TRBV7-2, TRBJ2-1)
CASSLASGRVNEQFF

SEQ ID NO: 399595 - protein, 13 aa, Homo sapiens
  CDR3 for alpha chain variable domain of TCR clone 199798 (TRAV27, TRAJ45)
CRGSGGGADGLTF

SEQ ID NO: 399596 - protein, 14 aa, Homo sapiens
  CDR3 for beta chain variable domain of TCR clone 199798 (TRBV25-1, TRBJ1-1)
CASTHLGGNTEAFF

SEQ ID NO: 399597 - protein, 11 aa, Homo sapiens
  CDR3 for alpha chain variable domain of TCR clone 199799 (TRAV1-2, TRAJ20)
CAVSNDYKPSF

SEQ ID NO: 399598 - protein, 16 aa, Homo sapiens
  CDR3 for beta chain variable domain of TCR clone 199799 (TRBV29-1, TRBJ2-6)
CSVEDITYSGANDLTF

SEQ ID NO: 399599 - protein, 12 aa, Homo sapiens
  CDR3 for alpha chain variable domain of TCR clone 199800 (TRAV13-2, TRAJ23)
CAERHRGGKLIF

SEQ ID NO: 399600 - protein, 16 aa, Homo sapiens
  CDR3 for beta chain variable domain of TCR clone 199800 (TRBV24-1, TRBJ2-3)
CATSDPGTGATDTQYF

SEQ ID NO: 399601 - protein, 17 aa, Homo sapiens
  CDR3 for alpha chain variable domain of TCR clone 199801 (TRAV12-3, TRAJ18)
CAMIRADRGPTLGRLYF

SEQ ID NO: 399602 - protein, 14 aa, Homo sapiens
  CDR3 for beta chain variable domain of TCR clone 199801 (TRBV5-7, TRBJ1-6)
CASTPWPADSPLHF

SEQ ID NO: 399603 - protein, 14 aa, Homo sapiens
  CDR3 for alpha chain variable domain of TCR clone 199802 (TRAV17, TRAJ57)
CATDSQGGSEKLVF

SEQ ID NO: 399604 - protein, 13 aa, Homo sapiens
  CDR3 for beta chain variable domain of TCR clone 199802 (TRBV19, TRBJ2-7)
CASSPRQSYEQYF

SEQ ID NO: 399605 - protein, 14 aa, Homo sapiens
  CDR3 for alpha chain variable domain of TCR clone 199803 (TRAV12-2, TRAJ17)
CAVLFKAAGNKLTF

SEQ ID NO: 399606 - protein, 14 aa, Homo sapiens
  CDR3 for beta chain variable domain of TCR clone 199803 (TRBV7-2, TRBJ2-7)
CDSRSQGAAYEKYF

SEQ ID NO: 399607 - protein, 14 aa, Homo sapiens
  CDR3 for alpha chain variable domain of TCR clone 199804 (TRAV1-1, TRAJ28)
CAAPSGVGSYQLTF

SEQ ID NO: 399608 - protein, 11 aa, Homo sapiens
  CDR3 for beta chain variable domain of TCR clone 199804 (TRBV12-4, TRBJ2-3)
CASTATDTQYF

SEQ ID NO: 399609 - protein, 14 aa, Homo sapiens
  CDR3 for alpha chain variable domain of TCR clone 199805 (TRAV8-3, TRAJ15)
CAVGLNQAGTALIF

SEQ ID NO: 399610 - protein, 12 aa, Homo sapiens
  CDR3 for beta chain variable domain of TCR clone 199805 (TRBV19, TRBJ2-7)
VAAGTTYYEQYF

SEQ ID NO: 399611 - protein, 14 aa, Homo sapiens
  CDR3 for alpha chain variable domain of TCR clone 199806 (TRAV26-1, TRAJ39)
CIVRGSRAGNMITF

SEQ ID NO: 399612 - protein, 15 aa, Homo sapiens
  CDR3 for beta chain variable domain of TCR clone 199806 (TRBV7-9, TRBJ1-5)
CASNQGHQPNQPQHF

SEQ ID NO: 399613 - protein, 14 aa, Homo sapiens
  CDR3 for alpha chain variable domain of TCR clone 199807 (TRAV2, TRAJ37)
CAVEDRGNTGKLIF

SEQ ID NO: 399614 - protein, 14 aa, Homo sapiens
  CDR3 for beta chain variable domain of TCR clone 199807 (TRBV18, TRBJ2-1)
CASSPQGRFNEQFF

SEQ ID NO: 399615 - protein, 11 aa, Homo sapiens
  CDR3 for alpha chain variable domain of TCR clone 199808 (TRAV17, TRAJ9)
CATTGGFKTIF

SEQ ID NO: 399616 - protein, 14 aa, Homo sapiens
  CDR3 for beta chain variable domain of TCR clone 199808 (TRBV7-9, TRBJ2-7)
CASSLGAGAYEQYF

SEQ ID NO: 399617 - protein, 23 aa, Homo sapiens
  CDR3 for alpha chain variable domain of TCR clone 199809 (TRAV26-1, TRAJ38)
CIADNAGNNHIQNPDPAVYQLRD

SEQ ID NO: 399618 - protein, 12 aa, Homo sapiens
  CDR3 for beta chain variable domain of TCR clone 199809 (TRBV11-2, TRBJ2-2)
CASSLGGGDLFF

SEQ ID NO: 399619 - protein, 14 aa, Homo sapiens
  CDR3 for alpha chain variable domain of TCR clone 199810 (TRAV26-1, TRAJ38)
CIADNAGNNRKPIW

SEQ ID NO: 399620 - protein, 12 aa, Homo sapiens
  CDR3 for beta chain variable domain of TCR clone 199810 (TRBV29-1, TRBJ2-3)
CSVTGGADTQYF

SEQ ID NO: 399621 - protein, 12 aa, Homo sapiens
  CDR3 for alpha chain variable domain of TCR clone 199811 (TRAV29/DV5, TRAJ49)
CAATDTGNTFYF

SEQ ID NO: 399622 - protein, 12 aa, Homo sapiens
  CDR3 for beta chain variable domain of TCR clone 199811 (TRBV12-4, TRBJ2-7)
CASSLGGYEQYF

SEQ ID NO: 399623 - protein, 14 aa, Homo sapiens
  CDR3 for alpha chain variable domain of TCR clone 199812 (TRAV8-6, TRAJ54)
CAVSLIQGAQRLVF

SEQ ID NO: 399624 - protein, 12 aa, Homo sapiens
  CDR3 for beta chain variable domain of TCR clone 199812 (TRBV7-2, TRBJ2-5)
CASSTGPGPQYF

SEQ ID NO: 399625 - protein, 13 aa, Homo sapiens
  CDR3 for alpha chain variable domain of TCR clone 199813 (TRAV27, TRAJ56)
CAGKPGANSKLTF

SEQ ID NO: 399626 - protein, 14 aa, Homo sapiens
  CDR3 for beta chain variable domain of TCR clone 199813 (TRBV7-2, TRBJ2-7)
CASSPKTSFYEQYF

SEQ ID NO: 399627 - protein, 13 aa, Homo sapiens
  CDR3 for alpha chain variable domain of TCR clone 199814 (TRAV12-1, TRAJ22)
CVVPSGSARQLTF

SEQ ID NO: 399628 - protein, 15 aa, Homo sapiens
  CDR3 for beta chain variable domain of TCR clone 199814 (TRBV11-3, TRBJ2-7)
CASSPGPASSYEQYC

SEQ ID NO: 399629 - protein, 13 aa, Homo sapiens
  CDR3 for alpha chain variable domain of TCR clone 199815 (TRAV36/DV7, TRAJ53)
CALSGGSNYKLTF

SEQ ID NO: 399630 - protein, 15 aa, Homo sapiens
  CDR3 for beta chain variable domain of TCR clone 199815 (TRBV20-1, TRBJ2-1)
CSARGIGGTYNEQFF

SEQ ID NO: 399631 - protein, 12 aa, Homo sapiens
  CDR3 for alpha chain variable domain of TCR clone 199816 (TRAV23/DV6, TRAJ3)
CAARTPQQCFQD

SEQ ID NO: 399632 - protein, 17 aa, Homo sapiens
  CDR3 for beta chain variable domain of TCR clone 199816 (TRBV7-9, TRBJ2-3)
CASSPTVAGDLTDTQYF

SEQ ID NO: 399633 - protein, 13 aa, Homo sapiens
  CDR3 for alpha chain variable domain of TCR clone 199817 (TRAV27, TRAJ41)
CAGEGNSGYALNF

SEQ ID NO: 399634 - protein, 13 aa, Homo sapiens
  CDR3 for beta chain variable domain of TCR clone 199817 (TRBV11-2, TRBJ2-7)
CASSGTRPYEQYF

SEQ ID NO: 399635 - protein, 11 aa, Homo sapiens
  CDR3 for alpha chain variable domain of TCR clone 199818 (TRAV21, TRAJ21)
CAAANFNKFYF

SEQ ID NO: 399636 - protein, 13 aa, Homo sapiens
  CDR3 for beta chain variable domain of TCR clone 199818 (TRBV11-3, TRBJ1-1)
CASSRQPNTEAFF

SEQ ID NO: 399637 - protein, 16 aa, Homo sapiens
  CDR3 for alpha chain variable domain of TCR clone 199819 (TRAV30, TRAJ24)
CDTEIVDADSWGKFQF

SEQ ID NO: 399638 - protein, 11 aa, Homo sapiens
  CDR3 for beta chain variable domain of TCR clone 199819 (TRBV19, TRBJ1-1)
CASSIGSEAFF

SEQ ID NO: 399639 - protein, 14 aa, Homo sapiens
  CDR3 for alpha chain variable domain of TCR clone 199820 (TRAV16, TRAJ57)
CPLPTQGGSEKLVF

SEQ ID NO: 399640 - protein, 15 aa, Homo sapiens
  CDR3 for beta chain variable domain of TCR clone 199820 (TRBV28, TRBJ1-3)
CASWGGHLSGNTIYF

SEQ ID NO: 399641 - protein, 18 aa, Homo sapiens
  CDR3 for alpha chain variable domain of TCR clone 199821 (TRAV21, TRAJ52)
CAVRPSPAGGNSYGKLTF

SEQ ID NO: 399642 - protein, 14 aa, Homo sapiens
  CDR3 for beta chain variable domain of TCR clone 199821 (TRBV20-1, TRBJ2-7)
CSAKTGTGGYEQYF

SEQ ID NO: 399643 - protein, 14 aa, Homo sapiens
  CDR3 for alpha chain variable domain of TCR clone 199822 (TRAV35, TRAJ53)
GRVNSGGSNYKLTF

SEQ ID NO: 399644 - protein, 15 aa, Homo sapiens
  CDR3 for beta chain variable domain of TCR clone 199822 (TRBV27, TRBJ1-6)
CASSFDRGLGSPLHF

SEQ ID NO: 399645 - protein, 15 aa, Homo sapiens
  CDR3 for alpha chain variable domain of TCR clone 199823 (TRAV27, TRAJ53)
CAGGDSGGSNYKLTF

SEQ ID NO: 399646 - protein, 13 aa, Homo sapiens
  CDR3 for beta chain variable domain of TCR clone 199823 (TRBV7-9, TRBJ2-1)
CASSWESYNEQFF

SEQ ID NO: 399647 - protein, 16 aa, Homo sapiens
  CDR3 for alpha chain variable domain of TCR clone 199824 (TRAV38-1, TRAJ37)
CAFKGDGSSNTGKLIF

SEQ ID NO: 399648 - protein, 13 aa, Homo sapiens
  CDR3 for beta chain variable domain of TCR clone 199824 (TRBV12-4, TRBJ2-5)
CASSLFRSETQYF

SEQ ID NO: 399649 - protein, 16 aa, Homo sapiens
  CDR3 for alpha chain variable domain of TCR clone 199825 (TRAV30, TRAJ24)
CGTGIVDADSWGTFQF

SEQ ID NO: 399650 - protein, 14 aa, Homo sapiens
  CDR3 for beta chain variable domain of TCR clone 199825 (TRBV12-5, TRBJ2-5)
CASGSRTHQETQYF

SEQ ID NO: 399651 - protein, 13 aa, Homo sapiens
  CDR3 for alpha chain variable domain of TCR clone 199826 (TRAV40, )
CLLGDGIPDIQNP

SEQ ID NO: 399652 - protein, 16 aa, Homo sapiens
  CDR3 for beta chain variable domain of TCR clone 199826 (TRBV20-1, TRBJ1-5)
CSAELPGQQTNQPQHF

SEQ ID NO: 399653 - protein, 18 aa, Homo sapiens
  CDR3 for alpha chain variable domain of TCR clone 199827 (TRAV13-1, TRAJ52)
CAAKNPNAGGTSHGKLTF

SEQ ID NO: 399654 - protein, 15 aa, Homo sapiens
  CDR3 for beta chain variable domain of TCR clone 199827 (TRBV6-1, TRBJ2-3)
CASGERGGITDTQYF

SEQ ID NO: 399655 - protein, 17 aa, Homo sapiens
  CDR3 for alpha chain variable domain of TCR clone 199828 (TRAV3, TRAJ6)
CAVRGGPRAGGSYISTF

SEQ ID NO: 399656 - protein, 20 aa, Homo sapiens
  CDR3 for beta chain variable domain of TCR clone 199828 (TRBV28, TRBJ2-1)
CASTPIGRSPGLAGGNEQFF

SEQ ID NO: 399657 - protein, 14 aa, Homo sapiens
  CDR3 for alpha chain variable domain of TCR clone 199829 (TRAV38-1, TRAJ40)
CALRPTSGTYKYIF

SEQ ID NO: 399658 - protein, 17 aa, Homo sapiens
  CDR3 for beta chain variable domain of TCR clone 199829 (TRBV24-1, TRBJ2-1)
CATSDVSTSGTYNEQFF

SEQ ID NO: 399659 - protein, 14 aa, Homo sapiens
  CDR3 for alpha chain variable domain of TCR clone 199830 (TRAV8-4, TRAJ16)
CAVSPVGRWPEAAL

SEQ ID NO: 399660 - protein, 17 aa, Homo sapiens
  CDR3 for beta chain variable domain of TCR clone 199830 (TRBV28, TRBJ2-3)
CASSPTPAGGRVDTQYF

SEQ ID NO: 399661 - protein, 13 aa, Homo sapiens
  CDR3 for alpha chain variable domain of TCR clone 199831 (TRAV3, TRAJ20)
CAVRDTPRYKLGF

SEQ ID NO: 399662 - protein, 16 aa, Homo sapiens
  CDR3 for beta chain variable domain of TCR clone 199831 (TRBV20-1, TRBJ2-7)
CSARAPGLALSYEQYF

SEQ ID NO: 399663 - protein, 15 aa, Homo sapiens
  CDR3 for alpha chain variable domain of TCR clone 199832 (TRAV21, TRAJ53)
CATLNSGGSHYKLTF

SEQ ID NO: 399664 - protein, 12 aa, Homo sapiens
  CDR3 for beta chain variable domain of TCR clone 199832 (TRBV14, TRBJ2-4)
CASSNLKSIQYF

SEQ ID NO: 399665 - protein, 13 aa, Homo sapiens
  CDR3 for alpha chain variable domain of TCR clone 199833 (TRAV13-1, TRAJ24)
CAASDGSWGKLQF

SEQ ID NO: 399666 - protein, 14 aa, Homo sapiens
  CDR3 for beta chain variable domain of TCR clone 199833 (TRBV4-1, TRBJ2-2)
CASSQAVNTGELFF

SEQ ID NO: 399667 - protein, 16 aa, Homo sapiens
  CDR3 for alpha chain variable domain of TCR clone 199834 (TRAV26-1, TRAJ5)
CIVPLSYPHGRRALTF

SEQ ID NO: 399668 - protein, 15 aa, Homo sapiens
  CDR3 for beta chain variable domain of TCR clone 199834 (TRBV5-1, TRBJ2-7)
CASSLGDFTTYEQYF

SEQ ID NO: 399669 - protein, 17 aa, Homo sapiens
  CDR3 for alpha chain variable domain of TCR clone 199835 (TRAV3, TRAJ6)
CAVRDGPRAGGSYIPTF

SEQ ID NO: 399670 - protein, 13 aa, Homo sapiens
  CDR3 for beta chain variable domain of TCR clone 199835 (TRBV7-6, TRBJ2-3)
CASSLRSDNTQYF

SEQ ID NO: 399671 - protein, 13 aa, Homo sapiens
  CDR3 for alpha chain variable domain of TCR clone 199836 (TRAV26-2, TRAJ43)
CILRAVNNNDMRF

SEQ ID NO: 399672 - protein, 14 aa, Homo sapiens
  CDR3 for beta chain variable domain of TCR clone 199836 (TRBV7-3, TRBJ2-1)
CASSLAGGTNEQFF

SEQ ID NO: 399673 - protein, 10 aa, Homo sapiens
  CDR3 for alpha chain variable domain of TCR clone 199837 (TRAV27, TRAJ26)
CAGGGQNFVF

SEQ ID NO: 399674 - protein, 17 aa, Homo sapiens
  CDR3 for beta chain variable domain of TCR clone 199837 (TRBV13, TRBJ2-3)
CASSLSRVAGGRNTQYF

SEQ ID NO: 399675 - protein, 15 aa, Homo sapiens
  CDR3 for alpha chain variable domain of TCR clone 199838 (TRAV4, TRAJ28)
CLVEGSRAGSYQLTF

SEQ ID NO: 399676 - protein, 15 aa, Homo sapiens
  CDR3 for beta chain variable domain of TCR clone 199838 (TRBV9, TRBJ2-3)
CASSVRGLAVDTQYF

SEQ ID NO: 399677 - protein, 13 aa, Homo sapiens
  CDR3 for alpha chain variable domain of TCR clone 199839 (TRAV3, TRAJ8)
CAVRFTGFQKLVF

SEQ ID NO: 399678 - protein, 12 aa, Homo sapiens
  CDR3 for beta chain variable domain of TCR clone 199839 (TRBV2, TRBJ1-2)
CASSWQTYGYAF

SEQ ID NO: 399679 - protein, 13 aa, Homo sapiens
  CDR3 for alpha chain variable domain of TCR clone 199840 (TRAV21, TRAJ47)
CAVSALYGNKLVF

SEQ ID NO: 399680 - protein, 17 aa, Homo sapiens
  CDR3 for beta chain variable domain of TCR clone 199840 (TRBV15, TRBJ2-3)
CATSGTTSEEGTDTQYF

SEQ ID NO: 399681 - protein, 14 aa, Homo sapiens
  CDR3 for alpha chain variable domain of TCR clone 199841 (TRAV9-2, TRAJ39)
CALYIYNAGNMLTF

SEQ ID NO: 399682 - protein, 15 aa, Homo sapiens
  CDR3 for beta chain variable domain of TCR clone 199841 (TRBV7-9, TRBJ1-4)
CASSARTGVNEKLFF

SEQ ID NO: 399683 - protein, 17 aa, Homo sapiens
  CDR3 for alpha chain variable domain of TCR clone 199842 (TRAV3, TRAJ6)
CAVRDGPRAGGSYIPTF

SEQ ID NO: 399684 - protein, 14 aa, Homo sapiens
  CDR3 for beta chain variable domain of TCR clone 199842 (TRBV7-2, TRBJ2-7)
CASSPNTSLYEQYF

SEQ ID NO: 399685 - protein, 16 aa, Homo sapiens
  CDR3 for alpha chain variable domain of TCR clone 199843 (TRAV13-1, TRAJ10)
CAAGYILTGGGNKLTF

SEQ ID NO: 399686 - protein, 15 aa, Homo sapiens
  CDR3 for beta chain variable domain of TCR clone 199843 (TRBV12-4, TRBJ2-7)
CGSSQTGAISYEQYF

SEQ ID NO: 399687 - protein, 15 aa, Homo sapiens
  CDR3 for alpha chain variable domain of TCR clone 199844 (TRAV3, TRAJ22)
CAVRDRGGSARQLTF

SEQ ID NO: 399688 - protein, 12 aa, Homo sapiens
  CDR3 for beta chain variable domain of TCR clone 199844 (TRBV7-2, TRBJ2-1)
CGSRPQDIEQFL

SEQ ID NO: 399689 - protein, 12 aa, Homo sapiens
  CDR3 for alpha chain variable domain of TCR clone 199845 (TRAV12-3, TRAJ42)
CAPGGSQGNLIF

SEQ ID NO: 399690 - protein, 15 aa, Homo sapiens
  CDR3 for beta chain variable domain of TCR clone 199845 (TRBV28, TRBJ2-1)
CASSIIAGGRSEQFF

SEQ ID NO: 399691 - protein, 14 aa, Homo sapiens
  CDR3 for alpha chain variable domain of TCR clone 199846 (TRAV21, TRAJ35)
FSVMPIGFFNVLHC

SEQ ID NO: 399692 - protein, 12 aa, Homo sapiens
  CDR3 for beta chain variable domain of TCR clone 199846 (TRBV7-9, TRBJ2-7)
CASSIKREEQYF

SEQ ID NO: 399693 - protein, 12 aa, Homo sapiens
  CDR3 for alpha chain variable domain of TCR clone 199847 (TRAV23/DV6, TRAJ36)
CAASNEANHLFF

SEQ ID NO: 399694 - protein, 16 aa, Homo sapiens
  CDR3 for beta chain variable domain of TCR clone 199847 (TRBV2, TRBJ2-1)
CASSVGGSLSYNEQFF

SEQ ID NO: 399695 - protein, 17 aa, Homo sapiens
  CDR3 for alpha chain variable domain of TCR clone 199848 (TRAV21, TRAJ52)
CAVGTNAGGTSYGKLTF

SEQ ID NO: 399696 - protein, 13 aa, Homo sapiens
  CDR3 for beta chain variable domain of TCR clone 199848 (TRBV5-1, TRBJ1-2)
CASSFSENLGYTF

SEQ ID NO: 399697 - protein, 13 aa, Homo sapiens
  CDR3 for alpha chain variable domain of TCR clone 199849 (TRAV22, TRAJ29)
CAVGGSGNTPLVF

SEQ ID NO: 399698 - protein, 18 aa, Homo sapiens
  CDR3 for beta chain variable domain of TCR clone 199849 (TRBV7-9, TRBJ2-1)
CASSLAVSGTSGRNEQFF

SEQ ID NO: 399699 - protein, 15 aa, Homo sapiens
  CDR3 for alpha chain variable domain of TCR clone 199850 (TRAV35, TRAJ40)
CAEQLGTSRTYKYIF

SEQ ID NO: 399700 - protein, 14 aa, Homo sapiens
  CDR3 for beta chain variable domain of TCR clone 199850 (TRBV7-3, TRBJ2-1)
CASSLAGGTNEQFF

SEQ ID NO: 399701 - protein, 16 aa, Homo sapiens
  CDR3 for alpha chain variable domain of TCR clone 199851 (TRAV34, TRAJ41)
CGALLINSNSGYALNF

SEQ ID NO: 399702 - protein, 14 aa, Homo sapiens
  CDR3 for beta chain variable domain of TCR clone 199851 (TRBV19, TRBJ2-1)
CASPTFVLSGEQFF

SEQ ID NO: 399703 - protein, 15 aa, Homo sapiens
  CDR3 for alpha chain variable domain of TCR clone 199852 (TRAV3, TRAJ30)
CAVRDEYGRDDKIIF

SEQ ID NO: 399704 - protein, 15 aa, Homo sapiens
  CDR3 for beta chain variable domain of TCR clone 199852 (TRBV5-1, TRBJ2-5)
CASSLANHRGETQYF

SEQ ID NO: 399705 - protein, 14 aa, Homo sapiens
  CDR3 for alpha chain variable domain of TCR clone 199853 (TRAV12-2, TRAJ17)
CAALFKAAANKLTF

SEQ ID NO: 399706 - protein, 16 aa, Homo sapiens
  CDR3 for beta chain variable domain of TCR clone 199853 (TRBV20-1, TRBJ2-2)
CSASASGIPGAGELFF

SEQ ID NO: 399707 - protein, 17 aa, Homo sapiens
  CDR3 for alpha chain variable domain of TCR clone 199854 (TRAV26-1, TRAJ28)
CIVRVPDSGAGGYQLTF

SEQ ID NO: 399708 - protein, 17 aa, Homo sapiens
  CDR3 for beta chain variable domain of TCR clone 199854 (TRBV28, TRBJ2-7)
CASSPLPAGGKSYEQYF

SEQ ID NO: 399709 - protein, 14 aa, Homo sapiens
  CDR3 for alpha chain variable domain of TCR clone 199855 (TRAV17, TRAJ32)
CATDPGGATNKLIF

SEQ ID NO: 399710 - protein, 14 aa, Homo sapiens
  CDR3 for beta chain variable domain of TCR clone 199855 (TRBV2, TRBJ1-5)
CANSENRGGQPQHF

SEQ ID NO: 399711 - protein, 13 aa, Homo sapiens
  CDR3 for alpha chain variable domain of TCR clone 199856 (TRAV12-2, TRAJ9)
CAVLETGGFKTIF

SEQ ID NO: 399712 - protein, 13 aa, Homo sapiens
  CDR3 for beta chain variable domain of TCR clone 199856 (TRBV7-2, TRBJ2-7)
CASSSPSGSEQYF

SEQ ID NO: 399713 - protein, 15 aa, Homo sapiens
  CDR3 for alpha chain variable domain of TCR clone 199857 (TRAV3, TRAJ29)
CAVRDLYSGNTPLVF

SEQ ID NO: 399714 - protein, 17 aa, Homo sapiens
  CDR3 for beta chain variable domain of TCR clone 199857 (TRBV20-1, TRBJ2-1)
CIARDPLAGVWDNEQFF

SEQ ID NO: 399715 - protein, 11 aa, Homo sapiens
  CDR3 for alpha chain variable domain of TCR clone 199858 (TRAV8-4, TRAJ26)
CAGGDGQNFVF

SEQ ID NO: 399716 - protein, 17 aa, Homo sapiens
  CDR3 for beta chain variable domain of TCR clone 199858 (TRBV7-9, TRBJ2-3)
CASSPTVAGDLTDTQYF

SEQ ID NO: 399717 - protein, 12 aa, Homo sapiens
  CDR3 for alpha chain variable domain of TCR clone 199859 (TRAV21, TRAJ39)
CAADNAGNMLTF

SEQ ID NO: 399718 - protein, 14 aa, Homo sapiens
  CDR3 for beta chain variable domain of TCR clone 199859 (TRBV7-3, TRBJ2-1)
CASSLAGGTNEQFF

SEQ ID NO: 399719 - protein, 11 aa, Homo sapiens
  CDR3 for alpha chain variable domain of TCR clone 199860 (TRAV23/DV6, TRAJ58)
CAARLLRGETS

SEQ ID NO: 399720 - protein, 14 aa, Homo sapiens
  CDR3 for beta chain variable domain of TCR clone 199860 (TRBV14, TRBJ2-1)
CASSQVQGRGEQFF

SEQ ID NO: 399721 - protein, 11 aa, Homo sapiens
  CDR3 for alpha chain variable domain of TCR clone 199861 (TRAV1-2, TRAJ20)
CAVSNDYKPSF

SEQ ID NO: 399722 - protein, 14 aa, Homo sapiens
  CDR3 for beta chain variable domain of TCR clone 199861 (TRBV11-2, TRBJ2-3)
CASSRLARTDTQYF

SEQ ID NO: 399723 - protein, 14 aa, Homo sapiens
  CDR3 for alpha chain variable domain of TCR clone 199862 (TRAV26-2, TRAJ23)
CSRTLYNQGGKLIF

SEQ ID NO: 399724 - protein, 15 aa, Homo sapiens
  CDR3 for beta chain variable domain of TCR clone 199862 (TRBV20-1, TRBJ2-7)
CSARERVSGMDEQYF

SEQ ID NO: 399725 - protein, 13 aa, Homo sapiens
  CDR3 for alpha chain variable domain of TCR clone 199863 (TRAV27, TRAJ49)
CAPRPYTGNQFYF

SEQ ID NO: 399726 - protein, 16 aa, Homo sapiens
  CDR3 for beta chain variable domain of TCR clone 199863 (TRBV7-7, TRBJ2-5)
CASSLVASGDGETQYF

SEQ ID NO: 399727 - protein, 15 aa, Homo sapiens
  CDR3 for alpha chain variable domain of TCR clone 199864 (TRAV26-1, TRAJ27)
CIVRVLTPMQANHPL

SEQ ID NO: 399728 - protein, 13 aa, Homo sapiens
  CDR3 for beta chain variable domain of TCR clone 199864 (TRBV20-1, TRBJ2-7)
CSATHTSGYEQYF

SEQ ID NO: 399729 - protein, 11 aa, Homo sapiens
  CDR3 for alpha chain variable domain of TCR clone 199865 (TRAV12-1, TRAJ21)
CVVYNFNKFYF

SEQ ID NO: 399730 - protein, 16 aa, Homo sapiens
  CDR3 for beta chain variable domain of TCR clone 199865 (TRBV27, TRBJ2-2)
CASSFRGLVRTGELFF

SEQ ID NO: 399731 - protein, 13 aa, Homo sapiens
  CDR3 for alpha chain variable domain of TCR clone 199866 (TRAV17, TRAJ7)
CATDNYGNNRLAF

SEQ ID NO: 399732 - protein, 13 aa, Homo sapiens
  CDR3 for beta chain variable domain of TCR clone 199866 (TRBV10-3, TRBJ2-7)
CASKLAVNYEQYF

SEQ ID NO: 399733 - protein, 13 aa, Homo sapiens
  CDR3 for alpha chain variable domain of TCR clone 199867 (TRAV13-2, TRAJ48)
FSEMDFGNEKLTF

SEQ ID NO: 399734 - protein, 15 aa, Homo sapiens
  CDR3 for beta chain variable domain of TCR clone 199867 (TRBV7-9, TRBJ1-6)
CASSSPGRGNSPLHF

SEQ ID NO: 399735 - protein, 15 aa, Homo sapiens
  CDR3 for alpha chain variable domain of TCR clone 199868 (TRAV12-1, TRAJ45)
CVVLSGGGGSDGLTF

SEQ ID NO: 399736 - protein, 14 aa, Homo sapiens
  CDR3 for beta chain variable domain of TCR clone 199868 (TRBV11-2, TRBJ2-5)
CASSRTGGIETQYF

SEQ ID NO: 399737 - protein, 14 aa, Homo sapiens
  CDR3 for alpha chain variable domain of TCR clone 199869 (TRAV3, TRAJ36)
CAVRDGTGANNLFL

SEQ ID NO: 399738 - protein, 16 aa, Homo sapiens
  CDR3 for beta chain variable domain of TCR clone 199869 (TRBV20-1, TRBJ2-6)
CSAREGPGVGANVLTF

SEQ ID NO: 399739 - protein, 17 aa, Homo sapiens
  CDR3 for alpha chain variable domain of TCR clone 199870 (TRAV3, TRAJ12)
CAVRDGGRMDSSYKLIF

SEQ ID NO: 399740 - protein, 15 aa, Homo sapiens
  CDR3 for beta chain variable domain of TCR clone 199870 (TRBV12-4, TRBJ2-2)
CASSFKSANTGELFF

SEQ ID NO: 399741 - protein, 10 aa, Homo sapiens
  CDR3 for alpha chain variable domain of TCR clone 199871 (TRAV3, TRAJ20)
CAVRDGATTS

SEQ ID NO: 399742 - protein, 16 aa, Homo sapiens
  CDR3 for beta chain variable domain of TCR clone 199871 (TRBV4-1, TRBJ2-5)
CASSQTSGGPLETQYF

SEQ ID NO: 399743 - protein, 14 aa, Homo sapiens
  CDR3 for alpha chain variable domain of TCR clone 199872 (TRAV23/DV6, TRAJ37)
CAASTSSNTGKLIL

SEQ ID NO: 399744 - protein, 15 aa, Homo sapiens
  CDR3 for beta chain variable domain of TCR clone 199872 (TRBV7-9, TRBJ2-7)
CASSPGGGLTYEQYF

SEQ ID NO: 399745 - protein, 14 aa, Homo sapiens
  CDR3 for alpha chain variable domain of TCR clone 199873 (TRAV29/DV5, TRAJ36)
CAARRKTGANNPFF

SEQ ID NO: 399746 - protein, 13 aa, Homo sapiens
  CDR3 for beta chain variable domain of TCR clone 199873 (TRBV20-1, TRBJ1-1)
CSAPLGGGTEAFF

SEQ ID NO: 399747 - protein, 16 aa, Homo sapiens
  CDR3 for alpha chain variable domain of TCR clone 199874 (TRAV3, TRAJ10)
CAVRDMRAGGGNKLTF

SEQ ID NO: 399748 - protein, 14 aa, Homo sapiens
  CDR3 for beta chain variable domain of TCR clone 199874 (TRBV20-1, TRBJ2-2)
CSAPDTANTGELFF

SEQ ID NO: 399749 - protein, 11 aa, Homo sapiens
  CDR3 for alpha chain variable domain of TCR clone 199875 (TRAV13-1, TRAJ39)
CASHEGNMLTF

SEQ ID NO: 399750 - protein, 14 aa, Homo sapiens
  CDR3 for beta chain variable domain of TCR clone 199875 (TRBV11-2, TRBJ1-5)
CASSLDRGRQPQHF

SEQ ID NO: 399751 - protein, 15 aa, Homo sapiens
  CDR3 for alpha chain variable domain of TCR clone 199876 (TRAV5, TRAJ33)
RAEASAMDSNYQLIW

SEQ ID NO: 399752 - protein, 12 aa, Homo sapiens
  CDR3 for beta chain variable domain of TCR clone 199876 (TRBV6-3, TRBJ2-7)
CASSLTPYEQYF

SEQ ID NO: 399753 - protein, 17 aa, Homo sapiens
  CDR3 for alpha chain variable domain of TCR clone 199877 (TRAV13-1, TRAJ52)
WAASSGAGGTSYGKLTF

SEQ ID NO: 399754 - protein, 15 aa, Homo sapiens
  CDR3 for beta chain variable domain of TCR clone 199877 (TRBV2, TRBJ2-1)
CASSDLAGSYNEQFF

SEQ ID NO: 399755 - protein, 15 aa, Homo sapiens
  CDR3 for alpha chain variable domain of TCR clone 199878 (TRAV20, TRAJ53)
CAVQASGGSNYKLTF

SEQ ID NO: 399756 - protein, 16 aa, Homo sapiens
  CDR3 for beta chain variable domain of TCR clone 199878 (TRBV7-8, TRBJ2-1)
CASSLGRTSGDNEQFF

SEQ ID NO: 399757 - protein, 15 aa, Homo sapiens
  CDR3 for alpha chain variable domain of TCR clone 199879 (TRAV29/DV5, TRAJ29)
CAASERRSGNTPLVF

SEQ ID NO: 399758 - protein, 11 aa, Homo sapiens
  CDR3 for beta chain variable domain of TCR clone 199879 (TRBV6-3, TRBJ2-3)
CATGQADTQYF

SEQ ID NO: 399759 - protein, 12 aa, Homo sapiens
  CDR3 for alpha chain variable domain of TCR clone 199880 (TRAV36/DV7, TRAJ54)
CAVVRGAQKLVF

SEQ ID NO: 399760 - protein, 14 aa, Homo sapiens
  CDR3 for beta chain variable domain of TCR clone 199880 (TRBV2, TRBJ2-3)
CASSDWREKDTQYF

SEQ ID NO: 399761 - protein, 14 aa, Homo sapiens
  CDR3 for alpha chain variable domain of TCR clone 199881 (TRAV12-2, TRAJ13)
FAVKKTGGYQKVTF

SEQ ID NO: 399762 - protein, 11 aa, Homo sapiens
  CDR3 for beta chain variable domain of TCR clone 199881 (TRBV5-6, TRBJ2-5)
CASSLERTQYF

SEQ ID NO: 399763 - protein, 13 aa, Homo sapiens
  CDR3 for alpha chain variable domain of TCR clone 199882 (TRAV26-1, TRAJ48)
CIVRVVGDEKLTF

SEQ ID NO: 399764 - protein, 14 aa, Homo sapiens
  CDR3 for beta chain variable domain of TCR clone 199882 (TRBV19, TRBJ2-1)
CASSEPGGHGEQFF

SEQ ID NO: 399765 - protein, 14 aa, Homo sapiens
  CDR3 for alpha chain variable domain of TCR clone 199883 (TRAV13-1, TRAJ6)
CAASITGGSYIPTF

SEQ ID NO: 399766 - protein, 13 aa, Homo sapiens
  CDR3 for beta chain variable domain of TCR clone 199883 (TRBV12-4, TRBJ1-2)
CASSLRQGKGYTF

SEQ ID NO: 399767 - protein, 10 aa, Homo sapiens
  CDR3 for alpha chain variable domain of TCR clone 199884 (TRAV1-2, TRAJ20)
CALNDYKPSF

SEQ ID NO: 399768 - protein, 14 aa, Homo sapiens
  CDR3 for beta chain variable domain of TCR clone 199884 (TRBV19, TRBJ2-1)
CASPTFVLSGEQFF

SEQ ID NO: 399769 - protein, 14 aa, Homo sapiens
  CDR3 for alpha chain variable domain of TCR clone 199885 (TRAV3, TRAJ9)
CAVRLNTGGFKHIF

SEQ ID NO: 399770 - protein, 15 aa, Homo sapiens
  CDR3 for beta chain variable domain of TCR clone 199885 (TRBV7-2, TRBJ2-1)
CASSLASGRVNEQFF

SEQ ID NO: 399771 - protein, 16 aa, Homo sapiens
  CDR3 for alpha chain variable domain of TCR clone 199886 (TRAV1-2, TRAJ10)
CAVRGVLTGGGNKLTF

SEQ ID NO: 399772 - protein, 15 aa, Homo sapiens
  CDR3 for beta chain variable domain of TCR clone 199886 (TRBV18, TRBJ2-1)
CASLPDRGRDNEQFF

SEQ ID NO: 399773 - protein, 15 aa, Homo sapiens
  CDR3 for alpha chain variable domain of TCR clone 199887 (TRAV17, TRAJ22)
CATVAPSGSARQLTF

SEQ ID NO: 399774 - protein, 12 aa, Homo sapiens
  CDR3 for beta chain variable domain of TCR clone 199887 (TRBV11-3, TRBJ1-1)
CASSHRQGEAFF

SEQ ID NO: 399775 - protein, 17 aa, Homo sapiens
  CDR3 for alpha chain variable domain of TCR clone 199888 (TRAV12-2, TRAJ52)
CAVNPYAGGTSYGKLTF

SEQ ID NO: 399776 - protein, 16 aa, Homo sapiens
  CDR3 for beta chain variable domain of TCR clone 199888 (TRBV5-5, TRBJ2-2)
CASSGRREGATGQLFF

SEQ ID NO: 399777 - protein, 12 aa, Homo sapiens
  CDR3 for alpha chain variable domain of TCR clone 199889 (TRAV16, TRAJ12)
CAHGDSSYKLIF

SEQ ID NO: 399778 - protein, 12 aa, Homo sapiens
  CDR3 for beta chain variable domain of TCR clone 199889 (TRBV28, TRBJ2-1)
CASGRLVGEQFF

SEQ ID NO: 399779 - protein, 13 aa, Homo sapiens
  CDR3 for alpha chain variable domain of TCR clone 199890 (TRAV13-2, TRAJ48)
FAELDFGNEKLTF

SEQ ID NO: 399780 - protein, 15 aa, Homo sapiens
  CDR3 for beta chain variable domain of TCR clone 199890 (TRBV7-9, TRBJ1-6)
CASSSPGRGNSPLHF

SEQ ID NO: 399781 - protein, 22 aa, Homo sapiens
  CDR3 for alpha chain variable domain of TCR clone 199891 (TRAV40, )
CLLGDGIPDIQNPDPAVYQLRD

SEQ ID NO: 399782 - protein, 16 aa, Homo sapiens
  CDR3 for beta chain variable domain of TCR clone 199891 (TRBV20-1, TRBJ1-5)
CSAELPGQQTNQHQHF

SEQ ID NO: 399783 - protein, 11 aa, Homo sapiens
  CDR3 for alpha chain variable domain of TCR clone 199892 (TRAV3, TRAJ32)
CAVREGIIVVL

SEQ ID NO: 399784 - protein, 13 aa, Homo sapiens
  CDR3 for beta chain variable domain of TCR clone 199892 (TRBV2, TRBJ1-1)
CASSEGGNTEAFF

SEQ ID NO: 399785 - protein, 14 aa, Homo sapiens
  CDR3 for alpha chain variable domain of TCR clone 199893 (TRAV13-1, TRAJ13)
CAASKGGGYQKVTF

SEQ ID NO: 399786 - protein, 18 aa, Homo sapiens
  CDR3 for beta chain variable domain of TCR clone 199893 (TRBV20-1, TRBJ2-6)
CSAETTPTHGSGANVLTF

SEQ ID NO: 399787 - protein, 13 aa, Homo sapiens
  CDR3 for alpha chain variable domain of TCR clone 199894 (TRAV21, TRAJ20)
CAVGLRVDYKLSF

SEQ ID NO: 399788 - protein, 15 aa, Homo sapiens
  CDR3 for beta chain variable domain of TCR clone 199894 (TRBV7-2, TRBJ2-1)
CASSLVAGRYNEQFF

SEQ ID NO: 399789 - protein, 14 aa, Homo sapiens
  CDR3 for alpha chain variable domain of TCR clone 199895 (TRAV1-2, TRAJ16)
CAVNRFSEGQKLLF

SEQ ID NO: 399790 - protein, 17 aa, Homo sapiens
  CDR3 for beta chain variable domain of TCR clone 199895 (TRBV13, TRBJ2-3)
CASSLSRVAGGRNTQYF

SEQ ID NO: 399791 - protein, 15 aa, Homo sapiens
  CDR3 for alpha chain variable domain of TCR clone 199896 (TRAV27, TRAJ38)
CAARRNAGNNRKLIW

SEQ ID NO: 399792 - protein, 16 aa, Homo sapiens
  CDR3 for beta chain variable domain of TCR clone 199896 (TRBV6-1, TRBJ2-5)
CASSETLDRGAETQYF

SEQ ID NO: 399793 - protein, 18 aa, Homo sapiens
  CDR3 for alpha chain variable domain of TCR clone 199897 (TRAV29/DV5, TRAJ52)
CAAGFRGAGGTNYGKLTF

SEQ ID NO: 399794 - protein, 16 aa, Homo sapiens
  CDR3 for beta chain variable domain of TCR clone 199897 (TRBV7-3, TRBJ2-2)
CASSLKRGTVSGELFF

SEQ ID NO: 399795 - protein, 13 aa, Homo sapiens
  CDR3 for alpha chain variable domain of TCR clone 199898 (TRAV27, TRAJ6)
LAGGTRGSYIPTF

SEQ ID NO: 399796 - protein, 12 aa, Homo sapiens
  CDR3 for beta chain variable domain of TCR clone 199898 (TRBV5-1, TRBJ1-2)
CASSQDTYGYTF

SEQ ID NO: 399797 - protein, 14 aa, Homo sapiens
  CDR3 for alpha chain variable domain of TCR clone 199899 (TRAV13-1, TRAJ44)
CAAKATGTASKLTF

SEQ ID NO: 399798 - protein, 15 aa, Homo sapiens
  CDR3 for beta chain variable domain of TCR clone 199899 (TRBV19, TRBJ2-7)
CASRPTPGLSIEQYF

SEQ ID NO: 399799 - protein, 14 aa, Homo sapiens
  CDR3 for alpha chain variable domain of TCR clone 199900 (TRAV1-1, TRAJ35)
CAVRSIGSGNVLHC

SEQ ID NO: 399800 - protein, 16 aa, Homo sapiens
  CDR3 for beta chain variable domain of TCR clone 199900 (TRBV20-1, TRBJ1-4)
CSAPGQGLLTNEKLFF

SEQ ID NO: 399801 - protein, 14 aa, Homo sapiens
  CDR3 for alpha chain variable domain of TCR clone 199901 (TRAV4, TRAJ32)
CLVNYGGATNKLIF

SEQ ID NO: 399802 - protein, 19 aa, Homo sapiens
  CDR3 for beta chain variable domain of TCR clone 199901 (TRBV15, TRBJ2-5)
CATSGGDEDGDPVLRARHA

SEQ ID NO: 399803 - protein, 14 aa, Homo sapiens
  CDR3 for alpha chain variable domain of TCR clone 199902 (TRAV8-3, TRAJ4)
CAVGAAGGYNKLIF

SEQ ID NO: 399804 - protein, 13 aa, Homo sapiens
  CDR3 for beta chain variable domain of TCR clone 199902 (TRBV7-9, TRBJ1-5)
CASSLRNDQPQHF

SEQ ID NO: 399805 - protein, 13 aa, Homo sapiens
  CDR3 for alpha chain variable domain of TCR clone 199903 (TRAV35, TRAJ21)
CAGQLSNFNKFYF

SEQ ID NO: 399806 - protein, 16 aa, Homo sapiens
  CDR3 for beta chain variable domain of TCR clone 199903 (TRBV12-5, TRBJ2-5)
CASGTRTSGNQETQYF

SEQ ID NO: 399807 - protein, 23 aa, Homo sapiens
  CDR3 for alpha chain variable domain of TCR clone 199904 (TRAV26-1, TRAJ38)
CIADNAGNNHIQNPDPAVYQLRD

SEQ ID NO: 399808 - protein, 18 aa, Homo sapiens
  CDR3 for beta chain variable domain of TCR clone 199904 (TRBV7-2, TRBJ2-7)
CASSLSGRGLAGGYEQYF

SEQ ID NO: 399809 - protein, 15 aa, Homo sapiens
  CDR3 for alpha chain variable domain of TCR clone 199905 (TRAV26-1, TRAJ44)
CIVRANTGTASRLTF

SEQ ID NO: 399810 - protein, 20 aa, Homo sapiens
  CDR3 for beta chain variable domain of TCR clone 199905 (TRBV7-8, TRBJ2-2)
CASSHLFPGPTIHITGELFF

SEQ ID NO: 399811 - protein, 16 aa, Homo sapiens
  CDR3 for alpha chain variable domain of TCR clone 199906 (TRAV3, TRAJ5)
CAVRNLMDTGRRALTF

SEQ ID NO: 399812 - protein, 12 aa, Homo sapiens
  CDR3 for beta chain variable domain of TCR clone 199906 (TRBV7-8, TRBJ2-7)
CASSLGDREQYF

SEQ ID NO: 399813 - protein, 13 aa, Homo sapiens
  CDR3 for alpha chain variable domain of TCR clone 199907 (TRAV2, TRAJ10)
CAVETGGGNKLTF

SEQ ID NO: 399814 - protein, 14 aa, Homo sapiens
  CDR3 for beta chain variable domain of TCR clone 199907 (TRBV20-1, TRBJ2-3)
CSAGGRRGTDMQYF

SEQ ID NO: 399815 - protein, 12 aa, Homo sapiens
  CDR3 for alpha chain variable domain of TCR clone 199908 (TRAV13-1, TRAJ21)
CAAKEGINKFYF

SEQ ID NO: 399816 - protein, 15 aa, Homo sapiens
  CDR3 for beta chain variable domain of TCR clone 199908 (TRBV25-1, TRBJ1-4)
CASSPGDSTNEKLFF

SEQ ID NO: 399817 - protein, 12 aa, Homo sapiens
  CDR3 for alpha chain variable domain of TCR clone 199909 (TRAV35, TRAJ30)
CAGLSRDDKIIF

SEQ ID NO: 399818 - protein, 15 aa, Homo sapiens
  CDR3 for beta chain variable domain of TCR clone 199909 (TRBV9, TRBJ1-6)
CASSVAGTGDSPLHF

SEQ ID NO: 399819 - protein, 14 aa, Homo sapiens
  CDR3 for alpha chain variable domain of TCR clone 199910 (TRAV38-2/DV8, TRAJ54)
AAMYQIQGAQKLVF

SEQ ID NO: 399820 - protein, 17 aa, Homo sapiens
  CDR3 for beta chain variable domain of TCR clone 199910 (TRBV6-1, TRBJ2-3)
CTSSEALRLISTDTQYF

SEQ ID NO: 399821 - protein, 13 aa, Homo sapiens
  CDR3 for alpha chain variable domain of TCR clone 199911 (TRAV17, TRAJ15)
CATDARAGTALIF

SEQ ID NO: 399822 - protein, 14 aa, Homo sapiens
  CDR3 for beta chain variable domain of TCR clone 199911 (TRBV20-1, TRBJ2-3)
CSARGGTSTDTQYF

SEQ ID NO: 399823 - protein, 16 aa, Homo sapiens
  CDR3 for alpha chain variable domain of TCR clone 199912 (TRAV35, TRAJ28)
CAGQRYSGAGSYQHTF

SEQ ID NO: 399824 - protein, 13 aa, Homo sapiens
  CDR3 for beta chain variable domain of TCR clone 199912 (TRBV19, TRBJ1-2)
CASSQGQVYGYTF

SEQ ID NO: 399825 - protein, 12 aa, Homo sapiens
  CDR3 for alpha chain variable domain of TCR clone 199913 (TRAV1-1, TRAJ8)
CAGGTGFQKLVF

SEQ ID NO: 399826 - protein, 18 aa, Homo sapiens
  CDR3 for beta chain variable domain of TCR clone 199913 (TRBV7-6, TRBJ2-1)
CASSPRTSGMSSYNEQFF

SEQ ID NO: 399827 - protein, 14 aa, Homo sapiens
  CDR3 for alpha chain variable domain of TCR clone 199914 (TRAV3, TRAJ9)
CAVRDDTGGFKTIF

SEQ ID NO: 399828 - protein, 18 aa, Homo sapiens
  CDR3 for beta chain variable domain of TCR clone 199914 (TRBV20-1, TRBJ2-6)
CSAVTTPTHGSGANVLTF

SEQ ID NO: 399829 - protein, 13 aa, Homo sapiens
  CDR3 for alpha chain variable domain of TCR clone 199915 (TRAV21, TRAJ37)
CAVSSGNTGKLIF

SEQ ID NO: 399830 - protein, 16 aa, Homo sapiens
  CDR3 for beta chain variable domain of TCR clone 199915 (TRBV12-5, TRBJ2-5)
CASGPRTSGNQETQYF

SEQ ID NO: 399831 - protein, 14 aa, Homo sapiens
  CDR3 for alpha chain variable domain of TCR clone 199916 (TRAV12-3, TRAJ6)
CAMSATGGSYIPTF

SEQ ID NO: 399832 - protein, 15 aa, Homo sapiens
  CDR3 for beta chain variable domain of TCR clone 199916 (TRBV4-2, TRBJ2-1)
CQQPPAGQGANEQFF

SEQ ID NO: 399833 - protein, 14 aa, Homo sapiens
  CDR3 for alpha chain variable domain of TCR clone 199917 (TRAV14/DV4, TRAJ15)
CAMRRDQAGTALIF

SEQ ID NO: 399834 - protein, 14 aa, Homo sapiens
  CDR3 for beta chain variable domain of TCR clone 199917 (TRBV18, TRBJ2-5)
CASSPEVSQETQYF

SEQ ID NO: 399835 - protein, 16 aa, Homo sapiens
  CDR3 for alpha chain variable domain of TCR clone 199918 (TRAV26-1, TRAJ37)
CIVRGDGSGNTGKLIF

SEQ ID NO: 399836 - protein, 15 aa, Homo sapiens
  CDR3 for beta chain variable domain of TCR clone 199918 (TRBV7-2, TRBJ2-1)
CASSSRTSREDEQFF

SEQ ID NO: 399837 - protein, 15 aa, Homo sapiens
  CDR3 for alpha chain variable domain of TCR clone 199919 (TRAV12-3, TRAJ6)
CAMSATTGGSYIPTF

SEQ ID NO: 399838 - protein, 13 aa, Homo sapiens
  CDR3 for beta chain variable domain of TCR clone 199919 (TRBV18, TRBJ2-3)
CASSTGRTDTQYF

SEQ ID NO: 399839 - protein, 13 aa, Homo sapiens
  CDR3 for alpha chain variable domain of TCR clone 199920 (TRAV16, TRAJ9)
CALRATGGFKTIF

SEQ ID NO: 399840 - protein, 16 aa, Homo sapiens
  CDR3 for beta chain variable domain of TCR clone 199920 (TRBV5-1, TRBJ1-3)
CASSRSGEDAGNTIYF

SEQ ID NO: 399841 - protein, 17 aa, Homo sapiens
  CDR3 for alpha chain variable domain of TCR clone 199921 (TRAV38-2/DV8, TRAJ38)
CAYRSARGAGTNRTLIW

SEQ ID NO: 399842 - protein, 13 aa, Homo sapiens
  CDR3 for beta chain variable domain of TCR clone 199921 (TRBV6-5, TRBJ2-1)
CASRGRVGNEQFF

SEQ ID NO: 399843 - protein, 15 aa, Homo sapiens
  CDR3 for alpha chain variable domain of TCR clone 199922 (TRAV2, TRAJ15)
CAVEDRGKAGTALIF

SEQ ID NO: 399844 - protein, 15 aa, Homo sapiens
  CDR3 for beta chain variable domain of TCR clone 199922 (TRBV7-2, TRBJ2-3)
CASSLVVRGPDTQYF

SEQ ID NO: 399845 - protein, 12 aa, Homo sapiens
  CDR3 for alpha chain variable domain of TCR clone 199923 (TRAV1-2, TRAJ33)
CAALDSNYQLIW

SEQ ID NO: 399846 - protein, 16 aa, Homo sapiens
  CDR3 for beta chain variable domain of TCR clone 199923 (TRBV2, TRBJ2-1)
CASSVGGSLSYDEQFF

SEQ ID NO: 399847 - protein, 19 aa, Homo sapiens
  CDR3 for alpha chain variable domain of TCR clone 199924 (TRAV2, TRAJ20)
ILQVREADAAVYRDCKLSF

SEQ ID NO: 399848 - protein, 18 aa, Homo sapiens
  CDR3 for beta chain variable domain of TCR clone 199924 (TRBV7-3, TRBJ2-3)
CASSSTGTYPSSTDTEYF

SEQ ID NO: 399849 - protein, 15 aa, Homo sapiens
  CDR3 for alpha chain variable domain of TCR clone 199925 (TRAV3, TRAJ26)
CAVRDGDNYGQNFVF

SEQ ID NO: 399850 - protein, 11 aa, Homo sapiens
  CDR3 for beta chain variable domain of TCR clone 199925 (TRBV11-2, TRBJ2-2)
CASSLPGELFF

SEQ ID NO: 399851 - protein, 10 aa, Homo sapiens
  CDR3 for alpha chain variable domain of TCR clone 199926 (TRAV20, TRAJ22)
CAAPARQLTF

SEQ ID NO: 399852 - protein, 14 aa, Homo sapiens
  CDR3 for beta chain variable domain of TCR clone 199926 (TRBV19, TRBJ2-1)
RASSMGSGATEQFF

SEQ ID NO: 399853 - protein, 14 aa, Homo sapiens
  CDR3 for alpha chain variable domain of TCR clone 199927 (TRAV3, TRAJ6)
CAVRDWGGSYIPTF

SEQ ID NO: 399854 - protein, 15 aa, Homo sapiens
  CDR3 for beta chain variable domain of TCR clone 199927 (TRBV11-3, TRBJ2-3)
CASLKDGREGDTQYF

SEQ ID NO: 399855 - protein, 15 aa, Homo sapiens
  CDR3 for alpha chain variable domain of TCR clone 199928 (TRAV40, TRAJ45)
CLLGDLGGGADGLTF

SEQ ID NO: 399856 - protein, 13 aa, Homo sapiens
  CDR3 for beta chain variable domain of TCR clone 199928 (TRBV7-9, TRBJ1-2)
CACSLKQNYGYTF

SEQ ID NO: 399857 - protein, 13 aa, Homo sapiens
  CDR3 for alpha chain variable domain of TCR clone 199929 (TRAV13-2, TRAJ5)
CAESDTGRRAITF

SEQ ID NO: 399858 - protein, 14 aa, Homo sapiens
  CDR3 for beta chain variable domain of TCR clone 199929 (TRBV2, TRBJ1-1)
CASTQVGENTEAFF

SEQ ID NO: 399859 - protein, 13 aa, Homo sapiens
  CDR3 for alpha chain variable domain of TCR clone 199930 (TRAV25, TRAJ54)
CAGTIQGAQKLVF

SEQ ID NO: 399860 - protein, 15 aa, Homo sapiens
  CDR3 for beta chain variable domain of TCR clone 199930 (TRBV12-4, TRBJ2-5)
CASSLLQGAGETQYF

SEQ ID NO: 399861 - protein, 12 aa, Homo sapiens
  CDR3 for alpha chain variable domain of TCR clone 199931 (TRAV17, TRAJ12)
CASLRSSYKLIF

SEQ ID NO: 399862 - protein, 16 aa, Homo sapiens
  CDR3 for beta chain variable domain of TCR clone 199931 (TRBV28, TRBJ2-7)
CASSLFFETGGPEKYF

SEQ ID NO: 399863 - protein, 14 aa, Homo sapiens
  CDR3 for alpha chain variable domain of TCR clone 199932 (TRAV8-6, TRAJ9)
CAVTPATGGFKTIF

SEQ ID NO: 399864 - protein, 17 aa, Homo sapiens
  CDR3 for beta chain variable domain of TCR clone 199932 (TRBV20-1, TRBJ2-7)
CSATRAGGVAGVEEQYF

SEQ ID NO: 399865 - protein, 14 aa, Homo sapiens
  CDR3 for alpha chain variable domain of TCR clone 199933 (TRAV1-1, TRAJ35)
CAVRSIGFGNALHC

SEQ ID NO: 399866 - protein, 14 aa, Homo sapiens
  CDR3 for beta chain variable domain of TCR clone 199933 (TRBV5-7, TRBJ2-7)
CASSGGLSSYEQYF

SEQ ID NO: 399867 - protein, 11 aa, Homo sapiens
  CDR3 for alpha chain variable domain of TCR clone 199934 (TRAV12-3, TRAJ17)
CNDAYRQQLTF

SEQ ID NO: 399868 - protein, 15 aa, Homo sapiens
  CDR3 for beta chain variable domain of TCR clone 199934 (TRBV20-1, TRBJ2-7)
CSARERVSGMDEQYF

SEQ ID NO: 399869 - protein, 17 aa, Homo sapiens
  CDR3 for alpha chain variable domain of TCR clone 199935 (TRAV8-6, TRAJ58)
CAVSSWVGEISGSRLTF

SEQ ID NO: 399870 - protein, 14 aa, Homo sapiens
  CDR3 for beta chain variable domain of TCR clone 199935 (TRBV4-2, TRBJ2-1)
CASGLDRAYNEQFF

SEQ ID NO: 399871 - protein, 15 aa, Homo sapiens
  CDR3 for alpha chain variable domain of TCR clone 199936 (TRAV27, TRAJ38)
CASRRNAGNNRKLIW

SEQ ID NO: 399872 - protein, 13 aa, Homo sapiens
  CDR3 for beta chain variable domain of TCR clone 199936 (TRBV10-3, TRBJ2-7)
CASKLAVNYEQYF

SEQ ID NO: 399873 - protein, 14 aa, Homo sapiens
  CDR3 for alpha chain variable domain of TCR clone 199937 (TRAV12-3, TRAJ58)
CAMSTETSGSRLTF

SEQ ID NO: 399874 - protein, 15 aa, Homo sapiens
  CDR3 for beta chain variable domain of TCR clone 199937 (TRBV4-1, TRBJ1-4)
CTSSDTGGTNEKLFF

SEQ ID NO: 399875 - protein, 11 aa, Homo sapiens
  CDR3 for alpha chain variable domain of TCR clone 199938 (TRAV2, TRAJ37)
CAVDNTGTLIF

SEQ ID NO: 399876 - protein, 16 aa, Homo sapiens
  CDR3 for beta chain variable domain of TCR clone 199938 (TRBV9, TRBJ2-1)
CASSVGGGGNYNEQFF

SEQ ID NO: 399877 - protein, 14 aa, Homo sapiens
  CDR3 for alpha chain variable domain of TCR clone 199939 (TRAV17, TRAJ34)
CATDSLEGTYKLIF

SEQ ID NO: 399878 - protein, 13 aa, Homo sapiens
  CDR3 for beta chain variable domain of TCR clone 199939 (TRBV11-2, TRBJ2-7)
CASSGTRPYEQYF

SEQ ID NO: 399879 - protein, 15 aa, Homo sapiens
  CDR3 for alpha chain variable domain of TCR clone 199940 (TRAV27, TRAJ38)
CAGRFNAGNNRKLIW

SEQ ID NO: 399880 - protein, 13 aa, Homo sapiens
  CDR3 for beta chain variable domain of TCR clone 199940 (TRBV9, TRBJ2-1)
CASSPSGGNEQFF

SEQ ID NO: 399881 - protein, 14 aa, Homo sapiens
  CDR3 for alpha chain variable domain of TCR clone 199941 (TRAV1-2, TRAJ16)
CAVNRFSDGQKLLF

SEQ ID NO: 399882 - protein, 13 aa, Homo sapiens
  CDR3 for beta chain variable domain of TCR clone 199941 (TRBV7-3, TRBJ2-7)
CASSKRRGGEQYF

SEQ ID NO: 399883 - protein, 15 aa, Homo sapiens
  CDR3 for alpha chain variable domain of TCR clone 199942 (TRAV3, TRAJ17)
CAVRDTGAAGNKLNF

SEQ ID NO: 399884 - protein, 15 aa, Homo sapiens
  CDR3 for beta chain variable domain of TCR clone 199942 (TRBV20-1, TRBJ2-7)
CSARDRVSGMDEQYF

SEQ ID NO: 399885 - protein, 14 aa, Homo sapiens
  CDR3 for alpha chain variable domain of TCR clone 199943 (TRAV8-3, TRAJ4)
CAVGASGGYNKLIF

SEQ ID NO: 399886 - protein, 14 aa, Homo sapiens
  CDR3 for beta chain variable domain of TCR clone 199943 (TRBV10-3, TRBJ1-2)
CAISAGGRVDGYTF

SEQ ID NO: 399887 - protein, 12 aa, Homo sapiens
  CDR3 for alpha chain variable domain of TCR clone 199944 (TRAV13-1, TRAJ53)
AASGGSNYTLTF

SEQ ID NO: 399888 - protein, 15 aa, Homo sapiens
  CDR3 for beta chain variable domain of TCR clone 199944 (TRBV5-1, TRBJ2-1)
CASSPPRAAYNEQFF

SEQ ID NO: 399889 - protein, 16 aa, Homo sapiens
  CDR3 for alpha chain variable domain of TCR clone 199945 (TRAV1-2, TRAJ10)
CAVRGVLTGGGNKLTF

SEQ ID NO: 399890 - protein, 12 aa, Homo sapiens
  CDR3 for beta chain variable domain of TCR clone 199945 (TRBV6-1, TRBJ2-7)
CASSDYSYEQYF

SEQ ID NO: 399891 - protein, 15 aa, Homo sapiens
  CDR3 for alpha chain variable domain of TCR clone 199946 (TRAV8-1, TRAJ6)
CAVNTPPGGSFIPTF

SEQ ID NO: 399892 - protein, 15 aa, Homo sapiens
  CDR3 for beta chain variable domain of TCR clone 199946 (TRBV11-2, TRBJ2-2)
CASSSDRVNAGELFF

SEQ ID NO: 399893 - protein, 14 aa, Homo sapiens
  CDR3 for alpha chain variable domain of TCR clone 199947 (TRAV38-1, TRAJ29)
CAFITPSGNTPLVL

SEQ ID NO: 399894 - protein, 15 aa, Homo sapiens
  CDR3 for beta chain variable domain of TCR clone 199947 (TRBV19, TRBJ1-1)
CASTSGQIQNTEAFF

SEQ ID NO: 399895 - protein, 16 aa, Homo sapiens
  CDR3 for alpha chain variable domain of TCR clone 199948 (TRAV16, TRAJ52)
CALSAAGGTSYGKLTF

SEQ ID NO: 399896 - protein, 12 aa, Homo sapiens
  CDR3 for beta chain variable domain of TCR clone 199948 (TRBV12-4, TRBJ1-3)
CDSSFSGNTIYF

SEQ ID NO: 399897 - protein, 14 aa, Homo sapiens
  CDR3 for alpha chain variable domain of TCR clone 199949 (TRAV29/DV5, TRAJ36)
CAARRKTWANNLFF

SEQ ID NO: 399898 - protein, 16 aa, Homo sapiens
  CDR3 for beta chain variable domain of TCR clone 199949 (TRBV4-1, TRBJ2-7)
CASSQEGTASSYEQYF

SEQ ID NO: 399899 - protein, 13 aa, Homo sapiens
  CDR3 for alpha chain variable domain of TCR clone 199950 (TRAV13-2, TRAJ49)
CAETLHGGNQFYF

SEQ ID NO: 399900 - protein, 15 aa, Homo sapiens
  CDR3 for beta chain variable domain of TCR clone 199950 (TRBV4-1, TRBJ1-2)
CASRQGQGAAYGYTF

SEQ ID NO: 399901 - protein, 12 aa, Homo sapiens
  CDR3 for alpha chain variable domain of TCR clone 199951 (TRAV29/DV5, TRAJ49)
CAATDTGNQVYF

SEQ ID NO: 399902 - protein, 12 aa, Homo sapiens
  CDR3 for beta chain variable domain of TCR clone 199951 (TRBV12-4, TRBJ2-7)
CASSLGGYGQYF

SEQ ID NO: 399903 - protein, 13 aa, Homo sapiens
  CDR3 for alpha chain variable domain of TCR clone 199952 (TRAV26-2, TRAJ43)
CILRAVNNNDIRF

SEQ ID NO: 399904 - protein, 13 aa, Homo sapiens
  CDR3 for beta chain variable domain of TCR clone 199952 (TRBV14, TRBJ2-1)
CASSQDRRNEQFF

SEQ ID NO: 399905 - protein, 12 aa, Homo sapiens
  CDR3 for alpha chain variable domain of TCR clone 199953 (TRAV13-1, TRAJ21)
CAASFNFNKFYF

SEQ ID NO: 399906 - protein, 14 aa, Homo sapiens
  CDR3 for beta chain variable domain of TCR clone 199953 (TRBV4-1, TRBJ2-7)
CASRLTSGSYEQYV

SEQ ID NO: 399907 - protein, 16 aa, Homo sapiens
  CDR3 for alpha chain variable domain of TCR clone 199954 (TRAV17, TRAJ54)
CATDSDIIQGAQKLVF

SEQ ID NO: 399908 - protein, 16 aa, Homo sapiens
  CDR3 for beta chain variable domain of TCR clone 199954 (TRBV7-3, TRBJ2-2)
CASSLKRGTLSGELFF

SEQ ID NO: 399909 - protein, 15 aa, Homo sapiens
  CDR3 for alpha chain variable domain of TCR clone 199955 (TRAV8-4, TRAJ9)
CAVSDLEGGGFITIF

SEQ ID NO: 399910 - protein, 12 aa, Homo sapiens
  CDR3 for beta chain variable domain of TCR clone 199955 (TRBV29-1, TRBJ2-3)
CSVTGGADTQYF

SEQ ID NO: 399911 - protein, 14 aa, Homo sapiens
  CDR3 for alpha chain variable domain of TCR clone 199956 (TRAV2, TRAJ16)
CAVEQGSDGQKLLF

SEQ ID NO: 399912 - protein, 12 aa, Homo sapiens
  CDR3 for beta chain variable domain of TCR clone 199956 (TRBV6-5, TRBJ2-7)
CASYIYGYEQYF

SEQ ID NO: 399913 - protein, 14 aa, Homo sapiens
  CDR3 for alpha chain variable domain of TCR clone 199957 (TRAV3, TRAJ28)
CCEGPLAGSYQLTF

SEQ ID NO: 399914 - protein, 13 aa, Homo sapiens
  CDR3 for beta chain variable domain of TCR clone 199957 (TRBV20-1, TRBJ2-7)
CSATHTSGYEQYF

SEQ ID NO: 399915 - protein, 14 aa, Homo sapiens
  CDR3 for alpha chain variable domain of TCR clone 199958 (TRAV38-1, TRAJ29)
CAFITPSGNTPLVF

SEQ ID NO: 399916 - protein, 14 aa, Homo sapiens
  CDR3 for beta chain variable domain of TCR clone 199958 (TRBV11-2, TRBJ2-3)
CASSRLARTDTQYF

SEQ ID NO: 399917 - protein, 14 aa, Homo sapiens
  CDR3 for alpha chain variable domain of TCR clone 199959 (TRAV26-1, TRAJ34)
CIVRVAYNTDKLIF

SEQ ID NO: 399918 - protein, 14 aa, Homo sapiens
  CDR3 for beta chain variable domain of TCR clone 199959 (TRBV20-1, TRBJ2-7)
QCRVPAAYFYEQYF

SEQ ID NO: 399919 - protein, 16 aa, Homo sapiens
  CDR3 for alpha chain variable domain of TCR clone 199960 (TRAV12-2, TRAJ10)
CAVNRVLTGGGNKLTF

SEQ ID NO: 399920 - protein, 12 aa, Homo sapiens
  CDR3 for beta chain variable domain of TCR clone 199960 (TRBV28, TRBJ2-7)
CASSFSSYVQYF

SEQ ID NO: 399921 - protein, 15 aa, Homo sapiens
  CDR3 for alpha chain variable domain of TCR clone 199961 (TRAV23/DV6, TRAJ15)
CAAIPAGRNCSELLE

SEQ ID NO: 399922 - protein, 14 aa, Homo sapiens
  CDR3 for beta chain variable domain of TCR clone 199961 (TRBV7-9, TRBJ1-2)
CASSRQGANYGYTF

SEQ ID NO: 399923 - protein, 15 aa, Homo sapiens
  CDR3 for alpha chain variable domain of TCR clone 199962 (TRAV3, TRAJ5)
CAARDLATGRRALTF

SEQ ID NO: 399924 - protein, 13 aa, Homo sapiens
  CDR3 for beta chain variable domain of TCR clone 199962 (TRBV12-4, TRBJ2-7)
CASSPTETYEQYF

SEQ ID NO: 399925 - protein, 15 aa, Homo sapiens
  CDR3 for alpha chain variable domain of TCR clone 199963 (TRAV2, TRAJ44)
CAVEAYTGTASKLTF

SEQ ID NO: 399926 - protein, 17 aa, Homo sapiens
  CDR3 for beta chain variable domain of TCR clone 199963 (TRBV12-4, TRBJ2-1)
CASSPGLAGGRISEQFF

SEQ ID NO: 399927 - protein, 16 aa, Homo sapiens
  CDR3 for alpha chain variable domain of TCR clone 199964 (TRAV23/DV6, TRAJ9)
CAASIGGNTGGFKTIL

SEQ ID NO: 399928 - protein, 12 aa, Homo sapiens
  CDR3 for beta chain variable domain of TCR clone 199964 (TRBV29-1, TRBJ2-3)
CSVTGGADTQYF

SEQ ID NO: 399929 - protein, 11 aa, Homo sapiens
  CDR3 for alpha chain variable domain of TCR clone 199965 (TRAV2, TRAJ13)
CASGGYQKVTF

SEQ ID NO: 399930 - protein, 15 aa, Homo sapiens
  CDR3 for beta chain variable domain of TCR clone 199965 (TRBV3-1, TRBJ2-2)
CASSQDWTRAGELFF

SEQ ID NO: 399931 - protein, 17 aa, Homo sapiens
  CDR3 for alpha chain variable domain of TCR clone 199966 (TRAV3, TRAJ38)
CAVRDCLNAGNNRKLIW

SEQ ID NO: 399932 - protein, 14 aa, Homo sapiens
  CDR3 for beta chain variable domain of TCR clone 199966 (TRBV12-4, TRBJ1-1)
CASSLGTGGTEAFF

SEQ ID NO: 399933 - protein, 13 aa, Homo sapiens
  CDR3 for alpha chain variable domain of TCR clone 199967 (TRAV36/DV7, TRAJ37)
CAVFSSHTGKLIF

SEQ ID NO: 399934 - protein, 12 aa, Homo sapiens
  CDR3 for beta chain variable domain of TCR clone 199967 (TRBV11-2, TRBJ2-2)
CASSLGGGELFF

SEQ ID NO: 399935 - protein, 13 aa, Homo sapiens
  CDR3 for alpha chain variable domain of TCR clone 199968 (TRAV21, TRAJ57)
CAVTQGGSEKLVF

SEQ ID NO: 399936 - protein, 16 aa, Homo sapiens
  CDR3 for beta chain variable domain of TCR clone 199968 (TRBV29-1, TRBJ2-7)
CSVEDAEDGTAYAQYF

SEQ ID NO: 399937 - protein, 13 aa, Homo sapiens
  CDR3 for alpha chain variable domain of TCR clone 199969 (TRAV2, TRAJ15)
CAVASQAGTALIF

SEQ ID NO: 399938 - protein, 13 aa, Homo sapiens
  CDR3 for beta chain variable domain of TCR clone 199969 (TRBV27, TRBJ2-7)
CASSLTTGYEQCF

SEQ ID NO: 399939 - protein, 12 aa, Homo sapiens
  CDR3 for alpha chain variable domain of TCR clone 199970 (TRAV10, TRAJ43)
CVVVRVGNDMRF

SEQ ID NO: 399940 - protein, 16 aa, Homo sapiens
  CDR3 for beta chain variable domain of TCR clone 199970 (TRBV7-3, TRBJ2-1)
CASSLEGYRSYNEQFF

SEQ ID NO: 399941 - protein, 17 aa, Homo sapiens
  CDR3 for alpha chain variable domain of TCR clone 199971 (TRAV3, TRAJ6)
CAVRDGPRAGGSYIPTF

SEQ ID NO: 399942 - protein, 16 aa, Homo sapiens
  CDR3 for beta chain variable domain of TCR clone 199971 (TRBV7-8, TRBJ2-3)
CASSTEGQRETDTQYL

SEQ ID NO: 399943 - protein, 15 aa, Homo sapiens
  CDR3 for alpha chain variable domain of TCR clone 199972 (TRAV17, TRAJ13)
CATDAGSGGYQKVTF

SEQ ID NO: 399944 - protein, 15 aa, Homo sapiens
  CDR3 for beta chain variable domain of TCR clone 199972 (TRBV11-2, TRBJ2-3)
CASSARRGRGDTQYF

SEQ ID NO: 399945 - protein, 11 aa, Homo sapiens
  CDR3 for alpha chain variable domain of TCR clone 199973 (TRAV1-1, TRAJ23)
CAVRQGGKLIF

SEQ ID NO: 399946 - protein, 14 aa, Homo sapiens
  CDR3 for beta chain variable domain of TCR clone 199973 (TRBV7-8, TRBJ1-2)
CASSPDSLSYGYTF

SEQ ID NO: 399947 - protein, 12 aa, Homo sapiens
  CDR3 for alpha chain variable domain of TCR clone 199974 (TRAV1-1, TRAJ43)
CAPRVSSNDMRF

SEQ ID NO: 399948 - protein, 12 aa, Homo sapiens
  CDR3 for beta chain variable domain of TCR clone 199974 (TRBV12-4, TRBJ2-3)
CASSSTTDTQYF

SEQ ID NO: 399949 - protein, 15 aa, Homo sapiens
  CDR3 for alpha chain variable domain of TCR clone 199975 (TRAV17, TRAJ57)
CATVPSQGGSEKLVF

SEQ ID NO: 399950 - protein, 17 aa, Homo sapiens
  CDR3 for beta chain variable domain of TCR clone 199975 (TRBV20-1, TRBJ2-1)
CSASSSGLAGSYNEQFF

SEQ ID NO: 399951 - protein, 12 aa, Homo sapiens
  CDR3 for alpha chain variable domain of TCR clone 199976 (TRAV29/DV5, TRAJ34)
CAARHNTDKLIF

SEQ ID NO: 399952 - protein, 13 aa, Homo sapiens
  CDR3 for beta chain variable domain of TCR clone 199976 (TRBV2, TRBJ1-5)
CATAGPGNQHQHF

SEQ ID NO: 399953 - protein, 16 aa, Homo sapiens
  CDR3 for alpha chain variable domain of TCR clone 199977 (TRAV3, TRAJ6)
CAVRDGMGRRKLHTYI

SEQ ID NO: 399954 - protein, 15 aa, Homo sapiens
  CDR3 for beta chain variable domain of TCR clone 199977 (TRBV9, TRBJ2-1)
CSSSLAGSSYNEQFF

SEQ ID NO: 399955 - protein, 18 aa, Homo sapiens
  CDR3 for alpha chain variable domain of TCR clone 199978 (TRAV21, TRAJ52)
CAVRPYTAGGTSYGKLTF

SEQ ID NO: 399956 - protein, 14 aa, Homo sapiens
  CDR3 for beta chain variable domain of TCR clone 199978 (TRBV4-1, TRBJ2-2)
CASSQAVNTGELFF

SEQ ID NO: 399957 - protein, 15 aa, Homo sapiens
  CDR3 for alpha chain variable domain of TCR clone 199979 (TRAV8-3, TRAJ23)
CAVGAPYNQGGKLIF

SEQ ID NO: 399958 - protein, 16 aa, Homo sapiens
  CDR3 for beta chain variable domain of TCR clone 199979 (TRBV3-1, TRBJ2-5)
CAGSQDWASGQETQYF

SEQ ID NO: 399959 - protein, 11 aa, Homo sapiens
  CDR3 for alpha chain variable domain of TCR clone 199980 (TRAV1-2, TRAJ8)
CALSSFQKLVF

SEQ ID NO: 399960 - protein, 16 aa, Homo sapiens
  CDR3 for beta chain variable domain of TCR clone 199980 (TRBV7-3, TRBJ2-2)
CASSLKRGTLSGELFF

SEQ ID NO: 399961 - protein, 16 aa, Homo sapiens
  CDR3 for alpha chain variable domain of TCR clone 199981 (TRAV8-1, TRAJ18)
FAVNAGRGSTLGRLDF

SEQ ID NO: 399962 - protein, 15 aa, Homo sapiens
  CDR3 for beta chain variable domain of TCR clone 199981 (TRBV7-2, TRBJ2-5)
CASTPRGASGETQYF

SEQ ID NO: 399963 - protein, 13 aa, Homo sapiens
  CDR3 for alpha chain variable domain of TCR clone 199982 (TRAV2, TRAJ40)
CAVVTSGTYKYIL

SEQ ID NO: 399964 - protein, 15 aa, Homo sapiens
  CDR3 for beta chain variable domain of TCR clone 199982 (TRBV11-3, TRBJ2-3)
CASLKDGREGDTQCF

SEQ ID NO: 399965 - protein, 10 aa, Homo sapiens
  CDR3 for alpha chain variable domain of TCR clone 199983 (TRAV12-3, TRAJ18)
CAMSAEAQPW

SEQ ID NO: 399966 - protein, 13 aa, Homo sapiens
  CDR3 for beta chain variable domain of TCR clone 199983 (TRBV15, TRBJ1-6)
CATSGGLNSPLHI

SEQ ID NO: 399967 - protein, 20 aa, Homo sapiens
  CDR3 for alpha chain variable domain of TCR clone 199984 (TRAV2, TRAJ20)
LILQVREADAAVYRDCKLSF

SEQ ID NO: 399968 - protein, 14 aa, Homo sapiens
  CDR3 for beta chain variable domain of TCR clone 199984 (TRBV7-3, TRBJ2-1)
CASSLAGGTNEQFF

SEQ ID NO: 399969 - protein, 12 aa, Homo sapiens
  CDR3 for alpha chain variable domain of TCR clone 199985 (TRAV21, TRAJ8)
CAVNTGFQKLVF

SEQ ID NO: 399970 - protein, 13 aa, Homo sapiens
  CDR3 for beta chain variable domain of TCR clone 199985 (TRBV6-3, TRBJ2-1)
CARSYENYNEQFF

SEQ ID NO: 399971 - protein, 15 aa, Homo sapiens
  CDR3 for alpha chain variable domain of TCR clone 199986 (TRAV35, TRAJ40)
CAGQLGTSGTYKYIF

SEQ ID NO: 399972 - protein, 17 aa, Homo sapiens
  CDR3 for beta chain variable domain of TCR clone 199986 (TRBV7-8, TRBJ2-6)
CASSAGTGGAGANVLTF

SEQ ID NO: 399973 - protein, 15 aa, Homo sapiens
  CDR3 for alpha chain variable domain of TCR clone 199987 (TRAV3, TRAJ15)
CAVRPANQAGTALNF

SEQ ID NO: 399974 - protein, 14 aa, Homo sapiens
  CDR3 for beta chain variable domain of TCR clone 199987 (TRBV4-1, TRBJ2-2)
CASSQAVNTGELFF

SEQ ID NO: 399975 - protein, 12 aa, Homo sapiens
  CDR3 for alpha chain variable domain of TCR clone 199988 (TRAV21, TRAJ57)
SVTQGGSGKLVF

SEQ ID NO: 399976 - protein, 11 aa, Homo sapiens
  CDR3 for beta chain variable domain of TCR clone 199988 (TRBV11-2, TRBJ2-2)
CASSLPGELFF

SEQ ID NO: 399977 - protein, 14 aa, Homo sapiens
  CDR3 for alpha chain variable domain of TCR clone 199989 (TRAV13-1, TRAJ20)
CAARPGSNDYKLSF

SEQ ID NO: 399978 - protein, 14 aa, Homo sapiens
  CDR3 for beta chain variable domain of TCR clone 199989 (TRBV7-8, TRBJ2-3)
CASSLEAGTDTQYF

SEQ ID NO: 399979 - protein, 14 aa, Homo sapiens
  CDR3 for alpha chain variable domain of TCR clone 199990 (TRAV26-1, TRAJ34)
CIVRVAYNTDKLIF

SEQ ID NO: 399980 - protein, 13 aa, Homo sapiens
  CDR3 for beta chain variable domain of TCR clone 199990 (TRBV7-3, TRBJ2-1)
CASSLYSYNEQFF

SEQ ID NO: 399981 - protein, 12 aa, Homo sapiens
  CDR3 for alpha chain variable domain of TCR clone 199991 (TRAV13-2, TRAJ39)
CSRNNAGNMLTF

SEQ ID NO: 399982 - protein, 13 aa, Homo sapiens
  CDR3 for beta chain variable domain of TCR clone 199991 (TRBV7-7, TRBJ2-5)
CASSRSGQETQYF

SEQ ID NO: 399983 - protein, 13 aa, Homo sapiens
  CDR3 for alpha chain variable domain of TCR clone 199992 (TRAV29/DV5, TRAJ44)
CAASTGTASKLTF

SEQ ID NO: 399984 - protein, 14 aa, Homo sapiens
  CDR3 for beta chain variable domain of TCR clone 199992 (TRBV18, TRBJ2-5)
CASSPGVSQETQYF

SEQ ID NO: 399985 - protein, 10 aa, Homo sapiens
  CDR3 for alpha chain variable domain of TCR clone 199993 (TRAV1-2, TRAJ34)
CSVNTYKLIF

SEQ ID NO: 399986 - protein, 13 aa, Homo sapiens
  CDR3 for beta chain variable domain of TCR clone 199993 (TRBV10-1, TRBJ2-1)
CASSAGPDNEHFF

SEQ ID NO: 399987 - protein, 14 aa, Homo sapiens
  CDR3 for alpha chain variable domain of TCR clone 199994 (TRAV2, TRAJ37)
CAVDFTSNTGKLVF

SEQ ID NO: 399988 - protein, 13 aa, Homo sapiens
  CDR3 for beta chain variable domain of TCR clone 199994 (TRBV20-1, TRBJ1-2)
CSAPRSGRYGYTF

SEQ ID NO: 399989 - protein, 13 aa, Homo sapiens
  CDR3 for alpha chain variable domain of TCR clone 199995 (TRAV16, TRAJ10)
CALLTGGGNKLTF

SEQ ID NO: 399990 - protein, 14 aa, Homo sapiens
  CDR3 for beta chain variable domain of TCR clone 199995 (TRBV7-9, TRBJ1-1)
CASSLVPVWTEAFF

SEQ ID NO: 399991 - protein, 14 aa, Homo sapiens
  CDR3 for alpha chain variable domain of TCR clone 199996 (TRAV16, TRAJ39)
CALSKNNAGNMLTF

SEQ ID NO: 399992 - protein, 16 aa, Homo sapiens
  CDR3 for beta chain variable domain of TCR clone 199996 (TRBV4-1, TRBJ1-4)
CASSQVGVATNEKLFF

SEQ ID NO: 399993 - protein, 14 aa, Homo sapiens
  CDR3 for alpha chain variable domain of TCR clone 199997 (TRAV12-1, TRAJ10)
CVVNSAGGGNKLTF

SEQ ID NO: 399994 - protein, 14 aa, Homo sapiens
  CDR3 for beta chain variable domain of TCR clone 199997 (TRBV12-4, TRBJ1-1)
CASSLGTGGTEPFF

SEQ ID NO: 399995 - protein, 13 aa, Homo sapiens
  CDR3 for alpha chain variable domain of TCR clone 199998 (TRAV12-2, TRAJ6)
CAVNVSRKLHTYI

SEQ ID NO: 399996 - protein, 13 aa, Homo sapiens
  CDR3 for beta chain variable domain of TCR clone 199998 (TRBV4-1, TRBJ2-7)
CASSWTGGYEQYF

SEQ ID NO: 399997 - protein, 12 aa, Homo sapiens
  CDR3 for alpha chain variable domain of TCR clone 199999 (TRAV12-1, TRAJ30)
CVVNPRDDKIIF

SEQ ID NO: 399998 - protein, 13 aa, Homo sapiens
  CDR3 for beta chain variable domain of TCR clone 199999 (TRBV7-7, TRBJ2-3)
CASSLSRADTQYF

SEQ ID NO: 399999 - protein, 14 aa, Homo sapiens
  CDR3 for alpha chain variable domain of TCR clone 200000 (TRAV8-2, TRAJ4)
CVVSPSGGYNKLIF

SEQ ID NO: 400000 - protein, 12 aa, Homo sapiens
  CDR3 for beta chain variable domain of TCR clone 200000 (TRBV12-4, TRBJ2-7)
CASSLGGYEQYF

SEQ ID NO: 400001 - protein, 12 aa, Homo sapiens
  CDR3 for alpha chain variable domain of TCR clone 200001 (TRAV13-2, TRAJ23)
CAERHRGGKRIF

SEQ ID NO: 400002 - protein, 12 aa, Homo sapiens
  CDR3 for beta chain variable domain of TCR clone 200001 (TRBV29-1, TRBJ2-3)
CSVTGGADTQYF

SEQ ID NO: 400003 - protein, 16 aa, Homo sapiens
  CDR3 for alpha chain variable domain of TCR clone 200002 (TRAV12-2, TRAJ45)
CAVIFLSGGGADGLTF

SEQ ID NO: 400004 - protein, 19 aa, Homo sapiens
  CDR3 for beta chain variable domain of TCR clone 200002 (TRBV28, TRBJ2-4)
CASSFQPGGPAHSKNSQYS

SEQ ID NO: 400005 - protein, 13 aa, Homo sapiens
  CDR3 for alpha chain variable domain of TCR clone 200003 (TRAV3, TRAJ21)
CAVKEPDFNKFYF

SEQ ID NO: 400006 - protein, 14 aa, Homo sapiens
  CDR3 for beta chain variable domain of TCR clone 200003 (TRBV7-2, TRBJ1-1)
CASSFLTGTTEAFF

SEQ ID NO: 400007 - protein, 14 aa, Homo sapiens
  CDR3 for alpha chain variable domain of TCR clone 200004 (TRAV38-2/DV8, TRAJ23)
CAYRSQNPGGKLIF

SEQ ID NO: 400008 - protein, 13 aa, Homo sapiens
  CDR3 for beta chain variable domain of TCR clone 200004 (TRBV24-1, TRBJ2-1)
CATSAGPYNEQFF

SEQ ID NO: 400009 - protein, 14 aa, Homo sapiens
  CDR3 for alpha chain variable domain of TCR clone 200005 (TRAV17, TRAJ15)
CATDRGQAGTALIF

SEQ ID NO: 400010 - protein, 17 aa, Homo sapiens
  CDR3 for beta chain variable domain of TCR clone 200005 (TRBV3-1, TRBJ2-7)
CASSQDLTGLSSYEQYF

SEQ ID NO: 400011 - protein, 14 aa, Homo sapiens
  CDR3 for alpha chain variable domain of TCR clone 200006 (TRAV3, TRAJ36)
CAVRDGTGTNNLFF

SEQ ID NO: 400012 - protein, 16 aa, Homo sapiens
  CDR3 for beta chain variable domain of TCR clone 200006 (TRBV7-3, TRBJ2-5)
CASIQPGGSVQETQYF

SEQ ID NO: 400013 - protein, 13 aa, Homo sapiens
  CDR3 for alpha chain variable domain of TCR clone 200007 (TRAV27, TRAJ41)
CAGEGNSGYALNF

SEQ ID NO: 400014 - protein, 13 aa, Homo sapiens
  CDR3 for beta chain variable domain of TCR clone 200007 (TRBV7-2, TRBJ2-2)
CASSLAVTGELFF

SEQ ID NO: 400015 - protein, 17 aa, Homo sapiens
  CDR3 for alpha chain variable domain of TCR clone 200008 (TRAV3, TRAJ6)
CAVRDGPRAGRSYIPTL

SEQ ID NO: 400016 - protein, 14 aa, Homo sapiens
  CDR3 for beta chain variable domain of TCR clone 200008 (TRBV7-2, TRBJ2-7)
CASSPKTSFYEQYF

SEQ ID NO: 400017 - protein, 12 aa, Homo sapiens
  CDR3 for alpha chain variable domain of TCR clone 200009 (TRAV8-3, TRAJ20)
CAEDFNDYKLSF

SEQ ID NO: 400018 - protein, 17 aa, Homo sapiens
  CDR3 for beta chain variable domain of TCR clone 200009 (TRBV25-1, TRBJ2-5)
CASSRRGGRGGQETQYF

SEQ ID NO: 400019 - protein, 14 aa, Homo sapiens
  CDR3 for alpha chain variable domain of TCR clone 200010 (TRAV8-3, TRAJ35)
CSVVPQGFGNVLHC

SEQ ID NO: 400020 - protein, 14 aa, Homo sapiens
  CDR3 for beta chain variable domain of TCR clone 200010 (TRBV15, TRBJ2-5)
CATSIGGLGETQYF

SEQ ID NO: 400021 - protein, 12 aa, Homo sapiens
  CDR3 for alpha chain variable domain of TCR clone 200011 (TRAV38-1, TRAJ43)
CAFMTRLADMRF

SEQ ID NO: 400022 - protein, 16 aa, Homo sapiens
  CDR3 for beta chain variable domain of TCR clone 200011 (TRBV28, TRBJ2-7)
CASSLFFETGGPEQYF

SEQ ID NO: 400023 - protein, 14 aa, Homo sapiens
  CDR3 for alpha chain variable domain of TCR clone 200012 (TRAV1-2, TRAJ16)
CAVNRFSDGQKLLF

SEQ ID NO: 400024 - protein, 17 aa, Homo sapiens
  CDR3 for beta chain variable domain of TCR clone 200012 (TRBV5-4, TRBJ2-3)
CISVPAVLTASTDTQYF

SEQ ID NO: 400025 - protein, 10 aa, Homo sapiens
  CDR3 for alpha chain variable domain of TCR clone 200013 (TRAV27, TRAJ58)
SETSGSRLTF

SEQ ID NO: 400026 - protein, 15 aa, Homo sapiens
  CDR3 for beta chain variable domain of TCR clone 200013 (TRBV27, TRBJ2-1)
CASSLARGAYNEQFF

SEQ ID NO: 400027 - protein, 14 aa, Homo sapiens
  CDR3 for alpha chain variable domain of TCR clone 200014 (TRAV12-2, TRAJ17)
CAGLFKAAGNTLTF

SEQ ID NO: 400028 - protein, 17 aa, Homo sapiens
  CDR3 for beta chain variable domain of TCR clone 200014 (TRBV20-1, TRBJ2-2)
CSASGSGQGGLTGELFF

SEQ ID NO: 400029 - protein, 14 aa, Homo sapiens
  CDR3 for alpha chain variable domain of TCR clone 200015 (TRAV17, TRAJ16)
CATADFSDGQKLLF

SEQ ID NO: 400030 - protein, 14 aa, Homo sapiens
  CDR3 for beta chain variable domain of TCR clone 200015 (TRBV12-5, TRBJ2-5)
CASGSRTHQEIQYF

SEQ ID NO: 400031 - protein, 10 aa, Homo sapiens
  CDR3 for alpha chain variable domain of TCR clone 200016 (TRAV13-1, TRAJ30)
PPYRDDKIIF

SEQ ID NO: 400032 - protein, 14 aa, Homo sapiens
  CDR3 for beta chain variable domain of TCR clone 200016 (TRBV7-2, TRBJ1-2)
CASSQTGSTYGYTF

SEQ ID NO: 400033 - protein, 12 aa, Homo sapiens
  CDR3 for alpha chain variable domain of TCR clone 200017 (TRAV8-3, TRAJ26)
CAGDKYGKNFFF

SEQ ID NO: 400034 - protein, 13 aa, Homo sapiens
  CDR3 for beta chain variable domain of TCR clone 200017 (TRBV10-3, TRBJ2-7)
CASKLAVNYEQYF

SEQ ID NO: 400035 - protein, 19 aa, Homo sapiens
  CDR3 for alpha chain variable domain of TCR clone 200018 (TRAV29/DV5, TRAJ49)
CSVLLCSKLTVDTGNQFYF

SEQ ID NO: 400036 - protein, 12 aa, Homo sapiens
  CDR3 for beta chain variable domain of TCR clone 200018 (TRBV2, TRBJ2-1)
CAYGPPGNEQFF

SEQ ID NO: 400037 - protein, 13 aa, Homo sapiens
  CDR3 for alpha chain variable domain of TCR clone 200019 (TRAV12-1, TRAJ9)
CVVTNTRGFKTIF

SEQ ID NO: 400038 - protein, 18 aa, Homo sapiens
  CDR3 for beta chain variable domain of TCR clone 200019 (TRBV25-1, TRBJ2-2)
CHPSLPGGQGRKTGELFF

SEQ ID NO: 400039 - protein, 13 aa, Homo sapiens
  CDR3 for alpha chain variable domain of TCR clone 200020 (TRAV27, TRAJ41)
CAGEGNSGYALNF

SEQ ID NO: 400040 - protein, 15 aa, Homo sapiens
  CDR3 for beta chain variable domain of TCR clone 200020 (TRBV6-3, TRBJ2-7)
CASSCPGTVFYEQYF

SEQ ID NO: 400041 - protein, 12 aa, Homo sapiens
  CDR3 for alpha chain variable domain of TCR clone 200021 (TRAV23/DV6, TRAJ30)
SAASKGDDKIIF

SEQ ID NO: 400042 - protein, 15 aa, Homo sapiens
  CDR3 for beta chain variable domain of TCR clone 200021 (TRBV20-1, TRBJ2-7)
CSARDRVSGMDEQYF

SEQ ID NO: 400043 - protein, 12 aa, Homo sapiens
  CDR3 for alpha chain variable domain of TCR clone 200022 (TRAV17, TRAJ49)
CATVTTGNQFYF

SEQ ID NO: 400044 - protein, 18 aa, Homo sapiens
  CDR3 for beta chain variable domain of TCR clone 200022 (TRBV12-4, TRBJ2-2)
CASSLVAGTRGRTGELFF

SEQ ID NO: 400045 - protein, 14 aa, Homo sapiens
  CDR3 for alpha chain variable domain of TCR clone 200023 (TRAV8-3, TRAJ13)
CAVCAQEGYQKVTS

SEQ ID NO: 400046 - protein, 13 aa, Homo sapiens
  CDR3 for beta chain variable domain of TCR clone 200023 (TRBV11-2, TRBJ2-5)
CASSSTGEETQYF

SEQ ID NO: 400047 - protein, 14 aa, Homo sapiens
  CDR3 for alpha chain variable domain of TCR clone 200024 (TRAV26-2, TRAJ56)
CILRATGANSKLTF

SEQ ID NO: 400048 - protein, 16 aa, Homo sapiens
  CDR3 for beta chain variable domain of TCR clone 200024 (TRBV6-1, TRBJ2-5)
CASSETLDRGAETQYF

SEQ ID NO: 400049 - protein, 13 aa, Homo sapiens
  CDR3 for alpha chain variable domain of TCR clone 200025 (TRAV17, TRAJ4)
CATKSGGYNKLIF

SEQ ID NO: 400050 - protein, 14 aa, Homo sapiens
  CDR3 for beta chain variable domain of TCR clone 200025 (TRBV20-1, TRBJ1-5)
CSARDDRGNQPQHS

SEQ ID NO: 400051 - protein, 14 aa, Homo sapiens
  CDR3 for alpha chain variable domain of TCR clone 200026 (TRAV38-2/DV8, TRAJ42)
CAYPEGGSQGNLIF

SEQ ID NO: 400052 - protein, 15 aa, Homo sapiens
  CDR3 for beta chain variable domain of TCR clone 200026 (TRBV19, TRBJ2-1)
CASSTGTSAYNEQFF

SEQ ID NO: 400053 - protein, 12 aa, Homo sapiens
  CDR3 for alpha chain variable domain of TCR clone 200027 (TRAV8-1, TRAJ26)
CAVNNYGQNFVF

SEQ ID NO: 400054 - protein, 15 aa, Homo sapiens
  CDR3 for beta chain variable domain of TCR clone 200027 (TRBV20-1, TRBJ1-1)
CSASWDRFLNTEALF

SEQ ID NO: 400055 - protein, 15 aa, Homo sapiens
  CDR3 for alpha chain variable domain of TCR clone 200028 (TRAV8-3, TRAJ27)
CAVGPSKTNAGKSTF

SEQ ID NO: 400056 - protein, 15 aa, Homo sapiens
  CDR3 for beta chain variable domain of TCR clone 200028 (TRBV7-9, TRBJ1-4)
CASSRTGGFNEKLFF

SEQ ID NO: 400057 - protein, 12 aa, Homo sapiens
  CDR3 for alpha chain variable domain of TCR clone 200029 (TRAV2, TRAJ9)
CAVGAGGVKTIF

SEQ ID NO: 400058 - protein, 14 aa, Homo sapiens
  CDR3 for beta chain variable domain of TCR clone 200029 (TRBV6-1, TRBJ1-3)
CASVQGGGGNTIYF

SEQ ID NO: 400059 - protein, 14 aa, Homo sapiens
  CDR3 for alpha chain variable domain of TCR clone 200030 (TRAV26-1, TRAJ38)
CIADNAGNNRKLIW

SEQ ID NO: 400060 - protein, 15 aa, Homo sapiens
  CDR3 for beta chain variable domain of TCR clone 200030 (TRBV7-3, TRBJ2-1)
CASSYSTSAHNEQFF

SEQ ID NO: 400061 - protein, 13 aa, Homo sapiens
  CDR3 for alpha chain variable domain of TCR clone 200031 (TRAV8-3, TRAJ28)
CAVGAVGSYQLTF

SEQ ID NO: 400062 - protein, 13 aa, Homo sapiens
  CDR3 for beta chain variable domain of TCR clone 200031 (TRBV19, TRBJ1-2)
CASSVRGQDGCTF

SEQ ID NO: 400063 - protein, 14 aa, Homo sapiens
  CDR3 for alpha chain variable domain of TCR clone 200032 (TRAV12-1, TRAJ12)
CVVTRMDSSYKLIF

SEQ ID NO: 400064 - protein, 14 aa, Homo sapiens
  CDR3 for beta chain variable domain of TCR clone 200032 (TRBV7-2, TRBJ2-2)
CASSLGQNTGELCF

SEQ ID NO: 400065 - protein, 13 aa, Homo sapiens
  CDR3 for alpha chain variable domain of TCR clone 200033 (TRAV8-2, TRAJ49)
CVVTPNTGNQFYF

SEQ ID NO: 400066 - protein, 15 aa, Homo sapiens
  CDR3 for beta chain variable domain of TCR clone 200033 (TRBV11-2, TRBJ2-1)
CASSLTSGGYNEQFF

SEQ ID NO: 400067 - protein, 13 aa, Homo sapiens
  CDR3 for alpha chain variable domain of TCR clone 200034 (TRAV21, TRAJ27)
CAARPGNAGKSTF

SEQ ID NO: 400068 - protein, 15 aa, Homo sapiens
  CDR3 for beta chain variable domain of TCR clone 200034 (TRBV20-1, TRBJ2-3)
CSATGTSGFTDTQYF

SEQ ID NO: 400069 - protein, 17 aa, Homo sapiens
  CDR3 for alpha chain variable domain of TCR clone 200035 (TRAV26-2, TRAJ32)
ERCCCLGNGGATNKLIF

SEQ ID NO: 400070 - protein, 14 aa, Homo sapiens
  CDR3 for beta chain variable domain of TCR clone 200035 (TRBV4-2, TRBJ2-1)
CASGLDRAYNEQFF

SEQ ID NO: 400071 - protein, 15 aa, Homo sapiens
  CDR3 for alpha chain variable domain of TCR clone 200036 (TRAV19, TRAJ53)
CALSSSGGSNYKLTF

SEQ ID NO: 400072 - protein, 15 aa, Homo sapiens
  CDR3 for beta chain variable domain of TCR clone 200036 (TRBV7-9, TRBJ1-6)
CASSSPGRGNSPLHF

SEQ ID NO: 400073 - protein, 14 aa, Homo sapiens
  CDR3 for alpha chain variable domain of TCR clone 200037 (TRAV1-2, TRAJ16)
FAVNRFSDGQKLLF

SEQ ID NO: 400074 - protein, 16 aa, Homo sapiens
  CDR3 for beta chain variable domain of TCR clone 200037 (TRBV5-4, TRBJ2-3)
CASQQPGAGGADTQYF

SEQ ID NO: 400075 - protein, 12 aa, Homo sapiens
  CDR3 for alpha chain variable domain of TCR clone 200038 (TRAV12-3, TRAJ17)
CAMTLTGNKLTF

SEQ ID NO: 400076 - protein, 12 aa, Homo sapiens
  CDR3 for beta chain variable domain of TCR clone 200038 (TRBV7-2, TRBJ1-2)
CASRDSIYGYTF

SEQ ID NO: 400077 - protein, 15 aa, Homo sapiens
  CDR3 for alpha chain variable domain of TCR clone 200039 (TRAV21, TRAJ37)
CAVMPTLSNTVKLIF

SEQ ID NO: 400078 - protein, 16 aa, Homo sapiens
  CDR3 for beta chain variable domain of TCR clone 200039 (TRBV24-1, TRBJ2-3)
CATSDRRQDLTDTQYF

SEQ ID NO: 400079 - protein, 11 aa, Homo sapiens
  CDR3 for alpha chain variable domain of TCR clone 200040 (TRAV1-1, TRAJ22)
CLGGFCKAPDL

SEQ ID NO: 400080 - protein, 14 aa, Homo sapiens
  CDR3 for beta chain variable domain of TCR clone 200040 (TRBV27, TRBJ2-7)
CASSLAGLSYEQYF

SEQ ID NO: 400081 - protein, 14 aa, Homo sapiens
  CDR3 for alpha chain variable domain of TCR clone 200041 (TRAV12-2, TRAJ5)
CAVNRSTGRRALTF

SEQ ID NO: 400082 - protein, 12 aa, Homo sapiens
  CDR3 for beta chain variable domain of TCR clone 200041 (TRBV5-1, TRBJ2-1)
CASIGGYNEQFF

SEQ ID NO: 400083 - protein, 12 aa, Homo sapiens
  CDR3 for alpha chain variable domain of TCR clone 200042 (TRAV26-1, TRAJ53)
CIEGGSNYKLTF

SEQ ID NO: 400084 - protein, 16 aa, Homo sapiens
  CDR3 for beta chain variable domain of TCR clone 200042 (TRBV7-2, TRBJ2-5)
CASSPFPTGGEETQYF

SEQ ID NO: 400085 - protein, 12 aa, Homo sapiens
  CDR3 for alpha chain variable domain of TCR clone 200043 (TRAV27, TRAJ57)
CATDGGSEKLVF

SEQ ID NO: 400086 - protein, 13 aa, Homo sapiens
  CDR3 for beta chain variable domain of TCR clone 200043 (TRBV7-9, TRBJ2-7)
CASSFAGAYEQYF

SEQ ID NO: 400087 - protein, 14 aa, Homo sapiens
  CDR3 for alpha chain variable domain of TCR clone 200044 (TRAV1-2, TRAJ16)
CAVNRFSDGQKLLF

SEQ ID NO: 400088 - protein, 14 aa, Homo sapiens
  CDR3 for beta chain variable domain of TCR clone 200044 (TRBV7-2, TRBJ1-1)
CASSFLTGTTEAFF

SEQ ID NO: 400089 - protein, 16 aa, Homo sapiens
  CDR3 for alpha chain variable domain of TCR clone 200045 (TRAV3, TRAJ3)
CAVRDMAKSSASKIIF

SEQ ID NO: 400090 - protein, 13 aa, Homo sapiens
  CDR3 for beta chain variable domain of TCR clone 200045 (TRBV10-3, TRBJ2-7)
CASKLAVNYEQYF

SEQ ID NO: 400091 - protein, 16 aa, Homo sapiens
  CDR3 for alpha chain variable domain of TCR clone 200046 (TRAV13-1, TRAJ13)
CTAFFLGVTRKLPLEL

SEQ ID NO: 400092 - protein, 17 aa, Homo sapiens
  CDR3 for beta chain variable domain of TCR clone 200046 (TRBV20-1, TRBJ2-1)
CSASSSGLAGSYNEQFF

SEQ ID NO: 400093 - protein, 12 aa, Homo sapiens
  CDR3 for alpha chain variable domain of TCR clone 200047 (TRAV12-3, TRAJ17)
CAMTLTGNKLTF

SEQ ID NO: 400094 - protein, 13 aa, Homo sapiens
  CDR3 for beta chain variable domain of TCR clone 200047 (TRBV7-2, TRBJ1-5)
CASSLEVRQPQHF

SEQ ID NO: 400095 - protein, 11 aa, Homo sapiens
  CDR3 for alpha chain variable domain of TCR clone 200048 (TRAV3, TRAJ32)
CAVREGIMVVL

SEQ ID NO: 400096 - protein, 14 aa, Homo sapiens
  CDR3 for beta chain variable domain of TCR clone 200048 (TRBV7-3, TRBJ2-3)
CASSPGASRDTQYF

SEQ ID NO: 400097 - protein, 14 aa, Homo sapiens
  CDR3 for alpha chain variable domain of TCR clone 200049 (TRAV1-2, TRAJ16)
CAVNRFSDGEKLLF

SEQ ID NO: 400098 - protein, 17 aa, Homo sapiens
  CDR3 for beta chain variable domain of TCR clone 200049 (TRBV7-9, TRBJ2-1)
CASSLVASYPSYNEQFF

SEQ ID NO: 400099 - protein, 13 aa, Homo sapiens
  CDR3 for alpha chain variable domain of TCR clone 200050 (TRAV8-3, TRAJ54)
CAVSIQGAQKLVF

SEQ ID NO: 400100 - protein, 14 aa, Homo sapiens
  CDR3 for beta chain variable domain of TCR clone 200050 (TRBV27, TRBJ2-1)
CAGSIAETYNEQFF

SEQ ID NO: 400101 - protein, 14 aa, Homo sapiens
  CDR3 for alpha chain variable domain of TCR clone 200051 (TRAV12-2, TRAJ9)
CAVNALEGGFKTIF

SEQ ID NO: 400102 - protein, 16 aa, Homo sapiens
  CDR3 for beta chain variable domain of TCR clone 200051 (TRBV19, TRBJ1-6)
CASSVAPVAGNSPLHC

SEQ ID NO: 400103 - protein, 16 aa, Homo sapiens
  CDR3 for alpha chain variable domain of TCR clone 200052 (TRAV3, TRAJ10)
CAVRDMRAGGGNKLPF

SEQ ID NO: 400104 - protein, 13 aa, Homo sapiens
  CDR3 for beta chain variable domain of TCR clone 200052 (TRBV7-9, TRBJ1-2)
CASSLKQNYGYAF

SEQ ID NO: 400105 - protein, 14 aa, Homo sapiens
  CDR3 for alpha chain variable domain of TCR clone 200053 (TRAV3, TRAJ9)
CAVRLNTGGFKTIF

SEQ ID NO: 400106 - protein, 15 aa, Homo sapiens
  CDR3 for beta chain variable domain of TCR clone 200053 (TRBV27, TRBJ2-7)
CASSTAGTGSYEQYF

SEQ ID NO: 400107 - protein, 12 aa, Homo sapiens
  CDR3 for alpha chain variable domain of TCR clone 200054 (TRAV29/DV5, TRAJ15)
CASNQAGTALIF

SEQ ID NO: 400108 - protein, 16 aa, Homo sapiens
  CDR3 for beta chain variable domain of TCR clone 200054 (TRBV7-3, TRBJ2-2)
CASSLKRGTLSGELFF

SEQ ID NO: 400109 - protein, 12 aa, Homo sapiens
  CDR3 for alpha chain variable domain of TCR clone 200055 (TRAV12-1, TRAJ40)
CVVYSGTYKYIF

SEQ ID NO: 400110 - protein, 14 aa, Homo sapiens
  CDR3 for beta chain variable domain of TCR clone 200055 (TRBV4-1, TRBJ1-6)
CASSQGPLGSPLHF

SEQ ID NO: 400111 - protein, 14 aa, Homo sapiens
  CDR3 for alpha chain variable domain of TCR clone 200056 (TRAV12-2, TRAJ9)
CAVNMEGGGFKTIF

SEQ ID NO: 400112 - protein, 13 aa, Homo sapiens
  CDR3 for beta chain variable domain of TCR clone 200056 (TRBV7-3, TRBJ2-5)
CASSFRGGETQYF

SEQ ID NO: 400113 - protein, 13 aa, Homo sapiens
  CDR3 for alpha chain variable domain of TCR clone 200057 (TRAV12-2, TRAJ18)
CAVRGSTLGRLYF

SEQ ID NO: 400114 - protein, 16 aa, Homo sapiens
  CDR3 for beta chain variable domain of TCR clone 200057 (TRBV12-4, TRBJ1-5)
CASSSGPRGSNQPQHF

SEQ ID NO: 400115 - protein, 12 aa, Homo sapiens
  CDR3 for alpha chain variable domain of TCR clone 200058 (TRAV21, TRAJ13)
PGPSGGYQKVTF

SEQ ID NO: 400116 - protein, 13 aa, Homo sapiens
  CDR3 for beta chain variable domain of TCR clone 200058 (TRBV11-2, TRBJ1-3)
CASSLEPVNTIYF

SEQ ID NO: 400117 - protein, 14 aa, Homo sapiens
  CDR3 for alpha chain variable domain of TCR clone 200059 (TRAV4, TRAJ30)
CLVGDMNRDDKFIF

SEQ ID NO: 400118 - protein, 14 aa, Homo sapiens
  CDR3 for beta chain variable domain of TCR clone 200059 (TRBV19, TRBJ2-7)
CASSIQEWSYEQYF

SEQ ID NO: 400119 - protein, 13 aa, Homo sapiens
  CDR3 for alpha chain variable domain of TCR clone 200060 (TRAV8-3, TRAJ36)
CAVGATGANNLFF

SEQ ID NO: 400120 - protein, 15 aa, Homo sapiens
  CDR3 for beta chain variable domain of TCR clone 200060 (TRBV25-1, TRBJ2-4)
CASSETESAKNIQYF

SEQ ID NO: 400121 - protein, 13 aa, Homo sapiens
  CDR3 for alpha chain variable domain of TCR clone 200061 (TRAV26-1, TRAJ48)
CIVRVVVDEKLTF

SEQ ID NO: 400122 - protein, 17 aa, Homo sapiens
  CDR3 for beta chain variable domain of TCR clone 200061 (TRBV7-3, TRBJ2-2)
CASSLSGTSGGTGELFF

SEQ ID NO: 400123 - protein, 23 aa, Homo sapiens
  CDR3 for alpha chain variable domain of TCR clone 200062 (TRAV8-1, TRAJ36)
CAVNSPTGANNPFLGLERDSPLF

SEQ ID NO: 400124 - protein, 15 aa, Homo sapiens
  CDR3 for beta chain variable domain of TCR clone 200062 (TRBV7-2, TRBJ2-3)
CASSLEQGGTDTQYF

SEQ ID NO: 400125 - protein, 14 aa, Homo sapiens
  CDR3 for alpha chain variable domain of TCR clone 200063 (TRAV1-2, TRAJ16)
CAVNRSSDGQKLLF

SEQ ID NO: 400126 - protein, 16 aa, Homo sapiens
  CDR3 for beta chain variable domain of TCR clone 200063 (TRBV19, TRBJ2-3)
CASSPEWDRGTDTQYF

SEQ ID NO: 400127 - protein, 16 aa, Homo sapiens
  CDR3 for alpha chain variable domain of TCR clone 200064 (TRAV30, TRAJ24)
CGTKIVDADSWGKFQF

SEQ ID NO: 400128 - protein, 15 aa, Homo sapiens
  CDR3 for beta chain variable domain of TCR clone 200064 (TRBV9, TRBJ1-6)
CASSVAGTWDSPLHF

SEQ ID NO: 400129 - protein, 15 aa, Homo sapiens
  CDR3 for alpha chain variable domain of TCR clone 200065 (TRAV12-3, TRAJ13)
CAMSARSGGYKKVTF

SEQ ID NO: 400130 - protein, 18 aa, Homo sapiens
  CDR3 for beta chain variable domain of TCR clone 200065 (TRBV3-1, TRBJ2-7)
CASSQEGGGRSWHYEQYF

SEQ ID NO: 400131 - protein, 18 aa, Homo sapiens
  CDR3 for alpha chain variable domain of TCR clone 200066 (TRAV12-3, TRAJ52)
CAISVGGAGGTSYGKLTF

SEQ ID NO: 400132 - protein, 14 aa, Homo sapiens
  CDR3 for beta chain variable domain of TCR clone 200066 (TRBV2, TRBJ2-1)
CASRTGSSYNEQFF

SEQ ID NO: 400133 - protein, 14 aa, Homo sapiens
  CDR3 for alpha chain variable domain of TCR clone 200067 (TRAV23/DV6, TRAJ8)
CAASKNTGFQKLVF

SEQ ID NO: 400134 - protein, 13 aa, Homo sapiens
  CDR3 for beta chain variable domain of TCR clone 200067 (TRBV13, TRBJ2-2)
CQQLSGRGRELFF

SEQ ID NO: 400135 - protein, 14 aa, Homo sapiens
  CDR3 for alpha chain variable domain of TCR clone 200068 (TRAV3, TRAJ6)
CAVRDWGGSYIPTF

SEQ ID NO: 400136 - protein, 16 aa, Homo sapiens
  CDR3 for beta chain variable domain of TCR clone 200068 (TRBV12-5, TRBJ2-5)
CASGPRTSGNQETQYF

SEQ ID NO: 400137 - protein, 18 aa, Homo sapiens
  CDR3 for alpha chain variable domain of TCR clone 200069 (TRAV13-1, TRAJ52)
CAAKNPNAGGTSYGKLTF

SEQ ID NO: 400138 - protein, 16 aa, Homo sapiens
  CDR3 for beta chain variable domain of TCR clone 200069 (TRBV7-3, TRBJ2-2)
GGTQPCIQWNTGELFF

SEQ ID NO: 400139 - protein, 17 aa, Homo sapiens
  CDR3 for alpha chain variable domain of TCR clone 200070 (TRAV3, TRAJ6)
CAVRDGPRAGGSYIPTF

SEQ ID NO: 400140 - protein, 14 aa, Homo sapiens
  CDR3 for beta chain variable domain of TCR clone 200070 (TRBV25-1, TRBJ1-2)
CASSDTTGVVGYTF

SEQ ID NO: 400141 - protein, 14 aa, Homo sapiens
  CDR3 for alpha chain variable domain of TCR clone 200071 (TRAV12-3, TRAJ10)
SHLPLTGGGNKLTF

SEQ ID NO: 400142 - protein, 13 aa, Homo sapiens
  CDR3 for beta chain variable domain of TCR clone 200071 (TRBV19, TRBJ1-5)
CASSLRQNQPQHF

SEQ ID NO: 400143 - protein, 14 aa, Homo sapiens
  CDR3 for alpha chain variable domain of TCR clone 200072 (TRAV25, TRAJ20)
CAGKGRWDDYKRSF

SEQ ID NO: 400144 - protein, 12 aa, Homo sapiens
  CDR3 for beta chain variable domain of TCR clone 200072 (TRBV12-5, TRBJ2-3)
CASQASTDTQYF

SEQ ID NO: 400145 - protein, 10 aa, Homo sapiens
  CDR3 for alpha chain variable domain of TCR clone 200073 (TRAV1-2, TRAJ23)
CAAWAGKRIF

SEQ ID NO: 400146 - protein, 14 aa, Homo sapiens
  CDR3 for beta chain variable domain of TCR clone 200073 (TRBV20-1, TRBJ2-7)
CSAKTGTGGYEQYF

SEQ ID NO: 400147 - protein, 14 aa, Homo sapiens
  CDR3 for alpha chain variable domain of TCR clone 200074 (TRAV12-1, TRAJ30)
CVPTGTNRDDKIIF

SEQ ID NO: 400148 - protein, 11 aa, Homo sapiens
  CDR3 for beta chain variable domain of TCR clone 200074 (TRBV4-1, TRBJ2-2)
CASKHTGELFF

SEQ ID NO: 400149 - protein, 14 aa, Homo sapiens
  CDR3 for alpha chain variable domain of TCR clone 200075 (TRAV1-2, TRAJ16)
CAVNRFSDGQKRLF

SEQ ID NO: 400150 - protein, 15 aa, Homo sapiens
  CDR3 for beta chain variable domain of TCR clone 200075 (TRBV19, TRBJ1-5)
CASSIVWADNQPQHF

SEQ ID NO: 400151 - protein, 13 aa, Homo sapiens
  CDR3 for alpha chain variable domain of TCR clone 200076 (TRAV13-1, TRAJ21)
RAASIYSFNKFYF

SEQ ID NO: 400152 - protein, 14 aa, Homo sapiens
  CDR3 for beta chain variable domain of TCR clone 200076 (TRBV4-1, TRBJ2-2)
CASSQAVNTGELFF

SEQ ID NO: 400153 - protein, 13 aa, Homo sapiens
  CDR3 for alpha chain variable domain of TCR clone 200077 (TRAV17, TRAJ5)
CAPMDTGRRALTF

SEQ ID NO: 400154 - protein, 16 aa, Homo sapiens
  CDR3 for beta chain variable domain of TCR clone 200077 (TRBV5-1, TRBJ2-3)
CASSLGLAVYTDTQYF

SEQ ID NO: 400155 - protein, 12 aa, Homo sapiens
  CDR3 for alpha chain variable domain of TCR clone 200078 (TRAV13-1, TRAJ21)
CAAKECFNKFYF

SEQ ID NO: 400156 - protein, 13 aa, Homo sapiens
  CDR3 for beta chain variable domain of TCR clone 200078 (TRBV7-3, TRBJ1-1)
CASGQDWGAEAFF

SEQ ID NO: 400157 - protein, 16 aa, Homo sapiens
  CDR3 for alpha chain variable domain of TCR clone 200079 (TRAV30, TRAJ24)
CGTEIVDADSWGKFQF

SEQ ID NO: 400158 - protein, 14 aa, Homo sapiens
  CDR3 for beta chain variable domain of TCR clone 200079 (TRBV19, TRBJ1-2)
CASSTGNLPYGYTF

SEQ ID NO: 400159 - protein, 11 aa, Homo sapiens
  CDR3 for alpha chain variable domain of TCR clone 200080 (TRAV3, TRAJ21)
CAVGNFNKFYF

SEQ ID NO: 400160 - protein, 16 aa, Homo sapiens
  CDR3 for beta chain variable domain of TCR clone 200080 (TRBV19, TRBJ2-1)
CASSKAGPRYYNEQFF

SEQ ID NO: 400161 - protein, 13 aa, Homo sapiens
  CDR3 for alpha chain variable domain of TCR clone 200081 (TRAV26-2, TRAJ43)
CILRAVNNNDLRF

SEQ ID NO: 400162 - protein, 14 aa, Homo sapiens
  CDR3 for beta chain variable domain of TCR clone 200081 (TRBV20-1, TRBJ1-1)
CSAQTRIGGTEAFF

SEQ ID NO: 400163 - protein, 15 aa, Homo sapiens
  CDR3 for alpha chain variable domain of TCR clone 200082 (TRAV1-2, TRAJ15)
CAVYVMGSAGTALIF

SEQ ID NO: 400164 - protein, 13 aa, Homo sapiens
  CDR3 for beta chain variable domain of TCR clone 200082 (TRBV20-1, TRBJ1-1)
CSAFDRENTEAFF

SEQ ID NO: 400165 - protein, 12 aa, Homo sapiens
  CDR3 for alpha chain variable domain of TCR clone 200083 (TRAV12-3, TRAJ17)
CAMTLTVNKLTF

SEQ ID NO: 400166 - protein, 15 aa, Homo sapiens
  CDR3 for beta chain variable domain of TCR clone 200083 (TRBV10-2, TRBJ2-6)
CASSEQGTGANVLTF

SEQ ID NO: 400167 - protein, 14 aa, Homo sapiens
  CDR3 for alpha chain variable domain of TCR clone 200084 (TRAV17, TRAJ22)
CATSPCGSARQLTF

SEQ ID NO: 400168 - protein, 15 aa, Homo sapiens
  CDR3 for beta chain variable domain of TCR clone 200084 (TRBV4-1, TRBJ2-5)
CASSQWDLYQETQYF

SEQ ID NO: 400169 - protein, 15 aa, Homo sapiens
  CDR3 for alpha chain variable domain of TCR clone 200085 (TRAV8-3, TRAJ11)
CAVGLLNSGYSTLTF

SEQ ID NO: 400170 - protein, 14 aa, Homo sapiens
  CDR3 for beta chain variable domain of TCR clone 200085 (TRBV7-3, TRBJ2-2)
CASSSGGYTGELFF

SEQ ID NO: 400171 - protein, 12 aa, Homo sapiens
  CDR3 for alpha chain variable domain of TCR clone 200086 (TRAV8-3, TRAJ6)
CAVGGGSYIPTF

SEQ ID NO: 400172 - protein, 16 aa, Homo sapiens
  CDR3 for beta chain variable domain of TCR clone 200086 (TRBV4-2, TRBJ2-3)
CASSQELAGDTDTQYF

SEQ ID NO: 400173 - protein, 13 aa, Homo sapiens
  CDR3 for alpha chain variable domain of TCR clone 200087 (TRAV13-1, TRAJ41)
CADAPHSGYALNF

SEQ ID NO: 400174 - protein, 13 aa, Homo sapiens
  CDR3 for beta chain variable domain of TCR clone 200087 (TRBV19, TRBJ2-7)
CASEGTTTYEQYF

SEQ ID NO: 400175 - protein, 15 aa, Homo sapiens
  CDR3 for alpha chain variable domain of TCR clone 200088 (TRAV2, TRAJ9)
CAVAALNTGGVKTIF

SEQ ID NO: 400176 - protein, 14 aa, Homo sapiens
  CDR3 for beta chain variable domain of TCR clone 200088 (TRBV7-8, TRBJ2-5)
CASSATGGQETQYF

SEQ ID NO: 400177 - protein, 14 aa, Homo sapiens
  CDR3 for alpha chain variable domain of TCR clone 200089 (TRAV1-2, TRAJ16)
CAVNRFSDGQKLLF

SEQ ID NO: 400178 - protein, 17 aa, Homo sapiens
  CDR3 for beta chain variable domain of TCR clone 200089 (TRBV15, TRBJ1-2)
RATSGWEIDVVNYGYTF

SEQ ID NO: 400179 - protein, 16 aa, Homo sapiens
  CDR3 for alpha chain variable domain of TCR clone 200090 (TRAV26-1, TRAJ38)
CIVRVELGGTNRKMIW

SEQ ID NO: 400180 - protein, 14 aa, Homo sapiens
  CDR3 for beta chain variable domain of TCR clone 200090 (TRBV5-1, TRBJ2-3)
CASSPGLAADTQYF

SEQ ID NO: 400181 - protein, 12 aa, Homo sapiens
  CDR3 for alpha chain variable domain of TCR clone 200091 (TRAV12-2, TRAJ44)
CADTGTASNLTF

SEQ ID NO: 400182 - protein, 13 aa, Homo sapiens
  CDR3 for beta chain variable domain of TCR clone 200091 (TRBV7-3, TRBJ2-1)
CASSLDSYNEQFF

SEQ ID NO: 400183 - protein, 12 aa, Homo sapiens
  CDR3 for alpha chain variable domain of TCR clone 200092 (TRAV38-2/DV8, TRAJ48)
CALLSGNEKLTF

SEQ ID NO: 400184 - protein, 14 aa, Homo sapiens
  CDR3 for beta chain variable domain of TCR clone 200092 (TRBV7-2, TRBJ2-7)
CASSPKTSFYEQYF

SEQ ID NO: 400185 - protein, 15 aa, Homo sapiens
  CDR3 for alpha chain variable domain of TCR clone 200093 (TRAV3, TRAJ22)
CAVRDRGGSARKLTF

SEQ ID NO: 400186 - protein, 13 aa, Homo sapiens
  CDR3 for beta chain variable domain of TCR clone 200093 (TRBV7-3, TRBJ2-1)
CASSPVAYSEQFF

SEQ ID NO: 400187 - protein, 21 aa, Homo sapiens
  CDR3 for alpha chain variable domain of TCR clone 200094 (TRAV34, TRAJ44)
PAMQASTSVEQTTGTASKLTF

SEQ ID NO: 400188 - protein, 16 aa, Homo sapiens
  CDR3 for beta chain variable domain of TCR clone 200094 (TRBV12-5, TRBJ2-5)
CASGPRTSGNQETQYF

SEQ ID NO: 400189 - protein, 16 aa, Homo sapiens
  CDR3 for alpha chain variable domain of TCR clone 200095 (TRAV26-1, TRAJ13)
CIVSPKDSGSYQKVTF

SEQ ID NO: 400190 - protein, 16 aa, Homo sapiens
  CDR3 for beta chain variable domain of TCR clone 200095 (TRBV5-7, TRBJ2-5)
CASIRGQTGYQETQYF

SEQ ID NO: 400191 - protein, 13 aa, Homo sapiens
  CDR3 for alpha chain variable domain of TCR clone 200096 (TRAV12-1, TRAJ16)
CVVNGSDGQKLLF

SEQ ID NO: 400192 - protein, 13 aa, Homo sapiens
  CDR3 for beta chain variable domain of TCR clone 200096 (TRBV2, TRBJ1-1)
CARNRTGGFHAFF

SEQ ID NO: 400193 - protein, 12 aa, Homo sapiens
  CDR3 for alpha chain variable domain of TCR clone 200097 (TRAV20, TRAJ20)
CAVRFNDYKLSF

SEQ ID NO: 400194 - protein, 14 aa, Homo sapiens
  CDR3 for beta chain variable domain of TCR clone 200097 (TRBV20-1, TRBJ2-1)
CSTQIGGSANEQFF

SEQ ID NO: 400195 - protein, 11 aa, Homo sapiens
  CDR3 for alpha chain variable domain of TCR clone 200098 (TRAV17, TRAJ43)
CATPWSNDMRF

SEQ ID NO: 400196 - protein, 15 aa, Homo sapiens
  CDR3 for beta chain variable domain of TCR clone 200098 (TRBV11-2, TRBJ2-1)
CASSLGTSGLNEQFF

SEQ ID NO: 400197 - protein, 16 aa, Homo sapiens
  CDR3 for alpha chain variable domain of TCR clone 200099 (TRAV3, TRAJ34)
CAVRARGTPTSSSLGL

SEQ ID NO: 400198 - protein, 15 aa, Homo sapiens
  CDR3 for beta chain variable domain of TCR clone 200099 (TRBV6-3, TRBJ2-7)
CASSSPETVFYEQYF

SEQ ID NO: 400199 - protein, 16 aa, Homo sapiens
  CDR3 for alpha chain variable domain of TCR clone 200100 (TRAV14/DV4, TRAJ21)
CTMREGPENNFNKFYF

SEQ ID NO: 400200 - protein, 12 aa, Homo sapiens
  CDR3 for beta chain variable domain of TCR clone 200100 (TRBV29-1, TRBJ2-2)
CSVDKYTGELFF

SEQ ID NO: 400201 - protein, 17 aa, Homo sapiens
  CDR3 for alpha chain variable domain of TCR clone 200101 (TRAV35, TRAJ47)
GLLDCRTHTAYGNKLVF

SEQ ID NO: 400202 - protein, 11 aa, Homo sapiens
  CDR3 for beta chain variable domain of TCR clone 200101 (TRBV29-1, TRBJ1-1)
CSVEVGTRTFF

SEQ ID NO: 400203 - protein, 17 aa, Homo sapiens
  CDR3 for alpha chain variable domain of TCR clone 200102 (TRAV3, TRAJ6)
CAVRDGPRAGGSYIPTF

SEQ ID NO: 400204 - protein, 22 aa, Homo sapiens
  CDR3 for beta chain variable domain of TCR clone 200102 (TRBV11-2, TRBJ1-4)
CASSLDITRRGIPRKDNEKLFF

SEQ ID NO: 400205 - protein, 15 aa, Homo sapiens
  CDR3 for alpha chain variable domain of TCR clone 200103 (TRAV12-1, TRAJ44)
CVADLPTGTASKLTF

SEQ ID NO: 400206 - protein, 19 aa, Homo sapiens
  CDR3 for beta chain variable domain of TCR clone 200103 (TRBV19, TRBJ2-5)
CASSIGQVTDFFLGETQYF

SEQ ID NO: 400207 - protein, 22 aa, Homo sapiens
  CDR3 for alpha chain variable domain of TCR clone 200104 (TRAV25, TRAJ13)
TATQTTDVGTFLDSGGYQKVTF

SEQ ID NO: 400208 - protein, 16 aa, Homo sapiens
  CDR3 for beta chain variable domain of TCR clone 200104 (TRBV19, TRBJ2-1)
CASSKAGPSSYNEQFF

SEQ ID NO: 400209 - protein, 18 aa, Homo sapiens
  CDR3 for alpha chain variable domain of TCR clone 200105 (TRAV29/DV5, TRAJ53)
CSVLLCSKRGGSNYKLTF

SEQ ID NO: 400210 - protein, 14 aa, Homo sapiens
  CDR3 for beta chain variable domain of TCR clone 200105 (TRBV7-8, TRBJ2-3)
CASSLEAGTDTQYF

SEQ ID NO: 400211 - protein, 12 aa, Homo sapiens
  CDR3 for alpha chain variable domain of TCR clone 200106 (TRAV29/DV5, TRAJ34)
CAASSGTAKLIF

SEQ ID NO: 400212 - protein, 15 aa, Homo sapiens
  CDR3 for beta chain variable domain of TCR clone 200106 (TRBV2, TRBJ2-3)
CASSDAGGPPDTQYF

SEQ ID NO: 400213 - protein, 12 aa, Homo sapiens
  CDR3 for alpha chain variable domain of TCR clone 200107 (TRAV12-3, TRAJ17)
CAMTLTGNKPTF

SEQ ID NO: 400214 - protein, 15 aa, Homo sapiens
  CDR3 for beta chain variable domain of TCR clone 200107 (TRBV28, TRBJ2-1)
CASSIIAGGRSEQFF

SEQ ID NO: 400215 - protein, 12 aa, Homo sapiens
  CDR3 for alpha chain variable domain of TCR clone 200108 (TRAV12-3, TRAJ20)
CAMVRGDYKLSF

SEQ ID NO: 400216 - protein, 16 aa, Homo sapiens
  CDR3 for beta chain variable domain of TCR clone 200108 (TRBV12-4, TRBJ2-7)
CASSLIGGTGTYEQYF

SEQ ID NO: 400217 - protein, 14 aa, Homo sapiens
  CDR3 for alpha chain variable domain of TCR clone 200109 (TRAV12-1, TRAJ17)
CVVNYKAAGSKLTF

SEQ ID NO: 400218 - protein, 17 aa, Homo sapiens
  CDR3 for beta chain variable domain of TCR clone 200109 (TRBV20-1, TRBJ2-1)
CSASSSGLAGSYNEQFS

SEQ ID NO: 400219 - protein, 14 aa, Homo sapiens
  CDR3 for alpha chain variable domain of TCR clone 200110 (TRAV8-6, TRAJ12)
CAVKAADSSYKLIF

SEQ ID NO: 400220 - protein, 12 aa, Homo sapiens
  CDR3 for beta chain variable domain of TCR clone 200110 (TRBV5-1, TRBJ2-7)
CASSLDSYEQYF

SEQ ID NO: 400221 - protein, 18 aa, Homo sapiens
  CDR3 for alpha chain variable domain of TCR clone 200111 (TRAV9-2, TRAJ52)
CALSRHNAGGTSYGKLTF

SEQ ID NO: 400222 - protein, 14 aa, Homo sapiens
  CDR3 for beta chain variable domain of TCR clone 200111 (TRBV7-2, TRBJ2-5)
CASSTGGELKTQYF

SEQ ID NO: 400223 - protein, 11 aa, Homo sapiens
  CDR3 for alpha chain variable domain of TCR clone 200112 (TRAV2, TRAJ13)
CASGGYQKVTF

SEQ ID NO: 400224 - protein, 16 aa, Homo sapiens
  CDR3 for beta chain variable domain of TCR clone 200112 (TRBV4-1, TRBJ2-7)
CASRPSGGGADNEQYF

SEQ ID NO: 400225 - protein, 15 aa, Homo sapiens
  CDR3 for alpha chain variable domain of TCR clone 200113 (TRAV3, TRAJ5)
CAVRDLDRGRRALTF

SEQ ID NO: 400226 - protein, 13 aa, Homo sapiens
  CDR3 for beta chain variable domain of TCR clone 200113 (TRBV12-4, TRBJ2-7)
CASSPTETYEQYF

SEQ ID NO: 400227 - protein, 13 aa, Homo sapiens
  CDR3 for alpha chain variable domain of TCR clone 200114 (TRAV30, TRAJ24)
CGTVTDSWGKLQF

SEQ ID NO: 400228 - protein, 13 aa, Homo sapiens
  CDR3 for beta chain variable domain of TCR clone 200114 (TRBV7-2, TRBJ2-7)
CASSSPSGSEQYF

SEQ ID NO: 400229 - protein, 15 aa, Homo sapiens
  CDR3 for alpha chain variable domain of TCR clone 200115 (TRAV4, TRAJ39)
CLVGPNNNAGNMLTF

SEQ ID NO: 400230 - protein, 16 aa, Homo sapiens
  CDR3 for beta chain variable domain of TCR clone 200115 (TRBV13, TRBJ2-2)
CASSARTGEHTGELFF

SEQ ID NO: 400231 - protein, 22 aa, Homo sapiens
  CDR3 for alpha chain variable domain of TCR clone 200116 (TRAV25, TRAJ13)
TATQTTDVGTFLDSGGYQKITF

SEQ ID NO: 400232 - protein, 14 aa, Homo sapiens
  CDR3 for beta chain variable domain of TCR clone 200116 (TRBV19, TRBJ2-1)
CASPTFVLSGEQFF

SEQ ID NO: 400233 - protein, 15 aa, Homo sapiens
  CDR3 for alpha chain variable domain of TCR clone 200117 (TRAV27, TRAJ38)
CAARRNAGNNRKLIW

SEQ ID NO: 400234 - protein, 15 aa, Homo sapiens
  CDR3 for beta chain variable domain of TCR clone 200117 (TRBV10-3, TRBJ2-1)
CAIRNGTSGHNEQFF

SEQ ID NO: 400235 - protein, 16 aa, Homo sapiens
  CDR3 for alpha chain variable domain of TCR clone 200118 (TRAV30, TRAJ24)
CGTEIVDADSWGEFLF

SEQ ID NO: 400236 - protein, 14 aa, Homo sapiens
  CDR3 for beta chain variable domain of TCR clone 200118 (TRBV12-5, TRBJ2-5)
CASGSRTHQETQYF

SEQ ID NO: 400237 - protein, 15 aa, Homo sapiens
  CDR3 for alpha chain variable domain of TCR clone 200119 (TRAV1-2, TRAJ35)
CAVRDREGFGNVLHC

SEQ ID NO: 400238 - protein, 12 aa, Homo sapiens
  CDR3 for beta chain variable domain of TCR clone 200119 (TRBV28, TRBJ2-3)
CASSLYRDTQYF

SEQ ID NO: 400239 - protein, 13 aa, Homo sapiens
  CDR3 for alpha chain variable domain of TCR clone 200120 (TRAV27, TRAJ6)
CAGGTRGSYIPTF

SEQ ID NO: 400240 - protein, 15 aa, Homo sapiens
  CDR3 for beta chain variable domain of TCR clone 200120 (TRBV2, TRBJ2-2)
CASSRETVGTGELFF

SEQ ID NO: 400241 - protein, 12 aa, Homo sapiens
  CDR3 for alpha chain variable domain of TCR clone 200121 (TRAV8-3, TRAJ26)
CAGDNYGQNFVF

SEQ ID NO: 400242 - protein, 11 aa, Homo sapiens
  CDR3 for beta chain variable domain of TCR clone 200121 (TRBV19, TRBJ1-1)
CASSIGSEAFF

SEQ ID NO: 400243 - protein, 15 aa, Homo sapiens
  CDR3 for alpha chain variable domain of TCR clone 200122 (TRAV8-3, TRAJ11)
CAVGLLNSRYSTLTF

SEQ ID NO: 400244 - protein, 13 aa, Homo sapiens
  CDR3 for beta chain variable domain of TCR clone 200122 (TRBV11-2, TRBJ2-5)
CASSSTGEETQYF

SEQ ID NO: 400245 - protein, 13 aa, Homo sapiens
  CDR3 for alpha chain variable domain of TCR clone 200123 (TRAV13-1, TRAJ9)
CVARGTGGFKTIF

SEQ ID NO: 400246 - protein, 12 aa, Homo sapiens
  CDR3 for beta chain variable domain of TCR clone 200123 (TRBV2, TRBJ2-1)
CAYGPPGNEQFF

SEQ ID NO: 400247 - protein, 15 aa, Homo sapiens
  CDR3 for alpha chain variable domain of TCR clone 200124 (TRAV17, TRAJ16)
CATALRFSDCRKLLF

SEQ ID NO: 400248 - protein, 15 aa, Homo sapiens
  CDR3 for beta chain variable domain of TCR clone 200124 (TRBV20-1, TRBJ1-1)
CSASRGVTGNTEAFF

SEQ ID NO: 400249 - protein, 16 aa, Homo sapiens
  CDR3 for alpha chain variable domain of TCR clone 200125 (TRAV8-4, TRAJ16)
CAVSPVGRWPEAALCK

SEQ ID NO: 400250 - protein, 15 aa, Homo sapiens
  CDR3 for beta chain variable domain of TCR clone 200125 (TRBV7-3, TRBJ1-6)
CASSLGRGAGSPLHC

SEQ ID NO: 400251 - protein, 14 aa, Homo sapiens
  CDR3 for alpha chain variable domain of TCR clone 200126 (TRAV14/DV4, TRAJ54)
CAMREAPGAQKLVF

SEQ ID NO: 400252 - protein, 15 aa, Homo sapiens
  CDR3 for beta chain variable domain of TCR clone 200126 (TRBV5-1, TRBJ2-7)
CASSLNGGPALEQYF

SEQ ID NO: 400253 - protein, 12 aa, Homo sapiens
  CDR3 for alpha chain variable domain of TCR clone 200127 (TRAV12-3, TRAJ17)
CAMTLTGNKLTF

SEQ ID NO: 400254 - protein, 14 aa, Homo sapiens
  CDR3 for beta chain variable domain of TCR clone 200127 (TRBV19, TRBJ2-7)
CASSIEASSYEQYF

SEQ ID NO: 400255 - protein, 13 aa, Homo sapiens
  CDR3 for alpha chain variable domain of TCR clone 200128 (TRAV12-2, TRAJ7)
CAVNLYGNNRLAF

SEQ ID NO: 400256 - protein, 14 aa, Homo sapiens
  CDR3 for beta chain variable domain of TCR clone 200128 (TRBV25-1, TRBJ1-2)
CASSEATGPYGYAF

SEQ ID NO: 400257 - protein, 16 aa, Homo sapiens
  CDR3 for alpha chain variable domain of TCR clone 200129 (TRAV3, TRAJ37)
CAVRPHGSGNTGKLSL

SEQ ID NO: 400258 - protein, 16 aa, Homo sapiens
  CDR3 for beta chain variable domain of TCR clone 200129 (TRBV9, TRBJ1-2)
CASSVEEKVSPYGYTF

SEQ ID NO: 400259 - protein, 13 aa, Homo sapiens
  CDR3 for alpha chain variable domain of TCR clone 200130 (TRAV8-2, TRAJ29)
CALPGAGNTPLVV

SEQ ID NO: 400260 - protein, 16 aa, Homo sapiens
  CDR3 for beta chain variable domain of TCR clone 200130 (TRBV5-1, TRBJ2-5)
CASSSSGLGGAETQYF

SEQ ID NO: 400261 - protein, 11 aa, Homo sapiens
  CDR3 for alpha chain variable domain of TCR clone 200131 (TRAV12-2, TRAJ39)
CAVNKLLTFGG

SEQ ID NO: 400262 - protein, 16 aa, Homo sapiens
  CDR3 for beta chain variable domain of TCR clone 200131 (TRBV9, TRBJ2-7)
CASSAGPDRSPYEQYF

SEQ ID NO: 400263 - protein, 15 aa, Homo sapiens
  CDR3 for alpha chain variable domain of TCR clone 200132 (TRAV17, TRAJ22)
CATVAPSGSARQLTF

SEQ ID NO: 400264 - protein, 13 aa, Homo sapiens
  CDR3 for beta chain variable domain of TCR clone 200132 (TRBV11-2, TRBJ2-1)
CASSSEAYNEQFF

SEQ ID NO: 400265 - protein, 13 aa, Homo sapiens
  CDR3 for alpha chain variable domain of TCR clone 200133 (TRAV17, TRAJ40)
CAGALGGTYKYIF

SEQ ID NO: 400266 - protein, 16 aa, Homo sapiens
  CDR3 for beta chain variable domain of TCR clone 200133 (TRBV11-2, TRBJ1-2)
CASSLDTGGADYGYSF

SEQ ID NO: 400267 - protein, 11 aa, Homo sapiens
  CDR3 for alpha chain variable domain of TCR clone 200134 (TRAV12-3, TRAJ43)
CAMSVSNDMRF

SEQ ID NO: 400268 - protein, 13 aa, Homo sapiens
  CDR3 for beta chain variable domain of TCR clone 200134 (TRBV20-1, TRBJ1-1)
CSAPLGGGTEAFL

SEQ ID NO: 400269 - protein, 13 aa, Homo sapiens
  CDR3 for alpha chain variable domain of TCR clone 200135 (TRAV21, TRAJ27)
CAARPGNAGKSTF

SEQ ID NO: 400270 - protein, 14 aa, Homo sapiens
  CDR3 for beta chain variable domain of TCR clone 200135 (TRBV20-1, TRBJ2-4)
CSASGRVGENIQYF

SEQ ID NO: 400271 - protein, 17 aa, Homo sapiens
  CDR3 for alpha chain variable domain of TCR clone 200136 (TRAV1-2, TRAJ27)
CAVRDKTGDTNAGKSTF

SEQ ID NO: 400272 - protein, 13 aa, Homo sapiens
  CDR3 for beta chain variable domain of TCR clone 200136 (TRBV7-9, TRBJ2-3)
CASSPGSTDTQYF

SEQ ID NO: 400273 - protein, 18 aa, Homo sapiens
  CDR3 for alpha chain variable domain of TCR clone 200137 (TRAV17, TRAJ45)
CATYLDLYSGGGADGLTF

SEQ ID NO: 400274 - protein, 14 aa, Homo sapiens
  CDR3 for beta chain variable domain of TCR clone 200137 (TRBV7-2, TRBJ2-7)
CASSPKTSFYEQYF

SEQ ID NO: 400275 - protein, 15 aa, Homo sapiens
  CDR3 for alpha chain variable domain of TCR clone 200138 (TRAV27, TRAJ38)
CAARRNAGNNRKLIW

SEQ ID NO: 400276 - protein, 15 aa, Homo sapiens
  CDR3 for beta chain variable domain of TCR clone 200138 (TRBV2, TRBJ2-1)
CASSELAGSYSEQFF

SEQ ID NO: 400277 - protein, 15 aa, Homo sapiens
  CDR3 for alpha chain variable domain of TCR clone 200139 (TRAV3, TRAJ3)
CAVRDRRSSASKIIF

SEQ ID NO: 400278 - protein, 12 aa, Homo sapiens
  CDR3 for beta chain variable domain of TCR clone 200139 (TRBV11-2, TRBJ2-2)
CASSLPTGELFF

SEQ ID NO: 400279 - protein, 13 aa, Homo sapiens
  CDR3 for alpha chain variable domain of TCR clone 200140 (TRAV12-1, TRAJ20)
CVGQRFNDYKLSL

SEQ ID NO: 400280 - protein, 14 aa, Homo sapiens
  CDR3 for beta chain variable domain of TCR clone 200140 (TRBV6-3, TRBJ1-5)
CASSYSRFAQPQHF

SEQ ID NO: 400281 - protein, 22 aa, Homo sapiens
  CDR3 for alpha chain variable domain of TCR clone 200141 (TRAV21, )
CAVRQDAGNNHIQNPDPAVYQL

SEQ ID NO: 400282 - protein, 16 aa, Homo sapiens
  CDR3 for beta chain variable domain of TCR clone 200141 (TRBV4-2, TRBJ1-1)
CASRPLAGGGDTEAFF

SEQ ID NO: 400283 - protein, 15 aa, Homo sapiens
  CDR3 for alpha chain variable domain of TCR clone 200142 (TRAV8-3, TRAJ45)
CALSYSGGGADGLTF

SEQ ID NO: 400284 - protein, 15 aa, Homo sapiens
  CDR3 for beta chain variable domain of TCR clone 200142 (TRBV20-1, TRBJ2-5)
CSARGLAEGGETQYF

SEQ ID NO: 400285 - protein, 12 aa, Homo sapiens
  CDR3 for alpha chain variable domain of TCR clone 200143 (TRAV17, TRAJ12)
CATLRSSYKLIF

SEQ ID NO: 400286 - protein, 17 aa, Homo sapiens
  CDR3 for beta chain variable domain of TCR clone 200143 (TRBV13, TRBJ2-3)
CASSLSRVAGGRNTQYF

SEQ ID NO: 400287 - protein, 13 aa, Homo sapiens
  CDR3 for alpha chain variable domain of TCR clone 200144 (TRAV12-3, TRAJ21)
CASGPHNFNKFYF

SEQ ID NO: 400288 - protein, 20 aa, Homo sapiens
  CDR3 for beta chain variable domain of TCR clone 200144 (TRBV7-8, TRBJ2-2)
CASSHLFPGPTIHITGELFF

SEQ ID NO: 400289 - protein, 11 aa, Homo sapiens
  CDR3 for alpha chain variable domain of TCR clone 200145 (TRAV2, TRAJ33)
CAVERNYQLIW

SEQ ID NO: 400290 - protein, 14 aa, Homo sapiens
  CDR3 for beta chain variable domain of TCR clone 200145 (TRBV20-1, TRBJ2-3)
CSARGGTSTDTQYF

SEQ ID NO: 400291 - protein, 15 aa, Homo sapiens
  CDR3 for alpha chain variable domain of TCR clone 200146 (TRAV17, TRAJ45)
TSVLRTGGGADGLTF

SEQ ID NO: 400292 - protein, 16 aa, Homo sapiens
  CDR3 for beta chain variable domain of TCR clone 200146 (TRBV4-2, TRBJ2-5)
CASSQELVGSQETQYF

SEQ ID NO: 400293 - protein, 14 aa, Homo sapiens
  CDR3 for alpha chain variable domain of TCR clone 200147 (TRAV12-3, TRAJ29)
CAMSPYSGNTPLVF

SEQ ID NO: 400294 - protein, 15 aa, Homo sapiens
  CDR3 for beta chain variable domain of TCR clone 200147 (TRBV27, TRBJ2-1)
CASSNGGESSNEQFF

SEQ ID NO: 400295 - protein, 14 aa, Homo sapiens
  CDR3 for alpha chain variable domain of TCR clone 200148 (TRAV3, TRAJ21)
CAVRDKYNFNKLYF

SEQ ID NO: 400296 - protein, 14 aa, Homo sapiens
  CDR3 for beta chain variable domain of TCR clone 200148 (TRBV27, TRBJ2-3)
CASRDSPITDTQYF

SEQ ID NO: 400297 - protein, 16 aa, Homo sapiens
  CDR3 for alpha chain variable domain of TCR clone 200149 (TRAV8-3, TRAJ10)
CAVGPILTGGGNKLTF

SEQ ID NO: 400298 - protein, 14 aa, Homo sapiens
  CDR3 for beta chain variable domain of TCR clone 200149 (TRBV27, TRBJ2-2)
CASSPHSGTGELFF

SEQ ID NO: 400299 - protein, 17 aa, Homo sapiens
  CDR3 for alpha chain variable domain of TCR clone 200150 (TRAV4, TRAJ18)
CLVGERSVGSTLGSLYF

SEQ ID NO: 400300 - protein, 14 aa, Homo sapiens
  CDR3 for beta chain variable domain of TCR clone 200150 (TRBV6-5, TRBJ1-2)
CASSYDGTGGGYTF

SEQ ID NO: 400301 - protein, 15 aa, Homo sapiens
  CDR3 for alpha chain variable domain of TCR clone 200151 (TRAV20, TRAJ41)
CAVQANSNYGYALNF

SEQ ID NO: 400302 - protein, 13 aa, Homo sapiens
  CDR3 for beta chain variable domain of TCR clone 200151 (TRBV7-9, TRBJ1-2)
CASSLKQNYGYTF

SEQ ID NO: 400303 - protein, 13 aa, Homo sapiens
  CDR3 for alpha chain variable domain of TCR clone 200152 (TRAV38-1, TRAJ20)
CAFMKPNDYKPSF

SEQ ID NO: 400304 - protein, 16 aa, Homo sapiens
  CDR3 for beta chain variable domain of TCR clone 200152 (TRBV12-4, TRBJ1-1)
CASSHRRDRQGTEAFF

SEQ ID NO: 400305 - protein, 12 aa, Homo sapiens
  CDR3 for alpha chain variable domain of TCR clone 200153 (TRAV19, TRAJ49)
CALSEPPNQFYF

SEQ ID NO: 400306 - protein, 14 aa, Homo sapiens
  CDR3 for beta chain variable domain of TCR clone 200153 (TRBV28, TRBJ1-2)
CASRIQGANYGYTF

SEQ ID NO: 400307 - protein, 16 aa, Homo sapiens
  CDR3 for alpha chain variable domain of TCR clone 200154 (TRAV29/DV5, TRAJ22)
CAASASTSGSARQLTF

SEQ ID NO: 400308 - protein, 15 aa, Homo sapiens
  CDR3 for beta chain variable domain of TCR clone 200154 (TRBV11-2, TRBJ2-2)
CASSSDRVNAGELFF

SEQ ID NO: 400309 - protein, 14 aa, Homo sapiens
  CDR3 for alpha chain variable domain of TCR clone 200155 (TRAV12-2, TRAJ13)
CAVKKTGGYQKVTF

SEQ ID NO: 400310 - protein, 17 aa, Homo sapiens
  CDR3 for beta chain variable domain of TCR clone 200155 (TRBV13, TRBJ2-3)
CASSLSRVSGGRNTQYV

SEQ ID NO: 400311 - protein, 14 aa, Homo sapiens
  CDR3 for alpha chain variable domain of TCR clone 200156 (TRAV26-1, TRAJ38)
CIADNAGNNRKLIC

SEQ ID NO: 400312 - protein, 16 aa, Homo sapiens
  CDR3 for beta chain variable domain of TCR clone 200156 (TRBV4-3, TRBJ2-1)
CASSPALDRGVNEQFF

SEQ ID NO: 400313 - protein, 14 aa, Homo sapiens
  CDR3 for alpha chain variable domain of TCR clone 200157 (TRAV13-1, TRAJ45)
CSAIGGGGADGLTF

SEQ ID NO: 400314 - protein, 16 aa, Homo sapiens
  CDR3 for beta chain variable domain of TCR clone 200157 (TRBV7-2, TRBJ1-1)
CASSLGAGWTNTEAFF

SEQ ID NO: 400315 - protein, 11 aa, Homo sapiens
  CDR3 for alpha chain variable domain of TCR clone 200158 (TRAV21, TRAJ11)
CAVNGYSTLTF

SEQ ID NO: 400316 - protein, 16 aa, Homo sapiens
  CDR3 for beta chain variable domain of TCR clone 200158 (TRBV4-3, TRBJ2-2)
CASSHLQGSGTVELFF

SEQ ID NO: 400317 - protein, 13 aa, Homo sapiens
  CDR3 for alpha chain variable domain of TCR clone 200159 (TRAV2, TRAJ15)
CAVEAQAGTALIF

SEQ ID NO: 400318 - protein, 14 aa, Homo sapiens
  CDR3 for beta chain variable domain of TCR clone 200159 (TRBV6-5, TRBJ2-1)
CASVASGGAHEQFF

SEQ ID NO: 400319 - protein, 13 aa, Homo sapiens
  CDR3 for alpha chain variable domain of TCR clone 200160 (TRAV29/DV5, TRAJ31)
CAASRNNNARLMF

SEQ ID NO: 400320 - protein, 13 aa, Homo sapiens
  CDR3 for beta chain variable domain of TCR clone 200160 (TRBV20-1, TRBJ2-5)
CSARDNYMETQYF

SEQ ID NO: 400321 - protein, 13 aa, Homo sapiens
  CDR3 for alpha chain variable domain of TCR clone 200161 (TRAV8-3, TRAJ28)
CAVGAVGSYQLTF

SEQ ID NO: 400322 - protein, 13 aa, Homo sapiens
  CDR3 for beta chain variable domain of TCR clone 200161 (TRBV19, TRBJ2-1)
CATSRGVYNEQFF

SEQ ID NO: 400323 - protein, 14 aa, Homo sapiens
  CDR3 for alpha chain variable domain of TCR clone 200162 (TRAV29/DV5, TRAJ45)
CAASFRGGADGLTF

SEQ ID NO: 400324 - protein, 15 aa, Homo sapiens
  CDR3 for beta chain variable domain of TCR clone 200162 (TRBV7-9, TRBJ1-6)
CASSSPGRGNSPLHF

SEQ ID NO: 400325 - protein, 13 aa, Homo sapiens
  CDR3 for alpha chain variable domain of TCR clone 200163 (TRAV26-1, TRAJ30)
CIVNMNRDYKIIF

SEQ ID NO: 400326 - protein, 16 aa, Homo sapiens
  CDR3 for beta chain variable domain of TCR clone 200163 (TRBV16, TRBJ2-7)
CASSRPAGGSSYEQYF

SEQ ID NO: 400327 - protein, 17 aa, Homo sapiens
  CDR3 for alpha chain variable domain of TCR clone 200164 (TRAV12-1, TRAJ53)
CVAGAIVGGGSNYTLTF

SEQ ID NO: 400328 - protein, 14 aa, Homo sapiens
  CDR3 for beta chain variable domain of TCR clone 200164 (TRBV5-1, TRBJ1-4)
CASSLDRTHEKLFF

SEQ ID NO: 400329 - protein, 14 aa, Homo sapiens
  CDR3 for alpha chain variable domain of TCR clone 200165 (TRAV13-1, TRAJ45)
CAAIGGGGADGLTF

SEQ ID NO: 400330 - protein, 16 aa, Homo sapiens
  CDR3 for beta chain variable domain of TCR clone 200165 (TRBV7-2, TRBJ1-1)
CASSLGAGWTSTEAFF

SEQ ID NO: 400331 - protein, 18 aa, Homo sapiens
  CDR3 for alpha chain variable domain of TCR clone 200166 (TRAV13-1, TRAJ52)
CAAKNPNAGGTSYGKLTF

SEQ ID NO: 400332 - protein, 14 aa, Homo sapiens
  CDR3 for beta chain variable domain of TCR clone 200166 (TRBV12-4, TRBJ2-5)
CASSQSGGGETQYF

SEQ ID NO: 400333 - protein, 14 aa, Homo sapiens
  CDR3 for alpha chain variable domain of TCR clone 200167 (TRAV38-1, TRAJ45)
CASHSGGRADGLTF

SEQ ID NO: 400334 - protein, 13 aa, Homo sapiens
  CDR3 for beta chain variable domain of TCR clone 200167 (TRBV10-3, TRBJ1-2)
CAISERDSYGYTF

SEQ ID NO: 400335 - protein, 14 aa, Homo sapiens
  CDR3 for alpha chain variable domain of TCR clone 200168 (TRAV9-2, TRAJ39)
CALYINNAGNMLTF

SEQ ID NO: 400336 - protein, 11 aa, Homo sapiens
  CDR3 for beta chain variable domain of TCR clone 200168 (TRBV7-8, TRBJ2-7)
CASSLSLEQYF

SEQ ID NO: 400337 - protein, 11 aa, Homo sapiens
  CDR3 for alpha chain variable domain of TCR clone 200169 (TRAV21, TRAJ34)
CAYYNTDKLIF

SEQ ID NO: 400338 - protein, 11 aa, Homo sapiens
  CDR3 for beta chain variable domain of TCR clone 200169 (TRBV29-1, TRBJ2-5)
CSEDRTGTQYF

SEQ ID NO: 400339 - protein, 12 aa, Homo sapiens
  CDR3 for alpha chain variable domain of TCR clone 200170 (TRAV2, TRAJ9)
YAVGAGGFKTIF

SEQ ID NO: 400340 - protein, 16 aa, Homo sapiens
  CDR3 for beta chain variable domain of TCR clone 200170 (TRBV13, TRBJ2-2)
CASSPRTGEHTGEPFL

SEQ ID NO: 400341 - protein, 13 aa, Homo sapiens
  CDR3 for alpha chain variable domain of TCR clone 200171 (TRAV1-1, TRAJ7)
FAVRDHGNNRLAF

SEQ ID NO: 400342 - protein, 20 aa, Homo sapiens
  CDR3 for beta chain variable domain of TCR clone 200171 (TRBV28, TRBJ2-3)
CAGSLGVRSTSGRSTDTQYF

SEQ ID NO: 400343 - protein, 15 aa, Homo sapiens
  CDR3 for alpha chain variable domain of TCR clone 200172 (TRAV27, TRAJ38)
CAARRNAGTNRKLIW

SEQ ID NO: 400344 - protein, 17 aa, Homo sapiens
  CDR3 for beta chain variable domain of TCR clone 200172 (TRBV20-1, TRBJ2-2)
CSASGSGQGGLTGELFF

SEQ ID NO: 400345 - protein, 14 aa, Homo sapiens
  CDR3 for alpha chain variable domain of TCR clone 200173 (TRAV35, TRAJ10)
CAGILTGGGNKLTF

SEQ ID NO: 400346 - protein, 20 aa, Homo sapiens
  CDR3 for beta chain variable domain of TCR clone 200173 (TRBV12-5, TRBJ2-5)
CASGPRTSGNQDPVLRARHA

SEQ ID NO: 400347 - protein, 11 aa, Homo sapiens
  CDR3 for alpha chain variable domain of TCR clone 200174 (TRAV3, TRAJ21)
CAVGNFNKFYF

SEQ ID NO: 400348 - protein, 15 aa, Homo sapiens
  CDR3 for beta chain variable domain of TCR clone 200174 (TRBV4-2, TRBJ2-6)
CASSLQGTGANVLTF

SEQ ID NO: 400349 - protein, 12 aa, Homo sapiens
  CDR3 for alpha chain variable domain of TCR clone 200175 (TRAV8-3, TRAJ26)
CAGVNYGQNFVF

SEQ ID NO: 400350 - protein, 12 aa, Homo sapiens
  CDR3 for beta chain variable domain of TCR clone 200175 (TRBV11-2, TRBJ2-1)
CASSPGNNEQFF

SEQ ID NO: 400351 - protein, 13 aa, Homo sapiens
  CDR3 for alpha chain variable domain of TCR clone 200176 (TRAV9-2, TRAJ53)
CALSGGSNYKLTF

SEQ ID NO: 400352 - protein, 17 aa, Homo sapiens
  CDR3 for beta chain variable domain of TCR clone 200176 (TRBV11-2, TRBJ2-1)
CASSLYPTGVEYNEQFF

SEQ ID NO: 400353 - protein, 16 aa, Homo sapiens
  CDR3 for alpha chain variable domain of TCR clone 200177 (TRAV12-1, TRAJ28)
CVVIAYSGAGRYQLTF

SEQ ID NO: 400354 - protein, 15 aa, Homo sapiens
  CDR3 for beta chain variable domain of TCR clone 200177 (TRBV14, TRBJ1-1)
CASSQEGMGFTEAFF

SEQ ID NO: 400355 - protein, 12 aa, Homo sapiens
  CDR3 for alpha chain variable domain of TCR clone 200178 (TRAV21, TRAJ33)
CTVQDSDYQLIW

SEQ ID NO: 400356 - protein, 14 aa, Homo sapiens
  CDR3 for beta chain variable domain of TCR clone 200178 (TRBV28, TRBJ2-1)
CASSPGEGGNEQFF

SEQ ID NO: 400357 - protein, 21 aa, Homo sapiens
  CDR3 for alpha chain variable domain of TCR clone 200179 (TRAV12-2, TRAJ10)
SPVIQPPTSGGVTGGGNKLTF

SEQ ID NO: 400358 - protein, 15 aa, Homo sapiens
  CDR3 for beta chain variable domain of TCR clone 200179 (TRBV6-1, TRBJ2-3)
CASSERWDSTDTQYF

SEQ ID NO: 400359 - protein, 17 aa, Homo sapiens
  CDR3 for alpha chain variable domain of TCR clone 200180 (TRAV3, TRAJ12)
CAVKDGGRMDSSYKLIF

SEQ ID NO: 400360 - protein, 15 aa, Homo sapiens
  CDR3 for beta chain variable domain of TCR clone 200180 (TRBV19, TRBJ1-1)
CASTSGQIQNTEAFF

SEQ ID NO: 400361 - protein, 13 aa, Homo sapiens
  CDR3 for alpha chain variable domain of TCR clone 200181 (TRAV12-3, TRAJ33)
CAMGVNSNYQLIW

SEQ ID NO: 400362 - protein, 13 aa, Homo sapiens
  CDR3 for beta chain variable domain of TCR clone 200181 (TRBV4-1, TRBJ2-2)
CASSQENTGELFF

SEQ ID NO: 400363 - protein, 15 aa, Homo sapiens
  CDR3 for alpha chain variable domain of TCR clone 200182 (TRAV17, TRAJ23)
CATDAEDNQGGKLIF

SEQ ID NO: 400364 - protein, 15 aa, Homo sapiens
  CDR3 for beta chain variable domain of TCR clone 200182 (TRBV5-1, TRBJ2-1)
CASTGSGRTYNEQFF

SEQ ID NO: 400365 - protein, 15 aa, Homo sapiens
  CDR3 for alpha chain variable domain of TCR clone 200183 (TRAV12-3, TRAJ11)
CAMSEENSRYSTLTF

SEQ ID NO: 400366 - protein, 16 aa, Homo sapiens
  CDR3 for beta chain variable domain of TCR clone 200183 (TRBV5-1, TRBJ2-7)
CASSLEGLAGLYEQYF

SEQ ID NO: 400367 - protein, 12 aa, Homo sapiens
  CDR3 for alpha chain variable domain of TCR clone 200184 (TRAV2, TRAJ10)
CASTGGGNKLTF

SEQ ID NO: 400368 - protein, 14 aa, Homo sapiens
  CDR3 for beta chain variable domain of TCR clone 200184 (TRBV7-2, TRBJ2-2)
CASRGQGEAGELFF

SEQ ID NO: 400369 - protein, 15 aa, Homo sapiens
  CDR3 for alpha chain variable domain of TCR clone 200185 (TRAV23/DV6, TRAJ12)
CAAIDLGAMDSRYKL

SEQ ID NO: 400370 - protein, 12 aa, Homo sapiens
  CDR3 for beta chain variable domain of TCR clone 200185 (TRBV10-3, TRBJ2-2)
CAIRENTGELFF

SEQ ID NO: 400371 - protein, 15 aa, Homo sapiens
  CDR3 for alpha chain variable domain of TCR clone 200186 (TRAV17, TRAJ45)
CATAYSVGGADGLTF

SEQ ID NO: 400372 - protein, 11 aa, Homo sapiens
  CDR3 for beta chain variable domain of TCR clone 200186 (TRBV7-8, TRBJ2-7)
CASSLSLEQYF

SEQ ID NO: 400373 - protein, 17 aa, Homo sapiens
  CDR3 for alpha chain variable domain of TCR clone 200187 (TRAV3, TRAJ6)
CAVRDGPRAGGSYIPTF

SEQ ID NO: 400374 - protein, 14 aa, Homo sapiens
  CDR3 for beta chain variable domain of TCR clone 200187 (TRBV12-4, TRBJ1-6)
CASNLQGKGSPLHF

SEQ ID NO: 400375 - protein, 19 aa, Homo sapiens
  CDR3 for alpha chain variable domain of TCR clone 200188 (TRAV8-3, TRAJ4)
LGTSVLWVFYSGGYNKLIF

SEQ ID NO: 400376 - protein, 16 aa, Homo sapiens
  CDR3 for beta chain variable domain of TCR clone 200188 (TRBV7-8, TRBJ2-3)
CASSTEGQRETDTQYF

SEQ ID NO: 400377 - protein, 14 aa, Homo sapiens
  CDR3 for alpha chain variable domain of TCR clone 200189 (TRAV20, TRAJ42)
CAVQAGGNQRNLIF

SEQ ID NO: 400378 - protein, 14 aa, Homo sapiens
  CDR3 for beta chain variable domain of TCR clone 200189 (TRBV28, TRBJ1-2)
CASRIQGANYGYTF

SEQ ID NO: 400379 - protein, 14 aa, Homo sapiens
  CDR3 for alpha chain variable domain of TCR clone 200190 (TRAV30, TRAJ33)
CGSVAPRSNYQLIW

SEQ ID NO: 400380 - protein, 14 aa, Homo sapiens
  CDR3 for beta chain variable domain of TCR clone 200190 (TRBV19, TRBJ2-7)
CASSTTRSSYEQYF

SEQ ID NO: 400381 - protein, 13 aa, Homo sapiens
  CDR3 for alpha chain variable domain of TCR clone 200191 (TRAV3, TRAJ21)
CAVREPDFNKFFF

SEQ ID NO: 400382 - protein, 14 aa, Homo sapiens
  CDR3 for beta chain variable domain of TCR clone 200191 (TRBV6-1, TRBJ1-3)
CASVQGGGGNTIYF

SEQ ID NO: 400383 - protein, 17 aa, Homo sapiens
  CDR3 for alpha chain variable domain of TCR clone 200192 (TRAV17, TRAJ7)
CATLGRHAFGKGNQVVV

SEQ ID NO: 400384 - protein, 13 aa, Homo sapiens
  CDR3 for beta chain variable domain of TCR clone 200192 (TRBV12-4, TRBJ2-7)
CASSVERVREQYF

SEQ ID NO: 400385 - protein, 14 aa, Homo sapiens
  CDR3 for alpha chain variable domain of TCR clone 200193 (TRAV25, TRAJ22)
CAVRSSGSASQLTF

SEQ ID NO: 400386 - protein, 16 aa, Homo sapiens
  CDR3 for beta chain variable domain of TCR clone 200193 (TRBV4-2, TRBJ1-1)
CASSPSPGRAAPDAFF

SEQ ID NO: 400387 - protein, 17 aa, Homo sapiens
  CDR3 for alpha chain variable domain of TCR clone 200194 (TRAV38-2/DV8, TRAJ57)
CAYRSVLTQGGSEKLVF

SEQ ID NO: 400388 - protein, 16 aa, Homo sapiens
  CDR3 for beta chain variable domain of TCR clone 200194 (TRBV2, TRBJ2-1)
CASSVGGPLSYNEQFF

SEQ ID NO: 400389 - protein, 10 aa, Homo sapiens
  CDR3 for alpha chain variable domain of TCR clone 200195 (TRAV20, TRAJ22)
CPAPARQLTF

SEQ ID NO: 400390 - protein, 14 aa, Homo sapiens
  CDR3 for beta chain variable domain of TCR clone 200195 (TRBV19, TRBJ2-1)
CASSMGSGATEQFF

SEQ ID NO: 400391 - protein, 14 aa, Homo sapiens
  CDR3 for alpha chain variable domain of TCR clone 200196 (TRAV12-1, TRAJ17)
CVVNYKAAGNKLTF

SEQ ID NO: 400392 - protein, 14 aa, Homo sapiens
  CDR3 for beta chain variable domain of TCR clone 200196 (TRBV11-2, TRBJ2-3)
CASSLGGGANTQYF

SEQ ID NO: 400393 - protein, 16 aa, Homo sapiens
  CDR3 for alpha chain variable domain of TCR clone 200197 (TRAV16, TRAJ4)
CALSRMFSGGYNKLIF

SEQ ID NO: 400394 - protein, 13 aa, Homo sapiens
  CDR3 for beta chain variable domain of TCR clone 200197 (TRBV20-1, TRBJ2-7)
CSARTGAGYEQYF

SEQ ID NO: 400395 - protein, 15 aa, Homo sapiens
  CDR3 for alpha chain variable domain of TCR clone 200198 (TRAV8-3, TRAJ40)
CAAPSLGSGTYKYIF

SEQ ID NO: 400396 - protein, 16 aa, Homo sapiens
  CDR3 for beta chain variable domain of TCR clone 200198 (TRBV7-3, TRBJ2-3)
CASSLSGYRPEDTQYY

SEQ ID NO: 400397 - protein, 13 aa, Homo sapiens
  CDR3 for alpha chain variable domain of TCR clone 200199 (TRAV17, TRAJ5)
CALRGTGRTALTF

SEQ ID NO: 400398 - protein, 11 aa, Homo sapiens
  CDR3 for beta chain variable domain of TCR clone 200199 (TRBV6-3, TRBJ2-3)
CATGQADTQYF

SEQ ID NO: 400399 - protein, 11 aa, Homo sapiens
  CDR3 for alpha chain variable domain of TCR clone 200200 (TRAV36/DV7, TRAJ43)
CAVERVNDMRF

SEQ ID NO: 400400 - protein, 14 aa, Homo sapiens
  CDR3 for beta chain variable domain of TCR clone 200200 (TRBV4-2, TRBJ2-1)
CASGLDRAYNEQFF

SEQ ID NO: 400401 - protein, 13 aa, Homo sapiens
  CDR3 for alpha chain variable domain of TCR clone 200201 (TRAV2, TRAJ40)
CAVVTSGTYKYIF

SEQ ID NO: 400402 - protein, 17 aa, Homo sapiens
  CDR3 for beta chain variable domain of TCR clone 200201 (TRBV13, TRBJ2-3)
CASSLSGVAGGRNTQYF

SEQ ID NO: 400403 - protein, 18 aa, Homo sapiens
  CDR3 for alpha chain variable domain of TCR clone 200202 (TRAV21, TRAJ52)
CAVRPSPAGGTSYGKLTF

SEQ ID NO: 400404 - protein, 14 aa, Homo sapiens
  CDR3 for beta chain variable domain of TCR clone 200202 (TRBV20-1, TRBJ2-3)
CSAGGRRGTDTQYF

SEQ ID NO: 400405 - protein, 15 aa, Homo sapiens
  CDR3 for alpha chain variable domain of TCR clone 200203 (TRAV38-1, TRAJ37)
CAFIFGSGNTGKLIF

SEQ ID NO: 400406 - protein, 10 aa, Homo sapiens
  CDR3 for beta chain variable domain of TCR clone 200203 (TRBV12-4, TRBJ2-3)
CQHRTDTQYF

SEQ ID NO: 400407 - protein, 11 aa, Homo sapiens
  CDR3 for alpha chain variable domain of TCR clone 200204 (TRAV26-1, TRAJ37)
CIVRVGRKLIF

SEQ ID NO: 400408 - protein, 13 aa, Homo sapiens
  CDR3 for beta chain variable domain of TCR clone 200204 (TRBV14, TRBJ1-2)
CASSKDRRYGYTF

SEQ ID NO: 400409 - protein, 17 aa, Homo sapiens
  CDR3 for alpha chain variable domain of TCR clone 200205 (TRAV23/DV6, TRAJ58)
CAARLLRGETSGSSLTF

SEQ ID NO: 400410 - protein, 13 aa, Homo sapiens
  CDR3 for beta chain variable domain of TCR clone 200205 (TRBV6-4, TRBJ1-5)
CASSADLNQPQHF

SEQ ID NO: 400411 - protein, 14 aa, Homo sapiens
  CDR3 for alpha chain variable domain of TCR clone 200206 (TRAV1-2, TRAJ29)
CAVRELTSATPLVF

SEQ ID NO: 400412 - protein, 14 aa, Homo sapiens
  CDR3 for beta chain variable domain of TCR clone 200206 (TRBV4-2, TRBJ1-2)
CASSPGGSNYGYTF

SEQ ID NO: 400413 - protein, 13 aa, Homo sapiens
  CDR3 for alpha chain variable domain of TCR clone 200207 (TRAV12-3, TRAJ9)
CAMRNTGGFKTIF

SEQ ID NO: 400414 - protein, 14 aa, Homo sapiens
  CDR3 for beta chain variable domain of TCR clone 200207 (TRBV11-2, TRBJ2-7)
CASSSTVEGYEQYF

SEQ ID NO: 400415 - protein, 16 aa, Homo sapiens
  CDR3 for alpha chain variable domain of TCR clone 200208 (TRAV2, TRAJ13)
CAARILGVTRKLPLEL

SEQ ID NO: 400416 - protein, 15 aa, Homo sapiens
  CDR3 for beta chain variable domain of TCR clone 200208 (TRBV5-1, TRBJ1-1)
CASSWTGRGNTEAFF

SEQ ID NO: 400417 - protein, 13 aa, Homo sapiens
  CDR3 for alpha chain variable domain of TCR clone 200209 (TRAV13-2, TRAJ13)
CAERPGGYQKVTF

SEQ ID NO: 400418 - protein, 15 aa, Homo sapiens
  CDR3 for beta chain variable domain of TCR clone 200209 (TRBV7-9, TRBJ2-7)
CASSLALAEAYEQYF

SEQ ID NO: 400419 - protein, 13 aa, Homo sapiens
  CDR3 for alpha chain variable domain of TCR clone 200210 (TRAV27, TRAJ49)
CAPRPYTGNQFCF

SEQ ID NO: 400420 - protein, 16 aa, Homo sapiens
  CDR3 for beta chain variable domain of TCR clone 200210 (TRBV4-1, TRBJ1-2)
CASSQDAGQVLYGDTF

SEQ ID NO: 400421 - protein, 13 aa, Homo sapiens
  CDR3 for alpha chain variable domain of TCR clone 200211 (TRAV27, TRAJ28)
CAISGAGSYQLTF

SEQ ID NO: 400422 - protein, 14 aa, Homo sapiens
  CDR3 for beta chain variable domain of TCR clone 200211 (TRBV4-1, TRBJ1-4)
CASSQDASREKLFF

SEQ ID NO: 400423 - protein, 12 aa, Homo sapiens
  CDR3 for alpha chain variable domain of TCR clone 200212 (TRAV1-1, TRAJ8)
CAGGPGFQKLVF

SEQ ID NO: 400424 - protein, 13 aa, Homo sapiens
  CDR3 for beta chain variable domain of TCR clone 200212 (TRBV7-9, TRBJ1-2)
CASSLKQNYGYTF

SEQ ID NO: 400425 - protein, 14 aa, Homo sapiens
  CDR3 for alpha chain variable domain of TCR clone 200213 (TRAV2, TRAJ9)
CAVEDRSGGFKTIF

SEQ ID NO: 400426 - protein, 12 aa, Homo sapiens
  CDR3 for beta chain variable domain of TCR clone 200213 (TRBV11-2, TRBJ2-1)
CAGSPGNNEQFF

SEQ ID NO: 400427 - protein, 16 aa, Homo sapiens
  CDR3 for alpha chain variable domain of TCR clone 200214 (TRAV23/DV6, TRAJ21)
CAASSGGGTTSTNFTF

SEQ ID NO: 400428 - protein, 11 aa, Homo sapiens
  CDR3 for beta chain variable domain of TCR clone 200214 (TRBV7-8, TRBJ2-7)
CASSLSLEQYF

SEQ ID NO: 400429 - protein, 18 aa, Homo sapiens
  CDR3 for alpha chain variable domain of TCR clone 200215 (TRAV35, TRAJ52)
CAGLLRYPGGTSYGKLTF

SEQ ID NO: 400430 - protein, 13 aa, Homo sapiens
  CDR3 for beta chain variable domain of TCR clone 200215 (TRBV7-3, TRBJ1-1)
CASSQDWGAEAFF

SEQ ID NO: 400431 - protein, 15 aa, Homo sapiens
  CDR3 for alpha chain variable domain of TCR clone 200216 (TRAV3, TRAJ17)
CAVSPKEAAGNKLTF

SEQ ID NO: 400432 - protein, 12 aa, Homo sapiens
  CDR3 for beta chain variable domain of TCR clone 200216 (TRBV7-9, TRBJ1-6)
CVSSLMTSPLHF

SEQ ID NO: 400433 - protein, 11 aa, Homo sapiens
  CDR3 for alpha chain variable domain of TCR clone 200217 (TRAV3, TRAJ21)
CAVGNFNKFYF

SEQ ID NO: 400434 - protein, 15 aa, Homo sapiens
  CDR3 for beta chain variable domain of TCR clone 200217 (TRBV5-1, TRBJ2-1)
CASSLVANSYNEQFI

SEQ ID NO: 400435 - protein, 15 aa, Homo sapiens
  CDR3 for alpha chain variable domain of TCR clone 200218 (TRAV17, TRAJ56)
CATEPFTGANSKLTS

SEQ ID NO: 400436 - protein, 14 aa, Homo sapiens
  CDR3 for beta chain variable domain of TCR clone 200218 (TRBV19, TRBJ2-1)
CASPTFVLSGEQFL

SEQ ID NO: 400437 - protein, 15 aa, Homo sapiens
  CDR3 for alpha chain variable domain of TCR clone 200219 (TRAV8-3, TRAJ37)
CAVGVPSSNTGKLIF

SEQ ID NO: 400438 - protein, 15 aa, Homo sapiens
  CDR3 for beta chain variable domain of TCR clone 200219 (TRBV11-2, TRBJ1-2)
CASSQMRGLNYGYTF

SEQ ID NO: 400439 - protein, 14 aa, Homo sapiens
  CDR3 for alpha chain variable domain of TCR clone 200220 (TRAV12-2, TRAJ13)
CAVKKTGGYQKVTF

SEQ ID NO: 400440 - protein, 12 aa, Homo sapiens
  CDR3 for beta chain variable domain of TCR clone 200220 (TRBV12-4, TRBJ1-2)
CASSFIWLHLRF

SEQ ID NO: 400441 - protein, 18 aa, Homo sapiens
  CDR3 for alpha chain variable domain of TCR clone 200221 (TRAV12-3, TRAJ52)
CAMSVGGAGGTSYGKLTF

SEQ ID NO: 400442 - protein, 11 aa, Homo sapiens
  CDR3 for beta chain variable domain of TCR clone 200221 (TRBV7-9, TRBJ2-5)
CASSLSATQYF

SEQ ID NO: 400443 - protein, 14 aa, Homo sapiens
  CDR3 for alpha chain variable domain of TCR clone 200222 (TRAV2, TRAJ37)
CAVDFTSNTGKLIF

SEQ ID NO: 400444 - protein, 15 aa, Homo sapiens
  CDR3 for beta chain variable domain of TCR clone 200222 (TRBV27, TRBJ2-7)
CASSPQREGQREQYF

SEQ ID NO: 400445 - protein, 14 aa, Homo sapiens
  CDR3 for alpha chain variable domain of TCR clone 200223 (TRAV12-2, TRAJ13)
CAVKKTGGYQKVTL

SEQ ID NO: 400446 - protein, 23 aa, Homo sapiens
  CDR3 for beta chain variable domain of TCR clone 200223 (TRBV4-2, TRBJ2-3)
CASSQDPPRASSISGGRGDTQYF

SEQ ID NO: 400447 - protein, 12 aa, Homo sapiens
  CDR3 for alpha chain variable domain of TCR clone 200224 (TRAV1-1, TRAJ9)
CAVDPGGFKTTF

SEQ ID NO: 400448 - protein, 15 aa, Homo sapiens
  CDR3 for beta chain variable domain of TCR clone 200224 (TRBV6-3, TRBJ2-7)
CASSSPGTVFYEQYF

SEQ ID NO: 400449 - protein, 14 aa, Homo sapiens
  CDR3 for alpha chain variable domain of TCR clone 200225 (TRAV12-2, TRAJ6)
CASKWGGGSYIPTF

SEQ ID NO: 400450 - protein, 19 aa, Homo sapiens
  CDR3 for beta chain variable domain of TCR clone 200225 (TRBV25-1, TRBJ2-2)
CAILVYRVDRGRKTGELFF

SEQ ID NO: 400451 - protein, 13 aa, Homo sapiens
  CDR3 for alpha chain variable domain of TCR clone 200226 (TRAV3, TRAJ3)
CAVADSSASKIIF

SEQ ID NO: 400452 - protein, 15 aa, Homo sapiens
  CDR3 for beta chain variable domain of TCR clone 200226 (TRBV10-2, TRBJ2-7)
CASWNRGQATYEQYF

SEQ ID NO: 400453 - protein, 12 aa, Homo sapiens
  CDR3 for alpha chain variable domain of TCR clone 200227 (TRAV12-3, TRAJ17)
CAMMLTGNKLTF

SEQ ID NO: 400454 - protein, 15 aa, Homo sapiens
  CDR3 for beta chain variable domain of TCR clone 200227 (TRBV9, TRBJ1-6)
CASSVAGTGDSPLHF

SEQ ID NO: 400455 - protein, 14 aa, Homo sapiens
  CDR3 for alpha chain variable domain of TCR clone 200228 (TRAV29/DV5, TRAJ28)
CAARAGAGSYQFTF

SEQ ID NO: 400456 - protein, 13 aa, Homo sapiens
  CDR3 for beta chain variable domain of TCR clone 200228 (TRBV7-2, TRBJ1-5)
CASSFARNQPQHF

SEQ ID NO: 400457 - protein, 15 aa, Homo sapiens
  CDR3 for alpha chain variable domain of TCR clone 200229 (TRAV26-1, TRAJ29)
CIVRVEGSGNTPLVF

SEQ ID NO: 400458 - protein, 15 aa, Homo sapiens
  CDR3 for beta chain variable domain of TCR clone 200229 (TRBV7-9, TRBJ1-5)
CASSQGRQPSQPQHF

SEQ ID NO: 400459 - protein, 13 aa, Homo sapiens
  CDR3 for alpha chain variable domain of TCR clone 200230 (TRAV13-1, TRAJ5)
CAANDTGRRALTF

SEQ ID NO: 400460 - protein, 12 aa, Homo sapiens
  CDR3 for beta chain variable domain of TCR clone 200230 (TRBV28, TRBJ2-3)
CASSLYRDTQYF

SEQ ID NO: 400461 - protein, 14 aa, Homo sapiens
  CDR3 for alpha chain variable domain of TCR clone 200231 (TRAV1-1, TRAJ27)
CAVIYNTNAGKSTF

SEQ ID NO: 400462 - protein, 16 aa, Homo sapiens
  CDR3 for beta chain variable domain of TCR clone 200231 (TRBV2, TRBJ2-1)
CASRLNTASAYNEQFF

SEQ ID NO: 400463 - protein, 15 aa, Homo sapiens
  CDR3 for alpha chain variable domain of TCR clone 200232 (TRAV8-3, TRAJ7)
CAVGSISYGNNRLAF

SEQ ID NO: 400464 - protein, 14 aa, Homo sapiens
  CDR3 for beta chain variable domain of TCR clone 200232 (TRBV20-1, TRBJ1-1)
CSAQTRIGGTEAFF

SEQ ID NO: 400465 - protein, 13 aa, Homo sapiens
  CDR3 for alpha chain variable domain of TCR clone 200233 (TRAV24, TRAJ42)
CAFSTGSQGNLIF

SEQ ID NO: 400466 - protein, 17 aa, Homo sapiens
  CDR3 for beta chain variable domain of TCR clone 200233 (TRBV7-2, TRBJ1-2)
CASSSRAGRGIVYGYTF

SEQ ID NO: 400467 - protein, 13 aa, Homo sapiens
  CDR3 for alpha chain variable domain of TCR clone 200234 (TRAV3, TRAJ27)
CAVRPLGAGKSTF

SEQ ID NO: 400468 - protein, 12 aa, Homo sapiens
  CDR3 for beta chain variable domain of TCR clone 200234 (TRBV6-1, TRBJ2-7)
CASSDYSYEQDF

SEQ ID NO: 400469 - protein, 19 aa, Homo sapiens
  CDR3 for alpha chain variable domain of TCR clone 200235 (TRAV2, TRAJ20)
ILQVWEADAAVYRDCKLSF

SEQ ID NO: 400470 - protein, 15 aa, Homo sapiens
  CDR3 for beta chain variable domain of TCR clone 200235 (TRBV6-5, TRBJ2-1)
CASSYDAGACNEQFF

SEQ ID NO: 400471 - protein, 14 aa, Homo sapiens
  CDR3 for alpha chain variable domain of TCR clone 200236 (TRAV12-1, TRAJ27)
CGEHIRTNAGKSTF

SEQ ID NO: 400472 - protein, 15 aa, Homo sapiens
  CDR3 for beta chain variable domain of TCR clone 200236 (TRBV27, TRBJ2-1)
CASSNGGGSSNEQFF

SEQ ID NO: 400473 - protein, 14 aa, Homo sapiens
  CDR3 for alpha chain variable domain of TCR clone 200237 (TRAV1-2, TRAJ16)
CAVNRFSDGQKLLF

SEQ ID NO: 400474 - protein, 15 aa, Homo sapiens
  CDR3 for beta chain variable domain of TCR clone 200237 (TRBV4-2, TRBJ1-1)
CASSQQGAGETEAFF

SEQ ID NO: 400475 - protein, 16 aa, Homo sapiens
  CDR3 for alpha chain variable domain of TCR clone 200238 (TRAV35, TRAJ28)
CAGQKYSGAGSYPLTF

SEQ ID NO: 400476 - protein, 13 aa, Homo sapiens
  CDR3 for beta chain variable domain of TCR clone 200238 (TRBV19, TRBJ1-2)
CASSQGQVYGYTF

SEQ ID NO: 400477 - protein, 17 aa, Homo sapiens
  CDR3 for alpha chain variable domain of TCR clone 200239 (TRAV3, TRAJ6)
CAVRDGPRAGGSYIPTF

SEQ ID NO: 400478 - protein, 13 aa, Homo sapiens
  CDR3 for beta chain variable domain of TCR clone 200239 (TRBV27, TRBJ1-1)
CASSLSTGAEAFF

SEQ ID NO: 400479 - protein, 13 aa, Homo sapiens
  CDR3 for alpha chain variable domain of TCR clone 200240 (TRAV17, TRAJ9)
CATDYTGGFKTIF

SEQ ID NO: 400480 - protein, 13 aa, Homo sapiens
  CDR3 for beta chain variable domain of TCR clone 200240 (TRBV7-3, TRBJ1-2)
CASSLKRGYGYTF

SEQ ID NO: 400481 - protein, 14 aa, Homo sapiens
  CDR3 for alpha chain variable domain of TCR clone 200241 (TRAV8-4, TRAJ17)
CAVSDQAAGNKLTF

SEQ ID NO: 400482 - protein, 18 aa, Homo sapiens
  CDR3 for beta chain variable domain of TCR clone 200241 (TRBV11-2, TRBJ2-3)
CASSLGGASRGAPNTQYF

SEQ ID NO: 400483 - protein, 17 aa, Homo sapiens
  CDR3 for alpha chain variable domain of TCR clone 200242 (TRAV4, TRAJ42)
CLVGVLNYGGSQGNVIF

SEQ ID NO: 400484 - protein, 12 aa, Homo sapiens
  CDR3 for beta chain variable domain of TCR clone 200242 (TRBV20-1, TRBJ2-1)
CSAQYTYNEQFF

SEQ ID NO: 400485 - protein, 13 aa, Homo sapiens
  CDR3 for alpha chain variable domain of TCR clone 200243 (TRAV27, TRAJ6)
CAGGTRGRYIPTF

SEQ ID NO: 400486 - protein, 13 aa, Homo sapiens
  CDR3 for beta chain variable domain of TCR clone 200243 (TRBV4-2, TRBJ1-1)
CASSQAGNTEAFF

SEQ ID NO: 400487 - protein, 13 aa, Homo sapiens
  CDR3 for alpha chain variable domain of TCR clone 200244 (TRAV1-1, TRAJ9)
CAAKNTGCFKTIF

SEQ ID NO: 400488 - protein, 14 aa, Homo sapiens
  CDR3 for beta chain variable domain of TCR clone 200244 (TRBV12-5, TRBJ2-5)
CASGTRTHQETQYF

SEQ ID NO: 400489 - protein, 15 aa, Homo sapiens
  CDR3 for alpha chain variable domain of TCR clone 200245 (TRAV35, TRAJ38)
CAGLSNAGNNRKLIW

SEQ ID NO: 400490 - protein, 18 aa, Homo sapiens
  CDR3 for beta chain variable domain of TCR clone 200245 (TRBV3-1, TRBJ1-2)
CASSQDVIGWNGDYGYTF

SEQ ID NO: 400491 - protein, 11 aa, Homo sapiens
  CDR3 for alpha chain variable domain of TCR clone 200246 (TRAV17, TRAJ43)
CSTPRSKDMRF

SEQ ID NO: 400492 - protein, 15 aa, Homo sapiens
  CDR3 for beta chain variable domain of TCR clone 200246 (TRBV11-2, TRBJ2-1)
CASSLGTSGLNEQFF

SEQ ID NO: 400493 - protein, 13 aa, Homo sapiens
  CDR3 for alpha chain variable domain of TCR clone 200247 (TRAV21, TRAJ3)
CCEPYSSASKIIF

SEQ ID NO: 400494 - protein, 13 aa, Homo sapiens
  CDR3 for beta chain variable domain of TCR clone 200247 (TRBV7-3, TRBJ1-1)
CASSQDWGAEAFF

SEQ ID NO: 400495 - protein, 11 aa, Homo sapiens
  CDR3 for alpha chain variable domain of TCR clone 200248 (TRAV26-1, TRAJ37)
CIVRFGRKLIF

SEQ ID NO: 400496 - protein, 14 aa, Homo sapiens
  CDR3 for beta chain variable domain of TCR clone 200248 (TRBV7-2, TRBJ2-7)
CASSLPPGQGPQYF

SEQ ID NO: 400497 - protein, 16 aa, Homo sapiens
  CDR3 for alpha chain variable domain of TCR clone 200249 (TRAV30, TRAJ24)
CGTEIVDADSWGKFQF

SEQ ID NO: 400498 - protein, 18 aa, Homo sapiens
  CDR3 for beta chain variable domain of TCR clone 200249 (TRBV7-2, TRBJ2-3)
CASSLKREGSGITDTQYF

SEQ ID NO: 400499 - protein, 13 aa, Homo sapiens
  CDR3 for alpha chain variable domain of TCR clone 200250 (TRAV23/DV6, TRAJ21)
CAASIGNFNKFYF

SEQ ID NO: 400500 - protein, 17 aa, Homo sapiens
  CDR3 for beta chain variable domain of TCR clone 200250 (TRBV6-5, TRBJ2-1)
CASRKNPRTGGHNEQFF

SEQ ID NO: 400501 - protein, 14 aa, Homo sapiens
  CDR3 for alpha chain variable domain of TCR clone 200251 (TRAV16, TRAJ29)
CALTRNSGNTPLVF

SEQ ID NO: 400502 - protein, 12 aa, Homo sapiens
  CDR3 for beta chain variable domain of TCR clone 200251 (TRBV2, TRBJ2-1)
CAKRQGYNEQFF

SEQ ID NO: 400503 - protein, 11 aa, Homo sapiens
  CDR3 for alpha chain variable domain of TCR clone 200252 (TRAV35, TRAJ30)
CAGERDDQIIF

SEQ ID NO: 400504 - protein, 14 aa, Homo sapiens
  CDR3 for beta chain variable domain of TCR clone 200252 (TRBV15, TRBJ2-5)
CATSGDRGQETQYF

SEQ ID NO: 400505 - protein, 12 aa, Homo sapiens
  CDR3 for alpha chain variable domain of TCR clone 200253 (TRAV1-2, TRAJ17)
CAVRAAGNKLTF

SEQ ID NO: 400506 - protein, 13 aa, Homo sapiens
  CDR3 for beta chain variable domain of TCR clone 200253 (TRBV4-2, TRBJ2-3)
CASSQGNTDTQYF

SEQ ID NO: 400507 - protein, 14 aa, Homo sapiens
  CDR3 for alpha chain variable domain of TCR clone 200254 (TRAV17, TRAJ16)
CATAGFSVGQKLLF

SEQ ID NO: 400508 - protein, 12 aa, Homo sapiens
  CDR3 for beta chain variable domain of TCR clone 200254 (TRBV24-1, TRBJ1-1)
CATLYPDTEAFF

SEQ ID NO: 400509 - protein, 15 aa, Homo sapiens
  CDR3 for alpha chain variable domain of TCR clone 200255 (TRAV8-3, TRAJ40)
CAAPSPGSGTYKYIF

SEQ ID NO: 400510 - protein, 16 aa, Homo sapiens
  CDR3 for beta chain variable domain of TCR clone 200255 (TRBV7-3, TRBJ2-3)
CASSLSGYRPEDTQYF

SEQ ID NO: 400511 - protein, 14 aa, Homo sapiens
  CDR3 for alpha chain variable domain of TCR clone 200256 (TRAV26-1, TRAJ40)
CIVRLLSGTYKYIF

SEQ ID NO: 400512 - protein, 12 aa, Homo sapiens
  CDR3 for beta chain variable domain of TCR clone 200256 (TRBV28, TRBJ2-6)
CAIQAGANVLTF

SEQ ID NO: 400513 - protein, 14 aa, Homo sapiens
  CDR3 for alpha chain variable domain of TCR clone 200257 (TRAV12-3, TRAJ10)
SHLPLTGGGNKLTF

SEQ ID NO: 400514 - protein, 14 aa, Homo sapiens
  CDR3 for beta chain variable domain of TCR clone 200257 (TRBV7-9, TRBJ2-7)
CASSLSQGSYEQYF

SEQ ID NO: 400515 - protein, 11 aa, Homo sapiens
  CDR3 for alpha chain variable domain of TCR clone 200258 (TRAV2, TRAJ20)
CAVADDYKLSF

SEQ ID NO: 400516 - protein, 14 aa, Homo sapiens
  CDR3 for beta chain variable domain of TCR clone 200258 (TRBV7-2, TRBJ2-7)
CASSPKTSFYEQYF

SEQ ID NO: 400517 - protein, 14 aa, Homo sapiens
  CDR3 for alpha chain variable domain of TCR clone 200259 (TRAV6, TRAJ6)
CALPTSGGSYIPTF

SEQ ID NO: 400518 - protein, 15 aa, Homo sapiens
  CDR3 for beta chain variable domain of TCR clone 200259 (TRBV7-2, TRBJ2-1)
CASSSGLAGGNEQFF

SEQ ID NO: 400519 - protein, 12 aa, Homo sapiens
  CDR3 for alpha chain variable domain of TCR clone 200260 (TRAV21, TRAJ33)
CAKMDSNYQLIW

SEQ ID NO: 400520 - protein, 16 aa, Homo sapiens
  CDR3 for beta chain variable domain of TCR clone 200260 (TRBV28, TRBJ2-7)
CASSPWVATGDLSQYF

SEQ ID NO: 400521 - protein, 13 aa, Homo sapiens
  CDR3 for alpha chain variable domain of TCR clone 200261 (TRAV21, TRAJ27)
CAALNTNAGKSTF

SEQ ID NO: 400522 - protein, 14 aa, Homo sapiens
  CDR3 for beta chain variable domain of TCR clone 200261 (TRBV27, TRBJ1-1)
CASSLLSRLSEAFF

SEQ ID NO: 400523 - protein, 11 aa, Homo sapiens
  CDR3 for alpha chain variable domain of TCR clone 200262 (TRAV17, TRAJ9)
CGVTGGFNTIF

SEQ ID NO: 400524 - protein, 14 aa, Homo sapiens
  CDR3 for beta chain variable domain of TCR clone 200262 (TRBV7-9, TRBJ2-2)
CASSLVQDTGELFF

SEQ ID NO: 400525 - protein, 11 aa, Homo sapiens
  CDR3 for alpha chain variable domain of TCR clone 200263 (TRAV1-1, TRAJ23)
CAVRQGGKLIF

SEQ ID NO: 400526 - protein, 13 aa, Homo sapiens
  CDR3 for beta chain variable domain of TCR clone 200263 (TRBV7-3, TRBJ1-1)
CASSQDCGAEAFF

SEQ ID NO: 400527 - protein, 16 aa, Homo sapiens
  CDR3 for alpha chain variable domain of TCR clone 200264 (TRAV17, TRAJ52)
CATSNAGGTSYGKLIF

SEQ ID NO: 400528 - protein, 13 aa, Homo sapiens
  CDR3 for beta chain variable domain of TCR clone 200264 (TRBV27, TRBJ1-6)
CASSLVLVSPLHF

SEQ ID NO: 400529 - protein, 13 aa, Homo sapiens
  CDR3 for alpha chain variable domain of TCR clone 200265 (TRAV35, TRAJ42)
CAGFPGSQGNLIF

SEQ ID NO: 400530 - protein, 14 aa, Homo sapiens
  CDR3 for beta chain variable domain of TCR clone 200265 (TRBV4-1, TRBJ2-2)
CASSQAVNTVELFF

SEQ ID NO: 400531 - protein, 15 aa, Homo sapiens
  CDR3 for alpha chain variable domain of TCR clone 200266 (TRAV23/DV6, TRAJ18)
FAARNRGSTLGRLYF

SEQ ID NO: 400532 - protein, 13 aa, Homo sapiens
  CDR3 for beta chain variable domain of TCR clone 200266 (TRBV7-2, TRBJ2-7)
CASSSPSGSEQYF

SEQ ID NO: 400533 - protein, 14 aa, Homo sapiens
  CDR3 for alpha chain variable domain of TCR clone 200267 (TRAV35, TRAJ42)
CAGRYGGSQGNLLF

SEQ ID NO: 400534 - protein, 15 aa, Homo sapiens
  CDR3 for beta chain variable domain of TCR clone 200267 (TRBV7-9, TRBJ2-1)
CASSLGWGRANEQFF

SEQ ID NO: 400535 - protein, 11 aa, Homo sapiens
  CDR3 for alpha chain variable domain of TCR clone 200268 (TRAV3, TRAJ21)
CAVGNFNKFYF

SEQ ID NO: 400536 - protein, 16 aa, Homo sapiens
  CDR3 for beta chain variable domain of TCR clone 200268 (TRBV19, TRBJ2-1)
CASSKAGTSAYNEQFF

SEQ ID NO: 400537 - protein, 14 aa, Homo sapiens
  CDR3 for alpha chain variable domain of TCR clone 200269 (TRAV26-1, TRAJ34)
CIVRESYNTDELIF

SEQ ID NO: 400538 - protein, 13 aa, Homo sapiens
  CDR3 for beta chain variable domain of TCR clone 200269 (TRBV19, TRBJ2-1)
CATSRGVYNEQFF

SEQ ID NO: 400539 - protein, 16 aa, Homo sapiens
  CDR3 for alpha chain variable domain of TCR clone 200270 (TRAV38-1, TRAJ37)
CAFKGDGSSNTGKLIF

SEQ ID NO: 400540 - protein, 15 aa, Homo sapiens
  CDR3 for beta chain variable domain of TCR clone 200270 (TRBV4-1, TRBJ2-7)
CASSQNTGRLYEQYF

SEQ ID NO: 400541 - protein, 13 aa, Homo sapiens
  CDR3 for alpha chain variable domain of TCR clone 200271 (TRAV1-1, TRAJ9)
CAAKNTGGFKTIF

SEQ ID NO: 400542 - protein, 13 aa, Homo sapiens
  CDR3 for beta chain variable domain of TCR clone 200271 (TRBV7-9, TRBJ1-2)
CAISLKQNYGYTF

SEQ ID NO: 400543 - protein, 15 aa, Homo sapiens
  CDR3 for alpha chain variable domain of TCR clone 200272 (TRAV38-1, TRAJ37)
CAFIFGSGNTGKLIF

SEQ ID NO: 400544 - protein, 15 aa, Homo sapiens
  CDR3 for beta chain variable domain of TCR clone 200272 (TRBV20-1, TRBJ2-7)
CSARDRVSGMDEQHF

SEQ ID NO: 400545 - protein, 13 aa, Homo sapiens
  CDR3 for alpha chain variable domain of TCR clone 200273 (TRAV12-3, TRAJ33)
CAMSVNSNYQLIW

SEQ ID NO: 400546 - protein, 14 aa, Homo sapiens
  CDR3 for beta chain variable domain of TCR clone 200273 (TRBV20-1, TRBJ1-1)
SAVLHLGGGTEAFF

SEQ ID NO: 400547 - protein, 12 aa, Homo sapiens
  CDR3 for alpha chain variable domain of TCR clone 200274 (TRAV3, TRAJ39)
CAVIEWSNMLTF

SEQ ID NO: 400548 - protein, 14 aa, Homo sapiens
  CDR3 for beta chain variable domain of TCR clone 200274 (TRBV7-8, TRBJ2-3)
CASIFPDGQDTQYF

SEQ ID NO: 400549 - protein, 10 aa, Homo sapiens
  CDR3 for alpha chain variable domain of TCR clone 200275 (TRAV20, TRAJ22)
CAAPARQLTF

SEQ ID NO: 400550 - protein, 13 aa, Homo sapiens
  CDR3 for beta chain variable domain of TCR clone 200275 (TRBV19, TRBJ1-2)
CASSVPGQDGYTF

SEQ ID NO: 400551 - protein, 12 aa, Homo sapiens
  CDR3 for alpha chain variable domain of TCR clone 200276 (TRAV3, TRAJ43)
CAVRDPNNDMRF

SEQ ID NO: 400552 - protein, 14 aa, Homo sapiens
  CDR3 for beta chain variable domain of TCR clone 200276 (TRBV28, TRBJ2-5)
CASSSGTAQETQYF

SEQ ID NO: 400553 - protein, 13 aa, Homo sapiens
  CDR3 for alpha chain variable domain of TCR clone 200277 (TRAV26-1, TRAJ48)
CIVRVVGDAKLTF

SEQ ID NO: 400554 - protein, 17 aa, Homo sapiens
  CDR3 for beta chain variable domain of TCR clone 200277 (TRBV7-3, TRBJ2-2)
CASSLSGSSGGTGELFF

SEQ ID NO: 400555 - protein, 17 aa, Homo sapiens
  CDR3 for alpha chain variable domain of TCR clone 200278 (TRAV12-1, TRAJ42)
CVVMRMNYGGSQGNLIF

SEQ ID NO: 400556 - protein, 13 aa, Homo sapiens
  CDR3 for beta chain variable domain of TCR clone 200278 (TRBV7-2, TRBJ1-1)
CATSLARPAEAFF

SEQ ID NO: 400557 - protein, 12 aa, Homo sapiens
  CDR3 for alpha chain variable domain of TCR clone 200279 (TRAV12-3, TRAJ17)
FAMPLTGNKLTF

SEQ ID NO: 400558 - protein, 15 aa, Homo sapiens
  CDR3 for beta chain variable domain of TCR clone 200279 (TRBV20-1, TRBJ2-7)
CSARDRVSGMDEQYF

SEQ ID NO: 400559 - protein, 15 aa, Homo sapiens
  CDR3 for alpha chain variable domain of TCR clone 200280 (TRAV8-3, TRAJ15)
CAVGAPNQAGTALIF

SEQ ID NO: 400560 - protein, 14 aa, Homo sapiens
  CDR3 for beta chain variable domain of TCR clone 200280 (TRBV7-7, TRBJ2-2)
CATRQDSDTGELFF

SEQ ID NO: 400561 - protein, 12 aa, Homo sapiens
  CDR3 for alpha chain variable domain of TCR clone 200281 (TRAV27, TRAJ42)
CAGGGSQGNLIF

SEQ ID NO: 400562 - protein, 16 aa, Homo sapiens
  CDR3 for beta chain variable domain of TCR clone 200281 (TRBV7-9, TRBJ1-2)
CASSLGFSSGEDGYTF

SEQ ID NO: 400563 - protein, 12 aa, Homo sapiens
  CDR3 for alpha chain variable domain of TCR clone 200282 (TRAV36/DV7, TRAJ54)
RAVVRGAQKLVF

SEQ ID NO: 400564 - protein, 13 aa, Homo sapiens
  CDR3 for beta chain variable domain of TCR clone 200282 (TRBV7-3, TRBJ1-1)
CQQLKGGNTEAFF

SEQ ID NO: 400565 - protein, 14 aa, Homo sapiens
  CDR3 for alpha chain variable domain of TCR clone 200283 (TRAV26-1, TRAJ11)
CIVPLYSGYSTLTF

SEQ ID NO: 400566 - protein, 13 aa, Homo sapiens
  CDR3 for beta chain variable domain of TCR clone 200283 (TRBV6-1, TRBJ1-1)
CASSRQGNTEAFF

SEQ ID NO: 400567 - protein, 14 aa, Homo sapiens
  CDR3 for alpha chain variable domain of TCR clone 200284 (TRAV2, TRAJ9)
CAVEDRSGGFKTSF

SEQ ID NO: 400568 - protein, 17 aa, Homo sapiens
  CDR3 for beta chain variable domain of TCR clone 200284 (TRBV11-2, TRBJ2-1)
CASSLYPPGVEYNEQFF

SEQ ID NO: 400569 - protein, 13 aa, Homo sapiens
  CDR3 for alpha chain variable domain of TCR clone 200285 (TRAV12-1, TRAJ33)
CGDAPDSNYQLIW

SEQ ID NO: 400570 - protein, 14 aa, Homo sapiens
  CDR3 for beta chain variable domain of TCR clone 200285 (TRBV7-2, TRBJ2-7)
CASRPQGAAYEQYF

SEQ ID NO: 400571 - protein, 12 aa, Homo sapiens
  CDR3 for alpha chain variable domain of TCR clone 200286 (TRAV3, TRAJ43)
CAVRGPDNDMRF

SEQ ID NO: 400572 - protein, 15 aa, Homo sapiens
  CDR3 for beta chain variable domain of TCR clone 200286 (TRBV10-2, TRBJ2-6)
CASSEQGTGANVLTF

SEQ ID NO: 400573 - protein, 14 aa, Homo sapiens
  CDR3 for alpha chain variable domain of TCR clone 200287 (TRAV8-3, TRAJ26)
CAVAPGNYGQNFVF

SEQ ID NO: 400574 - protein, 12 aa, Homo sapiens
  CDR3 for beta chain variable domain of TCR clone 200287 (TRBV12-4, TRBJ2-7)
CASSLGGYEQYF

SEQ ID NO: 400575 - protein, 13 aa, Homo sapiens
  CDR3 for alpha chain variable domain of TCR clone 200288 (TRAV12-3, TRAJ7)
CAMTPYGNNRLAF

SEQ ID NO: 400576 - protein, 13 aa, Homo sapiens
  CDR3 for beta chain variable domain of TCR clone 200288 (TRBV5-7, TRBJ2-3)
CASSLGRTDTQYF

SEQ ID NO: 400577 - protein, 14 aa, Homo sapiens
  CDR3 for alpha chain variable domain of TCR clone 200289 (TRAV8-2, TRAJ4)
CVVSPSGGYNKLIF

SEQ ID NO: 400578 - protein, 15 aa, Homo sapiens
  CDR3 for beta chain variable domain of TCR clone 200289 (TRBV4-1, TRBJ1-4)
CASSDTGATNEKLFF

SEQ ID NO: 400579 - protein, 12 aa, Homo sapiens
  CDR3 for alpha chain variable domain of TCR clone 200290 (TRAV13-2, TRAJ23)
CAERHRGGKLIF

SEQ ID NO: 400580 - protein, 15 aa, Homo sapiens
  CDR3 for beta chain variable domain of TCR clone 200290 (TRBV20-1, TRBJ2-7)
CSASDRVSGMDEQYF

SEQ ID NO: 400581 - protein, 14 aa, Homo sapiens
  CDR3 for alpha chain variable domain of TCR clone 200291 (TRAV12-2, TRAJ3)
CAVSLYSSASKIIF

SEQ ID NO: 400582 - protein, 14 aa, Homo sapiens
  CDR3 for beta chain variable domain of TCR clone 200291 (TRBV27, TRBJ2-1)
CAGSIAETYNEHFF

SEQ ID NO: 400583 - protein, 11 aa, Homo sapiens
  CDR3 for alpha chain variable domain of TCR clone 200292 (TRAV2, TRAJ20)
CAVLNDYKLSS

SEQ ID NO: 400584 - protein, 15 aa, Homo sapiens
  CDR3 for beta chain variable domain of TCR clone 200292 (TRBV7-9, TRBJ1-4)
CASSARTGGNEKLFF

SEQ ID NO: 400585 - protein, 12 aa, Homo sapiens
  CDR3 for alpha chain variable domain of TCR clone 200293 (TRAV12-1, TRAJ6)
CVVSERSYIPTF

SEQ ID NO: 400586 - protein, 21 aa, Homo sapiens
  CDR3 for beta chain variable domain of TCR clone 200293 (TRBV7-3, TRBJ2-1)
CASSLWPSGSQVLRARDTAHR

SEQ ID NO: 400587 - protein, 21 aa, Homo sapiens
  CDR3 for alpha chain variable domain of TCR clone 200294 (TRAV3, TRAJ37)
CAVRGKGWQHRQTNLWARDNF

SEQ ID NO: 400588 - protein, 21 aa, Homo sapiens
  CDR3 for beta chain variable domain of TCR clone 200294 (TRBV15, TRBJ2-1)
AWGTQPCTCVPPAEVDTARFF

SEQ ID NO: 400589 - protein, 14 aa, Homo sapiens
  CDR3 for alpha chain variable domain of TCR clone 200295 (TRAV25, TRAJ6)
CAGRESGGSYIPTF

SEQ ID NO: 400590 - protein, 15 aa, Homo sapiens
  CDR3 for beta chain variable domain of TCR clone 200295 (TRBV7-2, TRBJ2-2)
CASRRPGQNTGELFF

SEQ ID NO: 400591 - protein, 13 aa, Homo sapiens
  CDR3 for alpha chain variable domain of TCR clone 200296 (TRAV8-6, TRAJ32)
CAVSYRATNKLIF

SEQ ID NO: 400592 - protein, 13 aa, Homo sapiens
  CDR3 for beta chain variable domain of TCR clone 200296 (TRBV11-2, TRBJ2-7)
CASSLDLGYEQYF

SEQ ID NO: 400593 - protein, 15 aa, Homo sapiens
  CDR3 for alpha chain variable domain of TCR clone 200297 (TRAV13-1, TRAJ44)
CAASRGGGTASKLTF

SEQ ID NO: 400594 - protein, 14 aa, Homo sapiens
  CDR3 for beta chain variable domain of TCR clone 200297 (TRBV12-4, TRBJ1-1)
CASSLGTGGTEAFF

SEQ ID NO: 400595 - protein, 15 aa, Homo sapiens
  CDR3 for alpha chain variable domain of TCR clone 200298 (TRAV27, TRAJ38)
CAARRNADNNRKLIS

SEQ ID NO: 400596 - protein, 13 aa, Homo sapiens
  CDR3 for beta chain variable domain of TCR clone 200298 (TRBV12-5, TRBJ2-3)
CASGDRQSDTQYF

SEQ ID NO: 400597 - protein, 12 aa, Homo sapiens
  CDR3 for alpha chain variable domain of TCR clone 200299 (TRAV26-1, TRAJ17)
CIVRSAGNKPTF

SEQ ID NO: 400598 - protein, 15 aa, Homo sapiens
  CDR3 for beta chain variable domain of TCR clone 200299 (TRBV5-1, TRBJ2-3)
CASSVTSGSTDTQYF

SEQ ID NO: 400599 - protein, 15 aa, Homo sapiens
  CDR3 for alpha chain variable domain of TCR clone 200300 (TRAV3, TRAJ42)
CAVIGGPGSQGNLIF

SEQ ID NO: 400600 - protein, 14 aa, Homo sapiens
  CDR3 for beta chain variable domain of TCR clone 200300 (TRBV19, TRBJ1-2)
CASSSLFARDVYTF

SEQ ID NO: 400601 - protein, 14 aa, Homo sapiens
  CDR3 for alpha chain variable domain of TCR clone 200301 (TRAV21, TRAJ35)
CAVMPIGFGNVLHC

SEQ ID NO: 400602 - protein, 12 aa, Homo sapiens
  CDR3 for beta chain variable domain of TCR clone 200301 (TRBV7-9, TRBJ2-7)
CASSSTREEQYF

SEQ ID NO: 400603 - protein, 14 aa, Homo sapiens
  CDR3 for alpha chain variable domain of TCR clone 200302 (TRAV12-1, TRAJ3)
CVVNPGSSSSKIIF

SEQ ID NO: 400604 - protein, 14 aa, Homo sapiens
  CDR3 for beta chain variable domain of TCR clone 200302 (TRBV20-1, TRBJ2-3)
CSARGGTSTDTQYF

SEQ ID NO: 400605 - protein, 16 aa, Homo sapiens
  CDR3 for alpha chain variable domain of TCR clone 200303 (TRAV3, TRAJ6)
CAVRRTPSGGSYIPTF

SEQ ID NO: 400606 - protein, 13 aa, Homo sapiens
  CDR3 for beta chain variable domain of TCR clone 200303 (TRBV7-3, TRBJ1-1)
CASSQDWGAEAFF

SEQ ID NO: 400607 - protein, 14 aa, Homo sapiens
  CDR3 for alpha chain variable domain of TCR clone 200304 (TRAV36/DV7, TRAJ57)
CAVGFTGGSEKLVF

SEQ ID NO: 400608 - protein, 12 aa, Homo sapiens
  CDR3 for beta chain variable domain of TCR clone 200304 (TRBV19, TRBJ2-7)
CASTSGTYEQYF

SEQ ID NO: 400609 - protein, 14 aa, Homo sapiens
  CDR3 for alpha chain variable domain of TCR clone 200305 (TRAV1-2, TRAJ16)
CAVNRFSYGQKLLF

SEQ ID NO: 400610 - protein, 13 aa, Homo sapiens
  CDR3 for beta chain variable domain of TCR clone 200305 (TRBV19, TRBJ1-2)
CASSVPGQDGYTF

SEQ ID NO: 400611 - protein, 13 aa, Homo sapiens
  CDR3 for alpha chain variable domain of TCR clone 200306 (TRAV13-1, TRAJ10)
CAATAGGGNKLTF

SEQ ID NO: 400612 - protein, 14 aa, Homo sapiens
  CDR3 for beta chain variable domain of TCR clone 200306 (TRBV25-1, TRBJ1-1)
CASTHLGGNTEAFF

SEQ ID NO: 400613 - protein, 13 aa, Homo sapiens
  CDR3 for alpha chain variable domain of TCR clone 200307 (TRAV13-2, TRAJ15)
CAEKNQAGTTLIF

SEQ ID NO: 400614 - protein, 15 aa, Homo sapiens
  CDR3 for beta chain variable domain of TCR clone 200307 (TRBV29-1, TRBJ2-5)
CSVAPGQGARETQYF

SEQ ID NO: 400615 - protein, 14 aa, Homo sapiens
  CDR3 for alpha chain variable domain of TCR clone 200308 (TRAV27, TRAJ23)
PHLGAKDQGGKLIF

SEQ ID NO: 400616 - protein, 13 aa, Homo sapiens
  CDR3 for beta chain variable domain of TCR clone 200308 (TRBV2, TRBJ1-6)
CASGRGGISPLHF

SEQ ID NO: 400617 - protein, 11 aa, Homo sapiens
  CDR3 for alpha chain variable domain of TCR clone 200309 (TRAV12-3, TRAJ27)
CAMANAGKSTF

SEQ ID NO: 400618 - protein, 13 aa, Homo sapiens
  CDR3 for beta chain variable domain of TCR clone 200309 (TRBV6-1, TRBJ1-1)
CASSRQGNTEAFF

SEQ ID NO: 400619 - protein, 14 aa, Homo sapiens
  CDR3 for alpha chain variable domain of TCR clone 200310 (TRAV26-1, TRAJ33)
CIVREAGSNYQLIW

SEQ ID NO: 400620 - protein, 14 aa, Homo sapiens
  CDR3 for beta chain variable domain of TCR clone 200310 (TRBV2, TRBJ2-5)
CASSRDRGRETQYF

SEQ ID NO: 400621 - protein, 14 aa, Homo sapiens
  CDR3 for alpha chain variable domain of TCR clone 200311 (TRAV3, TRAJ17)
RAVRDAAAGNKLTF

SEQ ID NO: 400622 - protein, 16 aa, Homo sapiens
  CDR3 for beta chain variable domain of TCR clone 200311 (TRBV20-1, TRBJ1-2)
CSASMGQGVANYGYTF

SEQ ID NO: 400623 - protein, 17 aa, Homo sapiens
  CDR3 for alpha chain variable domain of TCR clone 200312 (TRAV16, TRAJ58)
CITVLLNGETSGSRLTF

SEQ ID NO: 400624 - protein, 17 aa, Homo sapiens
  CDR3 for beta chain variable domain of TCR clone 200312 (TRBV18, TRBJ2-1)
CASSKGLSGGADNEQFF

SEQ ID NO: 400625 - protein, 14 aa, Homo sapiens
  CDR3 for alpha chain variable domain of TCR clone 200313 (TRAV12-3, TRAJ18)
CNERRGATLGRLYF

SEQ ID NO: 400626 - protein, 13 aa, Homo sapiens
  CDR3 for beta chain variable domain of TCR clone 200313 (TRBV15, TRBJ1-6)
CATSGGLNSPLHF

SEQ ID NO: 400627 - protein, 14 aa, Homo sapiens
  CDR3 for alpha chain variable domain of TCR clone 200314 (TRAV35, TRAJ22)
CAGLRPGSARQLTF

SEQ ID NO: 400628 - protein, 12 aa, Homo sapiens
  CDR3 for beta chain variable domain of TCR clone 200314 (TRBV5-1, TRBJ2-7)
CASSLDPYEQYF

SEQ ID NO: 400629 - protein, 13 aa, Homo sapiens
  CDR3 for alpha chain variable domain of TCR clone 200315 (TRAV2, TRAJ40)
YAVVTSGTYKYIF

SEQ ID NO: 400630 - protein, 14 aa, Homo sapiens
  CDR3 for beta chain variable domain of TCR clone 200315 (TRBV19, TRBJ2-1)
CASPNFVLSGEQFF

SEQ ID NO: 400631 - protein, 16 aa, Homo sapiens
  CDR3 for alpha chain variable domain of TCR clone 200316 (TRAV3, TRAJ28)
CAVLPRSVAGSYQLTF

SEQ ID NO: 400632 - protein, 18 aa, Homo sapiens
  CDR3 for beta chain variable domain of TCR clone 200316 (TRBV23-1, TRBJ2-7)
CASSQYRRTDSTSSTSGR

SEQ ID NO: 400633 - protein, 13 aa, Homo sapiens
  CDR3 for alpha chain variable domain of TCR clone 200317 (TRAV3, TRAJ36)
CAVKRTGANNLFF

SEQ ID NO: 400634 - protein, 16 aa, Homo sapiens
  CDR3 for beta chain variable domain of TCR clone 200317 (TRBV2, TRBJ2-1)
CASSVGGSLSYNEQFF

SEQ ID NO: 400635 - protein, 13 aa, Homo sapiens
  CDR3 for alpha chain variable domain of TCR clone 200318 (TRAV12-2, TRAJ20)
CAVYPSNDYKLSF

SEQ ID NO: 400636 - protein, 15 aa, Homo sapiens
  CDR3 for beta chain variable domain of TCR clone 200318 (TRBV11-3, TRBJ2-7)
CASSPRDRNPYEQYF

SEQ ID NO: 400637 - protein, 17 aa, Homo sapiens
  CDR3 for alpha chain variable domain of TCR clone 200319 (TRAV35, TRAJ47)
GLLDCRTHTEYGNKLVF

SEQ ID NO: 400638 - protein, 11 aa, Homo sapiens
  CDR3 for beta chain variable domain of TCR clone 200319 (TRBV29-1, TRBJ1-1)
CSVEVGTRSFF

SEQ ID NO: 400639 - protein, 12 aa, Homo sapiens
  CDR3 for alpha chain variable domain of TCR clone 200320 (TRAV12-1, TRAJ16)
CVVFRDGQKLLF

SEQ ID NO: 400640 - protein, 15 aa, Homo sapiens
  CDR3 for beta chain variable domain of TCR clone 200320 (TRBV2, TRBJ2-1)
CASSVTSEGTDEQFF

SEQ ID NO: 400641 - protein, 18 aa, Homo sapiens
  CDR3 for alpha chain variable domain of TCR clone 200321 (TRAV35, TRAJ28)
CAGHNYPLSGAGGSQLTF

SEQ ID NO: 400642 - protein, 12 aa, Homo sapiens
  CDR3 for beta chain variable domain of TCR clone 200321 (TRBV7-9, TRBJ1-1)
CASSLEGTEAFF

SEQ ID NO: 400643 - protein, 14 aa, Homo sapiens
  CDR3 for alpha chain variable domain of TCR clone 200322 (TRAV22, TRAJ6)
CAGVGPGGSYIPTF

SEQ ID NO: 400644 - protein, 14 aa, Homo sapiens
  CDR3 for beta chain variable domain of TCR clone 200322 (TRBV9, TRBJ2-7)
GASSVGVGSYEQYF

SEQ ID NO: 400645 - protein, 12 aa, Homo sapiens
  CDR3 for alpha chain variable domain of TCR clone 200323 (TRAV8-3, TRAJ26)
CAGDNYGQNFVF

SEQ ID NO: 400646 - protein, 13 aa, Homo sapiens
  CDR3 for beta chain variable domain of TCR clone 200323 (TRBV10-3, TRBJ2-7)
CASKLAVNYEKYF

SEQ ID NO: 400647 - protein, 13 aa, Homo sapiens
  CDR3 for alpha chain variable domain of TCR clone 200324 (TRAV21, TRAJ20)
CAVGLRVDYKLSF

SEQ ID NO: 400648 - protein, 15 aa, Homo sapiens
  CDR3 for beta chain variable domain of TCR clone 200324 (TRBV7-2, TRBJ1-2)
CASSLVSGGDYGYTF

SEQ ID NO: 400649 - protein, 16 aa, Homo sapiens
  CDR3 for alpha chain variable domain of TCR clone 200325 (TRAV38-1, TRAJ56)
CAFMKRQTGANSKLTF

SEQ ID NO: 400650 - protein, 15 aa, Homo sapiens
  CDR3 for beta chain variable domain of TCR clone 200325 (TRBV4-1, TRBJ1-4)
CASSDTGGTNEKLFF

SEQ ID NO: 400651 - protein, 14 aa, Homo sapiens
  CDR3 for alpha chain variable domain of TCR clone 200326 (TRAV13-1, TRAJ10)
CAASSTGGGNKLTF

SEQ ID NO: 400652 - protein, 15 aa, Homo sapiens
  CDR3 for beta chain variable domain of TCR clone 200326 (TRBV11-3, TRBJ1-3)
CASSLFGPSGNAIYF

SEQ ID NO: 400653 - protein, 13 aa, Homo sapiens
  CDR3 for alpha chain variable domain of TCR clone 200327 (TRAV13-1, TRAJ54)
CAASSQGAQKLVF

SEQ ID NO: 400654 - protein, 15 aa, Homo sapiens
  CDR3 for beta chain variable domain of TCR clone 200327 (TRBV5-1, TRBJ2-2)
CASSSQGGNTGELFF

SEQ ID NO: 400655 - protein, 18 aa, Homo sapiens
  CDR3 for alpha chain variable domain of TCR clone 200328 (TRAV21, TRAJ52)
CAVRTSPAGGTSYGKLTF

SEQ ID NO: 400656 - protein, 15 aa, Homo sapiens
  CDR3 for beta chain variable domain of TCR clone 200328 (TRBV11-3, TRBJ2-3)
CASLKDGREGDTQYF

SEQ ID NO: 400657 - protein, 11 aa, Homo sapiens
  CDR3 for alpha chain variable domain of TCR clone 200329 (TRAV21, TRAJ34)
CAVTNTDRLIF

SEQ ID NO: 400658 - protein, 13 aa, Homo sapiens
  CDR3 for beta chain variable domain of TCR clone 200329 (TRBV7-9, TRBJ1-2)
CASSLKQNYGYTF

SEQ ID NO: 400659 - protein, 18 aa, Homo sapiens
  CDR3 for alpha chain variable domain of TCR clone 200330 (TRAV12-3, TRAJ52)
CAMSVGGAGGTSYGKLTF

SEQ ID NO: 400660 - protein, 15 aa, Homo sapiens
  CDR3 for beta chain variable domain of TCR clone 200330 (TRBV7-2, TRBJ1-2)
CSSSPRAGWNYGYTF

SEQ ID NO: 400661 - protein, 16 aa, Homo sapiens
  CDR3 for alpha chain variable domain of TCR clone 200331 (TRAV30, TRAJ24)
CGTEIVDADSWGKFQF

SEQ ID NO: 400662 - protein, 12 aa, Homo sapiens
  CDR3 for beta chain variable domain of TCR clone 200331 (TRBV11-2, TRBJ2-2)
CAISLPTGELFF

SEQ ID NO: 400663 - protein, 14 aa, Homo sapiens
  CDR3 for alpha chain variable domain of TCR clone 200332 (TRAV1-2, TRAJ8)
CAVREDTGSQKLVF

SEQ ID NO: 400664 - protein, 15 aa, Homo sapiens
  CDR3 for beta chain variable domain of TCR clone 200332 (TRBV7-9, TRBJ1-5)
CASSQGHQPNQPQHF

SEQ ID NO: 400665 - protein, 14 aa, Homo sapiens
  CDR3 for alpha chain variable domain of TCR clone 200333 (TRAV1-2, TRAJ24)
CAVLTTDSWGKFQF

SEQ ID NO: 400666 - protein, 11 aa, Homo sapiens
  CDR3 for beta chain variable domain of TCR clone 200333 (TRBV29-1, TRBJ2-5)
CSEDRTGTQYF

SEQ ID NO: 400667 - protein, 18 aa, Homo sapiens
  CDR3 for alpha chain variable domain of TCR clone 200334 (TRAV9-2, TRAJ52)
CALSRHNAGGTSYGKLTF

SEQ ID NO: 400668 - protein, 14 aa, Homo sapiens
  CDR3 for beta chain variable domain of TCR clone 200334 (TRBV7-2, TRBJ2-7)
CASSPKTSFYEQYF

SEQ ID NO: 400669 - protein, 12 aa, Homo sapiens
  CDR3 for alpha chain variable domain of TCR clone 200335 (TRAV3, TRAJ20)
CAVRDPDYKLSF

SEQ ID NO: 400670 - protein, 15 aa, Homo sapiens
  CDR3 for beta chain variable domain of TCR clone 200335 (TRBV28, TRBJ1-2)
CASSSHSIANYGYTF

SEQ ID NO: 400671 - protein, 12 aa, Homo sapiens
  CDR3 for alpha chain variable domain of TCR clone 200336 (TRAV12-2, TRAJ43)
CAVNVNNNDVCF

SEQ ID NO: 400672 - protein, 14 aa, Homo sapiens
  CDR3 for beta chain variable domain of TCR clone 200336 (TRBV7-2, TRBJ2-7)
CASSFLGRVYEQYF

SEQ ID NO: 400673 - protein, 14 aa, Homo sapiens
  CDR3 for alpha chain variable domain of TCR clone 200337 (TRAV34, TRAJ44)
CGADGTGTASKLTF

SEQ ID NO: 400674 - protein, 16 aa, Homo sapiens
  CDR3 for beta chain variable domain of TCR clone 200337 (TRBV11-2, TRBJ2-2)
CASSLRTGNLIGELFF

SEQ ID NO: 400675 - protein, 18 aa, Homo sapiens
  CDR3 for alpha chain variable domain of TCR clone 200338 (TRAV26-2, TRAJ54)
CILRDVEVGIQGAQKLVF

SEQ ID NO: 400676 - protein, 19 aa, Homo sapiens
  CDR3 for beta chain variable domain of TCR clone 200338 (TRBV7-2, TRBJ2-3)
CASSFLSRNWGGGTDTQYF

SEQ ID NO: 400677 - protein, 14 aa, Homo sapiens
  CDR3 for alpha chain variable domain of TCR clone 200339 (TRAV4, TRAJ9)
CLVGSGTGGFKTIF

SEQ ID NO: 400678 - protein, 15 aa, Homo sapiens
  CDR3 for beta chain variable domain of TCR clone 200339 (TRBV6-3, TRBJ2-7)
CASSSPGTVFYEQYF

SEQ ID NO: 400679 - protein, 17 aa, Homo sapiens
  CDR3 for alpha chain variable domain of TCR clone 200340 (TRAV26-1, TRAJ53)
CIVRVDDSGGSNYKLTF

SEQ ID NO: 400680 - protein, 13 aa, Homo sapiens
  CDR3 for beta chain variable domain of TCR clone 200340 (TRBV6-1, TRBJ2-5)
CASSSRVGETQYF

SEQ ID NO: 400681 - protein, 16 aa, Homo sapiens
  CDR3 for alpha chain variable domain of TCR clone 200341 (TRAV3, TRAJ10)
CAVRDMNAGGGNKLTY

SEQ ID NO: 400682 - protein, 15 aa, Homo sapiens
  CDR3 for beta chain variable domain of TCR clone 200341 (TRBV20-1, TRBJ2-7)
CSARDRVSGMDEQYF

SEQ ID NO: 400683 - protein, 12 aa, Homo sapiens
  CDR3 for alpha chain variable domain of TCR clone 200342 (TRAV21, TRAJ29)
CAVTSGNTPLVY

SEQ ID NO: 400684 - protein, 15 aa, Homo sapiens
  CDR3 for beta chain variable domain of TCR clone 200342 (TRBV12-4, TRBJ1-2)
CASRLGVAGNYGYTF

SEQ ID NO: 400685 - protein, 14 aa, Homo sapiens
  CDR3 for alpha chain variable domain of TCR clone 200343 (TRAV4, TRAJ26)
CLVGPHNYGQNFVF

SEQ ID NO: 400686 - protein, 17 aa, Homo sapiens
  CDR3 for beta chain variable domain of TCR clone 200343 (TRBV24-1, TRBJ2-1)
CATSDVSTRGTYNEQFF

SEQ ID NO: 400687 - protein, 14 aa, Homo sapiens
  CDR3 for alpha chain variable domain of TCR clone 200344 (TRAV1-2, TRAJ16)
CAVNRFSDGQKLLC

SEQ ID NO: 400688 - protein, 13 aa, Homo sapiens
  CDR3 for beta chain variable domain of TCR clone 200344 (TRBV29-1, TRBJ1-1)
CSVGDSRNTEAFF

SEQ ID NO: 400689 - protein, 20 aa, Homo sapiens
  CDR3 for alpha chain variable domain of TCR clone 200345 (TRAV30, TRAJ54)
SAAQSRTETQVVQGAQKLVF

SEQ ID NO: 400690 - protein, 11 aa, Homo sapiens
  CDR3 for beta chain variable domain of TCR clone 200345 (TRBV25-1, TRBJ2-4)
CQSRDQNMQYF

SEQ ID NO: 400691 - protein, 12 aa, Homo sapiens
  CDR3 for alpha chain variable domain of TCR clone 200346 (TRAV12-3, TRAJ17)
CEMTLTGNKLTF

SEQ ID NO: 400692 - protein, 14 aa, Homo sapiens
  CDR3 for beta chain variable domain of TCR clone 200346 (TRBV19, TRBJ2-1)
CASSGTNLQGEQFF

SEQ ID NO: 400693 - protein, 13 aa, Homo sapiens
  CDR3 for alpha chain variable domain of TCR clone 200347 (TRAV8-3, TRAJ36)
CAVGATGANNLFF

SEQ ID NO: 400694 - protein, 13 aa, Homo sapiens
  CDR3 for beta chain variable domain of TCR clone 200347 (TRBV10-3, TRBJ2-7)
CASKLAVNYERYF

SEQ ID NO: 400695 - protein, 18 aa, Homo sapiens
  CDR3 for alpha chain variable domain of TCR clone 200348 (TRAV26-1, TRAJ23)
CIVRVGLEVWNQGGKPIF

SEQ ID NO: 400696 - protein, 12 aa, Homo sapiens
  CDR3 for beta chain variable domain of TCR clone 200348 (TRBV12-4, TRBJ2-5)
CASSNSQETQYF

SEQ ID NO: 400697 - protein, 10 aa, Homo sapiens
  CDR3 for alpha chain variable domain of TCR clone 200349 (TRAV1-2, TRAJ20)
CALNDYKLSF

SEQ ID NO: 400698 - protein, 15 aa, Homo sapiens
  CDR3 for beta chain variable domain of TCR clone 200349 (TRBV7-9, TRBJ1-4)
CASSRTGGFNEKLFF

SEQ ID NO: 400699 - protein, 11 aa, Homo sapiens
  CDR3 for alpha chain variable domain of TCR clone 200350 (TRAV12-2, TRAJ43)
CATPIGNDMRF

SEQ ID NO: 400700 - protein, 13 aa, Homo sapiens
  CDR3 for beta chain variable domain of TCR clone 200350 (TRBV7-3, TRBJ1-2)
CASSLKRGYGYTF

SEQ ID NO: 400701 - protein, 16 aa, Homo sapiens
  CDR3 for alpha chain variable domain of TCR clone 200351 (TRAV3, TRAJ37)
CAVRGKGSGNTGKLIF

SEQ ID NO: 400702 - protein, 16 aa, Homo sapiens
  CDR3 for beta chain variable domain of TCR clone 200351 (TRBV5-1, TRBJ2-3)
CASSLGLAVYTDTQYF

SEQ ID NO: 400703 - protein, 11 aa, Homo sapiens
  CDR3 for alpha chain variable domain of TCR clone 200352 (TRAV3, TRAJ21)
CAVGNFNKFYF

SEQ ID NO: 400704 - protein, 15 aa, Homo sapiens
  CDR3 for beta chain variable domain of TCR clone 200352 (TRBV23-1, TRBJ1-5)
CASSQSRGQGWGAYI

SEQ ID NO: 400705 - protein, 13 aa, Homo sapiens
  CDR3 for alpha chain variable domain of TCR clone 200353 (TRAV13-1, TRAJ43)
CAASIPHNNDMRF

SEQ ID NO: 400706 - protein, 17 aa, Homo sapiens
  CDR3 for beta chain variable domain of TCR clone 200353 (TRBV20-1, TRBJ2-1)
CSASSSGLAGSYNEQFF

SEQ ID NO: 400707 - protein, 13 aa, Homo sapiens
  CDR3 for alpha chain variable domain of TCR clone 200354 (TRAV2, TRAJ24)
CAVSTDSWRKLQF

SEQ ID NO: 400708 - protein, 14 aa, Homo sapiens
  CDR3 for beta chain variable domain of TCR clone 200354 (TRBV13, TRBJ2-5)
CASSLGTAQETQYF

SEQ ID NO: 400709 - protein, 12 aa, Homo sapiens
  CDR3 for alpha chain variable domain of TCR clone 200355 (TRAV13-1, TRAJ8)
CSKEGGFQKLVF

SEQ ID NO: 400710 - protein, 17 aa, Homo sapiens
  CDR3 for beta chain variable domain of TCR clone 200355 (TRBV11-2, TRBJ2-1)
CASSLYPPGVEYNEQFF

SEQ ID NO: 400711 - protein, 13 aa, Homo sapiens
  CDR3 for alpha chain variable domain of TCR clone 200356 (TRAV38-1, TRAJ42)
CARWGGSQGNLIF

SEQ ID NO: 400712 - protein, 17 aa, Homo sapiens
  CDR3 for beta chain variable domain of TCR clone 200356 (TRBV20-1, TRBJ2-1)
CSTRDALAGVWDNEQFF

SEQ ID NO: 400713 - protein, 11 aa, Homo sapiens
  CDR3 for alpha chain variable domain of TCR clone 200357 (TRAV23/DV6, TRAJ18)
CADGALGRLYF

SEQ ID NO: 400714 - protein, 13 aa, Homo sapiens
  CDR3 for beta chain variable domain of TCR clone 200357 (TRBV7-9, TRBJ1-2)
CASSLKQNYGYTF

SEQ ID NO: 400715 - protein, 13 aa, Homo sapiens
  CDR3 for alpha chain variable domain of TCR clone 200358 (TRAV2, TRAJ40)
CAVVTSGTYKYIF

SEQ ID NO: 400716 - protein, 13 aa, Homo sapiens
  CDR3 for beta chain variable domain of TCR clone 200358 (TRBV18, TRBJ2-7)
CQLTERGAYEQYF

SEQ ID NO: 400717 - protein, 11 aa, Homo sapiens
  CDR3 for alpha chain variable domain of TCR clone 200359 (TRAV30, TRAJ23)
CGTEIAGKLIF

SEQ ID NO: 400718 - protein, 12 aa, Homo sapiens
  CDR3 for beta chain variable domain of TCR clone 200359 (TRBV12-4, TRBJ2-7)
CASSLGGYEQYF

SEQ ID NO: 400719 - protein, 10 aa, Homo sapiens
  CDR3 for alpha chain variable domain of TCR clone 200360 (TRAV23/DV6, TRAJ57)
CAASSTLSQG

SEQ ID NO: 400720 - protein, 15 aa, Homo sapiens
  CDR3 for beta chain variable domain of TCR clone 200360 (TRBV5-7, TRBJ2-7)
CASSLGPGRGHEQYF

SEQ ID NO: 400721 - protein, 13 aa, Homo sapiens
  CDR3 for alpha chain variable domain of TCR clone 200361 (TRAV3, TRAJ27)
CAVRPLGAGKSTF

SEQ ID NO: 400722 - protein, 12 aa, Homo sapiens
  CDR3 for beta chain variable domain of TCR clone 200361 (TRBV12-4, TRBJ1-3)
CASSFSGNTIYF

SEQ ID NO: 400723 - protein, 18 aa, Homo sapiens
  CDR3 for alpha chain variable domain of TCR clone 200362 (TRAV8-4, TRAJ52)
CAVASFNAGGTSYGKLPF

SEQ ID NO: 400724 - protein, 14 aa, Homo sapiens
  CDR3 for beta chain variable domain of TCR clone 200362 (TRBV18, TRBJ1-5)
CASSRQQRNQPQHF

SEQ ID NO: 400725 - protein, 13 aa, Homo sapiens
  CDR3 for alpha chain variable domain of TCR clone 200363 (TRAV2, TRAJ29)
CAAQNSGNTPLVF

SEQ ID NO: 400726 - protein, 14 aa, Homo sapiens
  CDR3 for beta chain variable domain of TCR clone 200363 (TRBV7-9, TRBJ2-4)
CASSLAMGGNIQYS

SEQ ID NO: 400727 - protein, 12 aa, Homo sapiens
  CDR3 for alpha chain variable domain of TCR clone 200364 (TRAV2, TRAJ43)
GAVEVDNNDMRF

SEQ ID NO: 400728 - protein, 13 aa, Homo sapiens
  CDR3 for beta chain variable domain of TCR clone 200364 (TRBV12-4, TRBJ2-1)
CASRRGATYGQFF

SEQ ID NO: 400729 - protein, 13 aa, Homo sapiens
  CDR3 for alpha chain variable domain of TCR clone 200365 (TRAV8-1, TRAJ23)
CAWRDNQGGKLIF

SEQ ID NO: 400730 - protein, 15 aa, Homo sapiens
  CDR3 for beta chain variable domain of TCR clone 200365 (TRBV12-4, TRBJ2-1)
CASSPLSGRNNEQFF

SEQ ID NO: 400731 - protein, 15 aa, Homo sapiens
  CDR3 for alpha chain variable domain of TCR clone 200366 (TRAV13-1, TRAJ32)
CAASNGWWCYKQAHL

SEQ ID NO: 400732 - protein, 15 aa, Homo sapiens
  CDR3 for beta chain variable domain of TCR clone 200366 (TRBV20-1, TRBJ1-2)
CSAIRTGAFNYGYAF

SEQ ID NO: 400733 - protein, 14 aa, Homo sapiens
  CDR3 for alpha chain variable domain of TCR clone 200367 (TRAV27, TRAJ23)
CAGAFDNQGGKLIF

SEQ ID NO: 400734 - protein, 15 aa, Homo sapiens
  CDR3 for beta chain variable domain of TCR clone 200367 (TRBV7-3, TRBJ2-7)
CAGSLTGQGKYEQYF

SEQ ID NO: 400735 - protein, 16 aa, Homo sapiens
  CDR3 for alpha chain variable domain of TCR clone 200368 (TRAV3, TRAJ10)
CAVRDMRAVGGNKLTF

SEQ ID NO: 400736 - protein, 13 aa, Homo sapiens
  CDR3 for beta chain variable domain of TCR clone 200368 (TRBV4-2, TRBJ1-1)
CASSQAGNTEAFF

SEQ ID NO: 400737 - protein, 14 aa, Homo sapiens
  CDR3 for alpha chain variable domain of TCR clone 200369 (TRAV1-1, TRAJ27)
CAVIYNTNAGKSTF

SEQ ID NO: 400738 - protein, 12 aa, Homo sapiens
  CDR3 for beta chain variable domain of TCR clone 200369 (TRBV11-2, TRBJ2-2)
CASSLPTGELFF

SEQ ID NO: 400739 - protein, 12 aa, Homo sapiens
  CDR3 for alpha chain variable domain of TCR clone 200370 (TRAV13-1, TRAJ21)
CAAFVNFNKFYF

SEQ ID NO: 400740 - protein, 14 aa, Homo sapiens
  CDR3 for beta chain variable domain of TCR clone 200370 (TRBV4-1, TRBJ2-7)
CASRLTSGSYEQYF

SEQ ID NO: 400741 - protein, 14 aa, Homo sapiens
  CDR3 for alpha chain variable domain of TCR clone 200371 (TRAV13-2, TRAJ10)
CAETFTGGGNKLTF

SEQ ID NO: 400742 - protein, 15 aa, Homo sapiens
  CDR3 for beta chain variable domain of TCR clone 200371 (TRBV18, TRBJ2-7)
CSSPRSQGISYEQYF

SEQ ID NO: 400743 - protein, 13 aa, Homo sapiens
  CDR3 for alpha chain variable domain of TCR clone 200372 (TRAV20, TRAJ34)
CAVHARQHRQAHL

SEQ ID NO: 400744 - protein, 15 aa, Homo sapiens
  CDR3 for beta chain variable domain of TCR clone 200372 (TRBV2, TRBJ2-1)
CASSVTSEGTDEQFF

SEQ ID NO: 400745 - protein, 12 aa, Homo sapiens
  CDR3 for alpha chain variable domain of TCR clone 200373 (TRAV26-2, TRAJ21)
CILKGNFNKFYF

SEQ ID NO: 400746 - protein, 14 aa, Homo sapiens
  CDR3 for beta chain variable domain of TCR clone 200373 (TRBV7-9, TRBJ1-1)
CARTPLQSYTEAFF

SEQ ID NO: 400747 - protein, 16 aa, Homo sapiens
  CDR3 for alpha chain variable domain of TCR clone 200374 (TRAV16, TRAJ42)
CALSGLLGGSQGNLIF

SEQ ID NO: 400748 - protein, 15 aa, Homo sapiens
  CDR3 for beta chain variable domain of TCR clone 200374 (TRBV5-1, TRBJ2-1)
CASSPGGLAWNEQFF

SEQ ID NO: 400749 - protein, 14 aa, Homo sapiens
  CDR3 for alpha chain variable domain of TCR clone 200375 (TRAV2, TRAJ37)
CAVDFTSNTGKLIF

SEQ ID NO: 400750 - protein, 14 aa, Homo sapiens
  CDR3 for beta chain variable domain of TCR clone 200375 (TRBV20-1, TRBJ1-5)
CSARGDGNFQPQHF

SEQ ID NO: 400751 - protein, 15 aa, Homo sapiens
  CDR3 for alpha chain variable domain of TCR clone 200376 (TRAV13-1, TRAJ49)
CAASTEGNTGNKFYF

SEQ ID NO: 400752 - protein, 12 aa, Homo sapiens
  CDR3 for beta chain variable domain of TCR clone 200376 (TRBV11-2, TRBJ2-2)
RASSLGGGELFF

SEQ ID NO: 400753 - protein, 13 aa, Homo sapiens
  CDR3 for alpha chain variable domain of TCR clone 200377 (TRAV21, TRAJ20)
CAVGLRVDYKLSF

SEQ ID NO: 400754 - protein, 18 aa, Homo sapiens
  CDR3 for beta chain variable domain of TCR clone 200377 (TRBV7-6, TRBJ2-1)
CASSPRTSGMGSYNEQFF

SEQ ID NO: 400755 - protein, 12 aa, Homo sapiens
  CDR3 for alpha chain variable domain of TCR clone 200378 (TRAV13-1, TRAJ49)
CAAPNTGNQFYF

SEQ ID NO: 400756 - protein, 17 aa, Homo sapiens
  CDR3 for beta chain variable domain of TCR clone 200378 (TRBV25-1, TRBJ2-7)
CASSDARVVFSSHEQYF

SEQ ID NO: 400757 - protein, 12 aa, Homo sapiens
  CDR3 for alpha chain variable domain of TCR clone 200379 (TRAV13-2, TRAJ23)
CAERHRGGKLIF

SEQ ID NO: 400758 - protein, 13 aa, Homo sapiens
  CDR3 for beta chain variable domain of TCR clone 200379 (TRBV20-1, TRBJ2-2)
GSALSGGAGELFF

SEQ ID NO: 400759 - protein, 13 aa, Homo sapiens
  CDR3 for alpha chain variable domain of TCR clone 200380 (TRAV8-1, TRAJ39)
CAGLNNAGNMLIF

SEQ ID NO: 400760 - protein, 17 aa, Homo sapiens
  CDR3 for beta chain variable domain of TCR clone 200380 (TRBV19, TRBJ2-3)
CASSIDPAGGGTDTQYF

SEQ ID NO: 400761 - protein, 13 aa, Homo sapiens
  CDR3 for alpha chain variable domain of TCR clone 200381 (TRAV16, TRAJ31)
CALSANNNARLMF

SEQ ID NO: 400762 - protein, 17 aa, Homo sapiens
  CDR3 for beta chain variable domain of TCR clone 200381 (TRBV12-4, TRBJ2-1)
CASSPGLAGGRINEQFF

SEQ ID NO: 400763 - protein, 15 aa, Homo sapiens
  CDR3 for alpha chain variable domain of TCR clone 200382 (TRAV21, TRAJ53)
CATLNSGGSNYKLTF

SEQ ID NO: 400764 - protein, 17 aa, Homo sapiens
  CDR3 for beta chain variable domain of TCR clone 200382 (TRBV25-1, TRBJ2-7)
CQPQQPPRTGVTYEQYF

SEQ ID NO: 400765 - protein, 17 aa, Homo sapiens
  CDR3 for alpha chain variable domain of TCR clone 200383 (TRAV26-2, TRAJ28)
CMLRPLLIVAGSYQLTF

SEQ ID NO: 400766 - protein, 16 aa, Homo sapiens
  CDR3 for beta chain variable domain of TCR clone 200383 (TRBV6-4, TRBJ1-4)
CASSETGQDPNEKLFF

SEQ ID NO: 400767 - protein, 14 aa, Homo sapiens
  CDR3 for alpha chain variable domain of TCR clone 200384 (TRAV1-1, TRAJ27)
CAVIYNTNAGKSTF

SEQ ID NO: 400768 - protein, 14 aa, Homo sapiens
  CDR3 for beta chain variable domain of TCR clone 200384 (TRBV25-1, TRBJ1-1)
CASTNLGGNTEAFF

SEQ ID NO: 400769 - protein, 14 aa, Homo sapiens
  CDR3 for alpha chain variable domain of TCR clone 200385 (TRAV12-1, TRAJ17)
CVVNYKAAGNKLTF

SEQ ID NO: 400770 - protein, 15 aa, Homo sapiens
  CDR3 for beta chain variable domain of TCR clone 200385 (TRBV7-2, TRBJ2-1)
CASTHGTGIYNEQVF

SEQ ID NO: 400771 - protein, 13 aa, Homo sapiens
  CDR3 for alpha chain variable domain of TCR clone 200386 (TRAV20, TRAJ9)
CAVPDTGGFKTIF

SEQ ID NO: 400772 - protein, 14 aa, Homo sapiens
  CDR3 for beta chain variable domain of TCR clone 200386 (TRBV7-2, TRBJ2-5)
CASSPRGSSETQYV

SEQ ID NO: 400773 - protein, 14 aa, Homo sapiens
  CDR3 for alpha chain variable domain of TCR clone 200387 (TRAV16, TRAJ15)
CALSGPQAGTALIF

SEQ ID NO: 400774 - protein, 11 aa, Homo sapiens
  CDR3 for beta chain variable domain of TCR clone 200387 (TRBV19, TRBJ1-1)
CASSIGSEAFF

SEQ ID NO: 400775 - protein, 13 aa, Homo sapiens
  CDR3 for alpha chain variable domain of TCR clone 200388 (TRAV35, TRAJ32)
CAGVGGATNKLTF

SEQ ID NO: 400776 - protein, 17 aa, Homo sapiens
  CDR3 for beta chain variable domain of TCR clone 200388 (TRBV4-3, TRBJ2-1)
CASSQFSSGRASGEQFF

SEQ ID NO: 400777 - protein, 14 aa, Homo sapiens
  CDR3 for alpha chain variable domain of TCR clone 200389 (TRAV14/DV4, TRAJ54)
CAMREAPGAHKLVF

SEQ ID NO: 400778 - protein, 15 aa, Homo sapiens
  CDR3 for beta chain variable domain of TCR clone 200389 (TRBV5-1, TRBJ2-7)
CASSLNGGPAREQYF

SEQ ID NO: 400779 - protein, 13 aa, Homo sapiens
  CDR3 for alpha chain variable domain of TCR clone 200390 (TRAV3, TRAJ21)
CAVRAPDFNKFYF

SEQ ID NO: 400780 - protein, 13 aa, Homo sapiens
  CDR3 for beta chain variable domain of TCR clone 200390 (TRBV20-1, TRBJ1-1)
CSARGGGNTEAFF

SEQ ID NO: 400781 - protein, 16 aa, Homo sapiens
  CDR3 for alpha chain variable domain of TCR clone 200391 (TRAV17, TRAJ28)
CATASVSGAGSYQPTF

SEQ ID NO: 400782 - protein, 14 aa, Homo sapiens
  CDR3 for beta chain variable domain of TCR clone 200391 (TRBV19, TRBJ2-1)
CASEVTGARNEQFF

SEQ ID NO: 400783 - protein, 13 aa, Homo sapiens
  CDR3 for alpha chain variable domain of TCR clone 200392 (TRAV24, TRAJ37)
CAFSPGNTGKLIF

SEQ ID NO: 400784 - protein, 15 aa, Homo sapiens
  CDR3 for beta chain variable domain of TCR clone 200392 (TRBV7-6, TRBJ2-5)
CASSKPTGPQETKYF

SEQ ID NO: 400785 - protein, 12 aa, Homo sapiens
  CDR3 for alpha chain variable domain of TCR clone 200393 (TRAV12-3, TRAJ4)
CAMTGAGTRLAV

SEQ ID NO: 400786 - protein, 14 aa, Homo sapiens
  CDR3 for beta chain variable domain of TCR clone 200393 (TRBV7-6, TRBJ2-3)
CASSLGTATDTQYV

SEQ ID NO: 400787 - protein, 10 aa, Homo sapiens
  CDR3 for alpha chain variable domain of TCR clone 200394 (TRAV2, TRAJ34)
CAVVNDKLIF

SEQ ID NO: 400788 - protein, 12 aa, Homo sapiens
  CDR3 for beta chain variable domain of TCR clone 200394 (TRBV19, TRBJ1-5)
CASSIAQQPQHF

SEQ ID NO: 400789 - protein, 13 aa, Homo sapiens
  CDR3 for alpha chain variable domain of TCR clone 200395 (TRAV20, TRAJ37)
CAGCSSNTGKLIF

SEQ ID NO: 400790 - protein, 15 aa, Homo sapiens
  CDR3 for beta chain variable domain of TCR clone 200395 (TRBV11-2, TRBJ2-7)
CASRFPGTGGYEQYF

SEQ ID NO: 400791 - protein, 11 aa, Homo sapiens
  CDR3 for alpha chain variable domain of TCR clone 200396 (TRAV12-3, TRAJ43)
CAMSVSNDMRF

SEQ ID NO: 400792 - protein, 15 aa, Homo sapiens
  CDR3 for beta chain variable domain of TCR clone 200396 (TRBV27, TRBJ1-6)
CASSFDRGLGSPLHF

SEQ ID NO: 400793 - protein, 11 aa, Homo sapiens
  CDR3 for alpha chain variable domain of TCR clone 200397 (TRAV23/DV6, TRAJ20)
CAAKDDYKLSF

SEQ ID NO: 400794 - protein, 12 aa, Homo sapiens
  CDR3 for beta chain variable domain of TCR clone 200397 (TRBV3-1, TRBJ2-3)
CASSIGDRAEYF

SEQ ID NO: 400795 - protein, 13 aa, Homo sapiens
  CDR3 for alpha chain variable domain of TCR clone 200398 (TRAV20, TRAJ37)
CAGCSSNTGKLIF

SEQ ID NO: 400796 - protein, 14 aa, Homo sapiens
  CDR3 for beta chain variable domain of TCR clone 200398 (TRBV6-5, TRBJ1-2)
CASSYDGTGGGYTF

SEQ ID NO: 400797 - protein, 12 aa, Homo sapiens
  CDR3 for alpha chain variable domain of TCR clone 200399 (TRAV8-4, TRAJ43)
CAVSVNINDMRF

SEQ ID NO: 400798 - protein, 14 aa, Homo sapiens
  CDR3 for beta chain variable domain of TCR clone 200399 (TRBV11-2, TRBJ1-2)
CASSLGTANYGYTF

SEQ ID NO: 400799 - protein, 11 aa, Homo sapiens
  CDR3 for alpha chain variable domain of TCR clone 200400 (TRAV4, TRAJ23)
RLVAPGGKLIF

SEQ ID NO: 400800 - protein, 15 aa, Homo sapiens
  CDR3 for beta chain variable domain of TCR clone 200400 (TRBV7-2, TRBJ2-1)
CASSFQAEEYNEQFF

SEQ ID NO: 400801 - protein, 18 aa, Homo sapiens
  CDR3 for alpha chain variable domain of TCR clone 200401 (TRAV12-3, TRAJ52)
CAMSVGGAGGTSYGKLTF

SEQ ID NO: 400802 - protein, 13 aa, Homo sapiens
  CDR3 for beta chain variable domain of TCR clone 200401 (TRBV2, TRBJ1-2)
CASRETRSDGYTF

SEQ ID NO: 400803 - protein, 16 aa, Homo sapiens
  CDR3 for alpha chain variable domain of TCR clone 200402 (TRAV14/DV4, TRAJ53)
CAMREGGGGSNYKLTF

SEQ ID NO: 400804 - protein, 13 aa, Homo sapiens
  CDR3 for beta chain variable domain of TCR clone 200402 (TRBV4-2, TRBJ2-3)
CASSLTSTDTQYF

SEQ ID NO: 400805 - protein, 15 aa, Homo sapiens
  CDR3 for alpha chain variable domain of TCR clone 200403 (TRAV13-1, TRAJ57)
CAAGNTQGGSEKLVF

SEQ ID NO: 400806 - protein, 13 aa, Homo sapiens
  CDR3 for beta chain variable domain of TCR clone 200403 (TRBV7-6, TRBJ1-5)
CASSQGPNRAQHF

SEQ ID NO: 400807 - protein, 10 aa, Homo sapiens
  CDR3 for alpha chain variable domain of TCR clone 200404 (TRAV36/DV7, TRAJ56)
CAGPAVELTF

SEQ ID NO: 400808 - protein, 12 aa, Homo sapiens
  CDR3 for beta chain variable domain of TCR clone 200404 (TRBV7-9, TRBJ2-7)
CASSIKREEQYF

SEQ ID NO: 400809 - protein, 14 aa, Homo sapiens
  CDR3 for alpha chain variable domain of TCR clone 200405 (TRAV1-2, TRAJ28)
CVARSGAGSYQLTF

SEQ ID NO: 400810 - protein, 16 aa, Homo sapiens
  CDR3 for beta chain variable domain of TCR clone 200405 (TRBV5-1, TRBJ2-5)
CASSLRRTGGQETQYF

SEQ ID NO: 400811 - protein, 20 aa, Homo sapiens
  CDR3 for alpha chain variable domain of TCR clone 200406 (TRAV8-3, TRAJ44)
LSTSVLWVRLYTGTASKLTF

SEQ ID NO: 400812 - protein, 15 aa, Homo sapiens
  CDR3 for beta chain variable domain of TCR clone 200406 (TRBV7-2, TRBJ2-3)
CASSSTGLETDTQYF

SEQ ID NO: 400813 - protein, 17 aa, Homo sapiens
  CDR3 for alpha chain variable domain of TCR clone 200407 (TRAV3, TRAJ6)
CAVRDGPRAGGSYIPTF

SEQ ID NO: 400814 - protein, 16 aa, Homo sapiens
  CDR3 for beta chain variable domain of TCR clone 200407 (TRBV7-8, TRBJ2-3)
CASSTEGQREIDTQYF

SEQ ID NO: 400815 - protein, 14 aa, Homo sapiens
  CDR3 for alpha chain variable domain of TCR clone 200408 (TRAV12-1, TRAJ26)
CVVKGSNYGRNFVF

SEQ ID NO: 400816 - protein, 17 aa, Homo sapiens
  CDR3 for beta chain variable domain of TCR clone 200408 (TRBV11-2, TRBJ2-6)
CASSQRDIFSGANVLTV

SEQ ID NO: 400817 - protein, 10 aa, Homo sapiens
  CDR3 for alpha chain variable domain of TCR clone 200409 (TRAV25, TRAJ21)
CAGNFNKFYF

SEQ ID NO: 400818 - protein, 14 aa, Homo sapiens
  CDR3 for beta chain variable domain of TCR clone 200409 (TRBV4-1, TRBJ1-1)
CASSPTGIHTEAFF

SEQ ID NO: 400819 - protein, 15 aa, Homo sapiens
  CDR3 for alpha chain variable domain of TCR clone 200410 (TRAV13-1, TRAJ10)
CAAEVATGGGNKLTF

SEQ ID NO: 400820 - protein, 13 aa, Homo sapiens
  CDR3 for beta chain variable domain of TCR clone 200410 (TRBV28, TRBJ2-5)
CAGVSRGEETQYF

SEQ ID NO: 400821 - protein, 13 aa, Homo sapiens
  CDR3 for alpha chain variable domain of TCR clone 200411 (TRAV26-1, TRAJ34)
CIVRPWITDKLIF

SEQ ID NO: 400822 - protein, 14 aa, Homo sapiens
  CDR3 for beta chain variable domain of TCR clone 200411 (TRBV6-3, TRBJ1-1)
CASSYQRRDTEAFF

SEQ ID NO: 400823 - protein, 11 aa, Homo sapiens
  CDR3 for alpha chain variable domain of TCR clone 200412 (TRAV8-3, TRAJ49)
CAVNTGNQFYF

SEQ ID NO: 400824 - protein, 14 aa, Homo sapiens
  CDR3 for beta chain variable domain of TCR clone 200412 (TRBV7-9, TRBJ2-1)
CASSPRDSLYEQFF

SEQ ID NO: 400825 - protein, 13 aa, Homo sapiens
  CDR3 for alpha chain variable domain of TCR clone 200413 (TRAV9-2, TRAJ37)
CALHSRNTGKLIF

SEQ ID NO: 400826 - protein, 15 aa, Homo sapiens
  CDR3 for beta chain variable domain of TCR clone 200413 (TRBV7-2, TRBJ2-7)
CASSTPGLTRGEQYF

SEQ ID NO: 400827 - protein, 11 aa, Homo sapiens
  CDR3 for alpha chain variable domain of TCR clone 200414 (TRAV29/DV5, TRAJ31)
CAASYRDGLMF

SEQ ID NO: 400828 - protein, 19 aa, Homo sapiens
  CDR3 for beta chain variable domain of TCR clone 200414 (TRBV19, TRBJ2-5)
CASSIGQVTDFFLGETQYF

SEQ ID NO: 400829 - protein, 13 aa, Homo sapiens
  CDR3 for alpha chain variable domain of TCR clone 200415 (TRAV3, TRAJ40)
CAVRGSGAYKYIF

SEQ ID NO: 400830 - protein, 20 aa, Homo sapiens
  CDR3 for beta chain variable domain of TCR clone 200415 (TRBV4-3, TRBJ2-4)
CASSQGRWTGGLRSLNIQYF

SEQ ID NO: 400831 - protein, 14 aa, Homo sapiens
  CDR3 for alpha chain variable domain of TCR clone 200416 (TRAV26-1, TRAJ38)
CIADNAGNNRKLIW

SEQ ID NO: 400832 - protein, 15 aa, Homo sapiens
  CDR3 for beta chain variable domain of TCR clone 200416 (TRBV20-1, TRBJ1-1)
CSARGGGTLKRSLDK

SEQ ID NO: 400833 - protein, 17 aa, Homo sapiens
  CDR3 for alpha chain variable domain of TCR clone 200417 (TRAV26-1, TRAJ46)
IASSESEKTSSGDKLTF

SEQ ID NO: 400834 - protein, 16 aa, Homo sapiens
  CDR3 for beta chain variable domain of TCR clone 200417 (TRBV27, TRBJ2-2)
CASSFRGLVRTGELFF

SEQ ID NO: 400835 - protein, 14 aa, Homo sapiens
  CDR3 for alpha chain variable domain of TCR clone 200418 (TRAV26-2, TRAJ38)
CILCNAGNNRKLIW

SEQ ID NO: 400836 - protein, 14 aa, Homo sapiens
  CDR3 for beta chain variable domain of TCR clone 200418 (TRBV19, TRBJ2-1)
CASPTFVLSGEQFF

SEQ ID NO: 400837 - protein, 17 aa, Homo sapiens
  CDR3 for alpha chain variable domain of TCR clone 200419 (TRAV13-1, TRAJ28)
CAASPPYSGAWSYQLTF

SEQ ID NO: 400838 - protein, 12 aa, Homo sapiens
  CDR3 for beta chain variable domain of TCR clone 200419 (TRBV11-3, TRBJ2-2)
CASSLPTGELFF

SEQ ID NO: 400839 - protein, 14 aa, Homo sapiens
  CDR3 for alpha chain variable domain of TCR clone 200420 (TRAV8-3, TRAJ4)
CAVGAAGGYNKLIF

SEQ ID NO: 400840 - protein, 17 aa, Homo sapiens
  CDR3 for beta chain variable domain of TCR clone 200420 (TRBV28, TRBJ2-7)
CASSPLHRASGVYEQYF

SEQ ID NO: 400841 - protein, 15 aa, Homo sapiens
  CDR3 for alpha chain variable domain of TCR clone 200421 (TRAV3, TRAJ17)
CAVSTKEAAGNKLTF

SEQ ID NO: 400842 - protein, 14 aa, Homo sapiens
  CDR3 for beta chain variable domain of TCR clone 200421 (TRBV5-1, TRBJ2-3)
CASSLFGPTDTQYF

SEQ ID NO: 400843 - protein, 15 aa, Homo sapiens
  CDR3 for alpha chain variable domain of TCR clone 200422 (TRAV38-1, TRAJ57)
CAFMDSQGGSEKLVS

SEQ ID NO: 400844 - protein, 16 aa, Homo sapiens
  CDR3 for beta chain variable domain of TCR clone 200422 (TRBV10-3, TRBJ2-1)
CASRGGGRGDYNEQFF

SEQ ID NO: 400845 - protein, 12 aa, Homo sapiens
  CDR3 for alpha chain variable domain of TCR clone 200423 (TRAV1-2, TRAJ29)
CAVPSGNTPLVF

SEQ ID NO: 400846 - protein, 15 aa, Homo sapiens
  CDR3 for beta chain variable domain of TCR clone 200423 (TRBV6-3, TRBJ2-2)
CASSFLATLTGELFF

SEQ ID NO: 400847 - protein, 11 aa, Homo sapiens
  CDR3 for alpha chain variable domain of TCR clone 200424 (TRAV1-2, TRAJ31)
CAVNNNARLMI

SEQ ID NO: 400848 - protein, 15 aa, Homo sapiens
  CDR3 for beta chain variable domain of TCR clone 200424 (TRBV28, TRBJ2-1)
CASSIIAEGRSEQFF

SEQ ID NO: 400849 - protein, 14 aa, Homo sapiens
  CDR3 for alpha chain variable domain of TCR clone 200425 (TRAV1-1, TRAJ27)
CAVIYNTNPGKSTF

SEQ ID NO: 400850 - protein, 14 aa, Homo sapiens
  CDR3 for beta chain variable domain of TCR clone 200425 (TRBV25-1, TRBJ1-1)
CASTHLGENTEAFF

SEQ ID NO: 400851 - protein, 14 aa, Homo sapiens
  CDR3 for alpha chain variable domain of TCR clone 200426 (TRAV23/DV6, TRAJ22)
CAASVSGSQRQLTF

SEQ ID NO: 400852 - protein, 16 aa, Homo sapiens
  CDR3 for beta chain variable domain of TCR clone 200426 (TRBV19, TRBJ2-2)
CASSFPGQGLAGELFF

SEQ ID NO: 400853 - protein, 13 aa, Homo sapiens
  CDR3 for alpha chain variable domain of TCR clone 200427 (TRAV8-3, TRAJ45)
CVRSGGGADGLTF

SEQ ID NO: 400854 - protein, 14 aa, Homo sapiens
  CDR3 for beta chain variable domain of TCR clone 200427 (TRBV4-1, TRBJ2-2)
CASSQAVNTGELFF

SEQ ID NO: 400855 - protein, 15 aa, Homo sapiens
  CDR3 for alpha chain variable domain of TCR clone 200428 (TRAV12-1, TRAJ44)
CVVDTPQGTASKLTF

SEQ ID NO: 400856 - protein, 10 aa, Homo sapiens
  CDR3 for beta chain variable domain of TCR clone 200428 (TRBV20-1, TRBJ2-5)
CSARFETQYF

SEQ ID NO: 400857 - protein, 11 aa, Homo sapiens
  CDR3 for alpha chain variable domain of TCR clone 200429 (TRAV35, TRAJ52)
CAGFFMEKLTF

SEQ ID NO: 400858 - protein, 15 aa, Homo sapiens
  CDR3 for beta chain variable domain of TCR clone 200429 (TRBV12-4, TRBJ1-5)
CASTRQGSGNQPQHF

SEQ ID NO: 400859 - protein, 15 aa, Homo sapiens
  CDR3 for alpha chain variable domain of TCR clone 200430 (TRAV35, TRAJ23)
CAGQWGYNQGGKLIF

SEQ ID NO: 400860 - protein, 16 aa, Homo sapiens
  CDR3 for beta chain variable domain of TCR clone 200430 (TRBV27, TRBJ2-1)
CASSSRLAGNYNEQFF

SEQ ID NO: 400861 - protein, 14 aa, Homo sapiens
  CDR3 for alpha chain variable domain of TCR clone 200431 (TRAV23/DV6, TRAJ35)
CAASKGGFGNVLHC

SEQ ID NO: 400862 - protein, 13 aa, Homo sapiens
  CDR3 for beta chain variable domain of TCR clone 200431 (TRBV7-3, TRBJ1-1)
CASSQDWGAEAFF

SEQ ID NO: 400863 - protein, 14 aa, Homo sapiens
  CDR3 for alpha chain variable domain of TCR clone 200432 (TRAV26-1, TRAJ33)
CIVRNMDSNYQLIW

SEQ ID NO: 400864 - protein, 14 aa, Homo sapiens
  CDR3 for beta chain variable domain of TCR clone 200432 (TRBV19, TRBJ2-1)
CASPTFVLSGEQFL

SEQ ID NO: 400865 - protein, 12 aa, Homo sapiens
  CDR3 for alpha chain variable domain of TCR clone 200433 (TRAV8-6, TRAJ21)
CAVRPNFNKFYF

SEQ ID NO: 400866 - protein, 17 aa, Homo sapiens
  CDR3 for beta chain variable domain of TCR clone 200433 (TRBV11-2, TRBJ2-1)
CASSLYPPGVEYNGQFF

SEQ ID NO: 400867 - protein, 14 aa, Homo sapiens
  CDR3 for alpha chain variable domain of TCR clone 200434 (TRAV3, TRAJ36)
CAVRDGTGANNLFF

SEQ ID NO: 400868 - protein, 16 aa, Homo sapiens
  CDR3 for beta chain variable domain of TCR clone 200434 (TRBV7-3, TRBJ2-5)
WASIQPGGSVQETQYF

SEQ ID NO: 400869 - protein, 13 aa, Homo sapiens
  CDR3 for alpha chain variable domain of TCR clone 200435 (TRAV8-6, TRAJ40)
CAVSVTGTYKYIF

SEQ ID NO: 400870 - protein, 15 aa, Homo sapiens
  CDR3 for beta chain variable domain of TCR clone 200435 (TRBV4-1, TRBJ2-3)
CASGRGQGIPDTQYC

SEQ ID NO: 400871 - protein, 13 aa, Homo sapiens
  CDR3 for alpha chain variable domain of TCR clone 200436 (TRAV12-3, TRAJ40)
CAMSARGNYKYIF

SEQ ID NO: 400872 - protein, 16 aa, Homo sapiens
  CDR3 for beta chain variable domain of TCR clone 200436 (TRBV20-1, TRBJ2-3)
CSGEAGLAGGQDTQYF

SEQ ID NO: 400873 - protein, 14 aa, Homo sapiens
  CDR3 for alpha chain variable domain of TCR clone 200437 (TRAV12-3, TRAJ9)
CAMSPNTGGFKTIF

SEQ ID NO: 400874 - protein, 15 aa, Homo sapiens
  CDR3 for beta chain variable domain of TCR clone 200437 (TRBV6-5, TRBJ2-1)
CASSYDAGAGNEKFF

SEQ ID NO: 400875 - protein, 15 aa, Homo sapiens
  CDR3 for alpha chain variable domain of TCR clone 200438 (TRAV29/DV5, TRAJ29)
CAASERSSGNTPLVF

SEQ ID NO: 400876 - protein, 11 aa, Homo sapiens
  CDR3 for beta chain variable domain of TCR clone 200438 (TRBV6-3, TRBJ2-3)
CATGQADTQYF

SEQ ID NO: 400877 - protein, 14 aa, Homo sapiens
  CDR3 for alpha chain variable domain of TCR clone 200439 (TRAV4, TRAJ17)
CVVGDMAAGNKLTF

SEQ ID NO: 400878 - protein, 14 aa, Homo sapiens
  CDR3 for beta chain variable domain of TCR clone 200439 (TRBV4-1, TRBJ2-7)
CASSPVAGGDEQYF

SEQ ID NO: 400879 - protein, 13 aa, Homo sapiens
  CDR3 for alpha chain variable domain of TCR clone 200440 (TRAV3, TRAJ21)
CAVREPDFNKFYF

SEQ ID NO: 400880 - protein, 19 aa, Homo sapiens
  CDR3 for beta chain variable domain of TCR clone 200440 (TRBV4-2, TRBJ1-5)
CAGSQDVGSGGGLNQPQHF

SEQ ID NO: 400881 - protein, 13 aa, Homo sapiens
  CDR3 for alpha chain variable domain of TCR clone 200441 (TRAV3, TRAJ21)
CAVGNFNKFYFDL

SEQ ID NO: 400882 - protein, 14 aa, Homo sapiens
  CDR3 for beta chain variable domain of TCR clone 200441 (TRBV29-1, TRBJ2-2)
CSGRGSGNTGELFF

SEQ ID NO: 400883 - protein, 11 aa, Homo sapiens
  CDR3 for alpha chain variable domain of TCR clone 200442 (TRAV13-1, TRAJ49)
CACVGGNQFYF

SEQ ID NO: 400884 - protein, 16 aa, Homo sapiens
  CDR3 for beta chain variable domain of TCR clone 200442 (TRBV11-2, TRBJ2-2)
CASSLQTGNLIGELFF

SEQ ID NO: 400885 - protein, 14 aa, Homo sapiens
  CDR3 for alpha chain variable domain of TCR clone 200443 (TRAV1-1, TRAJ35)
CAVRSIGFGNVLHC

SEQ ID NO: 400886 - protein, 12 aa, Homo sapiens
  CDR3 for beta chain variable domain of TCR clone 200443 (TRBV29-1, TRBJ2-3)
CSVTGGADTQYF

SEQ ID NO: 400887 - protein, 14 aa, Homo sapiens
  CDR3 for alpha chain variable domain of TCR clone 200444 (TRAV12-1, TRAJ8)
CVVNSNTGFQKLVF

SEQ ID NO: 400888 - protein, 16 aa, Homo sapiens
  CDR3 for beta chain variable domain of TCR clone 200444 (TRBV20-1, TRBJ2-2)
CSAREGRVGLTGELFF

SEQ ID NO: 400889 - protein, 13 aa, Homo sapiens
  CDR3 for alpha chain variable domain of TCR clone 200445 (TRAV1-2, TRAJ9)
CAALNTGGFKTIF

SEQ ID NO: 400890 - protein, 15 aa, Homo sapiens
  CDR3 for beta chain variable domain of TCR clone 200445 (TRBV7-9, TRBJ1-1)
CASSLLEQGGTEAFF

SEQ ID NO: 400891 - protein, 14 aa, Homo sapiens
  CDR3 for alpha chain variable domain of TCR clone 200446 (TRAV1-2, TRAJ6)
CAVSLSGGSYIPTF

SEQ ID NO: 400892 - protein, 15 aa, Homo sapiens
  CDR3 for beta chain variable domain of TCR clone 200446 (TRBV20-1, TRBJ2-7)
CSAESGTSGAYEQYF

SEQ ID NO: 400893 - protein, 11 aa, Homo sapiens
  CDR3 for alpha chain variable domain of TCR clone 200447 (TRAV23/DV6, TRAJ30)
CAASMCADANR

SEQ ID NO: 400894 - protein, 11 aa, Homo sapiens
  CDR3 for beta chain variable domain of TCR clone 200447 (TRBV19, TRBJ2-3)
CHRPRGDTQYF

SEQ ID NO: 400895 - protein, 12 aa, Homo sapiens
  CDR3 for alpha chain variable domain of TCR clone 200448 (TRAV27, TRAJ20)
CAGASNDYKLSF

SEQ ID NO: 400896 - protein, 15 aa, Homo sapiens
  CDR3 for beta chain variable domain of TCR clone 200448 (TRBV5-4, TRBJ1-2)
CASRGSRGTSGGYIF

SEQ ID NO: 400897 - protein, 12 aa, Homo sapiens
  CDR3 for alpha chain variable domain of TCR clone 200449 (TRAV17, TRAJ39)
CATGAAGNMLTF

SEQ ID NO: 400898 - protein, 14 aa, Homo sapiens
  CDR3 for beta chain variable domain of TCR clone 200449 (TRBV7-9, TRBJ1-2)
CASSGQGANYGYTF

SEQ ID NO: 400899 - protein, 17 aa, Homo sapiens
  CDR3 for alpha chain variable domain of TCR clone 200450 (TRAV26-2, TRAJ42)
CILRDVGYGGSQGNPLF

SEQ ID NO: 400900 - protein, 16 aa, Homo sapiens
  CDR3 for beta chain variable domain of TCR clone 200450 (TRBV12-4, TRBJ2-7)
CASSLIGGTGTYEQYF

SEQ ID NO: 400901 - protein, 16 aa, Homo sapiens
  CDR3 for alpha chain variable domain of TCR clone 200451 (TRAV3, TRAJ37)
CAVRGKGSGTTGKLIF

SEQ ID NO: 400902 - protein, 12 aa, Homo sapiens
  CDR3 for beta chain variable domain of TCR clone 200451 (TRBV7-6, TRBJ2-3)
CASSTGTDTQYF

SEQ ID NO: 400903 - protein, 13 aa, Homo sapiens
  CDR3 for alpha chain variable domain of TCR clone 200452 (TRAV29/DV5, TRAJ31)
CAASRNNNARLMF

SEQ ID NO: 400904 - protein, 12 aa, Homo sapiens
  CDR3 for beta chain variable domain of TCR clone 200452 (TRBV14, TRBJ2-5)
SASSHLKETQYF

SEQ ID NO: 400905 - protein, 14 aa, Homo sapiens
  CDR3 for alpha chain variable domain of TCR clone 200453 (TRAV17, TRAJ57)
CATDASGRSEKLVF

SEQ ID NO: 400906 - protein, 14 aa, Homo sapiens
  CDR3 for beta chain variable domain of TCR clone 200453 (TRBV4-2, TRBJ2-1)
CASGLDRAYNEQFF

SEQ ID NO: 400907 - protein, 14 aa, Homo sapiens
  CDR3 for alpha chain variable domain of TCR clone 200454 (TRAV1-2, TRAJ16)
CAVNRFSDGQKLLF

SEQ ID NO: 400908 - protein, 14 aa, Homo sapiens
  CDR3 for beta chain variable domain of TCR clone 200454 (TRBV10-1, TRBJ2-5)
CASSESQRAKTQYF

SEQ ID NO: 400909 - protein, 15 aa, Homo sapiens
  CDR3 for alpha chain variable domain of TCR clone 200455 (TRAV34, TRAJ38)
CGADFTPGNNRKLIW

SEQ ID NO: 400910 - protein, 15 aa, Homo sapiens
  CDR3 for beta chain variable domain of TCR clone 200455 (TRBV15, TRBJ1-5)
CATSRDPVSNQPQHF

SEQ ID NO: 400911 - protein, 14 aa, Homo sapiens
  CDR3 for alpha chain variable domain of TCR clone 200456 (TRAV25, TRAJ27)
CAGEHLTNAGKSTF

SEQ ID NO: 400912 - protein, 15 aa, Homo sapiens
  CDR3 for beta chain variable domain of TCR clone 200456 (TRBV15, TRBJ1-1)
CATSLQGGRNTEALF

SEQ ID NO: 400913 - protein, 11 aa, Homo sapiens
  CDR3 for alpha chain variable domain of TCR clone 200457 (TRAV4, TRAJ20)
CLVGDKVTTTN

SEQ ID NO: 400914 - protein, 15 aa, Homo sapiens
  CDR3 for beta chain variable domain of TCR clone 200457 (TRBV18, TRBJ2-7)
CASSPSSTGNYEQYF

SEQ ID NO: 400915 - protein, 12 aa, Homo sapiens
  CDR3 for alpha chain variable domain of TCR clone 200458 (TRAV27, TRAJ35)
CAGGDFGNVLHC

SEQ ID NO: 400916 - protein, 16 aa, Homo sapiens
  CDR3 for beta chain variable domain of TCR clone 200458 (TRBV6-1, TRBJ2-1)
CASILRQGSSYNEQFF

SEQ ID NO: 400917 - protein, 15 aa, Homo sapiens
  CDR3 for alpha chain variable domain of TCR clone 200459 (TRAV12-3, TRAJ6)
CAMSATTGGSYIPTF

SEQ ID NO: 400918 - protein, 13 aa, Homo sapiens
  CDR3 for beta chain variable domain of TCR clone 200459 (TRBV7-9, TRBJ1-2)
CASSLKQYYGYTF

SEQ ID NO: 400919 - protein, 14 aa, Homo sapiens
  CDR3 for alpha chain variable domain of TCR clone 200460 (TRAV12-2, TRAJ45)
CAVYSGGGADGLTF

SEQ ID NO: 400920 - protein, 13 aa, Homo sapiens
  CDR3 for beta chain variable domain of TCR clone 200460 (TRBV7-7, TRBJ2-3)
CASSLSRADTQYV

SEQ ID NO: 400921 - protein, 14 aa, Homo sapiens
  CDR3 for alpha chain variable domain of TCR clone 200461 (TRAV1-2, TRAJ16)
CAVNRFSDGQKLLF

SEQ ID NO: 400922 - protein, 14 aa, Homo sapiens
  CDR3 for beta chain variable domain of TCR clone 200461 (TRBV11-2, TRBJ2-3)
CASSLYAGRDTQYF

SEQ ID NO: 400923 - protein, 10 aa, Homo sapiens
  CDR3 for alpha chain variable domain of TCR clone 200462 (TRAV13-1, TRAJ7)
LIGGNNRIAF

SEQ ID NO: 400924 - protein, 14 aa, Homo sapiens
  CDR3 for beta chain variable domain of TCR clone 200462 (TRBV16, TRBJ1-1)
CASSQAGPNTEAFF

SEQ ID NO: 400925 - protein, 14 aa, Homo sapiens
  CDR3 for alpha chain variable domain of TCR clone 200463 (TRAV12-2, TRAJ13)
CAVKKTVGYQKVTF

SEQ ID NO: 400926 - protein, 13 aa, Homo sapiens
  CDR3 for beta chain variable domain of TCR clone 200463 (TRBV10-3, TRBJ2-7)
CASKLAVNYEQYF

SEQ ID NO: 400927 - protein, 14 aa, Homo sapiens
  CDR3 for alpha chain variable domain of TCR clone 200464 (TRAV12-2, TRAJ17)
CSVLFKAAGNKLTF

SEQ ID NO: 400928 - protein, 12 aa, Homo sapiens
  CDR3 for beta chain variable domain of TCR clone 200464 (TRBV11-2, TRBJ2-2)
CASSLGGGELFF

SEQ ID NO: 400929 - protein, 11 aa, Homo sapiens
  CDR3 for alpha chain variable domain of TCR clone 200465 (TRAV23/DV6, TRAJ49)
CAVEPVTSSIL

SEQ ID NO: 400930 - protein, 13 aa, Homo sapiens
  CDR3 for beta chain variable domain of TCR clone 200465 (TRBV6-1, TRBJ1-1)
CASSRQGNTEAFF

SEQ ID NO: 400931 - protein, 14 aa, Homo sapiens
  CDR3 for alpha chain variable domain of TCR clone 200466 (TRAV12-2, TRAJ13)
CAVKKTGGYQKVTF

SEQ ID NO: 400932 - protein, 13 aa, Homo sapiens
  CDR3 for beta chain variable domain of TCR clone 200466 (TRBV7-6, TRBJ1-2)
CASSVVADYGDTF

SEQ ID NO: 400933 - protein, 12 aa, Homo sapiens
  CDR3 for alpha chain variable domain of TCR clone 200467 (TRAV12-1, TRAJ40)
CVVYSGTYKYIF

SEQ ID NO: 400934 - protein, 15 aa, Homo sapiens
  CDR3 for beta chain variable domain of TCR clone 200467 (TRBV29-1, TRBJ2-7)
CSVEFFDRGSYEQYF

SEQ ID NO: 400935 - protein, 12 aa, Homo sapiens
  CDR3 for alpha chain variable domain of TCR clone 200468 (TRAV12-3, TRAJ17)
CPMTLTGNKLTF

SEQ ID NO: 400936 - protein, 15 aa, Homo sapiens
  CDR3 for beta chain variable domain of TCR clone 200468 (TRBV20-1, TRBJ2-7)
CSARDRVSGMYEQYF

SEQ ID NO: 400937 - protein, 13 aa, Homo sapiens
  CDR3 for alpha chain variable domain of TCR clone 200469 (TRAV3, TRAJ16)
CAVRDRNGQKLLF

SEQ ID NO: 400938 - protein, 15 aa, Homo sapiens
  CDR3 for beta chain variable domain of TCR clone 200469 (TRBV5-1, TRBJ2-1)
CASSPPGAPYNEQFF

SEQ ID NO: 400939 - protein, 13 aa, Homo sapiens
  CDR3 for alpha chain variable domain of TCR clone 200470 (TRAV12-1, TRAJ29)
CVVDTSGNTPLVF

SEQ ID NO: 400940 - protein, 14 aa, Homo sapiens
  CDR3 for beta chain variable domain of TCR clone 200470 (TRBV12-4, TRBJ2-3)
SASSLVPSTDTQYF

SEQ ID NO: 400941 - protein, 14 aa, Homo sapiens
  CDR3 for alpha chain variable domain of TCR clone 200471 (TRAV38-1, TRAJ45)
CAYYSGGGADGLTF

SEQ ID NO: 400942 - protein, 20 aa, Homo sapiens
  CDR3 for beta chain variable domain of TCR clone 200471 (TRBV28, TRBJ2-1)
CASTPMGRSPGLAGGNEQFF

SEQ ID NO: 400943 - protein, 14 aa, Homo sapiens
  CDR3 for alpha chain variable domain of TCR clone 200472 (TRAV20, TRAJ56)
CAVPFGGANSKLTF

SEQ ID NO: 400944 - protein, 14 aa, Homo sapiens
  CDR3 for beta chain variable domain of TCR clone 200472 (TRBV20-1, TRBJ2-7)
CSANRGRSSYEQYF

SEQ ID NO: 400945 - protein, 14 aa, Homo sapiens
  CDR3 for alpha chain variable domain of TCR clone 200473 (TRAV23/DV6, TRAJ24)
CAARLSDSWGKLQF

SEQ ID NO: 400946 - protein, 16 aa, Homo sapiens
  CDR3 for beta chain variable domain of TCR clone 200473 (TRBV7-9, TRBJ2-6)
CASSLKGPLRANVLTF

SEQ ID NO: 400947 - protein, 19 aa, Homo sapiens
  CDR3 for alpha chain variable domain of TCR clone 200474 (TRAV1-2, TRAJ26)
CLLPLCCERPDNYGQNFVF

SEQ ID NO: 400948 - protein, 18 aa, Homo sapiens
  CDR3 for beta chain variable domain of TCR clone 200474 (TRBV7-3, TRBJ2-3)
CASSSTGTYPGSTDTQYF

SEQ ID NO: 400949 - protein, 16 aa, Homo sapiens
  CDR3 for alpha chain variable domain of TCR clone 200475 (TRAV22, TRAJ45)
CAVERGKRGGADGLTF

SEQ ID NO: 400950 - protein, 16 aa, Homo sapiens
  CDR3 for beta chain variable domain of TCR clone 200475 (TRBV2, TRBJ2-5)
CASSTLRDRDRETQYF

SEQ ID NO: 400951 - protein, 13 aa, Homo sapiens
  CDR3 for alpha chain variable domain of TCR clone 200476 (TRAV12-2, TRAJ20)
CAVYPSNDYKLSF

SEQ ID NO: 400952 - protein, 16 aa, Homo sapiens
  CDR3 for beta chain variable domain of TCR clone 200476 (TRBV18, TRBJ1-2)
CDSSPKWTWVWLHLRF

SEQ ID NO: 400953 - protein, 11 aa, Homo sapiens
  CDR3 for alpha chain variable domain of TCR clone 200477 (TRAV17, TRAJ36)
CAPTGANNLFF

SEQ ID NO: 400954 - protein, 14 aa, Homo sapiens
  CDR3 for beta chain variable domain of TCR clone 200477 (TRBV7-3, TRBJ2-3)
CASSPSARTDTQYF

SEQ ID NO: 400955 - protein, 16 aa, Homo sapiens
  CDR3 for alpha chain variable domain of TCR clone 200478 (TRAV30, TRAJ24)
CGTEIVDADSWGKFQF

SEQ ID NO: 400956 - protein, 17 aa, Homo sapiens
  CDR3 for beta chain variable domain of TCR clone 200478 (TRBV18, TRBJ2-6)
CASSPDRGVGGANVLTF

SEQ ID NO: 400957 - protein, 14 aa, Homo sapiens
  CDR3 for alpha chain variable domain of TCR clone 200479 (TRAV12-2, TRAJ13)
CAVKKTGGYQKVTF

SEQ ID NO: 400958 - protein, 12 aa, Homo sapiens
  CDR3 for beta chain variable domain of TCR clone 200479 (TRBV12-4, TRBJ1-2)
CASSFIWRDLRF

SEQ ID NO: 400959 - protein, 13 aa, Homo sapiens
  CDR3 for alpha chain variable domain of TCR clone 200480 (TRAV12-1, TRAJ11)
CVVNRAGYSTLTF

SEQ ID NO: 400960 - protein, 12 aa, Homo sapiens
  CDR3 for beta chain variable domain of TCR clone 200480 (TRBV12-4, TRBJ1-2)
CASSFIWLHLRF

SEQ ID NO: 400961 - protein, 14 aa, Homo sapiens
  CDR3 for alpha chain variable domain of TCR clone 200481 (TRAV12-2, TRAJ53)
CAVGGGGSNYKLTF

SEQ ID NO: 400962 - protein, 13 aa, Homo sapiens
  CDR3 for beta chain variable domain of TCR clone 200481 (TRBV12-4, TRBJ1-1)
CASSLALGGEAFF

SEQ ID NO: 400963 - protein, 14 aa, Homo sapiens
  CDR3 for alpha chain variable domain of TCR clone 200482 (TRAV12-1, TRAJ17)
CVMNYKAAGNKLTF

SEQ ID NO: 400964 - protein, 13 aa, Homo sapiens
  CDR3 for beta chain variable domain of TCR clone 200482 (TRBV7-9, TRBJ1-2)
CASSLKQNYGYTF

SEQ ID NO: 400965 - protein, 11 aa, Homo sapiens
  CDR3 for alpha chain variable domain of TCR clone 200483 (TRAV2, TRAJ13)
CASGGYQKVTF

SEQ ID NO: 400966 - protein, 17 aa, Homo sapiens
  CDR3 for beta chain variable domain of TCR clone 200483 (TRBV20-1, TRBJ2-3)
CSARDGWNAKERDTQYF

SEQ ID NO: 400967 - protein, 15 aa, Homo sapiens
  CDR3 for alpha chain variable domain of TCR clone 200484 (TRAV12-3, TRAJ6)
FAMSAASGGSYIPTF

SEQ ID NO: 400968 - protein, 13 aa, Homo sapiens
  CDR3 for beta chain variable domain of TCR clone 200484 (TRBV20-1, TRBJ1-2)
CSASTERIYGYTF

SEQ ID NO: 400969 - protein, 19 aa, Homo sapiens
  CDR3 for alpha chain variable domain of TCR clone 200485 (TRAV1-2, TRAJ26)
CLLPLCCERPDNYGQNFVF

SEQ ID NO: 400970 - protein, 13 aa, Homo sapiens
  CDR3 for beta chain variable domain of TCR clone 200485 (TRBV9, TRBJ2-1)
CASNPSGGNEQFF

SEQ ID NO: 400971 - protein, 19 aa, Homo sapiens
  CDR3 for alpha chain variable domain of TCR clone 200486 (TRAV13-1, TRAJ52)
CAASPYQNAGGTSYGKLTF

SEQ ID NO: 400972 - protein, 15 aa, Homo sapiens
  CDR3 for beta chain variable domain of TCR clone 200486 (TRBV12-4, TRBJ2-5)
CASSPPTGLQETQYF

SEQ ID NO: 400973 - protein, 14 aa, Homo sapiens
  CDR3 for alpha chain variable domain of TCR clone 200487 (TRAV8-3, TRAJ27)
CSGGRNNNAGKSTF

SEQ ID NO: 400974 - protein, 15 aa, Homo sapiens
  CDR3 for beta chain variable domain of TCR clone 200487 (TRBV11-3, TRBJ2-5)
CASSLRGRVQETQYF

SEQ ID NO: 400975 - protein, 18 aa, Homo sapiens
  CDR3 for alpha chain variable domain of TCR clone 200488 (TRAV13-1, TRAJ52)
CAASKRSAGGTSYGKLTF

SEQ ID NO: 400976 - protein, 13 aa, Homo sapiens
  CDR3 for beta chain variable domain of TCR clone 200488 (TRBV12-4, TRBJ1-2)
CASSLREGKGYTF

SEQ ID NO: 400977 - protein, 16 aa, Homo sapiens
  CDR3 for alpha chain variable domain of TCR clone 200489 (TRAV2, TRAJ20)
PPVLWSFRSNDSKLSF

SEQ ID NO: 400978 - protein, 12 aa, Homo sapiens
  CDR3 for beta chain variable domain of TCR clone 200489 (TRBV7-6, TRBJ2-3)
CASSTGTDTQYF

SEQ ID NO: 400979 - protein, 14 aa, Homo sapiens
  CDR3 for alpha chain variable domain of TCR clone 200490 (TRAV13-2, TRAJ17)
CAENSKAAGNKLTF

SEQ ID NO: 400980 - protein, 20 aa, Homo sapiens
  CDR3 for beta chain variable domain of TCR clone 200490 (TRBV28, TRBJ2-1)
CASTRIGRSPGLAGGNEQFF

SEQ ID NO: 400981 - protein, 16 aa, Homo sapiens
  CDR3 for alpha chain variable domain of TCR clone 200491 (TRAV8-3, TRAJ8)
CAVPRDVNTGFQKLVF

SEQ ID NO: 400982 - protein, 12 aa, Homo sapiens
  CDR3 for beta chain variable domain of TCR clone 200491 (TRBV11-3, TRBJ1-1)
CASSLRDSEAFF

SEQ ID NO: 400983 - protein, 12 aa, Homo sapiens
  CDR3 for alpha chain variable domain of TCR clone 200492 (TRAV8-4, TRAJ43)
CAVSVNNNDMSF

SEQ ID NO: 400984 - protein, 13 aa, Homo sapiens
  CDR3 for beta chain variable domain of TCR clone 200492 (TRBV7-9, TRBJ1-2)
CASSLKQNYGYTF

SEQ ID NO: 400985 - protein, 18 aa, Homo sapiens
  CDR3 for alpha chain variable domain of TCR clone 200493 (TRAV3, TRAJ38)
CAVRDCLNAGNNHIQTPD

SEQ ID NO: 400986 - protein, 13 aa, Homo sapiens
  CDR3 for beta chain variable domain of TCR clone 200493 (TRBV23-1, TRBJ1-4)
CASRGKFNEKLFF

SEQ ID NO: 400987 - protein, 13 aa, Homo sapiens
  CDR3 for alpha chain variable domain of TCR clone 200494 (TRAV22, TRAJ29)
CAVGGSGNTPLVF

SEQ ID NO: 400988 - protein, 13 aa, Homo sapiens
  CDR3 for beta chain variable domain of TCR clone 200494 (TRBV4-2, TRBJ1-1)
CASSQAGNTAAFF

SEQ ID NO: 400989 - protein, 13 aa, Homo sapiens
  CDR3 for alpha chain variable domain of TCR clone 200495 (TRAV8-3, TRAJ28)
CAVGAVGSYQLTF

SEQ ID NO: 400990 - protein, 12 aa, Homo sapiens
  CDR3 for beta chain variable domain of TCR clone 200495 (TRBV6-3, TRBJ2-1)
CASSGSYNEQFF

SEQ ID NO: 400991 - protein, 13 aa, Homo sapiens
  CDR3 for alpha chain variable domain of TCR clone 200496 (TRAV35, TRAJ43)
CAGYPYNNNDMRF

SEQ ID NO: 400992 - protein, 15 aa, Homo sapiens
  CDR3 for beta chain variable domain of TCR clone 200496 (TRBV9, TRBJ1-6)
CASSVAGTGDSPLHF

SEQ ID NO: 400993 - protein, 13 aa, Homo sapiens
  CDR3 for alpha chain variable domain of TCR clone 200497 (TRAV8-6, TRAJ21)
CDVSPSSLNKFYF

SEQ ID NO: 400994 - protein, 14 aa, Homo sapiens
  CDR3 for beta chain variable domain of TCR clone 200497 (TRBV7-9, TRBJ2-5)
CASSLDTAQENQYF

SEQ ID NO: 400995 - protein, 14 aa, Homo sapiens
  CDR3 for alpha chain variable domain of TCR clone 200498 (TRAV3, TRAJ9)
CAVTLNTGGFKTIF

SEQ ID NO: 400996 - protein, 16 aa, Homo sapiens
  CDR3 for beta chain variable domain of TCR clone 200498 (TRBV12-5, TRBJ2-5)
CASGPRTSGNQETQYF

SEQ ID NO: 400997 - protein, 14 aa, Homo sapiens
  CDR3 for alpha chain variable domain of TCR clone 200499 (TRAV12-2, TRAJ40)
CAVKIPSGTYKYIF

SEQ ID NO: 400998 - protein, 14 aa, Homo sapiens
  CDR3 for beta chain variable domain of TCR clone 200499 (TRBV20-1, TRBJ1-1)
CSAQTRIGGTEPFF

SEQ ID NO: 400999 - protein, 15 aa, Homo sapiens
  CDR3 for alpha chain variable domain of TCR clone 200500 (TRAV4, TRAJ5)
CHVGAMDTGRRALTF

SEQ ID NO: 401000 - protein, 14 aa, Homo sapiens
  CDR3 for beta chain variable domain of TCR clone 200500 (TRBV4-2, TRBJ2-1)
CASGLDRAYNEQFF

SEQ ID NO: 401001 - protein, 14 aa, Homo sapiens
  CDR3 for alpha chain variable domain of TCR clone 200501 (TRAV12-2, TRAJ13)
CAVNPSGGNQKVTF

SEQ ID NO: 401002 - protein, 12 aa, Homo sapiens
  CDR3 for beta chain variable domain of TCR clone 200501 (TRBV29-1, TRBJ2-3)
CSVTGGADTQYF

SEQ ID NO: 401003 - protein, 14 aa, Homo sapiens
  CDR3 for alpha chain variable domain of TCR clone 200502 (TRAV8-3, TRAJ4)
CAVGAAGGYNKLFF

SEQ ID NO: 401004 - protein, 16 aa, Homo sapiens
  CDR3 for beta chain variable domain of TCR clone 200502 (TRBV13, TRBJ2-2)
CASSPRTGEHTGELFF

SEQ ID NO: 401005 - protein, 17 aa, Homo sapiens
  CDR3 for alpha chain variable domain of TCR clone 200503 (TRAV13-1, TRAJ52)
CAASSGAGGTSYGKLTF

SEQ ID NO: 401006 - protein, 14 aa, Homo sapiens
  CDR3 for beta chain variable domain of TCR clone 200503 (TRBV7-2, TRBJ1-2)
CASSQTGSTYGYTF

SEQ ID NO: 401007 - protein, 12 aa, Homo sapiens
  CDR3 for alpha chain variable domain of TCR clone 200504 (TRAV12-1, TRAJ31)
CVVNDNNARLMF

SEQ ID NO: 401008 - protein, 14 aa, Homo sapiens
  CDR3 for beta chain variable domain of TCR clone 200504 (TRBV19, TRBJ2-2)
CASSIAGAFGELFF

SEQ ID NO: 401009 - protein, 14 aa, Homo sapiens
  CDR3 for alpha chain variable domain of TCR clone 200505 (TRAV12-2, TRAJ39)
CAVKGGNAGNMLTV

SEQ ID NO: 401010 - protein, 13 aa, Homo sapiens
  CDR3 for beta chain variable domain of TCR clone 200505 (TRBV12-4, TRBJ1-1)
CASSSGRGTEAFF

SEQ ID NO: 401011 - protein, 14 aa, Homo sapiens
  CDR3 for alpha chain variable domain of TCR clone 200506 (TRAV1-2, TRAJ8)
CAVREDTGFQKLVF

SEQ ID NO: 401012 - protein, 13 aa, Homo sapiens
  CDR3 for beta chain variable domain of TCR clone 200506 (TRBV12-4, TRBJ1-5)
RASSPDRAQPQHF

SEQ ID NO: 401013 - protein, 11 aa, Homo sapiens
  CDR3 for alpha chain variable domain of TCR clone 200507 (TRAV12-1, TRAJ40)
CVVPGTYKYIF

SEQ ID NO: 401014 - protein, 12 aa, Homo sapiens
  CDR3 for beta chain variable domain of TCR clone 200507 (TRBV5-1, TRBJ1-1)
CASSLTGAEAFF

SEQ ID NO: 401015 - protein, 13 aa, Homo sapiens
  CDR3 for alpha chain variable domain of TCR clone 200508 (TRAV1-1, TRAJ31)
CASYLNNNVRLMF

SEQ ID NO: 401016 - protein, 13 aa, Homo sapiens
  CDR3 for beta chain variable domain of TCR clone 200508 (TRBV15, TRBJ1-6)
CATSGGLNSPLHF

SEQ ID NO: 401017 - protein, 13 aa, Homo sapiens
  CDR3 for alpha chain variable domain of TCR clone 200509 (TRAV12-3, TRAJ56)
CALATGANSKLTF

SEQ ID NO: 401018 - protein, 12 aa, Homo sapiens
  CDR3 for beta chain variable domain of TCR clone 200509 (TRBV10-2, TRBJ2-3)
CASSPESDTHYF

SEQ ID NO: 401019 - protein, 16 aa, Homo sapiens
  CDR3 for alpha chain variable domain of TCR clone 200510 (TRAV3, TRAJ37)
CAVRGKGSGNTGKLIF

SEQ ID NO: 401020 - protein, 14 aa, Homo sapiens
  CDR3 for beta chain variable domain of TCR clone 200510 (TRBV20-1, TRBJ2-4)
CSASGRVGENIQYF

SEQ ID NO: 401021 - protein, 21 aa, Homo sapiens
  CDR3 for alpha chain variable domain of TCR clone 200511 (TRAV12-1, TRAJ32)
SSVIQPPTSMNYGGATNKLIF

SEQ ID NO: 401022 - protein, 13 aa, Homo sapiens
  CDR3 for beta chain variable domain of TCR clone 200511 (TRBV10-3, TRBJ2-7)
CASKLAVNYEQYF

SEQ ID NO: 401023 - protein, 14 aa, Homo sapiens
  CDR3 for alpha chain variable domain of TCR clone 200512 (TRAV12-1, TRAJ17)
CVVNYKAAGNKLTF

SEQ ID NO: 401024 - protein, 17 aa, Homo sapiens
  CDR3 for beta chain variable domain of TCR clone 200512 (TRBV20-1, TRBJ2-1)
CSASSSGLAGCYTEQFF

SEQ ID NO: 401025 - protein, 13 aa, Homo sapiens
  CDR3 for alpha chain variable domain of TCR clone 200513 (TRAV3, TRAJ27)
CAVRPLGAGKSTF

SEQ ID NO: 401026 - protein, 15 aa, Homo sapiens
  CDR3 for beta chain variable domain of TCR clone 200513 (TRBV7-2, TRBJ2-3)
CASSLVVRGPDTQYF

SEQ ID NO: 401027 - protein, 14 aa, Homo sapiens
  CDR3 for alpha chain variable domain of TCR clone 200514 (TRAV13-1, TRAJ48)
CAASRSFGNEKLTF

SEQ ID NO: 401028 - protein, 17 aa, Homo sapiens
  CDR3 for beta chain variable domain of TCR clone 200514 (TRBV11-3, TRBJ2-6)
CASKWGQGLSGANVLTF

SEQ ID NO: 401029 - protein, 13 aa, Homo sapiens
  CDR3 for alpha chain variable domain of TCR clone 200515 (TRAV3, TRAJ30)
CAVRDRGDDKNIF

SEQ ID NO: 401030 - protein, 16 aa, Homo sapiens
  CDR3 for beta chain variable domain of TCR clone 200515 (TRBV12-5, TRBJ2-5)
CASGPRTSGNQETQYF

SEQ ID NO: 401031 - protein, 20 aa, Homo sapiens
  CDR3 for alpha chain variable domain of TCR clone 200516 (TRAV1-1, TRAJ39)
CLLLLRCESSAYHAGNMLTF

SEQ ID NO: 401032 - protein, 13 aa, Homo sapiens
  CDR3 for beta chain variable domain of TCR clone 200516 (TRBV12-4, TRBJ1-5)
CASSPDRAQPQHF

SEQ ID NO: 401033 - protein, 15 aa, Homo sapiens
  CDR3 for alpha chain variable domain of TCR clone 200517 (TRAV13-1, TRAJ5)
CAASRADTGRRALTF

SEQ ID NO: 401034 - protein, 15 aa, Homo sapiens
  CDR3 for beta chain variable domain of TCR clone 200517 (TRBV19, TRBJ2-1)
CASSMGWNSNNEQFF

SEQ ID NO: 401035 - protein, 14 aa, Homo sapiens
  CDR3 for alpha chain variable domain of TCR clone 200518 (TRAV35, TRAJ50)
CAGHRKTTYDKVIF

SEQ ID NO: 401036 - protein, 15 aa, Homo sapiens
  CDR3 for beta chain variable domain of TCR clone 200518 (TRBV6-3, TRBJ2-7)
CASSSPGTVFYEQYF

SEQ ID NO: 401037 - protein, 17 aa, Homo sapiens
  CDR3 for alpha chain variable domain of TCR clone 200519 (TRAV3, TRAJ12)
CAVRDGGRMDSRSKLIF

SEQ ID NO: 401038 - protein, 14 aa, Homo sapiens
  CDR3 for beta chain variable domain of TCR clone 200519 (TRBV7-9, TRBJ1-2)
CASSRQGANYGYTF

SEQ ID NO: 401039 - protein, 14 aa, Homo sapiens
  CDR3 for alpha chain variable domain of TCR clone 200520 (TRAV13-1, TRAJ44)
CAAKATGTASKLTF

SEQ ID NO: 401040 - protein, 15 aa, Homo sapiens
  CDR3 for beta chain variable domain of TCR clone 200520 (TRBV28, TRBJ2-4)
CASRGLAGVKNIQYF

SEQ ID NO: 401041 - protein, 14 aa, Homo sapiens
  CDR3 for alpha chain variable domain of TCR clone 200521 (TRAV21, TRAJ21)
CAVKGFGNFNKFYF

SEQ ID NO: 401042 - protein, 16 aa, Homo sapiens
  CDR3 for beta chain variable domain of TCR clone 200521 (TRBV12-4, TRBJ1-5)
CASRQGSGLGNQPRHF

SEQ ID NO: 401043 - protein, 14 aa, Homo sapiens
  CDR3 for alpha chain variable domain of TCR clone 200522 (TRAV12-2, TRAJ17)
CAVLFKAAANKLTF

SEQ ID NO: 401044 - protein, 14 aa, Homo sapiens
  CDR3 for beta chain variable domain of TCR clone 200522 (TRBV29-1, TRBJ2-1)
CSVGAVPGGNEHFF

SEQ ID NO: 401045 - protein, 14 aa, Homo sapiens
  CDR3 for alpha chain variable domain of TCR clone 200523 (TRAV12-2, TRAJ44)
CAVNPAGTASKLTF

SEQ ID NO: 401046 - protein, 11 aa, Homo sapiens
  CDR3 for beta chain variable domain of TCR clone 200523 (TRBV7-2, TRBJ2-3)
CASSLGDTQYF

SEQ ID NO: 401047 - protein, 14 aa, Homo sapiens
  CDR3 for alpha chain variable domain of TCR clone 200524 (TRAV8-2, TRAJ4)
CVVSHSGRYNKLIF

SEQ ID NO: 401048 - protein, 15 aa, Homo sapiens
  CDR3 for beta chain variable domain of TCR clone 200524 (TRBV4-1, TRBJ1-4)
CASSDTGGTNEKLFF

SEQ ID NO: 401049 - protein, 13 aa, Homo sapiens
  CDR3 for alpha chain variable domain of TCR clone 200525 (TRAV2, TRAJ29)
CAAQNSGNTPLVF

SEQ ID NO: 401050 - protein, 16 aa, Homo sapiens
  CDR3 for beta chain variable domain of TCR clone 200525 (TRBV12-5, TRBJ2-5)
CASGPRTSGNQETQYF

SEQ ID NO: 401051 - protein, 14 aa, Homo sapiens
  CDR3 for alpha chain variable domain of TCR clone 200526 (TRAV23/DV6, TRAJ37)
CAASTSSNTGKPIF

SEQ ID NO: 401052 - protein, 13 aa, Homo sapiens
  CDR3 for beta chain variable domain of TCR clone 200526 (TRBV7-7, TRBJ1-1)
CASSLGANTKAFF

SEQ ID NO: 401053 - protein, 13 aa, Homo sapiens
  CDR3 for alpha chain variable domain of TCR clone 200527 (TRAV27, TRAJ45)
CRSSGGGADGLTF

SEQ ID NO: 401054 - protein, 17 aa, Homo sapiens
  CDR3 for beta chain variable domain of TCR clone 200527 (TRBV11-2, TRBJ2-1)
CASSLYPPGDEYNEQFF

SEQ ID NO: 401055 - protein, 14 aa, Homo sapiens
  CDR3 for alpha chain variable domain of TCR clone 200528 (TRAV8-4, TRAJ5)
SAVSTDTGRRALTF

SEQ ID NO: 401056 - protein, 14 aa, Homo sapiens
  CDR3 for beta chain variable domain of TCR clone 200528 (TRBV5-1, TRBJ2-2)
CASSLGGGSGELFF

SEQ ID NO: 401057 - protein, 14 aa, Homo sapiens
  CDR3 for alpha chain variable domain of TCR clone 200529 (TRAV3, TRAJ34)
CAVRDINNHDKLIF

SEQ ID NO: 401058 - protein, 14 aa, Homo sapiens
  CDR3 for beta chain variable domain of TCR clone 200529 (TRBV7-2, TRBJ2-2)
CASSLGQNTGELFF

SEQ ID NO: 401059 - protein, 16 aa, Homo sapiens
  CDR3 for alpha chain variable domain of TCR clone 200530 (TRAV3, TRAJ37)
YAVRVRGSGNTGKLIF

SEQ ID NO: 401060 - protein, 16 aa, Homo sapiens
  CDR3 for beta chain variable domain of TCR clone 200530 (TRBV11-2, TRBJ2-7)
CASSPTTGGVSYEQYF

SEQ ID NO: 401061 - protein, 16 aa, Homo sapiens
  CDR3 for alpha chain variable domain of TCR clone 200531 (TRAV12-1, TRAJ12)
CVVNTLLMDSSYKLIF

SEQ ID NO: 401062 - protein, 14 aa, Homo sapiens
  CDR3 for beta chain variable domain of TCR clone 200531 (TRBV12-5, TRBJ2-5)
CASGSRTHQETQYF

SEQ ID NO: 401063 - protein, 14 aa, Homo sapiens
  CDR3 for alpha chain variable domain of TCR clone 200532 (TRAV12-2, TRAJ45)
CAVNIGGGADGLTF

SEQ ID NO: 401064 - protein, 13 aa, Homo sapiens
  CDR3 for beta chain variable domain of TCR clone 200532 (TRBV28, TRBJ2-5)
CASSFAGGETQYF

SEQ ID NO: 401065 - protein, 17 aa, Homo sapiens
  CDR3 for alpha chain variable domain of TCR clone 200533 (TRAV13-1, TRAJ31)
CAPRDRLMFGDGTQPVV

SEQ ID NO: 401066 - protein, 12 aa, Homo sapiens
  CDR3 for beta chain variable domain of TCR clone 200533 (TRBV7-9, TRBJ2-7)
CASSVEGYEQYF

SEQ ID NO: 401067 - protein, 15 aa, Homo sapiens
  CDR3 for alpha chain variable domain of TCR clone 200534 (TRAV13-1, TRAJ5)
WAASKADTGRRALTF

SEQ ID NO: 401068 - protein, 15 aa, Homo sapiens
  CDR3 for beta chain variable domain of TCR clone 200534 (TRBV19, TRBJ2-1)
CASSMGWNSNNEQFF

SEQ ID NO: 401069 - protein, 15 aa, Homo sapiens
  CDR3 for alpha chain variable domain of TCR clone 200535 (TRAV3, TRAJ22)
CAVRDRGGSARQLTL

SEQ ID NO: 401070 - protein, 14 aa, Homo sapiens
  CDR3 for beta chain variable domain of TCR clone 200535 (TRBV20-1, TRBJ1-1)
CSAQTRIGGTEAFF

SEQ ID NO: 401071 - protein, 12 aa, Homo sapiens
  CDR3 for alpha chain variable domain of TCR clone 200536 (TRAV17, TRAJ57)
CATDGGSEKLVF

SEQ ID NO: 401072 - protein, 13 aa, Homo sapiens
  CDR3 for beta chain variable domain of TCR clone 200536 (TRBV7-9, TRBJ2-7)
CASSFAGASEQYF

SEQ ID NO: 401073 - protein, 19 aa, Homo sapiens
  CDR3 for alpha chain variable domain of TCR clone 200537 (TRAV26-1, TRAJ52)
CIVRAHRNAGGTIYGKLTF

SEQ ID NO: 401074 - protein, 15 aa, Homo sapiens
  CDR3 for beta chain variable domain of TCR clone 200537 (TRBV29-1, TRBJ2-1)
CSGRDRKSAYNEQFF

SEQ ID NO: 401075 - protein, 13 aa, Homo sapiens
  CDR3 for alpha chain variable domain of TCR clone 200538 (TRAV12-1, TRAJ9)
CVVLNTGGFKTIF

SEQ ID NO: 401076 - protein, 13 aa, Homo sapiens
  CDR3 for beta chain variable domain of TCR clone 200538 (TRBV20-1, TRBJ1-1)
CSARGGGNTEASF

SEQ ID NO: 401077 - protein, 14 aa, Homo sapiens
  CDR3 for alpha chain variable domain of TCR clone 200539 (TRAV9-2, TRAJ39)
CALYIYNAGNMLTF

SEQ ID NO: 401078 - protein, 15 aa, Homo sapiens
  CDR3 for beta chain variable domain of TCR clone 200539 (TRBV5-1, TRBJ2-3)
CASSSTSGSTDTQYF

SEQ ID NO: 401079 - protein, 13 aa, Homo sapiens
  CDR3 for alpha chain variable domain of TCR clone 200540 (TRAV21, TRAJ20)
CAVGLRVDYKLSF

SEQ ID NO: 401080 - protein, 15 aa, Homo sapiens
  CDR3 for beta chain variable domain of TCR clone 200540 (TRBV7-9, TRBJ1-5)
CASSQGHQPNQPQRF

SEQ ID NO: 401081 - protein, 13 aa, Homo sapiens
  CDR3 for alpha chain variable domain of TCR clone 200541 (TRAV12-3, TRAJ26)
CAMSEPRGQNFVF

SEQ ID NO: 401082 - protein, 14 aa, Homo sapiens
  CDR3 for beta chain variable domain of TCR clone 200541 (TRBV7-8, TRBJ2-7)
CASSPGLADYEQYF

SEQ ID NO: 401083 - protein, 17 aa, Homo sapiens
  CDR3 for alpha chain variable domain of TCR clone 200542 (TRAV3, TRAJ6)
CAVRDGPRAGGSNIPTL

SEQ ID NO: 401084 - protein, 13 aa, Homo sapiens
  CDR3 for beta chain variable domain of TCR clone 200542 (TRBV20-1, TRBJ1-6)
CSAPLGVGSPLHF

SEQ ID NO: 401085 - protein, 18 aa, Homo sapiens
  CDR3 for alpha chain variable domain of TCR clone 200543 (TRAV21, TRAJ52)
CAVRPSPAGGTSYGKLTF

SEQ ID NO: 401086 - protein, 16 aa, Homo sapiens
  CDR3 for beta chain variable domain of TCR clone 200543 (TRBV7-9, TRBJ1-2)
CASNPGGGAINYGYTF

SEQ ID NO: 401087 - protein, 17 aa, Homo sapiens
  CDR3 for alpha chain variable domain of TCR clone 200544 (TRAV27, TRAJ42)
CAERVIYYGGSQGNLIF

SEQ ID NO: 401088 - protein, 16 aa, Homo sapiens
  CDR3 for beta chain variable domain of TCR clone 200544 (TRBV13, TRBJ2-2)
CASSPRTGEHTGELFF

SEQ ID NO: 401089 - protein, 12 aa, Homo sapiens
  CDR3 for alpha chain variable domain of TCR clone 200545 (TRAV8-3, TRAJ26)
CAGDNYGQNFVF

SEQ ID NO: 401090 - protein, 17 aa, Homo sapiens
  CDR3 for beta chain variable domain of TCR clone 200545 (TRBV7-8, TRBJ2-6)
CASSAGTGGAGSNVLTF

SEQ ID NO: 401091 - protein, 14 aa, Homo sapiens
  CDR3 for alpha chain variable domain of TCR clone 200546 (TRAV2, TRAJ37)
CAVDFTSYTGKLIF

SEQ ID NO: 401092 - protein, 14 aa, Homo sapiens
  CDR3 for beta chain variable domain of TCR clone 200546 (TRBV6-1, TRBJ1-3)
CASVQGGGGNTIYF

SEQ ID NO: 401093 - protein, 15 aa, Homo sapiens
  CDR3 for alpha chain variable domain of TCR clone 200547 (TRAV8-3, TRAJ45)
CASSYSGGGDDGLTF

SEQ ID NO: 401094 - protein, 13 aa, Homo sapiens
  CDR3 for beta chain variable domain of TCR clone 200547 (TRBV10-3, TRBJ2-7)
CAFKLAVNYEQYF

SEQ ID NO: 401095 - protein, 22 aa, Homo sapiens
  CDR3 for alpha chain variable domain of TCR clone 200548 (TRAV4, )
CLVGPHNYDIQNPDPAVYQLTD

SEQ ID NO: 401096 - protein, 17 aa, Homo sapiens
  CDR3 for beta chain variable domain of TCR clone 200548 (TRBV24-1, TRBJ2-1)
CATSDVSTSGTYNEQFF

SEQ ID NO: 401097 - protein, 15 aa, Homo sapiens
  CDR3 for alpha chain variable domain of TCR clone 200549 (TRAV1-2, TRAJ10)
CAVRGFPGGGNKLTF

SEQ ID NO: 401098 - protein, 16 aa, Homo sapiens
  CDR3 for beta chain variable domain of TCR clone 200549 (TRBV4-1, TRBJ2-1)
CASSQEAGQGSDEQFF

SEQ ID NO: 401099 - protein, 15 aa, Homo sapiens
  CDR3 for alpha chain variable domain of TCR clone 200550 (TRAV8-3, TRAJ45)
CASSYSGGGVDGFTF

SEQ ID NO: 401100 - protein, 13 aa, Homo sapiens
  CDR3 for beta chain variable domain of TCR clone 200550 (TRBV10-3, TRBJ2-7)
CASKLAVNYEQYF

SEQ ID NO: 401101 - protein, 15 aa, Homo sapiens
  CDR3 for alpha chain variable domain of TCR clone 200551 (TRAV13-1, TRAJ18)
CAASGGGSTLGRLNF

SEQ ID NO: 401102 - protein, 13 aa, Homo sapiens
  CDR3 for beta chain variable domain of TCR clone 200551 (TRBV18, TRBJ2-1)
CASGLASNNEQFF

SEQ ID NO: 401103 - protein, 14 aa, Homo sapiens
  CDR3 for alpha chain variable domain of TCR clone 200552 (TRAV13-1, TRAJ10)
CAASSPGGGNKLTF

SEQ ID NO: 401104 - protein, 14 aa, Homo sapiens
  CDR3 for beta chain variable domain of TCR clone 200552 (TRBV7-2, TRBJ2-7)
CASSPKTSFYEQYF

SEQ ID NO: 401105 - protein, 12 aa, Homo sapiens
  CDR3 for alpha chain variable domain of TCR clone 200553 (TRAV35, TRAJ39)
LAPNNAGNMLTF

SEQ ID NO: 401106 - protein, 14 aa, Homo sapiens
  CDR3 for beta chain variable domain of TCR clone 200553 (TRBV19, TRBJ2-1)
CASSPGLAPNEQFF

SEQ ID NO: 401107 - protein, 16 aa, Homo sapiens
  CDR3 for alpha chain variable domain of TCR clone 200554 (TRAV3, TRAJ5)
CAVRNLMDTGRRALTF

SEQ ID NO: 401108 - protein, 16 aa, Homo sapiens
  CDR3 for beta chain variable domain of TCR clone 200554 (TRBV4-2, TRBJ2-7)
CSSSQEGLANSYEQYF

SEQ ID NO: 401109 - protein, 16 aa, Homo sapiens
  CDR3 for alpha chain variable domain of TCR clone 200555 (TRAV20, TRAJ54)
CAVQRVLIQGAQKLVF

SEQ ID NO: 401110 - protein, 13 aa, Homo sapiens
  CDR3 for beta chain variable domain of TCR clone 200555 (TRBV3-1, TRBJ1-5)
CAITRRDGQPQHF

SEQ ID NO: 401111 - protein, 15 aa, Homo sapiens
  CDR3 for alpha chain variable domain of TCR clone 200556 (TRAV23/DV6, TRAJ28)
CAALLAYSGAGSYQL

SEQ ID NO: 401112 - protein, 13 aa, Homo sapiens
  CDR3 for beta chain variable domain of TCR clone 200556 (TRBV4-2, TRBJ2-3)
CASSQGNTDKQYF

SEQ ID NO: 401113 - protein, 14 aa, Homo sapiens
  CDR3 for alpha chain variable domain of TCR clone 200557 (TRAV38-1, TRAJ40)
CALRPTSGTYKYIF

SEQ ID NO: 401114 - protein, 14 aa, Homo sapiens
  CDR3 for beta chain variable domain of TCR clone 200557 (TRBV7-3, TRBJ2-1)
CASSLAGGTNEQFF

SEQ ID NO: 401115 - protein, 12 aa, Homo sapiens
  CDR3 for alpha chain variable domain of TCR clone 200558 (TRAV8-3, TRAJ20)
CAVGASDYELSF

SEQ ID NO: 401116 - protein, 16 aa, Homo sapiens
  CDR3 for beta chain variable domain of TCR clone 200558 (TRBV19, TRBJ2-2)
CASRSPGTGATGELFS

SEQ ID NO: 401117 - protein, 15 aa, Homo sapiens
  CDR3 for alpha chain variable domain of TCR clone 200559 (TRAV21, TRAJ53)
CATLNSGGSNCKLTF

SEQ ID NO: 401118 - protein, 14 aa, Homo sapiens
  CDR3 for beta chain variable domain of TCR clone 200559 (TRBV7-2, TRBJ2-7)
CASRSQGAAYEQYF

SEQ ID NO: 401119 - protein, 15 aa, Homo sapiens
  CDR3 for alpha chain variable domain of TCR clone 200560 (TRAV2, TRAJ9)
CAVEDRGTGCVKTIF

SEQ ID NO: 401120 - protein, 16 aa, Homo sapiens
  CDR3 for beta chain variable domain of TCR clone 200560 (TRBV24-1, TRBJ2-3)
CATSDPGTGATDTQYF

SEQ ID NO: 401121 - protein, 12 aa, Homo sapiens
  CDR3 for alpha chain variable domain of TCR clone 200561 (TRAV12-2, TRAJ24)
CAVTPADSWGEI

SEQ ID NO: 401122 - protein, 15 aa, Homo sapiens
  CDR3 for beta chain variable domain of TCR clone 200561 (TRBV12-4, TRBJ2-5)
CASSPPTGLQETQYF

SEQ ID NO: 401123 - protein, 15 aa, Homo sapiens
  CDR3 for alpha chain variable domain of TCR clone 200562 (TRAV20, TRAJ58)
CAVQDLETSGSRLTF

SEQ ID NO: 401124 - protein, 12 aa, Homo sapiens
  CDR3 for beta chain variable domain of TCR clone 200562 (TRBV9, TRBJ2-2)
CASSSRTRELFF

SEQ ID NO: 401125 - protein, 14 aa, Homo sapiens
  CDR3 for alpha chain variable domain of TCR clone 200563 (TRAV38-2/DV8, TRAJ42)
CAYPERGSQGNLIF

SEQ ID NO: 401126 - protein, 15 aa, Homo sapiens
  CDR3 for beta chain variable domain of TCR clone 200563 (TRBV19, TRBJ2-1)
CASSTGTSSYNEQFF

SEQ ID NO: 401127 - protein, 11 aa, Homo sapiens
  CDR3 for alpha chain variable domain of TCR clone 200564 (TRAV21, TRAJ31)
CAVRNNARLMS

SEQ ID NO: 401128 - protein, 17 aa, Homo sapiens
  CDR3 for beta chain variable domain of TCR clone 200564 (TRBV4-3, TRBJ1-2)
CASSSRLQAGGSVGYTF

SEQ ID NO: 401129 - protein, 14 aa, Homo sapiens
  CDR3 for alpha chain variable domain of TCR clone 200565 (TRAV8-4, TRAJ4)
CAVSPSGGYNKLIF

SEQ ID NO: 401130 - protein, 10 aa, Homo sapiens
  CDR3 for beta chain variable domain of TCR clone 200565 (TRBV7-8, TRBJ2-3)
SADSGGAQYF

SEQ ID NO: 401131 - protein, 10 aa, Homo sapiens
  CDR3 for alpha chain variable domain of TCR clone 200566 (TRAV16, TRAJ22)
SAMYLRQLTF

SEQ ID NO: 401132 - protein, 15 aa, Homo sapiens
  CDR3 for beta chain variable domain of TCR clone 200566 (TRBV29-1, TRBJ2-7)
CSVEFFDRGSYEQYF

SEQ ID NO: 401133 - protein, 13 aa, Homo sapiens
  CDR3 for alpha chain variable domain of TCR clone 200567 (TRAV8-3, TRAJ6)
CAARRGGSYIPTF

SEQ ID NO: 401134 - protein, 15 aa, Homo sapiens
  CDR3 for beta chain variable domain of TCR clone 200567 (TRBV4-1, TRBJ2-3)
CASSNIAGGRDTQYF

SEQ ID NO: 401135 - protein, 13 aa, Homo sapiens
  CDR3 for alpha chain variable domain of TCR clone 200568 (TRAV30, TRAJ24)
CGTVTDSWGKLQF

SEQ ID NO: 401136 - protein, 16 aa, Homo sapiens
  CDR3 for beta chain variable domain of TCR clone 200568 (TRBV28, TRBJ2-7)
CASSLFFETGGPEQYF

SEQ ID NO: 401137 - protein, 13 aa, Homo sapiens
  CDR3 for alpha chain variable domain of TCR clone 200569 (TRAV2, TRAJ15)
CAVASQAGTALIF

SEQ ID NO: 401138 - protein, 11 aa, Homo sapiens
  CDR3 for beta chain variable domain of TCR clone 200569 (TRBV19, TRBJ1-2)
CASSISSGYTF

SEQ ID NO: 401139 - protein, 10 aa, Homo sapiens
  CDR3 for alpha chain variable domain of TCR clone 200570 (TRAV1-2, TRAJ34)
CAVNTDKLIF

SEQ ID NO: 401140 - protein, 13 aa, Homo sapiens
  CDR3 for beta chain variable domain of TCR clone 200570 (TRBV10-1, TRBJ2-1)
CASSAGPDNEHFF

SEQ ID NO: 401141 - protein, 16 aa, Homo sapiens
  CDR3 for alpha chain variable domain of TCR clone 200571 (TRAV12-3, TRAJ53)
CAMSPGSGGRSYKLTF

SEQ ID NO: 401142 - protein, 11 aa, Homo sapiens
  CDR3 for beta chain variable domain of TCR clone 200571 (TRBV29-1, TRBJ2-5)
CSEDRTGTQYF

SEQ ID NO: 401143 - protein, 12 aa, Homo sapiens
  CDR3 for alpha chain variable domain of TCR clone 200572 (TRAV12-3, TRAJ17)
CAMTLTGNKITF

SEQ ID NO: 401144 - protein, 15 aa, Homo sapiens
  CDR3 for beta chain variable domain of TCR clone 200572 (TRBV20-1, TRBJ2-7)
CSARDRVSGMDEQCF

SEQ ID NO: 401145 - protein, 13 aa, Homo sapiens
  CDR3 for alpha chain variable domain of TCR clone 200573 (TRAV12-3, TRAJ13)
CAMTSGGYQKVTF

SEQ ID NO: 401146 - protein, 13 aa, Homo sapiens
  CDR3 for beta chain variable domain of TCR clone 200573 (TRBV20-1, TRBJ2-2)
CSALSGGAGKLFF

SEQ ID NO: 401147 - protein, 13 aa, Homo sapiens
  CDR3 for alpha chain variable domain of TCR clone 200574 (TRAV3, TRAJ15)
CAVRDQAGTALIF

SEQ ID NO: 401148 - protein, 14 aa, Homo sapiens
  CDR3 for beta chain variable domain of TCR clone 200574 (TRBV7-9, TRBJ2-4)
CASSLAMGGNIQYF

SEQ ID NO: 401149 - protein, 12 aa, Homo sapiens
  CDR3 for alpha chain variable domain of TCR clone 200575 (TRAV12-3, TRAJ17)
CAMTLTGNKLTF

SEQ ID NO: 401150 - protein, 15 aa, Homo sapiens
  CDR3 for beta chain variable domain of TCR clone 200575 (TRBV6-3, TRBJ2-7)
CASSSPGTVFYEQYI

SEQ ID NO: 401151 - protein, 12 aa, Homo sapiens
  CDR3 for alpha chain variable domain of TCR clone 200576 (TRAV12-3, TRAJ20)
CAMVRGDYKLSF

SEQ ID NO: 401152 - protein, 14 aa, Homo sapiens
  CDR3 for beta chain variable domain of TCR clone 200576 (TRBV11-2, TRBJ2-3)
CASSLGGGANTQYF

SEQ ID NO: 401153 - protein, 14 aa, Homo sapiens
  CDR3 for alpha chain variable domain of TCR clone 200577 (TRAV13-1, TRAJ4)
FAASLSGGYNKLIF

SEQ ID NO: 401154 - protein, 12 aa, Homo sapiens
  CDR3 for beta chain variable domain of TCR clone 200577 (TRBV20-1, TRBJ2-5)
CRVAGAGETQYF

SEQ ID NO: 401155 - protein, 14 aa, Homo sapiens
  CDR3 for alpha chain variable domain of TCR clone 200578 (TRAV8-4, TRAJ45)
CAPGGGGGADGLTC

SEQ ID NO: 401156 - protein, 20 aa, Homo sapiens
  CDR3 for beta chain variable domain of TCR clone 200578 (TRBV4-3, TRBJ2-3)
CASSPRVEMRASGRPDTQYF

SEQ ID NO: 401157 - protein, 14 aa, Homo sapiens
  CDR3 for alpha chain variable domain of TCR clone 200579 (TRAV21, TRAJ40)
CAVVWTSGTYKYIF

SEQ ID NO: 401158 - protein, 12 aa, Homo sapiens
  CDR3 for beta chain variable domain of TCR clone 200579 (TRBV28, TRBJ2-6)
CAIQPGANVLTF

SEQ ID NO: 401159 - protein, 12 aa, Homo sapiens
  CDR3 for alpha chain variable domain of TCR clone 200580 (TRAV12-3, TRAJ20)
CAMVRGDYKLSF

SEQ ID NO: 401160 - protein, 13 aa, Homo sapiens
  CDR3 for beta chain variable domain of TCR clone 200580 (TRBV23-1, TRBJ1-4)
CASRGKFNETLFF

SEQ ID NO: 401161 - protein, 15 aa, Homo sapiens
  CDR3 for alpha chain variable domain of TCR clone 200581 (TRAV8-3, TRAJ11)
CAVGLLNSGYSTLTF

SEQ ID NO: 401162 - protein, 23 aa, Homo sapiens
  CDR3 for beta chain variable domain of TCR clone 200581 (TRBV7-9, TRBJ1-2)
EAQLEKSRLLSDRFPSGEDGYTF

SEQ ID NO: 401163 - protein, 16 aa, Homo sapiens
  CDR3 for alpha chain variable domain of TCR clone 200582 (TRAV30, TRAJ24)
CGTEIVDADGWGKFLF

SEQ ID NO: 401164 - protein, 12 aa, Homo sapiens
  CDR3 for beta chain variable domain of TCR clone 200582 (TRBV27, TRBJ2-1)
CASRGFYNEQFF

SEQ ID NO: 401165 - protein, 14 aa, Homo sapiens
  CDR3 for alpha chain variable domain of TCR clone 200583 (TRAV12-2, TRAJ13)
CAVKKTGGYQKVTF

SEQ ID NO: 401166 - protein, 15 aa, Homo sapiens
  CDR3 for beta chain variable domain of TCR clone 200583 (TRBV6-5, TRBJ2-6)
CASSQWEAGANVLTF

SEQ ID NO: 401167 - protein, 12 aa, Homo sapiens
  CDR3 for alpha chain variable domain of TCR clone 200584 (TRAV20, TRAJ24)
CAVYNSWGKLQF

SEQ ID NO: 401168 - protein, 15 aa, Homo sapiens
  CDR3 for beta chain variable domain of TCR clone 200584 (TRBV20-1, TRBJ2-5)
CSARVRPSGRETQYF

SEQ ID NO: 401169 - protein, 14 aa, Homo sapiens
  CDR3 for alpha chain variable domain of TCR clone 200585 (TRAV8-6, TRAJ5)
CAVSVDKGRRALTF

SEQ ID NO: 401170 - protein, 11 aa, Homo sapiens
  CDR3 for beta chain variable domain of TCR clone 200585 (TRBV7-3, TRBJ2-5)
CASSLSETQYF

SEQ ID NO: 401171 - protein, 15 aa, Homo sapiens
  CDR3 for alpha chain variable domain of TCR clone 200586 (TRAV3, TRAJ4)
CAVRDGTGGYNKLIF

SEQ ID NO: 401172 - protein, 16 aa, Homo sapiens
  CDR3 for beta chain variable domain of TCR clone 200586 (TRBV27, TRBJ2-2)
CVSSSSGVSNTGELFF

SEQ ID NO: 401173 - protein, 13 aa, Homo sapiens
  CDR3 for alpha chain variable domain of TCR clone 200587 (TRAV16, TRAJ58)
CALRWASGSRLTF

SEQ ID NO: 401174 - protein, 16 aa, Homo sapiens
  CDR3 for beta chain variable domain of TCR clone 200587 (TRBV18, TRBJ2-2)
CASSPPRTANTGELLF

SEQ ID NO: 401175 - protein, 18 aa, Homo sapiens
  CDR3 for alpha chain variable domain of TCR clone 200588 (TRAV21, TRAJ52)
CAVRPSPAGGTSYEKLTF

SEQ ID NO: 401176 - protein, 12 aa, Homo sapiens
  CDR3 for beta chain variable domain of TCR clone 200588 (TRBV11-2, TRBJ2-2)
CASSLGGGELFF

SEQ ID NO: 401177 - protein, 14 aa, Homo sapiens
  CDR3 for alpha chain variable domain of TCR clone 200589 (TRAV1-2, TRAJ6)
CAVSLSGGSYIPTF

SEQ ID NO: 401178 - protein, 13 aa, Homo sapiens
  CDR3 for beta chain variable domain of TCR clone 200589 (TRBV27, TRBJ2-1)
CASRTLGVGEQFF

SEQ ID NO: 401179 - protein, 18 aa, Homo sapiens
  CDR3 for alpha chain variable domain of TCR clone 200590 (TRAV8-6, TRAJ52)
CAVSRVGAGGTSYGKLTF

SEQ ID NO: 401180 - protein, 13 aa, Homo sapiens
  CDR3 for beta chain variable domain of TCR clone 200590 (TRBV12-5, TRBJ2-3)
CASGDRQSDTQYF

SEQ ID NO: 401181 - protein, 14 aa, Homo sapiens
  CDR3 for alpha chain variable domain of TCR clone 200591 (TRAV13-1, TRAJ6)
CAASITGGSYIPTF

SEQ ID NO: 401182 - protein, 16 aa, Homo sapiens
  CDR3 for beta chain variable domain of TCR clone 200591 (TRBV7-3, TRBJ2-2)
CASSLKRGTLSGELFF

SEQ ID NO: 401183 - protein, 13 aa, Homo sapiens
  CDR3 for alpha chain variable domain of TCR clone 200592 (TRAV2, TRAJ40)
CAVVSSGTYKYIF

SEQ ID NO: 401184 - protein, 16 aa, Homo sapiens
  CDR3 for beta chain variable domain of TCR clone 200592 (TRBV29-1, TRBJ2-6)
CSVEDITYSGANVLTF

SEQ ID NO: 401185 - protein, 15 aa, Homo sapiens
  CDR3 for alpha chain variable domain of TCR clone 200593 (TRAV35, TRAJ58)
CAGRRQETSGSRLTF

SEQ ID NO: 401186 - protein, 13 aa, Homo sapiens
  CDR3 for beta chain variable domain of TCR clone 200593 (TRBV12-4, TRBJ1-5)
CASSPDRAQPQHF

SEQ ID NO: 401187 - protein, 14 aa, Homo sapiens
  CDR3 for alpha chain variable domain of TCR clone 200594 (TRAV26-1, TRAJ39)
CIVRGSRAGNMLTF

SEQ ID NO: 401188 - protein, 14 aa, Homo sapiens
  CDR3 for beta chain variable domain of TCR clone 200594 (TRBV25-1, TRBJ1-1)
CASPHLGGNTEAFF

SEQ ID NO: 401189 - protein, 12 aa, Homo sapiens
  CDR3 for alpha chain variable domain of TCR clone 200595 (TRAV13-1, TRAJ42)
CAASELWRKLRK

SEQ ID NO: 401190 - protein, 15 aa, Homo sapiens
  CDR3 for beta chain variable domain of TCR clone 200595 (TRBV20-1, TRBJ2-1)
CNASSAGSSYNEQFF

SEQ ID NO: 401191 - protein, 15 aa, Homo sapiens
  CDR3 for alpha chain variable domain of TCR clone 200596 (TRAV20, TRAJ39)
CSVQALLVAGNMLTF

SEQ ID NO: 401192 - protein, 14 aa, Homo sapiens
  CDR3 for beta chain variable domain of TCR clone 200596 (TRBV25-1, TRBJ1-1)
CASTHLGGNTEAFF

SEQ ID NO: 401193 - protein, 15 aa, Homo sapiens
  CDR3 for alpha chain variable domain of TCR clone 200597 (TRAV25, TRAJ52)
CAGTSGGTSYGKLTF

SEQ ID NO: 401194 - protein, 17 aa, Homo sapiens
  CDR3 for beta chain variable domain of TCR clone 200597 (TRBV18, TRBJ2-1)
CASSKGLSGGADNEQFF

SEQ ID NO: 401195 - protein, 15 aa, Homo sapiens
  CDR3 for alpha chain variable domain of TCR clone 200598 (TRAV21, TRAJ53)
CATLNCGGSNYKLTF

SEQ ID NO: 401196 - protein, 16 aa, Homo sapiens
  CDR3 for beta chain variable domain of TCR clone 200598 (TRBV9, TRBJ2-1)
CASSVGGGGNYNEQFF

SEQ ID NO: 401197 - protein, 14 aa, Homo sapiens
  CDR3 for alpha chain variable domain of TCR clone 200599 (TRAV9-2, TRAJ39)
CALYIYNAGNMLTF

SEQ ID NO: 401198 - protein, 13 aa, Homo sapiens
  CDR3 for beta chain variable domain of TCR clone 200599 (TRBV12-5, TRBJ2-1)
CASGLGRGNEQFF

SEQ ID NO: 401199 - protein, 14 aa, Homo sapiens
  CDR3 for alpha chain variable domain of TCR clone 200600 (TRAV8-4, TRAJ54)
CAVSEILGAQKLVF

SEQ ID NO: 401200 - protein, 17 aa, Homo sapiens
  CDR3 for beta chain variable domain of TCR clone 200600 (TRBV4-1, TRBJ1-4)
CASSQEWPRGVEEKLFF

SEQ ID NO: 401201 - protein, 14 aa, Homo sapiens
  CDR3 for alpha chain variable domain of TCR clone 200601 (TRAV2, TRAJ37)
CAVDFTSNTGKLIF

SEQ ID NO: 401202 - protein, 15 aa, Homo sapiens
  CDR3 for beta chain variable domain of TCR clone 200601 (TRBV7-2, TRBJ1-1)
CASSPQGGQGKSAFF

SEQ ID NO: 401203 - protein, 15 aa, Homo sapiens
  CDR3 for alpha chain variable domain of TCR clone 200602 (TRAV38-1, TRAJ57)
CAFMKLQGGSEKLVV

SEQ ID NO: 401204 - protein, 17 aa, Homo sapiens
  CDR3 for beta chain variable domain of TCR clone 200602 (TRBV13, TRBJ2-3)
CASSLSRVAGGRNTQYF

SEQ ID NO: 401205 - protein, 10 aa, Homo sapiens
  CDR3 for alpha chain variable domain of TCR clone 200603 (TRAV23/DV6, TRAJ57)
CAASSTLSQG

SEQ ID NO: 401206 - protein, 16 aa, Homo sapiens
  CDR3 for beta chain variable domain of TCR clone 200603 (TRBV3-1, TRBJ2-7)
CASSQGATGVAYEQYF

SEQ ID NO: 401207 - protein, 15 aa, Homo sapiens
  CDR3 for alpha chain variable domain of TCR clone 200604 (TRAV38-1, TRAJ37)
CAFIFGSGNTGKLIF

SEQ ID NO: 401208 - protein, 12 aa, Homo sapiens
  CDR3 for beta chain variable domain of TCR clone 200604 (TRBV7-9, TRBJ2-7)
CASSLEGYQQYF

SEQ ID NO: 401209 - protein, 14 aa, Homo sapiens
  CDR3 for alpha chain variable domain of TCR clone 200605 (TRAV29/DV5, TRAJ36)
CSARRTTGANNLFF

SEQ ID NO: 401210 - protein, 14 aa, Homo sapiens
  CDR3 for beta chain variable domain of TCR clone 200605 (TRBV12-5, TRBJ2-5)
CASGSRTHQETQYF

SEQ ID NO: 401211 - protein, 11 aa, Homo sapiens
  CDR3 for alpha chain variable domain of TCR clone 200606 (TRAV13-1, TRAJ24)
CAASGWGKLQF

SEQ ID NO: 401212 - protein, 14 aa, Homo sapiens
  CDR3 for beta chain variable domain of TCR clone 200606 (TRBV4-1, TRBJ2-2)
CASSQAVNTGELFF

SEQ ID NO: 401213 - protein, 14 aa, Homo sapiens
  CDR3 for alpha chain variable domain of TCR clone 200607 (TRAV29/DV5, TRAJ20)
CAASAPIEDYKLSF

SEQ ID NO: 401214 - protein, 15 aa, Homo sapiens
  CDR3 for beta chain variable domain of TCR clone 200607 (TRBV6-1, TRBJ2-1)
CASSEAAYSDNEQFF

SEQ ID NO: 401215 - protein, 13 aa, Homo sapiens
  CDR3 for alpha chain variable domain of TCR clone 200608 (TRAV17, TRAJ22)
CAHHSGSARQLTF

SEQ ID NO: 401216 - protein, 14 aa, Homo sapiens
  CDR3 for beta chain variable domain of TCR clone 200608 (TRBV16, TRBJ1-1)
CASSHAGPNTEAFF

SEQ ID NO: 401217 - protein, 13 aa, Homo sapiens
  CDR3 for alpha chain variable domain of TCR clone 200609 (TRAV2, TRAJ40)
CAVVTSGTYKYIF

SEQ ID NO: 401218 - protein, 14 aa, Homo sapiens
  CDR3 for beta chain variable domain of TCR clone 200609 (TRBV19, TRBJ2-1)
CASPNLVLSGEQFF

SEQ ID NO: 401219 - protein, 12 aa, Homo sapiens
  CDR3 for alpha chain variable domain of TCR clone 200610 (TRAV21, TRAJ37)
CAVRGNTGKLIF

SEQ ID NO: 401220 - protein, 14 aa, Homo sapiens
  CDR3 for beta chain variable domain of TCR clone 200610 (TRBV19, TRBJ2-1)
CASPTFVLSGEQFF

SEQ ID NO: 401221 - protein, 14 aa, Homo sapiens
  CDR3 for alpha chain variable domain of TCR clone 200611 (TRAV26-1, TRAJ45)
CIEVTGGGADGLTF

SEQ ID NO: 401222 - protein, 14 aa, Homo sapiens
  CDR3 for beta chain variable domain of TCR clone 200611 (TRBV20-1, TRBJ2-3)
CSARVRGSTDTQYF

SEQ ID NO: 401223 - protein, 16 aa, Homo sapiens
  CDR3 for alpha chain variable domain of TCR clone 200612 (TRAV3, TRAJ37)
CAVRVRGSGNTGKLIF

SEQ ID NO: 401224 - protein, 13 aa, Homo sapiens
  CDR3 for beta chain variable domain of TCR clone 200612 (TRBV12-4, TRBJ2-1)
CASSLGTDNEQFF

SEQ ID NO: 401225 - protein, 13 aa, Homo sapiens
  CDR3 for alpha chain variable domain of TCR clone 200613 (TRAV20, TRAJ42)
CAVQGGSQGNLIF

SEQ ID NO: 401226 - protein, 16 aa, Homo sapiens
  CDR3 for beta chain variable domain of TCR clone 200613 (TRBV5-1, TRBJ2-7)
CASSYASTSSGGEQYF

SEQ ID NO: 401227 - protein, 15 aa, Homo sapiens
  CDR3 for alpha chain variable domain of TCR clone 200614 (TRAV12-1, TRAJ45)
CVVLSGGGGADGLTF

SEQ ID NO: 401228 - protein, 13 aa, Homo sapiens
  CDR3 for beta chain variable domain of TCR clone 200614 (TRBV5-4, TRBJ2-1)
CASSLLAGDEQFF

SEQ ID NO: 401229 - protein, 13 aa, Homo sapiens
  CDR3 for alpha chain variable domain of TCR clone 200615 (TRAV26-1, TRAJ48)
CIVSVVGDEKLTF

SEQ ID NO: 401230 - protein, 17 aa, Homo sapiens
  CDR3 for beta chain variable domain of TCR clone 200615 (TRBV7-3, TRBJ2-2)
CASSLSGTSGGTGELFF

SEQ ID NO: 401231 - protein, 12 aa, Homo sapiens
  CDR3 for alpha chain variable domain of TCR clone 200616 (TRAV13-2, TRAJ23)
LAERHRGGKLIF

SEQ ID NO: 401232 - protein, 13 aa, Homo sapiens
  CDR3 for beta chain variable domain of TCR clone 200616 (TRBV28, TRBJ2-7)
CASSPSGTYEQYF

SEQ ID NO: 401233 - protein, 23 aa, Homo sapiens
  CDR3 for alpha chain variable domain of TCR clone 200617 (TRAV26-1, TRAJ38)
CIADNAGNNHIQSPDPAVYQLRD

SEQ ID NO: 401234 - protein, 13 aa, Homo sapiens
  CDR3 for beta chain variable domain of TCR clone 200617 (TRBV5-4, TRBJ1-1)
CASSVDLGTEAFF

SEQ ID NO: 401235 - protein, 14 aa, Homo sapiens
  CDR3 for alpha chain variable domain of TCR clone 200618 (TRAV1-2, TRAJ8)
CAVREDTGFQKLVF

SEQ ID NO: 401236 - protein, 13 aa, Homo sapiens
  CDR3 for beta chain variable domain of TCR clone 200618 (TRBV7-3, TRBJ2-1)
CASSLDRYNEQFF

SEQ ID NO: 401237 - protein, 16 aa, Homo sapiens
  CDR3 for alpha chain variable domain of TCR clone 200619 (TRAV20, TRAJ10)
CAVLRGLTGGGNKLTF

SEQ ID NO: 401238 - protein, 14 aa, Homo sapiens
  CDR3 for beta chain variable domain of TCR clone 200619 (TRBV19, TRBJ1-5)
CTSRAPDSFLSQHF

SEQ ID NO: 401239 - protein, 14 aa, Homo sapiens
  CDR3 for alpha chain variable domain of TCR clone 200620 (TRAV8-3, TRAJ36)
CAVGPITGANNLFF

SEQ ID NO: 401240 - protein, 15 aa, Homo sapiens
  CDR3 for beta chain variable domain of TCR clone 200620 (TRBV4-1, TRBJ2-1)
CASSQDPGNYNEQLS

SEQ ID NO: 401241 - protein, 16 aa, Homo sapiens
  CDR3 for alpha chain variable domain of TCR clone 200621 (TRAV38-1, TRAJ42)
CAFMKLGGGSQGNLIF

SEQ ID NO: 401242 - protein, 13 aa, Homo sapiens
  CDR3 for beta chain variable domain of TCR clone 200621 (TRBV10-2, TRBJ2-3)
CASSESGDHTQYF

SEQ ID NO: 401243 - protein, 13 aa, Homo sapiens
  CDR3 for alpha chain variable domain of TCR clone 200622 (TRAV2, TRAJ29)
CAEQNSGNTPLVF

SEQ ID NO: 401244 - protein, 13 aa, Homo sapiens
  CDR3 for beta chain variable domain of TCR clone 200622 (TRBV7-9, TRBJ1-2)
CASSLKQNYGYTF

SEQ ID NO: 401245 - protein, 12 aa, Homo sapiens
  CDR3 for alpha chain variable domain of TCR clone 200623 (TRAV26-1, TRAJ38)
CIADNAGNNHTQ

SEQ ID NO: 401246 - protein, 13 aa, Homo sapiens
  CDR3 for beta chain variable domain of TCR clone 200623 (TRBV20-1, TRBJ1-1)
CSARGGGNTEAFF

SEQ ID NO: 401247 - protein, 10 aa, Homo sapiens
  CDR3 for alpha chain variable domain of TCR clone 200624 (TRAV8-4, TRAJ30)
VFYREDKIIF

SEQ ID NO: 401248 - protein, 16 aa, Homo sapiens
  CDR3 for beta chain variable domain of TCR clone 200624 (TRBV20-1, TRBJ1-5)
CSAELPGRQTNQPQHF

SEQ ID NO: 401249 - protein, 18 aa, Homo sapiens
  CDR3 for alpha chain variable domain of TCR clone 200625 (TRAV13-1, TRAJ52)
CAASKRSAGGTRFGKLTF

SEQ ID NO: 401250 - protein, 13 aa, Homo sapiens
  CDR3 for beta chain variable domain of TCR clone 200625 (TRBV12-4, TRBJ1-2)
CASSLRQGKGYTF

SEQ ID NO: 401251 - protein, 15 aa, Homo sapiens
  CDR3 for alpha chain variable domain of TCR clone 200626 (TRAV13-1, TRAJ10)
CAATILTGGGNKLTF

SEQ ID NO: 401252 - protein, 15 aa, Homo sapiens
  CDR3 for beta chain variable domain of TCR clone 200626 (TRBV2, TRBJ2-7)
CASTLLGSGATEQYY

SEQ ID NO: 401253 - protein, 13 aa, Homo sapiens
  CDR3 for alpha chain variable domain of TCR clone 200627 (TRAV21, TRAJ27)
CAARPGNAGKSTF

SEQ ID NO: 401254 - protein, 15 aa, Homo sapiens
  CDR3 for beta chain variable domain of TCR clone 200627 (TRBV18, TRBJ2-5)
CASSPRASEAETQYF

SEQ ID NO: 401255 - protein, 18 aa, Homo sapiens
  CDR3 for alpha chain variable domain of TCR clone 200628 (TRAV1-1, TRAJ27)
CLLLLRFLGNTNAGKSTF

SEQ ID NO: 401256 - protein, 17 aa, Homo sapiens
  CDR3 for beta chain variable domain of TCR clone 200628 (TRBV20-1, TRBJ2-3)
CSARDPKGVSATDTQYF

SEQ ID NO: 401257 - protein, 12 aa, Homo sapiens
  CDR3 for alpha chain variable domain of TCR clone 200629 (TRAV12-3, TRAJ20)
CAMVRGGYKLSF

SEQ ID NO: 401258 - protein, 13 aa, Homo sapiens
  CDR3 for beta chain variable domain of TCR clone 200629 (TRBV23-1, TRBJ1-4)
CASRGKFNEKLLF

SEQ ID NO: 401259 - protein, 14 aa, Homo sapiens
  CDR3 for alpha chain variable domain of TCR clone 200630 (TRAV20, TRAJ13)
CAVLNSGGYQKVTF

SEQ ID NO: 401260 - protein, 14 aa, Homo sapiens
  CDR3 for beta chain variable domain of TCR clone 200630 (TRBV7-2, TRBJ2-7)
CASSLGTDPNEQYF

SEQ ID NO: 401261 - protein, 10 aa, Homo sapiens
  CDR3 for alpha chain variable domain of TCR clone 200631 (TRAV13-2, TRAJ49)
CADTGNQFYF

SEQ ID NO: 401262 - protein, 15 aa, Homo sapiens
  CDR3 for beta chain variable domain of TCR clone 200631 (TRBV27, TRBJ2-1)
CASSNGGGSSNEQFF

SEQ ID NO: 401263 - protein, 15 aa, Homo sapiens
  CDR3 for alpha chain variable domain of TCR clone 200632 (TRAV35, TRAJ41)
CAGQLFSNSGYALNF

SEQ ID NO: 401264 - protein, 14 aa, Homo sapiens
  CDR3 for beta chain variable domain of TCR clone 200632 (TRBV7-2, TRBJ1-2)
CASSRGGTNYGYTV

SEQ ID NO: 401265 - protein, 14 aa, Homo sapiens
  CDR3 for alpha chain variable domain of TCR clone 200633 (TRAV12-2, TRAJ9)
CAVNMEGGGFKTIF

SEQ ID NO: 401266 - protein, 14 aa, Homo sapiens
  CDR3 for beta chain variable domain of TCR clone 200633 (TRBV2, TRBJ2-5)
CTSSEVLAQETQYF

SEQ ID NO: 401267 - protein, 15 aa, Homo sapiens
  CDR3 for alpha chain variable domain of TCR clone 200634 (TRAV9-2, TRAJ49)
CALSPSDHTGNQFYF

SEQ ID NO: 401268 - protein, 14 aa, Homo sapiens
  CDR3 for beta chain variable domain of TCR clone 200634 (TRBV12-4, TRBJ1-1)
CASSLGTGGTEAFF

SEQ ID NO: 401269 - protein, 12 aa, Homo sapiens
  CDR3 for alpha chain variable domain of TCR clone 200635 (TRAV36/DV7, TRAJ40)
CAVGTGTYKYIF

SEQ ID NO: 401270 - protein, 13 aa, Homo sapiens
  CDR3 for beta chain variable domain of TCR clone 200635 (TRBV7-7, TRBJ2-1)
CASSLELVTEQFF

SEQ ID NO: 401271 - protein, 13 aa, Homo sapiens
  CDR3 for alpha chain variable domain of TCR clone 200636 (TRAV35, TRAJ57)
CAGSQGGSEKLVF

SEQ ID NO: 401272 - protein, 16 aa, Homo sapiens
  CDR3 for beta chain variable domain of TCR clone 200636 (TRBV12-4, TRBJ2-5)
CASSFFVRGRQETQYF

SEQ ID NO: 401273 - protein, 12 aa, Homo sapiens
  CDR3 for alpha chain variable domain of TCR clone 200637 (TRAV16, TRAJ21)
CALLGNFNKFYF

SEQ ID NO: 401274 - protein, 16 aa, Homo sapiens
  CDR3 for beta chain variable domain of TCR clone 200637 (TRBV12-5, TRBJ2-5)
CASGPRTSGNQETQYF

SEQ ID NO: 401275 - protein, 15 aa, Homo sapiens
  CDR3 for alpha chain variable domain of TCR clone 200638 (TRAV29/DV5, TRAJ24)
CAASGATDSWGKFQF

SEQ ID NO: 401276 - protein, 15 aa, Homo sapiens
  CDR3 for beta chain variable domain of TCR clone 200638 (TRBV11-2, TRBJ1-3)
CASSIWGSYGNTIYF

SEQ ID NO: 401277 - protein, 11 aa, Homo sapiens
  CDR3 for alpha chain variable domain of TCR clone 200639 (TRAV39, TRAJ49)
CAVDISTQFYF

SEQ ID NO: 401278 - protein, 11 aa, Homo sapiens
  CDR3 for beta chain variable domain of TCR clone 200639 (TRBV7-8, TRBJ2-7)
CASTLSLEQYF

SEQ ID NO: 401279 - protein, 15 aa, Homo sapiens
  CDR3 for alpha chain variable domain of TCR clone 200640 (TRAV12-2, TRAJ43)
CAFDMRFGARTRLTV

SEQ ID NO: 401280 - protein, 18 aa, Homo sapiens
  CDR3 for beta chain variable domain of TCR clone 200640 (TRBV20-1, TRBJ2-3)
CGASGLAGGPGTTDTQYF

SEQ ID NO: 401281 - protein, 12 aa, Homo sapiens
  CDR3 for alpha chain variable domain of TCR clone 200641 (TRAV27, TRAJ9)
CAGESGGFKTIF

SEQ ID NO: 401282 - protein, 18 aa, Homo sapiens
  CDR3 for beta chain variable domain of TCR clone 200641 (TRBV10-2, TRBJ2-2)
CISAPAVPRQADAGELFF

SEQ ID NO: 401283 - protein, 15 aa, Homo sapiens
  CDR3 for alpha chain variable domain of TCR clone 200642 (TRAV12-1, TRAJ44)
CVVFVNTGTASKLTF

SEQ ID NO: 401284 - protein, 14 aa, Homo sapiens
  CDR3 for beta chain variable domain of TCR clone 200642 (TRBV19, TRBJ1-1)
CASLRTGLNTEAFF

SEQ ID NO: 401285 - protein, 14 aa, Homo sapiens
  CDR3 for alpha chain variable domain of TCR clone 200643 (TRAV1-2, TRAJ16)
CAVRSASDGKKLLF

SEQ ID NO: 401286 - protein, 17 aa, Homo sapiens
  CDR3 for beta chain variable domain of TCR clone 200643 (TRBV7-3, TRBJ2-3)
CASSLMKRMRGADTQYF

SEQ ID NO: 401287 - protein, 11 aa, Homo sapiens
  CDR3 for alpha chain variable domain of TCR clone 200644 (TRAV4, TRAJ31)
CLVGLNARLMF

SEQ ID NO: 401288 - protein, 16 aa, Homo sapiens
  CDR3 for beta chain variable domain of TCR clone 200644 (TRBV15, TRBJ2-6)
CATRVNGGFLANVLTF

SEQ ID NO: 401289 - protein, 23 aa, Homo sapiens
  CDR3 for alpha chain variable domain of TCR clone 200645 (TRAV25, TRAJ26)
PAHHSHPDYRCRNRGVYGQNFVF

SEQ ID NO: 401290 - protein, 15 aa, Homo sapiens
  CDR3 for beta chain variable domain of TCR clone 200645 (TRBV5-1, TRBJ2-3)
CASSVTSGSTDTQYF

SEQ ID NO: 401291 - protein, 23 aa, Homo sapiens
  CDR3 for alpha chain variable domain of TCR clone 200646 (TRAV12-2, TRAJ43)
SLLIRDSQPSDSATYLCGFDMRF

SEQ ID NO: 401292 - protein, 18 aa, Homo sapiens
  CDR3 for beta chain variable domain of TCR clone 200646 (TRBV20-1, TRBJ2-3)
CSASGLAGGPGTTDTQYF

SEQ ID NO: 401293 - protein, 14 aa, Homo sapiens
  CDR3 for alpha chain variable domain of TCR clone 200647 (TRAV3, TRAJ33)
CAVRDMDSNYQLIW

SEQ ID NO: 401294 - protein, 19 aa, Homo sapiens
  CDR3 for beta chain variable domain of TCR clone 200647 (TRBV7-3, TRBJ1-2)
CASSFPHGNDGELWLHLRF

SEQ ID NO: 401295 - protein, 18 aa, Homo sapiens
  CDR3 for alpha chain variable domain of TCR clone 200648 (TRAV26-1, TRAJ27)
CIVRPSFNYNTNAGKSTF

SEQ ID NO: 401296 - protein, 14 aa, Homo sapiens
  CDR3 for beta chain variable domain of TCR clone 200648 (TRBV10-3, TRBJ1-6)
CAISVDGDESPHHF

SEQ ID NO: 401297 - protein, 15 aa, Homo sapiens
  CDR3 for alpha chain variable domain of TCR clone 200649 (TRAV2, TRAJ15)
CAVEDRGQAGTALIF

SEQ ID NO: 401298 - protein, 18 aa, Homo sapiens
  CDR3 for beta chain variable domain of TCR clone 200649 (TRBV12-4, TRBJ2-4)
CASSRTGAVDVAKNIQYF

SEQ ID NO: 401299 - protein, 16 aa, Homo sapiens
  CDR3 for alpha chain variable domain of TCR clone 200650 (TRAV3, TRAJ34)
CAVRARGTPTSSSLGL

SEQ ID NO: 401300 - protein, 15 aa, Homo sapiens
  CDR3 for beta chain variable domain of TCR clone 200650 (TRBV6-3, TRBJ2-7)
CASSFPGTVFYEQYF

SEQ ID NO: 401301 - protein, 15 aa, Homo sapiens
  CDR3 for alpha chain variable domain of TCR clone 200651 (TRAV13-1, TRAJ11)
CAASNRNSGYRTLTF

SEQ ID NO: 401302 - protein, 15 aa, Homo sapiens
  CDR3 for beta chain variable domain of TCR clone 200651 (TRBV6-3, TRBJ2-7)
CASSSPGTVFYEQYF

SEQ ID NO: 401303 - protein, 12 aa, Homo sapiens
  CDR3 for alpha chain variable domain of TCR clone 200652 (TRAV8-3, TRAJ41)
CAVALSGYALNF

SEQ ID NO: 401304 - protein, 17 aa, Homo sapiens
  CDR3 for beta chain variable domain of TCR clone 200652 (TRBV7-3, TRBJ2-2)
CASSLSWTSGGTGELFF

SEQ ID NO: 401305 - protein, 14 aa, Homo sapiens
  CDR3 for alpha chain variable domain of TCR clone 200653 (TRAV12-2, TRAJ13)
CAVKKTGGYQKVTF

SEQ ID NO: 401306 - protein, 11 aa, Homo sapiens
  CDR3 for beta chain variable domain of TCR clone 200653 (TRBV29-1, TRBJ2-5)
CSEDRTGTQFF

SEQ ID NO: 401307 - protein, 15 aa, Homo sapiens
  CDR3 for alpha chain variable domain of TCR clone 200654 (TRAV23/DV6, TRAJ18)
CAARYRGSTLGRLYF

SEQ ID NO: 401308 - protein, 14 aa, Homo sapiens
  CDR3 for beta chain variable domain of TCR clone 200654 (TRBV2, TRBJ1-5)
CASSGTGFNQPQHF

SEQ ID NO: 401309 - protein, 11 aa, Homo sapiens
  CDR3 for alpha chain variable domain of TCR clone 200655 (TRAV1-2, TRAJ31)
CAVKNNARLTF

SEQ ID NO: 401310 - protein, 15 aa, Homo sapiens
  CDR3 for beta chain variable domain of TCR clone 200655 (TRBV11-3, TRBJ2-3)
CASLKDGREGDTQYF

SEQ ID NO: 401311 - protein, 16 aa, Homo sapiens
  CDR3 for alpha chain variable domain of TCR clone 200656 (TRAV12-3, TRAJ53)
CAMSPGSGGSNYKLTF

SEQ ID NO: 401312 - protein, 13 aa, Homo sapiens
  CDR3 for beta chain variable domain of TCR clone 200656 (TRBV29-1, TRBJ1-1)
CSVESGFGTEAFF

SEQ ID NO: 401313 - protein, 12 aa, Homo sapiens
  CDR3 for alpha chain variable domain of TCR clone 200657 (TRAV2, TRAJ5)
CALDTGRRALTF

SEQ ID NO: 401314 - protein, 12 aa, Homo sapiens
  CDR3 for beta chain variable domain of TCR clone 200657 (TRBV12-4, TRBJ1-2)
CASSFIWLHLRF

SEQ ID NO: 401315 - protein, 14 aa, Homo sapiens
  CDR3 for alpha chain variable domain of TCR clone 200658 (TRAV14/DV4, TRAJ32)
SNVLPLTPTNKLIF

SEQ ID NO: 401316 - protein, 16 aa, Homo sapiens
  CDR3 for beta chain variable domain of TCR clone 200658 (TRBV27, TRBJ2-2)
CASSFRGLVRTGELFF

SEQ ID NO: 401317 - protein, 14 aa, Homo sapiens
  CDR3 for alpha chain variable domain of TCR clone 200659 (TRAV13-1, TRAJ3)
CAASKSSSASKIIF

SEQ ID NO: 401318 - protein, 12 aa, Homo sapiens
  CDR3 for beta chain variable domain of TCR clone 200659 (TRBV7-8, TRBJ2-7)
CASSLGDREQYF

SEQ ID NO: 401319 - protein, 19 aa, Homo sapiens
  CDR3 for alpha chain variable domain of TCR clone 200660 (TRAV38-1, TRAJ53)
CAFMKHGLESGGSNYKLTS

SEQ ID NO: 401320 - protein, 13 aa, Homo sapiens
  CDR3 for beta chain variable domain of TCR clone 200660 (TRBV19, TRBJ2-7)
CASSPRQSYEQYF

SEQ ID NO: 401321 - protein, 12 aa, Homo sapiens
  CDR3 for alpha chain variable domain of TCR clone 200661 (TRAV13-2, TRAJ23)
CAERHRGGKLIF

SEQ ID NO: 401322 - protein, 15 aa, Homo sapiens
  CDR3 for beta chain variable domain of TCR clone 200661 (TRBV9, TRBJ1-6)
CASSVAGTGDSPLRF

SEQ ID NO: 401323 - protein, 15 aa, Homo sapiens
  CDR3 for alpha chain variable domain of TCR clone 200662 (TRAV35, TRAJ38)
CAGFSNAGNNRKLSW

SEQ ID NO: 401324 - protein, 18 aa, Homo sapiens
  CDR3 for beta chain variable domain of TCR clone 200662 (TRBV3-1, TRBJ1-2)
CASSQDVIGWNGDYGYTF

SEQ ID NO: 401325 - protein, 17 aa, Homo sapiens
  CDR3 for alpha chain variable domain of TCR clone 200663 (TRAV3, TRAJ6)
CAVRDCPRAGGSYIPTF

SEQ ID NO: 401326 - protein, 17 aa, Homo sapiens
  CDR3 for beta chain variable domain of TCR clone 200663 (TRBV20-1, TRBJ2-1)
CSASSSGLAGSYNEQFF

SEQ ID NO: 401327 - protein, 16 aa, Homo sapiens
  CDR3 for alpha chain variable domain of TCR clone 200664 (TRAV1-2, TRAJ10)
WAVRGVLTGGGNKPTV

SEQ ID NO: 401328 - protein, 12 aa, Homo sapiens
  CDR3 for beta chain variable domain of TCR clone 200664 (TRBV7-8, TRBJ2-7)
CASSLGDREQYF

SEQ ID NO: 401329 - protein, 15 aa, Homo sapiens
  CDR3 for alpha chain variable domain of TCR clone 200665 (TRAV29/DV5, TRAJ24)
CAASGATDRWGKLQF

SEQ ID NO: 401330 - protein, 12 aa, Homo sapiens
  CDR3 for beta chain variable domain of TCR clone 200665 (TRBV11-2, TRBJ2-2)
CASSLPTGELFF

SEQ ID NO: 401331 - protein, 12 aa, Homo sapiens
  CDR3 for alpha chain variable domain of TCR clone 200666 (TRAV8-3, TRAJ41)
CAVALSGYALNF

SEQ ID NO: 401332 - protein, 16 aa, Homo sapiens
  CDR3 for beta chain variable domain of TCR clone 200666 (TRBV19, TRBJ2-1)
CASSKAGPSSYNEQFF

SEQ ID NO: 401333 - protein, 15 aa, Homo sapiens
  CDR3 for alpha chain variable domain of TCR clone 200667 (TRAV8-3, TRAJ27)
CAVGPSKTNAGKSTF

SEQ ID NO: 401334 - protein, 13 aa, Homo sapiens
  CDR3 for beta chain variable domain of TCR clone 200667 (TRBV7-2, TRBJ2-7)
CASRTSSSWEQYF

SEQ ID NO: 401335 - protein, 13 aa, Homo sapiens
  CDR3 for alpha chain variable domain of TCR clone 200668 (TRAV17, TRAJ9)
CATDYTGGFKTIF

SEQ ID NO: 401336 - protein, 18 aa, Homo sapiens
  CDR3 for beta chain variable domain of TCR clone 200668 (TRBV27, TRBJ2-1)
CASTSGTSGKATYNEQFF

SEQ ID NO: 401337 - protein, 14 aa, Homo sapiens
  CDR3 for alpha chain variable domain of TCR clone 200669 (TRAV3, TRAJ7)
CAVREEEREQQTRF

SEQ ID NO: 401338 - protein, 12 aa, Homo sapiens
  CDR3 for beta chain variable domain of TCR clone 200669 (TRBV7-8, TRBJ2-7)
CASSLGDREQFF

SEQ ID NO: 401339 - protein, 23 aa, Homo sapiens
  CDR3 for alpha chain variable domain of TCR clone 200670 (TRAV12-2, TRAJ36)
SLLIRDSQPSDSATRERANNLFF

SEQ ID NO: 401340 - protein, 17 aa, Homo sapiens
  CDR3 for beta chain variable domain of TCR clone 200670 (TRBV3-1, TRBJ2-3)
CASSQLLDRGHTDTQYF

SEQ ID NO: 401341 - protein, 18 aa, Homo sapiens
  CDR3 for alpha chain variable domain of TCR clone 200671 (TRAV26-1, TRAJ5)
CIVRVVPPRDTGRRTLTF

SEQ ID NO: 401342 - protein, 15 aa, Homo sapiens
  CDR3 for beta chain variable domain of TCR clone 200671 (TRBV7-9, TRBJ2-7)
CASSLPMGQANEQYF

SEQ ID NO: 401343 - protein, 18 aa, Homo sapiens
  CDR3 for alpha chain variable domain of TCR clone 200672 (TRAV8-4, TRAJ52)
CAVTRVNAGGTSYGKLTF

SEQ ID NO: 401344 - protein, 20 aa, Homo sapiens
  CDR3 for beta chain variable domain of TCR clone 200672 (TRBV19, TRBJ2-1)
CASSISRTVTSTRLNNEQFF

SEQ ID NO: 401345 - protein, 14 aa, Homo sapiens
  CDR3 for alpha chain variable domain of TCR clone 200673 (TRAV12-3, TRAJ10)
SHLPLTGVGNKLTF

SEQ ID NO: 401346 - protein, 17 aa, Homo sapiens
  CDR3 for beta chain variable domain of TCR clone 200673 (TRBV28, TRBJ2-5)
CASSTPEGDALQETQYF

SEQ ID NO: 401347 - protein, 15 aa, Homo sapiens
  CDR3 for alpha chain variable domain of TCR clone 200674 (TRAV23/DV6, TRAJ18)
CAARYRGSTLGRLYF

SEQ ID NO: 401348 - protein, 13 aa, Homo sapiens
  CDR3 for beta chain variable domain of TCR clone 200674 (TRBV12-4, TRBJ1-2)
CASSLRQGKGYTC

SEQ ID NO: 401349 - protein, 17 aa, Homo sapiens
  CDR3 for alpha chain variable domain of TCR clone 200675 (TRAV3, TRAJ6)
CAVRDGPRAGGSYIPTF

SEQ ID NO: 401350 - protein, 11 aa, Homo sapiens
  CDR3 for beta chain variable domain of TCR clone 200675 (TRBV19, TRBJ1-2)
CASSISSGYTF

SEQ ID NO: 401351 - protein, 14 aa, Homo sapiens
  CDR3 for alpha chain variable domain of TCR clone 200676 (TRAV12-2, TRAJ44)
CAVNPAATASKITF

SEQ ID NO: 401352 - protein, 13 aa, Homo sapiens
  CDR3 for beta chain variable domain of TCR clone 200676 (TRBV20-1, TRBJ1-6)
CSAPLGVGSPLHF

SEQ ID NO: 401353 - protein, 15 aa, Homo sapiens
  CDR3 for alpha chain variable domain of TCR clone 200677 (TRAV12-3, TRAJ27)
CAMRVYNTNAGKSTF

SEQ ID NO: 401354 - protein, 13 aa, Homo sapiens
  CDR3 for beta chain variable domain of TCR clone 200677 (TRBV11-2, TRBJ2-5)
CASSRGPSETQYF

SEQ ID NO: 401355 - protein, 16 aa, Homo sapiens
  CDR3 for alpha chain variable domain of TCR clone 200678 (TRAV14/DV4, TRAJ54)
CAMREGRIQGAQKLVF

SEQ ID NO: 401356 - protein, 15 aa, Homo sapiens
  CDR3 for beta chain variable domain of TCR clone 200678 (TRBV27, TRBJ2-1)
CASSNGGGSSNEQFF

SEQ ID NO: 401357 - protein, 15 aa, Homo sapiens
  CDR3 for alpha chain variable domain of TCR clone 200679 (TRAV29/DV5, TRAJ42)
CAAKTDGGCQGNLIF

SEQ ID NO: 401358 - protein, 15 aa, Homo sapiens
  CDR3 for beta chain variable domain of TCR clone 200679 (TRBV5-1, TRBJ2-2)
CASSSQGGNTGELFF

SEQ ID NO: 401359 - protein, 17 aa, Homo sapiens
  CDR3 for alpha chain variable domain of TCR clone 200680 (TRAV3, TRAJ6)
CAVRDGPRAGGSYIPTF

SEQ ID NO: 401360 - protein, 20 aa, Homo sapiens
  CDR3 for beta chain variable domain of TCR clone 200680 (TRBV28, TRBJ2-1)
CASIPIGRSPGLAGGNEQSF

SEQ ID NO: 401361 - protein, 12 aa, Homo sapiens
  CDR3 for alpha chain variable domain of TCR clone 200681 (TRAV12-3, TRAJ17)
CAMTLTGNKLNF

SEQ ID NO: 401362 - protein, 18 aa, Homo sapiens
  CDR3 for beta chain variable domain of TCR clone 200681 (TRBV4-1, TRBJ1-5)
CASSQDPRGQGLNQPQHF

SEQ ID NO: 401363 - protein, 12 aa, Homo sapiens
  CDR3 for alpha chain variable domain of TCR clone 200682 (TRAV12-3, TRAJ17)
CAMTLTGNKLTF

SEQ ID NO: 401364 - protein, 15 aa, Homo sapiens
  CDR3 for beta chain variable domain of TCR clone 200682 (TRBV20-1, TRBJ2-7)
CSARDRVSGMDERYF

SEQ ID NO: 401365 - protein, 17 aa, Homo sapiens
  CDR3 for alpha chain variable domain of TCR clone 200683 (TRAV4, TRAJ18)
CLVGERSVGSTPGRLYF

SEQ ID NO: 401366 - protein, 14 aa, Homo sapiens
  CDR3 for beta chain variable domain of TCR clone 200683 (TRBV6-5, TRBJ1-2)
RASSYDGTGGGYTF

SEQ ID NO: 401367 - protein, 16 aa, Homo sapiens
  CDR3 for alpha chain variable domain of TCR clone 200684 (TRAV30, TRAJ57)
CGTGWSPQGGSEKLVF

SEQ ID NO: 401368 - protein, 14 aa, Homo sapiens
  CDR3 for beta chain variable domain of TCR clone 200684 (TRBV18, TRBJ1-1)
CASSPGFQGVEAFF

SEQ ID NO: 401369 - protein, 16 aa, Homo sapiens
  CDR3 for alpha chain variable domain of TCR clone 200685 (TRAV30, TRAJ24)
CGTEIVDADSWGKFQF

SEQ ID NO: 401370 - protein, 14 aa, Homo sapiens
  CDR3 for beta chain variable domain of TCR clone 200685 (TRBV7-2, TRBJ2-7)
CASRPKTSFYEQYF

SEQ ID NO: 401371 - protein, 14 aa, Homo sapiens
  CDR3 for alpha chain variable domain of TCR clone 200686 (TRAV12-2, TRAJ17)
CAALFKAAGNKLTF

SEQ ID NO: 401372 - protein, 16 aa, Homo sapiens
  CDR3 for beta chain variable domain of TCR clone 200686 (TRBV4-3, TRBJ2-2)
CSSSHLQGSGTGELFF

SEQ ID NO: 401373 - protein, 14 aa, Homo sapiens
  CDR3 for alpha chain variable domain of TCR clone 200687 (TRAV29/DV5, TRAJ57)
CAARSQGGYEKLVF

SEQ ID NO: 401374 - protein, 15 aa, Homo sapiens
  CDR3 for beta chain variable domain of TCR clone 200687 (TRBV28, TRBJ2-4)
CAAGSGTLLMGIQYF

SEQ ID NO: 401375 - protein, 15 aa, Homo sapiens
  CDR3 for alpha chain variable domain of TCR clone 200688 (TRAV12-1, TRAJ4)
CVVNPFSGGCNKLIF

SEQ ID NO: 401376 - protein, 16 aa, Homo sapiens
  CDR3 for beta chain variable domain of TCR clone 200688 (TRBV5-1, TRBJ1-1)
CASSKTGTEVGTEAFF

SEQ ID NO: 401377 - protein, 15 aa, Homo sapiens
  CDR3 for alpha chain variable domain of TCR clone 200689 (TRAV36/DV7, TRAJ21)
CALKFYFGSGTKLNV

SEQ ID NO: 401378 - protein, 15 aa, Homo sapiens
  CDR3 for beta chain variable domain of TCR clone 200689 (TRBV11-2, TRBJ2-1)
CASSPAGQSLNEQFF

SEQ ID NO: 401379 - protein, 17 aa, Homo sapiens
  CDR3 for alpha chain variable domain of TCR clone 200690 (TRAV8-1, TRAJ42)
CAGKWGNYGGSQGNLIF

SEQ ID NO: 401380 - protein, 15 aa, Homo sapiens
  CDR3 for beta chain variable domain of TCR clone 200690 (TRBV9, TRBJ1-6)
CASSVAGTGDSPLHF

SEQ ID NO: 401381 - protein, 12 aa, Homo sapiens
  CDR3 for alpha chain variable domain of TCR clone 200691 (TRAV13-2, TRAJ23)
CAERHRGGKLIF

SEQ ID NO: 401382 - protein, 16 aa, Homo sapiens
  CDR3 for beta chain variable domain of TCR clone 200691 (TRBV19, TRBJ2-2)
CASSPSGGLNTGELFF

SEQ ID NO: 401383 - protein, 11 aa, Homo sapiens
  CDR3 for alpha chain variable domain of TCR clone 200692 (TRAV2, TRAJ33)
CAVESHYQLIW

SEQ ID NO: 401384 - protein, 15 aa, Homo sapiens
  CDR3 for beta chain variable domain of TCR clone 200692 (TRBV19, TRBJ1-1)
CASTSGQIQNTEAFF

SEQ ID NO: 401385 - protein, 13 aa, Homo sapiens
  CDR3 for alpha chain variable domain of TCR clone 200693 (TRAV16, TRAJ28)
SAPTGAGSYQLTF

SEQ ID NO: 401386 - protein, 16 aa, Homo sapiens
  CDR3 for beta chain variable domain of TCR clone 200693 (TRBV28, TRBJ1-5)
CASSLTGQGWNQPQHF

SEQ ID NO: 401387 - protein, 11 aa, Homo sapiens
  CDR3 for alpha chain variable domain of TCR clone 200694 (TRAV13-1, TRAJ43)
CAAHNNNDMRF

SEQ ID NO: 401388 - protein, 15 aa, Homo sapiens
  CDR3 for beta chain variable domain of TCR clone 200694 (TRBV6-1, TRBJ2-2)
CASSSLRGDTGELFF

SEQ ID NO: 401389 - protein, 12 aa, Homo sapiens
  CDR3 for alpha chain variable domain of TCR clone 200695 (TRAV12-3, TRAJ40)
CAVSSGTYKYIF

SEQ ID NO: 401390 - protein, 15 aa, Homo sapiens
  CDR3 for beta chain variable domain of TCR clone 200695 (TRBV7-9, TRBJ2-7)
CARSPGGGLTYEQYF

SEQ ID NO: 401391 - protein, 16 aa, Homo sapiens
  CDR3 for alpha chain variable domain of TCR clone 200696 (TRAV30, TRAJ24)
CGTETVDADSWGKFQF

SEQ ID NO: 401392 - protein, 13 aa, Homo sapiens
  CDR3 for beta chain variable domain of TCR clone 200696 (TRBV4-1, TRBJ2-2)
CASSQENTGELFF

SEQ ID NO: 401393 - protein, 14 aa, Homo sapiens
  CDR3 for alpha chain variable domain of TCR clone 200697 (TRAV8-4, TRAJ34)
CAVSDPGDTDKLIF

SEQ ID NO: 401394 - protein, 14 aa, Homo sapiens
  CDR3 for beta chain variable domain of TCR clone 200697 (TRBV25-1, TRBJ1-1)
CASTHLGGNTEAFF

SEQ ID NO: 401395 - protein, 15 aa, Homo sapiens
  CDR3 for alpha chain variable domain of TCR clone 200698 (TRAV8-4, TRAJ10)
CAVSDQMGGGNKLNF

SEQ ID NO: 401396 - protein, 16 aa, Homo sapiens
  CDR3 for beta chain variable domain of TCR clone 200698 (TRBV20-1, TRBJ2-1)
CSARDVTPPPYNEQFF

SEQ ID NO: 401397 - protein, 15 aa, Homo sapiens
  CDR3 for alpha chain variable domain of TCR clone 200699 (TRAV3, TRAJ22)
CAVRDRGGSARQLTF

SEQ ID NO: 401398 - protein, 16 aa, Homo sapiens
  CDR3 for beta chain variable domain of TCR clone 200699 (TRBV2, TRBJ1-5)
CASSESPQGLNQPQHF

SEQ ID NO: 401399 - protein, 11 aa, Homo sapiens
  CDR3 for alpha chain variable domain of TCR clone 200700 (TRAV3, TRAJ21)
CAVGNFNKFYI

SEQ ID NO: 401400 - protein, 16 aa, Homo sapiens
  CDR3 for beta chain variable domain of TCR clone 200700 (TRBV19, TRBJ2-1)
CASSKAGPSAYNEQFF

SEQ ID NO: 401401 - protein, 13 aa, Homo sapiens
  CDR3 for alpha chain variable domain of TCR clone 200701 (TRAV35, TRAJ42)
CAGFPGSQGNLIF

SEQ ID NO: 401402 - protein, 13 aa, Homo sapiens
  CDR3 for beta chain variable domain of TCR clone 200701 (TRBV7-9, TRBJ2-5)
CASTPVGQETQYF

SEQ ID NO: 401403 - protein, 23 aa, Homo sapiens
  CDR3 for alpha chain variable domain of TCR clone 200702 (TRAV12-1, TRAJ23)
SSVIQPPTSVWWYGDNQGGKLIF

SEQ ID NO: 401404 - protein, 13 aa, Homo sapiens
  CDR3 for beta chain variable domain of TCR clone 200702 (TRBV7-3, TRBJ1-1)
CASSQDWGAEAFF

SEQ ID NO: 401405 - protein, 14 aa, Homo sapiens
  CDR3 for alpha chain variable domain of TCR clone 200703 (TRAV20, TRAJ22)
CAVQGAGSARQLTF

SEQ ID NO: 401406 - protein, 18 aa, Homo sapiens
  CDR3 for beta chain variable domain of TCR clone 200703 (TRBV7-9, TRBJ2-7)
CASSLTTSGSRTWYEQYF

SEQ ID NO: 401407 - protein, 14 aa, Homo sapiens
  CDR3 for alpha chain variable domain of TCR clone 200704 (TRAV1-2, TRAJ16)
CAVNRFSDGQKLLF

SEQ ID NO: 401408 - protein, 17 aa, Homo sapiens
  CDR3 for beta chain variable domain of TCR clone 200704 (TRBV28, TRBJ2-5)
CASSTPEGDALQQTQYF

SEQ ID NO: 401409 - protein, 14 aa, Homo sapiens
  CDR3 for alpha chain variable domain of TCR clone 200705 (TRAV2, TRAJ9)
CAVEDRSGGFKTIF

SEQ ID NO: 401410 - protein, 12 aa, Homo sapiens
  CDR3 for beta chain variable domain of TCR clone 200705 (TRBV11-2, TRBJ2-1)
CASSPGNNGQFF

SEQ ID NO: 401411 - protein, 14 aa, Homo sapiens
  CDR3 for alpha chain variable domain of TCR clone 200706 (TRAV16, TRAJ17)
CSPRIKAAGKKLTF

SEQ ID NO: 401412 - protein, 17 aa, Homo sapiens
  CDR3 for beta chain variable domain of TCR clone 200706 (TRBV7-2, TRBJ2-3)
CASSSYSGTRRADTQYF

SEQ ID NO: 401413 - protein, 13 aa, Homo sapiens
  CDR3 for alpha chain variable domain of TCR clone 200707 (TRAV2, TRAJ40)
CAVVTSGTYKYIF

SEQ ID NO: 401414 - protein, 16 aa, Homo sapiens
  CDR3 for beta chain variable domain of TCR clone 200707 (TRBV19, TRBJ1-1)
CASRFGGPVTGTEAFF

SEQ ID NO: 401415 - protein, 14 aa, Homo sapiens
  CDR3 for alpha chain variable domain of TCR clone 200708 (TRAV13-2, TRAJ22)
CADGTLGSAWQLTF

SEQ ID NO: 401416 - protein, 15 aa, Homo sapiens
  CDR3 for beta chain variable domain of TCR clone 200708 (TRBV6-3, TRBJ2-7)
CASSSPGTVFYEQYF

SEQ ID NO: 401417 - protein, 14 aa, Homo sapiens
  CDR3 for alpha chain variable domain of TCR clone 200709 (TRAV17, TRAJ6)
CATPAMGGSYIPTF

SEQ ID NO: 401418 - protein, 19 aa, Homo sapiens
  CDR3 for beta chain variable domain of TCR clone 200709 (TRBV2, TRBJ2-7)
CASSDDETSGRANDYEQYF

SEQ ID NO: 401419 - protein, 14 aa, Homo sapiens
  CDR3 for alpha chain variable domain of TCR clone 200710 (TRAV1-2, TRAJ8)
CAVREDTGFQRLVF

SEQ ID NO: 401420 - protein, 15 aa, Homo sapiens
  CDR3 for beta chain variable domain of TCR clone 200710 (TRBV6-3, TRBJ2-7)
CASSAPGTVVYEQYF

SEQ ID NO: 401421 - protein, 14 aa, Homo sapiens
  CDR3 for alpha chain variable domain of TCR clone 200711 (TRAV1-2, TRAJ16)
CAVRSASVGQKLLF

SEQ ID NO: 401422 - protein, 17 aa, Homo sapiens
  CDR3 for beta chain variable domain of TCR clone 200711 (TRBV7-3, TRBJ2-3)
CASSLMKRMRGADTQYF

SEQ ID NO: 401423 - protein, 20 aa, Homo sapiens
  CDR3 for alpha chain variable domain of TCR clone 200712 (TRAV21, TRAJ4)
AASQPGDSATLSGGYNKLIF

SEQ ID NO: 401424 - protein, 19 aa, Homo sapiens
  CDR3 for beta chain variable domain of TCR clone 200712 (TRBV18, TRBJ1-3)
CASSPLSRTGMSSGNTIYF

SEQ ID NO: 401425 - protein, 13 aa, Homo sapiens
  CDR3 for alpha chain variable domain of TCR clone 200713 (TRAV26-1, TRAJ39)
CIVRVVAGNILTF

SEQ ID NO: 401426 - protein, 14 aa, Homo sapiens
  CDR3 for beta chain variable domain of TCR clone 200713 (TRBV20-1, TRBJ2-5)
CSARRQGIRETQYL

SEQ ID NO: 401427 - protein, 17 aa, Homo sapiens
  CDR3 for alpha chain variable domain of TCR clone 200714 (TRAV3, TRAJ6)
CAGRDGPRAGGSYIPTF

SEQ ID NO: 401428 - protein, 14 aa, Homo sapiens
  CDR3 for beta chain variable domain of TCR clone 200714 (TRBV7-2, TRBJ2-7)
CASNPKTSFYEQYF

SEQ ID NO: 401429 - protein, 13 aa, Homo sapiens
  CDR3 for alpha chain variable domain of TCR clone 200715 (TRAV30, TRAJ24)
CGTVTDSWGKLPF

SEQ ID NO: 401430 - protein, 14 aa, Homo sapiens
  CDR3 for beta chain variable domain of TCR clone 200715 (TRBV6-3, TRBJ2-2)
CASTYTPDTGELFF

SEQ ID NO: 401431 - protein, 16 aa, Homo sapiens
  CDR3 for alpha chain variable domain of TCR clone 200716 (TRAV23/DV6, TRAJ9)
CAASIGGNTGGFTTIF

SEQ ID NO: 401432 - protein, 13 aa, Homo sapiens
  CDR3 for beta chain variable domain of TCR clone 200716 (TRBV12-4, TRBJ1-1)
CASSPGTGFEAFF

SEQ ID NO: 401433 - protein, 12 aa, Homo sapiens
  CDR3 for alpha chain variable domain of TCR clone 200717 (TRAV12-3, TRAJ17)
CAMTLTGNKLTF

SEQ ID NO: 401434 - protein, 15 aa, Homo sapiens
  CDR3 for beta chain variable domain of TCR clone 200717 (TRBV20-1, TRBJ2-6)
CSARDQVSGMDEQYF

SEQ ID NO: 401435 - protein, 14 aa, Homo sapiens
  CDR3 for alpha chain variable domain of TCR clone 200718 (TRAV13-1, TRAJ23)
CAASRFGRGGKLIF

SEQ ID NO: 401436 - protein, 15 aa, Homo sapiens
  CDR3 for beta chain variable domain of TCR clone 200718 (TRBV7-2, TRBJ2-1)
CASSLVAGRYNEQFF

SEQ ID NO: 401437 - protein, 10 aa, Homo sapiens
  CDR3 for alpha chain variable domain of TCR clone 200719 (TRAV1-2, TRAJ20)
CALNDYKLSF

SEQ ID NO: 401438 - protein, 11 aa, Homo sapiens
  CDR3 for beta chain variable domain of TCR clone 200719 (TRBV29-1, TRBJ2-5)
CSEDRTGTQYF

SEQ ID NO: 401439 - protein, 14 aa, Homo sapiens
  CDR3 for alpha chain variable domain of TCR clone 200720 (TRAV12-2, TRAJ45)
CALPERGGADGLTF

SEQ ID NO: 401440 - protein, 18 aa, Homo sapiens
  CDR3 for beta chain variable domain of TCR clone 200720 (TRBV6-3, TRBJ2-2)
CASSYRPGGLDRPGELFF

SEQ ID NO: 401441 - protein, 14 aa, Homo sapiens
  CDR3 for alpha chain variable domain of TCR clone 200721 (TRAV13-1, TRAJ45)
CAATSGGGADGLTF

SEQ ID NO: 401442 - protein, 13 aa, Homo sapiens
  CDR3 for beta chain variable domain of TCR clone 200721 (TRBV12-4, TRBJ2-2)
CASRSRDTGELFF

SEQ ID NO: 401443 - protein, 16 aa, Homo sapiens
  CDR3 for alpha chain variable domain of TCR clone 200722 (TRAV26-1, TRAJ45)
CIVEKYSGGGADGLTF

SEQ ID NO: 401444 - protein, 15 aa, Homo sapiens
  CDR3 for beta chain variable domain of TCR clone 200722 (TRBV15, TRBJ2-7)
CHQQRPIKQAYEQYF

SEQ ID NO: 401445 - protein, 15 aa, Homo sapiens
  CDR3 for alpha chain variable domain of TCR clone 200723 (TRAV13-1, TRAJ17)
CAASIERAAGNKLTC

SEQ ID NO: 401446 - protein, 15 aa, Homo sapiens
  CDR3 for beta chain variable domain of TCR clone 200723 (TRBV6-1, TRBJ2-3)
CASSERGGITDTQYF

SEQ ID NO: 401447 - protein, 14 aa, Homo sapiens
  CDR3 for alpha chain variable domain of TCR clone 200724 (TRAV2, TRAJ37)
CAVDFTSNTGKLIF

SEQ ID NO: 401448 - protein, 18 aa, Homo sapiens
  CDR3 for beta chain variable domain of TCR clone 200724 (TRBV4-1, TRBJ1-5)
CASSQDPRGQGLNQPQHF

SEQ ID NO: 401449 - protein, 14 aa, Homo sapiens
  CDR3 for alpha chain variable domain of TCR clone 200725 (TRAV3, TRAJ9)
CALRLNTGGFKTIF

SEQ ID NO: 401450 - protein, 14 aa, Homo sapiens
  CDR3 for beta chain variable domain of TCR clone 200725 (TRBV20-1, TRBJ1-1)
CSAQTRIGGTQAFF

SEQ ID NO: 401451 - protein, 22 aa, Homo sapiens
  CDR3 for alpha chain variable domain of TCR clone 200726 (TRAV2, TRAJ22)
SSLLLILQVREADAAEQRRLTF

SEQ ID NO: 401452 - protein, 16 aa, Homo sapiens
  CDR3 for beta chain variable domain of TCR clone 200726 (TRBV2, TRBJ2-5)
CASSETQGVGEETQYF

SEQ ID NO: 401453 - protein, 16 aa, Homo sapiens
  CDR3 for alpha chain variable domain of TCR clone 200727 (TRAV3, TRAJ37)
CAVRGKWSGNTGKLIF

SEQ ID NO: 401454 - protein, 13 aa, Homo sapiens
  CDR3 for beta chain variable domain of TCR clone 200727 (TRBV4-2, TRBJ1-1)
CASSQAGNTEAFF

SEQ ID NO: 401455 - protein, 21 aa, Homo sapiens
  CDR3 for alpha chain variable domain of TCR clone 200728 (TRAV30, TRAJ43)
GLPAQLPRNLLPIIELNDMRF

SEQ ID NO: 401456 - protein, 14 aa, Homo sapiens
  CDR3 for beta chain variable domain of TCR clone 200728 (TRBV27, TRBJ2-1)
CASRHLGGGKEKFF

SEQ ID NO: 401457 - protein, 14 aa, Homo sapiens
  CDR3 for alpha chain variable domain of TCR clone 200729 (TRAV8-6, TRAJ33)
CAVSGMDSNYQLIW

SEQ ID NO: 401458 - protein, 14 aa, Homo sapiens
  CDR3 for beta chain variable domain of TCR clone 200729 (TRBV7-2, TRBJ2-2)
CASRGQGAAGELFF

SEQ ID NO: 401459 - protein, 16 aa, Homo sapiens
  CDR3 for alpha chain variable domain of TCR clone 200730 (TRAV12-3, TRAJ53)
CAMSPGSGGSNYKLTF

SEQ ID NO: 401460 - protein, 14 aa, Homo sapiens
  CDR3 for beta chain variable domain of TCR clone 200730 (TRBV12-5, TRBJ2-7)
CASGSRTHQETQYF

SEQ ID NO: 401461 - protein, 16 aa, Homo sapiens
  CDR3 for alpha chain variable domain of TCR clone 200731 (TRAV12-2, TRAJ40)
CAVIRGGTSGTYKYIF

SEQ ID NO: 401462 - protein, 14 aa, Homo sapiens
  CDR3 for beta chain variable domain of TCR clone 200731 (TRBV7-2, TRBJ2-7)
CASRSQGAAYEQYF

SEQ ID NO: 401463 - protein, 14 aa, Homo sapiens
  CDR3 for alpha chain variable domain of TCR clone 200732 (TRAV8-6, TRAJ54)
CAVSDFQGAQKLVF

SEQ ID NO: 401464 - protein, 15 aa, Homo sapiens
  CDR3 for beta chain variable domain of TCR clone 200732 (TRBV9, TRBJ1-6)
CASSVAGTGDSPLHF

SEQ ID NO: 401465 - protein, 14 aa, Homo sapiens
  CDR3 for alpha chain variable domain of TCR clone 200733 (TRAV13-2, TRAJ16)
CAENNWEDGQKLLF

SEQ ID NO: 401466 - protein, 14 aa, Homo sapiens
  CDR3 for beta chain variable domain of TCR clone 200733 (TRBV7-9, TRBJ1-1)
CASSLGVLKTEAFF

SEQ ID NO: 401467 - protein, 15 aa, Homo sapiens
  CDR3 for alpha chain variable domain of TCR clone 200734 (TRAV2, TRAJ11)
CAVGGRNSGYSTLPF

SEQ ID NO: 401468 - protein, 14 aa, Homo sapiens
  CDR3 for beta chain variable domain of TCR clone 200734 (TRBV4-1, TRBJ2-2)
CASSQAVNTGELFF

SEQ ID NO: 401469 - protein, 14 aa, Homo sapiens
  CDR3 for alpha chain variable domain of TCR clone 200735 (TRAV8-4, TRAJ9)
CAVRINTGGFKTIF

SEQ ID NO: 401470 - protein, 12 aa, Homo sapiens
  CDR3 for beta chain variable domain of TCR clone 200735 (TRBV11-2, TRBJ2-4)
CASSSASGSEYF

SEQ ID NO: 401471 - protein, 18 aa, Homo sapiens
  CDR3 for alpha chain variable domain of TCR clone 200736 (TRAV13-1, TRAJ52)
CAAKNPNAGGTSYGKLTF

SEQ ID NO: 401472 - protein, 13 aa, Homo sapiens
  CDR3 for beta chain variable domain of TCR clone 200736 (TRBV7-9, TRBJ2-5)
CASTPVGQETQYF

SEQ ID NO: 401473 - protein, 14 aa, Homo sapiens
  CDR3 for alpha chain variable domain of TCR clone 200737 (TRAV8-2, TRAJ23)
CVVSDDNQGGKLSF

SEQ ID NO: 401474 - protein, 16 aa, Homo sapiens
  CDR3 for beta chain variable domain of TCR clone 200737 (TRBV4-2, TRBJ2-5)
CASSQELVGSQETQYF

SEQ ID NO: 401475 - protein, 10 aa, Homo sapiens
  CDR3 for alpha chain variable domain of TCR clone 200738 (TRAV12-1, TRAJ20)
CVVNPRKLSF

SEQ ID NO: 401476 - protein, 13 aa, Homo sapiens
  CDR3 for beta chain variable domain of TCR clone 200738 (TRBV19, TRBJ1-2)
CASSVPGQDGYTF

SEQ ID NO: 401477 - protein, 15 aa, Homo sapiens
  CDR3 for alpha chain variable domain of TCR clone 200739 (TRAV12-3, TRAJ27)
CAMRAYNTNAGKSTF

SEQ ID NO: 401478 - protein, 13 aa, Homo sapiens
  CDR3 for beta chain variable domain of TCR clone 200739 (TRBV11-2, TRBJ2-5)
CASSSTGEETQYF

SEQ ID NO: 401479 - protein, 13 aa, Homo sapiens
  CDR3 for alpha chain variable domain of TCR clone 200740 (TRAV30, TRAJ29)
CGTEDSGNTPLVC

SEQ ID NO: 401480 - protein, 15 aa, Homo sapiens
  CDR3 for beta chain variable domain of TCR clone 200740 (TRBV6-1, TRBJ2-3)
CASSERGGITDTQYF

SEQ ID NO: 401481 - protein, 14 aa, Homo sapiens
  CDR3 for alpha chain variable domain of TCR clone 200741 (TRAV17, TRAJ22)
CATVLTGSARQLTF

SEQ ID NO: 401482 - protein, 13 aa, Homo sapiens
  CDR3 for beta chain variable domain of TCR clone 200741 (TRBV15, TRBJ1-6)
CATSGGLNSPLHF

SEQ ID NO: 401483 - protein, 14 aa, Homo sapiens
  CDR3 for alpha chain variable domain of TCR clone 200742 (TRAV1-2, TRAJ22)
CAVRGRGSARQLTF

SEQ ID NO: 401484 - protein, 15 aa, Homo sapiens
  CDR3 for beta chain variable domain of TCR clone 200742 (TRBV28, TRBJ2-7)
CASSPGGRGFYEQYF

SEQ ID NO: 401485 - protein, 13 aa, Homo sapiens
  CDR3 for alpha chain variable domain of TCR clone 200743 (TRAV1-2, TRAJ9)
CAALNTGGFKTIF

SEQ ID NO: 401486 - protein, 13 aa, Homo sapiens
  CDR3 for beta chain variable domain of TCR clone 200743 (TRBV7-3, TRBJ1-1)
CASSLAQGTEAFF

SEQ ID NO: 401487 - protein, 14 aa, Homo sapiens
  CDR3 for alpha chain variable domain of TCR clone 200744 (TRAV20, TRAJ16)
CAVRFFSDGKKLLF

SEQ ID NO: 401488 - protein, 16 aa, Homo sapiens
  CDR3 for beta chain variable domain of TCR clone 200744 (TRBV5-1, TRBJ2-3)
CASSSIGAGSTDTQYF

SEQ ID NO: 401489 - protein, 15 aa, Homo sapiens
  CDR3 for alpha chain variable domain of TCR clone 200745 (TRAV14/DV4, TRAJ10)
CAMRELTGGGNKLTL

SEQ ID NO: 401490 - protein, 15 aa, Homo sapiens
  CDR3 for beta chain variable domain of TCR clone 200745 (TRBV3-1, TRBJ2-5)
CASSANLGGPETQYF

SEQ ID NO: 401491 - protein, 16 aa, Homo sapiens
  CDR3 for alpha chain variable domain of TCR clone 200746 (TRAV3, TRAJ37)
CAVRVRGSVNTGKLIF

SEQ ID NO: 401492 - protein, 13 aa, Homo sapiens
  CDR3 for beta chain variable domain of TCR clone 200746 (TRBV14, TRBJ2-1)
CASSQDRRNEQFF

SEQ ID NO: 401493 - protein, 15 aa, Homo sapiens
  CDR3 for alpha chain variable domain of TCR clone 200747 (TRAV3, TRAJ20)
CAVSDIKLSDYTLSF

SEQ ID NO: 401494 - protein, 15 aa, Homo sapiens
  CDR3 for beta chain variable domain of TCR clone 200747 (TRBV7-9, TRBJ1-6)
CASSSPGRGNSPLHF

SEQ ID NO: 401495 - protein, 16 aa, Homo sapiens
  CDR3 for alpha chain variable domain of TCR clone 200748 (TRAV13-2, TRAJ32)
CAENRNYGGATNKLIF

SEQ ID NO: 401496 - protein, 14 aa, Homo sapiens
  CDR3 for beta chain variable domain of TCR clone 200748 (TRBV15, TRBJ2-5)
CATSSTGYQETQYF

SEQ ID NO: 401497 - protein, 13 aa, Homo sapiens
  CDR3 for alpha chain variable domain of TCR clone 200749 (TRAV12-2, TRAJ39)
CAVNNNAGNMLTF

SEQ ID NO: 401498 - protein, 16 aa, Homo sapiens
  CDR3 for beta chain variable domain of TCR clone 200749 (TRBV6-1, TRBJ2-5)
CASSETLDRGAETQYF

SEQ ID NO: 401499 - protein, 13 aa, Homo sapiens
  CDR3 for alpha chain variable domain of TCR clone 200750 (TRAV41, TRAJ54)
CAVRIQGAQKLVF

SEQ ID NO: 401500 - protein, 13 aa, Homo sapiens
  CDR3 for beta chain variable domain of TCR clone 200750 (TRBV7-9, TRBJ1-2)
CASSLKQNYGYSF

SEQ ID NO: 401501 - protein, 11 aa, Homo sapiens
  CDR3 for alpha chain variable domain of TCR clone 200751 (TRAV2, TRAJ13)
CASGGYQKVTF

SEQ ID NO: 401502 - protein, 15 aa, Homo sapiens
  CDR3 for beta chain variable domain of TCR clone 200751 (TRBV20-1, TRBJ2-7)
CSARDRVSGMDEEYF

SEQ ID NO: 401503 - protein, 10 aa, Homo sapiens
  CDR3 for alpha chain variable domain of TCR clone 200752 (TRAV36/DV7, TRAJ49)
CALPGNQFYF

SEQ ID NO: 401504 - protein, 13 aa, Homo sapiens
  CDR3 for beta chain variable domain of TCR clone 200752 (TRBV4-1, TRBJ2-7)
CASSQGQAYEQYF

SEQ ID NO: 401505 - protein, 13 aa, Homo sapiens
  CDR3 for alpha chain variable domain of TCR clone 200753 (TRAV21, TRAJ27)
CAARPGNAGKSTF

SEQ ID NO: 401506 - protein, 13 aa, Homo sapiens
  CDR3 for beta chain variable domain of TCR clone 200753 (TRBV18, TRBJ2-7)
CASQSGGGYEQYL

SEQ ID NO: 401507 - protein, 12 aa, Homo sapiens
  CDR3 for alpha chain variable domain of TCR clone 200754 (TRAV3, TRAJ27)
CAVRDKAGKSTF

SEQ ID NO: 401508 - protein, 14 aa, Homo sapiens
  CDR3 for beta chain variable domain of TCR clone 200754 (TRBV5-1, TRBJ1-2)
CASSVGSTNYGYTF

SEQ ID NO: 401509 - protein, 15 aa, Homo sapiens
  CDR3 for alpha chain variable domain of TCR clone 200755 (TRAV25, TRAJ53)
CPTSNSGRSNYKLTF

SEQ ID NO: 401510 - protein, 14 aa, Homo sapiens
  CDR3 for beta chain variable domain of TCR clone 200755 (TRBV11-2, TRBJ2-3)
CASSRLARTDTQYF

SEQ ID NO: 401511 - protein, 16 aa, Homo sapiens
  CDR3 for alpha chain variable domain of TCR clone 200756 (TRAV23/DV6, TRAJ48)
CAASGVVNFVNEKLTF

SEQ ID NO: 401512 - protein, 16 aa, Homo sapiens
  CDR3 for beta chain variable domain of TCR clone 200756 (TRBV4-2, TRBJ2-5)
CASSQELVGSQETQYF

SEQ ID NO: 401513 - protein, 16 aa, Homo sapiens
  CDR3 for alpha chain variable domain of TCR clone 200757 (TRAV26-1, TRAJ52)
CIVSNAGGTSYGKLTF

SEQ ID NO: 401514 - protein, 16 aa, Homo sapiens
  CDR3 for beta chain variable domain of TCR clone 200757 (TRBV5-1, TRBJ2-1)
CASSVEGRGLYKEQFF

SEQ ID NO: 401515 - protein, 14 aa, Homo sapiens
  CDR3 for alpha chain variable domain of TCR clone 200758 (TRAV17, TRAJ57)
CATDPQGGSEKLVF

SEQ ID NO: 401516 - protein, 14 aa, Homo sapiens
  CDR3 for beta chain variable domain of TCR clone 200758 (TRBV7-8, TRBJ2-7)
CSSSPRDRVYEQYF

SEQ ID NO: 401517 - protein, 12 aa, Homo sapiens
  CDR3 for alpha chain variable domain of TCR clone 200759 (TRAV17, TRAJ39)
CATGAAGNMLTF

SEQ ID NO: 401518 - protein, 14 aa, Homo sapiens
  CDR3 for beta chain variable domain of TCR clone 200759 (TRBV4-1, TRBJ2-2)
CSSSQAVNTGELFF

SEQ ID NO: 401519 - protein, 14 aa, Homo sapiens
  CDR3 for alpha chain variable domain of TCR clone 200760 (TRAV1-2, TRAJ16)
CAVNRFSDGQKLLF

SEQ ID NO: 401520 - protein, 16 aa, Homo sapiens
  CDR3 for beta chain variable domain of TCR clone 200760 (TRBV9, TRBJ2-1)
CASSVGGGGNDNEQFF

SEQ ID NO: 401521 - protein, 13 aa, Homo sapiens
  CDR3 for alpha chain variable domain of TCR clone 200761 (TRAV1-1, TRAJ38)
CASNAGNNRKLIW

SEQ ID NO: 401522 - protein, 13 aa, Homo sapiens
  CDR3 for beta chain variable domain of TCR clone 200761 (TRBV4-2, TRBJ1-1)
CASSQAGNTEAFF

SEQ ID NO: 401523 - protein, 18 aa, Homo sapiens
  CDR3 for alpha chain variable domain of TCR clone 200762 (TRAV29/DV5, TRAJ52)
CAAGFRGAGGTSYGKLTF

SEQ ID NO: 401524 - protein, 16 aa, Homo sapiens
  CDR3 for beta chain variable domain of TCR clone 200762 (TRBV3-1, TRBJ2-5)
CASSQDWASGQETQYF

SEQ ID NO: 401525 - protein, 13 aa, Homo sapiens
  CDR3 for alpha chain variable domain of TCR clone 200763 (TRAV8-6, TRAJ49)
CAVITNTGNQFYF

SEQ ID NO: 401526 - protein, 15 aa, Homo sapiens
  CDR3 for beta chain variable domain of TCR clone 200763 (TRBV25-1, TRBJ1-4)
CASSPGDSTNEKLFF

SEQ ID NO: 401527 - protein, 15 aa, Homo sapiens
  CDR3 for alpha chain variable domain of TCR clone 200764 (TRAV35, TRAJ40)
CAGQRGTSGTHNYIF

SEQ ID NO: 401528 - protein, 14 aa, Homo sapiens
  CDR3 for beta chain variable domain of TCR clone 200764 (TRBV7-3, TRBJ2-1)
CASSLAGGTNEQFF

SEQ ID NO: 401529 - protein, 11 aa, Homo sapiens
  CDR3 for alpha chain variable domain of TCR clone 200765 (TRAV21, TRAJ34)
CAVTNTDKLIF

SEQ ID NO: 401530 - protein, 15 aa, Homo sapiens
  CDR3 for beta chain variable domain of TCR clone 200765 (TRBV5-1, TRBJ2-6)
CASSLDPSGANVLTF

SEQ ID NO: 401531 - protein, 15 aa, Homo sapiens
  CDR3 for alpha chain variable domain of TCR clone 200766 (TRAV8-3, TRAJ27)
CTVGPSKTNAGKSTF

SEQ ID NO: 401532 - protein, 12 aa, Homo sapiens
  CDR3 for beta chain variable domain of TCR clone 200766 (TRBV11-2, TRBJ2-2)
CASSLGGGELFF

SEQ ID NO: 401533 - protein, 13 aa, Homo sapiens
  CDR3 for alpha chain variable domain of TCR clone 200767 (TRAV27, TRAJ41)
CAGEGNSGYALNS

SEQ ID NO: 401534 - protein, 14 aa, Homo sapiens
  CDR3 for beta chain variable domain of TCR clone 200767 (TRBV12-5, TRBJ2-5)
CASGSRTHQETQYF

SEQ ID NO: 401535 - protein, 14 aa, Homo sapiens
  CDR3 for alpha chain variable domain of TCR clone 200768 (TRAV1-2, TRAJ8)
CAVREDTGFMKLVF

SEQ ID NO: 401536 - protein, 15 aa, Homo sapiens
  CDR3 for beta chain variable domain of TCR clone 200768 (TRBV6-3, TRBJ2-7)
CASSSPGTVFYEQYF

SEQ ID NO: 401537 - protein, 14 aa, Homo sapiens
  CDR3 for alpha chain variable domain of TCR clone 200769 (TRAV1-2, TRAJ8)
CAVREDTGFQKLVF

SEQ ID NO: 401538 - protein, 14 aa, Homo sapiens
  CDR3 for beta chain variable domain of TCR clone 200769 (TRBV18, TRBJ1-1)
CANSPPTGRTEAFF

SEQ ID NO: 401539 - protein, 16 aa, Homo sapiens
  CDR3 for alpha chain variable domain of TCR clone 200770 (TRAV12-3, TRAJ53)
CAMSPGSGGSHSKLTF

SEQ ID NO: 401540 - protein, 20 aa, Homo sapiens
  CDR3 for beta chain variable domain of TCR clone 200770 (TRBV7-8, TRBJ2-2)
CASSHLFPGPTIHITGELFF

SEQ ID NO: 401541 - protein, 18 aa, Homo sapiens
  CDR3 for alpha chain variable domain of TCR clone 200771 (TRAV26-2, TRAJ45)
CILRDRVDQEEVLTDSPL

SEQ ID NO: 401542 - protein, 15 aa, Homo sapiens
  CDR3 for beta chain variable domain of TCR clone 200771 (TRBV7-6, TRBJ2-5)
CASSKPTGPQETQYF

SEQ ID NO: 401543 - protein, 16 aa, Homo sapiens
  CDR3 for alpha chain variable domain of TCR clone 200772 (TRAV35, TRAJ28)
CAGQRNSGAGSYQLTF

SEQ ID NO: 401544 - protein, 14 aa, Homo sapiens
  CDR3 for beta chain variable domain of TCR clone 200772 (TRBV18, TRBJ2-7)
CASSPRGGAYEQYF

SEQ ID NO: 401545 - protein, 16 aa, Homo sapiens
  CDR3 for alpha chain variable domain of TCR clone 200773 (TRAV38-1, TRAJ45)
CAFTESTGGGADGLTF

SEQ ID NO: 401546 - protein, 15 aa, Homo sapiens
  CDR3 for beta chain variable domain of TCR clone 200773 (TRBV6-1, TRBJ1-5)
CASSELREGNQPQHF

SEQ ID NO: 401547 - protein, 15 aa, Homo sapiens
  CDR3 for alpha chain variable domain of TCR clone 200774 (TRAV8-3, TRAJ11)
CAVGLLNSWYSTLTF

SEQ ID NO: 401548 - protein, 16 aa, Homo sapiens
  CDR3 for beta chain variable domain of TCR clone 200774 (TRBV7-9, TRBJ1-2)
CASSLGFSSGEDGYTF

SEQ ID NO: 401549 - protein, 17 aa, Homo sapiens
  CDR3 for alpha chain variable domain of TCR clone 200775 (TRAV26-2, TRAJ42)
CILRDVGYGESQGNLIF

SEQ ID NO: 401550 - protein, 16 aa, Homo sapiens
  CDR3 for beta chain variable domain of TCR clone 200775 (TRBV12-4, TRBJ2-7)
CANSLIGGTGTYEQYF

SEQ ID NO: 401551 - protein, 14 aa, Homo sapiens
  CDR3 for alpha chain variable domain of TCR clone 200776 (TRAV26-1, TRAJ38)
CIADTAGNNRKLIW

SEQ ID NO: 401552 - protein, 15 aa, Homo sapiens
  CDR3 for beta chain variable domain of TCR clone 200776 (TRBV27, TRBJ2-1)
CASSNGGGSSNEQFF

SEQ ID NO: 401553 - protein, 17 aa, Homo sapiens
  CDR3 for alpha chain variable domain of TCR clone 200777 (TRAV35, TRAJ28)
CAGLQVYSGAGSYQLTI

SEQ ID NO: 401554 - protein, 15 aa, Homo sapiens
  CDR3 for beta chain variable domain of TCR clone 200777 (TRBV2, TRBJ1-2)
CASSEIGGANYGYTF

SEQ ID NO: 401555 - protein, 18 aa, Homo sapiens
  CDR3 for alpha chain variable domain of TCR clone 200778 (TRAV26-1, TRAJ53)
CIVRVAWNSGGSNYKLTF

SEQ ID NO: 401556 - protein, 12 aa, Homo sapiens
  CDR3 for beta chain variable domain of TCR clone 200778 (TRBV19, TRBJ2-1)
CASSRQGAEQFF

SEQ ID NO: 401557 - protein, 14 aa, Homo sapiens
  CDR3 for alpha chain variable domain of TCR clone 200779 (TRAV12-2, TRAJ36)
CAVKISTGANNLFF

SEQ ID NO: 401558 - protein, 14 aa, Homo sapiens
  CDR3 for beta chain variable domain of TCR clone 200779 (TRBV25-1, TRBJ1-2)
CAGSDTTGVVGYTF

SEQ ID NO: 401559 - protein, 12 aa, Homo sapiens
  CDR3 for alpha chain variable domain of TCR clone 200780 (TRAV12-3, TRAJ17)
CAMTLTGNKLTF

SEQ ID NO: 401560 - protein, 15 aa, Homo sapiens
  CDR3 for beta chain variable domain of TCR clone 200780 (TRBV10-2, TRBJ2-6)
RASSEQGTGANDLTF

SEQ ID NO: 401561 - protein, 12 aa, Homo sapiens
  CDR3 for alpha chain variable domain of TCR clone 200781 (TRAV27, TRAJ34)
CAEPYNTDKLIF

SEQ ID NO: 401562 - protein, 15 aa, Homo sapiens
  CDR3 for beta chain variable domain of TCR clone 200781 (TRBV9, TRBJ2-7)
CASSLGDFTTYEQYF

SEQ ID NO: 401563 - protein, 14 aa, Homo sapiens
  CDR3 for alpha chain variable domain of TCR clone 200782 (TRAV17, TRAJ54)
CATEANQGAQKLVF

SEQ ID NO: 401564 - protein, 14 aa, Homo sapiens
  CDR3 for beta chain variable domain of TCR clone 200782 (TRBV25-1, TRBJ1-1)
CASTHLGGNTEAFF

SEQ ID NO: 401565 - protein, 15 aa, Homo sapiens
  CDR3 for alpha chain variable domain of TCR clone 200783 (TRAV8-3, TRAJ11)
CAVGLLNSGYSTLTF

SEQ ID NO: 401566 - protein, 12 aa, Homo sapiens
  CDR3 for beta chain variable domain of TCR clone 200783 (TRBV5-4, TRBJ2-7)
CASSWAGQGENF

SEQ ID NO: 401567 - protein, 12 aa, Homo sapiens
  CDR3 for alpha chain variable domain of TCR clone 200784 (TRAV12-3, TRAJ17)
CAMTLTGNKLTF

SEQ ID NO: 401568 - protein, 10 aa, Homo sapiens
  CDR3 for beta chain variable domain of TCR clone 200784 (TRBV7-9, TRBJ1-2)
CASSLKQNLA

SEQ ID NO: 401569 - protein, 14 aa, Homo sapiens
  CDR3 for alpha chain variable domain of TCR clone 200785 (TRAV16, TRAJ22)
CALSGRGSARQLTF

SEQ ID NO: 401570 - protein, 14 aa, Homo sapiens
  CDR3 for beta chain variable domain of TCR clone 200785 (TRBV7-2, TRBJ2-7)
CASSPKTSFYEQYF

SEQ ID NO: 401571 - protein, 15 aa, Homo sapiens
  CDR3 for alpha chain variable domain of TCR clone 200786 (TRAV26-1, TRAJ22)
CIVRVSFWFCKATDL

SEQ ID NO: 401572 - protein, 13 aa, Homo sapiens
  CDR3 for beta chain variable domain of TCR clone 200786 (TRBV7-9, TRBJ1-2)
CANSLKQNYGYTF

SEQ ID NO: 401573 - protein, 13 aa, Homo sapiens
  CDR3 for alpha chain variable domain of TCR clone 200787 (TRAV20, TRAJ37)
CAGCSSNTGKLIF

SEQ ID NO: 401574 - protein, 15 aa, Homo sapiens
  CDR3 for beta chain variable domain of TCR clone 200787 (TRBV3-1, TRBJ2-7)
CASSQAPSGSYEQYF

SEQ ID NO: 401575 - protein, 15 aa, Homo sapiens
  CDR3 for alpha chain variable domain of TCR clone 200788 (TRAV2, TRAJ22)
CCGNWRSGSARQLTF

SEQ ID NO: 401576 - protein, 18 aa, Homo sapiens
  CDR3 for beta chain variable domain of TCR clone 200788 (TRBV7-9, TRBJ2-7)
CASSLTTSGSRTWYEQYF

SEQ ID NO: 401577 - protein, 18 aa, Homo sapiens
  CDR3 for alpha chain variable domain of TCR clone 200789 (TRAV26-1, TRAJ52)
CIVRVEGAGGTSYGKLTF

SEQ ID NO: 401578 - protein, 14 aa, Homo sapiens
  CDR3 for beta chain variable domain of TCR clone 200789 (TRBV11-2, TRBJ2-7)
CASSLGAGAYEQYF

SEQ ID NO: 401579 - protein, 14 aa, Homo sapiens
  CDR3 for alpha chain variable domain of TCR clone 200790 (TRAV8-4, TRAJ13)
CAVTLSGGYQKVPF

SEQ ID NO: 401580 - protein, 16 aa, Homo sapiens
  CDR3 for beta chain variable domain of TCR clone 200790 (TRBV5-7, TRBJ1-4)
CASSPSGGLKTEKLFF

SEQ ID NO: 401581 - protein, 17 aa, Homo sapiens
  CDR3 for alpha chain variable domain of TCR clone 200791 (TRAV3, TRAJ6)
CAVRDGPRAGGSYIPTF

SEQ ID NO: 401582 - protein, 15 aa, Homo sapiens
  CDR3 for beta chain variable domain of TCR clone 200791 (TRBV7-9, TRBJ1-2)
CASSSFGDTNYGYTF

SEQ ID NO: 401583 - protein, 14 aa, Homo sapiens
  CDR3 for alpha chain variable domain of TCR clone 200792 (TRAV20, TRAJ10)
CAVRVEGGGNKLTF

SEQ ID NO: 401584 - protein, 18 aa, Homo sapiens
  CDR3 for beta chain variable domain of TCR clone 200792 (TRBV24-1, TRBJ2-1)
CATSDLMFLGRGVHEQFC

SEQ ID NO: 401585 - protein, 11 aa, Homo sapiens
  CDR3 for alpha chain variable domain of TCR clone 200793 (TRAV27, TRAJ47)
CAGAYGNKLVF

SEQ ID NO: 401586 - protein, 15 aa, Homo sapiens
  CDR3 for beta chain variable domain of TCR clone 200793 (TRBV4-1, TRBJ2-5)
CASSQWDLYQETQYF

SEQ ID NO: 401587 - protein, 13 aa, Homo sapiens
  CDR3 for alpha chain variable domain of TCR clone 200794 (TRAV12-2, TRAJ45)
CAARGGGDDGLTF

SEQ ID NO: 401588 - protein, 13 aa, Homo sapiens
  CDR3 for beta chain variable domain of TCR clone 200794 (TRBV6-5, TRBJ2-5)
CASRTAGRETQYF

SEQ ID NO: 401589 - protein, 14 aa, Homo sapiens
  CDR3 for alpha chain variable domain of TCR clone 200795 (TRAV12-3, TRAJ10)
SHLPLTGGGNKLTF

SEQ ID NO: 401590 - protein, 15 aa, Homo sapiens
  CDR3 for beta chain variable domain of TCR clone 200795 (TRBV29-1, TRBJ2-6)
CSVGDRGSGANFLTF

SEQ ID NO: 401591 - protein, 14 aa, Homo sapiens
  CDR3 for alpha chain variable domain of TCR clone 200796 (TRAV38-1, TRAJ45)
CASHSGGGADGLTF

SEQ ID NO: 401592 - protein, 13 aa, Homo sapiens
  CDR3 for beta chain variable domain of TCR clone 200796 (TRBV7-9, TRBJ2-5)
CASLPSGRETQYF

SEQ ID NO: 401593 - protein, 10 aa, Homo sapiens
  CDR3 for alpha chain variable domain of TCR clone 200797 (TRAV1-2, TRAJ31)
CVSEDVRLMF

SEQ ID NO: 401594 - protein, 14 aa, Homo sapiens
  CDR3 for beta chain variable domain of TCR clone 200797 (TRBV19, TRBJ2-1)
CASPTFVLSGEQFF

SEQ ID NO: 401595 - protein, 13 aa, Homo sapiens
  CDR3 for alpha chain variable domain of TCR clone 200798 (TRAV1-2, TRAJ21)
CAALNTGGFKTIF

SEQ ID NO: 401596 - protein, 13 aa, Homo sapiens
  CDR3 for beta chain variable domain of TCR clone 200798 (TRBV27, TRBJ1-4)
CASSLMGDEKLFF

SEQ ID NO: 401597 - protein, 14 aa, Homo sapiens
  CDR3 for alpha chain variable domain of TCR clone 200799 (TRAV17, TRAJ57)
CATDPQGGSEKLVF

SEQ ID NO: 401598 - protein, 15 aa, Homo sapiens
  CDR3 for beta chain variable domain of TCR clone 200799 (TRBV27, TRBJ2-3)
CASSSLAGVIDTQYF

SEQ ID NO: 401599 - protein, 14 aa, Homo sapiens
  CDR3 for alpha chain variable domain of TCR clone 200800 (TRAV12-3, TRAJ10)
SQLPLTGGGNKLTF

SEQ ID NO: 401600 - protein, 12 aa, Homo sapiens
  CDR3 for beta chain variable domain of TCR clone 200800 (TRBV7-9, TRBJ2-7)
CASSIKREEQYF

SEQ ID NO: 401601 - protein, 12 aa, Homo sapiens
  CDR3 for alpha chain variable domain of TCR clone 200801 (TRAV1-1, TRAJ39)
CAVPVVGNMLTF

SEQ ID NO: 401602 - protein, 14 aa, Homo sapiens
  CDR3 for beta chain variable domain of TCR clone 200801 (TRBV19, TRBJ1-2)
CASSRQGSSIGYTF

SEQ ID NO: 401603 - protein, 15 aa, Homo sapiens
  CDR3 for alpha chain variable domain of TCR clone 200802 (TRAV17, TRAJ35)
CATAFVIGFGNVLHC

SEQ ID NO: 401604 - protein, 14 aa, Homo sapiens
  CDR3 for beta chain variable domain of TCR clone 200802 (TRBV6-1, TRBJ1-3)
CASVQGGGGNTIYF

SEQ ID NO: 401605 - protein, 13 aa, Homo sapiens
  CDR3 for alpha chain variable domain of TCR clone 200803 (TRAV35, TRAJ42)
CAGFPGSQGNLIF

SEQ ID NO: 401606 - protein, 14 aa, Homo sapiens
  CDR3 for beta chain variable domain of TCR clone 200803 (TRBV19, TRBJ2-1)
CASPTFVLSGEQFL

SEQ ID NO: 401607 - protein, 16 aa, Homo sapiens
  CDR3 for alpha chain variable domain of TCR clone 200804 (TRAV12-3, TRAJ53)
CAMSPGSGGSNYKPTF

SEQ ID NO: 401608 - protein, 11 aa, Homo sapiens
  CDR3 for beta chain variable domain of TCR clone 200804 (TRBV29-1, TRBJ2-5)
YSEDRTGTQYF

SEQ ID NO: 401609 - protein, 15 aa, Homo sapiens
  CDR3 for alpha chain variable domain of TCR clone 200805 (TRAV2, TRAJ9)
CAVEDRGTGGFKTIF

SEQ ID NO: 401610 - protein, 16 aa, Homo sapiens
  CDR3 for beta chain variable domain of TCR clone 200805 (TRBV24-1, TRBJ2-3)
CATSGPGTGETVTKYF

SEQ ID NO: 401611 - protein, 13 aa, Homo sapiens
  CDR3 for alpha chain variable domain of TCR clone 200806 (TRAV12-1, TRAJ34)
CVVTGYNTDKLIF

SEQ ID NO: 401612 - protein, 13 aa, Homo sapiens
  CDR3 for beta chain variable domain of TCR clone 200806 (TRBV28, TRBJ2-7)
CASKAWGVYEQYF

SEQ ID NO: 401613 - protein, 14 aa, Homo sapiens
  CDR3 for alpha chain variable domain of TCR clone 200807 (TRAV26-1, TRAJ39)
CIVRANNAGNMLTF

SEQ ID NO: 401614 - protein, 15 aa, Homo sapiens
  CDR3 for beta chain variable domain of TCR clone 200807 (TRBV28, TRBJ1-2)
CASSLMVGRRDGYTF

SEQ ID NO: 401615 - protein, 14 aa, Homo sapiens
  CDR3 for alpha chain variable domain of TCR clone 200808 (TRAV1-2, TRAJ16)
CAVNRFSDGQKLLF

SEQ ID NO: 401616 - protein, 14 aa, Homo sapiens
  CDR3 for beta chain variable domain of TCR clone 200808 (TRBV7-2, TRBJ2-1)
CASSLGVGYNEQFF

SEQ ID NO: 401617 - protein, 14 aa, Homo sapiens
  CDR3 for alpha chain variable domain of TCR clone 200809 (TRAV8-6, TRAJ13)
CAVFSSGGYQKVTF

SEQ ID NO: 401618 - protein, 14 aa, Homo sapiens
  CDR3 for beta chain variable domain of TCR clone 200809 (TRBV2, TRBJ2-1)
CASRTGSSYNEQFF

SEQ ID NO: 401619 - protein, 12 aa, Homo sapiens
  CDR3 for alpha chain variable domain of TCR clone 200810 (TRAV2, TRAJ33)
CAVPDSNYPLIW

SEQ ID NO: 401620 - protein, 15 aa, Homo sapiens
  CDR3 for beta chain variable domain of TCR clone 200810 (TRBV15, TRBJ1-5)
CATSRDPVSNQPQHF

SEQ ID NO: 401621 - protein, 15 aa, Homo sapiens
  CDR3 for alpha chain variable domain of TCR clone 200811 (TRAV26-1, TRAJ42)
CIVRVTGGSQGNLIF

SEQ ID NO: 401622 - protein, 14 aa, Homo sapiens
  CDR3 for beta chain variable domain of TCR clone 200811 (TRBV19, TRBJ2-2)
CATTGHANTGELFF

SEQ ID NO: 401623 - protein, 11 aa, Homo sapiens
  CDR3 for alpha chain variable domain of TCR clone 200812 (TRAV2, TRAJ33)
CAVASNYQLIW

SEQ ID NO: 401624 - protein, 15 aa, Homo sapiens
  CDR3 for beta chain variable domain of TCR clone 200812 (TRBV19, TRBJ1-2)
CASSVGRVLNYGYTF

SEQ ID NO: 401625 - protein, 14 aa, Homo sapiens
  CDR3 for alpha chain variable domain of TCR clone 200813 (TRAV12-3, TRAJ10)
SHLPLTGGGNKLTF

SEQ ID NO: 401626 - protein, 14 aa, Homo sapiens
  CDR3 for beta chain variable domain of TCR clone 200813 (TRBV19, TRBJ1-5)
CASSLGGGSQPRHF

SEQ ID NO: 401627 - protein, 15 aa, Homo sapiens
  CDR3 for alpha chain variable domain of TCR clone 200814 (TRAV8-4, TRAJ10)
CAVSDGPGGGNKLTF

SEQ ID NO: 401628 - protein, 13 aa, Homo sapiens
  CDR3 for beta chain variable domain of TCR clone 200814 (TRBV28, TRBJ1-3)
CASSFLGSGPIYF

SEQ ID NO: 401629 - protein, 12 aa, Homo sapiens
  CDR3 for alpha chain variable domain of TCR clone 200815 (TRAV35, TRAJ39)
LVPNNAGNMLTF

SEQ ID NO: 401630 - protein, 16 aa, Homo sapiens
  CDR3 for beta chain variable domain of TCR clone 200815 (TRBV2, TRBJ2-3)
CASSTSVEGVTDTQYF

SEQ ID NO: 401631 - protein, 16 aa, Homo sapiens
  CDR3 for alpha chain variable domain of TCR clone 200816 (TRAV26-1, TRAJ23)
CILRVHPYNQGGKLIF

SEQ ID NO: 401632 - protein, 15 aa, Homo sapiens
  CDR3 for beta chain variable domain of TCR clone 200816 (TRBV5-7, TRBJ2-7)
CASSPYFEGSYEQYF

SEQ ID NO: 401633 - protein, 14 aa, Homo sapiens
  CDR3 for alpha chain variable domain of TCR clone 200817 (TRAV1-1, TRAJ27)
GAVIYNTNAGKSTF

SEQ ID NO: 401634 - protein, 15 aa, Homo sapiens
  CDR3 for beta chain variable domain of TCR clone 200817 (TRBV7-2, TRBJ2-1)
CASSSGLAGGNEQFF

SEQ ID NO: 401635 - protein, 18 aa, Homo sapiens
  CDR3 for alpha chain variable domain of TCR clone 200818 (TRAV35, TRAJ28)
CAGHNYPLSGAGSYQLTF

SEQ ID NO: 401636 - protein, 15 aa, Homo sapiens
  CDR3 for beta chain variable domain of TCR clone 200818 (TRBV6-5, TRBJ2-1)
CASSYDAGAGNEQFF

SEQ ID NO: 401637 - protein, 15 aa, Homo sapiens
  CDR3 for alpha chain variable domain of TCR clone 200819 (TRAV27, TRAJ38)
CAARRNAGDNRKLIW

SEQ ID NO: 401638 - protein, 13 aa, Homo sapiens
  CDR3 for beta chain variable domain of TCR clone 200819 (TRBV12-5, TRBJ2-3)
YASGDRQSDTQYF

SEQ ID NO: 401639 - protein, 13 aa, Homo sapiens
  CDR3 for alpha chain variable domain of TCR clone 200820 (TRAV8-3, TRAJ20)
CAVGAQDDYKLSF

SEQ ID NO: 401640 - protein, 15 aa, Homo sapiens
  CDR3 for beta chain variable domain of TCR clone 200820 (TRBV4-1, TRBJ2-1)
CASSQVLAGRDEQFF

SEQ ID NO: 401641 - protein, 14 aa, Homo sapiens
  CDR3 for alpha chain variable domain of TCR clone 200821 (TRAV3, TRAJ21)
CAVESQANFNKFYF

SEQ ID NO: 401642 - protein, 18 aa, Homo sapiens
  CDR3 for beta chain variable domain of TCR clone 200821 (TRBV7-9, TRBJ2-1)
CASILAVSGTSGRNEQFF

SEQ ID NO: 401643 - protein, 13 aa, Homo sapiens
  CDR3 for alpha chain variable domain of TCR clone 200822 (TRAV16, TRAJ48)
CSPLNFGNEKLTF

SEQ ID NO: 401644 - protein, 12 aa, Homo sapiens
  CDR3 for beta chain variable domain of TCR clone 200822 (TRBV7-8, TRBJ2-7)
CASSLGDREQYF

SEQ ID NO: 401645 - protein, 15 aa, Homo sapiens
  CDR3 for alpha chain variable domain of TCR clone 200823 (TRAV25, TRAJ10)
CAEPLLTGGGNKLTF

SEQ ID NO: 401646 - protein, 15 aa, Homo sapiens
  CDR3 for beta chain variable domain of TCR clone 200823 (TRBV12-5, TRBJ2-2)
CASGRLGGNTGELFF

SEQ ID NO: 401647 - protein, 13 aa, Homo sapiens
  CDR3 for alpha chain variable domain of TCR clone 200824 (TRAV8-3, TRAJ28)
CAVGAVVSYQITF

SEQ ID NO: 401648 - protein, 14 aa, Homo sapiens
  CDR3 for beta chain variable domain of TCR clone 200824 (TRBV7-2, TRBJ2-7)
CASRSQGAAYEQYF

SEQ ID NO: 401649 - protein, 18 aa, Homo sapiens
  CDR3 for alpha chain variable domain of TCR clone 200825 (TRAV13-1, TRAJ52)
CAASKRSAGGTSYGKLTF

SEQ ID NO: 401650 - protein, 15 aa, Homo sapiens
  CDR3 for beta chain variable domain of TCR clone 200825 (TRBV7-3, TRBJ2-2)
CASSETGQGTGELFF

SEQ ID NO: 401651 - protein, 10 aa, Homo sapiens
  CDR3 for alpha chain variable domain of TCR clone 200826 (TRAV9-2, TRAJ23)
PLRQGGKLIF

SEQ ID NO: 401652 - protein, 15 aa, Homo sapiens
  CDR3 for beta chain variable domain of TCR clone 200826 (TRBV29-1, TRBJ2-7)
CSVEFFDRGSYEQYF

SEQ ID NO: 401653 - protein, 13 aa, Homo sapiens
  CDR3 for alpha chain variable domain of TCR clone 200827 (TRAV17, TRAJ39)
CAISTNAGNMLTF

SEQ ID NO: 401654 - protein, 15 aa, Homo sapiens
  CDR3 for beta chain variable domain of TCR clone 200827 (TRBV20-1, TRBJ2-1)
CSASSAGSSYNEQFF

SEQ ID NO: 401655 - protein, 14 aa, Homo sapiens
  CDR3 for alpha chain variable domain of TCR clone 200828 (TRAV1-2, TRAJ16)
CAVNRFSDGQKLLF

SEQ ID NO: 401656 - protein, 14 aa, Homo sapiens
  CDR3 for beta chain variable domain of TCR clone 200828 (TRBV7-9, TRBJ2-1)
CASSPRDSVYEQFF

SEQ ID NO: 401657 - protein, 15 aa, Homo sapiens
  CDR3 for alpha chain variable domain of TCR clone 200829 (TRAV26-1, TRAJ29)
CIVRVEGSGNTPLVF

SEQ ID NO: 401658 - protein, 14 aa, Homo sapiens
  CDR3 for beta chain variable domain of TCR clone 200829 (TRBV15, TRBJ2-7)
CATSPDRGLYEQYF

SEQ ID NO: 401659 - protein, 14 aa, Homo sapiens
  CDR3 for alpha chain variable domain of TCR clone 200830 (TRAV1-2, TRAJ16)
CAVNRFSYGQKLLF

SEQ ID NO: 401660 - protein, 16 aa, Homo sapiens
  CDR3 for beta chain variable domain of TCR clone 200830 (TRBV12-5, TRBJ2-5)
CASGPRTSGNQEAQYF

SEQ ID NO: 401661 - protein, 16 aa, Homo sapiens
  CDR3 for alpha chain variable domain of TCR clone 200831 (TRAV12-3, TRAJ53)
CAMSPGSGGSNYKLTF

SEQ ID NO: 401662 - protein, 15 aa, Homo sapiens
  CDR3 for beta chain variable domain of TCR clone 200831 (TRBV4-3, TRBJ1-6)
CASSQDSQGGSPLHF

SEQ ID NO: 401663 - protein, 13 aa, Homo sapiens
  CDR3 for alpha chain variable domain of TCR clone 200832 (TRAV21, TRAJ20)
CAVGLRVYYKLSF

SEQ ID NO: 401664 - protein, 11 aa, Homo sapiens
  CDR3 for beta chain variable domain of TCR clone 200832 (TRBV25-1, TRBJ2-1)
CATTRISEQFF

SEQ ID NO: 401665 - protein, 14 aa, Homo sapiens
  CDR3 for alpha chain variable domain of TCR clone 200833 (TRAV13-1, TRAJ36)
CAASIKTGANNLFF

SEQ ID NO: 401666 - protein, 18 aa, Homo sapiens
  CDR3 for beta chain variable domain of TCR clone 200833 (TRBV20-1, TRBJ2-3)
CSARDPWGQGLSTDTQYF

SEQ ID NO: 401667 - protein, 15 aa, Homo sapiens
  CDR3 for alpha chain variable domain of TCR clone 200834 (TRAV1-2, TRAJ28)
CAVQYSGDGSYQLTF

SEQ ID NO: 401668 - protein, 13 aa, Homo sapiens
  CDR3 for beta chain variable domain of TCR clone 200834 (TRBV20-1, TRBJ2-7)
CSATHTSGYEQYF

SEQ ID NO: 401669 - protein, 15 aa, Homo sapiens
  CDR3 for alpha chain variable domain of TCR clone 200835 (TRAV35, TRAJ58)
CAGRRQETSGSRLTF

SEQ ID NO: 401670 - protein, 11 aa, Homo sapiens
  CDR3 for beta chain variable domain of TCR clone 200835 (TRBV11-2, TRBJ1-1)
CAGSINTEAFF

SEQ ID NO: 401671 - protein, 14 aa, Homo sapiens
  CDR3 for alpha chain variable domain of TCR clone 200836 (TRAV1-2, TRAJ8)
CAVREDTGFQKLVF

SEQ ID NO: 401672 - protein, 15 aa, Homo sapiens
  CDR3 for beta chain variable domain of TCR clone 200836 (TRBV12-4, TRBJ2-7)
CASSQRTSGNYEQYF

SEQ ID NO: 401673 - protein, 12 aa, Homo sapiens
  CDR3 for alpha chain variable domain of TCR clone 200837 (TRAV17, TRAJ43)
CATDAFPADLRF

SEQ ID NO: 401674 - protein, 14 aa, Homo sapiens
  CDR3 for beta chain variable domain of TCR clone 200837 (TRBV20-1, TRBJ2-3)
CSARDGGRTDTQYF

SEQ ID NO: 401675 - protein, 11 aa, Homo sapiens
  CDR3 for alpha chain variable domain of TCR clone 200838 (TRAV2, TRAJ33)
CAVESNYQLIW

SEQ ID NO: 401676 - protein, 16 aa, Homo sapiens
  CDR3 for beta chain variable domain of TCR clone 200838 (TRBV5-1, TRBJ2-1)
CASSIRSGGSYNEQFF

SEQ ID NO: 401677 - protein, 11 aa, Homo sapiens
  CDR3 for alpha chain variable domain of TCR clone 200839 (TRAV1-1, TRAJ23)
CAVRQVGKLIF

SEQ ID NO: 401678 - protein, 14 aa, Homo sapiens
  CDR3 for beta chain variable domain of TCR clone 200839 (TRBV19, TRBJ2-1)
CASPTFVLSGEQFF

SEQ ID NO: 401679 - protein, 10 aa, Homo sapiens
  CDR3 for alpha chain variable domain of TCR clone 200840 (TRAV30, TRAJ48)
CGIGNEKLTF

SEQ ID NO: 401680 - protein, 16 aa, Homo sapiens
  CDR3 for beta chain variable domain of TCR clone 200840 (TRBV24-1, TRBJ2-2)
CATSDTGQGGTGELFF

SEQ ID NO: 401681 - protein, 17 aa, Homo sapiens
  CDR3 for alpha chain variable domain of TCR clone 200841 (TRAV8-6, TRAJ58)
CAVSSWVGETSGSRLTF

SEQ ID NO: 401682 - protein, 12 aa, Homo sapiens
  CDR3 for beta chain variable domain of TCR clone 200841 (TRBV12-5, TRBJ2-5)
CASGQGVETQYF

SEQ ID NO: 401683 - protein, 19 aa, Homo sapiens
  CDR3 for alpha chain variable domain of TCR clone 200842 (TRAV2, )
CAVEEDIQNPDPAVYQLSD

SEQ ID NO: 401684 - protein, 14 aa, Homo sapiens
  CDR3 for beta chain variable domain of TCR clone 200842 (TRBV19, TRBJ1-2)
CASNPGQAPYGYTF

SEQ ID NO: 401685 - protein, 18 aa, Homo sapiens
  CDR3 for alpha chain variable domain of TCR clone 200843 (TRAV8-4, TRAJ52)
CAVTRANAGGTSYGKLTF

SEQ ID NO: 401686 - protein, 13 aa, Homo sapiens
  CDR3 for beta chain variable domain of TCR clone 200843 (TRBV14, TRBJ2-1)
CASSREGGTEQFF

SEQ ID NO: 401687 - protein, 10 aa, Homo sapiens
  CDR3 for alpha chain variable domain of TCR clone 200844 (TRAV8-4, TRAJ43)
CAVSADDMRF

SEQ ID NO: 401688 - protein, 13 aa, Homo sapiens
  CDR3 for beta chain variable domain of TCR clone 200844 (TRBV12-4, TRBJ2-5)
CASRPGTEETQYF

SEQ ID NO: 401689 - protein, 12 aa, Homo sapiens
  CDR3 for alpha chain variable domain of TCR clone 200845 (TRAV1-1, TRAJ39)
CAVLVVGNMLTF

SEQ ID NO: 401690 - protein, 13 aa, Homo sapiens
  CDR3 for beta chain variable domain of TCR clone 200845 (TRBV28, TRBJ2-3)
CASSLPQVDTQYF

SEQ ID NO: 401691 - protein, 15 aa, Homo sapiens
  CDR3 for alpha chain variable domain of TCR clone 200846 (TRAV26-1, TRAJ44)
CIVRANTGTASKITF

SEQ ID NO: 401692 - protein, 13 aa, Homo sapiens
  CDR3 for beta chain variable domain of TCR clone 200846 (TRBV10-3, TRBJ2-7)
CASKLAVNYEQYF

SEQ ID NO: 401693 - protein, 14 aa, Homo sapiens
  CDR3 for alpha chain variable domain of TCR clone 200847 (TRAV4, TRAJ26)
CLVGPHNYGQNFVF

SEQ ID NO: 401694 - protein, 13 aa, Homo sapiens
  CDR3 for beta chain variable domain of TCR clone 200847 (TRBV12-4, TRBJ1-2)
CASSLRQGKGYTF

SEQ ID NO: 401695 - protein, 14 aa, Homo sapiens
  CDR3 for alpha chain variable domain of TCR clone 200848 (TRAV23/DV6, TRAJ17)
CAASIGAAVNKLTF

SEQ ID NO: 401696 - protein, 12 aa, Homo sapiens
  CDR3 for beta chain variable domain of TCR clone 200848 (TRBV20-1, TRBJ2-5)
CSAGGAGETQYF

SEQ ID NO: 401697 - protein, 12 aa, Homo sapiens
  CDR3 for alpha chain variable domain of TCR clone 200849 (TRAV41, TRAJ58)
CAVATSGSRLTF

SEQ ID NO: 401698 - protein, 15 aa, Homo sapiens
  CDR3 for beta chain variable domain of TCR clone 200849 (TRBV29-1, TRBJ2-6)
CSVGDRGSGANDLTF

SEQ ID NO: 401699 - protein, 16 aa, Homo sapiens
  CDR3 for alpha chain variable domain of TCR clone 200850 (TRAV20, TRAJ6)
CAVQAGGTGGSYIPTF

SEQ ID NO: 401700 - protein, 13 aa, Homo sapiens
  CDR3 for beta chain variable domain of TCR clone 200850 (TRBV4-2, TRBJ1-1)
CASSQAGNTEAFF

SEQ ID NO: 401701 - protein, 14 aa, Homo sapiens
  CDR3 for alpha chain variable domain of TCR clone 200851 (TRAV8-4, TRAJ9)
CAVRINTGGFKTIF

SEQ ID NO: 401702 - protein, 15 aa, Homo sapiens
  CDR3 for beta chain variable domain of TCR clone 200851 (TRBV10-2, TRBJ2-6)
CASSEQGTGANDLTV

SEQ ID NO: 401703 - protein, 13 aa, Homo sapiens
  CDR3 for alpha chain variable domain of TCR clone 200852 (TRAV1-2, TRAJ9)
CAVPNTGGFKTIF

SEQ ID NO: 401704 - protein, 14 aa, Homo sapiens
  CDR3 for beta chain variable domain of TCR clone 200852 (TRBV5-1, TRBJ2-2)
CASSLGGGSGELFF

SEQ ID NO: 401705 - protein, 18 aa, Homo sapiens
  CDR3 for alpha chain variable domain of TCR clone 200853 (TRAV21, TRAJ52)
CAVRPSPAGGTSYGKLTF

SEQ ID NO: 401706 - protein, 17 aa, Homo sapiens
  CDR3 for beta chain variable domain of TCR clone 200853 (TRBV4-1, TRBJ1-4)
CASSQEGPRGVEEKLFS

SEQ ID NO: 401707 - protein, 16 aa, Homo sapiens
  CDR3 for alpha chain variable domain of TCR clone 200854 (TRAV3, TRAJ37)
CAVRGKGSGNTGKLIF

SEQ ID NO: 401708 - protein, 12 aa, Homo sapiens
  CDR3 for beta chain variable domain of TCR clone 200854 (TRBV11-2, TRBJ2-2)
CASSLGGGELFV

SEQ ID NO: 401709 - protein, 13 aa, Homo sapiens
  CDR3 for alpha chain variable domain of TCR clone 200855 (TRAV12-2, TRAJ42)
CAVKRGSQGNLIF

SEQ ID NO: 401710 - protein, 14 aa, Homo sapiens
  CDR3 for beta chain variable domain of TCR clone 200855 (TRBV7-9, TRBJ2-7)
CASILGGSSYEQYF

SEQ ID NO: 401711 - protein, 15 aa, Homo sapiens
  CDR3 for alpha chain variable domain of TCR clone 200856 (TRAV8-3, TRAJ7)
CAVGSISYGNNRLAF

SEQ ID NO: 401712 - protein, 15 aa, Homo sapiens
  CDR3 for beta chain variable domain of TCR clone 200856 (TRBV4-3, TRBJ1-4)
CASSQDFGAREKLFF

SEQ ID NO: 401713 - protein, 11 aa, Homo sapiens
  CDR3 for alpha chain variable domain of TCR clone 200857 (TRAV13-1, TRAJ43)
CAAHNNNDMRF

SEQ ID NO: 401714 - protein, 16 aa, Homo sapiens
  CDR3 for beta chain variable domain of TCR clone 200857 (TRBV11-2, TRBJ1-1)
CASSLRQGGEHSKAFF

SEQ ID NO: 401715 - protein, 14 aa, Homo sapiens
  CDR3 for alpha chain variable domain of TCR clone 200858 (TRAV2, TRAJ37)
CAVDFTSNTGKLIF

SEQ ID NO: 401716 - protein, 16 aa, Homo sapiens
  CDR3 for beta chain variable domain of TCR clone 200858 (TRBV2, TRBJ2-4)
CASSEAPGGEQNIQYF

SEQ ID NO: 401717 - protein, 15 aa, Homo sapiens
  CDR3 for alpha chain variable domain of TCR clone 200859 (TRAV26-1, TRAJ29)
CIVRVEGSGNTTLVF

SEQ ID NO: 401718 - protein, 15 aa, Homo sapiens
  CDR3 for beta chain variable domain of TCR clone 200859 (TRBV7-9, TRBJ1-5)
CASSQGHQPNQLQHF

SEQ ID NO: 401719 - protein, 13 aa, Homo sapiens
  CDR3 for alpha chain variable domain of TCR clone 200860 (TRAV35, TRAJ33)
CAGPMDSNYQLIW

SEQ ID NO: 401720 - protein, 13 aa, Homo sapiens
  CDR3 for beta chain variable domain of TCR clone 200860 (TRBV10-3, TRBJ2-1)
CAISEFSGREQFF

SEQ ID NO: 401721 - protein, 14 aa, Homo sapiens
  CDR3 for alpha chain variable domain of TCR clone 200861 (TRAV38-2/DV8, TRAJ23)
CAYRSQNQGGKLIF

SEQ ID NO: 401722 - protein, 15 aa, Homo sapiens
  CDR3 for beta chain variable domain of TCR clone 200861 (TRBV11-3, TRBJ2-7)
CASSPGPASSYEQYF

SEQ ID NO: 401723 - protein, 14 aa, Homo sapiens
  CDR3 for alpha chain variable domain of TCR clone 200862 (TRAV12-3, TRAJ10)
SHLPLTGGGNKLTF

SEQ ID NO: 401724 - protein, 15 aa, Homo sapiens
  CDR3 for beta chain variable domain of TCR clone 200862 (TRBV7-8, TRBJ2-7)
CASSLERAGSYEQYF

SEQ ID NO: 401725 - protein, 15 aa, Homo sapiens
  CDR3 for alpha chain variable domain of TCR clone 200863 (TRAV35, TRAJ23)
CAGQRGYNQGGKLIF

SEQ ID NO: 401726 - protein, 16 aa, Homo sapiens
  CDR3 for beta chain variable domain of TCR clone 200863 (TRBV12-5, TRBJ2-5)
CASGPRTSGNQETQYF

SEQ ID NO: 401727 - protein, 13 aa, Homo sapiens
  CDR3 for alpha chain variable domain of TCR clone 200864 (TRAV27, TRAJ11)
CAGGGSGYSTLTF

SEQ ID NO: 401728 - protein, 14 aa, Homo sapiens
  CDR3 for beta chain variable domain of TCR clone 200864 (TRBV4-1, TRBJ2-2)
CASSQAVNTGELFF

SEQ ID NO: 401729 - protein, 15 aa, Homo sapiens
  CDR3 for alpha chain variable domain of TCR clone 200865 (TRAV8-1, TRAJ6)
CAVYAGAGGSYIPTF

SEQ ID NO: 401730 - protein, 14 aa, Homo sapiens
  CDR3 for beta chain variable domain of TCR clone 200865 (TRBV25-1, TRBJ1-6)
CASSLSADISPLHF

SEQ ID NO: 401731 - protein, 15 aa, Homo sapiens
  CDR3 for alpha chain variable domain of TCR clone 200866 (TRAV21, TRAJ24)
CAARSSTDSWGKLQF

SEQ ID NO: 401732 - protein, 16 aa, Homo sapiens
  CDR3 for beta chain variable domain of TCR clone 200866 (TRBV24-1, TRBJ2-3)
CATSDPGTGATDTQYF

SEQ ID NO: 401733 - protein, 14 aa, Homo sapiens
  CDR3 for alpha chain variable domain of TCR clone 200867 (TRAV8-3, TRAJ9)
CAVVYNTGGFKTIF

SEQ ID NO: 401734 - protein, 14 aa, Homo sapiens
  CDR3 for beta chain variable domain of TCR clone 200867 (TRBV7-3, TRBJ2-2)
CATSSGGYTGELFF

SEQ ID NO: 401735 - protein, 16 aa, Homo sapiens
  CDR3 for alpha chain variable domain of TCR clone 200868 (TRAV2, TRAJ4)
CAVEDRFSGGYNKLIF

SEQ ID NO: 401736 - protein, 13 aa, Homo sapiens
  CDR3 for beta chain variable domain of TCR clone 200868 (TRBV7-7, TRBJ2-5)
CASSRSVQETQYF

SEQ ID NO: 401737 - protein, 23 aa, Homo sapiens
  CDR3 for alpha chain variable domain of TCR clone 200869 (TRAV12-2, TRAJ22)
CAVSFRVHPGPPIVSVSARQLTF

SEQ ID NO: 401738 - protein, 13 aa, Homo sapiens
  CDR3 for beta chain variable domain of TCR clone 200869 (TRBV12-4, TRBJ1-2)
CASSLDSNYGYTF

SEQ ID NO: 401739 - protein, 15 aa, Homo sapiens
  CDR3 for alpha chain variable domain of TCR clone 200870 (TRAV4, TRAJ39)
CLVGPKNNAGNMLTF

SEQ ID NO: 401740 - protein, 14 aa, Homo sapiens
  CDR3 for beta chain variable domain of TCR clone 200870 (TRBV19, TRBJ2-7)
CASNFRDTFTGMYF

SEQ ID NO: 401741 - protein, 14 aa, Homo sapiens
  CDR3 for alpha chain variable domain of TCR clone 200871 (TRAV3, TRAJ37)
CAVKESGNTGKLIF

SEQ ID NO: 401742 - protein, 12 aa, Homo sapiens
  CDR3 for beta chain variable domain of TCR clone 200871 (TRBV11-2, TRBJ2-7)
CASSPPADEQYF

SEQ ID NO: 401743 - protein, 11 aa, Homo sapiens
  CDR3 for alpha chain variable domain of TCR clone 200872 (TRAV1-1, TRAJ23)
CAVRQGGELTF

SEQ ID NO: 401744 - protein, 20 aa, Homo sapiens
  CDR3 for beta chain variable domain of TCR clone 200872 (TRBV7-8, TRBJ2-2)
CASSHLFPGRTIHITGELFF

SEQ ID NO: 401745 - protein, 13 aa, Homo sapiens
  CDR3 for alpha chain variable domain of TCR clone 200873 (TRAV12-2, TRAJ20)
CAVYPSNDYKLSF

SEQ ID NO: 401746 - protein, 15 aa, Homo sapiens
  CDR3 for beta chain variable domain of TCR clone 200873 (TRBV4-1, TRBJ2-3)
CASGRGQGIPDTQYF

SEQ ID NO: 401747 - protein, 16 aa, Homo sapiens
  CDR3 for alpha chain variable domain of TCR clone 200874 (TRAV16, TRAJ4)
CALSRMFSGGYNKLIF

SEQ ID NO: 401748 - protein, 16 aa, Homo sapiens
  CDR3 for beta chain variable domain of TCR clone 200874 (TRBV12-4, TRBJ1-5)
CASSRSVGGSNQPQHF

SEQ ID NO: 401749 - protein, 15 aa, Homo sapiens
  CDR3 for alpha chain variable domain of TCR clone 200875 (TRAV26-1, TRAJ29)
CIVRVEGSGSTPLFF

SEQ ID NO: 401750 - protein, 15 aa, Homo sapiens
  CDR3 for beta chain variable domain of TCR clone 200875 (TRBV7-9, TRBJ1-5)
CASSQGHQPNQPQHF

SEQ ID NO: 401751 - protein, 11 aa, Homo sapiens
  CDR3 for alpha chain variable domain of TCR clone 200876 (TRAV16, TRAJ33)
CALHSNYQLIW

SEQ ID NO: 401752 - protein, 15 aa, Homo sapiens
  CDR3 for beta chain variable domain of TCR clone 200876 (TRBV4-1, TRBJ2-7)
RASSQQGQGFDEQYF

SEQ ID NO: 401753 - protein, 14 aa, Homo sapiens
  CDR3 for alpha chain variable domain of TCR clone 200877 (TRAV13-1, TRAJ44)
CAVKATGTASKLTF

SEQ ID NO: 401754 - protein, 17 aa, Homo sapiens
  CDR3 for beta chain variable domain of TCR clone 200877 (TRBV7-3, TRBJ2-3)
RASSLMKRMRGADTQYF

SEQ ID NO: 401755 - protein, 14 aa, Homo sapiens
  CDR3 for alpha chain variable domain of TCR clone 200878 (TRAV17, TRAJ6)
CATDASGGSYIPTF

SEQ ID NO: 401756 - protein, 15 aa, Homo sapiens
  CDR3 for beta chain variable domain of TCR clone 200878 (TRBV7-9, TRBJ1-1)
CASSLLEQGGTEAFF

SEQ ID NO: 401757 - protein, 16 aa, Homo sapiens
  CDR3 for alpha chain variable domain of TCR clone 200879 (TRAV23/DV6, TRAJ9)
CAASIGGNTGGFKTIF

SEQ ID NO: 401758 - protein, 14 aa, Homo sapiens
  CDR3 for beta chain variable domain of TCR clone 200879 (TRBV9, TRBJ2-7)
CASSVGVGSYEQYC

SEQ ID NO: 401759 - protein, 14 aa, Homo sapiens
  CDR3 for alpha chain variable domain of TCR clone 200880 (TRAV3, TRAJ33)
CAVRDMDSNYQLIW

SEQ ID NO: 401760 - protein, 20 aa, Homo sapiens
  CDR3 for beta chain variable domain of TCR clone 200880 (TRBV7-3, TRBJ1-2)
CNSVPAAFPRVMMANYGYTF

SEQ ID NO: 401761 - protein, 18 aa, Homo sapiens
  CDR3 for alpha chain variable domain of TCR clone 200881 (TRAV21, TRAJ52)
CAVRPSPAGGTRYGKLTF

SEQ ID NO: 401762 - protein, 15 aa, Homo sapiens
  CDR3 for beta chain variable domain of TCR clone 200881 (TRBV20-1, TRBJ2-7)
CSARDRVSGMDEQYF

SEQ ID NO: 401763 - protein, 14 aa, Homo sapiens
  CDR3 for alpha chain variable domain of TCR clone 200882 (TRAV12-3, TRAJ10)
SHLPLTGGGNKFTF

SEQ ID NO: 401764 - protein, 13 aa, Homo sapiens
  CDR3 for beta chain variable domain of TCR clone 200882 (TRBV20-1, TRBJ2-1)
TSGALPPGNEQFF

SEQ ID NO: 401765 - protein, 12 aa, Homo sapiens
  CDR3 for alpha chain variable domain of TCR clone 200883 (TRAV27, TRAJ11)
CAGASGYSTLTF

SEQ ID NO: 401766 - protein, 12 aa, Homo sapiens
  CDR3 for beta chain variable domain of TCR clone 200883 (TRBV11-2, TRBJ2-2)
CASSLGGGELFF

SEQ ID NO: 401767 - protein, 12 aa, Homo sapiens
  CDR3 for alpha chain variable domain of TCR clone 200884 (TRAV12-3, TRAJ17)
CAMTLTGNKLTF

SEQ ID NO: 401768 - protein, 13 aa, Homo sapiens
  CDR3 for beta chain variable domain of TCR clone 200884 (TRBV7-3, TRBJ1-1)
CDSSQDWGAEAFF

SEQ ID NO: 401769 - protein, 14 aa, Homo sapiens
  CDR3 for alpha chain variable domain of TCR clone 200885 (TRAV1-2, TRAJ16)
CAVNRFSDGQKRLF

SEQ ID NO: 401770 - protein, 15 aa, Homo sapiens
  CDR3 for beta chain variable domain of TCR clone 200885 (TRBV27, TRBJ2-3)
CASSSLAGVIDTQYF

SEQ ID NO: 401771 - protein, 13 aa, Homo sapiens
  CDR3 for alpha chain variable domain of TCR clone 200886 (TRAV13-1, TRAJ49)
CAAVVRGGNQLYF

SEQ ID NO: 401772 - protein, 16 aa, Homo sapiens
  CDR3 for beta chain variable domain of TCR clone 200886 (TRBV7-3, TRBJ2-1)
CASSLTVESSYNEQFF

SEQ ID NO: 401773 - protein, 21 aa, Homo sapiens
  CDR3 for alpha chain variable domain of TCR clone 200887 (TRAV8-3, )
CAVVTTRIPDIQNPDPPVYQL

SEQ ID NO: 401774 - protein, 14 aa, Homo sapiens
  CDR3 for beta chain variable domain of TCR clone 200887 (TRBV11-2, TRBJ2-7)
CASSPSTTSYEQYF

SEQ ID NO: 401775 - protein, 13 aa, Homo sapiens
  CDR3 for alpha chain variable domain of TCR clone 200888 (TRAV13-1, TRAJ21)
CAASIYNFNKFYF

SEQ ID NO: 401776 - protein, 10 aa, Homo sapiens
  CDR3 for beta chain variable domain of TCR clone 200888 (TRBV5-5, TRBJ2-7)
CASSSSGSET

SEQ ID NO: 401777 - protein, 13 aa, Homo sapiens
  CDR3 for alpha chain variable domain of TCR clone 200889 (TRAV23/DV6, TRAJ34)
CAAIENNTDKLIF

SEQ ID NO: 401778 - protein, 13 aa, Homo sapiens
  CDR3 for beta chain variable domain of TCR clone 200889 (TRBV29-1, TRBJ2-7)
CSVGRSGGYEQYF

SEQ ID NO: 401779 - protein, 13 aa, Homo sapiens
  CDR3 for alpha chain variable domain of TCR clone 200890 (TRAV13-1, TRAJ21)
CAASIYNFNKFYF

SEQ ID NO: 401780 - protein, 14 aa, Homo sapiens
  CDR3 for beta chain variable domain of TCR clone 200890 (TRBV19, TRBJ1-1)
CASLRTGLNTEAFF

SEQ ID NO: 401781 - protein, 13 aa, Homo sapiens
  CDR3 for alpha chain variable domain of TCR clone 200891 (TRAV12-2, TRAJ52)
CAVGGTSYGKLTF

SEQ ID NO: 401782 - protein, 14 aa, Homo sapiens
  CDR3 for beta chain variable domain of TCR clone 200891 (TRBV19, TRBJ2-1)
CASPTFVLSGEQFY

SEQ ID NO: 401783 - protein, 16 aa, Homo sapiens
  CDR3 for alpha chain variable domain of TCR clone 200892 (TRAV27, TRAJ13)
CAGAKSDSGGYQQFTF

SEQ ID NO: 401784 - protein, 15 aa, Homo sapiens
  CDR3 for beta chain variable domain of TCR clone 200892 (TRBV29-1, TRBJ2-1)
CSVGRHALFYNEQFF

SEQ ID NO: 401785 - protein, 14 aa, Homo sapiens
  CDR3 for alpha chain variable domain of TCR clone 200893 (TRAV12-3, TRAJ10)
SHLPLTGGRNKLTF

SEQ ID NO: 401786 - protein, 15 aa, Homo sapiens
  CDR3 for beta chain variable domain of TCR clone 200893 (TRBV13, TRBJ2-1)
CASSLLSGLNNEQFF

SEQ ID NO: 401787 - protein, 12 aa, Homo sapiens
  CDR3 for alpha chain variable domain of TCR clone 200894 (TRAV27, TRAJ35)
CAGADFGNVLHC

SEQ ID NO: 401788 - protein, 18 aa, Homo sapiens
  CDR3 for beta chain variable domain of TCR clone 200894 (TRBV4-3, TRBJ1-4)
CASSQGSGQGAANEKLFF

SEQ ID NO: 401789 - protein, 16 aa, Homo sapiens
  CDR3 for alpha chain variable domain of TCR clone 200895 (TRAV30, TRAJ24)
CGTEIVDADSWGNSSL

SEQ ID NO: 401790 - protein, 15 aa, Homo sapiens
  CDR3 for beta chain variable domain of TCR clone 200895 (TRBV29-1, TRBJ2-1)
CSVGRHALFYNEQFF

SEQ ID NO: 401791 - protein, 17 aa, Homo sapiens
  CDR3 for alpha chain variable domain of TCR clone 200896 (TRAV9-2, TRAJ45)
CALSGYYSGGGADGLTF

SEQ ID NO: 401792 - protein, 15 aa, Homo sapiens
  CDR3 for beta chain variable domain of TCR clone 200896 (TRBV4-3, TRBJ1-1)
CASSQELGRGTEAFF

SEQ ID NO: 401793 - protein, 12 aa, Homo sapiens
  CDR3 for alpha chain variable domain of TCR clone 200897 (TRAV12-3, TRAJ21)
CAMFNHFNKFYF

SEQ ID NO: 401794 - protein, 16 aa, Homo sapiens
  CDR3 for beta chain variable domain of TCR clone 200897 (TRBV7-9, TRBJ1-2)
CASSLAPLRAAYGYTF

SEQ ID NO: 401795 - protein, 13 aa, Homo sapiens
  CDR3 for alpha chain variable domain of TCR clone 200898 (TRAV26-2, TRAJ57)
CILSRCGSEKLVF

SEQ ID NO: 401796 - protein, 16 aa, Homo sapiens
  CDR3 for beta chain variable domain of TCR clone 200898 (TRBV18, TRBJ1-5)
CASSPRTGGGNQPQHF

SEQ ID NO: 401797 - protein, 18 aa, Homo sapiens
  CDR3 for alpha chain variable domain of TCR clone 200899 (TRAV21, TRAJ52)
CAVSPSPAGGTSYGKLTF

SEQ ID NO: 401798 - protein, 16 aa, Homo sapiens
  CDR3 for beta chain variable domain of TCR clone 200899 (TRBV19, TRBJ2-2)
CASRSPGTGATGELFF

SEQ ID NO: 401799 - protein, 18 aa, Homo sapiens
  CDR3 for alpha chain variable domain of TCR clone 200900 (TRAV21, TRAJ53)
CAVKGGENSGGSNYKLTF

SEQ ID NO: 401800 - protein, 14 aa, Homo sapiens
  CDR3 for beta chain variable domain of TCR clone 200900 (TRBV11-3, TRBJ1-5)
LTGDRLYYNQTQHF

SEQ ID NO: 401801 - protein, 11 aa, Homo sapiens
  CDR3 for alpha chain variable domain of TCR clone 200901 (TRAV27, TRAJ45)
CAGAQEEVLTD

SEQ ID NO: 401802 - protein, 16 aa, Homo sapiens
  CDR3 for beta chain variable domain of TCR clone 200901 (TRBV7-9, TRBJ2-2)
CASSGFGGANTGELFF

SEQ ID NO: 401803 - protein, 19 aa, Homo sapiens
  CDR3 for alpha chain variable domain of TCR clone 200902 (TRAV9-2, TRAJ52)
CALSFSLLSGGTSYGKRTF

SEQ ID NO: 401804 - protein, 14 aa, Homo sapiens
  CDR3 for beta chain variable domain of TCR clone 200902 (TRBV7-7, TRBJ2-7)
CASSLFQDSYEQYF

SEQ ID NO: 401805 - protein, 12 aa, Homo sapiens
  CDR3 for alpha chain variable domain of TCR clone 200903 (TRAV36/DV7, TRAJ40)
CAVGTGTYKYIF

SEQ ID NO: 401806 - protein, 15 aa, Homo sapiens
  CDR3 for beta chain variable domain of TCR clone 200903 (TRBV19, TRBJ2-1)
CASSIGLAGWDEQFF

SEQ ID NO: 401807 - protein, 15 aa, Homo sapiens
  CDR3 for alpha chain variable domain of TCR clone 200904 (TRAV26-2, TRAJ26)
CILRDFDNYGQNFVF

SEQ ID NO: 401808 - protein, 14 aa, Homo sapiens
  CDR3 for beta chain variable domain of TCR clone 200904 (TRBV29-1, TRBJ2-5)
CSFWTPYTGETQYF

SEQ ID NO: 401809 - protein, 13 aa, Homo sapiens
  CDR3 for alpha chain variable domain of TCR clone 200905 (TRAV16, TRAJ28)
CALTGAGSYQLTF

SEQ ID NO: 401810 - protein, 13 aa, Homo sapiens
  CDR3 for beta chain variable domain of TCR clone 200905 (TRBV4-2, TRBJ1-1)
CASSQAGNTEAFF

SEQ ID NO: 401811 - protein, 12 aa, Homo sapiens
  CDR3 for alpha chain variable domain of TCR clone 200906 (TRAV8-4, TRAJ43)
CAVSVNNNDMRF

SEQ ID NO: 401812 - protein, 15 aa, Homo sapiens
  CDR3 for beta chain variable domain of TCR clone 200906 (TRBV12-4, TRBJ1-2)
CASSFPRGLSYGYTF

SEQ ID NO: 401813 - protein, 11 aa, Homo sapiens
  CDR3 for alpha chain variable domain of TCR clone 200907 (TRAV13-1, TRAJ20)
CAASNDYKPSF

SEQ ID NO: 401814 - protein, 15 aa, Homo sapiens
  CDR3 for beta chain variable domain of TCR clone 200907 (TRBV6-3, TRBJ2-7)
CASSSPGTVFYEQYF

SEQ ID NO: 401815 - protein, 15 aa, Homo sapiens
  CDR3 for alpha chain variable domain of TCR clone 200908 (TRAV25, TRAJ52)
CAGRPGGTSYVKLTF

SEQ ID NO: 401816 - protein, 17 aa, Homo sapiens
  CDR3 for beta chain variable domain of TCR clone 200908 (TRBV7-8, TRBJ2-6)
CAGSAGTGGAGANVLTF

SEQ ID NO: 401817 - protein, 14 aa, Homo sapiens
  CDR3 for alpha chain variable domain of TCR clone 200909 (TRAV3, TRAJ36)
CAVRDGTGANNLFF

SEQ ID NO: 401818 - protein, 16 aa, Homo sapiens
  CDR3 for beta chain variable domain of TCR clone 200909 (TRBV7-3, TRBJ2-5)
CASIQPGGSVQETQCF

SEQ ID NO: 401819 - protein, 14 aa, Homo sapiens
  CDR3 for alpha chain variable domain of TCR clone 200910 (TRAV12-3, TRAJ10)
SHLPLTGGGNKLTF

SEQ ID NO: 401820 - protein, 15 aa, Homo sapiens
  CDR3 for beta chain variable domain of TCR clone 200910 (TRBV10-2, TRBJ2-6)
CASSEQGTGANDLSF

SEQ ID NO: 401821 - protein, 11 aa, Homo sapiens
  CDR3 for alpha chain variable domain of TCR clone 200911 (TRAV12-2, TRAJ39)
CAVNNMLTFGG

SEQ ID NO: 401822 - protein, 16 aa, Homo sapiens
  CDR3 for beta chain variable domain of TCR clone 200911 (TRBV5-3, TRBJ2-2)
CARGFGTGTNTGELFF

SEQ ID NO: 401823 - protein, 14 aa, Homo sapiens
  CDR3 for alpha chain variable domain of TCR clone 200912 (TRAV12-2, TRAJ17)
CAVLFKAAGNKLTF

SEQ ID NO: 401824 - protein, 16 aa, Homo sapiens
  CDR3 for beta chain variable domain of TCR clone 200912 (TRBV10-3, TRBJ2-2)
CAISGTGAAGTGELFF

SEQ ID NO: 401825 - protein, 19 aa, Homo sapiens
  CDR3 for alpha chain variable domain of TCR clone 200913 (TRAV21, TRAJ45)
CAVEAPRGDQEEVLTDSPL

SEQ ID NO: 401826 - protein, 10 aa, Homo sapiens
  CDR3 for beta chain variable domain of TCR clone 200913 (TRBV4-1, TRBJ2-7)
SRGDRHEQYF

SEQ ID NO: 401827 - protein, 12 aa, Homo sapiens
  CDR3 for alpha chain variable domain of TCR clone 200914 (TRAV13-1, TRAJ42)
SVLRGSQGNLIF

SEQ ID NO: 401828 - protein, 15 aa, Homo sapiens
  CDR3 for beta chain variable domain of TCR clone 200914 (TRBV2, TRBJ1-4)
CASSELGVEKLFLAV

SEQ ID NO: 401829 - protein, 14 aa, Homo sapiens
  CDR3 for alpha chain variable domain of TCR clone 200915 (TRAV26-2, TRAJ38)
CILYNAGNNRKLIW

SEQ ID NO: 401830 - protein, 13 aa, Homo sapiens
  CDR3 for beta chain variable domain of TCR clone 200915 (TRBV6-6, TRBJ2-3)
CASSQGGRDTQYF

SEQ ID NO: 401831 - protein, 13 aa, Homo sapiens
  CDR3 for alpha chain variable domain of TCR clone 200916 (TRAV4, TRAJ15)
FLVGPEAGTALIF

SEQ ID NO: 401832 - protein, 15 aa, Homo sapiens
  CDR3 for beta chain variable domain of TCR clone 200916 (TRBV7-2, TRBJ2-1)
CASSFDPGRRNEQFF

SEQ ID NO: 401833 - protein, 12 aa, Homo sapiens
  CDR3 for alpha chain variable domain of TCR clone 200917 (TRAV12-3, TRAJ17)
CAMTLTGNKLTF

SEQ ID NO: 401834 - protein, 14 aa, Homo sapiens
  CDR3 for beta chain variable domain of TCR clone 200917 (TRBV12-4, TRBJ1-1)
CASSLGTGGAEAFF

SEQ ID NO: 401835 - protein, 15 aa, Homo sapiens
  CDR3 for alpha chain variable domain of TCR clone 200918 (TRAV36/DV7, TRAJ21)
CALKFYFGSGTKLNE

SEQ ID NO: 401836 - protein, 15 aa, Homo sapiens
  CDR3 for beta chain variable domain of TCR clone 200918 (TRBV28, TRBJ2-3)
CASSPDRQGANTQYF

SEQ ID NO: 401837 - protein, 12 aa, Homo sapiens
  CDR3 for alpha chain variable domain of TCR clone 200919 (TRAV8-3, TRAJ7)
CAVGAGEQQTRF

SEQ ID NO: 401838 - protein, 14 aa, Homo sapiens
  CDR3 for beta chain variable domain of TCR clone 200919 (TRBV6-5, TRBJ1-2)
CASSYDGTGGGYTF

SEQ ID NO: 401839 - protein, 15 aa, Homo sapiens
  CDR3 for alpha chain variable domain of TCR clone 200920 (TRAV27, TRAJ38)
CAGRFNAGNNRKLIW

SEQ ID NO: 401840 - protein, 14 aa, Homo sapiens
  CDR3 for beta chain variable domain of TCR clone 200920 (TRBV11-2, TRBJ1-2)
CASSLGTANYGYTF

SEQ ID NO: 401841 - protein, 13 aa, Homo sapiens
  CDR3 for alpha chain variable domain of TCR clone 200921 (TRAV8-4, TRAJ29)
CAVSATGNTPLVF

SEQ ID NO: 401842 - protein, 11 aa, Homo sapiens
  CDR3 for beta chain variable domain of TCR clone 200921 (TRBV19, TRBJ1-1)
CASSIGSEAFF

SEQ ID NO: 401843 - protein, 15 aa, Homo sapiens
  CDR3 for alpha chain variable domain of TCR clone 200922 (TRAV21, TRAJ13)
CAGRPTSGGYQKVTF

SEQ ID NO: 401844 - protein, 18 aa, Homo sapiens
  CDR3 for beta chain variable domain of TCR clone 200922 (TRBV11-3, TRBJ2-1)
CASSSYPGGRDSYNEQFF

SEQ ID NO: 401845 - protein, 13 aa, Homo sapiens
  CDR3 for alpha chain variable domain of TCR clone 200923 (TRAV29/DV5, TRAJ31)
CAASRNNNARLMF

SEQ ID NO: 401846 - protein, 15 aa, Homo sapiens
  CDR3 for beta chain variable domain of TCR clone 200923 (TRBV11-3, TRBJ1-1)
CASSLGGPGDTEAFF

SEQ ID NO: 401847 - protein, 11 aa, Homo sapiens
  CDR3 for alpha chain variable domain of TCR clone 200924 (TRAV2, TRAJ13)
CASGGYQKVTF

SEQ ID NO: 401848 - protein, 18 aa, Homo sapiens
  CDR3 for beta chain variable domain of TCR clone 200924 (TRBV11-2, TRBJ2-3)
CASSFGGASRGAPNTQYF

SEQ ID NO: 401849 - protein, 16 aa, Homo sapiens
  CDR3 for alpha chain variable domain of TCR clone 200925 (TRAV14/DV4, TRAJ10)
CAMREGGAGGGNKLTF

SEQ ID NO: 401850 - protein, 16 aa, Homo sapiens
  CDR3 for beta chain variable domain of TCR clone 200925 (TRBV7-9, TRBJ2-5)
CASSPSGQGVKGTQYF

SEQ ID NO: 401851 - protein, 14 aa, Homo sapiens
  CDR3 for alpha chain variable domain of TCR clone 200926 (TRAV12-2, TRAJ9)
CAVNMEGGGFKTIF

SEQ ID NO: 401852 - protein, 14 aa, Homo sapiens
  CDR3 for beta chain variable domain of TCR clone 200926 (TRBV27, TRBJ2-3)
CASRKGGRTDTQYF

SEQ ID NO: 401853 - protein, 11 aa, Homo sapiens
  CDR3 for alpha chain variable domain of TCR clone 200927 (TRAV3, TRAJ21)
CAVGNFYKFYF

SEQ ID NO: 401854 - protein, 16 aa, Homo sapiens
  CDR3 for beta chain variable domain of TCR clone 200927 (TRBV7-6, TRBJ2-1)
CASSAPGPSSYNEQFF

SEQ ID NO: 401855 - protein, 15 aa, Homo sapiens
  CDR3 for alpha chain variable domain of TCR clone 200928 (TRAV16, TRAJ53)
CALLNSGGSNYKLTF

SEQ ID NO: 401856 - protein, 13 aa, Homo sapiens
  CDR3 for beta chain variable domain of TCR clone 200928 (TRBV7-9, TRBJ1-2)
CASSLKQNYGYTF

SEQ ID NO: 401857 - protein, 13 aa, Homo sapiens
  CDR3 for alpha chain variable domain of TCR clone 200929 (TRAV8-4, TRAJ3)
GAVSDSGASKIIF

SEQ ID NO: 401858 - protein, 16 aa, Homo sapiens
  CDR3 for beta chain variable domain of TCR clone 200929 (TRBV7-9, TRBJ2-7)
CASSNHGGQEKYEQYF

SEQ ID NO: 401859 - protein, 11 aa, Homo sapiens
  CDR3 for alpha chain variable domain of TCR clone 200930 (TRAV1-2, TRAJ20)
CAVANDYKLSF

SEQ ID NO: 401860 - protein, 18 aa, Homo sapiens
  CDR3 for beta chain variable domain of TCR clone 200930 (TRBV4-3, TRBJ1-6)
CASSQDPGVYNSPLTLGM

SEQ ID NO: 401861 - protein, 11 aa, Homo sapiens
  CDR3 for alpha chain variable domain of TCR clone 200931 (TRAV1-1, TRAJ23)
CAVRQGGKLIF

SEQ ID NO: 401862 - protein, 16 aa, Homo sapiens
  CDR3 for beta chain variable domain of TCR clone 200931 (TRBV12-4, TRBJ2-7)
CASRSTGTGPSYEQYF

SEQ ID NO: 401863 - protein, 16 aa, Homo sapiens
  CDR3 for alpha chain variable domain of TCR clone 200932 (TRAV13-2, TRAJ37)
CAETPFGSGNTGKLIF

SEQ ID NO: 401864 - protein, 14 aa, Homo sapiens
  CDR3 for beta chain variable domain of TCR clone 200932 (TRBV11-3, TRBJ1-1)
CASSLAPSNTEAFF

SEQ ID NO: 401865 - protein, 16 aa, Homo sapiens
  CDR3 for alpha chain variable domain of TCR clone 200933 (TRAV12-3, TRAJ53)
CAMSPGSGGSNYKLTF

SEQ ID NO: 401866 - protein, 15 aa, Homo sapiens
  CDR3 for beta chain variable domain of TCR clone 200933 (TRBV11-2, TRBJ1-2)
CASSLEGVQRNGYTF

SEQ ID NO: 401867 - protein, 14 aa, Homo sapiens
  CDR3 for alpha chain variable domain of TCR clone 200934 (TRAV38-2/DV8, TRAJ30)
CAYMDGLGGDKIIF

SEQ ID NO: 401868 - protein, 12 aa, Homo sapiens
  CDR3 for beta chain variable domain of TCR clone 200934 (TRBV5-5, TRBJ2-5)
CASSYFGETQYF

SEQ ID NO: 401869 - protein, 11 aa, Homo sapiens
  CDR3 for alpha chain variable domain of TCR clone 200935 (TRAV2, TRAJ33)
CAVDSNYQLIW

SEQ ID NO: 401870 - protein, 15 aa, Homo sapiens
  CDR3 for beta chain variable domain of TCR clone 200935 (TRBV20-1, TRBJ2-1)
CSARDLQEGPNEQFF

SEQ ID NO: 401871 - protein, 16 aa, Homo sapiens
  CDR3 for alpha chain variable domain of TCR clone 200936 (TRAV38-1, TRAJ37)
CAFKGDGSSNTGKRIF

SEQ ID NO: 401872 - protein, 13 aa, Homo sapiens
  CDR3 for beta chain variable domain of TCR clone 200936 (TRBV12-4, TRBJ2-5)
CASSLFRRETQFF

SEQ ID NO: 401873 - protein, 12 aa, Homo sapiens
  CDR3 for alpha chain variable domain of TCR clone 200937 (TRAV29/DV5, TRAJ49)
CAATDTGNQFYF

SEQ ID NO: 401874 - protein, 18 aa, Homo sapiens
  CDR3 for beta chain variable domain of TCR clone 200937 (TRBV25-1, TRBJ2-2)
CHPSLPGGQGRKTGELFF

SEQ ID NO: 401875 - protein, 13 aa, Homo sapiens
  CDR3 for alpha chain variable domain of TCR clone 200938 (TRAV8-6, TRAJ16)
CAVSSPDGQKLLF

SEQ ID NO: 401876 - protein, 12 aa, Homo sapiens
  CDR3 for beta chain variable domain of TCR clone 200938 (TRBV11-2, TRBJ2-2)
CASSLGGGELFF

SEQ ID NO: 401877 - protein, 12 aa, Homo sapiens
  CDR3 for alpha chain variable domain of TCR clone 200939 (TRAV13-1, TRAJ53)
AASGGSNYKRTF

SEQ ID NO: 401878 - protein, 12 aa, Homo sapiens
  CDR3 for beta chain variable domain of TCR clone 200939 (TRBV18, TRBJ1-4)
CASSPSREKLFF

SEQ ID NO: 401879 - protein, 16 aa, Homo sapiens
  CDR3 for alpha chain variable domain of TCR clone 200940 (TRAV16, TRAJ52)
CALSGVCGTSYGKLTF

SEQ ID NO: 401880 - protein, 14 aa, Homo sapiens
  CDR3 for beta chain variable domain of TCR clone 200940 (TRBV19, TRBJ1-2)
CASSLQGQAYGYTF

SEQ ID NO: 401881 - protein, 16 aa, Homo sapiens
  CDR3 for alpha chain variable domain of TCR clone 200941 (TRAV16, TRAJ4)
CALSRMFSGGSNKLIF

SEQ ID NO: 401882 - protein, 12 aa, Homo sapiens
  CDR3 for beta chain variable domain of TCR clone 200941 (TRBV29-1, TRBJ2-3)
CSVTGGADTQYF

SEQ ID NO: 401883 - protein, 13 aa, Homo sapiens
  CDR3 for alpha chain variable domain of TCR clone 200942 (TRAV8-3, TRAJ28)
CAVGAVGSYQLTF

SEQ ID NO: 401884 - protein, 15 aa, Homo sapiens
  CDR3 for beta chain variable domain of TCR clone 200942 (TRBV19, TRBJ1-5)
CASSIVWADNQPQHF

SEQ ID NO: 401885 - protein, 13 aa, Homo sapiens
  CDR3 for alpha chain variable domain of TCR clone 200943 (TRAV12-1, TRAJ9)
CVVLNTGGFKTIF

SEQ ID NO: 401886 - protein, 16 aa, Homo sapiens
  CDR3 for beta chain variable domain of TCR clone 200943 (TRBV19, TRBJ2-2)
CASRSPGTGATGELFF

SEQ ID NO: 401887 - protein, 14 aa, Homo sapiens
  CDR3 for alpha chain variable domain of TCR clone 200944 (TRAV1-2, TRAJ8)
CAVREDTGFQKLVF

SEQ ID NO: 401888 - protein, 16 aa, Homo sapiens
  CDR3 for beta chain variable domain of TCR clone 200944 (TRBV27, TRBJ2-7)
CASSSERRDSAYEQYF

SEQ ID NO: 401889 - protein, 13 aa, Homo sapiens
  CDR3 for alpha chain variable domain of TCR clone 200945 (TRAV12-3, TRAJ9)
CAMRNTGGFKTIF

SEQ ID NO: 401890 - protein, 14 aa, Homo sapiens
  CDR3 for beta chain variable domain of TCR clone 200945 (TRBV11-2, TRBJ2-7)
CASSSTGVGYEQYF

SEQ ID NO: 401891 - protein, 15 aa, Homo sapiens
  CDR3 for alpha chain variable domain of TCR clone 200946 (TRAV3, TRAJ13)
YAVRVYSGGYQKVTF

SEQ ID NO: 401892 - protein, 14 aa, Homo sapiens
  CDR3 for beta chain variable domain of TCR clone 200946 (TRBV6-1, TRBJ1-3)
CASVQGGGGNTIYF

SEQ ID NO: 401893 - protein, 14 aa, Homo sapiens
  CDR3 for alpha chain variable domain of TCR clone 200947 (TRAV3, TRAJ28)
CAVRRGAGSYQSTF

SEQ ID NO: 401894 - protein, 16 aa, Homo sapiens
  CDR3 for beta chain variable domain of TCR clone 200947 (TRBV4-1, TRBJ2-7)
CASSQEWTSGPLEQYF

SEQ ID NO: 401895 - protein, 12 aa, Homo sapiens
  CDR3 for alpha chain variable domain of TCR clone 200948 (TRAV2, TRAJ9)
CAVGAGGFKTIF

SEQ ID NO: 401896 - protein, 13 aa, Homo sapiens
  CDR3 for beta chain variable domain of TCR clone 200948 (TRBV19, TRBJ1-2)
CASSRGQVYGYTF

SEQ ID NO: 401897 - protein, 13 aa, Homo sapiens
  CDR3 for alpha chain variable domain of TCR clone 200949 (TRAV8-3, TRAJ37)
CTVPSSNTGKLIF

SEQ ID NO: 401898 - protein, 12 aa, Homo sapiens
  CDR3 for beta chain variable domain of TCR clone 200949 (TRBV11-2, TRBJ2-1)
CASSPGNNEQFF

SEQ ID NO: 401899 - protein, 14 aa, Homo sapiens
  CDR3 for alpha chain variable domain of TCR clone 200950 (TRAV39, TRAJ54)
CAVVLIQGAQKLVF

SEQ ID NO: 401900 - protein, 15 aa, Homo sapiens
  CDR3 for beta chain variable domain of TCR clone 200950 (TRBV28, TRBJ2-3)
CAPTFRDWSTDTQYF

SEQ ID NO: 401901 - protein, 13 aa, Homo sapiens
  CDR3 for alpha chain variable domain of TCR clone 200951 (TRAV8-3, TRAJ47)
CAVSMEYGNKLVF

SEQ ID NO: 401902 - protein, 15 aa, Homo sapiens
  CDR3 for beta chain variable domain of TCR clone 200951 (TRBV7-9, TRBJ2-5)
CASSFKAGREETQYF

SEQ ID NO: 401903 - protein, 19 aa, Homo sapiens
  CDR3 for alpha chain variable domain of TCR clone 200952 (TRAV17, TRAJ17)
CATDGRPGVIKAAGNKLTF

SEQ ID NO: 401904 - protein, 17 aa, Homo sapiens
  CDR3 for beta chain variable domain of TCR clone 200952 (TRBV12-4, TRBJ1-1)
CASSLLGFRTMNTEAFF

SEQ ID NO: 401905 - protein, 15 aa, Homo sapiens
  CDR3 for alpha chain variable domain of TCR clone 200953 (TRAV13-1, TRAJ52)
CAASSPSTSYGKLTF

SEQ ID NO: 401906 - protein, 13 aa, Homo sapiens
  CDR3 for beta chain variable domain of TCR clone 200953 (TRBV27, TRBJ2-5)
CASSLSSLENQYF

SEQ ID NO: 401907 - protein, 17 aa, Homo sapiens
  CDR3 for alpha chain variable domain of TCR clone 200954 (TRAV12-2, TRAJ52)
CAVNPYAGGTSYGKLTF

SEQ ID NO: 401908 - protein, 17 aa, Homo sapiens
  CDR3 for beta chain variable domain of TCR clone 200954 (TRBV7-8, TRBJ2-6)
CASSAGTGGAGANVLTF

SEQ ID NO: 401909 - protein, 14 aa, Homo sapiens
  CDR3 for alpha chain variable domain of TCR clone 200955 (TRAV12-2, TRAJ6)
CASQWGGGSYIPTF

SEQ ID NO: 401910 - protein, 15 aa, Homo sapiens
  CDR3 for beta chain variable domain of TCR clone 200955 (TRBV2, TRBJ1-1)
CASSEGGNTEAFLDK

SEQ ID NO: 401911 - protein, 13 aa, Homo sapiens
  CDR3 for alpha chain variable domain of TCR clone 200956 (TRAV20, TRAJ37)
CAGCSSNTGKLIF

SEQ ID NO: 401912 - protein, 15 aa, Homo sapiens
  CDR3 for beta chain variable domain of TCR clone 200956 (TRBV15, TRBJ1-1)
CATSLQGGRNTEAFF

SEQ ID NO: 401913 - protein, 14 aa, Homo sapiens
  CDR3 for alpha chain variable domain of TCR clone 200957 (TRAV1-2, TRAJ16)
CAVNRFSDGQKLLF

SEQ ID NO: 401914 - protein, 15 aa, Homo sapiens
  CDR3 for beta chain variable domain of TCR clone 200957 (TRBV6-5, TRBJ1-2)
CASSYSPPRFYGYTF

SEQ ID NO: 401915 - protein, 17 aa, Homo sapiens
  CDR3 for alpha chain variable domain of TCR clone 200958 (TRAV29/DV5, TRAJ40)
CAASVIYTTSGTYKYIF

SEQ ID NO: 401916 - protein, 16 aa, Homo sapiens
  CDR3 for beta chain variable domain of TCR clone 200958 (TRBV19, TRBJ2-2)
CASSAAGTGGTGELFF

SEQ ID NO: 401917 - protein, 14 aa, Homo sapiens
  CDR3 for alpha chain variable domain of TCR clone 200959 (TRAV16, TRAJ28)
CALSSGAGSYQLTF

SEQ ID NO: 401918 - protein, 15 aa, Homo sapiens
  CDR3 for beta chain variable domain of TCR clone 200959 (TRBV6-4, TRBJ1-5)
CASSASSRINQPQHF

SEQ ID NO: 401919 - protein, 16 aa, Homo sapiens
  CDR3 for alpha chain variable domain of TCR clone 200960 (TRAV26-1, TRAJ32)
CIVRTNYGGATNKLIF

SEQ ID NO: 401920 - protein, 14 aa, Homo sapiens
  CDR3 for beta chain variable domain of TCR clone 200960 (TRBV27, TRBJ1-1)
CASSLLSGLSEAIF

SEQ ID NO: 401921 - protein, 10 aa, Homo sapiens
  CDR3 for alpha chain variable domain of TCR clone 200961 (TRAV23/DV6, TRAJ57)
CAASSTLSQG

SEQ ID NO: 401922 - protein, 15 aa, Homo sapiens
  CDR3 for beta chain variable domain of TCR clone 200961 (TRBV7-2, TRBJ2-1)
CASSLASGRVNEQFF

SEQ ID NO: 401923 - protein, 14 aa, Homo sapiens
  CDR3 for alpha chain variable domain of TCR clone 200962 (TRAV8-6, TRAJ8)
SAVNENTGFQKLVF

SEQ ID NO: 401924 - protein, 11 aa, Homo sapiens
  CDR3 for beta chain variable domain of TCR clone 200962 (TRBV29-1, TRBJ2-5)
CSEDRTGTQYF

SEQ ID NO: 401925 - protein, 13 aa, Homo sapiens
  CDR3 for alpha chain variable domain of TCR clone 200963 (TRAV35, TRAJ36)
CAGPRIGATNLFF

SEQ ID NO: 401926 - protein, 15 aa, Homo sapiens
  CDR3 for beta chain variable domain of TCR clone 200963 (TRBV20-1, TRBJ2-7)
CSARDRVSGMDEQYF

SEQ ID NO: 401927 - protein, 17 aa, Homo sapiens
  CDR3 for alpha chain variable domain of TCR clone 200964 (TRAV36/DV7, TRAJ52)
CAVAQRAGGTSSGKLTF

SEQ ID NO: 401928 - protein, 13 aa, Homo sapiens
  CDR3 for beta chain variable domain of TCR clone 200964 (TRBV20-1, TRBJ1-1)
CSAGTVGNTEAFF

SEQ ID NO: 401929 - protein, 14 aa, Homo sapiens
  CDR3 for alpha chain variable domain of TCR clone 200965 (TRAV12-3, TRAJ5)
CAMSTYTGRRALTF

SEQ ID NO: 401930 - protein, 13 aa, Homo sapiens
  CDR3 for beta chain variable domain of TCR clone 200965 (TRBV28, TRBJ2-3)
CASATGGGDTQYF

SEQ ID NO: 401931 - protein, 14 aa, Homo sapiens
  CDR3 for alpha chain variable domain of TCR clone 200966 (TRAV12-1, TRAJ30)
RVVNIGGRDDKIIF

SEQ ID NO: 401932 - protein, 13 aa, Homo sapiens
  CDR3 for beta chain variable domain of TCR clone 200966 (TRBV19, TRBJ1-5)
CASSINFNQPQHF

SEQ ID NO: 401933 - protein, 15 aa, Homo sapiens
  CDR3 for alpha chain variable domain of TCR clone 200967 (TRAV3, TRAJ5)
CAVRDLDTGRRALTF

SEQ ID NO: 401934 - protein, 15 aa, Homo sapiens
  CDR3 for beta chain variable domain of TCR clone 200967 (TRBV20-1, TRBJ2-1)
CSARSPGGPGNEQFF

SEQ ID NO: 401935 - protein, 16 aa, Homo sapiens
  CDR3 for alpha chain variable domain of TCR clone 200968 (TRAV30, TRAJ24)
CGAEIVDADSWGKFQF

SEQ ID NO: 401936 - protein, 14 aa, Homo sapiens
  CDR3 for beta chain variable domain of TCR clone 200968 (TRBV12-5, TRBJ2-5)
CASGSRTHQEAQYF

SEQ ID NO: 401937 - protein, 19 aa, Homo sapiens
  CDR3 for alpha chain variable domain of TCR clone 200969 (TRAV2, TRAJ20)
ILQVREADAAVYRDCKLSF

SEQ ID NO: 401938 - protein, 11 aa, Homo sapiens
  CDR3 for beta chain variable domain of TCR clone 200969 (TRBV5-1, TRBJ1-1)
CASSPGTEAFF

SEQ ID NO: 401939 - protein, 16 aa, Homo sapiens
  CDR3 for alpha chain variable domain of TCR clone 200970 (TRAV3, TRAJ37)
CAVRGKGSGNTGKLIF

SEQ ID NO: 401940 - protein, 13 aa, Homo sapiens
  CDR3 for beta chain variable domain of TCR clone 200970 (TRBV14, TRBJ2-7)
CASSQDGRYEQYF

SEQ ID NO: 401941 - protein, 14 aa, Homo sapiens
  CDR3 for alpha chain variable domain of TCR clone 200971 (TRAV20, TRAJ18)
CAVGRGSTLERLYF

SEQ ID NO: 401942 - protein, 14 aa, Homo sapiens
  CDR3 for beta chain variable domain of TCR clone 200971 (TRBV28, TRBJ2-4)
CASTQVTGVNIQYF

SEQ ID NO: 401943 - protein, 14 aa, Homo sapiens
  CDR3 for alpha chain variable domain of TCR clone 200972 (TRAV1-2, TRAJ8)
CAVREDTGFQKLVF

SEQ ID NO: 401944 - protein, 20 aa, Homo sapiens
  CDR3 for beta chain variable domain of TCR clone 200972 (TRBV7-8, TRBJ2-2)
CASSHLFPGPTIHITGELVF

SEQ ID NO: 401945 - protein, 16 aa, Homo sapiens
  CDR3 for alpha chain variable domain of TCR clone 200973 (TRAV8-3, TRAJ48)
CAVGLISNFGNEKLTF

SEQ ID NO: 401946 - protein, 14 aa, Homo sapiens
  CDR3 for beta chain variable domain of TCR clone 200973 (TRBV5-4, TRBJ1-1)
CASSLDSRRDEAFF

SEQ ID NO: 401947 - protein, 14 aa, Homo sapiens
  CDR3 for alpha chain variable domain of TCR clone 200974 (TRAV8-3, TRAJ44)
WARLYTGTASKLTF

SEQ ID NO: 401948 - protein, 18 aa, Homo sapiens
  CDR3 for beta chain variable domain of TCR clone 200974 (TRBV7-9, TRBJ2-1)
CASSTGLAEGSSYNEQFF

SEQ ID NO: 401949 - protein, 16 aa, Homo sapiens
  CDR3 for alpha chain variable domain of TCR clone 200975 (TRAV30, TRAJ24)
CGTEIVDADSWGKFQY

SEQ ID NO: 401950 - protein, 17 aa, Homo sapiens
  CDR3 for beta chain variable domain of TCR clone 200975 (TRBV20-1, TRBJ2-1)
CSASSSGLAGSYNEQFF

SEQ ID NO: 401951 - protein, 12 aa, Homo sapiens
  CDR3 for alpha chain variable domain of TCR clone 200976 (TRAV8-3, TRAJ41)
CAVALSGYALNF

SEQ ID NO: 401952 - protein, 18 aa, Homo sapiens
  CDR3 for beta chain variable domain of TCR clone 200976 (TRBV27, TRBJ2-7)
CTSVPAVTKGETAPTQYF

SEQ ID NO: 401953 - protein, 18 aa, Homo sapiens
  CDR3 for alpha chain variable domain of TCR clone 200977 (TRAV26-1, TRAJ52)
CIVRVAGAGGTSYGKLTF

SEQ ID NO: 401954 - protein, 13 aa, Homo sapiens
  CDR3 for beta chain variable domain of TCR clone 200977 (TRBV7-8, TRBJ1-2)
CASSAQSYYGHTF

SEQ ID NO: 401955 - protein, 15 aa, Homo sapiens
  CDR3 for alpha chain variable domain of TCR clone 200978 (TRAV21, TRAJ53)
CATSNSGGSNYKLTF

SEQ ID NO: 401956 - protein, 15 aa, Homo sapiens
  CDR3 for beta chain variable domain of TCR clone 200978 (TRBV7-6, TRBJ1-5)
CASSQSSGINQPQHF

SEQ ID NO: 401957 - protein, 12 aa, Homo sapiens
  CDR3 for alpha chain variable domain of TCR clone 200979 (TRAV12-1, TRAJ40)
CVFYSGTYKYIF

SEQ ID NO: 401958 - protein, 18 aa, Homo sapiens
  CDR3 for beta chain variable domain of TCR clone 200979 (TRBV12-4, TRBJ2-2)
CDSSLVAGTRGRTGELFF

SEQ ID NO: 401959 - protein, 11 aa, Homo sapiens
  CDR3 for alpha chain variable domain of TCR clone 200980 (TRAV1-2, TRAJ20)
CAVANDYKLGF

SEQ ID NO: 401960 - protein, 15 aa, Homo sapiens
  CDR3 for beta chain variable domain of TCR clone 200980 (TRBV20-1, TRBJ2-7)
CSAESGTSGAYEQYF

SEQ ID NO: 401961 - protein, 16 aa, Homo sapiens
  CDR3 for alpha chain variable domain of TCR clone 200981 (TRAV23/DV6, )
CADIQTPDPAVYQLRD

SEQ ID NO: 401962 - protein, 13 aa, Homo sapiens
  CDR3 for beta chain variable domain of TCR clone 200981 (TRBV28, TRBJ2-7)
CASRSSGVYEQYF

SEQ ID NO: 401963 - protein, 15 aa, Homo sapiens
  CDR3 for alpha chain variable domain of TCR clone 200982 (TRAV3, TRAJ22)
CAARDRGGSARQLTF

SEQ ID NO: 401964 - protein, 14 aa, Homo sapiens
  CDR3 for beta chain variable domain of TCR clone 200982 (TRBV25-1, TRBJ1-1)
CASTHLGGNTEAFF

SEQ ID NO: 401965 - protein, 15 aa, Homo sapiens
  CDR3 for alpha chain variable domain of TCR clone 200983 (TRAV30, TRAJ32)
CGTEILGGATNTLIF

SEQ ID NO: 401966 - protein, 17 aa, Homo sapiens
  CDR3 for beta chain variable domain of TCR clone 200983 (TRBV5-4, TRBJ2-1)
CASSSAGGRGPYNEQFF

SEQ ID NO: 401967 - protein, 12 aa, Homo sapiens
  CDR3 for alpha chain variable domain of TCR clone 200984 (TRAV25, TRAJ17)
CAGEAAGNKLTF

SEQ ID NO: 401968 - protein, 13 aa, Homo sapiens
  CDR3 for beta chain variable domain of TCR clone 200984 (TRBV5-1, TRBJ2-1)
RSSALWAGNEQFF

SEQ ID NO: 401969 - protein, 16 aa, Homo sapiens
  CDR3 for alpha chain variable domain of TCR clone 200985 (TRAV8-3, TRAJ18)
CAVALDRGSTLGRLYF

SEQ ID NO: 401970 - protein, 11 aa, Homo sapiens
  CDR3 for beta chain variable domain of TCR clone 200985 (TRBV29-1, TRBJ1-1)
CSVEILTGAFF

SEQ ID NO: 401971 - protein, 14 aa, Homo sapiens
  CDR3 for alpha chain variable domain of TCR clone 200986 (TRAV12-3, TRAJ41)
CAMSAGHSGYALNF

SEQ ID NO: 401972 - protein, 11 aa, Homo sapiens
  CDR3 for beta chain variable domain of TCR clone 200986 (TRBV7-2, TRBJ2-3)
CASSSSDTQYF

SEQ ID NO: 401973 - protein, 12 aa, Homo sapiens
  CDR3 for alpha chain variable domain of TCR clone 200987 (TRAV6, TRAJ5)
CSRNTGRRALTF

SEQ ID NO: 401974 - protein, 18 aa, Homo sapiens
  CDR3 for beta chain variable domain of TCR clone 200987 (TRBV11-2, TRBJ2-3)
CASSLGGASRGAPNTQYF

SEQ ID NO: 401975 - protein, 15 aa, Homo sapiens
  CDR3 for alpha chain variable domain of TCR clone 200988 (TRAV12-3, TRAJ49)
CAMDVTPNTGNQLYF

SEQ ID NO: 401976 - protein, 18 aa, Homo sapiens
  CDR3 for beta chain variable domain of TCR clone 200988 (TRBV4-1, TRBJ1-5)
CASSQDPRGQGLNQPQHF

SEQ ID NO: 401977 - protein, 17 aa, Homo sapiens
  CDR3 for alpha chain variable domain of TCR clone 200989 (TRAV3, TRAJ38)
CAVRDCLNAGNNRKPTW

SEQ ID NO: 401978 - protein, 13 aa, Homo sapiens
  CDR3 for beta chain variable domain of TCR clone 200989 (TRBV23-1, TRBJ1-4)
CASRGKFNEKLFF

SEQ ID NO: 401979 - protein, 12 aa, Homo sapiens
  CDR3 for alpha chain variable domain of TCR clone 200990 (TRAV16, TRAJ10)
CSRTGGGNKLTF

SEQ ID NO: 401980 - protein, 20 aa, Homo sapiens
  CDR3 for beta chain variable domain of TCR clone 200990 (TRBV28, TRBJ2-1)
CASTPIARSPGLAGGNEQFF

SEQ ID NO: 401981 - protein, 10 aa, Homo sapiens
  CDR3 for alpha chain variable domain of TCR clone 200991 (TRAV12-2, TRAJ22)
CAVNETQLTF

SEQ ID NO: 401982 - protein, 15 aa, Homo sapiens
  CDR3 for beta chain variable domain of TCR clone 200991 (TRBV20-1, TRBJ2-7)
CSARDRVSGMDEQYF

SEQ ID NO: 401983 - protein, 12 aa, Homo sapiens
  CDR3 for alpha chain variable domain of TCR clone 200992 (TRAV13-2, TRAJ23)
CAERHRGGKLIF

SEQ ID NO: 401984 - protein, 14 aa, Homo sapiens
  CDR3 for beta chain variable domain of TCR clone 200992 (TRBV3-1, TRBJ2-7)
CASSPSSGTYEQYF

SEQ ID NO: 401985 - protein, 14 aa, Homo sapiens
  CDR3 for alpha chain variable domain of TCR clone 200993 (TRAV13-1, TRAJ5)
CAALGWAGRRALTF

SEQ ID NO: 401986 - protein, 13 aa, Homo sapiens
  CDR3 for beta chain variable domain of TCR clone 200993 (TRBV11-3, TRBJ2-3)
CASSFTGPDTQYF

SEQ ID NO: 401987 - protein, 17 aa, Homo sapiens
  CDR3 for alpha chain variable domain of TCR clone 200994 (TRAV13-1, TRAJ28)
CSASPPYSGAGSYQLSF

SEQ ID NO: 401988 - protein, 16 aa, Homo sapiens
  CDR3 for beta chain variable domain of TCR clone 200994 (TRBV19, TRBJ2-2)
CASRSPGTGATGELFF

SEQ ID NO: 401989 - protein, 12 aa, Homo sapiens
  CDR3 for alpha chain variable domain of TCR clone 200995 (TRAV13-1, TRAJ17)
CAARTAGNKLTF

SEQ ID NO: 401990 - protein, 11 aa, Homo sapiens
  CDR3 for beta chain variable domain of TCR clone 200995 (TRBV29-1, TRBJ2-5)
CSEDLTGTQYF

SEQ ID NO: 401991 - protein, 15 aa, Homo sapiens
  CDR3 for alpha chain variable domain of TCR clone 200996 (TRAV4, TRAJ17)
CLVGDIGAAGNKLTF

SEQ ID NO: 401992 - protein, 14 aa, Homo sapiens
  CDR3 for beta chain variable domain of TCR clone 200996 (TRBV6-3, TRBJ2-7)
CGSSYSVRVYEQYF

SEQ ID NO: 401993 - protein, 12 aa, Homo sapiens
  CDR3 for alpha chain variable domain of TCR clone 200997 (TRAV30, TRAJ49)
CGTLGVSNQFYF

SEQ ID NO: 401994 - protein, 14 aa, Homo sapiens
  CDR3 for beta chain variable domain of TCR clone 200997 (TRBV9, TRBJ2-7)
CASSVGVGSYEQYF

SEQ ID NO: 401995 - protein, 12 aa, Homo sapiens
  CDR3 for alpha chain variable domain of TCR clone 200998 (TRAV3, TRAJ20)
CAVRDGDYKLSF

SEQ ID NO: 401996 - protein, 12 aa, Homo sapiens
  CDR3 for beta chain variable domain of TCR clone 200998 (TRBV5-1, TRBJ2-3)
CASSTGEDTQYF

SEQ ID NO: 401997 - protein, 14 aa, Homo sapiens
  CDR3 for alpha chain variable domain of TCR clone 200999 (TRAV21, TRAJ12)
CAVRNGDSSYKLIF

SEQ ID NO: 401998 - protein, 13 aa, Homo sapiens
  CDR3 for beta chain variable domain of TCR clone 200999 (TRBV10-3, TRBJ2-7)
CASKLAVNYEQYF

SEQ ID NO: 401999 - protein, 13 aa, Homo sapiens
  CDR3 for alpha chain variable domain of TCR clone 201000 (TRAV20, TRAJ37)
CAGCSSNTGKLIF

SEQ ID NO: 402000 - protein, 17 aa, Homo sapiens
  CDR3 for beta chain variable domain of TCR clone 201000 (TRBV6-1, TRBJ2-3)
CASRTRGLAQSTDTQYF

SEQ ID NO: 402001 - protein, 14 aa, Homo sapiens
  CDR3 for alpha chain variable domain of TCR clone 201001 (TRAV12-2, TRAJ17)
CAVLFKAAGNKLHF

SEQ ID NO: 402002 - protein, 14 aa, Homo sapiens
  CDR3 for beta chain variable domain of TCR clone 201001 (TRBV12-5, TRBJ2-5)
CASGSRTHQETQYF

SEQ ID NO: 402003 - protein, 12 aa, Homo sapiens
  CDR3 for alpha chain variable domain of TCR clone 201002 (TRAV1-2, TRAJ11)
CAVRGGYSTLTF

SEQ ID NO: 402004 - protein, 16 aa, Homo sapiens
  CDR3 for beta chain variable domain of TCR clone 201002 (TRBV7-9, TRBJ1-2)
CASSLGFSSGEDGYTF

SEQ ID NO: 402005 - protein, 14 aa, Homo sapiens
  CDR3 for alpha chain variable domain of TCR clone 201003 (TRAV12-2, TRAJ13)
CAVNPSGGYQKVTF

SEQ ID NO: 402006 - protein, 15 aa, Homo sapiens
  CDR3 for beta chain variable domain of TCR clone 201003 (TRBV7-6, TRBJ2-5)
CASSKPTGPQETQYF

SEQ ID NO: 402007 - protein, 13 aa, Homo sapiens
  CDR3 for alpha chain variable domain of TCR clone 201004 (TRAV21, TRAJ20)
CAVGLRIDYKLSF

SEQ ID NO: 402008 - protein, 16 aa, Homo sapiens
  CDR3 for beta chain variable domain of TCR clone 201004 (TRBV12-4, TRBJ2-5)
CASSFFVRGRQETQYF

SEQ ID NO: 402009 - protein, 12 aa, Homo sapiens
  CDR3 for alpha chain variable domain of TCR clone 201005 (TRAV35, TRAJ40)
CAGRAGTYKYIF

SEQ ID NO: 402010 - protein, 16 aa, Homo sapiens
  CDR3 for beta chain variable domain of TCR clone 201005 (TRBV7-2, TRBJ1-3)
CASSQGVPETPYILER

SEQ ID NO: 402011 - protein, 15 aa, Homo sapiens
  CDR3 for alpha chain variable domain of TCR clone 201006 (TRAV29/DV5, TRAJ29)
CAASERSSGNTPLVF

SEQ ID NO: 402012 - protein, 14 aa, Homo sapiens
  CDR3 for beta chain variable domain of TCR clone 201006 (TRBV19, TRBJ2-2)
CASSTLHRSGELFF

SEQ ID NO: 402013 - protein, 12 aa, Homo sapiens
  CDR3 for alpha chain variable domain of TCR clone 201007 (TRAV8-2, TRAJ30)
CVVSDRDDKIIF

SEQ ID NO: 402014 - protein, 13 aa, Homo sapiens
  CDR3 for beta chain variable domain of TCR clone 201007 (TRBV7-3, TRBJ2-1)
CASSLDSYNEQFF

SEQ ID NO: 402015 - protein, 13 aa, Homo sapiens
  CDR3 for alpha chain variable domain of TCR clone 201008 (TRAV26-1, TRAJ8)
CIVRSTGFQKLVF

SEQ ID NO: 402016 - protein, 15 aa, Homo sapiens
  CDR3 for beta chain variable domain of TCR clone 201008 (TRBV7-3, TRBJ2-1)
CQQLQTSGRYNEQFF

SEQ ID NO: 402017 - protein, 15 aa, Homo sapiens
  CDR3 for alpha chain variable domain of TCR clone 201009 (TRAV8-4, TRAJ13)
CAVSDWSGGYQKVTF

SEQ ID NO: 402018 - protein, 15 aa, Homo sapiens
  CDR3 for beta chain variable domain of TCR clone 201009 (TRBV7-2, TRBJ2-3)
CASSLAGAFIDTQYF

SEQ ID NO: 402019 - protein, 16 aa, Homo sapiens
  CDR3 for alpha chain variable domain of TCR clone 201010 (TRAV3, TRAJ10)
CAVRDMNAGGGNKLTF

SEQ ID NO: 402020 - protein, 11 aa, Homo sapiens
  CDR3 for beta chain variable domain of TCR clone 201010 (TRBV12-4, TRBJ2-3)
CASTATDTQYF

SEQ ID NO: 402021 - protein, 11 aa, Homo sapiens
  CDR3 for alpha chain variable domain of TCR clone 201011 (TRAV1-2, TRAJ20)
CAVANDYKLSF

SEQ ID NO: 402022 - protein, 16 aa, Homo sapiens
  CDR3 for beta chain variable domain of TCR clone 201011 (TRBV12-5, TRBJ2-5)
CASGPGTSGNQETQYF

SEQ ID NO: 402023 - protein, 17 aa, Homo sapiens
  CDR3 for alpha chain variable domain of TCR clone 201012 (TRAV26-1, TRAJ53)
CIVRVDDSGGSNYKLTF

SEQ ID NO: 402024 - protein, 15 aa, Homo sapiens
  CDR3 for beta chain variable domain of TCR clone 201012 (TRBV11-2, TRBJ1-3)
CASSIWGSYGNTIYF

SEQ ID NO: 402025 - protein, 14 aa, Homo sapiens
  CDR3 for alpha chain variable domain of TCR clone 201013 (TRAV1-1, TRAJ27)
CAVIYNTNAGKSTF

SEQ ID NO: 402026 - protein, 15 aa, Homo sapiens
  CDR3 for beta chain variable domain of TCR clone 201013 (TRBV7-2, TRBJ2-1)
CASSSGLAGGNELFF

SEQ ID NO: 402027 - protein, 14 aa, Homo sapiens
  CDR3 for alpha chain variable domain of TCR clone 201014 (TRAV12-3, TRAJ10)
CAMSGTGGGNKLTF

SEQ ID NO: 402028 - protein, 14 aa, Homo sapiens
  CDR3 for beta chain variable domain of TCR clone 201014 (TRBV7-9, TRBJ1-2)
CASSRQGANYGYTF

SEQ ID NO: 402029 - protein, 11 aa, Homo sapiens
  CDR3 for alpha chain variable domain of TCR clone 201015 (TRAV12-1, TRAJ30)
CVVNGQDKIIF

SEQ ID NO: 402030 - protein, 16 aa, Homo sapiens
  CDR3 for beta chain variable domain of TCR clone 201015 (TRBV24-1, TRBJ2-3)
CATSDAISGITDAQYF

SEQ ID NO: 402031 - protein, 19 aa, Homo sapiens
  CDR3 for alpha chain variable domain of TCR clone 201016 (TRAV26-1, TRAJ3)
CCVLLHRQLPYSSASKIIF

SEQ ID NO: 402032 - protein, 14 aa, Homo sapiens
  CDR3 for beta chain variable domain of TCR clone 201016 (TRBV7-2, TRBJ2-7)
CASRSQGAAYEQYF

SEQ ID NO: 402033 - protein, 14 aa, Homo sapiens
  CDR3 for alpha chain variable domain of TCR clone 201017 (TRAV1-2, TRAJ8)
CAVREDTGFQKLVF

SEQ ID NO: 402034 - protein, 14 aa, Homo sapiens
  CDR3 for beta chain variable domain of TCR clone 201017 (TRBV10-3, TRBJ2-2)
CAISEVSHSGELFF

SEQ ID NO: 402035 - protein, 15 aa, Homo sapiens
  CDR3 for alpha chain variable domain of TCR clone 201018 (TRAV26-1, TRAJ48)
CIVRVGDFGNEKLTF

SEQ ID NO: 402036 - protein, 14 aa, Homo sapiens
  CDR3 for beta chain variable domain of TCR clone 201018 (TRBV12-5, TRBJ2-5)
CASGSRTHQETQYF

SEQ ID NO: 402037 - protein, 16 aa, Homo sapiens
  CDR3 for alpha chain variable domain of TCR clone 201019 (TRAV6, TRAJ43)
CARHKPRFGAGTRLTV

SEQ ID NO: 402038 - protein, 12 aa, Homo sapiens
  CDR3 for beta chain variable domain of TCR clone 201019 (TRBV11-2, TRBJ2-2)
CASSLGGGELFF

SEQ ID NO: 402039 - protein, 12 aa, Homo sapiens
  CDR3 for alpha chain variable domain of TCR clone 201020 (TRAV12-3, TRAJ34)
CAMGYKTDKLIF

SEQ ID NO: 402040 - protein, 15 aa, Homo sapiens
  CDR3 for beta chain variable domain of TCR clone 201020 (TRBV28, TRBJ2-1)
CASSIIAGGRSEQFF

SEQ ID NO: 402041 - protein, 14 aa, Homo sapiens
  CDR3 for alpha chain variable domain of TCR clone 201021 (TRAV12-1, TRAJ23)
CVVIVYNQGGKLIF

SEQ ID NO: 402042 - protein, 15 aa, Homo sapiens
  CDR3 for beta chain variable domain of TCR clone 201021 (TRBV20-1, TRBJ1-5)
GSAKPPGQGPQPQHF

SEQ ID NO: 402043 - protein, 16 aa, Homo sapiens
  CDR3 for alpha chain variable domain of TCR clone 201022 (TRAV26-1, TRAJ31)
CIVRPPVLNNNARLIF

SEQ ID NO: 402044 - protein, 11 aa, Homo sapiens
  CDR3 for beta chain variable domain of TCR clone 201022 (TRBV7-8, TRBJ2-7)
CASSLSLEQYF

SEQ ID NO: 402045 - protein, 17 aa, Homo sapiens
  CDR3 for alpha chain variable domain of TCR clone 201023 (TRAV16, TRAJ58)
CITVLSNAETSGSRLTF

SEQ ID NO: 402046 - protein, 17 aa, Homo sapiens
  CDR3 for beta chain variable domain of TCR clone 201023 (TRBV18, TRBJ2-1)
CASSKGLSGGADNEQFF

SEQ ID NO: 402047 - protein, 12 aa, Homo sapiens
  CDR3 for alpha chain variable domain of TCR clone 201024 (TRAV12-3, TRAJ20)
CSMVRGDYKLSF

SEQ ID NO: 402048 - protein, 16 aa, Homo sapiens
  CDR3 for beta chain variable domain of TCR clone 201024 (TRBV5-1, TRBJ2-3)
CASSLGLAVYTDTQYF

SEQ ID NO: 402049 - protein, 14 aa, Homo sapiens
  CDR3 for alpha chain variable domain of TCR clone 201025 (TRAV17, TRAJ57)
CATDPQGGSEKLVF

SEQ ID NO: 402050 - protein, 12 aa, Homo sapiens
  CDR3 for beta chain variable domain of TCR clone 201025 (TRBV24-1, TRBJ1-4)
CATSDPNEKLFF

SEQ ID NO: 402051 - protein, 13 aa, Homo sapiens
  CDR3 for alpha chain variable domain of TCR clone 201026 (TRAV17, TRAJ34)
CATDLYNTDKLIF

SEQ ID NO: 402052 - protein, 15 aa, Homo sapiens
  CDR3 for beta chain variable domain of TCR clone 201026 (TRBV20-1, TRBJ2-3)
CSATGTSGFTDTQYL

SEQ ID NO: 402053 - protein, 17 aa, Homo sapiens
  CDR3 for alpha chain variable domain of TCR clone 201027 (TRAV4, TRAJ13)
CLVGVQGSSGGYQKVTF

SEQ ID NO: 402054 - protein, 15 aa, Homo sapiens
  CDR3 for beta chain variable domain of TCR clone 201027 (TRBV7-9, TRBJ1-1)
CASSLLEQGGTEAFF

SEQ ID NO: 402055 - protein, 14 aa, Homo sapiens
  CDR3 for alpha chain variable domain of TCR clone 201028 (TRAV20, TRAJ20)
CAVRRGYNDHKLSF

SEQ ID NO: 402056 - protein, 13 aa, Homo sapiens
  CDR3 for beta chain variable domain of TCR clone 201028 (TRBV19, TRBJ2-5)
CASSEIAPETQYF

SEQ ID NO: 402057 - protein, 16 aa, Homo sapiens
  CDR3 for alpha chain variable domain of TCR clone 201029 (TRAV8-3, TRAJ48)
CAVGLISNFGNEKLPF

SEQ ID NO: 402058 - protein, 13 aa, Homo sapiens
  CDR3 for beta chain variable domain of TCR clone 201029 (TRBV20-1, TRBJ1-5)
CSASWGRSQPQHF

SEQ ID NO: 402059 - protein, 12 aa, Homo sapiens
  CDR3 for alpha chain variable domain of TCR clone 201030 (TRAV8-3, TRAJ20)
CAVGANDYKLSF

SEQ ID NO: 402060 - protein, 15 aa, Homo sapiens
  CDR3 for beta chain variable domain of TCR clone 201030 (TRBV19, TRBJ2-2)
CSRSPGTGATGELFS

SEQ ID NO: 402061 - protein, 14 aa, Homo sapiens
  CDR3 for alpha chain variable domain of TCR clone 201031 (TRAV1-2, TRAJ16)
CAVNRFSAGQKLLF

SEQ ID NO: 402062 - protein, 16 aa, Homo sapiens
  CDR3 for beta chain variable domain of TCR clone 201031 (TRBV12-4, TRBJ2-5)
CASSFFVRGRQETQYF

SEQ ID NO: 402063 - protein, 12 aa, Homo sapiens
  CDR3 for alpha chain variable domain of TCR clone 201032 (TRAV12-3, TRAJ17)
CAMTLTGNKLTF

SEQ ID NO: 402064 - protein, 12 aa, Homo sapiens
  CDR3 for beta chain variable domain of TCR clone 201032 (TRBV5-1, TRBJ2-7)
CASSLDSYEHYF

SEQ ID NO: 402065 - protein, 14 aa, Homo sapiens
  CDR3 for alpha chain variable domain of TCR clone 201033 (TRAV1-2, TRAJ16)
CAVNRFSDGQKLLF

SEQ ID NO: 402066 - protein, 14 aa, Homo sapiens
  CDR3 for beta chain variable domain of TCR clone 201033 (TRBV7-9, TRBJ2-3)
CASSLEDGTDTQDF

SEQ ID NO: 402067 - protein, 12 aa, Homo sapiens
  CDR3 for alpha chain variable domain of TCR clone 201034 (TRAV12-3, TRAJ43)
CAISSNNNDMRF

SEQ ID NO: 402068 - protein, 14 aa, Homo sapiens
  CDR3 for beta chain variable domain of TCR clone 201034 (TRBV19, TRBJ2-1)
CASPTFVLSGEQFF

SEQ ID NO: 402069 - protein, 15 aa, Homo sapiens
  CDR3 for alpha chain variable domain of TCR clone 201035 (TRAV12-3, TRAJ52)
CNGGAGGTSYGKLTF

SEQ ID NO: 402070 - protein, 15 aa, Homo sapiens
  CDR3 for beta chain variable domain of TCR clone 201035 (TRBV28, TRBJ2-5)
CASSPPWSYQETQYF

SEQ ID NO: 402071 - protein, 11 aa, Homo sapiens
  CDR3 for alpha chain variable domain of TCR clone 201036 (TRAV1-2, TRAJ20)
CAVANDYKLSF

SEQ ID NO: 402072 - protein, 15 aa, Homo sapiens
  CDR3 for beta chain variable domain of TCR clone 201036 (TRBV28, TRBJ1-3)
CASSMGWASGNTIYF

SEQ ID NO: 402073 - protein, 18 aa, Homo sapiens
  CDR3 for alpha chain variable domain of TCR clone 201037 (TRAV21, TRAJ52)
CALRPSPAGGTSYGKLTF

SEQ ID NO: 402074 - protein, 18 aa, Homo sapiens
  CDR3 for beta chain variable domain of TCR clone 201037 (TRBV25-1, TRBJ1-2)
CASSGLQNGQGLIFGYTF

SEQ ID NO: 402075 - protein, 13 aa, Homo sapiens
  CDR3 for alpha chain variable domain of TCR clone 201038 (TRAV3, TRAJ21)
CDVREPDFNKFYF

SEQ ID NO: 402076 - protein, 17 aa, Homo sapiens
  CDR3 for beta chain variable domain of TCR clone 201038 (TRBV7-8, TRBJ2-6)
CASSAVTGGAGANVLTF

SEQ ID NO: 402077 - protein, 16 aa, Homo sapiens
  CDR3 for alpha chain variable domain of TCR clone 201039 (TRAV13-1, TRAJ17)
CAASKGVKAAGNKLTF

SEQ ID NO: 402078 - protein, 16 aa, Homo sapiens
  CDR3 for beta chain variable domain of TCR clone 201039 (TRBV20-1, TRBJ1-5)
SAVLGKGGIAISPSIF

SEQ ID NO: 402079 - protein, 16 aa, Homo sapiens
  CDR3 for alpha chain variable domain of TCR clone 201040 (TRAV30, TRAJ44)
CGTEDKRTGTASKLNF

SEQ ID NO: 402080 - protein, 17 aa, Homo sapiens
  CDR3 for beta chain variable domain of TCR clone 201040 (TRBV11-2, TRBJ2-1)
CASSLYPPGVEYNEQFF

SEQ ID NO: 402081 - protein, 23 aa, Homo sapiens
  CDR3 for alpha chain variable domain of TCR clone 201041 (TRAV26-1, TRAJ38)
CIADNAGNNHIQNPDPAAYHLRD

SEQ ID NO: 402082 - protein, 13 aa, Homo sapiens
  CDR3 for beta chain variable domain of TCR clone 201041 (TRBV20-1, TRBJ1-1)
CSARGGGNTEAFF

SEQ ID NO: 402083 - protein, 16 aa, Homo sapiens
  CDR3 for alpha chain variable domain of TCR clone 201042 (TRAV8-3, TRAJ4)
CAVGARGSGGYNKLMF

SEQ ID NO: 402084 - protein, 16 aa, Homo sapiens
  CDR3 for beta chain variable domain of TCR clone 201042 (TRBV4-3, TRBJ2-5)
CASSQDSIPLQETQYF

SEQ ID NO: 402085 - protein, 14 aa, Homo sapiens
  CDR3 for alpha chain variable domain of TCR clone 201043 (TRAV12-1, TRAJ4)
CVVPLKSGYNKLIF

SEQ ID NO: 402086 - protein, 15 aa, Homo sapiens
  CDR3 for beta chain variable domain of TCR clone 201043 (TRBV7-2, TRBJ2-2)
CASSPTGANTGELFF

SEQ ID NO: 402087 - protein, 13 aa, Homo sapiens
  CDR3 for alpha chain variable domain of TCR clone 201044 (TRAV12-1, TRAJ7)
CVVNMRGNNSLAF

SEQ ID NO: 402088 - protein, 17 aa, Homo sapiens
  CDR3 for beta chain variable domain of TCR clone 201044 (TRBV28, TRBJ1-1)
CASSLSRTGYENTEAFF

SEQ ID NO: 402089 - protein, 12 aa, Homo sapiens
  CDR3 for alpha chain variable domain of TCR clone 201045 (TRAV30, TRAJ43)
CGTEERGNDMRS

SEQ ID NO: 402090 - protein, 17 aa, Homo sapiens
  CDR3 for beta chain variable domain of TCR clone 201045 (TRBV11-2, TRBJ2-1)
CASSLYPPGVEYNEQFF

SEQ ID NO: 402091 - protein, 15 aa, Homo sapiens
  CDR3 for alpha chain variable domain of TCR clone 201046 (TRAV3, TRAJ22)
CAVRDRGGSARQLTF

SEQ ID NO: 402092 - protein, 16 aa, Homo sapiens
  CDR3 for beta chain variable domain of TCR clone 201046 (TRBV2, TRBJ2-5)
CASSETQGVGEETQYF

SEQ ID NO: 402093 - protein, 14 aa, Homo sapiens
  CDR3 for alpha chain variable domain of TCR clone 201047 (TRAV10, TRAJ32)
CREPRGGATNKLIF

SEQ ID NO: 402094 - protein, 14 aa, Homo sapiens
  CDR3 for beta chain variable domain of TCR clone 201047 (TRBV5-4, TRBJ2-2)
CASRLDGGTGELFF

SEQ ID NO: 402095 - protein, 11 aa, Homo sapiens
  CDR3 for alpha chain variable domain of TCR clone 201048 (TRAV21, TRAJ39)
LLVNAGNMLTF

SEQ ID NO: 402096 - protein, 15 aa, Homo sapiens
  CDR3 for beta chain variable domain of TCR clone 201048 (TRBV29-1, TRBJ2-1)
RSGRDRKSSYNEPFF

SEQ ID NO: 402097 - protein, 15 aa, Homo sapiens
  CDR3 for alpha chain variable domain of TCR clone 201049 (TRAV12-2, TRAJ56)
CAVNPFTGANRKLTF

SEQ ID NO: 402098 - protein, 13 aa, Homo sapiens
  CDR3 for beta chain variable domain of TCR clone 201049 (TRBV20-1, TRBJ1-2)
CSARDRVYGGYTF

SEQ ID NO: 402099 - protein, 15 aa, Homo sapiens
  CDR3 for alpha chain variable domain of TCR clone 201050 (TRAV38-1, TRAJ37)
WAFIHGSGNTGKLIF

SEQ ID NO: 402100 - protein, 14 aa, Homo sapiens
  CDR3 for beta chain variable domain of TCR clone 201050 (TRBV29-1, TRBJ2-5)
CSVETSGSGETQYF

SEQ ID NO: 402101 - protein, 17 aa, Homo sapiens
  CDR3 for alpha chain variable domain of TCR clone 201051 (TRAV2, TRAJ22)
ILQVREADAAEQRQLTF

SEQ ID NO: 402102 - protein, 16 aa, Homo sapiens
  CDR3 for beta chain variable domain of TCR clone 201051 (TRBV2, TRBJ2-5)
CDSSETQGVGEETQYF

SEQ ID NO: 402103 - protein, 14 aa, Homo sapiens
  CDR3 for alpha chain variable domain of TCR clone 201052 (TRAV2, TRAJ9)
CAVADRSGGFKTIF

SEQ ID NO: 402104 - protein, 15 aa, Homo sapiens
  CDR3 for beta chain variable domain of TCR clone 201052 (TRBV11-3, TRBJ2-3)
CASSAGTVVTNTQYF

SEQ ID NO: 402105 - protein, 11 aa, Homo sapiens
  CDR3 for alpha chain variable domain of TCR clone 201053 (TRAV8-4, TRAJ20)
CAVTNVLTTTS

SEQ ID NO: 402106 - protein, 13 aa, Homo sapiens
  CDR3 for beta chain variable domain of TCR clone 201053 (TRBV13, TRBJ2-1)
CASILGGRGEQFF

SEQ ID NO: 402107 - protein, 12 aa, Homo sapiens
  CDR3 for alpha chain variable domain of TCR clone 201054 (TRAV21, TRAJ23)
CAVGPQGGQLIF

SEQ ID NO: 402108 - protein, 14 aa, Homo sapiens
  CDR3 for beta chain variable domain of TCR clone 201054 (TRBV6-1, TRBJ1-3)
CASVQGGGGNTIYF

SEQ ID NO: 402109 - protein, 14 aa, Homo sapiens
  CDR3 for alpha chain variable domain of TCR clone 201055 (TRAV12-2, TRAJ13)
CAVKKTGGYQKVTF

SEQ ID NO: 402110 - protein, 19 aa, Homo sapiens
  CDR3 for beta chain variable domain of TCR clone 201055 (TRBV25-1, TRBJ2-2)
WAILVYRVDRGRKTGELFF

SEQ ID NO: 402111 - protein, 16 aa, Homo sapiens
  CDR3 for alpha chain variable domain of TCR clone 201056 (TRAV8-3, TRAJ10)
CAVGPILTGVGNKLTF

SEQ ID NO: 402112 - protein, 16 aa, Homo sapiens
  CDR3 for beta chain variable domain of TCR clone 201056 (TRBV7-2, TRBJ2-5)
CASSSKWLSGQETQYF

SEQ ID NO: 402113 - protein, 15 aa, Homo sapiens
  CDR3 for alpha chain variable domain of TCR clone 201057 (TRAV13-2, TRAJ53)
CAERGSRGSNYKLTF

SEQ ID NO: 402114 - protein, 14 aa, Homo sapiens
  CDR3 for beta chain variable domain of TCR clone 201057 (TRBV4-1, TRBJ2-2)
CASSQYPETGELFF

SEQ ID NO: 402115 - protein, 13 aa, Homo sapiens
  CDR3 for alpha chain variable domain of TCR clone 201058 (TRAV8-3, TRAJ44)
CAVVPGTASKLTF

SEQ ID NO: 402116 - protein, 13 aa, Homo sapiens
  CDR3 for beta chain variable domain of TCR clone 201058 (TRBV12-5, TRBJ2-3)
CASGDRQSDTQYF

SEQ ID NO: 402117 - protein, 11 aa, Homo sapiens
  CDR3 for alpha chain variable domain of TCR clone 201059 (TRAV17, TRAJ9)
CGFTRGFKTIF

SEQ ID NO: 402118 - protein, 12 aa, Homo sapiens
  CDR3 for beta chain variable domain of TCR clone 201059 (TRBV29-1, TRBJ2-3)
CSVTGGADTQYF

SEQ ID NO: 402119 - protein, 13 aa, Homo sapiens
  CDR3 for alpha chain variable domain of TCR clone 201060 (TRAV36/DV7, TRAJ37)
CAVFSSNTGKLIF

SEQ ID NO: 402120 - protein, 15 aa, Homo sapiens
  CDR3 for beta chain variable domain of TCR clone 201060 (TRBV5-1, TRBJ2-7)
CASSLMTSGSNEQYF

SEQ ID NO: 402121 - protein, 14 aa, Homo sapiens
  CDR3 for alpha chain variable domain of TCR clone 201061 (TRAV36/DV7, TRAJ44)
CCGANTGTASKLTF

SEQ ID NO: 402122 - protein, 13 aa, Homo sapiens
  CDR3 for beta chain variable domain of TCR clone 201061 (TRBV10-3, TRBJ2-7)
CASKLAVNYEQYF

SEQ ID NO: 402123 - protein, 14 aa, Homo sapiens
  CDR3 for alpha chain variable domain of TCR clone 201062 (TRAV1-2, TRAJ16)
CAVSRFSDGQKLLL

SEQ ID NO: 402124 - protein, 15 aa, Homo sapiens
  CDR3 for beta chain variable domain of TCR clone 201062 (TRBV6-3, TRBJ2-7)
CASSSPGTVFYEQYF

SEQ ID NO: 402125 - protein, 15 aa, Homo sapiens
  CDR3 for alpha chain variable domain of TCR clone 201063 (TRAV12-2, TRAJ43)
CAFDMRFGAGTRLTV

SEQ ID NO: 402126 - protein, 13 aa, Homo sapiens
  CDR3 for beta chain variable domain of TCR clone 201063 (TRBV4-2, TRBJ1-1)
CASRQAGNTEAFF

SEQ ID NO: 402127 - protein, 15 aa, Homo sapiens
  CDR3 for alpha chain variable domain of TCR clone 201064 (TRAV12-1, TRAJ4)
CVVNPFSDGYNKLIF

SEQ ID NO: 402128 - protein, 15 aa, Homo sapiens
  CDR3 for beta chain variable domain of TCR clone 201064 (TRBV7-9, TRBJ1-6)
CASSSPGRGNSPLHF

SEQ ID NO: 402129 - protein, 15 aa, Homo sapiens
  CDR3 for alpha chain variable domain of TCR clone 201065 (TRAV20, TRAJ43)
CAVQAGKSSNTDMRF

SEQ ID NO: 402130 - protein, 14 aa, Homo sapiens
  CDR3 for beta chain variable domain of TCR clone 201065 (TRBV27, TRBJ2-1)
CASRHLGGGKEQFF

SEQ ID NO: 402131 - protein, 14 aa, Homo sapiens
  CDR3 for alpha chain variable domain of TCR clone 201066 (TRAV16, TRAJ42)
CALLAGGSQGNLIF

SEQ ID NO: 402132 - protein, 17 aa, Homo sapiens
  CDR3 for beta chain variable domain of TCR clone 201066 (TRBV7-3, TRBJ2-3)
CASSLMKRMRGADTQYF

SEQ ID NO: 402133 - protein, 16 aa, Homo sapiens
  CDR3 for alpha chain variable domain of TCR clone 201067 (TRAV23/DV6, TRAJ3)
CSKHAVSYSSASTIIF

SEQ ID NO: 402134 - protein, 15 aa, Homo sapiens
  CDR3 for beta chain variable domain of TCR clone 201067 (TRBV27, TRBJ2-1)
CASSNGGGSSNEQFF

SEQ ID NO: 402135 - protein, 11 aa, Homo sapiens
  CDR3 for alpha chain variable domain of TCR clone 201068 (TRAV17, TRAJ43)
CATPRSNDMRF

SEQ ID NO: 402136 - protein, 14 aa, Homo sapiens
  CDR3 for beta chain variable domain of TCR clone 201068 (TRBV7-7, TRBJ2-7)
CASSLGRGVGEQYF

SEQ ID NO: 402137 - protein, 16 aa, Homo sapiens
  CDR3 for alpha chain variable domain of TCR clone 201069 (TRAV3, TRAJ34)
CAVRARGTPTSSSLGL

SEQ ID NO: 402138 - protein, 15 aa, Homo sapiens
  CDR3 for beta chain variable domain of TCR clone 201069 (TRBV6-3, TRBJ2-7)
CASSSLGTVFYEQYF

SEQ ID NO: 402139 - protein, 12 aa, Homo sapiens
  CDR3 for alpha chain variable domain of TCR clone 201070 (TRAV21, TRAJ33)
CAKMDSNYQLIW

SEQ ID NO: 402140 - protein, 11 aa, Homo sapiens
  CDR3 for beta chain variable domain of TCR clone 201070 (TRBV12-4, TRBJ2-3)
CASTATDTQYF

SEQ ID NO: 402141 - protein, 16 aa, Homo sapiens
  CDR3 for alpha chain variable domain of TCR clone 201071 (TRAV16, TRAJ4)
CITVLPFSGGYNKLIF

SEQ ID NO: 402142 - protein, 16 aa, Homo sapiens
  CDR3 for beta chain variable domain of TCR clone 201071 (TRBV19, TRBJ1-5)
CASSIDRGGPRQPQHF

SEQ ID NO: 402143 - protein, 13 aa, Homo sapiens
  CDR3 for alpha chain variable domain of TCR clone 201072 (TRAV3, TRAJ21)
CAVREPDFNKFYF

SEQ ID NO: 402144 - protein, 15 aa, Homo sapiens
  CDR3 for beta chain variable domain of TCR clone 201072 (TRBV19, TRBJ2-3)
CASSARWTITDTQYF

SEQ ID NO: 402145 - protein, 14 aa, Homo sapiens
  CDR3 for alpha chain variable domain of TCR clone 201073 (TRAV35, TRAJ38)
CAGSNAGTNRKLIW

SEQ ID NO: 402146 - protein, 12 aa, Homo sapiens
  CDR3 for beta chain variable domain of TCR clone 201073 (TRBV19, TRBJ2-7)
CASTDRGYEQYF

SEQ ID NO: 402147 - protein, 12 aa, Homo sapiens
  CDR3 for alpha chain variable domain of TCR clone 201074 (TRAV13-1, TRAJ24)
CAALGSWGKLQF

SEQ ID NO: 402148 - protein, 17 aa, Homo sapiens
  CDR3 for beta chain variable domain of TCR clone 201074 (TRBV28, TRBJ2-5)
CASSTPEGDALQETRYF

SEQ ID NO: 402149 - protein, 15 aa, Homo sapiens
  CDR3 for alpha chain variable domain of TCR clone 201075 (TRAV2, TRAJ9)
CAVEDRGTGGFKTIF

SEQ ID NO: 402150 - protein, 14 aa, Homo sapiens
  CDR3 for beta chain variable domain of TCR clone 201075 (TRBV27, TRBJ2-5)
CASSSLKGWETQYF

SEQ ID NO: 402151 - protein, 14 aa, Homo sapiens
  CDR3 for alpha chain variable domain of TCR clone 201076 (TRAV9-2, TRAJ39)
CALYIYNAGNMLTF

SEQ ID NO: 402152 - protein, 13 aa, Homo sapiens
  CDR3 for beta chain variable domain of TCR clone 201076 (TRBV10-2, TRBJ2-6)
CASKSAGANVLTF

SEQ ID NO: 402153 - protein, 14 aa, Homo sapiens
  CDR3 for alpha chain variable domain of TCR clone 201077 (TRAV8-3, TRAJ44)
CAVGNTGTASKLTF

SEQ ID NO: 402154 - protein, 15 aa, Homo sapiens
  CDR3 for beta chain variable domain of TCR clone 201077 (TRBV28, TRBJ2-7)
CASSCRGQGRYEQYF

SEQ ID NO: 402155 - protein, 20 aa, Homo sapiens
  CDR3 for alpha chain variable domain of TCR clone 201078 (TRAV8-3, TRAJ44)
LSTSVLWVRLYNGTASKLTF

SEQ ID NO: 402156 - protein, 15 aa, Homo sapiens
  CDR3 for beta chain variable domain of TCR clone 201078 (TRBV6-5, TRBJ1-2)
CASSYSQAFNYGYTF

SEQ ID NO: 402157 - protein, 13 aa, Homo sapiens
  CDR3 for alpha chain variable domain of TCR clone 201079 (TRAV20, TRAJ37)
CSGCSSNTGKLIF

SEQ ID NO: 402158 - protein, 15 aa, Homo sapiens
  CDR3 for beta chain variable domain of TCR clone 201079 (TRBV7-2, TRBJ2-1)
CASSSGLAGGNEQFF

SEQ ID NO: 402159 - protein, 12 aa, Homo sapiens
  CDR3 for alpha chain variable domain of TCR clone 201080 (TRAV27, TRAJ35)
CPGADFGNVLHC

SEQ ID NO: 402160 - protein, 16 aa, Homo sapiens
  CDR3 for beta chain variable domain of TCR clone 201080 (TRBV6-1, TRBJ2-1)
CASILRQGSSYNEQFF

SEQ ID NO: 402161 - protein, 13 aa, Homo sapiens
  CDR3 for alpha chain variable domain of TCR clone 201081 (TRAV8-3, TRAJ28)
CAVGAVGSYQLTF

SEQ ID NO: 402162 - protein, 14 aa, Homo sapiens
  CDR3 for beta chain variable domain of TCR clone 201081 (TRBV7-2, TRBJ2-7)
CASRSQGAAYAQYF

SEQ ID NO: 402163 - protein, 14 aa, Homo sapiens
  CDR3 for alpha chain variable domain of TCR clone 201082 (TRAV16, TRAJ39)
CALSKNTAGNMLTF

SEQ ID NO: 402164 - protein, 16 aa, Homo sapiens
  CDR3 for beta chain variable domain of TCR clone 201082 (TRBV6-6, TRBJ2-1)
CASSYSFSGSYNEQFF

SEQ ID NO: 402165 - protein, 14 aa, Homo sapiens
  CDR3 for alpha chain variable domain of TCR clone 201083 (TRAV12-2, TRAJ13)
CAVKKTGGYQKATF

SEQ ID NO: 402166 - protein, 15 aa, Homo sapiens
  CDR3 for beta chain variable domain of TCR clone 201083 (TRBV7-2, TRBJ2-1)
CASSLASGRVNEQFF

SEQ ID NO: 402167 - protein, 10 aa, Homo sapiens
  CDR3 for alpha chain variable domain of TCR clone 201084 (TRAV27, TRAJ43)
CAGANNDMRF

SEQ ID NO: 402168 - protein, 20 aa, Homo sapiens
  CDR3 for beta chain variable domain of TCR clone 201084 (TRBV6-1, TRBJ1-4)
CASSESLAGGMGATNEKLFF

SEQ ID NO: 402169 - protein, 12 aa, Homo sapiens
  CDR3 for alpha chain variable domain of TCR clone 201085 (TRAV17, TRAJ39)
CATGAAGNRLTF

SEQ ID NO: 402170 - protein, 14 aa, Homo sapiens
  CDR3 for beta chain variable domain of TCR clone 201085 (TRBV7-9, TRBJ1-2)
CASSRQGANYGYTF

SEQ ID NO: 402171 - protein, 14 aa, Homo sapiens
  CDR3 for alpha chain variable domain of TCR clone 201086 (TRAV20, TRAJ56)
CAVQLGGDNSKLTF

SEQ ID NO: 402172 - protein, 14 aa, Homo sapiens
  CDR3 for beta chain variable domain of TCR clone 201086 (TRBV20-1, TRBJ2-7)
CSAKRGRSSYEQYF

SEQ ID NO: 402173 - protein, 14 aa, Homo sapiens
  CDR3 for alpha chain variable domain of TCR clone 201087 (TRAV29/DV5, TRAJ57)
CAARSQGGSEKLVF

SEQ ID NO: 402174 - protein, 17 aa, Homo sapiens
  CDR3 for beta chain variable domain of TCR clone 201087 (TRBV7-9, TRBJ2-3)
CASSPTVAGDLTDTQYF

SEQ ID NO: 402175 - protein, 14 aa, Homo sapiens
  CDR3 for alpha chain variable domain of TCR clone 201088 (TRAV12-2, TRAJ32)
CAHPESGATNKLIF

SEQ ID NO: 402176 - protein, 15 aa, Homo sapiens
  CDR3 for beta chain variable domain of TCR clone 201088 (TRBV20-1, TRBJ2-7)
CSARDRVSGMDEQYF

SEQ ID NO: 402177 - protein, 14 aa, Homo sapiens
  CDR3 for alpha chain variable domain of TCR clone 201089 (TRAV29/DV5, TRAJ36)
CAARRKTGANNLFF

SEQ ID NO: 402178 - protein, 15 aa, Homo sapiens
  CDR3 for beta chain variable domain of TCR clone 201089 (TRBV2, TRBJ2-1)
CVSSELAGSYNGQFF

SEQ ID NO: 402179 - protein, 11 aa, Homo sapiens
  CDR3 for alpha chain variable domain of TCR clone 201090 (TRAV1-1, TRAJ22)
CLGGFCKATDL

SEQ ID NO: 402180 - protein, 14 aa, Homo sapiens
  CDR3 for beta chain variable domain of TCR clone 201090 (TRBV27, TRBJ2-7)
CAGSLAGLSYEQYF

SEQ ID NO: 402181 - protein, 13 aa, Homo sapiens
  CDR3 for alpha chain variable domain of TCR clone 201091 (TRAV27, TRAJ39)
CAGAQGAGNMLTF

SEQ ID NO: 402182 - protein, 13 aa, Homo sapiens
  CDR3 for beta chain variable domain of TCR clone 201091 (TRBV28, TRBJ2-2)
CASIRESTGELFF

SEQ ID NO: 402183 - protein, 13 aa, Homo sapiens
  CDR3 for alpha chain variable domain of TCR clone 201092 (TRAV17, TRAJ9)
CATDYTGGIKTIL

SEQ ID NO: 402184 - protein, 16 aa, Homo sapiens
  CDR3 for beta chain variable domain of TCR clone 201092 (TRBV7-7, TRBJ2-1)
CASSLASGTSYNEQFF

SEQ ID NO: 402185 - protein, 12 aa, Homo sapiens
  CDR3 for alpha chain variable domain of TCR clone 201093 (TRAV13-1, TRAJ20)
CAARQNDYKLSF

SEQ ID NO: 402186 - protein, 14 aa, Homo sapiens
  CDR3 for beta chain variable domain of TCR clone 201093 (TRBV5-1, TRBJ2-7)
CTSSFASGVNEQYF

SEQ ID NO: 402187 - protein, 13 aa, Homo sapiens
  CDR3 for alpha chain variable domain of TCR clone 201094 (TRAV3, TRAJ29)
CAVRYWGNTPLVL

SEQ ID NO: 402188 - protein, 15 aa, Homo sapiens
  CDR3 for beta chain variable domain of TCR clone 201094 (TRBV12-4, TRBJ2-5)
CASIGRTGEGETQYF

SEQ ID NO: 402189 - protein, 12 aa, Homo sapiens
  CDR3 for alpha chain variable domain of TCR clone 201095 (TRAV12-3, TRAJ40)
CAMSSGTYKYIF

SEQ ID NO: 402190 - protein, 15 aa, Homo sapiens
  CDR3 for beta chain variable domain of TCR clone 201095 (TRBV7-3, TRBJ2-2)
CASSETGQGTGDLFF

SEQ ID NO: 402191 - protein, 16 aa, Homo sapiens
  CDR3 for alpha chain variable domain of TCR clone 201096 (TRAV30, TRAJ24)
CGTEIVDADSWGKFQF

SEQ ID NO: 402192 - protein, 15 aa, Homo sapiens
  CDR3 for beta chain variable domain of TCR clone 201096 (TRBV5-1, TRBJ1-1)
CASSLGPRGNTEAFF

SEQ ID NO: 402193 - protein, 14 aa, Homo sapiens
  CDR3 for alpha chain variable domain of TCR clone 201097 (TRAV20, TRAJ22)
CAVALGGSARQLTF

SEQ ID NO: 402194 - protein, 17 aa, Homo sapiens
  CDR3 for beta chain variable domain of TCR clone 201097 (TRBV13, TRBJ2-3)
CASSRSRVAGGRNTQYF

SEQ ID NO: 402195 - protein, 15 aa, Homo sapiens
  CDR3 for alpha chain variable domain of TCR clone 201098 (TRAV35, TRAJ41)
CAGQLFSNTGYALNF

SEQ ID NO: 402196 - protein, 14 aa, Homo sapiens
  CDR3 for beta chain variable domain of TCR clone 201098 (TRBV7-2, TRBJ1-2)
CASSRGGTNYGYTF

SEQ ID NO: 402197 - protein, 14 aa, Homo sapiens
  CDR3 for alpha chain variable domain of TCR clone 201099 (TRAV38-1, TRAJ40)
CALRPTSGTYKYIF

SEQ ID NO: 402198 - protein, 15 aa, Homo sapiens
  CDR3 for beta chain variable domain of TCR clone 201099 (TRBV4-1, TRBJ1-4)
CASSDTGGTNEKLFF

SEQ ID NO: 402199 - protein, 14 aa, Homo sapiens
  CDR3 for alpha chain variable domain of TCR clone 201100 (TRAV16, TRAJ3)
CALSQYSSASKIIF

SEQ ID NO: 402200 - protein, 13 aa, Homo sapiens
  CDR3 for beta chain variable domain of TCR clone 201100 (TRBV12-4, TRBJ1-2)
CASSSGLTVISTF

SEQ ID NO: 402201 - protein, 16 aa, Homo sapiens
  CDR3 for alpha chain variable domain of TCR clone 201101 (TRAV3, TRAJ10)
CAVRDMRAGGGNKLTF

SEQ ID NO: 402202 - protein, 15 aa, Homo sapiens
  CDR3 for beta chain variable domain of TCR clone 201101 (TRBV19, TRBJ1-1)
CASTSGQIQTTEAFF

SEQ ID NO: 402203 - protein, 11 aa, Homo sapiens
  CDR3 for alpha chain variable domain of TCR clone 201102 (TRAV35, TRAJ22)
CAGPGVGQLTF

SEQ ID NO: 402204 - protein, 15 aa, Homo sapiens
  CDR3 for beta chain variable domain of TCR clone 201102 (TRBV27, TRBJ2-7)
CASSTAGTGSYEQYF

SEQ ID NO: 402205 - protein, 18 aa, Homo sapiens
  CDR3 for alpha chain variable domain of TCR clone 201103 (TRAV21, TRAJ52)
CAVRPSPAGGTSYGKLTF

SEQ ID NO: 402206 - protein, 16 aa, Homo sapiens
  CDR3 for beta chain variable domain of TCR clone 201103 (TRBV4-2, TRBJ1-2)
CASSRAGTKANYGYTF

SEQ ID NO: 402207 - protein, 11 aa, Homo sapiens
  CDR3 for alpha chain variable domain of TCR clone 201104 (TRAV29/DV5, TRAJ34)
CAASPLAKLIF

SEQ ID NO: 402208 - protein, 15 aa, Homo sapiens
  CDR3 for beta chain variable domain of TCR clone 201104 (TRBV11-2, TRBJ2-5)
CASSPRSGGLETQYF

SEQ ID NO: 402209 - protein, 11 aa, Homo sapiens
  CDR3 for alpha chain variable domain of TCR clone 201105 (TRAV1-2, TRAJ20)
CAVSNDYKLSF

SEQ ID NO: 402210 - protein, 16 aa, Homo sapiens
  CDR3 for beta chain variable domain of TCR clone 201105 (TRBV7-9, TRBJ1-3)
CASSQTSGLRMGTIYF

SEQ ID NO: 402211 - protein, 14 aa, Homo sapiens
  CDR3 for alpha chain variable domain of TCR clone 201106 (TRAV1-1, TRAJ27)
CAVIYNTDAGKSTF

SEQ ID NO: 402212 - protein, 15 aa, Homo sapiens
  CDR3 for beta chain variable domain of TCR clone 201106 (TRBV11-2, TRBJ2-2)
CASSLDTGNTGELFF

SEQ ID NO: 402213 - protein, 11 aa, Homo sapiens
  CDR3 for alpha chain variable domain of TCR clone 201107 (TRAV35, TRAJ43)
CAGQLNNDMRF

SEQ ID NO: 402214 - protein, 14 aa, Homo sapiens
  CDR3 for beta chain variable domain of TCR clone 201107 (TRBV7-2, TRBJ1-1)
CASSFLTGTTEAFF

SEQ ID NO: 402215 - protein, 15 aa, Homo sapiens
  CDR3 for alpha chain variable domain of TCR clone 201108 (TRAV3, TRAJ17)
CAVRDTGAAGNKLTF

SEQ ID NO: 402216 - protein, 15 aa, Homo sapiens
  CDR3 for beta chain variable domain of TCR clone 201108 (TRBV6-1, TRBJ2-3)
CASSERGGITDTQYF

SEQ ID NO: 402217 - protein, 17 aa, Homo sapiens
  CDR3 for alpha chain variable domain of TCR clone 201109 (TRAV13-1, TRAJ52)
CAASSGAGGTSYGKLTF

SEQ ID NO: 402218 - protein, 15 aa, Homo sapiens
  CDR3 for beta chain variable domain of TCR clone 201109 (TRBV7-3, TRBJ2-1)
CASSLSSGSFDEQFF

SEQ ID NO: 402219 - protein, 12 aa, Homo sapiens
  CDR3 for alpha chain variable domain of TCR clone 201110 (TRAV12-1, TRAJ40)
CVVNGETYKYIF

SEQ ID NO: 402220 - protein, 16 aa, Homo sapiens
  CDR3 for beta chain variable domain of TCR clone 201110 (TRBV5-1, TRBJ1-1)
CASSSGGNSLNTEAFF

SEQ ID NO: 402221 - protein, 16 aa, Homo sapiens
  CDR3 for alpha chain variable domain of TCR clone 201111 (TRAV26-1, TRAJ36)
CIVRVPDQTGANNLFF

SEQ ID NO: 402222 - protein, 18 aa, Homo sapiens
  CDR3 for beta chain variable domain of TCR clone 201111 (TRBV11-2, TRBJ2-3)
CASSLGGASRGAPNTQYF

SEQ ID NO: 402223 - protein, 15 aa, Homo sapiens
  CDR3 for alpha chain variable domain of TCR clone 201112 (TRAV12-1, TRAJ4)
CVVKPFSGGYNKLIF

SEQ ID NO: 402224 - protein, 16 aa, Homo sapiens
  CDR3 for beta chain variable domain of TCR clone 201112 (TRBV5-1, TRBJ1-1)
CASSKTGTEVGTEAFF

SEQ ID NO: 402225 - protein, 14 aa, Homo sapiens
  CDR3 for alpha chain variable domain of TCR clone 201113 (TRAV13-1, TRAJ15)
CAPGGNQAGTALIF

SEQ ID NO: 402226 - protein, 14 aa, Homo sapiens
  CDR3 for beta chain variable domain of TCR clone 201113 (TRBV4-2, TRBJ2-1)
CASGLDRAYNEQVF

SEQ ID NO: 402227 - protein, 12 aa, Homo sapiens
  CDR3 for alpha chain variable domain of TCR clone 201114 (TRAV24, TRAJ26)
CAFFNYGQNFVF

SEQ ID NO: 402228 - protein, 14 aa, Homo sapiens
  CDR3 for beta chain variable domain of TCR clone 201114 (TRBV2, TRBJ2-1)
CASSEARQGVSEFF

SEQ ID NO: 402229 - protein, 14 aa, Homo sapiens
  CDR3 for alpha chain variable domain of TCR clone 201115 (TRAV27, TRAJ36)
CAGPPKRGANNLFF

SEQ ID NO: 402230 - protein, 15 aa, Homo sapiens
  CDR3 for beta chain variable domain of TCR clone 201115 (TRBV20-1, TRBJ2-7)
CSAESGTSGAYEQYF

SEQ ID NO: 402231 - protein, 15 aa, Homo sapiens
  CDR3 for alpha chain variable domain of TCR clone 201116 (TRAV1-2, TRAJ28)
CAVQYSGAGSYQLTF

SEQ ID NO: 402232 - protein, 13 aa, Homo sapiens
  CDR3 for beta chain variable domain of TCR clone 201116 (TRBV27, TRBJ1-1)
CASSLSIGAEAFF

SEQ ID NO: 402233 - protein, 18 aa, Homo sapiens
  CDR3 for alpha chain variable domain of TCR clone 201117 (TRAV8-3, TRAJ4)
WVRDPTSNDPGGYNKLIF

SEQ ID NO: 402234 - protein, 13 aa, Homo sapiens
  CDR3 for beta chain variable domain of TCR clone 201117 (TRBV20-1, TRBJ1-2)
CSATGIQGSGYTF

SEQ ID NO: 402235 - protein, 10 aa, Homo sapiens
  CDR3 for alpha chain variable domain of TCR clone 201118 (TRAV21, TRAJ49)
CAVTGNQFYF

SEQ ID NO: 402236 - protein, 15 aa, Homo sapiens
  CDR3 for beta chain variable domain of TCR clone 201118 (TRBV6-1, TRBJ2-3)
CASTTRAGYTDTQYF

SEQ ID NO: 402237 - protein, 16 aa, Homo sapiens
  CDR3 for alpha chain variable domain of TCR clone 201119 (TRAV30, TRAJ24)
CGTELVDADSWGKFPF

SEQ ID NO: 402238 - protein, 14 aa, Homo sapiens
  CDR3 for beta chain variable domain of TCR clone 201119 (TRBV12-5, TRBJ2-5)
CASGSRTHQETQYF

SEQ ID NO: 402239 - protein, 14 aa, Homo sapiens
  CDR3 for alpha chain variable domain of TCR clone 201120 (TRAV8-4, TRAJ54)
CAVSEVLGAQKLVF

SEQ ID NO: 402240 - protein, 15 aa, Homo sapiens
  CDR3 for beta chain variable domain of TCR clone 201120 (TRBV28, TRBJ2-5)
CASSSGRTIQETQYF

SEQ ID NO: 402241 - protein, 15 aa, Homo sapiens
  CDR3 for alpha chain variable domain of TCR clone 201121 (TRAV8-6, TRAJ11)
CAVSDRRSGYRTLTF

SEQ ID NO: 402242 - protein, 15 aa, Homo sapiens
  CDR3 for beta chain variable domain of TCR clone 201121 (TRBV7-3, TRBJ2-1)
CASSPTGGSRNEQFF

SEQ ID NO: 402243 - protein, 14 aa, Homo sapiens
  CDR3 for alpha chain variable domain of TCR clone 201122 (TRAV6, TRAJ8)
CALERGTGFQKLGF

SEQ ID NO: 402244 - protein, 16 aa, Homo sapiens
  CDR3 for beta chain variable domain of TCR clone 201122 (TRBV4-1, TRBJ2-5)
CASSQTFYGDQETQYF

SEQ ID NO: 402245 - protein, 12 aa, Homo sapiens
  CDR3 for alpha chain variable domain of TCR clone 201123 (TRAV21, TRAJ6)
CAVKGGSYIPTF

SEQ ID NO: 402246 - protein, 14 aa, Homo sapiens
  CDR3 for beta chain variable domain of TCR clone 201123 (TRBV18, TRBJ1-1)
CASSPPTGRTEAFF

SEQ ID NO: 402247 - protein, 14 aa, Homo sapiens
  CDR3 for alpha chain variable domain of TCR clone 201124 (TRAV12-2, TRAJ13)
CAVKKTGGYRKVTF

SEQ ID NO: 402248 - protein, 17 aa, Homo sapiens
  CDR3 for beta chain variable domain of TCR clone 201124 (TRBV15, TRBJ2-4)
CATSRDNPQTGLDIQYF

SEQ ID NO: 402249 - protein, 14 aa, Homo sapiens
  CDR3 for alpha chain variable domain of TCR clone 201125 (TRAV8-4, TRAJ13)
CAVTLSGGYQKVTF

SEQ ID NO: 402250 - protein, 14 aa, Homo sapiens
  CDR3 for beta chain variable domain of TCR clone 201125 (TRBV7-2, TRBJ1-2)
CGSSQTGSTYGYTF

SEQ ID NO: 402251 - protein, 12 aa, Homo sapiens
  CDR3 for alpha chain variable domain of TCR clone 201126 (TRAV12-2, TRAJ10)
WGVTGGGNKLTF

SEQ ID NO: 402252 - protein, 15 aa, Homo sapiens
  CDR3 for beta chain variable domain of TCR clone 201126 (TRBV7-9, TRBJ1-4)
CASSRTGGFNEKLFF

SEQ ID NO: 402253 - protein, 14 aa, Homo sapiens
  CDR3 for alpha chain variable domain of TCR clone 201127 (TRAV1-2, TRAJ8)
CAVREDTGFQRIVF

SEQ ID NO: 402254 - protein, 15 aa, Homo sapiens
  CDR3 for beta chain variable domain of TCR clone 201127 (TRBV6-3, TRBJ2-7)
CASSSPGTVFYEQYF

SEQ ID NO: 402255 - protein, 15 aa, Homo sapiens
  CDR3 for alpha chain variable domain of TCR clone 201128 (TRAV26-1, TRAJ56)
CIVRVAAGADSTLTF

SEQ ID NO: 402256 - protein, 14 aa, Homo sapiens
  CDR3 for beta chain variable domain of TCR clone 201128 (TRBV27, TRBJ2-7)
CQQSQREGQREQYF

SEQ ID NO: 402257 - protein, 14 aa, Homo sapiens
  CDR3 for alpha chain variable domain of TCR clone 201129 (TRAV12-2, TRAJ40)
CAVKIPSGTYKYIF

SEQ ID NO: 402258 - protein, 14 aa, Homo sapiens
  CDR3 for beta chain variable domain of TCR clone 201129 (TRBV20-1, TRBJ1-1)
CSAQTRIAGTEAFF

SEQ ID NO: 402259 - protein, 14 aa, Homo sapiens
  CDR3 for alpha chain variable domain of TCR clone 201130 (TRAV16, TRAJ17)
CALSGRAAGNRLTF

SEQ ID NO: 402260 - protein, 17 aa, Homo sapiens
  CDR3 for beta chain variable domain of TCR clone 201130 (TRBV18, TRBJ2-6)
CASSPRQGAVGANVLTF

SEQ ID NO: 402261 - protein, 15 aa, Homo sapiens
  CDR3 for alpha chain variable domain of TCR clone 201131 (TRAV3, TRAJ22)
CAVRDRGGSARQLTF

SEQ ID NO: 402262 - protein, 13 aa, Homo sapiens
  CDR3 for beta chain variable domain of TCR clone 201131 (TRBV27, TRBJ2-1)
CASRTLGVGEQFF

SEQ ID NO: 402263 - protein, 16 aa, Homo sapiens
  CDR3 for alpha chain variable domain of TCR clone 201132 (TRAV3, TRAJ37)
CAVRPHGSGNTGNLIF

SEQ ID NO: 402264 - protein, 11 aa, Homo sapiens
  CDR3 for beta chain variable domain of TCR clone 201132 (TRBV10-3, TRBJ2-7)
CAISEGLEQYF

SEQ ID NO: 402265 - protein, 15 aa, Homo sapiens
  CDR3 for alpha chain variable domain of TCR clone 201133 (TRAV17, TRAJ4)
CATGTWSGGYNKLIF

SEQ ID NO: 402266 - protein, 14 aa, Homo sapiens
  CDR3 for beta chain variable domain of TCR clone 201133 (TRBV5-1, TRBJ2-7)
CASSRGESLYEQYF

SEQ ID NO: 402267 - protein, 13 aa, Homo sapiens
  CDR3 for alpha chain variable domain of TCR clone 201134 (TRAV12-3, TRAJ33)
CAMSVNSNYQLIW

SEQ ID NO: 402268 - protein, 18 aa, Homo sapiens
  CDR3 for beta chain variable domain of TCR clone 201134 (TRBV2, TRBJ2-1)
CTSGPAGRGLPAYNEQFF

SEQ ID NO: 402269 - protein, 10 aa, Homo sapiens
  CDR3 for alpha chain variable domain of TCR clone 201135 (TRAV30, TRAJ48)
CGIGNEKLTF

SEQ ID NO: 402270 - protein, 16 aa, Homo sapiens
  CDR3 for beta chain variable domain of TCR clone 201135 (TRBV27, TRBJ2-1)
SMNVEPGNSGDNEQFF

SEQ ID NO: 402271 - protein, 14 aa, Homo sapiens
  CDR3 for alpha chain variable domain of TCR clone 201136 (TRAV1-2, TRAJ16)
CAVNRFSDGQTLLF

SEQ ID NO: 402272 - protein, 14 aa, Homo sapiens
  CDR3 for beta chain variable domain of TCR clone 201136 (TRBV20-1, TRBJ1-1)
CSAQTRIAGTEAFF

SEQ ID NO: 402273 - protein, 11 aa, Homo sapiens
  CDR3 for alpha chain variable domain of TCR clone 201137 (TRAV21, TRAJ34)
CAVTNTDKLIF

SEQ ID NO: 402274 - protein, 18 aa, Homo sapiens
  CDR3 for beta chain variable domain of TCR clone 201137 (TRBV11-2, TRBJ2-6)
CASSLNPFLGTGANVLTF

SEQ ID NO: 402275 - protein, 16 aa, Homo sapiens
  CDR3 for alpha chain variable domain of TCR clone 201138 (TRAV35, TRAJ28)
CAGQRYSGAGSYQLTF

SEQ ID NO: 402276 - protein, 15 aa, Homo sapiens
  CDR3 for beta chain variable domain of TCR clone 201138 (TRBV7-2, TRBJ1-2)
CASSFTQGAKYGYTF

SEQ ID NO: 402277 - protein, 18 aa, Homo sapiens
  CDR3 for alpha chain variable domain of TCR clone 201139 (TRAV26-1, TRAJ22)
CIVRASFWFCKATDLLIW

SEQ ID NO: 402278 - protein, 13 aa, Homo sapiens
  CDR3 for beta chain variable domain of TCR clone 201139 (TRBV7-9, TRBJ1-2)
CASSLKQNYGYTF

SEQ ID NO: 402279 - protein, 10 aa, Homo sapiens
  CDR3 for alpha chain variable domain of TCR clone 201140 (TRAV4, TRAJ15)
CLPFWTALIF

SEQ ID NO: 402280 - protein, 15 aa, Homo sapiens
  CDR3 for beta chain variable domain of TCR clone 201140 (TRBV5-1, TRBJ2-1)
CASSFSGTGYNEQFL

SEQ ID NO: 402281 - protein, 11 aa, Homo sapiens
  CDR3 for alpha chain variable domain of TCR clone 201141 (TRAV22, TRAJ20)
CAPLHDYKLSF

SEQ ID NO: 402282 - protein, 13 aa, Homo sapiens
  CDR3 for beta chain variable domain of TCR clone 201141 (TRBV7-2, TRBJ2-7)
CASSSPSGSEQYF

SEQ ID NO: 402283 - protein, 14 aa, Homo sapiens
  CDR3 for alpha chain variable domain of TCR clone 201142 (TRAV26-1, TRAJ38)
CIADNAGKKRKLIW

SEQ ID NO: 402284 - protein, 13 aa, Homo sapiens
  CDR3 for beta chain variable domain of TCR clone 201142 (TRBV20-1, TRBJ1-1)
CSARGGGNTEAFF

SEQ ID NO: 402285 - protein, 15 aa, Homo sapiens
  CDR3 for alpha chain variable domain of TCR clone 201143 (TRAV27, TRAJ38)
CAARRNAGNHRKLIW

SEQ ID NO: 402286 - protein, 13 aa, Homo sapiens
  CDR3 for beta chain variable domain of TCR clone 201143 (TRBV7-3, TRBJ2-1)
CASSLDSYNEQFF

SEQ ID NO: 402287 - protein, 17 aa, Homo sapiens
  CDR3 for alpha chain variable domain of TCR clone 201144 (TRAV13-1, TRAJ28)
CAASPPYSGAGSYQLTF

SEQ ID NO: 402288 - protein, 15 aa, Homo sapiens
  CDR3 for beta chain variable domain of TCR clone 201144 (TRBV6-3, TRBJ2-2)
CASSFLARLTGELFF

SEQ ID NO: 402289 - protein, 13 aa, Homo sapiens
  CDR3 for alpha chain variable domain of TCR clone 201145 (TRAV36/DV7, TRAJ53)
SALSGGSNYKLTF

SEQ ID NO: 402290 - protein, 13 aa, Homo sapiens
  CDR3 for beta chain variable domain of TCR clone 201145 (TRBV28, TRBJ2-7)
CASSLPSRYEQYF

SEQ ID NO: 402291 - protein, 16 aa, Homo sapiens
  CDR3 for alpha chain variable domain of TCR clone 201146 (TRAV12-2, TRAJ43)
CAGDDMRFGAGTRLTV

SEQ ID NO: 402292 - protein, 13 aa, Homo sapiens
  CDR3 for beta chain variable domain of TCR clone 201146 (TRBV10-3, TRBJ2-7)
CASKLAVNYEQYF

SEQ ID NO: 402293 - protein, 14 aa, Homo sapiens
  CDR3 for alpha chain variable domain of TCR clone 201147 (TRAV14/DV4, TRAJ54)
CAMREAPGAEKLVF

SEQ ID NO: 402294 - protein, 15 aa, Homo sapiens
  CDR3 for beta chain variable domain of TCR clone 201147 (TRBV5-1, TRBJ2-7)
CASSLNGGPAREQYF

SEQ ID NO: 402295 - protein, 16 aa, Homo sapiens
  CDR3 for alpha chain variable domain of TCR clone 201148 (TRAV21, TRAJ33)
CAVSPARMDSNYQLIW

SEQ ID NO: 402296 - protein, 17 aa, Homo sapiens
  CDR3 for beta chain variable domain of TCR clone 201148 (TRBV2, TRBJ1-4)
CASSKRELTRGEEKLFF

SEQ ID NO: 402297 - protein, 15 aa, Homo sapiens
  CDR3 for alpha chain variable domain of TCR clone 201149 (TRAV17, TRAJ28)
CATVDSGAGSYQLTF

SEQ ID NO: 402298 - protein, 13 aa, Homo sapiens
  CDR3 for beta chain variable domain of TCR clone 201149 (TRBV5-4, TRBJ2-5)
CASSRQEGEIQYF

SEQ ID NO: 402299 - protein, 17 aa, Homo sapiens
  CDR3 for alpha chain variable domain of TCR clone 201150 (TRAV23/DV6, TRAJ58)
FAARLLRGETSGSRLTF

SEQ ID NO: 402300 - protein, 14 aa, Homo sapiens
  CDR3 for beta chain variable domain of TCR clone 201150 (TRBV2, TRBJ2-7)
CASSLTSGGYEQYF

SEQ ID NO: 402301 - protein, 15 aa, Homo sapiens
  CDR3 for alpha chain variable domain of TCR clone 201151 (TRAV26-1, TRAJ40)
CIGRAVPSGTYKYIF

SEQ ID NO: 402302 - protein, 16 aa, Homo sapiens
  CDR3 for beta chain variable domain of TCR clone 201151 (TRBV7-2, TRBJ2-2)
CASSLRGQANTGELFF

SEQ ID NO: 402303 - protein, 13 aa, Homo sapiens
  CDR3 for alpha chain variable domain of TCR clone 201152 (TRAV35, TRAJ42)
CAGFPGSQGNLIF

SEQ ID NO: 402304 - protein, 15 aa, Homo sapiens
  CDR3 for beta chain variable domain of TCR clone 201152 (TRBV4-1, TRBJ2-7)
CASSQQGQGFDEQYF

SEQ ID NO: 402305 - protein, 16 aa, Homo sapiens
  CDR3 for alpha chain variable domain of TCR clone 201153 (TRAV12-2, TRAJ28)
CAVTTDSGAGSYQLTF

SEQ ID NO: 402306 - protein, 12 aa, Homo sapiens
  CDR3 for beta chain variable domain of TCR clone 201153 (TRBV9, TRBJ2-2)
CASSLVTGELFF

SEQ ID NO: 402307 - protein, 11 aa, Homo sapiens
  CDR3 for alpha chain variable domain of TCR clone 201154 (TRAV2, TRAJ13)
CASGGYQKVTF

SEQ ID NO: 402308 - protein, 14 aa, Homo sapiens
  CDR3 for beta chain variable domain of TCR clone 201154 (TRBV7-9, TRBJ2-4)
CASSLAMGGNIQYF

SEQ ID NO: 402309 - protein, 12 aa, Homo sapiens
  CDR3 for alpha chain variable domain of TCR clone 201155 (TRAV12-3, TRAJ17)
CAMTLTCNKLTF

SEQ ID NO: 402310 - protein, 15 aa, Homo sapiens
  CDR3 for beta chain variable domain of TCR clone 201155 (TRBV10-2, TRBJ2-6)
CAGSERGTGANVLTF

SEQ ID NO: 402311 - protein, 14 aa, Homo sapiens
  CDR3 for alpha chain variable domain of TCR clone 201156 (TRAV38-1, TRAJ40)
CALRPTSVTYKYIF

SEQ ID NO: 402312 - protein, 15 aa, Homo sapiens
  CDR3 for beta chain variable domain of TCR clone 201156 (TRBV19, TRBJ2-7)
CASSPAGSGEALRYF

SEQ ID NO: 402313 - protein, 14 aa, Homo sapiens
  CDR3 for alpha chain variable domain of TCR clone 201157 (TRAV20, TRAJ56)
CAVQFGGANSKLTF

SEQ ID NO: 402314 - protein, 15 aa, Homo sapiens
  CDR3 for beta chain variable domain of TCR clone 201157 (TRBV5-1, TRBJ2-2)
CASSSQGGNTGELFF

SEQ ID NO: 402315 - protein, 15 aa, Homo sapiens
  CDR3 for alpha chain variable domain of TCR clone 201158 (TRAV35, TRAJ40)
CAGQLCQAGTYKYIF

SEQ ID NO: 402316 - protein, 14 aa, Homo sapiens
  CDR3 for beta chain variable domain of TCR clone 201158 (TRBV7-3, TRBJ2-1)
CASSLTGGANEQFF

SEQ ID NO: 402317 - protein, 13 aa, Homo sapiens
  CDR3 for alpha chain variable domain of TCR clone 201159 (TRAV12-2, TRAJ42)
CAVKRGSQGNLIF

SEQ ID NO: 402318 - protein, 16 aa, Homo sapiens
  CDR3 for beta chain variable domain of TCR clone 201159 (TRBV9, TRBJ2-2)
CASSAMGKGDTGELFF

SEQ ID NO: 402319 - protein, 14 aa, Homo sapiens
  CDR3 for alpha chain variable domain of TCR clone 201160 (TRAV13-1, TRAJ36)
CAASINNGANNLFF

SEQ ID NO: 402320 - protein, 18 aa, Homo sapiens
  CDR3 for beta chain variable domain of TCR clone 201160 (TRBV20-1, TRBJ2-3)
CSARDPWGQGLSTDTQYF

SEQ ID NO: 402321 - protein, 13 aa, Homo sapiens
  CDR3 for alpha chain variable domain of TCR clone 201161 (TRAV13-2, TRAJ48)
CAEMDFGNEKLTF

SEQ ID NO: 402322 - protein, 15 aa, Homo sapiens
  CDR3 for beta chain variable domain of TCR clone 201161 (TRBV7-9, TRBJ1-6)
CASSSPGRGNSTLDF

SEQ ID NO: 402323 - protein, 14 aa, Homo sapiens
  CDR3 for alpha chain variable domain of TCR clone 201162 (TRAV2, TRAJ9)
CAVEDRRGGFKTIF

SEQ ID NO: 402324 - protein, 16 aa, Homo sapiens
  CDR3 for beta chain variable domain of TCR clone 201162 (TRBV15, TRBJ2-7)
CATSRDGGIPSYEQYF

SEQ ID NO: 402325 - protein, 14 aa, Homo sapiens
  CDR3 for alpha chain variable domain of TCR clone 201163 (TRAV26-1, TRAJ48)
CIVRVPFGNKKLTF

SEQ ID NO: 402326 - protein, 16 aa, Homo sapiens
  CDR3 for beta chain variable domain of TCR clone 201163 (TRBV18, TRBJ2-1)
CASSPYLSIRGDEQFF

SEQ ID NO: 402327 - protein, 12 aa, Homo sapiens
  CDR3 for alpha chain variable domain of TCR clone 201164 (TRAV13-1, TRAJ53)
CAAGGINYKLTF

SEQ ID NO: 402328 - protein, 11 aa, Homo sapiens
  CDR3 for beta chain variable domain of TCR clone 201164 (TRBV2, TRBJ1-1)
CASREGTEAFF

SEQ ID NO: 402329 - protein, 12 aa, Homo sapiens
  CDR3 for alpha chain variable domain of TCR clone 201165 (TRAV3, TRAJ20)
CAVSDPDYKISF

SEQ ID NO: 402330 - protein, 14 aa, Homo sapiens
  CDR3 for beta chain variable domain of TCR clone 201165 (TRBV4-2, TRBJ2-1)
CASGLDRAYNEQFF

SEQ ID NO: 402331 - protein, 14 aa, Homo sapiens
  CDR3 for alpha chain variable domain of TCR clone 201166 (TRAV1-2, TRAJ16)
CAVNRFSDGQKLLF

SEQ ID NO: 402332 - protein, 12 aa, Homo sapiens
  CDR3 for beta chain variable domain of TCR clone 201166 (TRBV19, TRBJ2-1)
CASSPGQGRPQI

SEQ ID NO: 402333 - protein, 15 aa, Homo sapiens
  CDR3 for alpha chain variable domain of TCR clone 201167 (TRAV3, TRAJ3)
CAVRDRDSSASKIIF

SEQ ID NO: 402334 - protein, 14 aa, Homo sapiens
  CDR3 for beta chain variable domain of TCR clone 201167 (TRBV4-3, TRBJ1-5)
CASSQGGQGWPQHF

SEQ ID NO: 402335 - protein, 14 aa, Homo sapiens
  CDR3 for alpha chain variable domain of TCR clone 201168 (TRAV26-1, TRAJ29)
CIVRVGIRKHTSCL

SEQ ID NO: 402336 - protein, 14 aa, Homo sapiens
  CDR3 for beta chain variable domain of TCR clone 201168 (TRBV18, TRBJ2-5)
CASSPGVSQETQYF

SEQ ID NO: 402337 - protein, 16 aa, Homo sapiens
  CDR3 for alpha chain variable domain of TCR clone 201169 (TRAV14/DV4, TRAJ21)
CAMREGPENNSNKFYF

SEQ ID NO: 402338 - protein, 12 aa, Homo sapiens
  CDR3 for beta chain variable domain of TCR clone 201169 (TRBV29-1, TRBJ2-2)
CSVDKYTGELFF

SEQ ID NO: 402339 - protein, 13 aa, Homo sapiens
  CDR3 for alpha chain variable domain of TCR clone 201170 (TRAV27, TRAJ56)
CAGKPGANSKLTF

SEQ ID NO: 402340 - protein, 17 aa, Homo sapiens
  CDR3 for beta chain variable domain of TCR clone 201170 (TRBV13, TRBJ2-3)
CASSLSRVAGGRNTQYF

SEQ ID NO: 402341 - protein, 16 aa, Homo sapiens
  CDR3 for alpha chain variable domain of TCR clone 201171 (TRAV30, TRAJ24)
CGTEIVDADSWGKFQF

SEQ ID NO: 402342 - protein, 12 aa, Homo sapiens
  CDR3 for beta chain variable domain of TCR clone 201171 (TRBV11-2, TRBJ2-2)
CASSLGGGELFV

SEQ ID NO: 402343 - protein, 13 aa, Homo sapiens
  CDR3 for alpha chain variable domain of TCR clone 201172 (TRAV3, TRAJ27)
CAVRPLGSGKSTF

SEQ ID NO: 402344 - protein, 13 aa, Homo sapiens
  CDR3 for beta chain variable domain of TCR clone 201172 (TRBV7-9, TRBJ2-3)
CASSPGSTETQYF

SEQ ID NO: 402345 - protein, 10 aa, Homo sapiens
  CDR3 for alpha chain variable domain of TCR clone 201173 (TRAV2, TRAJ34)
CAVVNDKLIF

SEQ ID NO: 402346 - protein, 14 aa, Homo sapiens
  CDR3 for beta chain variable domain of TCR clone 201173 (TRBV25-1, TRBJ1-1)
CASTHLGGNTEAFF

SEQ ID NO: 402347 - protein, 16 aa, Homo sapiens
  CDR3 for alpha chain variable domain of TCR clone 201174 (TRAV20, TRAJ22)
CAVQASSPGSARELTF

SEQ ID NO: 402348 - protein, 13 aa, Homo sapiens
  CDR3 for beta chain variable domain of TCR clone 201174 (TRBV7-2, TRBJ2-5)
CASSQTSVETQYF

SEQ ID NO: 402349 - protein, 16 aa, Homo sapiens
  CDR3 for alpha chain variable domain of TCR clone 201175 (TRAV12-2, TRAJ10)
CAVNRVLTGGGNKLTF

SEQ ID NO: 402350 - protein, 17 aa, Homo sapiens
  CDR3 for beta chain variable domain of TCR clone 201175 (TRBV7-8, TRBJ2-6)
CASSAGTGGAGANVLTF

SEQ ID NO: 402351 - protein, 14 aa, Homo sapiens
  CDR3 for alpha chain variable domain of TCR clone 201176 (TRAV27, TRAJ23)
CAGLSYNQGGKLSF

SEQ ID NO: 402352 - protein, 15 aa, Homo sapiens
  CDR3 for beta chain variable domain of TCR clone 201176 (TRBV19, TRBJ2-2)
CASSVNRGVTGELFF

SEQ ID NO: 402353 - protein, 16 aa, Homo sapiens
  CDR3 for alpha chain variable domain of TCR clone 201177 (TRAV23/DV6, TRAJ52)
CAARPSGGTSYGKLTF

SEQ ID NO: 402354 - protein, 12 aa, Homo sapiens
  CDR3 for beta chain variable domain of TCR clone 201177 (TRBV11-2, TRBJ2-2)
CASSLGGGELFF

SEQ ID NO: 402355 - protein, 13 aa, Homo sapiens
  CDR3 for alpha chain variable domain of TCR clone 201178 (TRAV17, TRAJ5)
CALRGTGRRTLTF

SEQ ID NO: 402356 - protein, 13 aa, Homo sapiens
  CDR3 for beta chain variable domain of TCR clone 201178 (TRBV6-1, TRBJ1-1)
CASSRQGNTEAFF

SEQ ID NO: 402357 - protein, 12 aa, Homo sapiens
  CDR3 for alpha chain variable domain of TCR clone 201179 (TRAV3, TRAJ20)
CAVRDGDYKLSF

SEQ ID NO: 402358 - protein, 16 aa, Homo sapiens
  CDR3 for beta chain variable domain of TCR clone 201179 (TRBV7-2, TRBJ2-6)
CASSLAGRSGANVLTF

SEQ ID NO: 402359 - protein, 15 aa, Homo sapiens
  CDR3 for alpha chain variable domain of TCR clone 201180 (TRAV16, TRAJ48)
CALFISNFGNEKLTF

SEQ ID NO: 402360 - protein, 14 aa, Homo sapiens
  CDR3 for beta chain variable domain of TCR clone 201180 (TRBV19, TRBJ2-5)
CASSIEHSQETQYF

SEQ ID NO: 402361 - protein, 12 aa, Homo sapiens
  CDR3 for alpha chain variable domain of TCR clone 201181 (TRAV12-1, TRAJ34)
CVVAGATDKLIF

SEQ ID NO: 402362 - protein, 15 aa, Homo sapiens
  CDR3 for beta chain variable domain of TCR clone 201181 (TRBV2, TRBJ2-2)
CASSRQGPNTGELFF

SEQ ID NO: 402363 - protein, 14 aa, Homo sapiens
  CDR3 for alpha chain variable domain of TCR clone 201182 (TRAV12-2, TRAJ17)
CAVLFKAAGTKLTF

SEQ ID NO: 402364 - protein, 18 aa, Homo sapiens
  CDR3 for beta chain variable domain of TCR clone 201182 (TRBV7-2, TRBJ2-2)
CASSLGLAGVANTGELFF

SEQ ID NO: 402365 - protein, 18 aa, Homo sapiens
  CDR3 for alpha chain variable domain of TCR clone 201183 (TRAV26-1, TRAJ23)
CIVRVGLEGWNQGGKLIF

SEQ ID NO: 402366 - protein, 16 aa, Homo sapiens
  CDR3 for beta chain variable domain of TCR clone 201183 (TRBV12-4, TRBJ2-5)
CASSFFVRGRLETQYF

SEQ ID NO: 402367 - protein, 14 aa, Homo sapiens
  CDR3 for alpha chain variable domain of TCR clone 201184 (TRAV1-2, TRAJ16)
CAVNRFSDGQKLLF

SEQ ID NO: 402368 - protein, 13 aa, Homo sapiens
  CDR3 for beta chain variable domain of TCR clone 201184 (TRBV20-1, TRBJ1-1)
CSTRVGGNTEAFF

SEQ ID NO: 402369 - protein, 17 aa, Homo sapiens
  CDR3 for alpha chain variable domain of TCR clone 201185 (TRAV29/DV5, TRAJ40)
CEASVIYTTSGTYKYIF

SEQ ID NO: 402370 - protein, 13 aa, Homo sapiens
  CDR3 for beta chain variable domain of TCR clone 201185 (TRBV6-1, TRBJ2-1)
CASSHDRNNEQFF

SEQ ID NO: 402371 - protein, 13 aa, Homo sapiens
  CDR3 for alpha chain variable domain of TCR clone 201186 (TRAV27, TRAJ6)
VAGGTRGSYIPTF

SEQ ID NO: 402372 - protein, 14 aa, Homo sapiens
  CDR3 for beta chain variable domain of TCR clone 201186 (TRBV20-1, TRBJ2-4)
CSASGRVGENTQYF

SEQ ID NO: 402373 - protein, 14 aa, Homo sapiens
  CDR3 for alpha chain variable domain of TCR clone 201187 (TRAV1-2, TRAJ6)
CAVRSSGGSYIPTF

SEQ ID NO: 402374 - protein, 15 aa, Homo sapiens
  CDR3 for beta chain variable domain of TCR clone 201187 (TRBV5-7, TRBJ1-5)
CASSYGKLWDQPQHF

SEQ ID NO: 402375 - protein, 18 aa, Homo sapiens
  CDR3 for alpha chain variable domain of TCR clone 201188 (TRAV8-3, TRAJ44)
CAVGALIPALPVNSPLGL

SEQ ID NO: 402376 - protein, 15 aa, Homo sapiens
  CDR3 for beta chain variable domain of TCR clone 201188 (TRBV27, TRBJ1-5)
CASTFNRGSNQPQHF

SEQ ID NO: 402377 - protein, 14 aa, Homo sapiens
  CDR3 for alpha chain variable domain of TCR clone 201189 (TRAV23/DV6, TRAJ13)
CAASDSGGYQKVTF

SEQ ID NO: 402378 - protein, 14 aa, Homo sapiens
  CDR3 for beta chain variable domain of TCR clone 201189 (TRBV7-2, TRBJ2-7)
CASSPKTSFYEQYF

SEQ ID NO: 402379 - protein, 12 aa, Homo sapiens
  CDR3 for alpha chain variable domain of TCR clone 201190 (TRAV13-1, TRAJ27)
CAAHTNAGKSTF

SEQ ID NO: 402380 - protein, 18 aa, Homo sapiens
  CDR3 for beta chain variable domain of TCR clone 201190 (TRBV25-1, TRBJ1-2)
CASSGLQNGQGLIFGYTF

SEQ ID NO: 402381 - protein, 14 aa, Homo sapiens
  CDR3 for alpha chain variable domain of TCR clone 201191 (TRAV20, TRAJ29)
CAVQAWVGNTPLVF

SEQ ID NO: 402382 - protein, 15 aa, Homo sapiens
  CDR3 for beta chain variable domain of TCR clone 201191 (TRBV29-1, TRBJ2-7)
CSVEFFDTGSYEQYF

SEQ ID NO: 402383 - protein, 17 aa, Homo sapiens
  CDR3 for alpha chain variable domain of TCR clone 201192 (TRAV3, TRAJ6)
CAVRDGPRAGGSYRPTF

SEQ ID NO: 402384 - protein, 12 aa, Homo sapiens
  CDR3 for beta chain variable domain of TCR clone 201192 (TRBV11-2, TRBJ2-1)
CASSPGNNEQFF

SEQ ID NO: 402385 - protein, 15 aa, Homo sapiens
  CDR3 for alpha chain variable domain of TCR clone 201193 (TRAV3, TRAJ13)
RAVRVYSVGYQKVTF

SEQ ID NO: 402386 - protein, 15 aa, Homo sapiens
  CDR3 for beta chain variable domain of TCR clone 201193 (TRBV5-7, TRBJ1-2)
CASSLGVAANYGYTF

SEQ ID NO: 402387 - protein, 13 aa, Homo sapiens
  CDR3 for alpha chain variable domain of TCR clone 201194 (TRAV27, TRAJ37)
CAGGPSNTGKLIF

SEQ ID NO: 402388 - protein, 14 aa, Homo sapiens
  CDR3 for beta chain variable domain of TCR clone 201194 (TRBV19, TRBJ2-1)
CASPTFVLSGEQFF

SEQ ID NO: 402389 - protein, 14 aa, Homo sapiens
  CDR3 for alpha chain variable domain of TCR clone 201195 (TRAV12-1, TRAJ17)
CVVNYKAAGNKLAF

SEQ ID NO: 402390 - protein, 15 aa, Homo sapiens
  CDR3 for beta chain variable domain of TCR clone 201195 (TRBV7-2, TRBJ2-1)
CASTHGTGIYNEQFF

SEQ ID NO: 402391 - protein, 14 aa, Homo sapiens
  CDR3 for alpha chain variable domain of TCR clone 201196 (TRAV12-2, TRAJ13)
CAVKKTGGDQKVTF

SEQ ID NO: 402392 - protein, 13 aa, Homo sapiens
  CDR3 for beta chain variable domain of TCR clone 201196 (TRBV7-8, TRBJ2-7)
CASSLTGGREQYF

SEQ ID NO: 402393 - protein, 17 aa, Homo sapiens
  CDR3 for alpha chain variable domain of TCR clone 201197 (TRAV8-3, TRAJ53)
CAVGRLNSGGSNYKLTF

SEQ ID NO: 402394 - protein, 14 aa, Homo sapiens
  CDR3 for beta chain variable domain of TCR clone 201197 (TRBV7-8, TRBJ2-3)
CASSFPDGQDTQYF

SEQ ID NO: 402395 - protein, 15 aa, Homo sapiens
  CDR3 for alpha chain variable domain of TCR clone 201198 (TRAV8-3, TRAJ41)
CAVGASSNSGYAPNF

SEQ ID NO: 402396 - protein, 17 aa, Homo sapiens
  CDR3 for beta chain variable domain of TCR clone 201198 (TRBV25-1, TRBJ2-1)
CASSAYGQGRGVYEQFF

SEQ ID NO: 402397 - protein, 14 aa, Homo sapiens
  CDR3 for alpha chain variable domain of TCR clone 201199 (TRAV3, TRAJ34)
CAVRDINNTDKLIF

SEQ ID NO: 402398 - protein, 15 aa, Homo sapiens
  CDR3 for beta chain variable domain of TCR clone 201199 (TRBV20-1, TRBJ2-7)
CSARDRVSGMDEKYF

SEQ ID NO: 402399 - protein, 14 aa, Homo sapiens
  CDR3 for alpha chain variable domain of TCR clone 201200 (TRAV8-1, TRAJ5)
CAVRTDTGRRALTF

SEQ ID NO: 402400 - protein, 17 aa, Homo sapiens
  CDR3 for beta chain variable domain of TCR clone 201200 (TRBV7-8, TRBJ2-6)
CASSAGTGGAGANVLTF

SEQ ID NO: 402401 - protein, 12 aa, Homo sapiens
  CDR3 for alpha chain variable domain of TCR clone 201201 (TRAV13-1, TRAJ49)
CAGSPMGNQFYF

SEQ ID NO: 402402 - protein, 10 aa, Homo sapiens
  CDR3 for beta chain variable domain of TCR clone 201201 (TRBV15, TRBJ2-7)
AETGGYEQYF

SEQ ID NO: 402403 - protein, 17 aa, Homo sapiens
  CDR3 for alpha chain variable domain of TCR clone 201202 (TRAV13-1, TRAJ52)
CAASSGAGGTSYGKLTF

SEQ ID NO: 402404 - protein, 15 aa, Homo sapiens
  CDR3 for beta chain variable domain of TCR clone 201202 (TRBV4-1, TRBJ2-1)
CASSQDPGNYNEQFF

SEQ ID NO: 402405 - protein, 17 aa, Homo sapiens
  CDR3 for alpha chain variable domain of TCR clone 201203 (TRAV3, TRAJ6)
CALRDGPRAGGSYIPTC

SEQ ID NO: 402406 - protein, 14 aa, Homo sapiens
  CDR3 for beta chain variable domain of TCR clone 201203 (TRBV7-2, TRBJ2-7)
CASSPKTSFYEQYF

SEQ ID NO: 402407 - protein, 15 aa, Homo sapiens
  CDR3 for alpha chain variable domain of TCR clone 201204 (TRAV26-2, TRAJ39)
CSLRGNNNAGNMLTY

SEQ ID NO: 402408 - protein, 15 aa, Homo sapiens
  CDR3 for beta chain variable domain of TCR clone 201204 (TRBV5-4, TRBJ1-1)
CASSSLGWANTEAFF

SEQ ID NO: 402409 - protein, 16 aa, Homo sapiens
  CDR3 for alpha chain variable domain of TCR clone 201205 (TRAV8-3, TRAJ13)
CAVGAYPSGGYQKVTF

SEQ ID NO: 402410 - protein, 14 aa, Homo sapiens
  CDR3 for beta chain variable domain of TCR clone 201205 (TRBV7-8, TRBJ2-3)
CASSLEAGTDTQYF

SEQ ID NO: 402411 - protein, 15 aa, Homo sapiens
  CDR3 for alpha chain variable domain of TCR clone 201206 (TRAV1-2, TRAJ17)
CAVRGYGAAGNKLTF

SEQ ID NO: 402412 - protein, 18 aa, Homo sapiens
  CDR3 for beta chain variable domain of TCR clone 201206 (TRBV11-2, TRBJ2-5)
CASSPQGGRERPQETQYF

SEQ ID NO: 402413 - protein, 15 aa, Homo sapiens
  CDR3 for alpha chain variable domain of TCR clone 201207 (TRAV8-3, TRAJ15)
CAVGAPNLAGTALIF

SEQ ID NO: 402414 - protein, 14 aa, Homo sapiens
  CDR3 for beta chain variable domain of TCR clone 201207 (TRBV20-1, TRBJ2-1)
CSPNDEASYNEQFF

SEQ ID NO: 402415 - protein, 13 aa, Homo sapiens
  CDR3 for alpha chain variable domain of TCR clone 201208 (TRAV12-3, TRAJ33)
CAMSVNSNYQLIW

SEQ ID NO: 402416 - protein, 12 aa, Homo sapiens
  CDR3 for beta chain variable domain of TCR clone 201208 (TRBV12-4, TRBJ1-2)
CASSVIWLHLRF

SEQ ID NO: 402417 - protein, 12 aa, Homo sapiens
  CDR3 for alpha chain variable domain of TCR clone 201209 (TRAV17, TRAJ53)
CATEGSNYKLTF

SEQ ID NO: 402418 - protein, 19 aa, Homo sapiens
  CDR3 for beta chain variable domain of TCR clone 201209 (TRBV5-1, TRBJ2-3)
CASSLWTSGGNTTPDTQYF

SEQ ID NO: 402419 - protein, 18 aa, Homo sapiens
  CDR3 for alpha chain variable domain of TCR clone 201210 (TRAV26-2, TRAJ45)
CILRVDKYSGGGADGVTF

SEQ ID NO: 402420 - protein, 16 aa, Homo sapiens
  CDR3 for beta chain variable domain of TCR clone 201210 (TRBV2, TRBJ1-4)
CASNLLQGATNEKLFF

SEQ ID NO: 402421 - protein, 15 aa, Homo sapiens
  CDR3 for alpha chain variable domain of TCR clone 201211 (TRAV3, TRAJ5)
CAVRDLDTGRRALTF

SEQ ID NO: 402422 - protein, 13 aa, Homo sapiens
  CDR3 for beta chain variable domain of TCR clone 201211 (TRBV12-3, TRBJ2-7)
CASSPTETYEHYF

SEQ ID NO: 402423 - protein, 11 aa, Homo sapiens
  CDR3 for alpha chain variable domain of TCR clone 201212 (TRAV13-2, TRAJ31)
CAENMDARLMF

SEQ ID NO: 402424 - protein, 16 aa, Homo sapiens
  CDR3 for beta chain variable domain of TCR clone 201212 (TRBV19, TRBJ1-5)
CASSIQGGYSNQPQHF

SEQ ID NO: 402425 - protein, 10 aa, Homo sapiens
  CDR3 for alpha chain variable domain of TCR clone 201213 (TRAV8-4, TRAJ39)
CAVSGNMLTF

SEQ ID NO: 402426 - protein, 14 aa, Homo sapiens
  CDR3 for beta chain variable domain of TCR clone 201213 (TRBV20-1, TRBJ1-1)
CSAQTRIGGTEAFF

SEQ ID NO: 402427 - protein, 14 aa, Homo sapiens
  CDR3 for alpha chain variable domain of TCR clone 201214 (TRAV12-3, TRAJ54)
CVMSALQGAQKLVF

SEQ ID NO: 402428 - protein, 15 aa, Homo sapiens
  CDR3 for beta chain variable domain of TCR clone 201214 (TRBV19, TRBJ2-4)
CASSTPGIAKNIQYF

SEQ ID NO: 402429 - protein, 14 aa, Homo sapiens
  CDR3 for alpha chain variable domain of TCR clone 201215 (TRAV12-1, TRAJ4)
CVVTPSGGYNKLIF

SEQ ID NO: 402430 - protein, 15 aa, Homo sapiens
  CDR3 for beta chain variable domain of TCR clone 201215 (TRBV11-3, TRBJ1-1)
CTSSLGGPGDTEAFF

SEQ ID NO: 402431 - protein, 11 aa, Homo sapiens
  CDR3 for alpha chain variable domain of TCR clone 201216 (TRAV20, TRAJ40)
CAVGGTYKYIF

SEQ ID NO: 402432 - protein, 15 aa, Homo sapiens
  CDR3 for beta chain variable domain of TCR clone 201216 (TRBV6-3, TRBJ2-2)
CASSFLATQTGELFF

SEQ ID NO: 402433 - protein, 16 aa, Homo sapiens
  CDR3 for alpha chain variable domain of TCR clone 201217 (TRAV3, TRAJ37)
CAMRPHGSGNTGKLIF

SEQ ID NO: 402434 - protein, 14 aa, Homo sapiens
  CDR3 for beta chain variable domain of TCR clone 201217 (TRBV25-1, TRBJ1-1)
CASTHLGGNTEAFF

SEQ ID NO: 402435 - protein, 17 aa, Homo sapiens
  CDR3 for alpha chain variable domain of TCR clone 201218 (TRAV3, TRAJ6)
CAVRDGPRAGGSYIPTF

SEQ ID NO: 402436 - protein, 16 aa, Homo sapiens
  CDR3 for beta chain variable domain of TCR clone 201218 (TRBV16, TRBJ2-7)
CASSRPAGGSSYEQYF

SEQ ID NO: 402437 - protein, 13 aa, Homo sapiens
  CDR3 for alpha chain variable domain of TCR clone 201219 (TRAV12-3, TRAJ33)
CAMSVNSNYQLIW

SEQ ID NO: 402438 - protein, 14 aa, Homo sapiens
  CDR3 for beta chain variable domain of TCR clone 201219 (TRBV11-2, TRBJ2-7)
CASSLVPGGYEQYF

SEQ ID NO: 402439 - protein, 16 aa, Homo sapiens
  CDR3 for alpha chain variable domain of TCR clone 201220 (TRAV21, TRAJ37)
CAVRTAGSSNTGKKIF

SEQ ID NO: 402440 - protein, 13 aa, Homo sapiens
  CDR3 for beta chain variable domain of TCR clone 201220 (TRBV7-9, TRBJ2-5)
CASLPSGRETQYF

SEQ ID NO: 402441 - protein, 13 aa, Homo sapiens
  CDR3 for alpha chain variable domain of TCR clone 201221 (TRAV26-2, TRAJ43)
CILRAVNINDMRF

SEQ ID NO: 402442 - protein, 15 aa, Homo sapiens
  CDR3 for beta chain variable domain of TCR clone 201221 (TRBV7-2, TRBJ2-1)
CASTHGTGIYNEQFF

SEQ ID NO: 402443 - protein, 13 aa, Homo sapiens
  CDR3 for alpha chain variable domain of TCR clone 201222 (TRAV27, TRAJ56)
CAGKPGANSKLTF

SEQ ID NO: 402444 - protein, 13 aa, Homo sapiens
  CDR3 for beta chain variable domain of TCR clone 201222 (TRBV27, TRBJ2-1)
CASSIWGADEQFF

SEQ ID NO: 402445 - protein, 11 aa, Homo sapiens
  CDR3 for alpha chain variable domain of TCR clone 201223 (TRAV12-3, TRAJ43)
CAMSVSNDMRF

SEQ ID NO: 402446 - protein, 14 aa, Homo sapiens
  CDR3 for beta chain variable domain of TCR clone 201223 (TRBV7-8, TRBJ2-3)
CASSFEAGTDTQYF

SEQ ID NO: 402447 - protein, 12 aa, Homo sapiens
  CDR3 for alpha chain variable domain of TCR clone 201224 (TRAV12-3, TRAJ17)
CAMTLTGNKLTF

SEQ ID NO: 402448 - protein, 15 aa, Homo sapiens
  CDR3 for beta chain variable domain of TCR clone 201224 (TRBV20-1, TRBJ2-7)
CSARYRVSGMDERYF

SEQ ID NO: 402449 - protein, 15 aa, Homo sapiens
  CDR3 for alpha chain variable domain of TCR clone 201225 (TRAV3, TRAJ30)
CAVRDEYGRDDKIIF

SEQ ID NO: 402450 - protein, 13 aa, Homo sapiens
  CDR3 for beta chain variable domain of TCR clone 201225 (TRBV19, TRBJ1-3)
CASRLSLGNTIYF

SEQ ID NO: 402451 - protein, 12 aa, Homo sapiens
  CDR3 for alpha chain variable domain of TCR clone 201226 (TRAV26-1, TRAJ54)
CIGGWGAQKLVF

SEQ ID NO: 402452 - protein, 14 aa, Homo sapiens
  CDR3 for beta chain variable domain of TCR clone 201226 (TRBV11-2, TRBJ1-2)
CTSSSGQAGDGYTF

SEQ ID NO: 402453 - protein, 13 aa, Homo sapiens
  CDR3 for alpha chain variable domain of TCR clone 201227 (TRAV6, TRAJ20)
CALAVSNEYKLSF

SEQ ID NO: 402454 - protein, 16 aa, Homo sapiens
  CDR3 for beta chain variable domain of TCR clone 201227 (TRBV7-9, TRBJ2-1)
CASSDVAGGSYNEQFF

SEQ ID NO: 402455 - protein, 14 aa, Homo sapiens
  CDR3 for alpha chain variable domain of TCR clone 201228 (TRAV25, TRAJ5)
CAGGGAGEHLLLGM

SEQ ID NO: 402456 - protein, 15 aa, Homo sapiens
  CDR3 for beta chain variable domain of TCR clone 201228 (TRBV19, TRBJ2-4)
CASRGPRRGENIQYF

SEQ ID NO: 402457 - protein, 16 aa, Homo sapiens
  CDR3 for alpha chain variable domain of TCR clone 201229 (TRAV30, TRAJ24)
CGTEIADADSWGKFQL

SEQ ID NO: 402458 - protein, 19 aa, Homo sapiens
  CDR3 for beta chain variable domain of TCR clone 201229 (TRBV25-1, TRBJ2-2)
CAILVYRVDRGRKTGELFF

SEQ ID NO: 402459 - protein, 16 aa, Homo sapiens
  CDR3 for alpha chain variable domain of TCR clone 201230 (TRAV12-3, TRAJ53)
CAMSPASGGSNYKLTF

SEQ ID NO: 402460 - protein, 17 aa, Homo sapiens
  CDR3 for beta chain variable domain of TCR clone 201230 (TRBV11-2, TRBJ2-1)
CASSLYHPGVEYNEQFF

SEQ ID NO: 402461 - protein, 16 aa, Homo sapiens
  CDR3 for alpha chain variable domain of TCR clone 201231 (TRAV20, TRAJ28)
CAVRGPSGAGSYQLTF

SEQ ID NO: 402462 - protein, 15 aa, Homo sapiens
  CDR3 for beta chain variable domain of TCR clone 201231 (TRBV5-1, TRBJ2-1)
CASTGAGRTYNEQFF

SEQ ID NO: 402463 - protein, 15 aa, Homo sapiens
  CDR3 for alpha chain variable domain of TCR clone 201232 (TRAV12-2, TRAJ53)
CAVNGGGGSNYKMTF

SEQ ID NO: 402464 - protein, 17 aa, Homo sapiens
  CDR3 for beta chain variable domain of TCR clone 201232 (TRBV7-3, TRBJ2-3)
RASSLMKRMRGADTQYF

SEQ ID NO: 402465 - protein, 11 aa, Homo sapiens
  CDR3 for alpha chain variable domain of TCR clone 201233 (TRAV23/DV6, TRAJ48)
CAPRWGEKLTF

SEQ ID NO: 402466 - protein, 14 aa, Homo sapiens
  CDR3 for beta chain variable domain of TCR clone 201233 (TRBV19, TRBJ2-5)
CASSMTGQQETQYF

SEQ ID NO: 402467 - protein, 12 aa, Homo sapiens
  CDR3 for alpha chain variable domain of TCR clone 201234 (TRAV12-1, TRAJ50)
CVGRTSYGKVIF

SEQ ID NO: 402468 - protein, 12 aa, Homo sapiens
  CDR3 for beta chain variable domain of TCR clone 201234 (TRBV5-7, TRBJ1-1)
CASSVVGTEAFF

SEQ ID NO: 402469 - protein, 12 aa, Homo sapiens
  CDR3 for alpha chain variable domain of TCR clone 201235 (TRAV1-1, TRAJ9)
CAVDTGGFKTIF

SEQ ID NO: 402470 - protein, 13 aa, Homo sapiens
  CDR3 for beta chain variable domain of TCR clone 201235 (TRBV20-1, TRBJ1-1)
CSAPRGGGTEAFF

SEQ ID NO: 402471 - protein, 11 aa, Homo sapiens
  CDR3 for alpha chain variable domain of TCR clone 201236 (TRAV12-1, TRAJ3)
CVVNRQQCFQD

SEQ ID NO: 402472 - protein, 13 aa, Homo sapiens
  CDR3 for beta chain variable domain of TCR clone 201236 (TRBV7-9, TRBJ1-2)
CASSLKQNYGYTF

SEQ ID NO: 402473 - protein, 14 aa, Homo sapiens
  CDR3 for alpha chain variable domain of TCR clone 201237 (TRAV26-1, TRAJ34)
CIARVAYNTDKLIF

SEQ ID NO: 402474 - protein, 14 aa, Homo sapiens
  CDR3 for beta chain variable domain of TCR clone 201237 (TRBV4-1, TRBJ2-2)
CASSQAVNTGELFF

SEQ ID NO: 402475 - protein, 12 aa, Homo sapiens
  CDR3 for alpha chain variable domain of TCR clone 201238 (TRAV2, TRAJ24)
CAATDSWGKFQF

SEQ ID NO: 402476 - protein, 14 aa, Homo sapiens
  CDR3 for beta chain variable domain of TCR clone 201238 (TRBV7-2, TRBJ1-1)
CASSFLTGTTEAFF

SEQ ID NO: 402477 - protein, 14 aa, Homo sapiens
  CDR3 for alpha chain variable domain of TCR clone 201239 (TRAV12-2, TRAJ13)
CAVKTTGGYQKVTF

SEQ ID NO: 402478 - protein, 15 aa, Homo sapiens
  CDR3 for beta chain variable domain of TCR clone 201239 (TRBV7-2, TRBJ2-1)
CASSLASGRVNEQFF

SEQ ID NO: 402479 - protein, 12 aa, Homo sapiens
  CDR3 for alpha chain variable domain of TCR clone 201240 (TRAV12-3, TRAJ17)
CAMTLTGNKLTF

SEQ ID NO: 402480 - protein, 14 aa, Homo sapiens
  CDR3 for beta chain variable domain of TCR clone 201240 (TRBV6-1, TRBJ2-1)
CASAKDGVYNEQFF

SEQ ID NO: 402481 - protein, 15 aa, Homo sapiens
  CDR3 for alpha chain variable domain of TCR clone 201241 (TRAV26-2, TRAJ28)
CILVESGAGSYQLTF

SEQ ID NO: 402482 - protein, 16 aa, Homo sapiens
  CDR3 for beta chain variable domain of TCR clone 201241 (TRBV4-2, TRBJ1-2)
CASSQEIGGASYGYTC

SEQ ID NO: 402483 - protein, 14 aa, Homo sapiens
  CDR3 for alpha chain variable domain of TCR clone 201242 (TRAV12-2, TRAJ44)
CAVNPAGTASKLTF

SEQ ID NO: 402484 - protein, 19 aa, Homo sapiens
  CDR3 for beta chain variable domain of TCR clone 201242 (TRBV6-1, TRBJ1-3)
CASVQGGGWKHHIFWRGKL

SEQ ID NO: 402485 - protein, 14 aa, Homo sapiens
  CDR3 for alpha chain variable domain of TCR clone 201243 (TRAV8-1, TRAJ5)
CAVRTDMGRRALTF

SEQ ID NO: 402486 - protein, 14 aa, Homo sapiens
  CDR3 for beta chain variable domain of TCR clone 201243 (TRBV7-8, TRBJ2-3)
CASSFPDGQDTQYF

SEQ ID NO: 402487 - protein, 13 aa, Homo sapiens
  CDR3 for alpha chain variable domain of TCR clone 201244 (TRAV12-3, TRAJ33)
CAMSVNSNYQLIW

SEQ ID NO: 402488 - protein, 15 aa, Homo sapiens
  CDR3 for beta chain variable domain of TCR clone 201244 (TRBV4-1, TRBJ1-6)
CASSAGQGYNSPLHF

SEQ ID NO: 402489 - protein, 12 aa, Homo sapiens
  CDR3 for alpha chain variable domain of TCR clone 201245 (TRAV13-1, TRAJ15)
CAASQDGTALIF

SEQ ID NO: 402490 - protein, 14 aa, Homo sapiens
  CDR3 for beta chain variable domain of TCR clone 201245 (TRBV19, TRBJ2-2)
CASSTLHRSGELFF

SEQ ID NO: 402491 - protein, 10 aa, Homo sapiens
  CDR3 for alpha chain variable domain of TCR clone 201246 (TRAV12-3, TRAJ18)
CAMSAEAQPW

SEQ ID NO: 402492 - protein, 14 aa, Homo sapiens
  CDR3 for beta chain variable domain of TCR clone 201246 (TRBV5-1, TRBJ1-1)
CASSLQGASTEAFF

SEQ ID NO: 402493 - protein, 12 aa, Homo sapiens
  CDR3 for alpha chain variable domain of TCR clone 201247 (TRAV25, TRAJ38)
CVGTGNNRKLIW

SEQ ID NO: 402494 - protein, 14 aa, Homo sapiens
  CDR3 for beta chain variable domain of TCR clone 201247 (TRBV19, TRBJ1-5)
CASSKMTGPQPQHF

SEQ ID NO: 402495 - protein, 12 aa, Homo sapiens
  CDR3 for alpha chain variable domain of TCR clone 201248 (TRAV13-1, TRAJ49)
CAAGIRSNQFYF

SEQ ID NO: 402496 - protein, 13 aa, Homo sapiens
  CDR3 for beta chain variable domain of TCR clone 201248 (TRBV15, TRBJ1-6)
CATSGGLNSPLHF

SEQ ID NO: 402497 - protein, 14 aa, Homo sapiens
  CDR3 for alpha chain variable domain of TCR clone 201249 (TRAV16, TRAJ54)
CALSGLQGAQKLVF

SEQ ID NO: 402498 - protein, 15 aa, Homo sapiens
  CDR3 for beta chain variable domain of TCR clone 201249 (TRBV3-1, TRBJ2-7)
CASSQVAGAQYEHYF

SEQ ID NO: 402499 - protein, 11 aa, Homo sapiens
  CDR3 for alpha chain variable domain of TCR clone 201250 (TRAV8-4, TRAJ34)
CAVSWTDQLIF

SEQ ID NO: 402500 - protein, 14 aa, Homo sapiens
  CDR3 for beta chain variable domain of TCR clone 201250 (TRBV7-9, TRBJ2-3)
CASSLEDGTDTQYF

SEQ ID NO: 402501 - protein, 15 aa, Homo sapiens
  CDR3 for alpha chain variable domain of TCR clone 201251 (TRAV26-1, TRAJ44)
CIARVPFGTTSKLTF

SEQ ID NO: 402502 - protein, 17 aa, Homo sapiens
  CDR3 for beta chain variable domain of TCR clone 201251 (TRBV24-1, TRBJ2-4)
CATSDAEARGVRNIQYF

SEQ ID NO: 402503 - protein, 20 aa, Homo sapiens
  CDR3 for alpha chain variable domain of TCR clone 201252 (TRAV12-1, TRAJ42)
SSVIQPPTSVKRGSQGNLIF

SEQ ID NO: 402504 - protein, 18 aa, Homo sapiens
  CDR3 for beta chain variable domain of TCR clone 201252 (TRBV11-2, TRBJ2-3)
CASSLGGASRGAPNTQYF

SEQ ID NO: 402505 - protein, 14 aa, Homo sapiens
  CDR3 for alpha chain variable domain of TCR clone 201253 (TRAV2, TRAJ9)
CAVEDRSGGFKTIF

SEQ ID NO: 402506 - protein, 12 aa, Homo sapiens
  CDR3 for beta chain variable domain of TCR clone 201253 (TRBV30, TRBJ2-7)
CAWSDRGDEQYF

SEQ ID NO: 402507 - protein, 12 aa, Homo sapiens
  CDR3 for alpha chain variable domain of TCR clone 201254 (TRAV36/DV7, TRAJ54)
CAVVRGAQKLVF

SEQ ID NO: 402508 - protein, 14 aa, Homo sapiens
  CDR3 for beta chain variable domain of TCR clone 201254 (TRBV7-6, TRBJ2-3)
CASSLGTVTDTQYF

SEQ ID NO: 402509 - protein, 11 aa, Homo sapiens
  CDR3 for alpha chain variable domain of TCR clone 201255 (TRAV12-2, TRAJ21)
CAVEGVNKFYF

SEQ ID NO: 402510 - protein, 15 aa, Homo sapiens
  CDR3 for beta chain variable domain of TCR clone 201255 (TRBV20-1, TRBJ1-5)
CSASRRGDLRQPQHF

SEQ ID NO: 402511 - protein, 14 aa, Homo sapiens
  CDR3 for alpha chain variable domain of TCR clone 201256 (TRAV12-3, TRAJ21)
CAATDLYNFNKFYF

SEQ ID NO: 402512 - protein, 13 aa, Homo sapiens
  CDR3 for beta chain variable domain of TCR clone 201256 (TRBV19, TRBJ2-2)
CASSSKNTGELVF

SEQ ID NO: 402513 - protein, 17 aa, Homo sapiens
  CDR3 for alpha chain variable domain of TCR clone 201257 (TRAV36/DV7, TRAJ52)
CAVAQRAGGTSYGKLTF

SEQ ID NO: 402514 - protein, 14 aa, Homo sapiens
  CDR3 for beta chain variable domain of TCR clone 201257 (TRBV7-9, TRBJ2-5)
CASSLVGGEETQYF

SEQ ID NO: 402515 - protein, 15 aa, Homo sapiens
  CDR3 for alpha chain variable domain of TCR clone 201258 (TRAV27, TRAJ38)
CSARRNAGNNRKLIW

SEQ ID NO: 402516 - protein, 13 aa, Homo sapiens
  CDR3 for beta chain variable domain of TCR clone 201258 (TRBV19, TRBJ1-2)
CASSVPGQDGYTF

SEQ ID NO: 402517 - protein, 14 aa, Homo sapiens
  CDR3 for alpha chain variable domain of TCR clone 201259 (TRAV3, TRAJ6)
CAVRDWGGSYIPTF

SEQ ID NO: 402518 - protein, 15 aa, Homo sapiens
  CDR3 for beta chain variable domain of TCR clone 201259 (TRBV2, TRBJ2-1)
CASSELAGGHNEQFF

SEQ ID NO: 402519 - protein, 14 aa, Homo sapiens
  CDR3 for alpha chain variable domain of TCR clone 201260 (TRAV26-1, TRAJ45)
CIEVTGGGADGLSF

SEQ ID NO: 402520 - protein, 13 aa, Homo sapiens
  CDR3 for beta chain variable domain of TCR clone 201260 (TRBV7-6, TRBJ1-2)
CASSLVADYGYTF

SEQ ID NO: 402521 - protein, 13 aa, Homo sapiens
  CDR3 for alpha chain variable domain of TCR clone 201261 (TRAV13-1, TRAJ37)
CAAVSGNTGTLIF

SEQ ID NO: 402522 - protein, 17 aa, Homo sapiens
  CDR3 for beta chain variable domain of TCR clone 201261 (TRBV10-2, TRBJ1-6)
CASSENRGSSYKSPLHF

SEQ ID NO: 402523 - protein, 12 aa, Homo sapiens
  CDR3 for alpha chain variable domain of TCR clone 201262 (TRAV13-1, TRAJ21)
CAAKEGFNKFYF

SEQ ID NO: 402524 - protein, 15 aa, Homo sapiens
  CDR3 for beta chain variable domain of TCR clone 201262 (TRBV6-3, TRBJ2-7)
CASSSPGTVFYGQYF

SEQ ID NO: 402525 - protein, 14 aa, Homo sapiens
  CDR3 for alpha chain variable domain of TCR clone 201263 (TRAV2, TRAJ9)
CAVEDRSGGFKTIF

SEQ ID NO: 402526 - protein, 14 aa, Homo sapiens
  CDR3 for beta chain variable domain of TCR clone 201263 (TRBV7-2, TRBJ2-7)
CASSPKTSFCEQYI

SEQ ID NO: 402527 - protein, 16 aa, Homo sapiens
  CDR3 for alpha chain variable domain of TCR clone 201264 (TRAV12-3, TRAJ53)
CAMSPGSGGSNYKLTF

SEQ ID NO: 402528 - protein, 15 aa, Homo sapiens
  CDR3 for beta chain variable domain of TCR clone 201264 (TRBV18, TRBJ2-1)
CASSPPSASYNEQFF

SEQ ID NO: 402529 - protein, 11 aa, Homo sapiens
  CDR3 for alpha chain variable domain of TCR clone 201265 (TRAV2, TRAJ33)
CAVESNYQLIW

SEQ ID NO: 402530 - protein, 14 aa, Homo sapiens
  CDR3 for beta chain variable domain of TCR clone 201265 (TRBV7-2, TRBJ2-5)
CASSTGGELKTQYF

SEQ ID NO: 402531 - protein, 15 aa, Homo sapiens
  CDR3 for alpha chain variable domain of TCR clone 201266 (TRAV17, TRAJ56)
CATDANTGANSKLTF

SEQ ID NO: 402532 - protein, 12 aa, Homo sapiens
  CDR3 for beta chain variable domain of TCR clone 201266 (TRBV7-8, TRBJ2-7)
CASSLGDGEQYF

SEQ ID NO: 402533 - protein, 11 aa, Homo sapiens
  CDR3 for alpha chain variable domain of TCR clone 201267 (TRAV1-2, TRAJ20)
CAVANDYKLSF

SEQ ID NO: 402534 - protein, 18 aa, Homo sapiens
  CDR3 for beta chain variable domain of TCR clone 201267 (TRBV20-1, TRBJ2-6)
CSADTTPAHGSGANVLTF

SEQ ID NO: 402535 - protein, 14 aa, Homo sapiens
  CDR3 for alpha chain variable domain of TCR clone 201268 (TRAV9-2, TRAJ39)
CALYIYNAGNMLTF

SEQ ID NO: 402536 - protein, 12 aa, Homo sapiens
  CDR3 for beta chain variable domain of TCR clone 201268 (TRBV7-9, TRBJ2-7)
CASSQGVYEQYF

SEQ ID NO: 402537 - protein, 16 aa, Homo sapiens
  CDR3 for alpha chain variable domain of TCR clone 201269 (TRAV16, TRAJ4)
CALSRMCSGGYNKLIF

SEQ ID NO: 402538 - protein, 16 aa, Homo sapiens
  CDR3 for beta chain variable domain of TCR clone 201269 (TRBV24-1, TRBJ2-3)
CATSDPGTGATDTQYF

SEQ ID NO: 402539 - protein, 15 aa, Homo sapiens
  CDR3 for alpha chain variable domain of TCR clone 201270 (TRAV3, TRAJ5)
CAVRDLDTGRRALTF

SEQ ID NO: 402540 - protein, 15 aa, Homo sapiens
  CDR3 for beta chain variable domain of TCR clone 201270 (TRBV7-9, TRBJ1-4)
CASSRTGGFNEKLFF

SEQ ID NO: 402541 - protein, 15 aa, Homo sapiens
  CDR3 for alpha chain variable domain of TCR clone 201271 (TRAV36/DV7, TRAJ22)
CAVTFSSGSARQLTF

SEQ ID NO: 402542 - protein, 12 aa, Homo sapiens
  CDR3 for beta chain variable domain of TCR clone 201271 (TRBV11-2, TRBJ2-2)
CASSLGGGELFF

SEQ ID NO: 402543 - protein, 15 aa, Homo sapiens
  CDR3 for alpha chain variable domain of TCR clone 201272 (TRAV17, TRAJ54)
CATTRSEQGARKLVF

SEQ ID NO: 402544 - protein, 16 aa, Homo sapiens
  CDR3 for beta chain variable domain of TCR clone 201272 (TRBV12-4, TRBJ2-3)
CASSLRLAETTDTQYF

SEQ ID NO: 402545 - protein, 13 aa, Homo sapiens
  CDR3 for alpha chain variable domain of TCR clone 201273 (TRAV13-1, TRAJ6)
CAARRGGSYIPTF

SEQ ID NO: 402546 - protein, 16 aa, Homo sapiens
  CDR3 for beta chain variable domain of TCR clone 201273 (TRBV7-9, TRBJ2-2)
CASSLATGVGTGELFC

SEQ ID NO: 402547 - protein, 15 aa, Homo sapiens
  CDR3 for alpha chain variable domain of TCR clone 201274 (TRAV13-1, TRAJ32)
CAASNGWWCYKQAHL

SEQ ID NO: 402548 - protein, 15 aa, Homo sapiens
  CDR3 for beta chain variable domain of TCR clone 201274 (TRBV20-1, TRBJ1-2)
CSAIRTGAFNYGYTV

SEQ ID NO: 402549 - protein, 13 aa, Homo sapiens
  CDR3 for alpha chain variable domain of TCR clone 201275 (TRAV3, TRAJ29)
CAVRDIIATPLVF

SEQ ID NO: 402550 - protein, 14 aa, Homo sapiens
  CDR3 for beta chain variable domain of TCR clone 201275 (TRBV27, TRBJ2-1)
CASSATGGYNEQFF

SEQ ID NO: 402551 - protein, 13 aa, Homo sapiens
  CDR3 for alpha chain variable domain of TCR clone 201276 (TRAV9-2, TRAJ49)
CALRHFTGNQLYF

SEQ ID NO: 402552 - protein, 16 aa, Homo sapiens
  CDR3 for beta chain variable domain of TCR clone 201276 (TRBV7-9, TRBJ2-1)
CASSPRLGSSYNEQFF

SEQ ID NO: 402553 - protein, 14 aa, Homo sapiens
  CDR3 for alpha chain variable domain of TCR clone 201277 (TRAV1-2, TRAJ8)
CAVREDTGFQKFVF

SEQ ID NO: 402554 - protein, 15 aa, Homo sapiens
  CDR3 for beta chain variable domain of TCR clone 201277 (TRBV12-4, TRBJ2-5)
CASSPPTGLQETQYF

SEQ ID NO: 402555 - protein, 22 aa, Homo sapiens
  CDR3 for alpha chain variable domain of TCR clone 201278 (TRAV27, TRAJ58)
TAAQPGDTGLYLSEISGSRLTF

SEQ ID NO: 402556 - protein, 14 aa, Homo sapiens
  CDR3 for beta chain variable domain of TCR clone 201278 (TRBV7-2, TRBJ2-7)
CASSPKTSFYEQYF

SEQ ID NO: 402557 - protein, 14 aa, Homo sapiens
  CDR3 for alpha chain variable domain of TCR clone 201279 (TRAV13-2, TRAJ43)
CAEIPTYNNNDMRF

SEQ ID NO: 402558 - protein, 16 aa, Homo sapiens
  CDR3 for beta chain variable domain of TCR clone 201279 (TRBV19, TRBJ2-3)
CASSIVASLGTDTQYF

SEQ ID NO: 402559 - protein, 11 aa, Homo sapiens
  CDR3 for alpha chain variable domain of TCR clone 201280 (TRAV3, TRAJ21)
CAVGTFNKFYF

SEQ ID NO: 402560 - protein, 15 aa, Homo sapiens
  CDR3 for beta chain variable domain of TCR clone 201280 (TRBV6-3, TRBJ2-7)
CASSSPGTVFYEQYF

SEQ ID NO: 402561 - protein, 13 aa, Homo sapiens
  CDR3 for alpha chain variable domain of TCR clone 201281 (TRAV25, TRAJ30)
CAGRVDRDEKIIF

SEQ ID NO: 402562 - protein, 17 aa, Homo sapiens
  CDR3 for beta chain variable domain of TCR clone 201281 (TRBV7-9, TRBJ2-6)
CASSFCAGYSGANVLTF

SEQ ID NO: 402563 - protein, 13 aa, Homo sapiens
  CDR3 for alpha chain variable domain of TCR clone 201282 (TRAV12-2, TRAJ3)
CAFPYSSASKIIF

SEQ ID NO: 402564 - protein, 11 aa, Homo sapiens
  CDR3 for beta chain variable domain of TCR clone 201282 (TRBV20-1, TRBJ2-3)
CSGTSSTTQYF

SEQ ID NO: 402565 - protein, 13 aa, Homo sapiens
  CDR3 for alpha chain variable domain of TCR clone 201283 (TRAV27, TRAJ56)
CAGKPGDNSKLTF

SEQ ID NO: 402566 - protein, 15 aa, Homo sapiens
  CDR3 for beta chain variable domain of TCR clone 201283 (TRBV6-1, TRBJ2-3)
CASSERWDSTDTQYF

SEQ ID NO: 402567 - protein, 13 aa, Homo sapiens
  CDR3 for alpha chain variable domain of TCR clone 201284 (TRAV8-4, TRAJ30)
CAVSVSRDDKIIF

SEQ ID NO: 402568 - protein, 13 aa, Homo sapiens
  CDR3 for beta chain variable domain of TCR clone 201284 (TRBV3-1, TRBJ2-2)
CASLARGSGELFF

SEQ ID NO: 402569 - protein, 16 aa, Homo sapiens
  CDR3 for alpha chain variable domain of TCR clone 201285 (TRAV30, TRAJ24)
CGTDIVDADSWGKFQF

SEQ ID NO: 402570 - protein, 17 aa, Homo sapiens
  CDR3 for beta chain variable domain of TCR clone 201285 (TRBV11-2, TRBJ2-1)
CASSLYPPGVEYNEQFF

SEQ ID NO: 402571 - protein, 15 aa, Homo sapiens
  CDR3 for alpha chain variable domain of TCR clone 201286 (TRAV12-1, TRAJ44)
CVADLPTGTASKLTC

SEQ ID NO: 402572 - protein, 13 aa, Homo sapiens
  CDR3 for beta chain variable domain of TCR clone 201286 (TRBV19, TRBJ1-1)
CASSFGRNTEAFF

SEQ ID NO: 402573 - protein, 14 aa, Homo sapiens
  CDR3 for alpha chain variable domain of TCR clone 201287 (TRAV12-2, TRAJ17)
CAVLFKAAGTKLTF

SEQ ID NO: 402574 - protein, 11 aa, Homo sapiens
  CDR3 for beta chain variable domain of TCR clone 201287 (TRBV29-1, TRBJ2-5)
CSEDRTGTQYF

SEQ ID NO: 402575 - protein, 14 aa, Homo sapiens
  CDR3 for alpha chain variable domain of TCR clone 201288 (TRAV8-1, TRAJ5)
CAVRIDTGRRALTF

SEQ ID NO: 402576 - protein, 14 aa, Homo sapiens
  CDR3 for beta chain variable domain of TCR clone 201288 (TRBV7-8, TRBJ2-3)
CASSFPDGQDTQYF

SEQ ID NO: 402577 - protein, 13 aa, Homo sapiens
  CDR3 for alpha chain variable domain of TCR clone 201289 (TRAV20, TRAJ48)
GAVHLFGNEKLTF

SEQ ID NO: 402578 - protein, 15 aa, Homo sapiens
  CDR3 for beta chain variable domain of TCR clone 201289 (TRBV6-5, TRBJ2-6)
CASSQWEAGANVLTF

SEQ ID NO: 402579 - protein, 16 aa, Homo sapiens
  CDR3 for alpha chain variable domain of TCR clone 201290 (TRAV30, TRAJ24)
CGTEIVDADIWGQFQF

SEQ ID NO: 402580 - protein, 14 aa, Homo sapiens
  CDR3 for beta chain variable domain of TCR clone 201290 (TRBV12-5, TRBJ2-5)
CASGSRTHQETQYF

SEQ ID NO: 402581 - protein, 15 aa, Homo sapiens
  CDR3 for alpha chain variable domain of TCR clone 201291 (TRAV21, TRAJ37)
RAVRPTLSNTGKLIF

SEQ ID NO: 402582 - protein, 17 aa, Homo sapiens
  CDR3 for beta chain variable domain of TCR clone 201291 (TRBV13, TRBJ2-3)
CASSLSRVAGGRNTQYF

SEQ ID NO: 402583 - protein, 14 aa, Homo sapiens
  CDR3 for alpha chain variable domain of TCR clone 201292 (TRAV12-2, TRAJ11)
CAVNRESGYSTLTF

SEQ ID NO: 402584 - protein, 15 aa, Homo sapiens
  CDR3 for beta chain variable domain of TCR clone 201292 (TRBV2, TRBJ2-5)
CASRIAGVGGETQYF

SEQ ID NO: 402585 - protein, 16 aa, Homo sapiens
  CDR3 for alpha chain variable domain of TCR clone 201293 (TRAV1-2, TRAJ10)
CAVRGVLTGGGNKLTF

SEQ ID NO: 402586 - protein, 14 aa, Homo sapiens
  CDR3 for beta chain variable domain of TCR clone 201293 (TRBV13, TRBJ2-3)
CASSLGGPQRPQYF

SEQ ID NO: 402587 - protein, 17 aa, Homo sapiens
  CDR3 for alpha chain variable domain of TCR clone 201294 (TRAV30, TRAJ24)
SVVQRLWMLTAGGKFQF

SEQ ID NO: 402588 - protein, 14 aa, Homo sapiens
  CDR3 for beta chain variable domain of TCR clone 201294 (TRBV12-5, TRBJ2-5)
CASGSRTHQETQYF

SEQ ID NO: 402589 - protein, 12 aa, Homo sapiens
  CDR3 for alpha chain variable domain of TCR clone 201295 (TRAV21, TRAJ29)
CAVTSGNTPLVF

SEQ ID NO: 402590 - protein, 14 aa, Homo sapiens
  CDR3 for beta chain variable domain of TCR clone 201295 (TRBV11-2, TRBJ2-5)
CASRPLAGRETQYF

SEQ ID NO: 402591 - protein, 21 aa, Homo sapiens
  CDR3 for alpha chain variable domain of TCR clone 201296 (TRAV21, TRAJ27)
CAARPGNAGKSTFGDEPTLTV

SEQ ID NO: 402592 - protein, 14 aa, Homo sapiens
  CDR3 for beta chain variable domain of TCR clone 201296 (TRBV7-6, TRBJ2-3)
CASSLGTVTDTQYF

SEQ ID NO: 402593 - protein, 17 aa, Homo sapiens
  CDR3 for alpha chain variable domain of TCR clone 201297 (TRAV3, TRAJ12)
CAVRDGGRMDSSYKLIF

SEQ ID NO: 402594 - protein, 12 aa, Homo sapiens
  CDR3 for beta chain variable domain of TCR clone 201297 (TRBV19, TRBJ2-7)
CASTSGTYEQYF

SEQ ID NO: 402595 - protein, 15 aa, Homo sapiens
  CDR3 for alpha chain variable domain of TCR clone 201298 (TRAV12-3, TRAJ11)
CAMSEENSGYSTLTF

SEQ ID NO: 402596 - protein, 15 aa, Homo sapiens
  CDR3 for beta chain variable domain of TCR clone 201298 (TRBV7-2, TRBJ2-5)
CASSFLRGGEETQYF

SEQ ID NO: 402597 - protein, 15 aa, Homo sapiens
  CDR3 for alpha chain variable domain of TCR clone 201299 (TRAV10, TRAJ6)
CVVRPRTGGSYIPTF

SEQ ID NO: 402598 - protein, 14 aa, Homo sapiens
  CDR3 for beta chain variable domain of TCR clone 201299 (TRBV20-1, TRBJ2-4)
CSASGRVGEYIQYF

SEQ ID NO: 402599 - protein, 17 aa, Homo sapiens
  CDR3 for alpha chain variable domain of TCR clone 201300 (TRAV3, TRAJ12)
CAVRDGGRMDSSYKLLF

SEQ ID NO: 402600 - protein, 14 aa, Homo sapiens
  CDR3 for beta chain variable domain of TCR clone 201300 (TRBV12-4, TRBJ1-3)
CASTLTGAGNTIYF

SEQ ID NO: 402601 - protein, 14 aa, Homo sapiens
  CDR3 for alpha chain variable domain of TCR clone 201301 (TRAV26-1, TRAJ34)
CIVRVAYNTDKLIF

SEQ ID NO: 402602 - protein, 14 aa, Homo sapiens
  CDR3 for beta chain variable domain of TCR clone 201301 (TRBV7-2, TRBJ2-2)
CASRGQGAAGELFF

SEQ ID NO: 402603 - protein, 15 aa, Homo sapiens
  CDR3 for alpha chain variable domain of TCR clone 201302 (TRAV13-2, TRAJ45)
CAEHHSGGGADGLTF

SEQ ID NO: 402604 - protein, 15 aa, Homo sapiens
  CDR3 for beta chain variable domain of TCR clone 201302 (TRBV7-2, TRBJ2-7)
CASSLALGSACEQYF

SEQ ID NO: 402605 - protein, 12 aa, Homo sapiens
  CDR3 for alpha chain variable domain of TCR clone 201303 (TRAV21, TRAJ13)
PGPSGGYQKVTF

SEQ ID NO: 402606 - protein, 16 aa, Homo sapiens
  CDR3 for beta chain variable domain of TCR clone 201303 (TRBV19, TRBJ2-1)
CASSKAGPSSYNEQFF

SEQ ID NO: 402607 - protein, 18 aa, Homo sapiens
  CDR3 for alpha chain variable domain of TCR clone 201304 (TRAV26-2, TRAJ54)
CILRDVEVGIQGAQKLVF

SEQ ID NO: 402608 - protein, 15 aa, Homo sapiens
  CDR3 for beta chain variable domain of TCR clone 201304 (TRBV7-9, TRBJ1-6)
CASSSPGRGNSPLHF

SEQ ID NO: 402609 - protein, 17 aa, Homo sapiens
  CDR3 for alpha chain variable domain of TCR clone 201305 (TRAV3, TRAJ28)
CAVREAYSGAGSYKLNF

SEQ ID NO: 402610 - protein, 18 aa, Homo sapiens
  CDR3 for beta chain variable domain of TCR clone 201305 (TRBV27, TRBJ2-1)
CASGNRAVGVGSKNEQFF

SEQ ID NO: 402611 - protein, 13 aa, Homo sapiens
  CDR3 for alpha chain variable domain of TCR clone 201306 (TRAV8-3, TRAJ30)
CCGCLNRDDKIIF

SEQ ID NO: 402612 - protein, 15 aa, Homo sapiens
  CDR3 for beta chain variable domain of TCR clone 201306 (TRBV7-2, TRBJ2-7)
CASSLSGALTYEQHF

SEQ ID NO: 402613 - protein, 17 aa, Homo sapiens
  CDR3 for alpha chain variable domain of TCR clone 201307 (TRAV17, TRAJ52)
CATDRNAGGTSYGKLTF

SEQ ID NO: 402614 - protein, 16 aa, Homo sapiens
  CDR3 for beta chain variable domain of TCR clone 201307 (TRBV7-3, TRBJ2-1)
CASSLEGYRSYNEQFF

SEQ ID NO: 402615 - protein, 13 aa, Homo sapiens
  CDR3 for alpha chain variable domain of TCR clone 201308 (TRAV12-1, TRAJ33)
CGDAPDSNYQLIW

SEQ ID NO: 402616 - protein, 15 aa, Homo sapiens
  CDR3 for beta chain variable domain of TCR clone 201308 (TRBV27, TRBJ2-1)
CASSNWGGSSNEQFF

SEQ ID NO: 402617 - protein, 12 aa, Homo sapiens
  CDR3 for alpha chain variable domain of TCR clone 201309 (TRAV17, TRAJ30)
CATDARDDKIIF

SEQ ID NO: 402618 - protein, 15 aa, Homo sapiens
  CDR3 for beta chain variable domain of TCR clone 201309 (TRBV4-1, TRBJ2-1)
CASSQGGKLYNEQFF

SEQ ID NO: 402619 - protein, 12 aa, Homo sapiens
  CDR3 for alpha chain variable domain of TCR clone 201310 (TRAV23/DV6, TRAJ24)
CAAKSAWGKFQF

SEQ ID NO: 402620 - protein, 15 aa, Homo sapiens
  CDR3 for beta chain variable domain of TCR clone 201310 (TRBV4-3, TRBJ2-3)
CASSPSLLSTDTQYF

SEQ ID NO: 402621 - protein, 14 aa, Homo sapiens
  CDR3 for alpha chain variable domain of TCR clone 201311 (TRAV16, TRAJ54)
CALSLIQGSQKLVS

SEQ ID NO: 402622 - protein, 15 aa, Homo sapiens
  CDR3 for beta chain variable domain of TCR clone 201311 (TRBV20-1, TRBJ2-7)
CSARDRVSGMDEQYF

SEQ ID NO: 402623 - protein, 12 aa, Homo sapiens
  CDR3 for alpha chain variable domain of TCR clone 201312 (TRAV1-2, TRAJ24)
CAVGGSWGRFQF

SEQ ID NO: 402624 - protein, 16 aa, Homo sapiens
  CDR3 for beta chain variable domain of TCR clone 201312 (TRBV12-5, TRBJ2-5)
CASGPRTSGNQETQYF

SEQ ID NO: 402625 - protein, 11 aa, Homo sapiens
  CDR3 for alpha chain variable domain of TCR clone 201313 (TRAV25, TRAJ39)
LENNAGNMLTF

SEQ ID NO: 402626 - protein, 15 aa, Homo sapiens
  CDR3 for beta chain variable domain of TCR clone 201313 (TRBV18, TRBJ1-5)
CASSPSDRSNQPQHF

SEQ ID NO: 402627 - protein, 17 aa, Homo sapiens
  CDR3 for alpha chain variable domain of TCR clone 201314 (TRAV12-2, TRAJ39)
CAVNNMLTFGGETRLMV

SEQ ID NO: 402628 - protein, 16 aa, Homo sapiens
  CDR3 for beta chain variable domain of TCR clone 201314 (TRBV5-3, TRBJ2-2)
CARSFGTGTSTGELFF

SEQ ID NO: 402629 - protein, 13 aa, Homo sapiens
  CDR3 for alpha chain variable domain of TCR clone 201315 (TRAV2, TRAJ15)
CAVASQAGTALIF

SEQ ID NO: 402630 - protein, 12 aa, Homo sapiens
  CDR3 for beta chain variable domain of TCR clone 201315 (TRBV6-5, TRBJ2-7)
CASSDRQNEQYF

SEQ ID NO: 402631 - protein, 17 aa, Homo sapiens
  CDR3 for alpha chain variable domain of TCR clone 201316 (TRAV12-3, TRAJ6)
CAMSARGGAGGSYIPTF

SEQ ID NO: 402632 - protein, 14 aa, Homo sapiens
  CDR3 for beta chain variable domain of TCR clone 201316 (TRBV20-1, TRBJ2-7)
CSAKTGTGGYEQYF

SEQ ID NO: 402633 - protein, 12 aa, Homo sapiens
  CDR3 for alpha chain variable domain of TCR clone 201317 (TRAV8-3, TRAJ26)
CASDNYGQNFVF

SEQ ID NO: 402634 - protein, 13 aa, Homo sapiens
  CDR3 for beta chain variable domain of TCR clone 201317 (TRBV20-1, TRBJ1-1)
CSAPLGGGTEAFF

SEQ ID NO: 402635 - protein, 13 aa, Homo sapiens
  CDR3 for alpha chain variable domain of TCR clone 201318 (TRAV13-1, TRAJ20)
CAARVSNDYKPSF

SEQ ID NO: 402636 - protein, 12 aa, Homo sapiens
  CDR3 for beta chain variable domain of TCR clone 201318 (TRBV20-1, TRBJ2-1)
CGARLGTDEQFF

SEQ ID NO: 402637 - protein, 12 aa, Homo sapiens
  CDR3 for alpha chain variable domain of TCR clone 201319 (TRAV26-1, TRAJ43)
CIVRPRGDDMRF

SEQ ID NO: 402638 - protein, 16 aa, Homo sapiens
  CDR3 for beta chain variable domain of TCR clone 201319 (TRBV3-1, TRBJ2-1)
CASSQGGKRSFDEQFF

SEQ ID NO: 402639 - protein, 13 aa, Homo sapiens
  CDR3 for alpha chain variable domain of TCR clone 201320 (TRAV4, TRAJ20)
CLVGEGNDYKLSF

SEQ ID NO: 402640 - protein, 15 aa, Homo sapiens
  CDR3 for beta chain variable domain of TCR clone 201320 (TRBV18, TRBJ2-7)
CASSPSSTGNYEQYF

SEQ ID NO: 402641 - protein, 17 aa, Homo sapiens
  CDR3 for alpha chain variable domain of TCR clone 201321 (TRAV4, TRAJ13)
CLVGVQGSSGGYQKVTF

SEQ ID NO: 402642 - protein, 18 aa, Homo sapiens
  CDR3 for beta chain variable domain of TCR clone 201321 (TRBV15, TRBJ2-3)
CATSRDGAWSWDTDTQYF

SEQ ID NO: 402643 - protein, 12 aa, Homo sapiens
  CDR3 for alpha chain variable domain of TCR clone 201322 (TRAV12-3, TRAJ17)
CAMTLTGDKLTF

SEQ ID NO: 402644 - protein, 15 aa, Homo sapiens
  CDR3 for beta chain variable domain of TCR clone 201322 (TRBV10-3, TRBJ2-3)
CASSLTSGGTDTQYF

SEQ ID NO: 402645 - protein, 14 aa, Homo sapiens
  CDR3 for alpha chain variable domain of TCR clone 201323 (TRAV1-2, TRAJ16)
CAVRAASDGQKLLF

SEQ ID NO: 402646 - protein, 20 aa, Homo sapiens
  CDR3 for beta chain variable domain of TCR clone 201323 (TRBV7-8, TRBJ2-2)
CASIHLFPGTTIHITGELFF

SEQ ID NO: 402647 - protein, 18 aa, Homo sapiens
  CDR3 for alpha chain variable domain of TCR clone 201324 (TRAV21, TRAJ52)
CAVRPSPAGGTSYGKLTF

SEQ ID NO: 402648 - protein, 14 aa, Homo sapiens
  CDR3 for beta chain variable domain of TCR clone 201324 (TRBV5-4, TRBJ1-1)
CASSLDSRRDEPFF

SEQ ID NO: 402649 - protein, 15 aa, Homo sapiens
  CDR3 for alpha chain variable domain of TCR clone 201325 (TRAV21, TRAJ53)
CATLNSGGSNYKLTF

SEQ ID NO: 402650 - protein, 16 aa, Homo sapiens
  CDR3 for beta chain variable domain of TCR clone 201325 (TRBV9, TRBJ2-1)
RASSVGGVGNYNEQFF

SEQ ID NO: 402651 - protein, 14 aa, Homo sapiens
  CDR3 for alpha chain variable domain of TCR clone 201326 (TRAV1-2, TRAJ6)
CAVSLSGGSYISTF

SEQ ID NO: 402652 - protein, 15 aa, Homo sapiens
  CDR3 for beta chain variable domain of TCR clone 201326 (TRBV28, TRBJ2-7)
CASSPGGRGFYEQYF

SEQ ID NO: 402653 - protein, 14 aa, Homo sapiens
  CDR3 for alpha chain variable domain of TCR clone 201327 (TRAV8-2, TRAJ37)
CVVSGSGNTGKLIF

SEQ ID NO: 402654 - protein, 14 aa, Homo sapiens
  CDR3 for beta chain variable domain of TCR clone 201327 (TRBV11-2, TRBJ2-3)
CASSRLARTDTQYF

SEQ ID NO: 402655 - protein, 13 aa, Homo sapiens
  CDR3 for alpha chain variable domain of TCR clone 201328 (TRAV27, TRAJ41)
CAGEGNSGYALNF

SEQ ID NO: 402656 - protein, 18 aa, Homo sapiens
  CDR3 for beta chain variable domain of TCR clone 201328 (TRBV4-1, TRBJ1-5)
CASSQDPRGQGLNQPQHF

SEQ ID NO: 402657 - protein, 10 aa, Homo sapiens
  CDR3 for alpha chain variable domain of TCR clone 201329 (TRAV13-1, TRAJ8)
CAAPFQKLVF

SEQ ID NO: 402658 - protein, 20 aa, Homo sapiens
  CDR3 for beta chain variable domain of TCR clone 201329 (TRBV3-1, TRBJ2-6)
CASSPRPGLEGGAEANVLTF

SEQ ID NO: 402659 - protein, 18 aa, Homo sapiens
  CDR3 for alpha chain variable domain of TCR clone 201330 (TRAV26-1, TRAJ23)
CIVRVGLEVWNQGGKLIF

SEQ ID NO: 402660 - protein, 16 aa, Homo sapiens
  CDR3 for beta chain variable domain of TCR clone 201330 (TRBV27, TRBJ2-7)
CASSFQGGRGSYEQYF

SEQ ID NO: 402661 - protein, 16 aa, Homo sapiens
  CDR3 for alpha chain variable domain of TCR clone 201331 (TRAV30, TRAJ24)
CGTEIVDADSWGKFQF

SEQ ID NO: 402662 - protein, 15 aa, Homo sapiens
  CDR3 for beta chain variable domain of TCR clone 201331 (TRBV5-1, TRBJ2-6)
CASSLDPSGANVLTF

SEQ ID NO: 402663 - protein, 14 aa, Homo sapiens
  CDR3 for alpha chain variable domain of TCR clone 201332 (TRAV26-1, TRAJ34)
CIVRVAYNTDKLIF

SEQ ID NO: 402664 - protein, 13 aa, Homo sapiens
  CDR3 for beta chain variable domain of TCR clone 201332 (TRBV20-1, TRBJ2-2)
CSASAAGTGELFF

SEQ ID NO: 402665 - protein, 17 aa, Homo sapiens
  CDR3 for alpha chain variable domain of TCR clone 201333 (TRAV3, TRAJ6)
CAVRDCPRAGGSYIPTF

SEQ ID NO: 402666 - protein, 16 aa, Homo sapiens
  CDR3 for beta chain variable domain of TCR clone 201333 (TRBV4-1, TRBJ2-7)
CASRLTAGQATYEQYF

SEQ ID NO: 402667 - protein, 15 aa, Homo sapiens
  CDR3 for alpha chain variable domain of TCR clone 201334 (TRAV40, TRAJ28)
SPFPGTGAGSYQLTF

SEQ ID NO: 402668 - protein, 13 aa, Homo sapiens
  CDR3 for beta chain variable domain of TCR clone 201334 (TRBV7-9, TRBJ2-3)
CASSPGSTDTQYF

SEQ ID NO: 402669 - protein, 14 aa, Homo sapiens
  CDR3 for alpha chain variable domain of TCR clone 201335 (TRAV17, TRAJ57)
CATDPQGGSEKLVF

SEQ ID NO: 402670 - protein, 18 aa, Homo sapiens
  CDR3 for beta chain variable domain of TCR clone 201335 (TRBV6-6, TRBJ1-3)
CARSYSKWDSISGNTIYF

SEQ ID NO: 402671 - protein, 15 aa, Homo sapiens
  CDR3 for alpha chain variable domain of TCR clone 201336 (TRAV21, TRAJ53)
CATLNSGGSNYKLKF

SEQ ID NO: 402672 - protein, 16 aa, Homo sapiens
  CDR3 for beta chain variable domain of TCR clone 201336 (TRBV12-4, TRBJ1-5)
CASSRPVGGSNQPQHF

SEQ ID NO: 402673 - protein, 14 aa, Homo sapiens
  CDR3 for alpha chain variable domain of TCR clone 201337 (TRAV12-2, TRAJ15)
CAPHTGQAATALIF

SEQ ID NO: 402674 - protein, 17 aa, Homo sapiens
  CDR3 for beta chain variable domain of TCR clone 201337 (TRBV5-5, TRBJ1-2)
CASSLGSLDGQSEGYTF

SEQ ID NO: 402675 - protein, 12 aa, Homo sapiens
  CDR3 for alpha chain variable domain of TCR clone 201338 (TRAV1-1, TRAJ43)
CAPRVSSNDMRL

SEQ ID NO: 402676 - protein, 15 aa, Homo sapiens
  CDR3 for beta chain variable domain of TCR clone 201338 (TRBV5-1, TRBJ2-7)
CASSLGDFTTYEQYF

SEQ ID NO: 402677 - protein, 14 aa, Homo sapiens
  CDR3 for alpha chain variable domain of TCR clone 201339 (TRAV12-3, TRAJ13)
CAMRNSGGYQKVTF

SEQ ID NO: 402678 - protein, 14 aa, Homo sapiens
  CDR3 for beta chain variable domain of TCR clone 201339 (TRBV4-1, TRBJ1-6)
CASSPGSDSLPLHF

SEQ ID NO: 402679 - protein, 18 aa, Homo sapiens
  CDR3 for alpha chain variable domain of TCR clone 201340 (TRAV21, TRAJ52)
CAVRPSPAGGTSYGKLTF

SEQ ID NO: 402680 - protein, 17 aa, Homo sapiens
  CDR3 for beta chain variable domain of TCR clone 201340 (TRBV13, TRBJ2-3)
CASSRSRVAGGRNTQYL

SEQ ID NO: 402681 - protein, 16 aa, Homo sapiens
  CDR3 for alpha chain variable domain of TCR clone 201341 (TRAV38-1, TRAJ56)
CAFMKRQTGANSKLTF

SEQ ID NO: 402682 - protein, 15 aa, Homo sapiens
  CDR3 for beta chain variable domain of TCR clone 201341 (TRBV11-3, TRBJ2-3)
CASSAGTVVTNTQYF

SEQ ID NO: 402683 - protein, 13 aa, Homo sapiens
  CDR3 for alpha chain variable domain of TCR clone 201342 (TRAV17, TRAJ9)
CATGSTGGFKTIF

SEQ ID NO: 402684 - protein, 14 aa, Homo sapiens
  CDR3 for beta chain variable domain of TCR clone 201342 (TRBV7-2, TRBJ2-7)
CASRSQGAAYEQYF

SEQ ID NO: 402685 - protein, 13 aa, Homo sapiens
  CDR3 for alpha chain variable domain of TCR clone 201343 (TRAV1-2, TRAJ9)
CAALNTGGFKTIF

SEQ ID NO: 402686 - protein, 14 aa, Homo sapiens
  CDR3 for beta chain variable domain of TCR clone 201343 (TRBV11-3, TRBJ1-6)
CASSFSGGDSPLHF

SEQ ID NO: 402687 - protein, 13 aa, Homo sapiens
  CDR3 for alpha chain variable domain of TCR clone 201344 (TRAV21, TRAJ20)
CAVGLRVDYKLSF

SEQ ID NO: 402688 - protein, 21 aa, Homo sapiens
  CDR3 for beta chain variable domain of TCR clone 201344 (TRBV15, TRBJ2-1)
AWGTQPCTRVPPAEVDTARFF

SEQ ID NO: 402689 - protein, 11 aa, Homo sapiens
  CDR3 for alpha chain variable domain of TCR clone 201345 (TRAV17, TRAJ21)
CATGNFNTFYF

SEQ ID NO: 402690 - protein, 16 aa, Homo sapiens
  CDR3 for beta chain variable domain of TCR clone 201345 (TRBV2, TRBJ2-1)
CASSANPRDWQAEQFF

SEQ ID NO: 402691 - protein, 15 aa, Homo sapiens
  CDR3 for alpha chain variable domain of TCR clone 201346 (TRAV27, TRAJ38)
CAARRNAGNNRKLIW

SEQ ID NO: 402692 - protein, 18 aa, Homo sapiens
  CDR3 for beta chain variable domain of TCR clone 201346 (TRBV5-1, TRBJ1-6)
CASSPGQTRIPYNSPLHF

SEQ ID NO: 402693 - protein, 16 aa, Homo sapiens
  CDR3 for alpha chain variable domain of TCR clone 201347 (TRAV16, TRAJ52)
CALSVAGGTSYGKLTF

SEQ ID NO: 402694 - protein, 20 aa, Homo sapiens
  CDR3 for beta chain variable domain of TCR clone 201347 (TRBV19, TRBJ2-1)
CASSISRTVTSTRLNNEQFF

SEQ ID NO: 402695 - protein, 15 aa, Homo sapiens
  CDR3 for alpha chain variable domain of TCR clone 201348 (TRAV21, TRAJ33)
CAVNPPRDSNYQLIW

SEQ ID NO: 402696 - protein, 13 aa, Homo sapiens
  CDR3 for beta chain variable domain of TCR clone 201348 (TRBV14, TRBJ2-7)
CASSQDRRYEQYF

SEQ ID NO: 402697 - protein, 13 aa, Homo sapiens
  CDR3 for alpha chain variable domain of TCR clone 201349 (TRAV8-3, TRAJ48)
CAVVPFGNEKLTF

SEQ ID NO: 402698 - protein, 14 aa, Homo sapiens
  CDR3 for beta chain variable domain of TCR clone 201349 (TRBV18, TRBJ2-7)
CASSPGGGAYEQYF

SEQ ID NO: 402699 - protein, 14 aa, Homo sapiens
  CDR3 for alpha chain variable domain of TCR clone 201350 (TRAV12-2, TRAJ13)
CAVKKTGGYQKVTF

SEQ ID NO: 402700 - protein, 17 aa, Homo sapiens
  CDR3 for beta chain variable domain of TCR clone 201350 (TRBV28, TRBJ2-5)
CASSTPEGEALQETRYF

SEQ ID NO: 402701 - protein, 14 aa, Homo sapiens
  CDR3 for alpha chain variable domain of TCR clone 201351 (TRAV23/DV6, TRAJ27)
CSASRDTNAGKSTF

SEQ ID NO: 402702 - protein, 13 aa, Homo sapiens
  CDR3 for beta chain variable domain of TCR clone 201351 (TRBV20-1, TRBJ1-5)
CSASGRGNQPQHF

SEQ ID NO: 402703 - protein, 15 aa, Homo sapiens
  CDR3 for alpha chain variable domain of TCR clone 201352 (TRAV8-4, TRAJ47)
CAVSDPEEYGNKLVF

SEQ ID NO: 402704 - protein, 12 aa, Homo sapiens
  CDR3 for beta chain variable domain of TCR clone 201352 (TRBV18, TRBJ2-5)
CASSPNQETQYF

SEQ ID NO: 402705 - protein, 11 aa, Homo sapiens
  CDR3 for alpha chain variable domain of TCR clone 201353 (TRAV12-2, TRAJ39)
CAVNNMLTFEG

SEQ ID NO: 402706 - protein, 16 aa, Homo sapiens
  CDR3 for beta chain variable domain of TCR clone 201353 (TRBV9, TRBJ2-7)
CASSAGPDRSPYEQCF

SEQ ID NO: 402707 - protein, 12 aa, Homo sapiens
  CDR3 for alpha chain variable domain of TCR clone 201354 (TRAV27, TRAJ9)
CAGESGGFKTIF

SEQ ID NO: 402708 - protein, 18 aa, Homo sapiens
  CDR3 for beta chain variable domain of TCR clone 201354 (TRBV7-9, TRBJ2-7)
WASSLTTSGSRTWYEQYF

SEQ ID NO: 402709 - protein, 14 aa, Homo sapiens
  CDR3 for alpha chain variable domain of TCR clone 201355 (TRAV9-2, TRAJ39)
CALYIYNAGNMLTF

SEQ ID NO: 402710 - protein, 14 aa, Homo sapiens
  CDR3 for beta chain variable domain of TCR clone 201355 (TRBV19, TRBJ1-3)
CASSIGGSGNTIYF

SEQ ID NO: 402711 - protein, 18 aa, Homo sapiens
  CDR3 for alpha chain variable domain of TCR clone 201356 (TRAV21, TRAJ52)
CAVRPSPAGGTSYGKLTF

SEQ ID NO: 402712 - protein, 17 aa, Homo sapiens
  CDR3 for beta chain variable domain of TCR clone 201356 (TRBV13, TRBJ2-3)
CVSSLSRVAGGKNTQYF

SEQ ID NO: 402713 - protein, 12 aa, Homo sapiens
  CDR3 for alpha chain variable domain of TCR clone 201357 (TRAV21, TRAJ27)
CAASRQCRQINL

SEQ ID NO: 402714 - protein, 14 aa, Homo sapiens
  CDR3 for beta chain variable domain of TCR clone 201357 (TRBV7-6, TRBJ2-3)
CASSLGTVTDTQYF

SEQ ID NO: 402715 - protein, 17 aa, Homo sapiens
  CDR3 for alpha chain variable domain of TCR clone 201358 (TRAV3, TRAJ42)
CAVRDRDYGGSQGNLIF

SEQ ID NO: 402716 - protein, 13 aa, Homo sapiens
  CDR3 for beta chain variable domain of TCR clone 201358 (TRBV20-1, TRBJ2-5)
CSAQASGRETQYF

SEQ ID NO: 402717 - protein, 14 aa, Homo sapiens
  CDR3 for alpha chain variable domain of TCR clone 201359 (TRAV1-2, TRAJ16)
CAVNRFSDGQKLLF

SEQ ID NO: 402718 - protein, 12 aa, Homo sapiens
  CDR3 for beta chain variable domain of TCR clone 201359 (TRBV11-2, TRBJ2-1)
CASSPGTNEQFF

SEQ ID NO: 402719 - protein, 15 aa, Homo sapiens
  CDR3 for alpha chain variable domain of TCR clone 201360 (TRAV8-3, TRAJ32)
CAVGPYGGATNKLIF

SEQ ID NO: 402720 - protein, 13 aa, Homo sapiens
  CDR3 for beta chain variable domain of TCR clone 201360 (TRBV27, TRBJ1-1)
CASSLSIGAEAFF

SEQ ID NO: 402721 - protein, 11 aa, Homo sapiens
  CDR3 for alpha chain variable domain of TCR clone 201361 (TRAV2, TRAJ13)
CASGGYQKVTF

SEQ ID NO: 402722 - protein, 13 aa, Homo sapiens
  CDR3 for beta chain variable domain of TCR clone 201361 (TRBV7-9, TRBJ2-1)
CASSWESYNEQFF

SEQ ID NO: 402723 - protein, 12 aa, Homo sapiens
  CDR3 for alpha chain variable domain of TCR clone 201362 (TRAV3, TRAJ20)
CAVRDGDYKLSF

SEQ ID NO: 402724 - protein, 15 aa, Homo sapiens
  CDR3 for beta chain variable domain of TCR clone 201362 (TRBV7-2, TRBJ2-1)
CASSFSGGIYNEQFF

SEQ ID NO: 402725 - protein, 15 aa, Homo sapiens
  CDR3 for alpha chain variable domain of TCR clone 201363 (TRAV12-2, TRAJ11)
CAVNLRNSGYSTLTF

SEQ ID NO: 402726 - protein, 18 aa, Homo sapiens
  CDR3 for beta chain variable domain of TCR clone 201363 (TRBV7-2, TRBJ2-2)
CASCLASRGAGGPGELFF

SEQ ID NO: 402727 - protein, 14 aa, Homo sapiens
  CDR3 for alpha chain variable domain of TCR clone 201364 (TRAV6, TRAJ37)
CALGSQGNTGKPIF

SEQ ID NO: 402728 - protein, 15 aa, Homo sapiens
  CDR3 for beta chain variable domain of TCR clone 201364 (TRBV2, TRBJ2-1)
CASSEEREGDNEQFF

SEQ ID NO: 402729 - protein, 12 aa, Homo sapiens
  CDR3 for alpha chain variable domain of TCR clone 201365 (TRAV12-1, TRAJ23)
CVVNIPGGKLIF

SEQ ID NO: 402730 - protein, 16 aa, Homo sapiens
  CDR3 for beta chain variable domain of TCR clone 201365 (TRBV7-9, TRBJ2-1)
CASSPRASSSYNEQFF

SEQ ID NO: 402731 - protein, 16 aa, Homo sapiens
  CDR3 for alpha chain variable domain of TCR clone 201366 (TRAV3, TRAJ10)
CAVRDMRAGGGNKLTF

SEQ ID NO: 402732 - protein, 14 aa, Homo sapiens
  CDR3 for beta chain variable domain of TCR clone 201366 (TRBV28, TRBJ1-2)
CASSFGTEAYGYTF

SEQ ID NO: 402733 - protein, 12 aa, Homo sapiens
  CDR3 for alpha chain variable domain of TCR clone 201367 (TRAV2, TRAJ20)
CAVVRNDYKLSF

SEQ ID NO: 402734 - protein, 15 aa, Homo sapiens
  CDR3 for beta chain variable domain of TCR clone 201367 (TRBV20-1, TRBJ2-7)
CSARDRVSGMDEQYF

SEQ ID NO: 402735 - protein, 14 aa, Homo sapiens
  CDR3 for alpha chain variable domain of TCR clone 201368 (TRAV23/DV6, TRAJ22)
CAASVSGSARQLTF

SEQ ID NO: 402736 - protein, 17 aa, Homo sapiens
  CDR3 for beta chain variable domain of TCR clone 201368 (TRBV11-2, TRBJ2-1)
CASSLYPPGVEYNEQFF

SEQ ID NO: 402737 - protein, 13 aa, Homo sapiens
  CDR3 for alpha chain variable domain of TCR clone 201369 (TRAV13-1, TRAJ21)
CAASIYNFNKFYF

SEQ ID NO: 402738 - protein, 12 aa, Homo sapiens
  CDR3 for beta chain variable domain of TCR clone 201369 (TRBV11-2, TRBJ2-1)
CAGSPGNNEQFF

SEQ ID NO: 402739 - protein, 13 aa, Homo sapiens
  CDR3 for alpha chain variable domain of TCR clone 201370 (TRAV12-2, TRAJ47)
CAVFMEYGNKLVF

SEQ ID NO: 402740 - protein, 14 aa, Homo sapiens
  CDR3 for beta chain variable domain of TCR clone 201370 (TRBV4-1, TRBJ1-5)
CASSQGPTNQPQRF

SEQ ID NO: 402741 - protein, 16 aa, Homo sapiens
  CDR3 for alpha chain variable domain of TCR clone 201371 (TRAV12-3, TRAJ53)
CAMSTGSGGSNYKLTF

SEQ ID NO: 402742 - protein, 11 aa, Homo sapiens
  CDR3 for beta chain variable domain of TCR clone 201371 (TRBV29-1, TRBJ2-5)
CSEDRTGTQYV

SEQ ID NO: 402743 - protein, 14 aa, Homo sapiens
  CDR3 for alpha chain variable domain of TCR clone 201372 (TRAV29/DV5, TRAJ49)
CAASLSNTANQFYF

SEQ ID NO: 402744 - protein, 15 aa, Homo sapiens
  CDR3 for beta chain variable domain of TCR clone 201372 (TRBV20-1, TRBJ2-1)
CSARGIGGTYNEQFF

SEQ ID NO: 402745 - protein, 11 aa, Homo sapiens
  CDR3 for alpha chain variable domain of TCR clone 201373 (TRAV3, TRAJ21)
CALGNFNKFYF

SEQ ID NO: 402746 - protein, 13 aa, Homo sapiens
  CDR3 for beta chain variable domain of TCR clone 201373 (TRBV12-4, TRBJ2-1)
CASSLAENNEQFF

SEQ ID NO: 402747 - protein, 16 aa, Homo sapiens
  CDR3 for alpha chain variable domain of TCR clone 201374 (TRAV12-3, TRAJ53)
CAMSPGSGGSNYKLTF

SEQ ID NO: 402748 - protein, 12 aa, Homo sapiens
  CDR3 for beta chain variable domain of TCR clone 201374 (TRBV11-2, TRBJ2-5)
CASSLVGETQYF

SEQ ID NO: 402749 - protein, 16 aa, Homo sapiens
  CDR3 for alpha chain variable domain of TCR clone 201375 (TRAV16, TRAJ4)
CALSRMFSGGYNKLIF

SEQ ID NO: 402750 - protein, 14 aa, Homo sapiens
  CDR3 for beta chain variable domain of TCR clone 201375 (TRBV7-2, TRBJ2-7)
CASSPKTSFYEQDF

SEQ ID NO: 402751 - protein, 12 aa, Homo sapiens
  CDR3 for alpha chain variable domain of TCR clone 201376 (TRAV12-3, TRAJ17)
CAMTLTGNKLTF

SEQ ID NO: 402752 - protein, 13 aa, Homo sapiens
  CDR3 for beta chain variable domain of TCR clone 201376 (TRBV20-1, TRBJ2-5)
CSAIGDYQETQYF

SEQ ID NO: 402753 - protein, 13 aa, Homo sapiens
  CDR3 for alpha chain variable domain of TCR clone 201377 (TRAV1-1, TRAJ38)
CASNAGNNRKLMW

SEQ ID NO: 402754 - protein, 14 aa, Homo sapiens
  CDR3 for beta chain variable domain of TCR clone 201377 (TRBV15, TRBJ2-1)
CATSGVEDYNEQFF

SEQ ID NO: 402755 - protein, 13 aa, Homo sapiens
  CDR3 for alpha chain variable domain of TCR clone 201378 (TRAV12-3, TRAJ7)
CAMSASGNNRLAF

SEQ ID NO: 402756 - protein, 14 aa, Homo sapiens
  CDR3 for beta chain variable domain of TCR clone 201378 (TRBV4-2, TRBJ2-7)
CASSHRTGEYEQYF

SEQ ID NO: 402757 - protein, 14 aa, Homo sapiens
  CDR3 for alpha chain variable domain of TCR clone 201379 (TRAV8-3, TRAJ6)
CAVGASGGSFIPTF

SEQ ID NO: 402758 - protein, 17 aa, Homo sapiens
  CDR3 for beta chain variable domain of TCR clone 201379 (TRBV18, TRBJ2-2)
CASSPSDPWQNTGELFF

SEQ ID NO: 402759 - protein, 14 aa, Homo sapiens
  CDR3 for alpha chain variable domain of TCR clone 201380 (TRAV35, TRAJ33)
CAGSSQDSNYQLIW

SEQ ID NO: 402760 - protein, 16 aa, Homo sapiens
  CDR3 for beta chain variable domain of TCR clone 201380 (TRBV7-2, TRBJ2-1)
CASSLGRTSGDNEQFF

SEQ ID NO: 402761 - protein, 14 aa, Homo sapiens
  CDR3 for alpha chain variable domain of TCR clone 201381 (TRAV1-1, TRAJ23)
CAVKAYNQGGKLIF

SEQ ID NO: 402762 - protein, 15 aa, Homo sapiens
  CDR3 for beta chain variable domain of TCR clone 201381 (TRBV7-2, TRBJ2-3)
CASTPTSGEADTQYF

SEQ ID NO: 402763 - protein, 14 aa, Homo sapiens
  CDR3 for alpha chain variable domain of TCR clone 201382 (TRAV12-2, TRAJ11)
CAVEGGSGYSTLTF

SEQ ID NO: 402764 - protein, 16 aa, Homo sapiens
  CDR3 for beta chain variable domain of TCR clone 201382 (TRBV6-1, TRBJ1-2)
CASSGAWQGRSHGHTF

SEQ ID NO: 402765 - protein, 14 aa, Homo sapiens
  CDR3 for alpha chain variable domain of TCR clone 201383 (TRAV4, TRAJ6)
CLVGEAGGSYIPTF

SEQ ID NO: 402766 - protein, 13 aa, Homo sapiens
  CDR3 for beta chain variable domain of TCR clone 201383 (TRBV7-3, TRBJ1-1)
CASSQEWGAEAFF

SEQ ID NO: 402767 - protein, 14 aa, Homo sapiens
  CDR3 for alpha chain variable domain of TCR clone 201384 (TRAV4, TRAJ17)
CLVGDKAAGNKLTF

SEQ ID NO: 402768 - protein, 14 aa, Homo sapiens
  CDR3 for beta chain variable domain of TCR clone 201384 (TRBV4-1, TRBJ2-7)
CASSPVAGGDEQYF

SEQ ID NO: 402769 - protein, 17 aa, Homo sapiens
  CDR3 for alpha chain variable domain of TCR clone 201385 (TRAV12-2, TRAJ53)
CAPLTDSQEGSNYKQTF

SEQ ID NO: 402770 - protein, 12 aa, Homo sapiens
  CDR3 for beta chain variable domain of TCR clone 201385 (TRBV11-2, TRBJ2-2)
CASSLGGGELFF

SEQ ID NO: 402771 - protein, 13 aa, Homo sapiens
  CDR3 for alpha chain variable domain of TCR clone 201386 (TRAV3, TRAJ21)
CAVREPDFNKFYF

SEQ ID NO: 402772 - protein, 14 aa, Homo sapiens
  CDR3 for beta chain variable domain of TCR clone 201386 (TRBV7-8, TRBJ2-1)
CATERERSYNEQFF

SEQ ID NO: 402773 - protein, 17 aa, Homo sapiens
  CDR3 for alpha chain variable domain of TCR clone 201387 (TRAV23/DV6, TRAJ57)
CAASSALSQGGSETLVF

SEQ ID NO: 402774 - protein, 14 aa, Homo sapiens
  CDR3 for beta chain variable domain of TCR clone 201387 (TRBV25-1, TRBJ1-1)
CASTHLGGNTEAFF

SEQ ID NO: 402775 - protein, 22 aa, Homo sapiens
  CDR3 for alpha chain variable domain of TCR clone 201388 (TRAV40, )
CLLGDGIPDIQNPDPAVYQLRD

SEQ ID NO: 402776 - protein, 16 aa, Homo sapiens
  CDR3 for beta chain variable domain of TCR clone 201388 (TRBV20-1, TRBJ1-5)
CSAALPGQQTNQPQHF

SEQ ID NO: 402777 - protein, 12 aa, Homo sapiens
  CDR3 for alpha chain variable domain of TCR clone 201389 (TRAV10, TRAJ43)
CVVVRVGNDMRF

SEQ ID NO: 402778 - protein, 16 aa, Homo sapiens
  CDR3 for beta chain variable domain of TCR clone 201389 (TRBV2, TRBJ1-4)
CASNLLQGATNDKLFF

SEQ ID NO: 402779 - protein, 14 aa, Homo sapiens
  CDR3 for alpha chain variable domain of TCR clone 201390 (TRAV9-2, TRAJ39)
CALYIYNAGNMLTF

SEQ ID NO: 402780 - protein, 14 aa, Homo sapiens
  CDR3 for beta chain variable domain of TCR clone 201390 (TRBV12-5, TRBJ2-5)
CASGSRSHQETQYF

SEQ ID NO: 402781 - protein, 15 aa, Homo sapiens
  CDR3 for alpha chain variable domain of TCR clone 201391 (TRAV21, TRAJ24)
CAARSSTDSWGKLQF

SEQ ID NO: 402782 - protein, 17 aa, Homo sapiens
  CDR3 for beta chain variable domain of TCR clone 201391 (TRBV20-1, TRBJ2-7)
CSATRAGGVAGVEEQYF

SEQ ID NO: 402783 - protein, 14 aa, Homo sapiens
  CDR3 for alpha chain variable domain of TCR clone 201392 (TRAV12-3, TRAJ10)
SHLPLTGGGNKLTF

SEQ ID NO: 402784 - protein, 12 aa, Homo sapiens
  CDR3 for beta chain variable domain of TCR clone 201392 (TRBV11-2, TRBJ2-2)
CASSRGGGELFL

SEQ ID NO: 402785 - protein, 12 aa, Homo sapiens
  CDR3 for alpha chain variable domain of TCR clone 201393 (TRAV35, TRAJ30)
CAGQLADDKIIF

SEQ ID NO: 402786 - protein, 17 aa, Homo sapiens
  CDR3 for beta chain variable domain of TCR clone 201393 (TRBV4-2, TRBJ2-5)
CASSPGRWQNFQETQYF

SEQ ID NO: 402787 - protein, 13 aa, Homo sapiens
  CDR3 for alpha chain variable domain of TCR clone 201394 (TRAV13-1, TRAJ39)
CSKYSNAGNMLTF

SEQ ID NO: 402788 - protein, 13 aa, Homo sapiens
  CDR3 for beta chain variable domain of TCR clone 201394 (TRBV5-7, TRBJ1-1)
CASSLFQNTEAFF

SEQ ID NO: 402789 - protein, 13 aa, Homo sapiens
  CDR3 for alpha chain variable domain of TCR clone 201395 (TRAV12-3, TRAJ13)
CAMSSGGYEKVTF

SEQ ID NO: 402790 - protein, 17 aa, Homo sapiens
  CDR3 for beta chain variable domain of TCR clone 201395 (TRBV4-1, TRBJ1-4)
CASSQEGPRGVEEKLFF

SEQ ID NO: 402791 - protein, 13 aa, Homo sapiens
  CDR3 for alpha chain variable domain of TCR clone 201396 (TRAV12-2, TRAJ12)
CAVNWDSSYKLIF

SEQ ID NO: 402792 - protein, 15 aa, Homo sapiens
  CDR3 for beta chain variable domain of TCR clone 201396 (TRBV7-3, TRBJ2-2)
CASSETGQGTGELFF

SEQ ID NO: 402793 - protein, 18 aa, Homo sapiens
  CDR3 for alpha chain variable domain of TCR clone 201397 (TRAV21, TRAJ52)
CAVRPSPAGGTSYGKLTF

SEQ ID NO: 402794 - protein, 16 aa, Homo sapiens
  CDR3 for beta chain variable domain of TCR clone 201397 (TRBV7-3, TRBJ2-1)
CASSLEGYRSYNGQFF

SEQ ID NO: 402795 - protein, 12 aa, Homo sapiens
  CDR3 for alpha chain variable domain of TCR clone 201398 (TRAV27, TRAJ52)
SAGGTSYGKLTF

SEQ ID NO: 402796 - protein, 14 aa, Homo sapiens
  CDR3 for beta chain variable domain of TCR clone 201398 (TRBV7-6, TRBJ2-3)
CASSLGTVTDTQYF

SEQ ID NO: 402797 - protein, 13 aa, Homo sapiens
  CDR3 for alpha chain variable domain of TCR clone 201399 (TRAV27, TRAJ41)
CAGEGNSGYALNF

SEQ ID NO: 402798 - protein, 20 aa, Homo sapiens
  CDR3 for beta chain variable domain of TCR clone 201399 (TRBV11-2, TRBJ1-6)
CASSLVFATGGSVHPSTLGT

SEQ ID NO: 402799 - protein, 12 aa, Homo sapiens
  CDR3 for alpha chain variable domain of TCR clone 201400 (TRAV13-1, TRAJ5)
CAAKAGRRARTF

SEQ ID NO: 402800 - protein, 13 aa, Homo sapiens
  CDR3 for beta chain variable domain of TCR clone 201400 (TRBV7-9, TRBJ1-2)
CASSLKQNYGYTF

SEQ ID NO: 402801 - protein, 11 aa, Homo sapiens
  CDR3 for alpha chain variable domain of TCR clone 201401 (TRAV3, TRAJ21)
CAVGNFNKFYF

SEQ ID NO: 402802 - protein, 14 aa, Homo sapiens
  CDR3 for beta chain variable domain of TCR clone 201401 (TRBV29-1, TRBJ2-2)
CGGRGSGNTGELFF

SEQ ID NO: 402803 - protein, 18 aa, Homo sapiens
  CDR3 for alpha chain variable domain of TCR clone 201402 (TRAV12-3, TRAJ52)
CAVRPSPAGGTSYGKLTF

SEQ ID NO: 402804 - protein, 16 aa, Homo sapiens
  CDR3 for beta chain variable domain of TCR clone 201402 (TRBV13, TRBJ2-2)
FASSPRTGEHTGELFF

SEQ ID NO: 402805 - protein, 15 aa, Homo sapiens
  CDR3 for alpha chain variable domain of TCR clone 201403 (TRAV20, TRAJ53)
CAVQASGGSNYKLTF

SEQ ID NO: 402806 - protein, 12 aa, Homo sapiens
  CDR3 for beta chain variable domain of TCR clone 201403 (TRBV29-1, TRBJ2-3)
CSVTGGADTQYF

SEQ ID NO: 402807 - protein, 12 aa, Homo sapiens
  CDR3 for alpha chain variable domain of TCR clone 201404 (TRAV8-3, TRAJ20)
CAVDFNDYKLSS

SEQ ID NO: 402808 - protein, 12 aa, Homo sapiens
  CDR3 for beta chain variable domain of TCR clone 201404 (TRBV29-1, TRBJ2-3)
CSVTGGADTQYF

SEQ ID NO: 402809 - protein, 13 aa, Homo sapiens
  CDR3 for alpha chain variable domain of TCR clone 201405 (TRAV12-1, TRAJ40)
CVVPTSGTYKYIF

SEQ ID NO: 402810 - protein, 15 aa, Homo sapiens
  CDR3 for beta chain variable domain of TCR clone 201405 (TRBV7-2, TRBJ2-1)
CASSLVGSSYNEQFF

SEQ ID NO: 402811 - protein, 14 aa, Homo sapiens
  CDR3 for alpha chain variable domain of TCR clone 201406 (TRAV12-1, TRAJ30)
CVVNIGGRDDKIIF

SEQ ID NO: 402812 - protein, 12 aa, Homo sapiens
  CDR3 for beta chain variable domain of TCR clone 201406 (TRBV11-3, TRBJ2-2)
CASSLGGGELFF

SEQ ID NO: 402813 - protein, 14 aa, Homo sapiens
  CDR3 for alpha chain variable domain of TCR clone 201407 (TRAV3, TRAJ40)
CAVRDRRGTYRYIF

SEQ ID NO: 402814 - protein, 15 aa, Homo sapiens
  CDR3 for beta chain variable domain of TCR clone 201407 (TRBV28, TRBJ2-1)
CASSIIAGGRSEQFF

SEQ ID NO: 402815 - protein, 15 aa, Homo sapiens
  CDR3 for alpha chain variable domain of TCR clone 201408 (TRAV21, TRAJ10)
CAVPLLTGGGNKLTF

SEQ ID NO: 402816 - protein, 13 aa, Homo sapiens
  CDR3 for beta chain variable domain of TCR clone 201408 (TRBV12-4, TRBJ2-2)
CASSITGSGELFF

SEQ ID NO: 402817 - protein, 14 aa, Homo sapiens
  CDR3 for alpha chain variable domain of TCR clone 201409 (TRAV13-1, TRAJ44)
CAAKATGTASKLTF

SEQ ID NO: 402818 - protein, 16 aa, Homo sapiens
  CDR3 for beta chain variable domain of TCR clone 201409 (TRBV7-3, TRBJ2-3)
CASSLMKRMRSRYAVF

SEQ ID NO: 402819 - protein, 13 aa, Homo sapiens
  CDR3 for alpha chain variable domain of TCR clone 201410 (TRAV13-1, TRAJ21)
CAASIYNFNKFYF

SEQ ID NO: 402820 - protein, 15 aa, Homo sapiens
  CDR3 for beta chain variable domain of TCR clone 201410 (TRBV7-8, TRBJ1-5)
CASSLAGQPNQPRHF

SEQ ID NO: 402821 - protein, 11 aa, Homo sapiens
  CDR3 for alpha chain variable domain of TCR clone 201411 (TRAV1-2, TRAJ40)
CAVPGTYKYIF

SEQ ID NO: 402822 - protein, 19 aa, Homo sapiens
  CDR3 for beta chain variable domain of TCR clone 201411 (TRBV25-1, TRBJ2-2)
CAILVYRVDRGRKTGELFF

SEQ ID NO: 402823 - protein, 11 aa, Homo sapiens
  CDR3 for alpha chain variable domain of TCR clone 201412 (TRAV12-1, TRAJ21)
CVVYNFNKFYF

SEQ ID NO: 402824 - protein, 16 aa, Homo sapiens
  CDR3 for beta chain variable domain of TCR clone 201412 (TRBV19, TRBJ2-7)
CASSMGQGRSSSTSGR

SEQ ID NO: 402825 - protein, 14 aa, Homo sapiens
  CDR3 for alpha chain variable domain of TCR clone 201413 (TRAV12-2, TRAJ13)
CAVKKTGGYQKVTF

SEQ ID NO: 402826 - protein, 14 aa, Homo sapiens
  CDR3 for beta chain variable domain of TCR clone 201413 (TRBV19, TRBJ2-1)
CASPTFVLSVEQFF

SEQ ID NO: 402827 - protein, 12 aa, Homo sapiens
  CDR3 for alpha chain variable domain of TCR clone 201414 (TRAV3, TRAJ20)
CAVRDHDYKLSF

SEQ ID NO: 402828 - protein, 13 aa, Homo sapiens
  CDR3 for beta chain variable domain of TCR clone 201414 (TRBV9, TRBJ2-7)
CASSVGQSGEQYF

SEQ ID NO: 402829 - protein, 12 aa, Homo sapiens
  CDR3 for alpha chain variable domain of TCR clone 201415 (TRAV13-1, TRAJ21)
CAVKEGFNKFYF

SEQ ID NO: 402830 - protein, 18 aa, Homo sapiens
  CDR3 for beta chain variable domain of TCR clone 201415 (TRBV11-2, TRBJ2-3)
CASSLGGASRGAPNTQYF

SEQ ID NO: 402831 - protein, 11 aa, Homo sapiens
  CDR3 for alpha chain variable domain of TCR clone 201416 (TRAV1-1, TRAJ23)
CAVRQGGKLIF

SEQ ID NO: 402832 - protein, 13 aa, Homo sapiens
  CDR3 for beta chain variable domain of TCR clone 201416 (TRBV7-3, TRBJ1-1)
CARSQDWGAEAFF

SEQ ID NO: 402833 - protein, 14 aa, Homo sapiens
  CDR3 for alpha chain variable domain of TCR clone 201417 (TRAV13-1, TRAJ9)
CAASALTGGFKTIF

SEQ ID NO: 402834 - protein, 13 aa, Homo sapiens
  CDR3 for beta chain variable domain of TCR clone 201417 (TRBV20-1, TRBJ1-1)
CSAGTVGNTEVFF

SEQ ID NO: 402835 - protein, 14 aa, Homo sapiens
  CDR3 for alpha chain variable domain of TCR clone 201418 (TRAV1-2, TRAJ8)
CAVREDTGPQKLVF

SEQ ID NO: 402836 - protein, 15 aa, Homo sapiens
  CDR3 for beta chain variable domain of TCR clone 201418 (TRBV6-3, TRBJ2-7)
CASSSPGTVFYEQYF

SEQ ID NO: 402837 - protein, 18 aa, Homo sapiens
  CDR3 for alpha chain variable domain of TCR clone 201419 (TRAV13-1, TRAJ52)
CAASKRSAGGTSYGKLTF

SEQ ID NO: 402838 - protein, 13 aa, Homo sapiens
  CDR3 for beta chain variable domain of TCR clone 201419 (TRBV7-2, TRBJ2-5)
CQQHRGELKTQYF

SEQ ID NO: 402839 - protein, 14 aa, Homo sapiens
  CDR3 for alpha chain variable domain of TCR clone 201420 (TRAV8-1, TRAJ5)
CAVRTDAGRRALTF

SEQ ID NO: 402840 - protein, 12 aa, Homo sapiens
  CDR3 for beta chain variable domain of TCR clone 201420 (TRBV11-2, TRBJ2-1)
CASSPGNNKQFF

SEQ ID NO: 402841 - protein, 16 aa, Homo sapiens
  CDR3 for alpha chain variable domain of TCR clone 201421 (TRAV38-1, TRAJ45)
CAFMKGSGGVANGLTF

SEQ ID NO: 402842 - protein, 15 aa, Homo sapiens
  CDR3 for beta chain variable domain of TCR clone 201421 (TRBV20-1, TRBJ2-7)
CSAREGRDSLYEQYF

SEQ ID NO: 402843 - protein, 16 aa, Homo sapiens
  CDR3 for alpha chain variable domain of TCR clone 201422 (TRAV23/DV6, TRAJ9)
CAASIGGNTGGFQTIF

SEQ ID NO: 402844 - protein, 13 aa, Homo sapiens
  CDR3 for beta chain variable domain of TCR clone 201422 (TRBV7-3, TRBJ1-1)
CASSQDWGAEAFF

SEQ ID NO: 402845 - protein, 15 aa, Homo sapiens
  CDR3 for alpha chain variable domain of TCR clone 201423 (TRAV13-1, TRAJ17)
CAASIERAAGNKLTF

SEQ ID NO: 402846 - protein, 15 aa, Homo sapiens
  CDR3 for beta chain variable domain of TCR clone 201423 (TRBV19, TRBJ1-1)
CASTSGQIQNTEAFF

SEQ ID NO: 402847 - protein, 18 aa, Homo sapiens
  CDR3 for alpha chain variable domain of TCR clone 201424 (TRAV12-3, TRAJ52)
CAMSRTNAGGTSYGKLTF

SEQ ID NO: 402848 - protein, 15 aa, Homo sapiens
  CDR3 for beta chain variable domain of TCR clone 201424 (TRBV19, TRBJ1-2)
CASSVGQVLNYGYAF

SEQ ID NO: 402849 - protein, 10 aa, Homo sapiens
  CDR3 for alpha chain variable domain of TCR clone 201425 (TRAV13-1, TRAJ27)
CGPLARQINL

SEQ ID NO: 402850 - protein, 13 aa, Homo sapiens
  CDR3 for beta chain variable domain of TCR clone 201425 (TRBV28, TRBJ1-1)
CASSKQGWTEAFF

SEQ ID NO: 402851 - protein, 15 aa, Homo sapiens
  CDR3 for alpha chain variable domain of TCR clone 201426 (TRAV3, TRAJ20)
CSVRDIRLSYYKLSF

SEQ ID NO: 402852 - protein, 15 aa, Homo sapiens
  CDR3 for beta chain variable domain of TCR clone 201426 (TRBV7-9, TRBJ1-6)
CASSSPGRGNSPLHF

SEQ ID NO: 402853 - protein, 17 aa, Homo sapiens
  CDR3 for alpha chain variable domain of TCR clone 201427 (TRAV3, TRAJ7)
CAVRDMSPLEGTTDSLL

SEQ ID NO: 402854 - protein, 16 aa, Homo sapiens
  CDR3 for beta chain variable domain of TCR clone 201427 (TRBV12-5, TRBJ2-5)
CASGPRTSGNQETQYF

SEQ ID NO: 402855 - protein, 17 aa, Homo sapiens
  CDR3 for alpha chain variable domain of TCR clone 201428 (TRAV29/DV5, TRAJ45)
CAADGPFSGGGADGLTF

SEQ ID NO: 402856 - protein, 15 aa, Homo sapiens
  CDR3 for beta chain variable domain of TCR clone 201428 (TRBV5-1, TRBJ2-7)
CASSLNGGPAREQYF

SEQ ID NO: 402857 - protein, 12 aa, Homo sapiens
  CDR3 for alpha chain variable domain of TCR clone 201429 (TRAV12-3, TRAJ17)
CSMTLTGNKLTF

SEQ ID NO: 402858 - protein, 15 aa, Homo sapiens
  CDR3 for beta chain variable domain of TCR clone 201429 (TRBV20-1, TRBJ2-7)
CSARDRVSGMDEQYL

SEQ ID NO: 402859 - protein, 14 aa, Homo sapiens
  CDR3 for alpha chain variable domain of TCR clone 201430 (TRAV1-2, TRAJ8)
CAVREDTGFQKLVF

SEQ ID NO: 402860 - protein, 16 aa, Homo sapiens
  CDR3 for beta chain variable domain of TCR clone 201430 (TRBV4-1, TRBJ2-3)
CASSRSTGGAEDTQYF

SEQ ID NO: 402861 - protein, 12 aa, Homo sapiens
  CDR3 for alpha chain variable domain of TCR clone 201431 (TRAV26-1, TRAJ36)
CIVRVRADNLSF

SEQ ID NO: 402862 - protein, 15 aa, Homo sapiens
  CDR3 for beta chain variable domain of TCR clone 201431 (TRBV6-3, TRBJ2-7)
CASSSPGTVFYEQYF

SEQ ID NO: 402863 - protein, 16 aa, Homo sapiens
  CDR3 for alpha chain variable domain of TCR clone 201432 (TRAV8-3, TRAJ44)
CAVGASNTGIASRLTF

SEQ ID NO: 402864 - protein, 15 aa, Homo sapiens
  CDR3 for beta chain variable domain of TCR clone 201432 (TRBV27, TRBJ1-5)
CASTFNRGSNQPQHF

SEQ ID NO: 402865 - protein, 17 aa, Homo sapiens
  CDR3 for alpha chain variable domain of TCR clone 201433 (TRAV3, TRAJ12)
CAVRDGGRRDSSYKLIF

SEQ ID NO: 402866 - protein, 14 aa, Homo sapiens
  CDR3 for beta chain variable domain of TCR clone 201433 (TRBV4-2, TRBJ2-1)
CASGLDRAYNEQFF

SEQ ID NO: 402867 - protein, 13 aa, Homo sapiens
  CDR3 for alpha chain variable domain of TCR clone 201434 (TRAV27, TRAJ41)
CAGEGKSGCALNF

SEQ ID NO: 402868 - protein, 14 aa, Homo sapiens
  CDR3 for beta chain variable domain of TCR clone 201434 (TRBV7-2, TRBJ1-1)
CASSFLTGTTEAFF

SEQ ID NO: 402869 - protein, 14 aa, Homo sapiens
  CDR3 for alpha chain variable domain of TCR clone 201435 (TRAV17, TRAJ24)
CATLTTDSWGKFQF

SEQ ID NO: 402870 - protein, 16 aa, Homo sapiens
  CDR3 for beta chain variable domain of TCR clone 201435 (TRBV4-2, TRBJ2-7)
CASSPDGGSLRGEQYF

SEQ ID NO: 402871 - protein, 14 aa, Homo sapiens
  CDR3 for alpha chain variable domain of TCR clone 201436 (TRAV21, TRAJ38)
CAVMGAGNNRKLIC

SEQ ID NO: 402872 - protein, 13 aa, Homo sapiens
  CDR3 for beta chain variable domain of TCR clone 201436 (TRBV7-3, TRBJ2-5)
CASSIGFFETQYF

SEQ ID NO: 402873 - protein, 15 aa, Homo sapiens
  CDR3 for alpha chain variable domain of TCR clone 201437 (TRAV27, TRAJ38)
CAARRNAGNNRKLVW

SEQ ID NO: 402874 - protein, 17 aa, Homo sapiens
  CDR3 for beta chain variable domain of TCR clone 201437 (TRBV7-3, TRBJ2-3)
CASSLMKRMRGADTQYF

SEQ ID NO: 402875 - protein, 18 aa, Homo sapiens
  CDR3 for alpha chain variable domain of TCR clone 201438 (TRAV26-1, TRAJ23)
CIVRVGLEVWNQGGKLIF

SEQ ID NO: 402876 - protein, 16 aa, Homo sapiens
  CDR3 for beta chain variable domain of TCR clone 201438 (TRBV12-4, TRBJ2-5)
CDSSCFVRGRQETQYF

SEQ ID NO: 402877 - protein, 13 aa, Homo sapiens
  CDR3 for alpha chain variable domain of TCR clone 201439 (TRAV8-3, TRAJ41)
CAVGADSGYALNF

SEQ ID NO: 402878 - protein, 12 aa, Homo sapiens
  CDR3 for beta chain variable domain of TCR clone 201439 (TRBV2, TRBJ2-4)
CASQGDSGIQYF

SEQ ID NO: 402879 - protein, 15 aa, Homo sapiens
  CDR3 for alpha chain variable domain of TCR clone 201440 (TRAV12-2, TRAJ53)
CAVNGGGGSNDKLTF

SEQ ID NO: 402880 - protein, 17 aa, Homo sapiens
  CDR3 for beta chain variable domain of TCR clone 201440 (TRBV7-3, TRBJ2-3)
RASSLMKRMRGADTQYF

SEQ ID NO: 402881 - protein, 13 aa, Homo sapiens
  CDR3 for alpha chain variable domain of TCR clone 201441 (TRAV4, TRAJ31)
CLVYRNNNARLMF

SEQ ID NO: 402882 - protein, 15 aa, Homo sapiens
  CDR3 for beta chain variable domain of TCR clone 201441 (TRBV7-2, TRBJ1-2)
CASSLVSGGDYGYTF

SEQ ID NO: 402883 - protein, 15 aa, Homo sapiens
  CDR3 for alpha chain variable domain of TCR clone 201442 (TRAV8-3, TRAJ45)
CALSYSGGVADGLTF

SEQ ID NO: 402884 - protein, 13 aa, Homo sapiens
  CDR3 for beta chain variable domain of TCR clone 201442 (TRBV10-3, TRBJ2-7)
CASKLAVNYEQYF

SEQ ID NO: 402885 - protein, 13 aa, Homo sapiens
  CDR3 for alpha chain variable domain of TCR clone 201443 (TRAV13-1, TRAJ9)
CAARGAGGFKTIF

SEQ ID NO: 402886 - protein, 12 aa, Homo sapiens
  CDR3 for beta chain variable domain of TCR clone 201443 (TRBV2, TRBJ2-1)
CAYGPPGNEQFF

SEQ ID NO: 402887 - protein, 11 aa, Homo sapiens
  CDR3 for alpha chain variable domain of TCR clone 201444 (TRAV12-2, TRAJ43)
FASPIGNDMRF

SEQ ID NO: 402888 - protein, 12 aa, Homo sapiens
  CDR3 for beta chain variable domain of TCR clone 201444 (TRBV20-1, TRBJ2-7)
CSAGLKMGEQYF

SEQ ID NO: 402889 - protein, 12 aa, Homo sapiens
  CDR3 for alpha chain variable domain of TCR clone 201445 (TRAV13-1, TRAJ21)
CAAKEGFTKFYF

SEQ ID NO: 402890 - protein, 13 aa, Homo sapiens
  CDR3 for beta chain variable domain of TCR clone 201445 (TRBV18, TRBJ1-1)
CASSGSRNTEAFF

SEQ ID NO: 402891 - protein, 13 aa, Homo sapiens
  CDR3 for alpha chain variable domain of TCR clone 201446 (TRAV21, TRAJ27)
CAARPGNAGKSTF

SEQ ID NO: 402892 - protein, 15 aa, Homo sapiens
  CDR3 for beta chain variable domain of TCR clone 201446 (TRBV7-2, TRBJ2-2)
CASRRPGQNTGELFF

SEQ ID NO: 402893 - protein, 15 aa, Homo sapiens
  CDR3 for alpha chain variable domain of TCR clone 201447 (TRAV20, TRAJ28)
CAVQYFWAGSYQLTF

SEQ ID NO: 402894 - protein, 12 aa, Homo sapiens
  CDR3 for beta chain variable domain of TCR clone 201447 (TRBV12-4, TRBJ1-3)
CASRASGNTIYF

SEQ ID NO: 402895 - protein, 11 aa, Homo sapiens
  CDR3 for alpha chain variable domain of TCR clone 201448 (TRAV16, TRAJ29)
WAPSRNTPLVF

SEQ ID NO: 402896 - protein, 15 aa, Homo sapiens
  CDR3 for beta chain variable domain of TCR clone 201448 (TRBV5-7, TRBJ2-7)
CASSPYFEGSYEQYF

SEQ ID NO: 402897 - protein, 12 aa, Homo sapiens
  CDR3 for alpha chain variable domain of TCR clone 201449 (TRAV1-1, TRAJ9)
CAVDTGGFKTIF

SEQ ID NO: 402898 - protein, 16 aa, Homo sapiens
  CDR3 for beta chain variable domain of TCR clone 201449 (TRBV6-1, TRBJ2-1)
CASSARLAGSYNEQFF

SEQ ID NO: 402899 - protein, 14 aa, Homo sapiens
  CDR3 for alpha chain variable domain of TCR clone 201450 (TRAV12-3, TRAJ58)
CAISTETSGSRLTF

SEQ ID NO: 402900 - protein, 12 aa, Homo sapiens
  CDR3 for beta chain variable domain of TCR clone 201450 (TRBV7-8, TRBJ2-7)
CASSLGDREQYF

SEQ ID NO: 402901 - protein, 13 aa, Homo sapiens
  CDR3 for alpha chain variable domain of TCR clone 201451 (TRAV12-2, TRAJ24)
CAVSTDSWGKLQF

SEQ ID NO: 402902 - protein, 12 aa, Homo sapiens
  CDR3 for beta chain variable domain of TCR clone 201451 (TRBV7-6, TRBJ2-7)
CASSFADSEQYF

SEQ ID NO: 402903 - protein, 14 aa, Homo sapiens
  CDR3 for alpha chain variable domain of TCR clone 201452 (TRAV8-3, TRAJ36)
CAVGPITGANNLFF

SEQ ID NO: 402904 - protein, 17 aa, Homo sapiens
  CDR3 for beta chain variable domain of TCR clone 201452 (TRBV11-2, TRBJ2-1)
CASSLYPPGVEYNEQFF

SEQ ID NO: 402905 - protein, 12 aa, Homo sapiens
  CDR3 for alpha chain variable domain of TCR clone 201453 (TRAV30, TRAJ43)
CGTEERGNDMCF

SEQ ID NO: 402906 - protein, 17 aa, Homo sapiens
  CDR3 for beta chain variable domain of TCR clone 201453 (TRBV11-2, TRBJ2-1)
CASSLYPPGVEYNEQFF

SEQ ID NO: 402907 - protein, 17 aa, Homo sapiens
  CDR3 for alpha chain variable domain of TCR clone 201454 (TRAV12-2, TRAJ52)
CAVNPYAGGTSYGKLTF

SEQ ID NO: 402908 - protein, 15 aa, Homo sapiens
  CDR3 for beta chain variable domain of TCR clone 201454 (TRBV20-1, TRBJ2-7)
CSARDRVSGMDEQYF

SEQ ID NO: 402909 - protein, 13 aa, Homo sapiens
  CDR3 for alpha chain variable domain of TCR clone 201455 (TRAV13-1, TRAJ24)
CAASDGSWGKLQV

SEQ ID NO: 402910 - protein, 13 aa, Homo sapiens
  CDR3 for beta chain variable domain of TCR clone 201455 (TRBV4-3, TRBJ2-5)
CASSQGGGETQYF

SEQ ID NO: 402911 - protein, 11 aa, Homo sapiens
  CDR3 for alpha chain variable domain of TCR clone 201456 (TRAV1-2, TRAJ20)
CAVANGYKLSF

SEQ ID NO: 402912 - protein, 18 aa, Homo sapiens
  CDR3 for beta chain variable domain of TCR clone 201456 (TRBV20-1, TRBJ2-6)
CSAETTPTHGSGDNVLTF

SEQ ID NO: 402913 - protein, 15 aa, Homo sapiens
  CDR3 for alpha chain variable domain of TCR clone 201457 (TRAV8-2, TRAJ40)
CVVLGTTSGTYKYIF

SEQ ID NO: 402914 - protein, 15 aa, Homo sapiens
  CDR3 for beta chain variable domain of TCR clone 201457 (TRBV11-2, TRBJ2-2)
CASRGLAANTGELFF

SEQ ID NO: 402915 - protein, 16 aa, Homo sapiens
  CDR3 for alpha chain variable domain of TCR clone 201458 (TRAV38-2/DV8, TRAJ47)
CAYRSAIMEYGYKLVF

SEQ ID NO: 402916 - protein, 14 aa, Homo sapiens
  CDR3 for beta chain variable domain of TCR clone 201458 (TRBV19, TRBJ2-7)
CASSIFAGTYEQYF

SEQ ID NO: 402917 - protein, 13 aa, Homo sapiens
  CDR3 for alpha chain variable domain of TCR clone 201459 (TRAV2, TRAJ40)
CAVVTSGTYKYIF

SEQ ID NO: 402918 - protein, 15 aa, Homo sapiens
  CDR3 for beta chain variable domain of TCR clone 201459 (TRBV11-3, TRBJ2-3)
CASLEDGREGDKQYF

SEQ ID NO: 402919 - protein, 13 aa, Homo sapiens
  CDR3 for alpha chain variable domain of TCR clone 201460 (TRAV12-3, TRAJ35)
CAMAIGFGNVLHC

SEQ ID NO: 402920 - protein, 12 aa, Homo sapiens
  CDR3 for beta chain variable domain of TCR clone 201460 (TRBV5-1, TRBJ2-3)
CASSLAADTQYF

SEQ ID NO: 402921 - protein, 22 aa, Homo sapiens
  CDR3 for alpha chain variable domain of TCR clone 201461 (TRAV8-3, TRAJ32)
CAVEVVLQTSSSLELALCLLSS

SEQ ID NO: 402922 - protein, 13 aa, Homo sapiens
  CDR3 for beta chain variable domain of TCR clone 201461 (TRBV19, TRBJ2-2)
CASRTLGTGELFF

SEQ ID NO: 402923 - protein, 12 aa, Homo sapiens
  CDR3 for alpha chain variable domain of TCR clone 201462 (TRAV13-1, TRAJ21)
CAAKEGFNKFYF

SEQ ID NO: 402924 - protein, 15 aa, Homo sapiens
  CDR3 for beta chain variable domain of TCR clone 201462 (TRBV7-8, TRBJ1-5)
CASSLERRGLEPQHF

SEQ ID NO: 402925 - protein, 12 aa, Homo sapiens
  CDR3 for alpha chain variable domain of TCR clone 201463 (TRAV17, TRAJ57)
CATDGGSEKLVF

SEQ ID NO: 402926 - protein, 16 aa, Homo sapiens
  CDR3 for beta chain variable domain of TCR clone 201463 (TRBV7-9, TRBJ2-1)
CASSDVAGGSYNEQFF

SEQ ID NO: 402927 - protein, 14 aa, Homo sapiens
  CDR3 for alpha chain variable domain of TCR clone 201464 (TRAV13-1, TRAJ20)
CAARPGSNDYKLSF

SEQ ID NO: 402928 - protein, 13 aa, Homo sapiens
  CDR3 for beta chain variable domain of TCR clone 201464 (TRBV20-1, TRBJ1-1)
CSAPPGGHTEALF

SEQ ID NO: 402929 - protein, 14 aa, Homo sapiens
  CDR3 for alpha chain variable domain of TCR clone 201465 (TRAV8-4, TRAJ9)
CAVRVDTGGFKTIF

SEQ ID NO: 402930 - protein, 14 aa, Homo sapiens
  CDR3 for beta chain variable domain of TCR clone 201465 (TRBV7-2, TRBJ2-7)
CASRSQGAAYEQYF

SEQ ID NO: 402931 - protein, 16 aa, Homo sapiens
  CDR3 for alpha chain variable domain of TCR clone 201466 (TRAV13-1, TRAJ22)
CAAKGGRSGSARQLTF

SEQ ID NO: 402932 - protein, 15 aa, Homo sapiens
  CDR3 for beta chain variable domain of TCR clone 201466 (TRBV9, TRBJ1-6)
CASSVAGTGDSPLLF

SEQ ID NO: 402933 - protein, 12 aa, Homo sapiens
  CDR3 for alpha chain variable domain of TCR clone 201467 (TRAV36/DV7, TRAJ37)
CACYGNTGKLIS

SEQ ID NO: 402934 - protein, 13 aa, Homo sapiens
  CDR3 for beta chain variable domain of TCR clone 201467 (TRBV10-3, TRBJ2-7)
CASKRAVNYEQYF

SEQ ID NO: 402935 - protein, 14 aa, Homo sapiens
  CDR3 for alpha chain variable domain of TCR clone 201468 (TRAV26-2, TRAJ21)
CILKGNLTNFTLDL

SEQ ID NO: 402936 - protein, 14 aa, Homo sapiens
  CDR3 for beta chain variable domain of TCR clone 201468 (TRBV12-4, TRBJ1-1)
CASSLGTGGTEAFF

SEQ ID NO: 402937 - protein, 12 aa, Homo sapiens
  CDR3 for alpha chain variable domain of TCR clone 201469 (TRAV1-2, TRAJ26)
CAVRYYGQNFVF

SEQ ID NO: 402938 - protein, 14 aa, Homo sapiens
  CDR3 for beta chain variable domain of TCR clone 201469 (TRBV19, TRBJ2-1)
CASPTFVLSGEQFF

SEQ ID NO: 402939 - protein, 13 aa, Homo sapiens
  CDR3 for alpha chain variable domain of TCR clone 201470 (TRAV12-3, TRAJ33)
CAMSVNSDYQLIW

SEQ ID NO: 402940 - protein, 14 aa, Homo sapiens
  CDR3 for beta chain variable domain of TCR clone 201470 (TRBV4-2, TRBJ2-3)
CASRETRAPGMQYF

SEQ ID NO: 402941 - protein, 14 aa, Homo sapiens
  CDR3 for alpha chain variable domain of TCR clone 201471 (TRAV12-2, TRAJ17)
CAVLFKAAGNKLTF

SEQ ID NO: 402942 - protein, 17 aa, Homo sapiens
  CDR3 for beta chain variable domain of TCR clone 201471 (TRBV20-1, TRBJ2-2)
CSASGSGQGGLTGELLC

SEQ ID NO: 402943 - protein, 13 aa, Homo sapiens
  CDR3 for alpha chain variable domain of TCR clone 201472 (TRAV21, TRAJ37)
CAVGEINTGKLIF

SEQ ID NO: 402944 - protein, 14 aa, Homo sapiens
  CDR3 for beta chain variable domain of TCR clone 201472 (TRBV4-1, TRBJ1-2)
CASSQDGQVRGYTF

SEQ ID NO: 402945 - protein, 12 aa, Homo sapiens
  CDR3 for alpha chain variable domain of TCR clone 201473 (TRAV12-2, TRAJ21)
CAVRYNFNKFYF

SEQ ID NO: 402946 - protein, 14 aa, Homo sapiens
  CDR3 for beta chain variable domain of TCR clone 201473 (TRBV28, TRBJ2-1)
CASSYYTAYNAQFF

SEQ ID NO: 402947 - protein, 14 aa, Homo sapiens
  CDR3 for alpha chain variable domain of TCR clone 201474 (TRAV2, TRAJ37)
CAVDCTSNTGKLIF

SEQ ID NO: 402948 - protein, 16 aa, Homo sapiens
  CDR3 for beta chain variable domain of TCR clone 201474 (TRBV27, TRBJ2-2)
CASSFRGLVRTGELFF

SEQ ID NO: 402949 - protein, 16 aa, Homo sapiens
  CDR3 for alpha chain variable domain of TCR clone 201475 (TRAV30, TRAJ24)
CGTEIVDDDTWGKFQF

SEQ ID NO: 402950 - protein, 19 aa, Homo sapiens
  CDR3 for beta chain variable domain of TCR clone 201475 (TRBV25-1, TRBJ2-2)
CAILVYRVDRGRRTGELFF

SEQ ID NO: 402951 - protein, 17 aa, Homo sapiens
  CDR3 for alpha chain variable domain of TCR clone 201476 (TRAV3, TRAJ6)
CAVRDGPRAGGSSIPTF

SEQ ID NO: 402952 - protein, 15 aa, Homo sapiens
  CDR3 for beta chain variable domain of TCR clone 201476 (TRBV29-1, TRBJ2-5)
CSVEGLAVNQETQYF

SEQ ID NO: 402953 - protein, 15 aa, Homo sapiens
  CDR3 for alpha chain variable domain of TCR clone 201477 (TRAV21, TRAJ24)
CAARSSTDNWGKLQF

SEQ ID NO: 402954 - protein, 11 aa, Homo sapiens
  CDR3 for beta chain variable domain of TCR clone 201477 (TRBV11-2, TRBJ2-2)
CASSLPGELFF

SEQ ID NO: 402955 - protein, 15 aa, Homo sapiens
  CDR3 for alpha chain variable domain of TCR clone 201478 (TRAV26-1, TRAJ17)
CIVRVVKAAGNKPTF

SEQ ID NO: 402956 - protein, 16 aa, Homo sapiens
  CDR3 for beta chain variable domain of TCR clone 201478 (TRBV7-9, TRBJ2-1)
CVSSLVSGPSYNEQFF

SEQ ID NO: 402957 - protein, 16 aa, Homo sapiens
  CDR3 for alpha chain variable domain of TCR clone 201479 (TRAV13-1, TRAJ18)
CAASRMRGSTLGRLYF

SEQ ID NO: 402958 - protein, 16 aa, Homo sapiens
  CDR3 for beta chain variable domain of TCR clone 201479 (TRBV27, TRBJ1-1)
CASSSRGRTGYTEAFF

SEQ ID NO: 402959 - protein, 22 aa, Homo sapiens
  CDR3 for alpha chain variable domain of TCR clone 201480 (TRAV4, )
CLVGPLNYDIQNPDPAVYQLRD

SEQ ID NO: 402960 - protein, 17 aa, Homo sapiens
  CDR3 for beta chain variable domain of TCR clone 201480 (TRBV24-1, TRBJ2-1)
CATSDVSTSGTYNEQFF

SEQ ID NO: 402961 - protein, 14 aa, Homo sapiens
  CDR3 for alpha chain variable domain of TCR clone 201481 (TRAV16, TRAJ33)
CALSAMDSNYQLIW

SEQ ID NO: 402962 - protein, 15 aa, Homo sapiens
  CDR3 for beta chain variable domain of TCR clone 201481 (TRBV28, TRBJ2-7)
CASSLEAYPIYEQYL

SEQ ID NO: 402963 - protein, 15 aa, Homo sapiens
  CDR3 for alpha chain variable domain of TCR clone 201482 (TRAV12-1, TRAJ10)
CVVNKLTGGGNKLTF

SEQ ID NO: 402964 - protein, 17 aa, Homo sapiens
  CDR3 for beta chain variable domain of TCR clone 201482 (TRBV5-1, TRBJ1-6)
CASSPSLQGSDNSPLHC

SEQ ID NO: 402965 - protein, 15 aa, Homo sapiens
  CDR3 for alpha chain variable domain of TCR clone 201483 (TRAV13-1, TRAJ8)
CAASIPNTGFQKLVF

SEQ ID NO: 402966 - protein, 13 aa, Homo sapiens
  CDR3 for beta chain variable domain of TCR clone 201483 (TRBV5-4, TRBJ1-1)
CAISFQVNTEAFF

SEQ ID NO: 402967 - protein, 18 aa, Homo sapiens
  CDR3 for alpha chain variable domain of TCR clone 201484 (TRAV26-1, TRAJ56)
CIVRVASRVTGANSKLTF

SEQ ID NO: 402968 - protein, 15 aa, Homo sapiens
  CDR3 for beta chain variable domain of TCR clone 201484 (TRBV7-9, TRBJ2-5)
CASSDTGGGRETQYF

SEQ ID NO: 402969 - protein, 15 aa, Homo sapiens
  CDR3 for alpha chain variable domain of TCR clone 201485 (TRAV1-2, TRAJ30)
CAVRPHGNRDDKIIF

SEQ ID NO: 402970 - protein, 13 aa, Homo sapiens
  CDR3 for beta chain variable domain of TCR clone 201485 (TRBV4-1, TRBJ2-7)
CVSSQGQAYEQYF

SEQ ID NO: 402971 - protein, 18 aa, Homo sapiens
  CDR3 for alpha chain variable domain of TCR clone 201486 (TRAV2, TRAJ32)
CCLLLCLHYGGATNKLIF

SEQ ID NO: 402972 - protein, 16 aa, Homo sapiens
  CDR3 for beta chain variable domain of TCR clone 201486 (TRBV7-9, TRBJ2-7)
CASSCPDREGGYEQYF

SEQ ID NO: 402973 - protein, 11 aa, Homo sapiens
  CDR3 for alpha chain variable domain of TCR clone 201487 (TRAV2, TRAJ13)
CASGGYQKVTF

SEQ ID NO: 402974 - protein, 14 aa, Homo sapiens
  CDR3 for beta chain variable domain of TCR clone 201487 (TRBV19, TRBJ2-1)
FASSKDRGQDEQFF

SEQ ID NO: 402975 - protein, 14 aa, Homo sapiens
  CDR3 for alpha chain variable domain of TCR clone 201488 (TRAV8-1, TRAJ24)
CAVNATDSWGKLQF

SEQ ID NO: 402976 - protein, 16 aa, Homo sapiens
  CDR3 for beta chain variable domain of TCR clone 201488 (TRBV4-3, TRBJ2-1)
CASSPALDRGVNEQFF

SEQ ID NO: 402977 - protein, 14 aa, Homo sapiens
  CDR3 for alpha chain variable domain of TCR clone 201489 (TRAV26-1, TRAJ21)
CIVRPPYNFNKFYF

SEQ ID NO: 402978 - protein, 14 aa, Homo sapiens
  CDR3 for beta chain variable domain of TCR clone 201489 (TRBV7-7, TRBJ2-2)
CATRQDSDTGELFF

SEQ ID NO: 402979 - protein, 13 aa, Homo sapiens
  CDR3 for alpha chain variable domain of TCR clone 201490 (TRAV26-1, TRAJ48)
CIVRVVGAEKLTF

SEQ ID NO: 402980 - protein, 13 aa, Homo sapiens
  CDR3 for beta chain variable domain of TCR clone 201490 (TRBV7-9, TRBJ1-2)
CASSLKQNYGYTF

SEQ ID NO: 402981 - protein, 16 aa, Homo sapiens
  CDR3 for alpha chain variable domain of TCR clone 201491 (TRAV8-3, TRAJ44)
CAVGTLMTGTASKLTF

SEQ ID NO: 402982 - protein, 15 aa, Homo sapiens
  CDR3 for beta chain variable domain of TCR clone 201491 (TRBV5-1, TRBJ2-7)
CASSLNGGPAREQYF

SEQ ID NO: 402983 - protein, 23 aa, Homo sapiens
  CDR3 for alpha chain variable domain of TCR clone 201492 (TRAV26-1, )
CIADNAGNNYIQNPDPAVYQLRD

SEQ ID NO: 402984 - protein, 13 aa, Homo sapiens
  CDR3 for beta chain variable domain of TCR clone 201492 (TRBV5-1, TRBJ1-1)
CASSADWDTEAFF

SEQ ID NO: 402985 - protein, 12 aa, Homo sapiens
  CDR3 for alpha chain variable domain of TCR clone 201493 (TRAV13-2, TRAJ23)
CAERHRGGKLIF

SEQ ID NO: 402986 - protein, 15 aa, Homo sapiens
  CDR3 for beta chain variable domain of TCR clone 201493 (TRBV7-3, TRBJ2-6)
CASSLGGSGANVLTF

SEQ ID NO: 402987 - protein, 10 aa, Homo sapiens
  CDR3 for alpha chain variable domain of TCR clone 201494 (TRAV1-2, TRAJ31)
CAFFDARLMF

SEQ ID NO: 402988 - protein, 14 aa, Homo sapiens
  CDR3 for beta chain variable domain of TCR clone 201494 (TRBV4-3, TRBJ2-2)
CASSQGHVTGELFF

SEQ ID NO: 402989 - protein, 14 aa, Homo sapiens
  CDR3 for alpha chain variable domain of TCR clone 201495 (TRAV8-3, TRAJ9)
CAVVYDTGGFKTIF

SEQ ID NO: 402990 - protein, 14 aa, Homo sapiens
  CDR3 for beta chain variable domain of TCR clone 201495 (TRBV7-3, TRBJ2-2)
CASSSGRYTGELFF

SEQ ID NO: 402991 - protein, 13 aa, Homo sapiens
  CDR3 for alpha chain variable domain of TCR clone 201496 (TRAV23/DV6, TRAJ12)
CAPRVDSSYKLIF

SEQ ID NO: 402992 - protein, 14 aa, Homo sapiens
  CDR3 for beta chain variable domain of TCR clone 201496 (TRBV27, TRBJ2-2)
CASRPGVNTGELFF

SEQ ID NO: 402993 - protein, 13 aa, Homo sapiens
  CDR3 for alpha chain variable domain of TCR clone 201497 (TRAV20, TRAJ49)
CAVQARTGNEFYF

SEQ ID NO: 402994 - protein, 14 aa, Homo sapiens
  CDR3 for beta chain variable domain of TCR clone 201497 (TRBV5-1, TRBJ1-1)
CASSLQGASTEAFF

SEQ ID NO: 402995 - protein, 14 aa, Homo sapiens
  CDR3 for alpha chain variable domain of TCR clone 201498 (TRAV35, TRAJ33)
CAGSSQDSNYQLIW

SEQ ID NO: 402996 - protein, 17 aa, Homo sapiens
  CDR3 for beta chain variable domain of TCR clone 201498 (TRBV4-2, TRBJ2-5)
CASSQDAAGGPVETQYF

SEQ ID NO: 402997 - protein, 11 aa, Homo sapiens
  CDR3 for alpha chain variable domain of TCR clone 201499 (TRAV3, TRAJ17)
CAEAAGNKLTF

SEQ ID NO: 402998 - protein, 12 aa, Homo sapiens
  CDR3 for beta chain variable domain of TCR clone 201499 (TRBV11-3, TRBJ1-1)
CASSLRDSEALF

SEQ ID NO: 402999 - protein, 14 aa, Homo sapiens
  CDR3 for alpha chain variable domain of TCR clone 201500 (TRAV1-2, TRAJ16)
CAVNRFSDGQKLPF

SEQ ID NO: 403000 - protein, 15 aa, Homo sapiens
  CDR3 for beta chain variable domain of TCR clone 201500 (TRBV6-1, TRBJ2-3)
CASSERGGITDTQYF

SEQ ID NO: 403001 - protein, 16 aa, Homo sapiens
  CDR3 for alpha chain variable domain of TCR clone 201501 (TRAV30, TRAJ24)
CVTEIVDADSWGKFQF

SEQ ID NO: 403002 - protein, 17 aa, Homo sapiens
  CDR3 for beta chain variable domain of TCR clone 201501 (TRBV20-1, TRBJ2-1)
CSAPPRLAGTRYNEQFF

SEQ ID NO: 403003 - protein, 15 aa, Homo sapiens
  CDR3 for alpha chain variable domain of TCR clone 201502 (TRAV8-6, TRAJ10)
CAVSDQAVGGNKLTF

SEQ ID NO: 403004 - protein, 15 aa, Homo sapiens
  CDR3 for beta chain variable domain of TCR clone 201502 (TRBV3-1, TRBJ2-5)
FASSANLGGPETQYF

SEQ ID NO: 403005 - protein, 16 aa, Homo sapiens
  CDR3 for alpha chain variable domain of TCR clone 201503 (TRAV1-2, TRAJ10)
CAVRGVLTGGGNKLTF

SEQ ID NO: 403006 - protein, 15 aa, Homo sapiens
  CDR3 for beta chain variable domain of TCR clone 201503 (TRBV7-9, TRBJ2-1)
CASSLLIGSYNEQFF

SEQ ID NO: 403007 - protein, 18 aa, Homo sapiens
  CDR3 for alpha chain variable domain of TCR clone 201504 (TRAV26-2, TRAJ32)
CILRAPLNYGGATNKLIF

SEQ ID NO: 403008 - protein, 13 aa, Homo sapiens
  CDR3 for beta chain variable domain of TCR clone 201504 (TRBV7-3, TRBJ2-1)
CANSLWPYNEQFF

SEQ ID NO: 403009 - protein, 12 aa, Homo sapiens
  CDR3 for alpha chain variable domain of TCR clone 201505 (TRAV12-3, TRAJ17)
CAMTLTGNKLTF

SEQ ID NO: 403010 - protein, 15 aa, Homo sapiens
  CDR3 for beta chain variable domain of TCR clone 201505 (TRBV20-1, TRBJ2-7)
CSVRDWVSGMDEQYF

SEQ ID NO: 403011 - protein, 12 aa, Homo sapiens
  CDR3 for alpha chain variable domain of TCR clone 201506 (TRAV12-1, TRAJ40)
CVVTSGTYKYIF

SEQ ID NO: 403012 - protein, 17 aa, Homo sapiens
  CDR3 for beta chain variable domain of TCR clone 201506 (TRBV11-2, TRBJ2-1)
CASSLYPPGVEYNEQFF

SEQ ID NO: 403013 - protein, 14 aa, Homo sapiens
  CDR3 for alpha chain variable domain of TCR clone 201507 (TRAV12-3, TRAJ10)
SHLPLTGGGNKLTF

SEQ ID NO: 403014 - protein, 15 aa, Homo sapiens
  CDR3 for beta chain variable domain of TCR clone 201507 (TRBV25-1, TRBJ1-4)
CASSPGDSTNEKLFF

SEQ ID NO: 403015 - protein, 13 aa, Homo sapiens
  CDR3 for alpha chain variable domain of TCR clone 201508 (TRAV2, TRAJ40)
CAVVTSGTYKYIF

SEQ ID NO: 403016 - protein, 16 aa, Homo sapiens
  CDR3 for beta chain variable domain of TCR clone 201508 (TRBV28, TRBJ2-7)
CASSPWVATGDLSQYF

SEQ ID NO: 403017 - protein, 14 aa, Homo sapiens
  CDR3 for alpha chain variable domain of TCR clone 201509 (TRAV12-3, TRAJ10)
SHLPLTGGGNKLTF

SEQ ID NO: 403018 - protein, 15 aa, Homo sapiens
  CDR3 for beta chain variable domain of TCR clone 201509 (TRBV11-2, TRBJ1-3)
CASSLDGTVGNTLYF

SEQ ID NO: 403019 - protein, 13 aa, Homo sapiens
  CDR3 for alpha chain variable domain of TCR clone 201510 (TRAV2, TRAJ15)
CAVASQAGTVLIF

SEQ ID NO: 403020 - protein, 15 aa, Homo sapiens
  CDR3 for beta chain variable domain of TCR clone 201510 (TRBV27, TRBJ2-1)
CASSNGGGSSNEQFF

SEQ ID NO: 403021 - protein, 12 aa, Homo sapiens
  CDR3 for alpha chain variable domain of TCR clone 201511 (TRAV25, TRAJ11)
CAGASGYSTLTF

SEQ ID NO: 403022 - protein, 14 aa, Homo sapiens
  CDR3 for beta chain variable domain of TCR clone 201511 (TRBV5-8, TRBJ2-5)
CASSFTQGQETQYF

SEQ ID NO: 403023 - protein, 17 aa, Homo sapiens
  CDR3 for alpha chain variable domain of TCR clone 201512 (TRAV21, TRAJ41)
CAVREFRVCTQLRQRHL

SEQ ID NO: 403024 - protein, 15 aa, Homo sapiens
  CDR3 for beta chain variable domain of TCR clone 201512 (TRBV18, TRBJ1-5)
CASSPQARSNQPQHF

SEQ ID NO: 403025 - protein, 11 aa, Homo sapiens
  CDR3 for alpha chain variable domain of TCR clone 201513 (TRAV17, TRAJ9)
CATTGGFKTIF

SEQ ID NO: 403026 - protein, 14 aa, Homo sapiens
  CDR3 for beta chain variable domain of TCR clone 201513 (TRBV7-9, TRBJ2-2)
CASSGLADPGELFF

SEQ ID NO: 403027 - protein, 14 aa, Homo sapiens
  CDR3 for alpha chain variable domain of TCR clone 201514 (TRAV1-2, TRAJ8)
CAVREDTGFHKLVF

SEQ ID NO: 403028 - protein, 12 aa, Homo sapiens
  CDR3 for beta chain variable domain of TCR clone 201514 (TRBV11-2, TRBJ2-2)
CASSLGGGELFF

SEQ ID NO: 403029 - protein, 12 aa, Homo sapiens
  CDR3 for alpha chain variable domain of TCR clone 201515 (TRAV1-2, TRAJ33)
CAALDSNYQFIW

SEQ ID NO: 403030 - protein, 14 aa, Homo sapiens
  CDR3 for beta chain variable domain of TCR clone 201515 (TRBV20-1, TRBJ2-1)
CSAQIGGSANEQFF

SEQ ID NO: 403031 - protein, 13 aa, Homo sapiens
  CDR3 for alpha chain variable domain of TCR clone 201516 (TRAV21, TRAJ15)
CAVRNQAGTALIF

SEQ ID NO: 403032 - protein, 16 aa, Homo sapiens
  CDR3 for beta chain variable domain of TCR clone 201516 (TRBV20-1, TRBJ2-5)
CSPGGTSGGFMETQYF

SEQ ID NO: 403033 - protein, 13 aa, Homo sapiens
  CDR3 for alpha chain variable domain of TCR clone 201517 (TRAV8-6, TRAJ37)
CAVSAGNTGKLIF

SEQ ID NO: 403034 - protein, 13 aa, Homo sapiens
  CDR3 for beta chain variable domain of TCR clone 201517 (TRBV7-6, TRBJ2-7)
CASSLDHTHEQYF

SEQ ID NO: 403035 - protein, 12 aa, Homo sapiens
  CDR3 for alpha chain variable domain of TCR clone 201518 (TRAV22, TRAJ29)
CAPPSGNTPLVF

SEQ ID NO: 403036 - protein, 16 aa, Homo sapiens
  CDR3 for beta chain variable domain of TCR clone 201518 (TRBV7-6, TRBJ2-1)
CASSAPGPSSYNEQFF

SEQ ID NO: 403037 - protein, 11 aa, Homo sapiens
  CDR3 for alpha chain variable domain of TCR clone 201519 (TRAV2, TRAJ33)
CAVESNYQLIW

SEQ ID NO: 403038 - protein, 15 aa, Homo sapiens
  CDR3 for beta chain variable domain of TCR clone 201519 (TRBV18, TRBJ2-3)
CASSPLAGETDTQYF

SEQ ID NO: 403039 - protein, 11 aa, Homo sapiens
  CDR3 for alpha chain variable domain of TCR clone 201520 (TRAV3, TRAJ21)
CAVGNSNKFYF

SEQ ID NO: 403040 - protein, 16 aa, Homo sapiens
  CDR3 for beta chain variable domain of TCR clone 201520 (TRBV19, TRBJ2-1)
CASSKAGPSSYNEHFF

SEQ ID NO: 403041 - protein, 12 aa, Homo sapiens
  CDR3 for alpha chain variable domain of TCR clone 201521 (TRAV1-1, TRAJ30)
CAVRGRDDKIIF

SEQ ID NO: 403042 - protein, 17 aa, Homo sapiens
  CDR3 for beta chain variable domain of TCR clone 201521 (TRBV13, TRBJ2-3)
CASSLSRVAGGRNTQYF

SEQ ID NO: 403043 - protein, 13 aa, Homo sapiens
  CDR3 for alpha chain variable domain of TCR clone 201522 (TRAV25, TRAJ35)
CAGGGGFGNVLHW

SEQ ID NO: 403044 - protein, 14 aa, Homo sapiens
  CDR3 for beta chain variable domain of TCR clone 201522 (TRBV6-1, TRBJ2-1)
CASAGGAIKNEQFF

SEQ ID NO: 403045 - protein, 11 aa, Homo sapiens
  CDR3 for alpha chain variable domain of TCR clone 201523 (TRAV12-3, TRAJ43)
CAMTVSNDMRF

SEQ ID NO: 403046 - protein, 13 aa, Homo sapiens
  CDR3 for beta chain variable domain of TCR clone 201523 (TRBV20-1, TRBJ1-1)
CSAPLGGGTEAFF

SEQ ID NO: 403047 - protein, 14 aa, Homo sapiens
  CDR3 for alpha chain variable domain of TCR clone 201524 (TRAV1-2, TRAJ16)
CAVNRFSDGQKLLF

SEQ ID NO: 403048 - protein, 17 aa, Homo sapiens
  CDR3 for beta chain variable domain of TCR clone 201524 (TRBV13, TRBJ2-3)
WASRLSRVAGGRNTQYF

SEQ ID NO: 403049 - protein, 16 aa, Homo sapiens
  CDR3 for alpha chain variable domain of TCR clone 201525 (TRAV2, TRAJ36)
CAVEDRGNWGKQPLIW

SEQ ID NO: 403050 - protein, 14 aa, Homo sapiens
  CDR3 for beta chain variable domain of TCR clone 201525 (TRBV7-9, TRBJ2-5)
CASSLDTAQETQYF

SEQ ID NO: 403051 - protein, 16 aa, Homo sapiens
  CDR3 for alpha chain variable domain of TCR clone 201526 (TRAV30, TRAJ24)
CGTEIVDADSWGKFQF

SEQ ID NO: 403052 - protein, 15 aa, Homo sapiens
  CDR3 for beta chain variable domain of TCR clone 201526 (TRBV7-9, TRBJ1-4)
CASSARIGGNKKLFF

SEQ ID NO: 403053 - protein, 19 aa, Homo sapiens
  CDR3 for alpha chain variable domain of TCR clone 201527 (TRAV26-1, TRAJ28)
CIVRVAHAYSGAGSYQPTF

SEQ ID NO: 403054 - protein, 15 aa, Homo sapiens
  CDR3 for beta chain variable domain of TCR clone 201527 (TRBV5-1, TRBJ1-3)
CASGSKTGAGNTIYF

SEQ ID NO: 403055 - protein, 12 aa, Homo sapiens
  CDR3 for alpha chain variable domain of TCR clone 201528 (TRAV20, TRAJ39)
CSVGNAGNMLTF

SEQ ID NO: 403056 - protein, 16 aa, Homo sapiens
  CDR3 for beta chain variable domain of TCR clone 201528 (TRBV15, TRBJ1-2)
CATSRGARTGGGGYTF

SEQ ID NO: 403057 - protein, 15 aa, Homo sapiens
  CDR3 for alpha chain variable domain of TCR clone 201529 (TRAV8-3, TRAJ6)
CAVGPLGGGSYIPTF

SEQ ID NO: 403058 - protein, 13 aa, Homo sapiens
  CDR3 for beta chain variable domain of TCR clone 201529 (TRBV19, TRBJ2-2)
CSSTGQGAGELFF

SEQ ID NO: 403059 - protein, 13 aa, Homo sapiens
  CDR3 for alpha chain variable domain of TCR clone 201530 (TRAV8-3, TRAJ48)
CSVVRFGNEKLTF

SEQ ID NO: 403060 - protein, 16 aa, Homo sapiens
  CDR3 for beta chain variable domain of TCR clone 201530 (TRBV20-1, TRBJ2-5)
CSARDFASGIQETQYF

SEQ ID NO: 403061 - protein, 14 aa, Homo sapiens
  CDR3 for alpha chain variable domain of TCR clone 201531 (TRAV26-1, TRAJ40)
CIVRLLSGTYKYIF

SEQ ID NO: 403062 - protein, 13 aa, Homo sapiens
  CDR3 for beta chain variable domain of TCR clone 201531 (TRBV7-9, TRBJ1-2)
CASSLKQNYGYTF

SEQ ID NO: 403063 - protein, 14 aa, Homo sapiens
  CDR3 for alpha chain variable domain of TCR clone 201532 (TRAV29/DV5, TRAJ36)
CAARRKTGANNPFF

SEQ ID NO: 403064 - protein, 12 aa, Homo sapiens
  CDR3 for beta chain variable domain of TCR clone 201532 (TRBV12-4, TRBJ2-7)
CASSLGGYEQYF

SEQ ID NO: 403065 - protein, 13 aa, Homo sapiens
  CDR3 for alpha chain variable domain of TCR clone 201533 (TRAV4, TRAJ27)
CLVGDPGAGKSPF

SEQ ID NO: 403066 - protein, 13 aa, Homo sapiens
  CDR3 for beta chain variable domain of TCR clone 201533 (TRBV7-3, TRBJ1-2)
CASSLKRGYGYTF

SEQ ID NO: 403067 - protein, 23 aa, Homo sapiens
  CDR3 for alpha chain variable domain of TCR clone 201534 (TRAV1-1, TRAJ29)
LLQELQMKDSASYFLGGNTPLVF

SEQ ID NO: 403068 - protein, 12 aa, Homo sapiens
  CDR3 for beta chain variable domain of TCR clone 201534 (TRBV29-1, TRBJ2-3)
CSVTGGADTQYF

SEQ ID NO: 403069 - protein, 14 aa, Homo sapiens
  CDR3 for alpha chain variable domain of TCR clone 201535 (TRAV12-2, TRAJ53)
CRERGGGSNYNLTF

SEQ ID NO: 403070 - protein, 12 aa, Homo sapiens
  CDR3 for beta chain variable domain of TCR clone 201535 (TRBV27, TRBJ1-6)
CASKLFQGPLHF

SEQ ID NO: 403071 - protein, 16 aa, Homo sapiens
  CDR3 for alpha chain variable domain of TCR clone 201536 (TRAV3, TRAJ3)
GAVRDRAKSSASKIIF

SEQ ID NO: 403072 - protein, 16 aa, Homo sapiens
  CDR3 for beta chain variable domain of TCR clone 201536 (TRBV20-1, TRBJ2-4)
CSATSLAELAKNIQYF

SEQ ID NO: 403073 - protein, 15 aa, Homo sapiens
  CDR3 for alpha chain variable domain of TCR clone 201537 (TRAV27, TRAJ38)
CAARRNAGNNRKLIW

SEQ ID NO: 403074 - protein, 15 aa, Homo sapiens
  CDR3 for beta chain variable domain of TCR clone 201537 (TRBV2, TRBJ2-1)
CDSSELAGSYNEQFF

SEQ ID NO: 403075 - protein, 14 aa, Homo sapiens
  CDR3 for alpha chain variable domain of TCR clone 201538 (TRAV16, TRAJ33)
CALSAMDSSYQLIW

SEQ ID NO: 403076 - protein, 17 aa, Homo sapiens
  CDR3 for beta chain variable domain of TCR clone 201538 (TRBV25-1, TRBJ2-7)
CASSDARVVFSSYEQYF

SEQ ID NO: 403077 - protein, 15 aa, Homo sapiens
  CDR3 for alpha chain variable domain of TCR clone 201539 (TRAV26-2, TRAJ28)
CILVESGAGSYQLTF

SEQ ID NO: 403078 - protein, 15 aa, Homo sapiens
  CDR3 for beta chain variable domain of TCR clone 201539 (TRBV4-1, TRBJ1-4)
CASSDTGGTNEKLFF

SEQ ID NO: 403079 - protein, 17 aa, Homo sapiens
  CDR3 for alpha chain variable domain of TCR clone 201540 (TRAV26-1, TRAJ58)
CIVRVGAEETSGSRLTF

SEQ ID NO: 403080 - protein, 13 aa, Homo sapiens
  CDR3 for beta chain variable domain of TCR clone 201540 (TRBV12-5, TRBJ1-2)
CASGIRTGNGYTF

SEQ ID NO: 403081 - protein, 14 aa, Homo sapiens
  CDR3 for alpha chain variable domain of TCR clone 201541 (TRAV1-2, TRAJ16)
CAVNRFSDGQKLLF

SEQ ID NO: 403082 - protein, 16 aa, Homo sapiens
  CDR3 for beta chain variable domain of TCR clone 201541 (TRBV29-1, TRBJ2-7)
RSVEDAEDGTAYEQYF

SEQ ID NO: 403083 - protein, 15 aa, Homo sapiens
  CDR3 for alpha chain variable domain of TCR clone 201542 (TRAV12-2, TRAJ9)
CAVNNKRTGGFKTIF

SEQ ID NO: 403084 - protein, 14 aa, Homo sapiens
  CDR3 for beta chain variable domain of TCR clone 201542 (TRBV4-1, TRBJ1-4)
CASSQERKNEKLFF

SEQ ID NO: 403085 - protein, 19 aa, Homo sapiens
  CDR3 for alpha chain variable domain of TCR clone 201543 (TRAV1-2, TRAJ26)
CLLPLGCERPDNYGQNFVF

SEQ ID NO: 403086 - protein, 17 aa, Homo sapiens
  CDR3 for beta chain variable domain of TCR clone 201543 (TRBV28, TRBJ2-5)
CASSRQGGLAGAETQYF

SEQ ID NO: 403087 - protein, 19 aa, Homo sapiens
  CDR3 for alpha chain variable domain of TCR clone 201544 (TRAV1-1, TRAJ37)
CLLLLRCERSGSNTGKLIF

SEQ ID NO: 403088 - protein, 14 aa, Homo sapiens
  CDR3 for beta chain variable domain of TCR clone 201544 (TRBV29-1, TRBJ2-2)
CIALGGVGAGELFF

SEQ ID NO: 403089 - protein, 14 aa, Homo sapiens
  CDR3 for alpha chain variable domain of TCR clone 201545 (TRAV13-1, TRAJ26)
CVASSAHYGQNFVF

SEQ ID NO: 403090 - protein, 17 aa, Homo sapiens
  CDR3 for beta chain variable domain of TCR clone 201545 (TRBV25-1, TRBJ2-5)
CASSRRGGRGGQETQYF

SEQ ID NO: 403091 - protein, 14 aa, Homo sapiens
  CDR3 for alpha chain variable domain of TCR clone 201546 (TRAV1-2, TRAJ16)
CAVNRFSDGQKLFF

SEQ ID NO: 403092 - protein, 14 aa, Homo sapiens
  CDR3 for beta chain variable domain of TCR clone 201546 (TRBV7-9, TRBJ2-2)
CASSLGHRTGELFF

SEQ ID NO: 403093 - protein, 14 aa, Homo sapiens
  CDR3 for alpha chain variable domain of TCR clone 201547 (TRAV12-3, TRAJ22)
CAMSLFGSARQLTF

SEQ ID NO: 403094 - protein, 16 aa, Homo sapiens
  CDR3 for beta chain variable domain of TCR clone 201547 (TRBV7-9, TRBJ1-2)
CASSLGFSSGGDGYNF

SEQ ID NO: 403095 - protein, 16 aa, Homo sapiens
  CDR3 for alpha chain variable domain of TCR clone 201548 (TRAV8-3, TRAJ44)
CAVGASNIGTASRLTF

SEQ ID NO: 403096 - protein, 15 aa, Homo sapiens
  CDR3 for beta chain variable domain of TCR clone 201548 (TRBV27, TRBJ1-5)
CASTFNRGSNQPQHF

SEQ ID NO: 403097 - protein, 14 aa, Homo sapiens
  CDR3 for alpha chain variable domain of TCR clone 201549 (TRAV2, TRAJ9)
CAVEDRGGGFKPIF

SEQ ID NO: 403098 - protein, 12 aa, Homo sapiens
  CDR3 for beta chain variable domain of TCR clone 201549 (TRBV11-2, TRBJ2-1)
CASSPGNNEQFF

SEQ ID NO: 403099 - protein, 15 aa, Homo sapiens
  CDR3 for alpha chain variable domain of TCR clone 201550 (TRAV13-1, TRAJ50)
CAAKGSETSYDKVIF

SEQ ID NO: 403100 - protein, 13 aa, Homo sapiens
  CDR3 for beta chain variable domain of TCR clone 201550 (TRBV20-1, TRBJ2-3)
CGARAGGRYTQYF

SEQ ID NO: 403101 - protein, 14 aa, Homo sapiens
  CDR3 for alpha chain variable domain of TCR clone 201551 (TRAV12-2, TRAJ45)
CAVNKGGGADGLIF

SEQ ID NO: 403102 - protein, 14 aa, Homo sapiens
  CDR3 for beta chain variable domain of TCR clone 201551 (TRBV20-1, TRBJ1-1)
CSAMGGTANTEAFF

SEQ ID NO: 403103 - protein, 19 aa, Homo sapiens
  CDR3 for alpha chain variable domain of TCR clone 201552 (TRAV26-1, TRAJ52)
CIVRAHRNAGGTSYGKLTF

SEQ ID NO: 403104 - protein, 13 aa, Homo sapiens
  CDR3 for beta chain variable domain of TCR clone 201552 (TRBV20-1, TRBJ1-6)
CSAPLGVGSPLHY

SEQ ID NO: 403105 - protein, 11 aa, Homo sapiens
  CDR3 for alpha chain variable domain of TCR clone 201553 (TRAV20, TRAJ34)
CTRDNTDKVTF

SEQ ID NO: 403106 - protein, 15 aa, Homo sapiens
  CDR3 for beta chain variable domain of TCR clone 201553 (TRBV2, TRBJ2-1)
CASSVTSEGTDEQFF

SEQ ID NO: 403107 - protein, 15 aa, Homo sapiens
  CDR3 for alpha chain variable domain of TCR clone 201554 (TRAV26-1, TRAJ44)
CIVRANTGTASKLTF

SEQ ID NO: 403108 - protein, 14 aa, Homo sapiens
  CDR3 for beta chain variable domain of TCR clone 201554 (TRBV7-8, TRBJ2-3)
CASSLEAGTDTQYF

SEQ ID NO: 403109 - protein, 12 aa, Homo sapiens
  CDR3 for alpha chain variable domain of TCR clone 201555 (TRAV12-3, TRAJ43)
CAISSNNNDMPF

SEQ ID NO: 403110 - protein, 15 aa, Homo sapiens
  CDR3 for beta chain variable domain of TCR clone 201555 (TRBV27, TRBJ1-4)
CASSPRHATNEKLFF

SEQ ID NO: 403111 - protein, 11 aa, Homo sapiens
  CDR3 for alpha chain variable domain of TCR clone 201556 (TRAV2, TRAJ33)
CAVESNYQLIW

SEQ ID NO: 403112 - protein, 14 aa, Homo sapiens
  CDR3 for beta chain variable domain of TCR clone 201556 (TRBV2, TRBJ2-1)
CASSDRAYYNEQFF

SEQ ID NO: 403113 - protein, 13 aa, Homo sapiens
  CDR3 for alpha chain variable domain of TCR clone 201557 (TRAV21, TRAJ20)
CAVGLRVDYKLSF

SEQ ID NO: 403114 - protein, 12 aa, Homo sapiens
  CDR3 for beta chain variable domain of TCR clone 201557 (TRBV24-1, TRBJ1-1)
CATLYPDTEAFF

SEQ ID NO: 403115 - protein, 15 aa, Homo sapiens
  CDR3 for alpha chain variable domain of TCR clone 201558 (TRAV20, TRAJ53)
CAVQASGGSNYKLTF

SEQ ID NO: 403116 - protein, 15 aa, Homo sapiens
  CDR3 for beta chain variable domain of TCR clone 201558 (TRBV6-4, TRBJ2-1)
CASSDSTGGYNEQFF

SEQ ID NO: 403117 - protein, 14 aa, Homo sapiens
  CDR3 for alpha chain variable domain of TCR clone 201559 (TRAV20, TRAJ29)
CAVQAWVGKTPLVF

SEQ ID NO: 403118 - protein, 15 aa, Homo sapiens
  CDR3 for beta chain variable domain of TCR clone 201559 (TRBV29-1, TRBJ2-7)
CSVEFFDRGSYEQYF

SEQ ID NO: 403119 - protein, 13 aa, Homo sapiens
  CDR3 for alpha chain variable domain of TCR clone 201560 (TRAV21, TRAJ45)
CAVPGGGADGLTF

SEQ ID NO: 403120 - protein, 17 aa, Homo sapiens
  CDR3 for beta chain variable domain of TCR clone 201560 (TRBV5-1, TRBJ2-5)
CASSLLGLAANQETQYF

SEQ ID NO: 403121 - protein, 13 aa, Homo sapiens
  CDR3 for alpha chain variable domain of TCR clone 201561 (TRAV21, TRAJ27)
CAARPGNAGKSTF

SEQ ID NO: 403122 - protein, 15 aa, Homo sapiens
  CDR3 for beta chain variable domain of TCR clone 201561 (TRBV4-3, TRBJ2-7)
CASSQGGRGIYEQYF

SEQ ID NO: 403123 - protein, 15 aa, Homo sapiens
  CDR3 for alpha chain variable domain of TCR clone 201562 (TRAV23/DV6, TRAJ18)
CAARYRGSTLGRLYF

SEQ ID NO: 403124 - protein, 15 aa, Homo sapiens
  CDR3 for beta chain variable domain of TCR clone 201562 (TRBV11-3, TRBJ2-7)
CASSLGGGLNYEQYF

SEQ ID NO: 403125 - protein, 15 aa, Homo sapiens
  CDR3 for alpha chain variable domain of TCR clone 201563 (TRAV26-1, TRAJ29)
CIVRVEGSGNTPLVF

SEQ ID NO: 403126 - protein, 11 aa, Homo sapiens
  CDR3 for beta chain variable domain of TCR clone 201563 (TRBV6-4, TRBJ2-1)
CASSDSYAQFF

SEQ ID NO: 403127 - protein, 14 aa, Homo sapiens
  CDR3 for alpha chain variable domain of TCR clone 201564 (TRAV1-2, TRAJ16)
CAVNRLSDGQKLLF

SEQ ID NO: 403128 - protein, 14 aa, Homo sapiens
  CDR3 for beta chain variable domain of TCR clone 201564 (TRBV7-2, TRBJ2-7)
CASRSQGAAYEQYF

SEQ ID NO: 403129 - protein, 11 aa, Homo sapiens
  CDR3 for alpha chain variable domain of TCR clone 201565 (TRAV29/DV5, TRAJ31)
CAAMNNARLMF

SEQ ID NO: 403130 - protein, 15 aa, Homo sapiens
  CDR3 for beta chain variable domain of TCR clone 201565 (TRBV20-1, TRBJ2-7)
CRARGPLAGGREQYF

SEQ ID NO: 403131 - protein, 13 aa, Homo sapiens
  CDR3 for alpha chain variable domain of TCR clone 201566 (TRAV8-2, TRAJ13)
CVLSDLRYQKVTF

SEQ ID NO: 403132 - protein, 14 aa, Homo sapiens
  CDR3 for beta chain variable domain of TCR clone 201566 (TRBV25-1, TRBJ1-1)
CASTHLGGNTEAFF

SEQ ID NO: 403133 - protein, 15 aa, Homo sapiens
  CDR3 for alpha chain variable domain of TCR clone 201567 (TRAV21, TRAJ52)
CATRGGGTSYRKLTF

SEQ ID NO: 403134 - protein, 14 aa, Homo sapiens
  CDR3 for beta chain variable domain of TCR clone 201567 (TRBV28, TRBJ2-3)
CASISAPSTDTQYF

SEQ ID NO: 403135 - protein, 14 aa, Homo sapiens
  CDR3 for alpha chain variable domain of TCR clone 201568 (TRAV17, TRAJ11)
CAADTSRGYSTLTF

SEQ ID NO: 403136 - protein, 13 aa, Homo sapiens
  CDR3 for beta chain variable domain of TCR clone 201568 (TRBV19, TRBJ2-5)
CASRDSRRETQYF

SEQ ID NO: 403137 - protein, 12 aa, Homo sapiens
  CDR3 for alpha chain variable domain of TCR clone 201569 (TRAV12-1, TRAJ31)
CVSWNNNARLMF

SEQ ID NO: 403138 - protein, 15 aa, Homo sapiens
  CDR3 for beta chain variable domain of TCR clone 201569 (TRBV7-2, TRBJ1-5)
CASSLDRGQDPTQHF

SEQ ID NO: 403139 - protein, 13 aa, Homo sapiens
  CDR3 for alpha chain variable domain of TCR clone 201570 (TRAV3, TRAJ21)
CAVREPDFNKFYF

SEQ ID NO: 403140 - protein, 13 aa, Homo sapiens
  CDR3 for beta chain variable domain of TCR clone 201570 (TRBV9, TRBJ2-1)
CASGPSGGYEQFF

SEQ ID NO: 403141 - protein, 16 aa, Homo sapiens
  CDR3 for alpha chain variable domain of TCR clone 201571 (TRAV30, TRAJ26)
CGTESVGDNYGQNFVF

SEQ ID NO: 403142 - protein, 14 aa, Homo sapiens
  CDR3 for beta chain variable domain of TCR clone 201571 (TRBV19, TRBJ2-1)
CASSAGLSGNEQFF

SEQ ID NO: 403143 - protein, 15 aa, Homo sapiens
  CDR3 for alpha chain variable domain of TCR clone 201572 (TRAV21, TRAJ22)
CAVRLFFWFCKATDL

SEQ ID NO: 403144 - protein, 14 aa, Homo sapiens
  CDR3 for beta chain variable domain of TCR clone 201572 (TRBV19, TRBJ1-5)
CAGRAPDSFLSQHF

SEQ ID NO: 403145 - protein, 14 aa, Homo sapiens
  CDR3 for alpha chain variable domain of TCR clone 201573 (TRAV8-1, TRAJ34)
CAVITTYNTAKLIF

SEQ ID NO: 403146 - protein, 14 aa, Homo sapiens
  CDR3 for beta chain variable domain of TCR clone 201573 (TRBV11-3, TRBJ1-3)
CASSHNGQGNTIYF

SEQ ID NO: 403147 - protein, 12 aa, Homo sapiens
  CDR3 for alpha chain variable domain of TCR clone 201574 (TRAV13-1, TRAJ27)
CAAHTNAGKSTF

SEQ ID NO: 403148 - protein, 13 aa, Homo sapiens
  CDR3 for beta chain variable domain of TCR clone 201574 (TRBV19, TRBJ1-2)
CASSVPGQDGYTF

SEQ ID NO: 403149 - protein, 16 aa, Homo sapiens
  CDR3 for alpha chain variable domain of TCR clone 201575 (TRAV3, TRAJ37)
CAVRPHGSGNTGKLIF

SEQ ID NO: 403150 - protein, 15 aa, Homo sapiens
  CDR3 for beta chain variable domain of TCR clone 201575 (TRBV6-3, TRBJ2-2)
CASSFLATLTGELFF

SEQ ID NO: 403151 - protein, 13 aa, Homo sapiens
  CDR3 for alpha chain variable domain of TCR clone 201576 (TRAV17, TRAJ7)
CATDNYGNNRLAF

SEQ ID NO: 403152 - protein, 16 aa, Homo sapiens
  CDR3 for beta chain variable domain of TCR clone 201576 (TRBV20-1, TRBJ2-1)
CSARGSSSGMVNEQFF

SEQ ID NO: 403153 - protein, 14 aa, Homo sapiens
  CDR3 for alpha chain variable domain of TCR clone 201577 (TRAV36/DV7, TRAJ33)
CAVLPRDINYQLIW

SEQ ID NO: 403154 - protein, 17 aa, Homo sapiens
  CDR3 for beta chain variable domain of TCR clone 201577 (TRBV23-1, TRBJ2-5)
CASSPTLNVIGVETQYF

SEQ ID NO: 403155 - protein, 13 aa, Homo sapiens
  CDR3 for alpha chain variable domain of TCR clone 201578 (TRAV12-2, TRAJ12)
CAVNWDSSYKLIF

SEQ ID NO: 403156 - protein, 14 aa, Homo sapiens
  CDR3 for beta chain variable domain of TCR clone 201578 (TRBV5-1, TRBJ1-2)
CASSLEPVNYGYTF

SEQ ID NO: 403157 - protein, 14 aa, Homo sapiens
  CDR3 for alpha chain variable domain of TCR clone 201579 (TRAV12-3, TRAJ7)
CAMSEIGGNNRLAF

SEQ ID NO: 403158 - protein, 13 aa, Homo sapiens
  CDR3 for beta chain variable domain of TCR clone 201579 (TRBV9, TRBJ1-1)
CASSVARNPEAFC

SEQ ID NO: 403159 - protein, 13 aa, Homo sapiens
  CDR3 for alpha chain variable domain of TCR clone 201580 (TRAV13-1, TRAJ39)
CSKYSNAGNMLTF

SEQ ID NO: 403160 - protein, 17 aa, Homo sapiens
  CDR3 for beta chain variable domain of TCR clone 201580 (TRBV20-1, TRBJ2-2)
CSASGSGQGGLTGELFF

SEQ ID NO: 403161 - protein, 14 aa, Homo sapiens
  CDR3 for alpha chain variable domain of TCR clone 201581 (TRAV30, TRAJ26)
CGTEIVSYGQNFVF

SEQ ID NO: 403162 - protein, 12 aa, Homo sapiens
  CDR3 for beta chain variable domain of TCR clone 201581 (TRBV12-4, TRBJ2-3)
CASSTLPDTQYF

SEQ ID NO: 403163 - protein, 13 aa, Homo sapiens
  CDR3 for alpha chain variable domain of TCR clone 201582 (TRAV17, TRAJ54)
CATDAGGAQKLAF

SEQ ID NO: 403164 - protein, 17 aa, Homo sapiens
  CDR3 for beta chain variable domain of TCR clone 201582 (TRBV25-1, TRBJ1-6)
CASSEYIGERGNSPLHF

SEQ ID NO: 403165 - protein, 14 aa, Homo sapiens
  CDR3 for alpha chain variable domain of TCR clone 201583 (TRAV1-2, TRAJ16)
CAVNRFSDGQKLLF

SEQ ID NO: 403166 - protein, 14 aa, Homo sapiens
  CDR3 for beta chain variable domain of TCR clone 201583 (TRBV20-1, TRBJ2-7)
CSARRGRSSYEQYF

SEQ ID NO: 403167 - protein, 14 aa, Homo sapiens
  CDR3 for alpha chain variable domain of TCR clone 201584 (TRAV16, TRAJ39)
CALSKNNAGNMLTF

SEQ ID NO: 403168 - protein, 14 aa, Homo sapiens
  CDR3 for beta chain variable domain of TCR clone 201584 (TRBV20-1, TRBJ2-1)
CSAQIGGSANEQFF

SEQ ID NO: 403169 - protein, 12 aa, Homo sapiens
  CDR3 for alpha chain variable domain of TCR clone 201585 (TRAV17, TRAJ20)
CATDSNDYKLSF

SEQ ID NO: 403170 - protein, 17 aa, Homo sapiens
  CDR3 for beta chain variable domain of TCR clone 201585 (TRBV7-8, TRBJ2-6)
CASSAGTGGAGANVLTF

SEQ ID NO: 403171 - protein, 14 aa, Homo sapiens
  CDR3 for alpha chain variable domain of TCR clone 201586 (TRAV12-3, TRAJ10)
SHLPLTGGGNELTF

SEQ ID NO: 403172 - protein, 13 aa, Homo sapiens
  CDR3 for beta chain variable domain of TCR clone 201586 (TRBV2, TRBJ1-6)
CADSGSYNSPLHF

SEQ ID NO: 403173 - protein, 13 aa, Homo sapiens
  CDR3 for alpha chain variable domain of TCR clone 201587 (TRAV27, TRAJ39)
CAGVGNAGNMLTF

SEQ ID NO: 403174 - protein, 12 aa, Homo sapiens
  CDR3 for beta chain variable domain of TCR clone 201587 (TRBV29-1, TRBJ2-1)
CSVEGPGPEQFF

SEQ ID NO: 403175 - protein, 12 aa, Homo sapiens
  CDR3 for alpha chain variable domain of TCR clone 201588 (TRAV12-2, TRAJ58)
CAVETSGSRLTF

SEQ ID NO: 403176 - protein, 12 aa, Homo sapiens
  CDR3 for beta chain variable domain of TCR clone 201588 (TRBV20-1, TRBJ1-2)
CSATGTEYGYAF

SEQ ID NO: 403177 - protein, 12 aa, Homo sapiens
  CDR3 for alpha chain variable domain of TCR clone 201589 (TRAV12-3, TRAJ34)
CAMGYNTDKLIF

SEQ ID NO: 403178 - protein, 15 aa, Homo sapiens
  CDR3 for beta chain variable domain of TCR clone 201589 (TRBV20-1, TRBJ2-7)
CSPESGTSGAYEQYF

SEQ ID NO: 403179 - protein, 14 aa, Homo sapiens
  CDR3 for alpha chain variable domain of TCR clone 201590 (TRAV2, TRAJ21)
CAVEVLNNFNKFYF

SEQ ID NO: 403180 - protein, 11 aa, Homo sapiens
  CDR3 for beta chain variable domain of TCR clone 201590 (TRBV10-3, TRBJ2-1)
CAISDRGLQFF

SEQ ID NO: 403181 - protein, 18 aa, Homo sapiens
  CDR3 for alpha chain variable domain of TCR clone 201591 (TRAV12-1, TRAJ52)
CVVKLINAGGTSYGKLTF

SEQ ID NO: 403182 - protein, 16 aa, Homo sapiens
  CDR3 for beta chain variable domain of TCR clone 201591 (TRBV20-1, TRBJ1-2)
CSASMGQGVANYGYTF

SEQ ID NO: 403183 - protein, 13 aa, Homo sapiens
  CDR3 for alpha chain variable domain of TCR clone 201592 (TRAV30, TRAJ24)
CGTVTDSWWKLQF

SEQ ID NO: 403184 - protein, 16 aa, Homo sapiens
  CDR3 for beta chain variable domain of TCR clone 201592 (TRBV7-3, TRBJ2-2)
CASSLKRGTLSGELFF

SEQ ID NO: 403185 - protein, 16 aa, Homo sapiens
  CDR3 for alpha chain variable domain of TCR clone 201593 (TRAV30, TRAJ24)
CGTEIVDADSWGKFQF

SEQ ID NO: 403186 - protein, 15 aa, Homo sapiens
  CDR3 for beta chain variable domain of TCR clone 201593 (TRBV7-2, TRBJ1-6)
CASSLGPDRGMPLHF

SEQ ID NO: 403187 - protein, 11 aa, Homo sapiens
  CDR3 for alpha chain variable domain of TCR clone 201594 (TRAV20, TRAJ23)
CACNQGGKLIF

SEQ ID NO: 403188 - protein, 14 aa, Homo sapiens
  CDR3 for beta chain variable domain of TCR clone 201594 (TRBV7-9, TRBJ2-1)
CASSSMVGFGEQFF

SEQ ID NO: 403189 - protein, 16 aa, Homo sapiens
  CDR3 for alpha chain variable domain of TCR clone 201595 (TRAV27, TRAJ56)
CAGVSRKDGANSKLTF

SEQ ID NO: 403190 - protein, 16 aa, Homo sapiens
  CDR3 for beta chain variable domain of TCR clone 201595 (TRBV18, TRBJ2-4)
CASSPPYSGAKNIQYF

SEQ ID NO: 403191 - protein, 13 aa, Homo sapiens
  CDR3 for alpha chain variable domain of TCR clone 201596 (TRAV27, TRAJ41)
CAGEGNSGYALNF

SEQ ID NO: 403192 - protein, 14 aa, Homo sapiens
  CDR3 for beta chain variable domain of TCR clone 201596 (TRBV7-2, TRBJ1-1)
CASSFLTGTSEAFF

SEQ ID NO: 403193 - protein, 16 aa, Homo sapiens
  CDR3 for alpha chain variable domain of TCR clone 201597 (TRAV10, TRAJ41)
CVVSLANSHSGYALNF

SEQ ID NO: 403194 - protein, 13 aa, Homo sapiens
  CDR3 for beta chain variable domain of TCR clone 201597 (TRBV15, TRBJ1-2)
CATSRGQLYGYTF

SEQ ID NO: 403195 - protein, 16 aa, Homo sapiens
  CDR3 for alpha chain variable domain of TCR clone 201598 (TRAV3, TRAJ37)
CAVRPHGYGNTGKLIF

SEQ ID NO: 403196 - protein, 17 aa, Homo sapiens
  CDR3 for beta chain variable domain of TCR clone 201598 (TRBV7-2, TRBJ2-7)
CASSFETSGSTSSTSGR

SEQ ID NO: 403197 - protein, 12 aa, Homo sapiens
  CDR3 for alpha chain variable domain of TCR clone 201599 (TRAV12-3, TRAJ17)
CAMTLTGNKLTF

SEQ ID NO: 403198 - protein, 18 aa, Homo sapiens
  CDR3 for beta chain variable domain of TCR clone 201599 (TRBV7-9, TRBJ2-3)
CASSLDLAGLATPDTQYF

SEQ ID NO: 403199 - protein, 13 aa, Homo sapiens
  CDR3 for alpha chain variable domain of TCR clone 201600 (TRAV8-3, TRAJ28)
CAVGSVGSYQLTF

SEQ ID NO: 403200 - protein, 18 aa, Homo sapiens
  CDR3 for beta chain variable domain of TCR clone 201600 (TRBV4-1, TRBJ1-5)
CASSQDPWGQGLNQPQHF

SEQ ID NO: 403201 - protein, 13 aa, Homo sapiens
  CDR3 for alpha chain variable domain of TCR clone 201601 (TRAV13-2, TRAJ40)
CAELISGTYKYIF

SEQ ID NO: 403202 - protein, 19 aa, Homo sapiens
  CDR3 for beta chain variable domain of TCR clone 201601 (TRBV11-3, TRBJ2-2)
CASSTRPGAKTTNTGELFF

SEQ ID NO: 403203 - protein, 12 aa, Homo sapiens
  CDR3 for alpha chain variable domain of TCR clone 201602 (TRAV12-1, TRAJ40)
CVFYSGTYKYIF

SEQ ID NO: 403204 - protein, 16 aa, Homo sapiens
  CDR3 for beta chain variable domain of TCR clone 201602 (TRBV7-6, TRBJ2-3)
CASSPLAGGSTDTQYF

SEQ ID NO: 403205 - protein, 13 aa, Homo sapiens
  CDR3 for alpha chain variable domain of TCR clone 201603 (TRAV2, TRAJ40)
CAVVTSGTYKYIL

SEQ ID NO: 403206 - protein, 14 aa, Homo sapiens
  CDR3 for beta chain variable domain of TCR clone 201603 (TRBV19, TRBJ2-1)
CASPTFVSSGEQFF

SEQ ID NO: 403207 - protein, 23 aa, Homo sapiens
  CDR3 for alpha chain variable domain of TCR clone 201604 (TRAV26-1, )
CIADSAGNNHIQNPDPAVYQLRD

SEQ ID NO: 403208 - protein, 15 aa, Homo sapiens
  CDR3 for beta chain variable domain of TCR clone 201604 (TRBV27, TRBJ2-1)
CASSNGGGSSNEQFF

SEQ ID NO: 403209 - protein, 13 aa, Homo sapiens
  CDR3 for alpha chain variable domain of TCR clone 201605 (TRAV8-6, TRAJ8)
CAVSNTGFQKLVF

SEQ ID NO: 403210 - protein, 16 aa, Homo sapiens
  CDR3 for beta chain variable domain of TCR clone 201605 (TRBV4-3, TRBJ2-3)
CASSLGLAGEGDTQYF

SEQ ID NO: 403211 - protein, 12 aa, Homo sapiens
  CDR3 for alpha chain variable domain of TCR clone 201606 (TRAV1-2, TRAJ33)
CAALDSNYQLIW

SEQ ID NO: 403212 - protein, 15 aa, Homo sapiens
  CDR3 for beta chain variable domain of TCR clone 201606 (TRBV7-9, TRBJ1-4)
CASSATGGNNEKLFF

SEQ ID NO: 403213 - protein, 14 aa, Homo sapiens
  CDR3 for alpha chain variable domain of TCR clone 201607 (TRAV9-2, TRAJ39)
FALYIYNAGSMLTF

SEQ ID NO: 403214 - protein, 16 aa, Homo sapiens
  CDR3 for beta chain variable domain of TCR clone 201607 (TRBV12-5, TRBJ2-5)
CASGPRTSGNQETQYF

SEQ ID NO: 403215 - protein, 14 aa, Homo sapiens
  CDR3 for alpha chain variable domain of TCR clone 201608 (TRAV26-1, TRAJ44)
CIVKSTGTASKLTF

SEQ ID NO: 403216 - protein, 16 aa, Homo sapiens
  CDR3 for beta chain variable domain of TCR clone 201608 (TRBV12-4, TRBJ2-5)
CASSWRPSGDLETQYF

SEQ ID NO: 403217 - protein, 11 aa, Homo sapiens
  CDR3 for alpha chain variable domain of TCR clone 201609 (TRAV12-3, TRAJ27)
LAMANAGKSTF

SEQ ID NO: 403218 - protein, 13 aa, Homo sapiens
  CDR3 for beta chain variable domain of TCR clone 201609 (TRBV20-1, TRBJ1-1)
CSARVGGNTEAFF

SEQ ID NO: 403219 - protein, 11 aa, Homo sapiens
  CDR3 for alpha chain variable domain of TCR clone 201610 (TRAV2, TRAJ13)
CASGGYQKVTF

SEQ ID NO: 403220 - protein, 16 aa, Homo sapiens
  CDR3 for beta chain variable domain of TCR clone 201610 (TRBV13, TRBJ2-3)
CQQPLQGSGGRNTQYF

SEQ ID NO: 403221 - protein, 14 aa, Homo sapiens
  CDR3 for alpha chain variable domain of TCR clone 201611 (TRAV29/DV5, TRAJ45)
CAAIFRGGADGLTF

SEQ ID NO: 403222 - protein, 11 aa, Homo sapiens
  CDR3 for beta chain variable domain of TCR clone 201611 (TRBV11-2, TRBJ2-2)
CASSLPGELFF

SEQ ID NO: 403223 - protein, 13 aa, Homo sapiens
  CDR3 for alpha chain variable domain of TCR clone 201612 (TRAV12-1, TRAJ17)
CVVSKAAGNKLTF

SEQ ID NO: 403224 - protein, 17 aa, Homo sapiens
  CDR3 for beta chain variable domain of TCR clone 201612 (TRBV4-1, TRBJ2-5)
CASSQVPSGGPQETQYF

SEQ ID NO: 403225 - protein, 14 aa, Homo sapiens
  CDR3 for alpha chain variable domain of TCR clone 201613 (TRAV12-2, TRAJ11)
CAVNRESGYSTLTF

SEQ ID NO: 403226 - protein, 10 aa, Homo sapiens
  CDR3 for beta chain variable domain of TCR clone 201613 (TRBV20-1, TRBJ2-5)
CSASFETQYF

SEQ ID NO: 403227 - protein, 11 aa, Homo sapiens
  CDR3 for alpha chain variable domain of TCR clone 201614 (TRAV2, TRAJ13)
CASGGYQKVTF

SEQ ID NO: 403228 - protein, 12 aa, Homo sapiens
  CDR3 for beta chain variable domain of TCR clone 201614 (TRBV7-8, TRBJ2-7)
CASSLGDRGQYF

SEQ ID NO: 403229 - protein, 13 aa, Homo sapiens
  CDR3 for alpha chain variable domain of TCR clone 201615 (TRAV1-1, TRAJ33)
CASHMDSNYQLIS

SEQ ID NO: 403230 - protein, 18 aa, Homo sapiens
  CDR3 for beta chain variable domain of TCR clone 201615 (TRBV20-1, TRBJ2-2)
CSARVQTARPSGTGELFF

SEQ ID NO: 403231 - protein, 15 aa, Homo sapiens
  CDR3 for alpha chain variable domain of TCR clone 201616 (TRAV20, TRAJ50)
CAVRQMKTSYDKVIF

SEQ ID NO: 403232 - protein, 16 aa, Homo sapiens
  CDR3 for beta chain variable domain of TCR clone 201616 (TRBV15, TRBJ1-2)
CSTSRGPRTGGGGYTF

SEQ ID NO: 403233 - protein, 14 aa, Homo sapiens
  CDR3 for alpha chain variable domain of TCR clone 201617 (TRAV2, TRAJ37)
CAVDFTSNTGKLIF

SEQ ID NO: 403234 - protein, 15 aa, Homo sapiens
  CDR3 for beta chain variable domain of TCR clone 201617 (TRBV20-1, TRBJ1-1)
CSASRGVAENTEAFF

SEQ ID NO: 403235 - protein, 12 aa, Homo sapiens
  CDR3 for alpha chain variable domain of TCR clone 201618 (TRAV27, TRAJ58)
CAGARDTTRLTF

SEQ ID NO: 403236 - protein, 15 aa, Homo sapiens
  CDR3 for beta chain variable domain of TCR clone 201618 (TRBV3-1, TRBJ2-7)
CASSQVAGAQYEQYF

SEQ ID NO: 403237 - protein, 14 aa, Homo sapiens
  CDR3 for alpha chain variable domain of TCR clone 201619 (TRAV8-3, TRAJ28)
CAVVPGAGSYQLTF

SEQ ID NO: 403238 - protein, 16 aa, Homo sapiens
  CDR3 for beta chain variable domain of TCR clone 201619 (TRBV7-3, TRBJ2-2)
CASSLKRGTLSGELFF

SEQ ID NO: 403239 - protein, 13 aa, Homo sapiens
  CDR3 for alpha chain variable domain of TCR clone 201620 (TRAV2, TRAJ40)
CAVVTSGPYKYIF

SEQ ID NO: 403240 - protein, 14 aa, Homo sapiens
  CDR3 for beta chain variable domain of TCR clone 201620 (TRBV19, TRBJ2-1)
CASPTCVLSGEQFF

SEQ ID NO: 403241 - protein, 14 aa, Homo sapiens
  CDR3 for alpha chain variable domain of TCR clone 201621 (TRAV12-3, TRAJ53)
CVATSGGSNYKLTF

SEQ ID NO: 403242 - protein, 13 aa, Homo sapiens
  CDR3 for beta chain variable domain of TCR clone 201621 (TRBV19, TRBJ1-5)
CASSTQDGQPQHF

SEQ ID NO: 403243 - protein, 18 aa, Homo sapiens
  CDR3 for alpha chain variable domain of TCR clone 201622 (TRAV21, TRAJ52)
CAVRPSPAGGTSYGKLTF

SEQ ID NO: 403244 - protein, 15 aa, Homo sapiens
  CDR3 for beta chain variable domain of TCR clone 201622 (TRBV7-9, TRBJ2-7)
CASSSFGLAVYEQYF

SEQ ID NO: 403245 - protein, 14 aa, Homo sapiens
  CDR3 for alpha chain variable domain of TCR clone 201623 (TRAV35, TRAJ13)
CAGRFPGGYQKVTF

SEQ ID NO: 403246 - protein, 14 aa, Homo sapiens
  CDR3 for beta chain variable domain of TCR clone 201623 (TRBV19, TRBJ2-2)
CASSMVGLSGELFF

SEQ ID NO: 403247 - protein, 10 aa, Homo sapiens
  CDR3 for alpha chain variable domain of TCR clone 201624 (TRAV5, TRAJ34)
SAEDTDKLIF

SEQ ID NO: 403248 - protein, 12 aa, Homo sapiens
  CDR3 for beta chain variable domain of TCR clone 201624 (TRBV11-2, TRBJ2-2)
CASSLGGGELFF

SEQ ID NO: 403249 - protein, 16 aa, Homo sapiens
  CDR3 for alpha chain variable domain of TCR clone 201625 (TRAV26-2, TRAJ28)
CILRPYSGAGSYQLTF

SEQ ID NO: 403250 - protein, 14 aa, Homo sapiens
  CDR3 for beta chain variable domain of TCR clone 201625 (TRBV7-9, TRBJ2-1)
CASSPRDSLYEQFF

SEQ ID NO: 403251 - protein, 14 aa, Homo sapiens
  CDR3 for alpha chain variable domain of TCR clone 201626 (TRAV12-2, TRAJ44)
CAVNKAGTASKLTF

SEQ ID NO: 403252 - protein, 15 aa, Homo sapiens
  CDR3 for beta chain variable domain of TCR clone 201626 (TRBV4-1, TRBJ2-5)
CASSQSRGDQETQYF

SEQ ID NO: 403253 - protein, 14 aa, Homo sapiens
  CDR3 for alpha chain variable domain of TCR clone 201627 (TRAV13-1, TRAJ44)
CAAKATGTASKLTF

SEQ ID NO: 403254 - protein, 15 aa, Homo sapiens
  CDR3 for beta chain variable domain of TCR clone 201627 (TRBV10-3, TRBJ2-1)
CAISDVQERAYEQFF

SEQ ID NO: 403255 - protein, 15 aa, Homo sapiens
  CDR3 for alpha chain variable domain of TCR clone 201628 (TRAV8-6, TRAJ11)
CAVSDRRSGYSTLTF

SEQ ID NO: 403256 - protein, 13 aa, Homo sapiens
  CDR3 for beta chain variable domain of TCR clone 201628 (TRBV19, TRBJ2-7)
CASSPRQSYEQYF

SEQ ID NO: 403257 - protein, 11 aa, Homo sapiens
  CDR3 for alpha chain variable domain of TCR clone 201629 (TRAV21, TRAJ31)
CAVRNNARLMF

SEQ ID NO: 403258 - protein, 15 aa, Homo sapiens
  CDR3 for beta chain variable domain of TCR clone 201629 (TRBV20-1, TRBJ2-7)
CSARDRVAGMDEPYF

SEQ ID NO: 403259 - protein, 12 aa, Homo sapiens
  CDR3 for alpha chain variable domain of TCR clone 201630 (TRAV21, TRAJ34)
CAAPYNTDKLIF

SEQ ID NO: 403260 - protein, 16 aa, Homo sapiens
  CDR3 for beta chain variable domain of TCR clone 201630 (TRBV27, TRBJ2-5)
CASSSQTSGFQETQYF

SEQ ID NO: 403261 - protein, 14 aa, Homo sapiens
  CDR3 for alpha chain variable domain of TCR clone 201631 (TRAV12-3, TRAJ10)
SHLPLTGGGNKLTF

SEQ ID NO: 403262 - protein, 15 aa, Homo sapiens
  CDR3 for beta chain variable domain of TCR clone 201631 (TRBV11-2, TRBJ1-1)
CASSSRSSLLLSLDK

SEQ ID NO: 403263 - protein, 14 aa, Homo sapiens
  CDR3 for alpha chain variable domain of TCR clone 201632 (TRAV1-2, TRAJ16)
CAVNRISDGQKLLF

SEQ ID NO: 403264 - protein, 14 aa, Homo sapiens
  CDR3 for beta chain variable domain of TCR clone 201632 (TRBV20-1, TRBJ2-1)
CSARGGSSYNEQFF

SEQ ID NO: 403265 - protein, 14 aa, Homo sapiens
  CDR3 for alpha chain variable domain of TCR clone 201633 (TRAV12-2, TRAJ13)
CAVKKTGGYQKVTF

SEQ ID NO: 403266 - protein, 14 aa, Homo sapiens
  CDR3 for beta chain variable domain of TCR clone 201633 (TRBV11-3, TRBJ2-7)
CASSPDRNTYEQYF

SEQ ID NO: 403267 - protein, 15 aa, Homo sapiens
  CDR3 for alpha chain variable domain of TCR clone 201634 (TRAV8-3, TRAJ44)
CAVGEGAGTASKLTF

SEQ ID NO: 403268 - protein, 12 aa, Homo sapiens
  CDR3 for beta chain variable domain of TCR clone 201634 (TRBV7-8, TRBJ2-4)
CASSLGGNIQYF

SEQ ID NO: 403269 - protein, 13 aa, Homo sapiens
  CDR3 for alpha chain variable domain of TCR clone 201635 (TRAV13-1, TRAJ39)
CAASIWAGNMLTF

SEQ ID NO: 403270 - protein, 16 aa, Homo sapiens
  CDR3 for beta chain variable domain of TCR clone 201635 (TRBV7-3, TRBJ2-2)
CASSSKRGTLSGELFF

SEQ ID NO: 403271 - protein, 13 aa, Homo sapiens
  CDR3 for alpha chain variable domain of TCR clone 201636 (TRAV14/DV4, TRAJ49)
CAMVENTGNQFHF

SEQ ID NO: 403272 - protein, 14 aa, Homo sapiens
  CDR3 for beta chain variable domain of TCR clone 201636 (TRBV6-1, TRBJ2-7)
CASTRTGDYYEQYF

SEQ ID NO: 403273 - protein, 16 aa, Homo sapiens
  CDR3 for alpha chain variable domain of TCR clone 201637 (TRAV3, TRAJ3)
CAVRDRAKSSASKIIF

SEQ ID NO: 403274 - protein, 13 aa, Homo sapiens
  CDR3 for beta chain variable domain of TCR clone 201637 (TRBV10-3, TRBJ2-7)
CASKLAVNYEQNF

SEQ ID NO: 403275 - protein, 16 aa, Homo sapiens
  CDR3 for alpha chain variable domain of TCR clone 201638 (TRAV3, TRAJ37)
CAVRGKGSGHTGKLIF

SEQ ID NO: 403276 - protein, 15 aa, Homo sapiens
  CDR3 for beta chain variable domain of TCR clone 201638 (TRBV7-3, TRBJ2-2)
CASSETGQGTGELFF

SEQ ID NO: 403277 - protein, 13 aa, Homo sapiens
  CDR3 for alpha chain variable domain of TCR clone 201639 (TRAV2, TRAJ40)
CAVVTSGTYKFIF

SEQ ID NO: 403278 - protein, 17 aa, Homo sapiens
  CDR3 for beta chain variable domain of TCR clone 201639 (TRBV7-3, TRBJ2-3)
CASSLMKRMRGADTQYF

SEQ ID NO: 403279 - protein, 13 aa, Homo sapiens
  CDR3 for alpha chain variable domain of TCR clone 201640 (TRAV8-6, TRAJ40)
CAVSVTGAYKYIF

SEQ ID NO: 403280 - protein, 15 aa, Homo sapiens
  CDR3 for beta chain variable domain of TCR clone 201640 (TRBV4-1, TRBJ2-3)
CASGRGQGIPDTQYF

SEQ ID NO: 403281 - protein, 14 aa, Homo sapiens
  CDR3 for alpha chain variable domain of TCR clone 201641 (TRAV13-1, TRAJ35)
CAASKGGFGNVLHC

SEQ ID NO: 403282 - protein, 13 aa, Homo sapiens
  CDR3 for beta chain variable domain of TCR clone 201641 (TRBV7-3, TRBJ1-1)
CASIQDWGAEAFF

SEQ ID NO: 403283 - protein, 14 aa, Homo sapiens
  CDR3 for alpha chain variable domain of TCR clone 201642 (TRAV12-2, TRAJ13)
CAVKETGGYQKVNF

SEQ ID NO: 403284 - protein, 15 aa, Homo sapiens
  CDR3 for beta chain variable domain of TCR clone 201642 (TRBV27, TRBJ2-1)
CASSNGGGSSNEQFF

SEQ ID NO: 403285 - protein, 15 aa, Homo sapiens
  CDR3 for alpha chain variable domain of TCR clone 201643 (TRAV12-1, TRAJ45)
CVVLSGGGGADGLTF

SEQ ID NO: 403286 - protein, 13 aa, Homo sapiens
  CDR3 for beta chain variable domain of TCR clone 201643 (TRBV7-3, TRBJ1-1)
RASSQDWGAEAFF

SEQ ID NO: 403287 - protein, 15 aa, Homo sapiens
  CDR3 for alpha chain variable domain of TCR clone 201644 (TRAV12-3, TRAJ6)
CAMSAASGGSYIPTF

SEQ ID NO: 403288 - protein, 13 aa, Homo sapiens
  CDR3 for beta chain variable domain of TCR clone 201644 (TRBV20-1, TRBJ1-2)
CSASTERIYGYPF

SEQ ID NO: 403289 - protein, 22 aa, Homo sapiens
  CDR3 for alpha chain variable domain of TCR clone 201645 (TRAV27, TRAJ41)
CSVRTQIPDIQNPDPAVYQLRD

SEQ ID NO: 403290 - protein, 16 aa, Homo sapiens
  CDR3 for beta chain variable domain of TCR clone 201645 (TRBV5-1, TRBJ2-3)
CASSLGLAVYTDTQYF

SEQ ID NO: 403291 - protein, 15 aa, Homo sapiens
  CDR3 for alpha chain variable domain of TCR clone 201646 (TRAV8-3, TRAJ45)
CASSYSGGGADGLTF

SEQ ID NO: 403292 - protein, 13 aa, Homo sapiens
  CDR3 for beta chain variable domain of TCR clone 201646 (TRBV10-3, TRBJ2-7)
RASKLAVSYEQYF

SEQ ID NO: 403293 - protein, 13 aa, Homo sapiens
  CDR3 for alpha chain variable domain of TCR clone 201647 (TRAV21, TRAJ15)
CAVANQAGTALIF

SEQ ID NO: 403294 - protein, 14 aa, Homo sapiens
  CDR3 for beta chain variable domain of TCR clone 201647 (TRBV27, TRBJ2-2)
CASSLGAATRELFF

SEQ ID NO: 403295 - protein, 13 aa, Homo sapiens
  CDR3 for alpha chain variable domain of TCR clone 201648 (TRAV12-1, TRAJ6)
CVVNSGGSYIPTF

SEQ ID NO: 403296 - protein, 16 aa, Homo sapiens
  CDR3 for beta chain variable domain of TCR clone 201648 (TRBV28, TRBJ1-5)
CASSTGLQGEGQPQHF

SEQ ID NO: 403297 - protein, 16 aa, Homo sapiens
  CDR3 for alpha chain variable domain of TCR clone 201649 (TRAV3, TRAJ6)
CAVRRTPSGGSYIHTF

SEQ ID NO: 403298 - protein, 14 aa, Homo sapiens
  CDR3 for beta chain variable domain of TCR clone 201649 (TRBV3-1, TRBJ1-5)
CASSTGDSNQPQHF

SEQ ID NO: 403299 - protein, 14 aa, Homo sapiens
  CDR3 for alpha chain variable domain of TCR clone 201650 (TRAV8-3, TRAJ10)
CAVGNAGGGNKLTF

SEQ ID NO: 403300 - protein, 13 aa, Homo sapiens
  CDR3 for beta chain variable domain of TCR clone 201650 (TRBV12-4, TRBJ2-5)
CANRLAVQETQYF

SEQ ID NO: 403301 - protein, 12 aa, Homo sapiens
  CDR3 for alpha chain variable domain of TCR clone 201651 (TRAV12-2, TRAJ10)
WGVTGGGNKLTF

SEQ ID NO: 403302 - protein, 16 aa, Homo sapiens
  CDR3 for beta chain variable domain of TCR clone 201651 (TRBV7-2, TRBJ1-3)
CASSRLEASSGNTIYF

SEQ ID NO: 403303 - protein, 14 aa, Homo sapiens
  CDR3 for alpha chain variable domain of TCR clone 201652 (TRAV1-2, TRAJ16)
CAVYRFSDGQKLLF

SEQ ID NO: 403304 - protein, 18 aa, Homo sapiens
  CDR3 for beta chain variable domain of TCR clone 201652 (TRBV20-1, TRBJ2-6)
CSAETTPTHGSGANVLTF

SEQ ID NO: 403305 - protein, 13 aa, Homo sapiens
  CDR3 for alpha chain variable domain of TCR clone 201653 (TRAV12-1, TRAJ13)
CVAALLGYQKGTF

SEQ ID NO: 403306 - protein, 13 aa, Homo sapiens
  CDR3 for beta chain variable domain of TCR clone 201653 (TRBV20-1, TRBJ2-5)
CSAILTGQETQYF

SEQ ID NO: 403307 - protein, 12 aa, Homo sapiens
  CDR3 for alpha chain variable domain of TCR clone 201654 (TRAV8-3, TRAJ26)
CAGDNYGQNFVF

SEQ ID NO: 403308 - protein, 15 aa, Homo sapiens
  CDR3 for beta chain variable domain of TCR clone 201654 (TRBV9, TRBJ2-1)
CASTLAGSSSNEQFF

SEQ ID NO: 403309 - protein, 15 aa, Homo sapiens
  CDR3 for alpha chain variable domain of TCR clone 201655 (TRAV1-2, TRAJ30)
CAVRPHGNRDDKIIF

SEQ ID NO: 403310 - protein, 13 aa, Homo sapiens
  CDR3 for beta chain variable domain of TCR clone 201655 (TRBV4-1, TRBJ2-7)
SASSQGQAYEQYF

SEQ ID NO: 403311 - protein, 14 aa, Homo sapiens
  CDR3 for alpha chain variable domain of TCR clone 201656 (TRAV17, TRAJ32)
CATDPGGATNKLIF

SEQ ID NO: 403312 - protein, 14 aa, Homo sapiens
  CDR3 for beta chain variable domain of TCR clone 201656 (TRBV2, TRBJ1-5)
CSSSENRGGQPQHF

SEQ ID NO: 403313 - protein, 15 aa, Homo sapiens
  CDR3 for alpha chain variable domain of TCR clone 201657 (TRAV27, TRAJ45)
CRSPQSGAGADGLTF

SEQ ID NO: 403314 - protein, 12 aa, Homo sapiens
  CDR3 for beta chain variable domain of TCR clone 201657 (TRBV24-1, TRBJ2-7)
CATSDPGYEQYF

SEQ ID NO: 403315 - protein, 14 aa, Homo sapiens
  CDR3 for alpha chain variable domain of TCR clone 201658 (TRAV1-2, TRAJ16)
CAVNRISDGQKLLF

SEQ ID NO: 403316 - protein, 15 aa, Homo sapiens
  CDR3 for beta chain variable domain of TCR clone 201658 (TRBV9, TRBJ1-6)
CASSVAGTGDSPLHV

SEQ ID NO: 403317 - protein, 14 aa, Homo sapiens
  CDR3 for alpha chain variable domain of TCR clone 201659 (TRAV8-3, TRAJ47)
CAVGAQGYGNKLVF

SEQ ID NO: 403318 - protein, 12 aa, Homo sapiens
  CDR3 for beta chain variable domain of TCR clone 201659 (TRBV11-2, TRBJ2-2)
CASSLGGGELFF

SEQ ID NO: 403319 - protein, 15 aa, Homo sapiens
  CDR3 for alpha chain variable domain of TCR clone 201660 (TRAV3, TRAJ22)
CAVRDRGGSVRQLTF

SEQ ID NO: 403320 - protein, 15 aa, Homo sapiens
  CDR3 for beta chain variable domain of TCR clone 201660 (TRBV7-3, TRBJ2-2)
CASSETGQGTGELFF

SEQ ID NO: 403321 - protein, 15 aa, Homo sapiens
  CDR3 for alpha chain variable domain of TCR clone 201661 (TRAV12-2, TRAJ53)
CAVNGGGGGNYKLTF

SEQ ID NO: 403322 - protein, 14 aa, Homo sapiens
  CDR3 for beta chain variable domain of TCR clone 201661 (TRBV19, TRBJ2-2)
CASSTLYRSGELFF

SEQ ID NO: 403323 - protein, 13 aa, Homo sapiens
  CDR3 for alpha chain variable domain of TCR clone 201662 (TRAV27, TRAJ40)
CAGPPSGTYKYIF

SEQ ID NO: 403324 - protein, 16 aa, Homo sapiens
  CDR3 for beta chain variable domain of TCR clone 201662 (TRBV25-1, TRBJ2-7)
CASSELTGGGIYEQYF

SEQ ID NO: 403325 - protein, 17 aa, Homo sapiens
  CDR3 for alpha chain variable domain of TCR clone 201663 (TRAV3, TRAJ6)
CAVRDGPRAGGSYIPTF

SEQ ID NO: 403326 - protein, 16 aa, Homo sapiens
  CDR3 for beta chain variable domain of TCR clone 201663 (TRBV5-1, TRBJ2-2)
CASSSRTGGRTGELFF

SEQ ID NO: 403327 - protein, 16 aa, Homo sapiens
  CDR3 for alpha chain variable domain of TCR clone 201664 (TRAV4, TRAJ37)
CLVGWFGSSNTVKLIF

SEQ ID NO: 403328 - protein, 15 aa, Homo sapiens
  CDR3 for beta chain variable domain of TCR clone 201664 (TRBV12-4, TRBJ2-3)
CASSLAERPTDTQYF

SEQ ID NO: 403329 - protein, 14 aa, Homo sapiens
  CDR3 for alpha chain variable domain of TCR clone 201665 (TRAV38-1, TRAJ45)
CAYYSGGGADGLTF

SEQ ID NO: 403330 - protein, 13 aa, Homo sapiens
  CDR3 for beta chain variable domain of TCR clone 201665 (TRBV7-8, TRBJ2-2)
CASSHYFPGRLSI

SEQ ID NO: 403331 - protein, 12 aa, Homo sapiens
  CDR3 for alpha chain variable domain of TCR clone 201666 (TRAV16, TRAJ56)
CAPTGANSKLTF

SEQ ID NO: 403332 - protein, 16 aa, Homo sapiens
  CDR3 for beta chain variable domain of TCR clone 201666 (TRBV27, TRBJ2-6)
CQQFDRVRFWANDLTF

SEQ ID NO: 403333 - protein, 14 aa, Homo sapiens
  CDR3 for alpha chain variable domain of TCR clone 201667 (TRAV8-4, TRAJ8)
CAVSLNTGFQKLVF

SEQ ID NO: 403334 - protein, 13 aa, Homo sapiens
  CDR3 for beta chain variable domain of TCR clone 201667 (TRBV7-9, TRBJ2-3)
CASSPGSTDTQYL

SEQ ID NO: 403335 - protein, 13 aa, Homo sapiens
  CDR3 for alpha chain variable domain of TCR clone 201668 (TRAV3, TRAJ27)
CAVRPLGAGKSTF

SEQ ID NO: 403336 - protein, 14 aa, Homo sapiens
  CDR3 for beta chain variable domain of TCR clone 201668 (TRBV29-1, TRBJ2-2)
CSALGGVGAGELFF

SEQ ID NO: 403337 - protein, 17 aa, Homo sapiens
  CDR3 for alpha chain variable domain of TCR clone 201669 (TRAV3, TRAJ6)
CAVIDGPRAGGSYIPTF

SEQ ID NO: 403338 - protein, 15 aa, Homo sapiens
  CDR3 for beta chain variable domain of TCR clone 201669 (TRBV5-1, TRBJ2-1)
CASSPPGAPYNEQFF

SEQ ID NO: 403339 - protein, 16 aa, Homo sapiens
  CDR3 for alpha chain variable domain of TCR clone 201670 (TRAV12-2, TRAJ43)
CAGDDMRFGAGTRLTV

SEQ ID NO: 403340 - protein, 16 aa, Homo sapiens
  CDR3 for beta chain variable domain of TCR clone 201670 (TRBV2, TRBJ2-4)
CASSEAPGGEQDIQYF

SEQ ID NO: 403341 - protein, 15 aa, Homo sapiens
  CDR3 for alpha chain variable domain of TCR clone 201671 (TRAV3, TRAJ17)
CAVSPQEAAGNKLTF

SEQ ID NO: 403342 - protein, 12 aa, Homo sapiens
  CDR3 for beta chain variable domain of TCR clone 201671 (TRBV7-9, TRBJ1-6)
CASSLMTSPLHF

SEQ ID NO: 403343 - protein, 14 aa, Homo sapiens
  CDR3 for alpha chain variable domain of TCR clone 201672 (TRAV13-1, TRAJ44)
CAAKATGTAGKLPF

SEQ ID NO: 403344 - protein, 17 aa, Homo sapiens
  CDR3 for beta chain variable domain of TCR clone 201672 (TRBV7-3, TRBJ2-3)
CASSLMKRMRGADTQYF

SEQ ID NO: 403345 - protein, 13 aa, Homo sapiens
  CDR3 for alpha chain variable domain of TCR clone 201673 (TRAV27, TRAJ27)
CAGGITHAGKSTF

SEQ ID NO: 403346 - protein, 13 aa, Homo sapiens
  CDR3 for beta chain variable domain of TCR clone 201673 (TRBV20-1, TRBJ1-2)
CSASLGVGYGYTF

SEQ ID NO: 403347 - protein, 14 aa, Homo sapiens
  CDR3 for alpha chain variable domain of TCR clone 201674 (TRAV27, TRAJ22)
CAGLPSGSARQLTF

SEQ ID NO: 403348 - protein, 15 aa, Homo sapiens
  CDR3 for beta chain variable domain of TCR clone 201674 (TRBV28, TRBJ2-7)
CASSLISGGSYEQYF

SEQ ID NO: 403349 - protein, 11 aa, Homo sapiens
  CDR3 for alpha chain variable domain of TCR clone 201675 (TRAV12-3, TRAJ43)
CAMSVSNDMRF

SEQ ID NO: 403350 - protein, 16 aa, Homo sapiens
  CDR3 for beta chain variable domain of TCR clone 201675 (TRBV2, TRBJ2-3)
CTSSTSVEGVTDTQYF

SEQ ID NO: 403351 - protein, 12 aa, Homo sapiens
  CDR3 for alpha chain variable domain of TCR clone 201676 (TRAV12-3, TRAJ20)
CAMVRGDYKLSF

SEQ ID NO: 403352 - protein, 12 aa, Homo sapiens
  CDR3 for beta chain variable domain of TCR clone 201676 (TRBV6-1, TRBJ2-7)
CASSDYYYEQYF

SEQ ID NO: 403353 - protein, 12 aa, Homo sapiens
  CDR3 for alpha chain variable domain of TCR clone 201677 (TRAV29/DV5, TRAJ34)
CAARHNTDKLIF

SEQ ID NO: 403354 - protein, 14 aa, Homo sapiens
  CDR3 for beta chain variable domain of TCR clone 201677 (TRBV25-1, TRBJ1-1)
CASTHLGGNTEAFF

SEQ ID NO: 403355 - protein, 14 aa, Homo sapiens
  CDR3 for alpha chain variable domain of TCR clone 201678 (TRAV17, TRAJ34)
CATDSLEGTDKLIF

SEQ ID NO: 403356 - protein, 15 aa, Homo sapiens
  CDR3 for beta chain variable domain of TCR clone 201678 (TRBV7-3, TRBJ2-1)
CASSFGQSNYNEQFF

SEQ ID NO: 403357 - protein, 11 aa, Homo sapiens
  CDR3 for alpha chain variable domain of TCR clone 201679 (TRAV12-2, TRAJ31)
CAVTRWARLMF

SEQ ID NO: 403358 - protein, 16 aa, Homo sapiens
  CDR3 for beta chain variable domain of TCR clone 201679 (TRBV19, TRBJ2-1)
CASSKAGPSSYNEQFF

SEQ ID NO: 403359 - protein, 15 aa, Homo sapiens
  CDR3 for alpha chain variable domain of TCR clone 201680 (TRAV21, TRAJ32)
CAVNSSGGATNKLIF

SEQ ID NO: 403360 - protein, 18 aa, Homo sapiens
  CDR3 for beta chain variable domain of TCR clone 201680 (TRBV7-9, TRBJ2-1)
CASSTGLAEGSSYNEQFF

SEQ ID NO: 403361 - protein, 18 aa, Homo sapiens
  CDR3 for alpha chain variable domain of TCR clone 201681 (TRAV21, TRAJ53)
CAVKGGENSGGSNYKLTS

SEQ ID NO: 403362 - protein, 17 aa, Homo sapiens
  CDR3 for beta chain variable domain of TCR clone 201681 (TRBV7-2, TRBJ2-3)
CASSLEARGTSTDTQYF

SEQ ID NO: 403363 - protein, 14 aa, Homo sapiens
  CDR3 for alpha chain variable domain of TCR clone 201682 (TRAV12-2, TRAJ40)
CAVKIPSGTYKYIF

SEQ ID NO: 403364 - protein, 13 aa, Homo sapiens
  CDR3 for beta chain variable domain of TCR clone 201682 (TRBV24-1, TRBJ1-4)
CATNNGRSEKLFF

SEQ ID NO: 403365 - protein, 12 aa, Homo sapiens
  CDR3 for alpha chain variable domain of TCR clone 201683 (TRAV13-1, TRAJ21)
CAAKEGFNKFYF

SEQ ID NO: 403366 - protein, 15 aa, Homo sapiens
  CDR3 for beta chain variable domain of TCR clone 201683 (TRBV2, TRBJ2-1)
CVSSELAGSCNEQFF

SEQ ID NO: 403367 - protein, 10 aa, Homo sapiens
  CDR3 for alpha chain variable domain of TCR clone 201684 (TRAV30, TRAJ48)
CGIGNEKLTF

SEQ ID NO: 403368 - protein, 14 aa, Homo sapiens
  CDR3 for beta chain variable domain of TCR clone 201684 (TRBV19, TRBJ1-1)
CATTSGTRGTEAFF

SEQ ID NO: 403369 - protein, 15 aa, Homo sapiens
  CDR3 for alpha chain variable domain of TCR clone 201685 (TRAV23/DV6, TRAJ33)
CAASNSGGGNYPLIL

SEQ ID NO: 403370 - protein, 14 aa, Homo sapiens
  CDR3 for beta chain variable domain of TCR clone 201685 (TRBV7-2, TRBJ2-7)
CASSLYPGRYEQYF

SEQ ID NO: 403371 - protein, 13 aa, Homo sapiens
  CDR3 for alpha chain variable domain of TCR clone 201686 (TRAV3, TRAJ4)
CAVRDGGYNKLIF

SEQ ID NO: 403372 - protein, 15 aa, Homo sapiens
  CDR3 for beta chain variable domain of TCR clone 201686 (TRBV5-1, TRBJ2-1)
CASSPPRARYNEQFF

SEQ ID NO: 403373 - protein, 14 aa, Homo sapiens
  CDR3 for alpha chain variable domain of TCR clone 201687 (TRAV1-2, TRAJ16)
CAVNRFSDGQKLLF

SEQ ID NO: 403374 - protein, 15 aa, Homo sapiens
  CDR3 for beta chain variable domain of TCR clone 201687 (TRBV20-1, TRBJ1-1)
CSARRGVTGNTEAFF

SEQ ID NO: 403375 - protein, 17 aa, Homo sapiens
  CDR3 for alpha chain variable domain of TCR clone 201688 (TRAV3, TRAJ42)
CAVRDSDYGGGQGNLIF

SEQ ID NO: 403376 - protein, 15 aa, Homo sapiens
  CDR3 for beta chain variable domain of TCR clone 201688 (TRBV6-6, TRBJ2-7)
CASSYSYGGSYEQYF

SEQ ID NO: 403377 - protein, 16 aa, Homo sapiens
  CDR3 for alpha chain variable domain of TCR clone 201689 (TRAV12-3, TRAJ53)
CAMSPGSGGSNDKLTF

SEQ ID NO: 403378 - protein, 13 aa, Homo sapiens
  CDR3 for beta chain variable domain of TCR clone 201689 (TRBV7-3, TRBJ1-1)
CASSQDWGAEAFF

SEQ ID NO: 403379 - protein, 16 aa, Homo sapiens
  CDR3 for alpha chain variable domain of TCR clone 201690 (TRAV12-2, TRAJ40)
CSVIRGGTSGTYKYIF

SEQ ID NO: 403380 - protein, 13 aa, Homo sapiens
  CDR3 for beta chain variable domain of TCR clone 201690 (TRBV7-9, TRBJ1-2)
CASSLKQNYGYTF

SEQ ID NO: 403381 - protein, 16 aa, Homo sapiens
  CDR3 for alpha chain variable domain of TCR clone 201691 (TRAV12-1, TRAJ48)
CVVNMVSNVGNEKLTF

SEQ ID NO: 403382 - protein, 18 aa, Homo sapiens
  CDR3 for beta chain variable domain of TCR clone 201691 (TRBV11-2, TRBJ2-6)
CASSLNPFLGTGANVLTF

SEQ ID NO: 403383 - protein, 13 aa, Homo sapiens
  CDR3 for alpha chain variable domain of TCR clone 201692 (TRAV8-1, TRAJ28)
CAVSGAGSYQLTF

SEQ ID NO: 403384 - protein, 14 aa, Homo sapiens
  CDR3 for beta chain variable domain of TCR clone 201692 (TRBV11-2, TRBJ2-3)
CASSRLARTDTQYF

SEQ ID NO: 403385 - protein, 15 aa, Homo sapiens
  CDR3 for alpha chain variable domain of TCR clone 201693 (TRAV12-3, TRAJ48)
CAMNAKNFGNEKLTF

SEQ ID NO: 403386 - protein, 14 aa, Homo sapiens
  CDR3 for beta chain variable domain of TCR clone 201693 (TRBV2, TRBJ1-6)
CASSEPRNNSPLHF

SEQ ID NO: 403387 - protein, 14 aa, Homo sapiens
  CDR3 for alpha chain variable domain of TCR clone 201694 (TRAV1-2, TRAJ8)
CAVREDTGFQKLVF

SEQ ID NO: 403388 - protein, 15 aa, Homo sapiens
  CDR3 for beta chain variable domain of TCR clone 201694 (TRBV19, TRBJ2-3)
CASRETMGSRNTQYF

SEQ ID NO: 403389 - protein, 15 aa, Homo sapiens
  CDR3 for alpha chain variable domain of TCR clone 201695 (TRAV8-4, TRAJ47)
CAVSDPEEYGNKLVF

SEQ ID NO: 403390 - protein, 15 aa, Homo sapiens
  CDR3 for beta chain variable domain of TCR clone 201695 (TRBV11-2, TRBJ2-1)
CASSLGPDSNNEQFF

SEQ ID NO: 403391 - protein, 12 aa, Homo sapiens
  CDR3 for alpha chain variable domain of TCR clone 201696 (TRAV25, TRAJ17)
CAGEAAGNKLTF

SEQ ID NO: 403392 - protein, 14 aa, Homo sapiens
  CDR3 for beta chain variable domain of TCR clone 201696 (TRBV6-1, TRBJ1-3)
CASVQGGGGNTIYF

SEQ ID NO: 403393 - protein, 14 aa, Homo sapiens
  CDR3 for alpha chain variable domain of TCR clone 201697 (TRAV1-2, TRAJ8)
CAVRDDTGFQKLVF

SEQ ID NO: 403394 - protein, 15 aa, Homo sapiens
  CDR3 for beta chain variable domain of TCR clone 201697 (TRBV6-3, TRBJ2-7)
CASGSPGTVFYEQYF

SEQ ID NO: 403395 - protein, 12 aa, Homo sapiens
  CDR3 for alpha chain variable domain of TCR clone 201698 (TRAV12-3, TRAJ17)
CAMTLTGNKTTF

SEQ ID NO: 403396 - protein, 15 aa, Homo sapiens
  CDR3 for beta chain variable domain of TCR clone 201698 (TRBV20-1, TRBJ2-7)
CSARDRVSGMDEQYF

SEQ ID NO: 403397 - protein, 23 aa, Homo sapiens
  CDR3 for alpha chain variable domain of TCR clone 201699 (TRAV1-1, TRAJ11)
LLQELQMKDSTSYFCAGYSTLTF

SEQ ID NO: 403398 - protein, 15 aa, Homo sapiens
  CDR3 for beta chain variable domain of TCR clone 201699 (TRBV6-5, TRBJ2-1)
CASRGDFDSYNEQFF

SEQ ID NO: 403399 - protein, 14 aa, Homo sapiens
  CDR3 for alpha chain variable domain of TCR clone 201700 (TRAV13-1, TRAJ22)
CAASNGGSARQLTF

SEQ ID NO: 403400 - protein, 14 aa, Homo sapiens
  CDR3 for beta chain variable domain of TCR clone 201700 (TRBV18, TRBJ2-2)
CASSPGQKTGELFF

SEQ ID NO: 403401 - protein, 14 aa, Homo sapiens
  CDR3 for alpha chain variable domain of TCR clone 201701 (TRAV2, TRAJ9)
CAVEDRSGGFKTIF

SEQ ID NO: 403402 - protein, 13 aa, Homo sapiens
  CDR3 for beta chain variable domain of TCR clone 201701 (TRBV12-4, TRBJ1-5)
CASSPDRAQPQHL

SEQ ID NO: 403403 - protein, 14 aa, Homo sapiens
  CDR3 for alpha chain variable domain of TCR clone 201702 (TRAV12-3, TRAJ58)
CAMSAETSGSRLTF

SEQ ID NO: 403404 - protein, 12 aa, Homo sapiens
  CDR3 for beta chain variable domain of TCR clone 201702 (TRBV7-8, TRBJ2-7)
CASSLGDREQYF

SEQ ID NO: 403405 - protein, 18 aa, Homo sapiens
  CDR3 for alpha chain variable domain of TCR clone 201703 (TRAV13-1, TRAJ52)
CAAKNPNAGGTSYGKLTF

SEQ ID NO: 403406 - protein, 12 aa, Homo sapiens
  CDR3 for beta chain variable domain of TCR clone 201703 (TRBV11-2, TRBJ2-2)
SASSLGGGELFF

SEQ ID NO: 403407 - protein, 13 aa, Homo sapiens
  CDR3 for alpha chain variable domain of TCR clone 201704 (TRAV2, TRAJ40)
CAVVTSGTYKYIF

SEQ ID NO: 403408 - protein, 15 aa, Homo sapiens
  CDR3 for beta chain variable domain of TCR clone 201704 (TRBV7-6, TRBJ2-1)
CASSLGGQSHNEQFF

SEQ ID NO: 403409 - protein, 12 aa, Homo sapiens
  CDR3 for alpha chain variable domain of TCR clone 201705 (TRAV16, TRAJ10)
CSRTGGGNKLTF

SEQ ID NO: 403410 - protein, 13 aa, Homo sapiens
  CDR3 for beta chain variable domain of TCR clone 201705 (TRBV7-3, TRBJ1-1)
CASSQDWGAVAFF

SEQ ID NO: 403411 - protein, 13 aa, Homo sapiens
  CDR3 for alpha chain variable domain of TCR clone 201706 (TRAV20, TRAJ37)
CAGCSSNTGQLIS

SEQ ID NO: 403412 - protein, 11 aa, Homo sapiens
  CDR3 for beta chain variable domain of TCR clone 201706 (TRBV12-4, TRBJ2-3)
CASTATDTQYF

SEQ ID NO: 403413 - protein, 10 aa, Homo sapiens
  CDR3 for alpha chain variable domain of TCR clone 201707 (TRAV16, TRAJ22)
SAMYLRQLTF

SEQ ID NO: 403414 - protein, 12 aa, Homo sapiens
  CDR3 for beta chain variable domain of TCR clone 201707 (TRBV5-7, TRBJ1-1)
CASSLGRGKAFF

SEQ ID NO: 403415 - protein, 16 aa, Homo sapiens
  CDR3 for alpha chain variable domain of TCR clone 201708 (TRAV12-2, TRAJ10)
CAVSRILTGGGNKLTF

SEQ ID NO: 403416 - protein, 12 aa, Homo sapiens
  CDR3 for beta chain variable domain of TCR clone 201708 (TRBV28, TRBJ2-7)
CASSFSSYEQYF

SEQ ID NO: 403417 - protein, 11 aa, Homo sapiens
  CDR3 for alpha chain variable domain of TCR clone 201709 (TRAV35, TRAJ57)
GPQGGSEKLVF

SEQ ID NO: 403418 - protein, 19 aa, Homo sapiens
  CDR3 for beta chain variable domain of TCR clone 201709 (TRBV25-1, TRBJ2-2)
CAILVYRVDRGRKTGELFF

SEQ ID NO: 403419 - protein, 14 aa, Homo sapiens
  CDR3 for alpha chain variable domain of TCR clone 201710 (TRAV20, TRAJ13)
CAVLNSGGYQKVTF

SEQ ID NO: 403420 - protein, 14 aa, Homo sapiens
  CDR3 for beta chain variable domain of TCR clone 201710 (TRBV7-6, TRBJ2-1)
CASSLGGGADEQFF

SEQ ID NO: 403421 - protein, 13 aa, Homo sapiens
  CDR3 for alpha chain variable domain of TCR clone 201711 (TRAV27, TRAJ45)
CRSSGGGADGLTF

SEQ ID NO: 403422 - protein, 15 aa, Homo sapiens
  CDR3 for beta chain variable domain of TCR clone 201711 (TRBV20-1, TRBJ2-7)
CSARDRVSGMYEQYF

SEQ ID NO: 403423 - protein, 15 aa, Homo sapiens
  CDR3 for alpha chain variable domain of TCR clone 201712 (TRAV21, TRAJ53)
CATLNSGGSNYKMTF

SEQ ID NO: 403424 - protein, 13 aa, Homo sapiens
  CDR3 for beta chain variable domain of TCR clone 201712 (TRBV11-2, TRBJ2-5)
CASSSTGEETQYF

SEQ ID NO: 403425 - protein, 12 aa, Homo sapiens
  CDR3 for alpha chain variable domain of TCR clone 201713 (TRAV8-3, TRAJ26)
CAGDNYGQNFVF

SEQ ID NO: 403426 - protein, 17 aa, Homo sapiens
  CDR3 for beta chain variable domain of TCR clone 201713 (TRBV7-8, TRBJ2-6)
CASSAGTRGAGANVLTF

SEQ ID NO: 403427 - protein, 14 aa, Homo sapiens
  CDR3 for alpha chain variable domain of TCR clone 201714 (TRAV3, TRAJ7)
CAVREEEREQQTRF

SEQ ID NO: 403428 - protein, 20 aa, Homo sapiens
  CDR3 for beta chain variable domain of TCR clone 201714 (TRBV7-8, TRBJ2-2)
CASSHLFPGPTIHITGELFF

SEQ ID NO: 403429 - protein, 15 aa, Homo sapiens
  CDR3 for alpha chain variable domain of TCR clone 201715 (TRAV26-1, TRAJ44)
CIVRIGTGTASKLTF

SEQ ID NO: 403430 - protein, 13 aa, Homo sapiens
  CDR3 for beta chain variable domain of TCR clone 201715 (TRBV19, TRBJ1-5)
CANSIGGNQPQHF

SEQ ID NO: 403431 - protein, 12 aa, Homo sapiens
  CDR3 for alpha chain variable domain of TCR clone 201716 (TRAV12-3, TRAJ17)
CAMTLTGNELTF

SEQ ID NO: 403432 - protein, 11 aa, Homo sapiens
  CDR3 for beta chain variable domain of TCR clone 201716 (TRBV11-2, TRBJ2-2)
CASSLPGELFF

SEQ ID NO: 403433 - protein, 16 aa, Homo sapiens
  CDR3 for alpha chain variable domain of TCR clone 201717 (TRAV30, TRAJ24)
CGTEIVDADSWGKFQF

SEQ ID NO: 403434 - protein, 15 aa, Homo sapiens
  CDR3 for beta chain variable domain of TCR clone 201717 (TRBV7-2, TRBJ2-7)
CASSSRALSSNQQYF

SEQ ID NO: 403435 - protein, 13 aa, Homo sapiens
  CDR3 for alpha chain variable domain of TCR clone 201718 (TRAV20, TRAJ12)
CAVRLDSSYKLIF

SEQ ID NO: 403436 - protein, 14 aa, Homo sapiens
  CDR3 for beta chain variable domain of TCR clone 201718 (TRBV4-1, TRBJ2-2)
CASSQAVNTGELFF

SEQ ID NO: 403437 - protein, 11 aa, Homo sapiens
  CDR3 for alpha chain variable domain of TCR clone 201719 (TRAV13-1, TRAJ39)
CASHAGNMLTF

SEQ ID NO: 403438 - protein, 12 aa, Homo sapiens
  CDR3 for beta chain variable domain of TCR clone 201719 (TRBV11-2, TRBJ2-2)
CASSLGGGELFF

SEQ ID NO: 403439 - protein, 14 aa, Homo sapiens
  CDR3 for alpha chain variable domain of TCR clone 201720 (TRAV1-1, TRAJ35)
CAVRSIGFGNVLHC

SEQ ID NO: 403440 - protein, 15 aa, Homo sapiens
  CDR3 for beta chain variable domain of TCR clone 201720 (TRBV6-1, TRBJ1-1)
CASSEAWGQNTEAFF

SEQ ID NO: 403441 - protein, 17 aa, Homo sapiens
  CDR3 for alpha chain variable domain of TCR clone 201721 (TRAV23/DV6, TRAJ57)
CAASSNLSQGGSEKLVF

SEQ ID NO: 403442 - protein, 13 aa, Homo sapiens
  CDR3 for beta chain variable domain of TCR clone 201721 (TRBV25-1, TRBJ1-1)
CQHPPGGNTEAFF

SEQ ID NO: 403443 - protein, 13 aa, Homo sapiens
  CDR3 for alpha chain variable domain of TCR clone 201722 (TRAV38-1, TRAJ52)
CAFRGTSYGKLTF

SEQ ID NO: 403444 - protein, 13 aa, Homo sapiens
  CDR3 for beta chain variable domain of TCR clone 201722 (TRBV6-6, TRBJ2-7)
CASSSSGSYEQYF

SEQ ID NO: 403445 - protein, 15 aa, Homo sapiens
  CDR3 for alpha chain variable domain of TCR clone 201723 (TRAV25, TRAJ23)
CALAPNYNEGGKLIF

SEQ ID NO: 403446 - protein, 13 aa, Homo sapiens
  CDR3 for beta chain variable domain of TCR clone 201723 (TRBV11-3, TRBJ1-1)
CASSWDGNTEAFF

SEQ ID NO: 403447 - protein, 19 aa, Homo sapiens
  CDR3 for alpha chain variable domain of TCR clone 201724 (TRAV25, TRAJ20)
TATQTTDVGILPHDYKLSF

SEQ ID NO: 403448 - protein, 17 aa, Homo sapiens
  CDR3 for beta chain variable domain of TCR clone 201724 (TRBV4-3, TRBJ2-1)
CASSQFSSGMASGEQFF

SEQ ID NO: 403449 - protein, 21 aa, Homo sapiens
  CDR3 for alpha chain variable domain of TCR clone 201725 (TRAV29/DV5, TRAJ52)
CSVLLCSKREAGGTSYGKLTF

SEQ ID NO: 403450 - protein, 15 aa, Homo sapiens
  CDR3 for beta chain variable domain of TCR clone 201725 (TRBV6-1, TRBJ2-1)
CARSELRGQYNEQFF

SEQ ID NO: 403451 - protein, 16 aa, Homo sapiens
  CDR3 for alpha chain variable domain of TCR clone 201726 (TRAV26-2, TRAJ22)
CILRDGASGSARQLTF

SEQ ID NO: 403452 - protein, 13 aa, Homo sapiens
  CDR3 for beta chain variable domain of TCR clone 201726 (TRBV11-3, TRBJ2-1)
CASRINTRNEQFF

SEQ ID NO: 403453 - protein, 14 aa, Homo sapiens
  CDR3 for alpha chain variable domain of TCR clone 201727 (TRAV13-2, TRAJ6)
CAERGSGGSYIPTF

SEQ ID NO: 403454 - protein, 15 aa, Homo sapiens
  CDR3 for beta chain variable domain of TCR clone 201727 (TRBV19, TRBJ2-7)
CASSPAGSGEALRYF

SEQ ID NO: 403455 - protein, 14 aa, Homo sapiens
  CDR3 for alpha chain variable domain of TCR clone 201728 (TRAV1-2, TRAJ8)
CAVREETGFQKLVF

SEQ ID NO: 403456 - protein, 13 aa, Homo sapiens
  CDR3 for beta chain variable domain of TCR clone 201728 (TRBV12-4, TRBJ1-2)
CASSLRQGKGYTF

SEQ ID NO: 403457 - protein, 12 aa, Homo sapiens
  CDR3 for alpha chain variable domain of TCR clone 201729 (TRAV13-1, TRAJ21)
CAAKEGFNKFYF

SEQ ID NO: 403458 - protein, 20 aa, Homo sapiens
  CDR3 for beta chain variable domain of TCR clone 201729 (TRBV7-8, TRBJ2-2)
CASSYLFPGPTIHITGELFF

SEQ ID NO: 403459 - protein, 13 aa, Homo sapiens
  CDR3 for alpha chain variable domain of TCR clone 201730 (TRAV9-2, TRAJ20)
CALLPRDDYKLSF

SEQ ID NO: 403460 - protein, 15 aa, Homo sapiens
  CDR3 for beta chain variable domain of TCR clone 201730 (TRBV5-1, TRBJ2-7)
CASSLDLTSSYEQYF

SEQ ID NO: 403461 - protein, 13 aa, Homo sapiens
  CDR3 for alpha chain variable domain of TCR clone 201731 (TRAV26-1, TRAJ34)
CIVRPWLTDKLIF

SEQ ID NO: 403462 - protein, 14 aa, Homo sapiens
  CDR3 for beta chain variable domain of TCR clone 201731 (TRBV12-4, TRBJ1-4)
CASSRQGANEKLFF

SEQ ID NO: 403463 - protein, 17 aa, Homo sapiens
  CDR3 for alpha chain variable domain of TCR clone 201732 (TRAV8-6, TRAJ58)
CAASSWVGETSGPRLTF

SEQ ID NO: 403464 - protein, 14 aa, Homo sapiens
  CDR3 for beta chain variable domain of TCR clone 201732 (TRBV4-2, TRBJ2-1)
CASGLDRAYNEQFF

SEQ ID NO: 403465 - protein, 11 aa, Homo sapiens
  CDR3 for alpha chain variable domain of TCR clone 201733 (TRAV2, TRAJ13)
CASGGYQKVTF

SEQ ID NO: 403466 - protein, 14 aa, Homo sapiens
  CDR3 for beta chain variable domain of TCR clone 201733 (TRBV18, TRBJ2-1)
CASSPGVSQETQYF

SEQ ID NO: 403467 - protein, 17 aa, Homo sapiens
  CDR3 for alpha chain variable domain of TCR clone 201734 (TRAV3, TRAJ6)
CAVRDGPRAGGSYRPTL

SEQ ID NO: 403468 - protein, 14 aa, Homo sapiens
  CDR3 for beta chain variable domain of TCR clone 201734 (TRBV7-2, TRBJ2-7)
CASSPKTSFYEQYF

SEQ ID NO: 403469 - protein, 15 aa, Homo sapiens
  CDR3 for alpha chain variable domain of TCR clone 201735 (TRAV14/DV4, TRAJ12)
CAMREERDSSYKLIF

SEQ ID NO: 403470 - protein, 15 aa, Homo sapiens
  CDR3 for beta chain variable domain of TCR clone 201735 (TRBV7-2, TRBJ2-1)
CASSLVAGGHNDQFF

SEQ ID NO: 403471 - protein, 15 aa, Homo sapiens
  CDR3 for alpha chain variable domain of TCR clone 201736 (TRAV26-1, TRAJ29)
CMVRVEGSGNTPLVF

SEQ ID NO: 403472 - protein, 14 aa, Homo sapiens
  CDR3 for beta chain variable domain of TCR clone 201736 (TRBV18, TRBJ2-5)
CASSPGVSQETQYF

SEQ ID NO: 403473 - protein, 14 aa, Homo sapiens
  CDR3 for alpha chain variable domain of TCR clone 201737 (TRAV2, TRAJ29)
CAGPFQYGNTPIVF

SEQ ID NO: 403474 - protein, 11 aa, Homo sapiens
  CDR3 for beta chain variable domain of TCR clone 201737 (TRBV29-1, TRBJ2-5)
CSGDRTGTQYF

SEQ ID NO: 403475 - protein, 15 aa, Homo sapiens
  CDR3 for alpha chain variable domain of TCR clone 201738 (TRAV30, TRAJ32)
CGTEILGGATNKLIF

SEQ ID NO: 403476 - protein, 16 aa, Homo sapiens
  CDR3 for beta chain variable domain of TCR clone 201738 (TRBV5-4, TRBJ2-1)
CQQLRGGRGPYNEQFF

SEQ ID NO: 403477 - protein, 14 aa, Homo sapiens
  CDR3 for alpha chain variable domain of TCR clone 201739 (TRAV1-2, TRAJ16)
CAVNRFSDGEKLLF

SEQ ID NO: 403478 - protein, 18 aa, Homo sapiens
  CDR3 for beta chain variable domain of TCR clone 201739 (TRBV7-9, TRBJ2-7)
CASSLTTSGSRTWYEQYF

SEQ ID NO: 403479 - protein, 11 aa, Homo sapiens
  CDR3 for alpha chain variable domain of TCR clone 201740 (TRAV21, TRAJ34)
CAHYNTDKLIF

SEQ ID NO: 403480 - protein, 14 aa, Homo sapiens
  CDR3 for beta chain variable domain of TCR clone 201740 (TRBV7-2, TRBJ2-7)
CASRPKTSFYEQYF

SEQ ID NO: 403481 - protein, 12 aa, Homo sapiens
  CDR3 for alpha chain variable domain of TCR clone 201741 (TRAV2, TRAJ31)
CAVEDNNARLMF

SEQ ID NO: 403482 - protein, 15 aa, Homo sapiens
  CDR3 for beta chain variable domain of TCR clone 201741 (TRBV10-3, TRBJ2-1)
CHQWSGVGGGGEQFF

SEQ ID NO: 403483 - protein, 11 aa, Homo sapiens
  CDR3 for alpha chain variable domain of TCR clone 201742 (TRAV12-2, TRAJ21)
CAVNDFNKFYF

SEQ ID NO: 403484 - protein, 14 aa, Homo sapiens
  CDR3 for beta chain variable domain of TCR clone 201742 (TRBV12-5, TRBJ2-5)
CASGSRTHQETQYF

SEQ ID NO: 403485 - protein, 12 aa, Homo sapiens
  CDR3 for alpha chain variable domain of TCR clone 201743 (TRAV12-3, TRAJ3)
CAIDSSASKIIF

SEQ ID NO: 403486 - protein, 17 aa, Homo sapiens
  CDR3 for beta chain variable domain of TCR clone 201743 (TRBV7-9, TRBJ2-3)
CASSLEEAGAYPATQYF

SEQ ID NO: 403487 - protein, 17 aa, Homo sapiens
  CDR3 for alpha chain variable domain of TCR clone 201744 (TRAV27, TRAJ52)
CAGAGCAGGTSYGKLTF

SEQ ID NO: 403488 - protein, 16 aa, Homo sapiens
  CDR3 for beta chain variable domain of TCR clone 201744 (TRBV19, TRBJ2-1)
CASSKAGPSSYNELFF

SEQ ID NO: 403489 - protein, 10 aa, Homo sapiens
  CDR3 for alpha chain variable domain of TCR clone 201745 (TRAV38-2/DV8, TRAJ21)
CAYRRNKFYF

SEQ ID NO: 403490 - protein, 12 aa, Homo sapiens
  CDR3 for beta chain variable domain of TCR clone 201745 (TRBV11-3, TRBJ2-3)
CASSLGEDTQYF

SEQ ID NO: 403491 - protein, 16 aa, Homo sapiens
  CDR3 for alpha chain variable domain of TCR clone 201746 (TRAV38-2/DV8, TRAJ47)
CAYRSEIMEYGNKLVF

SEQ ID NO: 403492 - protein, 14 aa, Homo sapiens
  CDR3 for beta chain variable domain of TCR clone 201746 (TRBV19, TRBJ2-7)
CASSIFAGTYEQYF

SEQ ID NO: 403493 - protein, 14 aa, Homo sapiens
  CDR3 for alpha chain variable domain of TCR clone 201747 (TRAV26-2, TRAJ31)
CILIPGNNNARHMF

SEQ ID NO: 403494 - protein, 16 aa, Homo sapiens
  CDR3 for beta chain variable domain of TCR clone 201747 (TRBV7-3, TRBJ2-1)
CASSLVSGSSNNEQFF

SEQ ID NO: 403495 - protein, 15 aa, Homo sapiens
  CDR3 for alpha chain variable domain of TCR clone 201748 (TRAV8-4, TRAJ3)
CAVTGENLVRQCFQD

SEQ ID NO: 403496 - protein, 16 aa, Homo sapiens
  CDR3 for beta chain variable domain of TCR clone 201748 (TRBV4-2, TRBJ1-1)
CASSQAGFGMNTEAFF

SEQ ID NO: 403497 - protein, 13 aa, Homo sapiens
  CDR3 for alpha chain variable domain of TCR clone 201749 (TRAV13-2, TRAJ53)
CAENMGSNYKLTF

SEQ ID NO: 403498 - protein, 14 aa, Homo sapiens
  CDR3 for beta chain variable domain of TCR clone 201749 (TRBV7-2, TRBJ2-7)
CASSPKTSFYEQYF

SEQ ID NO: 403499 - protein, 12 aa, Homo sapiens
  CDR3 for alpha chain variable domain of TCR clone 201750 (TRAV27, TRAJ33)
CAGDGSNYQLIW

SEQ ID NO: 403500 - protein, 16 aa, Homo sapiens
  CDR3 for beta chain variable domain of TCR clone 201750 (TRBV20-1, TRBJ2-4)
CSATSLAELAKNIQYF

SEQ ID NO: 403501 - protein, 14 aa, Homo sapiens
  CDR3 for alpha chain variable domain of TCR clone 201751 (TRAV29/DV5, TRAJ36)
CAARRKTGANNLFF

SEQ ID NO: 403502 - protein, 14 aa, Homo sapiens
  CDR3 for beta chain variable domain of TCR clone 201751 (TRBV12-5, TRBJ2-5)
CASGSRTHQQTQYL

SEQ ID NO: 403503 - protein, 14 aa, Homo sapiens
  CDR3 for alpha chain variable domain of TCR clone 201752 (TRAV12-2, TRAJ45)
CALNIGGGADGLTF

SEQ ID NO: 403504 - protein, 15 aa, Homo sapiens
  CDR3 for beta chain variable domain of TCR clone 201752 (TRBV5-1, TRBJ2-3)
CASSVTSGSTDTQYF

SEQ ID NO: 403505 - protein, 13 aa, Homo sapiens
  CDR3 for alpha chain variable domain of TCR clone 201753 (TRAV14/DV4, TRAJ4)
CAMKAGGYNKLIF

SEQ ID NO: 403506 - protein, 17 aa, Homo sapiens
  CDR3 for beta chain variable domain of TCR clone 201753 (TRBV7-8, TRBJ2-6)
CASSAGTGGAGANVLTF

SEQ ID NO: 403507 - protein, 15 aa, Homo sapiens
  CDR3 for alpha chain variable domain of TCR clone 201754 (TRAV8-6, TRAJ6)
CAVSGESGGSYIPTF

SEQ ID NO: 403508 - protein, 13 aa, Homo sapiens
  CDR3 for beta chain variable domain of TCR clone 201754 (TRBV12-4, TRBJ1-1)
CASSPGTGFEAFF

SEQ ID NO: 403509 - protein, 16 aa, Homo sapiens
  CDR3 for alpha chain variable domain of TCR clone 201755 (TRAV3, TRAJ37)
CAVRVRGSGNTGKLIF

SEQ ID NO: 403510 - protein, 13 aa, Homo sapiens
  CDR3 for beta chain variable domain of TCR clone 201755 (TRBV7-9, TRBJ1-2)
CASSLEQNYGYFF

SEQ ID NO: 403511 - protein, 14 aa, Homo sapiens
  CDR3 for alpha chain variable domain of TCR clone 201756 (TRAV1-2, TRAJ29)
CAVRELTSATPLVF

SEQ ID NO: 403512 - protein, 12 aa, Homo sapiens
  CDR3 for beta chain variable domain of TCR clone 201756 (TRBV3-1, TRBJ2-2)
CASSLFPGELFF

SEQ ID NO: 403513 - protein, 18 aa, Homo sapiens
  CDR3 for alpha chain variable domain of TCR clone 201757 (TRAV12-3, TRAJ52)
CAMSVGGAGGTSYGKLTF

SEQ ID NO: 403514 - protein, 15 aa, Homo sapiens
  CDR3 for beta chain variable domain of TCR clone 201757 (TRBV27, TRBJ1-6)
CASSFDRGLGSHLYF

SEQ ID NO: 403515 - protein, 15 aa, Homo sapiens
  CDR3 for alpha chain variable domain of TCR clone 201758 (TRAV4, TRAJ39)
CLVGPNNNAGSILTF

SEQ ID NO: 403516 - protein, 13 aa, Homo sapiens
  CDR3 for beta chain variable domain of TCR clone 201758 (TRBV11-2, TRBJ2-5)
CASSSTGEETQYF

SEQ ID NO: 403517 - protein, 13 aa, Homo sapiens
  CDR3 for alpha chain variable domain of TCR clone 201759 (TRAV8-3, TRAJ28)
CVVGEVGSYQLTF

SEQ ID NO: 403518 - protein, 14 aa, Homo sapiens
  CDR3 for beta chain variable domain of TCR clone 201759 (TRBV7-2, TRBJ2-7)
CASRSQGAAYEQYF

SEQ ID NO: 403519 - protein, 17 aa, Homo sapiens
  CDR3 for alpha chain variable domain of TCR clone 201760 (TRAV3, TRAJ6)
CAVRDGPRAGGSYIPPF

SEQ ID NO: 403520 - protein, 19 aa, Homo sapiens
  CDR3 for beta chain variable domain of TCR clone 201760 (TRBV25-1, TRBJ2-2)
CAILVYRVDRGRKTGELFF

SEQ ID NO: 403521 - protein, 14 aa, Homo sapiens
  CDR3 for alpha chain variable domain of TCR clone 201761 (TRAV12-3, TRAJ10)
SHLPLTGGGNKLTF

SEQ ID NO: 403522 - protein, 16 aa, Homo sapiens
  CDR3 for beta chain variable domain of TCR clone 201761 (TRBV6-1, TRBJ1-2)
CASSGAWQGRSHGYTF

SEQ ID NO: 403523 - protein, 14 aa, Homo sapiens
  CDR3 for alpha chain variable domain of TCR clone 201762 (TRAV12-3, TRAJ6)
CAMSATGGSYIPTF

SEQ ID NO: 403524 - protein, 16 aa, Homo sapiens
  CDR3 for beta chain variable domain of TCR clone 201762 (TRBV4-2, TRBJ2-1)
CDSSPRAGQGANEQFF

SEQ ID NO: 403525 - protein, 15 aa, Homo sapiens
  CDR3 for alpha chain variable domain of TCR clone 201763 (TRAV26-1, TRAJ29)
CIVRVEGSGNTPLVF

SEQ ID NO: 403526 - protein, 15 aa, Homo sapiens
  CDR3 for beta chain variable domain of TCR clone 201763 (TRBV7-9, TRBJ1-5)
CASSQGHQPNQTQHL

SEQ ID NO: 403527 - protein, 18 aa, Homo sapiens
  CDR3 for alpha chain variable domain of TCR clone 201764 (TRAV21, TRAJ52)
CAVRPSPAGGTNYGKMTF

SEQ ID NO: 403528 - protein, 13 aa, Homo sapiens
  CDR3 for beta chain variable domain of TCR clone 201764 (TRBV20-1, TRBJ1-1)
CSARVGGNTEAFF

SEQ ID NO: 403529 - protein, 14 aa, Homo sapiens
  CDR3 for alpha chain variable domain of TCR clone 201765 (TRAV29/DV5, TRAJ36)
CAARRKTGANNLFF

SEQ ID NO: 403530 - protein, 15 aa, Homo sapiens
  CDR3 for beta chain variable domain of TCR clone 201765 (TRBV5-1, TRBJ2-7)
CASSLDLTSSYEQYF

SEQ ID NO: 403531 - protein, 13 aa, Homo sapiens
  CDR3 for alpha chain variable domain of TCR clone 201766 (TRAV12-3, TRAJ5)
CAMIYTGRRAPTF

SEQ ID NO: 403532 - protein, 12 aa, Homo sapiens
  CDR3 for beta chain variable domain of TCR clone 201766 (TRBV18, TRBJ1-4)
CASSPSREKLFF

SEQ ID NO: 403533 - protein, 13 aa, Homo sapiens
  CDR3 for alpha chain variable domain of TCR clone 201767 (TRAV12-1, TRAJ11)
CVVTRGGYSTLTF

SEQ ID NO: 403534 - protein, 13 aa, Homo sapiens
  CDR3 for beta chain variable domain of TCR clone 201767 (TRBV20-1, TRBJ1-2)
CSARDQGAYGYFF

SEQ ID NO: 403535 - protein, 15 aa, Homo sapiens
  CDR3 for alpha chain variable domain of TCR clone 201768 (TRAV12-1, TRAJ44)
CVADLPTGTASKLTF

SEQ ID NO: 403536 - protein, 18 aa, Homo sapiens
  CDR3 for beta chain variable domain of TCR clone 201768 (TRBV7-6, TRBJ2-1)
CASSPRTSGMSSYNEQFF

SEQ ID NO: 403537 - protein, 12 aa, Homo sapiens
  CDR3 for alpha chain variable domain of TCR clone 201769 (TRAV23/DV6, TRAJ31)
CAASRIGARLLF

SEQ ID NO: 403538 - protein, 13 aa, Homo sapiens
  CDR3 for beta chain variable domain of TCR clone 201769 (TRBV28, TRBJ2-7)
CASKAGGVYEQYF

SEQ ID NO: 403539 - protein, 15 aa, Homo sapiens
  CDR3 for alpha chain variable domain of TCR clone 201770 (TRAV8-4, TRAJ37)
CAVSRGSGNTGKLIF

SEQ ID NO: 403540 - protein, 16 aa, Homo sapiens
  CDR3 for beta chain variable domain of TCR clone 201770 (TRBV7-3, TRBJ2-3)
CASCLSGYRPEDTQYF

SEQ ID NO: 403541 - protein, 12 aa, Homo sapiens
  CDR3 for alpha chain variable domain of TCR clone 201771 (TRAV17, TRAJ21)
CALRYTFNKFYF

SEQ ID NO: 403542 - protein, 13 aa, Homo sapiens
  CDR3 for beta chain variable domain of TCR clone 201771 (TRBV24-1, TRBJ2-5)
CATSTGGTETQYF

SEQ ID NO: 403543 - protein, 11 aa, Homo sapiens
  CDR3 for alpha chain variable domain of TCR clone 201772 (TRAV13-1, TRAJ31)
CSNRYNARLRF

SEQ ID NO: 403544 - protein, 11 aa, Homo sapiens
  CDR3 for beta chain variable domain of TCR clone 201772 (TRBV20-1, TRBJ2-7)
CSARTSYEQYF

SEQ ID NO: 403545 - protein, 10 aa, Homo sapiens
  CDR3 for alpha chain variable domain of TCR clone 201773 (TRAV8-4, TRAJ43)
CAVSADDMRF

SEQ ID NO: 403546 - protein, 15 aa, Homo sapiens
  CDR3 for beta chain variable domain of TCR clone 201773 (TRBV5-7, TRBJ1-5)
CASSYGKLWDQPQHF

SEQ ID NO: 403547 - protein, 14 aa, Homo sapiens
  CDR3 for alpha chain variable domain of TCR clone 201774 (TRAV35, TRAJ40)
CAGSTTSGIYKYIF

SEQ ID NO: 403548 - protein, 13 aa, Homo sapiens
  CDR3 for beta chain variable domain of TCR clone 201774 (TRBV20-1, TRBJ1-6)
CSAPLGVGSPLHF

SEQ ID NO: 403549 - protein, 16 aa, Homo sapiens
  CDR3 for alpha chain variable domain of TCR clone 201775 (TRAV12-3, TRAJ53)
CAMSPGSGGSNYKLTF

SEQ ID NO: 403550 - protein, 11 aa, Homo sapiens
  CDR3 for beta chain variable domain of TCR clone 201775 (TRBV29-1, TRBJ2-5)
CSEDRPGTQSF

SEQ ID NO: 403551 - protein, 15 aa, Homo sapiens
  CDR3 for alpha chain variable domain of TCR clone 201776 (TRAV3, TRAJ5)
CAVRDLYTGRRALTF

SEQ ID NO: 403552 - protein, 16 aa, Homo sapiens
  CDR3 for beta chain variable domain of TCR clone 201776 (TRBV20-1, TRBJ1-4)
CSAPGQGLLTNEKRFF

SEQ ID NO: 403553 - protein, 17 aa, Homo sapiens
  CDR3 for alpha chain variable domain of TCR clone 201777 (TRAV3, TRAJ6)
CAVSRRTDTGGSYIPTF

SEQ ID NO: 403554 - protein, 18 aa, Homo sapiens
  CDR3 for beta chain variable domain of TCR clone 201777 (TRBV7-2, TRBJ2-3)
CASSLETSRGRKEDTQYF

SEQ ID NO: 403555 - protein, 11 aa, Homo sapiens
  CDR3 for alpha chain variable domain of TCR clone 201778 (TRAV21, TRAJ31)
CAVRNNARLMF

SEQ ID NO: 403556 - protein, 17 aa, Homo sapiens
  CDR3 for beta chain variable domain of TCR clone 201778 (TRBV28, TRBJ1-5)
CASSLSWLVSSNQPQHL

SEQ ID NO: 403557 - protein, 14 aa, Homo sapiens
  CDR3 for alpha chain variable domain of TCR clone 201779 (TRAV27, TRAJ23)
CAGLSYNQGGKLIF

SEQ ID NO: 403558 - protein, 13 aa, Homo sapiens
  CDR3 for beta chain variable domain of TCR clone 201779 (TRBV20-1, TRBJ1-1)
CSAPLGGGTEAFF

SEQ ID NO: 403559 - protein, 14 aa, Homo sapiens
  CDR3 for alpha chain variable domain of TCR clone 201780 (TRAV13-1, TRAJ6)
CAASITGGSYIPTF

SEQ ID NO: 403560 - protein, 11 aa, Homo sapiens
  CDR3 for beta chain variable domain of TCR clone 201780 (TRBV12-4, TRBJ2-3)
CASTATDTQYF

SEQ ID NO: 403561 - protein, 12 aa, Homo sapiens
  CDR3 for alpha chain variable domain of TCR clone 201781 (TRAV13-1, TRAJ21)
CAAKEGFNKFYF

SEQ ID NO: 403562 - protein, 15 aa, Homo sapiens
  CDR3 for beta chain variable domain of TCR clone 201781 (TRBV28, TRBJ2-4)
CAAGSGTLIMGMQYF

SEQ ID NO: 403563 - protein, 13 aa, Homo sapiens
  CDR3 for alpha chain variable domain of TCR clone 201782 (TRAV8-3, TRAJ7)
CAVGAYGNNRLAF

SEQ ID NO: 403564 - protein, 14 aa, Homo sapiens
  CDR3 for beta chain variable domain of TCR clone 201782 (TRBV20-1, TRBJ1-5)
CSARDDRGNQPQHF

SEQ ID NO: 403565 - protein, 12 aa, Homo sapiens
  CDR3 for alpha chain variable domain of TCR clone 201783 (TRAV12-1, TRAJ40)
CVVYSGTYKYIF

SEQ ID NO: 403566 - protein, 18 aa, Homo sapiens
  CDR3 for beta chain variable domain of TCR clone 201783 (TRBV11-3, TRBJ2-3)
CASSFGGGSRGAPNTQYF

SEQ ID NO: 403567 - protein, 15 aa, Homo sapiens
  CDR3 for alpha chain variable domain of TCR clone 201784 (TRAV27, TRAJ38)
CAARSNAGNNRKLIW

SEQ ID NO: 403568 - protein, 13 aa, Homo sapiens
  CDR3 for beta chain variable domain of TCR clone 201784 (TRBV20-1, TRBJ1-1)
CSARAGGNTEAFF

SEQ ID NO: 403569 - protein, 11 aa, Homo sapiens
  CDR3 for alpha chain variable domain of TCR clone 201785 (TRAV1-1, TRAJ30)
CAQNRGDKIIF

SEQ ID NO: 403570 - protein, 14 aa, Homo sapiens
  CDR3 for beta chain variable domain of TCR clone 201785 (TRBV7-8, TRBJ2-7)
CASSPGLADYEQYF

SEQ ID NO: 403571 - protein, 16 aa, Homo sapiens
  CDR3 for alpha chain variable domain of TCR clone 201786 (TRAV3, TRAJ21)
CAVRDIERGNFNKFYF

SEQ ID NO: 403572 - protein, 13 aa, Homo sapiens
  CDR3 for beta chain variable domain of TCR clone 201786 (TRBV27, TRBJ2-7)
CASSVTTGCEQYF

SEQ ID NO: 403573 - protein, 16 aa, Homo sapiens
  CDR3 for alpha chain variable domain of TCR clone 201787 (TRAV8-3, TRAJ8)
CAVPRDGNTGFQKLVL

SEQ ID NO: 403574 - protein, 14 aa, Homo sapiens
  CDR3 for beta chain variable domain of TCR clone 201787 (TRBV28, TRBJ1-1)
CASSESVRGTEAFF

SEQ ID NO: 403575 - protein, 14 aa, Homo sapiens
  CDR3 for alpha chain variable domain of TCR clone 201788 (TRAV1-2, TRAJ16)
CAVNRFSDGQKLLF

SEQ ID NO: 403576 - protein, 14 aa, Homo sapiens
  CDR3 for beta chain variable domain of TCR clone 201788 (TRBV29-1, TRBJ1-3)
CSVADRVVGNTIYF

SEQ ID NO: 403577 - protein, 14 aa, Homo sapiens
  CDR3 for alpha chain variable domain of TCR clone 201789 (TRAV12-2, TRAJ13)
CALKKTGGYQKVTF

SEQ ID NO: 403578 - protein, 15 aa, Homo sapiens
  CDR3 for beta chain variable domain of TCR clone 201789 (TRBV27, TRBJ2-1)
CASSNGGGASNEQFF

SEQ ID NO: 403579 - protein, 18 aa, Homo sapiens
  CDR3 for alpha chain variable domain of TCR clone 201790 (TRAV35, TRAJ28)
CAGHNYPLSGAGIYQLTF

SEQ ID NO: 403580 - protein, 12 aa, Homo sapiens
  CDR3 for beta chain variable domain of TCR clone 201790 (TRBV7-9, TRBJ1-1)
CASSLEGTEAFF

SEQ ID NO: 403581 - protein, 16 aa, Homo sapiens
  CDR3 for alpha chain variable domain of TCR clone 201791 (TRAV16, TRAJ4)
CALSRMFSGGYNKLIF

SEQ ID NO: 403582 - protein, 13 aa, Homo sapiens
  CDR3 for beta chain variable domain of TCR clone 201791 (TRBV5-1, TRBJ1-2)
CASSIDRPEGYTF

SEQ ID NO: 403583 - protein, 15 aa, Homo sapiens
  CDR3 for alpha chain variable domain of TCR clone 201792 (TRAV8-3, TRAJ27)
CAVGPSKTNAGKSTF

SEQ ID NO: 403584 - protein, 18 aa, Homo sapiens
  CDR3 for beta chain variable domain of TCR clone 201792 (TRBV7-2, TRBJ2-3)
CASSLKREGSGITDTQYF

SEQ ID NO: 403585 - protein, 15 aa, Homo sapiens
  CDR3 for alpha chain variable domain of TCR clone 201793 (TRAV13-1, TRAJ57)
CAASNTQGGPEKLVF

SEQ ID NO: 403586 - protein, 13 aa, Homo sapiens
  CDR3 for beta chain variable domain of TCR clone 201793 (TRBV7-6, TRBJ1-5)
CASSQGPNRPQHF

SEQ ID NO: 403587 - protein, 11 aa, Homo sapiens
  CDR3 for alpha chain variable domain of TCR clone 201794 (TRAV2, TRAJ33)
CAVDSNYQLIW

SEQ ID NO: 403588 - protein, 14 aa, Homo sapiens
  CDR3 for beta chain variable domain of TCR clone 201794 (TRBV11-2, TRBJ2-3)
CASSRLAPTDTQYF

SEQ ID NO: 403589 - protein, 12 aa, Homo sapiens
  CDR3 for alpha chain variable domain of TCR clone 201795 (TRAV3, TRAJ39)
CAVIEWSNMLTF

SEQ ID NO: 403590 - protein, 16 aa, Homo sapiens
  CDR3 for beta chain variable domain of TCR clone 201795 (TRBV13, TRBJ2-2)
CASSPRTGEHTGELFF

SEQ ID NO: 403591 - protein, 14 aa, Homo sapiens
  CDR3 for alpha chain variable domain of TCR clone 201796 (TRAV12-1, TRAJ43)
CVVNGRSNNNDMRF

SEQ ID NO: 403592 - protein, 16 aa, Homo sapiens
  CDR3 for beta chain variable domain of TCR clone 201796 (TRBV7-9, TRBJ2-5)
CASSFSGTSGRETQYF

SEQ ID NO: 403593 - protein, 13 aa, Homo sapiens
  CDR3 for alpha chain variable domain of TCR clone 201797 (TRAV8-4, TRAJ10)
CAAFTGGGNKLNF

SEQ ID NO: 403594 - protein, 15 aa, Homo sapiens
  CDR3 for beta chain variable domain of TCR clone 201797 (TRBV15, TRBJ1-2)
CATSRVRASGSGYTF

SEQ ID NO: 403595 - protein, 14 aa, Homo sapiens
  CDR3 for alpha chain variable domain of TCR clone 201798 (TRAV38-1, TRAJ33)
CAFMKPYSNYQLIW

SEQ ID NO: 403596 - protein, 14 aa, Homo sapiens
  CDR3 for beta chain variable domain of TCR clone 201798 (TRBV6-1, TRBJ1-3)
CASVQGGGGNTIYF

SEQ ID NO: 403597 - protein, 15 aa, Homo sapiens
  CDR3 for alpha chain variable domain of TCR clone 201799 (TRAV8-2, TRAJ40)
CVVLGTTSGTYKYIF

SEQ ID NO: 403598 - protein, 16 aa, Homo sapiens
  CDR3 for beta chain variable domain of TCR clone 201799 (TRBV7-3, TRBJ2-1)
CASSLEGYRSYNEQVF

SEQ ID NO: 403599 - protein, 15 aa, Homo sapiens
  CDR3 for alpha chain variable domain of TCR clone 201800 (TRAV3, TRAJ22)
CAVRDRGGSARQLTF

SEQ ID NO: 403600 - protein, 13 aa, Homo sapiens
  CDR3 for beta chain variable domain of TCR clone 201800 (TRBV3-1, TRBJ1-1)
CASSPGVITEDFF

SEQ ID NO: 403601 - protein, 15 aa, Homo sapiens
  CDR3 for alpha chain variable domain of TCR clone 201801 (TRAV3, TRAJ22)
CAVRDRCGSARQLTF

SEQ ID NO: 403602 - protein, 20 aa, Homo sapiens
  CDR3 for beta chain variable domain of TCR clone 201801 (TRBV11-2, TRBJ1-6)
CASSLVFATGGSVHPSTLGT

SEQ ID NO: 403603 - protein, 14 aa, Homo sapiens
  CDR3 for alpha chain variable domain of TCR clone 201802 (TRAV13-1, TRAJ44)
CAAKATGTASKLTF

SEQ ID NO: 403604 - protein, 17 aa, Homo sapiens
  CDR3 for beta chain variable domain of TCR clone 201802 (TRBV7-3, TRBJ2-3)
RASSVMKRMRGAATQYF

SEQ ID NO: 403605 - protein, 14 aa, Homo sapiens
  CDR3 for alpha chain variable domain of TCR clone 201803 (TRAV16, TRAJ15)
CALSFNQAGTALIF

SEQ ID NO: 403606 - protein, 16 aa, Homo sapiens
  CDR3 for beta chain variable domain of TCR clone 201803 (TRBV9, TRBJ2-7)
CASSAGPDRSPYEQSF

SEQ ID NO: 403607 - protein, 16 aa, Homo sapiens
  CDR3 for alpha chain variable domain of TCR clone 201804 (TRAV14/DV4, TRAJ54)
CAMREGLAWGAQKLVF

SEQ ID NO: 403608 - protein, 14 aa, Homo sapiens
  CDR3 for beta chain variable domain of TCR clone 201804 (TRBV7-2, TRBJ2-7)
CASRSQGAAYEQYF

SEQ ID NO: 403609 - protein, 15 aa, Homo sapiens
  CDR3 for alpha chain variable domain of TCR clone 201805 (TRAV1-1, TRAJ20)
CAVRDNVANAYKLSV

SEQ ID NO: 403610 - protein, 13 aa, Homo sapiens
  CDR3 for beta chain variable domain of TCR clone 201805 (TRBV4-1, TRBJ2-2)
CASSQENTGELFF

SEQ ID NO: 403611 - protein, 15 aa, Homo sapiens
  CDR3 for alpha chain variable domain of TCR clone 201806 (TRAV26-2, TRAJ26)
CILRDIDNYGQNFVF

SEQ ID NO: 403612 - protein, 14 aa, Homo sapiens
  CDR3 for beta chain variable domain of TCR clone 201806 (TRBV29-1, TRBJ2-5)
CSFWTPYAGETQYF

SEQ ID NO: 403613 - protein, 17 aa, Homo sapiens
  CDR3 for alpha chain variable domain of TCR clone 201807 (TRAV26-1, TRAJ37)
CIVRVITVSSNTGKLIF

SEQ ID NO: 403614 - protein, 13 aa, Homo sapiens
  CDR3 for beta chain variable domain of TCR clone 201807 (TRBV2, TRBJ2-7)
CASSVGGAGEQYF

SEQ ID NO: 403615 - protein, 14 aa, Homo sapiens
  CDR3 for alpha chain variable domain of TCR clone 201808 (TRAV1-2, TRAJ16)
CAVNRFSDGQNLLF

SEQ ID NO: 403616 - protein, 13 aa, Homo sapiens
  CDR3 for beta chain variable domain of TCR clone 201808 (TRBV7-3, TRBJ1-1)
CASSQDWGAEAFL

SEQ ID NO: 403617 - protein, 17 aa, Homo sapiens
  CDR3 for alpha chain variable domain of TCR clone 201809 (TRAV13-1, TRAJ31)
CAPRDRLMFGDGTQLVV

SEQ ID NO: 403618 - protein, 12 aa, Homo sapiens
  CDR3 for beta chain variable domain of TCR clone 201809 (TRBV7-9, TRBJ2-7)
CASSIKREEQYF

SEQ ID NO: 403619 - protein, 12 aa, Homo sapiens
  CDR3 for alpha chain variable domain of TCR clone 201810 (TRAV12-3, TRAJ17)
CAMTLTGNKLTF

SEQ ID NO: 403620 - protein, 16 aa, Homo sapiens
  CDR3 for beta chain variable domain of TCR clone 201810 (TRBV12-4, TRBJ2-5)
CASSFFDRGRQETQYF

SEQ ID NO: 403621 - protein, 11 aa, Homo sapiens
  CDR3 for alpha chain variable domain of TCR clone 201811 (TRAV12-1, TRAJ34)
CVMNKGRELIF

SEQ ID NO: 403622 - protein, 12 aa, Homo sapiens
  CDR3 for beta chain variable domain of TCR clone 201811 (TRBV2, TRBJ2-1)
CDYGPPGNEQFF

SEQ ID NO: 403623 - protein, 11 aa, Homo sapiens
  CDR3 for alpha chain variable domain of TCR clone 201812 (TRAV2, TRAJ13)
CASGGYQRVTF

SEQ ID NO: 403624 - protein, 16 aa, Homo sapiens
  CDR3 for beta chain variable domain of TCR clone 201812 (TRBV19, TRBJ2-1)
CASSKAGPSSYNEQFF

SEQ ID NO: 403625 - protein, 13 aa, Homo sapiens
  CDR3 for alpha chain variable domain of TCR clone 201813 (TRAV2, TRAJ20)
CAVEDPSEYKLSF

SEQ ID NO: 403626 - protein, 16 aa, Homo sapiens
  CDR3 for beta chain variable domain of TCR clone 201813 (TRBV25-1, TRBJ2-7)
CASSELTDGGIYEQYF

SEQ ID NO: 403627 - protein, 22 aa, Homo sapiens
  CDR3 for alpha chain variable domain of TCR clone 201814 (TRAV3, TRAJ38)
CAVRDCLNAGNNHIQNPDPAVY

SEQ ID NO: 403628 - protein, 19 aa, Homo sapiens
  CDR3 for beta chain variable domain of TCR clone 201814 (TRBV11-3, TRBJ2-2)
CASSTRPGAKTTNTGELFF

SEQ ID NO: 403629 - protein, 14 aa, Homo sapiens
  CDR3 for alpha chain variable domain of TCR clone 201815 (TRAV13-2, TRAJ9)
CAENSFTGGLKTIF

SEQ ID NO: 403630 - protein, 13 aa, Homo sapiens
  CDR3 for beta chain variable domain of TCR clone 201815 (TRBV19, TRBJ2-7)
CASSIDRTYEQYF

SEQ ID NO: 403631 - protein, 16 aa, Homo sapiens
  CDR3 for alpha chain variable domain of TCR clone 201816 (TRAV3, TRAJ10)
RAVRDMRAGGGNKLTF

SEQ ID NO: 403632 - protein, 15 aa, Homo sapiens
  CDR3 for beta chain variable domain of TCR clone 201816 (TRBV7-2, TRBJ1-5)
CASSRGQGDNQPQHF

SEQ ID NO: 403633 - protein, 13 aa, Homo sapiens
  CDR3 for alpha chain variable domain of TCR clone 201817 (TRAV13-2, TRAJ13)
CAERPGGYQKVTF

SEQ ID NO: 403634 - protein, 16 aa, Homo sapiens
  CDR3 for beta chain variable domain of TCR clone 201817 (TRBV18, TRBJ2-5)
CASSPPSSGWAKTQYF

SEQ ID NO: 403635 - protein, 11 aa, Homo sapiens
  CDR3 for alpha chain variable domain of TCR clone 201818 (TRAV2, TRAJ23)
CAVETRGKLIF

SEQ ID NO: 403636 - protein, 15 aa, Homo sapiens
  CDR3 for beta chain variable domain of TCR clone 201818 (TRBV2, TRBJ2-1)
CASSVVGSSGNEQFF

SEQ ID NO: 403637 - protein, 14 aa, Homo sapiens
  CDR3 for alpha chain variable domain of TCR clone 201819 (TRAV3, TRAJ37)
CAVKESGNTGKLIF

SEQ ID NO: 403638 - protein, 16 aa, Homo sapiens
  CDR3 for beta chain variable domain of TCR clone 201819 (TRBV7-9, TRBJ2-5)
CASSPSGQGVKGTQYF

SEQ ID NO: 403639 - protein, 11 aa, Homo sapiens
  CDR3 for alpha chain variable domain of TCR clone 201820 (TRAV12-3, TRAJ49)
CAMSSGNQFYF

SEQ ID NO: 403640 - protein, 16 aa, Homo sapiens
  CDR3 for beta chain variable domain of TCR clone 201820 (TRBV12-4, TRBJ2-5)
CASSWRPSGDLETQYF

SEQ ID NO: 403641 - protein, 12 aa, Homo sapiens
  CDR3 for alpha chain variable domain of TCR clone 201821 (TRAV12-3, TRAJ17)
CAMTLTGNKLTF

SEQ ID NO: 403642 - protein, 15 aa, Homo sapiens
  CDR3 for beta chain variable domain of TCR clone 201821 (TRBV7-9, TRBJ2-1)
CASSLGLAGGTEQFF

SEQ ID NO: 403643 - protein, 14 aa, Homo sapiens
  CDR3 for alpha chain variable domain of TCR clone 201822 (TRAV26-1, TRAJ38)
CIADNAGNNRKLDW

SEQ ID NO: 403644 - protein, 13 aa, Homo sapiens
  CDR3 for beta chain variable domain of TCR clone 201822 (TRBV20-1, TRBJ1-1)
CSARGGGNTEAFF

SEQ ID NO: 403645 - protein, 13 aa, Homo sapiens
  CDR3 for alpha chain variable domain of TCR clone 201823 (TRAV13-1, TRAJ12)
CAASPDSSYKLIF

SEQ ID NO: 403646 - protein, 15 aa, Homo sapiens
  CDR3 for beta chain variable domain of TCR clone 201823 (TRBV20-1, TRBJ2-7)
CSARDRVSGMDEKYF

SEQ ID NO: 403647 - protein, 12 aa, Homo sapiens
  CDR3 for alpha chain variable domain of TCR clone 201824 (TRAV2, TRAJ40)
CVVTSGTYKYIF

SEQ ID NO: 403648 - protein, 14 aa, Homo sapiens
  CDR3 for beta chain variable domain of TCR clone 201824 (TRBV19, TRBJ2-1)
CASPTFVLSGEQFF

SEQ ID NO: 403649 - protein, 15 aa, Homo sapiens
  CDR3 for alpha chain variable domain of TCR clone 201825 (TRAV17, TRAJ13)
CATDAGTGGYQKVTF

SEQ ID NO: 403650 - protein, 17 aa, Homo sapiens
  CDR3 for beta chain variable domain of TCR clone 201825 (TRBV11-2, TRBJ2-1)
CASSLYPPGVEYNEQFF

SEQ ID NO: 403651 - protein, 17 aa, Homo sapiens
  CDR3 for alpha chain variable domain of TCR clone 201826 (TRAV20, TRAJ42)
CVVQAWGYGGSKGNLIF

SEQ ID NO: 403652 - protein, 16 aa, Homo sapiens
  CDR3 for beta chain variable domain of TCR clone 201826 (TRBV29-1, TRBJ2-5)
CSVEGLAGDYQETQYF

SEQ ID NO: 403653 - protein, 12 aa, Homo sapiens
  CDR3 for alpha chain variable domain of TCR clone 201827 (TRAV12-2, TRAJ42)
CAVGGSQGNLIF

SEQ ID NO: 403654 - protein, 15 aa, Homo sapiens
  CDR3 for beta chain variable domain of TCR clone 201827 (TRBV12-4, TRBJ2-5)
CASTLNSGRGGTQYF

SEQ ID NO: 403655 - protein, 13 aa, Homo sapiens
  CDR3 for alpha chain variable domain of TCR clone 201828 (TRAV12-2, TRAJ4)
CAVRSGGYNKLIF

SEQ ID NO: 403656 - protein, 15 aa, Homo sapiens
  CDR3 for beta chain variable domain of TCR clone 201828 (TRBV10-3, TRBJ2-1)
CAISYVQDRAYEQFF

SEQ ID NO: 403657 - protein, 15 aa, Homo sapiens
  CDR3 for alpha chain variable domain of TCR clone 201829 (TRAV12-3, TRAJ42)
CAMSGHGGSQGNLIF

SEQ ID NO: 403658 - protein, 14 aa, Homo sapiens
  CDR3 for beta chain variable domain of TCR clone 201829 (TRBV4-1, TRBJ2-2)
CASSQAVNTGELFF

SEQ ID NO: 403659 - protein, 13 aa, Homo sapiens
  CDR3 for alpha chain variable domain of TCR clone 201830 (TRAV22, TRAJ29)
CAVGGSGNTPLVF

SEQ ID NO: 403660 - protein, 11 aa, Homo sapiens
  CDR3 for beta chain variable domain of TCR clone 201830 (TRBV5-4, TRBJ2-3)
CASSPTDTQYF

SEQ ID NO: 403661 - protein, 14 aa, Homo sapiens
  CDR3 for alpha chain variable domain of TCR clone 201831 (TRAV17, TRAJ9)
CATPTRAGGFKTIF

SEQ ID NO: 403662 - protein, 16 aa, Homo sapiens
  CDR3 for beta chain variable domain of TCR clone 201831 (TRBV4-2, TRBJ2-3)
CASSQELAGDTDTQYF

SEQ ID NO: 403663 - protein, 14 aa, Homo sapiens
  CDR3 for alpha chain variable domain of TCR clone 201832 (TRAV12-2, TRAJ3)
CAVRLYSSASKIIF

SEQ ID NO: 403664 - protein, 14 aa, Homo sapiens
  CDR3 for beta chain variable domain of TCR clone 201832 (TRBV27, TRBJ2-1)
CAGSIAETYNEQFF

SEQ ID NO: 403665 - protein, 11 aa, Homo sapiens
  CDR3 for alpha chain variable domain of TCR clone 201833 (TRAV8-3, TRAJ49)
CAVNTGNQVYF

SEQ ID NO: 403666 - protein, 12 aa, Homo sapiens
  CDR3 for beta chain variable domain of TCR clone 201833 (TRBV11-2, TRBJ2-7)
CASSPPADEQYF

SEQ ID NO: 403667 - protein, 13 aa, Homo sapiens
  CDR3 for alpha chain variable domain of TCR clone 201834 (TRAV27, TRAJ53)
CAGQGGSKYKLTF

SEQ ID NO: 403668 - protein, 13 aa, Homo sapiens
  CDR3 for beta chain variable domain of TCR clone 201834 (TRBV29-1, TRBJ1-1)
CSVESGFGTEAFF

SEQ ID NO: 403669 - protein, 13 aa, Homo sapiens
  CDR3 for alpha chain variable domain of TCR clone 201835 (TRAV12-3, TRAJ7)
CAMSASGNNRLAF

SEQ ID NO: 403670 - protein, 14 aa, Homo sapiens
  CDR3 for beta chain variable domain of TCR clone 201835 (TRBV13, TRBJ2-5)
CASGLGPRGGTQYF

SEQ ID NO: 403671 - protein, 15 aa, Homo sapiens
  CDR3 for alpha chain variable domain of TCR clone 201836 (TRAV21, TRAJ37)
CAVRPTLSNTGKLIF

SEQ ID NO: 403672 - protein, 16 aa, Homo sapiens
  CDR3 for beta chain variable domain of TCR clone 201836 (TRBV24-1, TRBJ2-3)
FATSDRRQDLTDTQYF

SEQ ID NO: 403673 - protein, 14 aa, Homo sapiens
  CDR3 for alpha chain variable domain of TCR clone 201837 (TRAV1-2, TRAJ16)
CAVNRFSDGQKLLF

SEQ ID NO: 403674 - protein, 17 aa, Homo sapiens
  CDR3 for beta chain variable domain of TCR clone 201837 (TRBV4-1, TRBJ2-1)
CASSQDPRGASYNEQFF

SEQ ID NO: 403675 - protein, 15 aa, Homo sapiens
  CDR3 for alpha chain variable domain of TCR clone 201838 (TRAV8-3, TRAJ15)
CAVGAANQAGTALIF

SEQ ID NO: 403676 - protein, 14 aa, Homo sapiens
  CDR3 for beta chain variable domain of TCR clone 201838 (TRBV20-1, TRBJ2-1)
CSPNDGASYNEQFF

SEQ ID NO: 403677 - protein, 15 aa, Homo sapiens
  CDR3 for alpha chain variable domain of TCR clone 201839 (TRAV26-1, TRAJ29)
CIVRVEGSGNTPLVF

SEQ ID NO: 403678 - protein, 16 aa, Homo sapiens
  CDR3 for beta chain variable domain of TCR clone 201839 (TRBV4-2, TRBJ2-4)
CASSQELRRAKNIQYF

SEQ ID NO: 403679 - protein, 15 aa, Homo sapiens
  CDR3 for alpha chain variable domain of TCR clone 201840 (TRAV26-1, TRAJ29)
CIVRVEGSGNTPRVL

SEQ ID NO: 403680 - protein, 14 aa, Homo sapiens
  CDR3 for beta chain variable domain of TCR clone 201840 (TRBV18, TRBJ2-5)
CASSPGVSQETQYF

SEQ ID NO: 403681 - protein, 14 aa, Homo sapiens
  CDR3 for alpha chain variable domain of TCR clone 201841 (TRAV8-4, TRAJ13)
CAVTLSGGYQKVTF

SEQ ID NO: 403682 - protein, 16 aa, Homo sapiens
  CDR3 for beta chain variable domain of TCR clone 201841 (TRBV6-1, TRBJ1-2)
CASSGAWQGRSHGYTF

SEQ ID NO: 403683 - protein, 12 aa, Homo sapiens
  CDR3 for alpha chain variable domain of TCR clone 201842 (TRAV3, TRAJ39)
CAVIAWSNMLTF

SEQ ID NO: 403684 - protein, 14 aa, Homo sapiens
  CDR3 for beta chain variable domain of TCR clone 201842 (TRBV7-8, TRBJ2-3)
CASSFPDGQDTQYF

SEQ ID NO: 403685 - protein, 13 aa, Homo sapiens
  CDR3 for alpha chain variable domain of TCR clone 201843 (TRAV20, TRAJ48)
CAVQGVGNEKLTF

SEQ ID NO: 403686 - protein, 19 aa, Homo sapiens
  CDR3 for beta chain variable domain of TCR clone 201843 (TRBV2, TRBJ2-2)
CASSQPGLAGGGNTGEPFF

SEQ ID NO: 403687 - protein, 19 aa, Homo sapiens
  CDR3 for alpha chain variable domain of TCR clone 201844 (TRAV26-1, TRAJ52)
CIVRAHRNAGGTSYGKLTF

SEQ ID NO: 403688 - protein, 15 aa, Homo sapiens
  CDR3 for beta chain variable domain of TCR clone 201844 (TRBV29-1, TRBJ2-1)
CSGRDRKSSYNEQFS

SEQ ID NO: 403689 - protein, 14 aa, Homo sapiens
  CDR3 for alpha chain variable domain of TCR clone 201845 (TRAV26-1, TRAJ49)
CIVRARHTGNQFYF

SEQ ID NO: 403690 - protein, 13 aa, Homo sapiens
  CDR3 for beta chain variable domain of TCR clone 201845 (TRBV12-5, TRBJ2-3)
CASGDRQSDTQYF

SEQ ID NO: 403691 - protein, 16 aa, Homo sapiens
  CDR3 for alpha chain variable domain of TCR clone 201846 (TRAV30, TRAJ24)
CGTEIVDADSWGKFQL

SEQ ID NO: 403692 - protein, 14 aa, Homo sapiens
  CDR3 for beta chain variable domain of TCR clone 201846 (TRBV7-2, TRBJ2-7)
CASRSQGAAYEQYF

SEQ ID NO: 403693 - protein, 10 aa, Homo sapiens
  CDR3 for alpha chain variable domain of TCR clone 201847 (TRAV1-2, TRAJ20)
CAVTDYKLSF

SEQ ID NO: 403694 - protein, 15 aa, Homo sapiens
  CDR3 for beta chain variable domain of TCR clone 201847 (TRBV7-2, TRBJ2-7)
CASSLVSSGSYEQYV

SEQ ID NO: 403695 - protein, 16 aa, Homo sapiens
  CDR3 for alpha chain variable domain of TCR clone 201848 (TRAV20, TRAJ28)
CAVRDPSGAGSYQLTF

SEQ ID NO: 403696 - protein, 14 aa, Homo sapiens
  CDR3 for beta chain variable domain of TCR clone 201848 (TRBV4-2, TRBJ2-1)
CASGLDRAYNEQFF

SEQ ID NO: 403697 - protein, 11 aa, Homo sapiens
  CDR3 for alpha chain variable domain of TCR clone 201849 (TRAV21, TRAJ48)
CAVDGNEKLTF

SEQ ID NO: 403698 - protein, 16 aa, Homo sapiens
  CDR3 for beta chain variable domain of TCR clone 201849 (TRBV19, TRBJ2-1)
CASSSKGTRSYNGQFF

SEQ ID NO: 403699 - protein, 14 aa, Homo sapiens
  CDR3 for alpha chain variable domain of TCR clone 201850 (TRAV13-1, TRAJ35)
CAASKGGFGNVLHG

SEQ ID NO: 403700 - protein, 13 aa, Homo sapiens
  CDR3 for beta chain variable domain of TCR clone 201850 (TRBV7-3, TRBJ1-1)
CASSQDWEAEAFF

SEQ ID NO: 403701 - protein, 17 aa, Homo sapiens
  CDR3 for alpha chain variable domain of TCR clone 201851 (TRAV26-1, TRAJ53)
CIVRVDDSGGSNYKLTF

SEQ ID NO: 403702 - protein, 15 aa, Homo sapiens
  CDR3 for beta chain variable domain of TCR clone 201851 (TRBV18, TRBJ2-7)
CASSPLQGRTYEQYF

SEQ ID NO: 403703 - protein, 17 aa, Homo sapiens
  CDR3 for alpha chain variable domain of TCR clone 201852 (TRAV3, TRAJ6)
CAVRDGPRAGGSYVPTF

SEQ ID NO: 403704 - protein, 13 aa, Homo sapiens
  CDR3 for beta chain variable domain of TCR clone 201852 (TRBV19, TRBJ2-7)
CASSIDRTYEQYF

SEQ ID NO: 403705 - protein, 15 aa, Homo sapiens
  CDR3 for alpha chain variable domain of TCR clone 201853 (TRAV17, TRAJ57)
CATGPSQGGSEKLVF

SEQ ID NO: 403706 - protein, 17 aa, Homo sapiens
  CDR3 for beta chain variable domain of TCR clone 201853 (TRBV19, TRBJ2-1)
CASSIQGLAGGYNEQFF

SEQ ID NO: 403707 - protein, 11 aa, Homo sapiens
  CDR3 for alpha chain variable domain of TCR clone 201854 (TRAV12-1, TRAJ21)
CVVNNFNKFYF

SEQ ID NO: 403708 - protein, 14 aa, Homo sapiens
  CDR3 for beta chain variable domain of TCR clone 201854 (TRBV15, TRBJ1-5)
CASSREQSNQPQHF

SEQ ID NO: 403709 - protein, 13 aa, Homo sapiens
  CDR3 for alpha chain variable domain of TCR clone 201855 (TRAV2, TRAJ29)
CAEQNSGNTPLVF

SEQ ID NO: 403710 - protein, 13 aa, Homo sapiens
  CDR3 for beta chain variable domain of TCR clone 201855 (TRBV28, TRBJ1-2)
CASSPGNRNGYIF

SEQ ID NO: 403711 - protein, 11 aa, Homo sapiens
  CDR3 for alpha chain variable domain of TCR clone 201856 (TRAV3, TRAJ17)
PRGAAGNRLTF

SEQ ID NO: 403712 - protein, 15 aa, Homo sapiens
  CDR3 for beta chain variable domain of TCR clone 201856 (TRBV4-1, TRBJ1-4)
CASSDTGGTNEKLFF

SEQ ID NO: 403713 - protein, 15 aa, Homo sapiens
  CDR3 for alpha chain variable domain of TCR clone 201857 (TRAV26-1, TRAJ48)
CIVRVGDFGNEKLTF

SEQ ID NO: 403714 - protein, 16 aa, Homo sapiens
  CDR3 for beta chain variable domain of TCR clone 201857 (TRBV4-1, TRBJ2-3)
CASSQRAGGVTDTQYF

SEQ ID NO: 403715 - protein, 15 aa, Homo sapiens
  CDR3 for alpha chain variable domain of TCR clone 201858 (TRAV20, TRAJ23)
CAVQAVRNQGGKIIF

SEQ ID NO: 403716 - protein, 16 aa, Homo sapiens
  CDR3 for beta chain variable domain of TCR clone 201858 (TRBV27, TRBJ2-7)
CASSKQGRGWAYEQYF

SEQ ID NO: 403717 - protein, 13 aa, Homo sapiens
  CDR3 for alpha chain variable domain of TCR clone 201859 (TRAV17, TRAJ9)
CATDYTGGFKTIF

SEQ ID NO: 403718 - protein, 16 aa, Homo sapiens
  CDR3 for beta chain variable domain of TCR clone 201859 (TRBV7-7, TRBJ2-1)
CASNLASGTSYNEQFF

SEQ ID NO: 403719 - protein, 14 aa, Homo sapiens
  CDR3 for alpha chain variable domain of TCR clone 201860 (TRAV8-4, TRAJ13)
CAVTLSGGYQKVTF

SEQ ID NO: 403720 - protein, 16 aa, Homo sapiens
  CDR3 for beta chain variable domain of TCR clone 201860 (TRBV7-2, TRBJ2-6)
CASSERRASGANVLTF

SEQ ID NO: 403721 - protein, 11 aa, Homo sapiens
  CDR3 for alpha chain variable domain of TCR clone 201861 (TRAV12-3, TRAJ27)
CAMANAGKSTF

SEQ ID NO: 403722 - protein, 20 aa, Homo sapiens
  CDR3 for beta chain variable domain of TCR clone 201861 (TRBV7-8, TRBJ2-2)
CASSHLFPGPTIHITGELFF

SEQ ID NO: 403723 - protein, 14 aa, Homo sapiens
  CDR3 for alpha chain variable domain of TCR clone 201862 (TRAV1-2, TRAJ16)
CAVNRFSDGQKLLF

SEQ ID NO: 403724 - protein, 15 aa, Homo sapiens
  CDR3 for beta chain variable domain of TCR clone 201862 (TRBV19, TRBJ1-1)
CASRETGGVNTEAFF

SEQ ID NO: 403725 - protein, 16 aa, Homo sapiens
  CDR3 for alpha chain variable domain of TCR clone 201863 (TRAV30, TRAJ24)
CGTESVDADSWGKFQF

SEQ ID NO: 403726 - protein, 14 aa, Homo sapiens
  CDR3 for beta chain variable domain of TCR clone 201863 (TRBV13, TRBJ2-1)
CASSPRPRYNEQFF

SEQ ID NO: 403727 - protein, 13 aa, Homo sapiens
  CDR3 for alpha chain variable domain of TCR clone 201864 (TRAV21, TRAJ57)
CAVTQGGSEKLVF

SEQ ID NO: 403728 - protein, 19 aa, Homo sapiens
  CDR3 for beta chain variable domain of TCR clone 201864 (TRBV7-2, TRBJ2-3)
CASSSQGGPRLAGADTQYF

SEQ ID NO: 403729 - protein, 10 aa, Homo sapiens
  CDR3 for alpha chain variable domain of TCR clone 201865 (TRAV26-1, TRAJ28)
CIVRVAHAYS

SEQ ID NO: 403730 - protein, 17 aa, Homo sapiens
  CDR3 for beta chain variable domain of TCR clone 201865 (TRBV9, TRBJ2-2)
CASSVGGQGADTGELFF

SEQ ID NO: 403731 - protein, 16 aa, Homo sapiens
  CDR3 for alpha chain variable domain of TCR clone 201866 (TRAV27, TRAJ53)
CAAPGGSGGSNYKLTF

SEQ ID NO: 403732 - protein, 15 aa, Homo sapiens
  CDR3 for beta chain variable domain of TCR clone 201866 (TRBV20-1, TRBJ1-1)
CSASRGVTGNTEAFF

SEQ ID NO: 403733 - protein, 15 aa, Homo sapiens
  CDR3 for alpha chain variable domain of TCR clone 201867 (TRAV17, TRAJ10)
CATVLLTGGGNKLTF

SEQ ID NO: 403734 - protein, 16 aa, Homo sapiens
  CDR3 for beta chain variable domain of TCR clone 201867 (TRBV7-9, TRBJ2-3)
CASSPWWEVGTDTQYF

SEQ ID NO: 403735 - protein, 14 aa, Homo sapiens
  CDR3 for alpha chain variable domain of TCR clone 201868 (TRAV16, TRAJ37)
CALDISSNTGKLIF

SEQ ID NO: 403736 - protein, 14 aa, Homo sapiens
  CDR3 for beta chain variable domain of TCR clone 201868 (TRBV7-6, TRBJ2-7)
CASSFRQGADEQYF

SEQ ID NO: 403737 - protein, 14 aa, Homo sapiens
  CDR3 for alpha chain variable domain of TCR clone 201869 (TRAV23/DV6, TRAJ37)
CAASTSSNTGKLIS

SEQ ID NO: 403738 - protein, 11 aa, Homo sapiens
  CDR3 for beta chain variable domain of TCR clone 201869 (TRBV12-4, TRBJ2-3)
CASTATDTQYF

SEQ ID NO: 403739 - protein, 13 aa, Homo sapiens
  CDR3 for alpha chain variable domain of TCR clone 201870 (TRAV3, TRAJ21)
CAVREPDFNKFYF

SEQ ID NO: 403740 - protein, 13 aa, Homo sapiens
  CDR3 for beta chain variable domain of TCR clone 201870 (TRBV11-2, TRBJ2-1)
CASSSEAYNEQFF

SEQ ID NO: 403741 - protein, 12 aa, Homo sapiens
  CDR3 for alpha chain variable domain of TCR clone 201871 (TRAV38-2/DV8, TRAJ43)
CAPTPGGNDMRF

SEQ ID NO: 403742 - protein, 17 aa, Homo sapiens
  CDR3 for beta chain variable domain of TCR clone 201871 (TRBV7-8, TRBJ2-6)
CASSAGTGGAGANVLTF

SEQ ID NO: 403743 - protein, 17 aa, Homo sapiens
  CDR3 for alpha chain variable domain of TCR clone 201872 (TRAV2, TRAJ36)
CAVEDRGNWGNQPLLWN

SEQ ID NO: 403744 - protein, 14 aa, Homo sapiens
  CDR3 for beta chain variable domain of TCR clone 201872 (TRBV7-9, TRBJ2-5)
CASSLDTAQETQYF

SEQ ID NO: 403745 - protein, 16 aa, Homo sapiens
  CDR3 for alpha chain variable domain of TCR clone 201873 (TRAV4, TRAJ22)
CLVGDLYSGSARQLTF

SEQ ID NO: 403746 - protein, 16 aa, Homo sapiens
  CDR3 for beta chain variable domain of TCR clone 201873 (TRBV7-9, TRBJ2-1)
CASSDVAGGSYNEQFY

SEQ ID NO: 403747 - protein, 14 aa, Homo sapiens
  CDR3 for alpha chain variable domain of TCR clone 201874 (TRAV17, TRAJ45)
CATASGGGADGLTF

SEQ ID NO: 403748 - protein, 12 aa, Homo sapiens
  CDR3 for beta chain variable domain of TCR clone 201874 (TRBV12-4, TRBJ2-1)
CASSPGRNEQFF

SEQ ID NO: 403749 - protein, 16 aa, Homo sapiens
  CDR3 for alpha chain variable domain of TCR clone 201875 (TRAV3, TRAJ10)
CAVRDMRAGGGNKLTI

SEQ ID NO: 403750 - protein, 14 aa, Homo sapiens
  CDR3 for beta chain variable domain of TCR clone 201875 (TRBV7-2, TRBJ1-1)
CASSFLTGTTEAFF

SEQ ID NO: 403751 - protein, 13 aa, Homo sapiens
  CDR3 for alpha chain variable domain of TCR clone 201876 (TRAV12-3, TRAJ9)
CAMRNTGGFKTIF

SEQ ID NO: 403752 - protein, 13 aa, Homo sapiens
  CDR3 for beta chain variable domain of TCR clone 201876 (TRBV28, TRBJ2-1)
CASRSGGLNEQFF

SEQ ID NO: 403753 - protein, 15 aa, Homo sapiens
  CDR3 for alpha chain variable domain of TCR clone 201877 (TRAV26-1, TRAJ17)
CIVRVVKAAGNKLTF

SEQ ID NO: 403754 - protein, 14 aa, Homo sapiens
  CDR3 for beta chain variable domain of TCR clone 201877 (TRBV11-2, TRBJ2-3)
CASSLGGGANTQYF

SEQ ID NO: 403755 - protein, 14 aa, Homo sapiens
  CDR3 for alpha chain variable domain of TCR clone 201878 (TRAV12-3, TRAJ56)
CAMSVTGANSKLTF

SEQ ID NO: 403756 - protein, 14 aa, Homo sapiens
  CDR3 for beta chain variable domain of TCR clone 201878 (TRBV7-2, TRBJ2-7)
CASRSQGAAYEQYF

SEQ ID NO: 403757 - protein, 13 aa, Homo sapiens
  CDR3 for alpha chain variable domain of TCR clone 201879 (TRAV3, TRAJ33)
CAVRDRSNYQLIW

SEQ ID NO: 403758 - protein, 16 aa, Homo sapiens
  CDR3 for beta chain variable domain of TCR clone 201879 (TRBV4-2, TRBJ2-7)
CASSQDRGTSSYEQHF

SEQ ID NO: 403759 - protein, 12 aa, Homo sapiens
  CDR3 for alpha chain variable domain of TCR clone 201880 (TRAV8-3, TRAJ20)
CAVGANDYKLSS

SEQ ID NO: 403760 - protein, 16 aa, Homo sapiens
  CDR3 for beta chain variable domain of TCR clone 201880 (TRBV20-1, TRBJ2-3)
CSGEAGLAGGQDTQYF

SEQ ID NO: 403761 - protein, 14 aa, Homo sapiens
  CDR3 for alpha chain variable domain of TCR clone 201881 (TRAV12-3, TRAJ10)
SHLPLTGGGNKLNF

SEQ ID NO: 403762 - protein, 14 aa, Homo sapiens
  CDR3 for beta chain variable domain of TCR clone 201881 (TRBV4-2, TRBJ2-1)
CASGLDRAYNEQFF

SEQ ID NO: 403763 - protein, 13 aa, Homo sapiens
  CDR3 for alpha chain variable domain of TCR clone 201882 (TRAV21, TRAJ32)
CAVSGGATNKPIF

SEQ ID NO: 403764 - protein, 15 aa, Homo sapiens
  CDR3 for beta chain variable domain of TCR clone 201882 (TRBV23-1, TRBJ2-1)
CASSQWPQLTMSSSS

SEQ ID NO: 403765 - protein, 14 aa, Homo sapiens
  CDR3 for alpha chain variable domain of TCR clone 201883 (TRAV4, TRAJ17)
CLVGDMAAGNKLTF

SEQ ID NO: 403766 - protein, 16 aa, Homo sapiens
  CDR3 for beta chain variable domain of TCR clone 201883 (TRBV5-7, TRBJ1-2)
CASSRGVTGGSYGYTF

SEQ ID NO: 403767 - protein, 12 aa, Homo sapiens
  CDR3 for alpha chain variable domain of TCR clone 201884 (TRAV13-1, TRAJ49)
CAASIWGNQFYF

SEQ ID NO: 403768 - protein, 14 aa, Homo sapiens
  CDR3 for beta chain variable domain of TCR clone 201884 (TRBV12-4, TRBJ1-1)
CASGLDGLNTEAFF

SEQ ID NO: 403769 - protein, 15 aa, Homo sapiens
  CDR3 for alpha chain variable domain of TCR clone 201885 (TRAV26-1, TRAJ40)
CIVSFATSGTYKYIF

SEQ ID NO: 403770 - protein, 15 aa, Homo sapiens
  CDR3 for beta chain variable domain of TCR clone 201885 (TRBV5-7, TRBJ2-3)
CASSPGRATTDTQYF

SEQ ID NO: 403771 - protein, 14 aa, Homo sapiens
  CDR3 for alpha chain variable domain of TCR clone 201886 (TRAV13-1, TRAJ13)
CAASRVGGYQKVTF

SEQ ID NO: 403772 - protein, 17 aa, Homo sapiens
  CDR3 for beta chain variable domain of TCR clone 201886 (TRBV15, TRBJ1-5)
CATSRAPPGTRNQPQHS

SEQ ID NO: 403773 - protein, 14 aa, Homo sapiens
  CDR3 for alpha chain variable domain of TCR clone 201887 (TRAV1-2, TRAJ16)
CAVNRFSAGQKLLF

SEQ ID NO: 403774 - protein, 14 aa, Homo sapiens
  CDR3 for beta chain variable domain of TCR clone 201887 (TRBV12-5, TRBJ2-5)
CASGSRTHQETQYF

SEQ ID NO: 403775 - protein, 12 aa, Homo sapiens
  CDR3 for alpha chain variable domain of TCR clone 201888 (TRAV16, TRAJ12)
CAHGYSSYKLIF

SEQ ID NO: 403776 - protein, 12 aa, Homo sapiens
  CDR3 for beta chain variable domain of TCR clone 201888 (TRBV28, TRBJ2-1)
CASSRLVGEQFF

SEQ ID NO: 403777 - protein, 12 aa, Homo sapiens
  CDR3 for alpha chain variable domain of TCR clone 201889 (TRAV1-2, TRAJ29)
CAVRNLNTPLIF

SEQ ID NO: 403778 - protein, 18 aa, Homo sapiens
  CDR3 for beta chain variable domain of TCR clone 201889 (TRBV15, TRBJ2-1)
CVPPPGCSGGPTTNEQFF

SEQ ID NO: 403779 - protein, 13 aa, Homo sapiens
  CDR3 for alpha chain variable domain of TCR clone 201890 (TRAV3, TRAJ15)
CAVRDQAGTALIF

SEQ ID NO: 403780 - protein, 13 aa, Homo sapiens
  CDR3 for beta chain variable domain of TCR clone 201890 (TRBV18, TRBJ2-5)
CASSLQGQETQYF

SEQ ID NO: 403781 - protein, 13 aa, Homo sapiens
  CDR3 for alpha chain variable domain of TCR clone 201891 (TRAV17, TRAJ40)
CATRSPGTYKYIF

SEQ ID NO: 403782 - protein, 12 aa, Homo sapiens
  CDR3 for beta chain variable domain of TCR clone 201891 (TRBV28, TRBJ2-3)
CASSLYRDTQYF

SEQ ID NO: 403783 - protein, 14 aa, Homo sapiens
  CDR3 for alpha chain variable domain of TCR clone 201892 (TRAV13-1, TRAJ29)
CAASSNSGKTPLVF

SEQ ID NO: 403784 - protein, 13 aa, Homo sapiens
  CDR3 for beta chain variable domain of TCR clone 201892 (TRBV10-2, TRBJ1-1)
CASNDQMNTEAFF

SEQ ID NO: 403785 - protein, 13 aa, Homo sapiens
  CDR3 for alpha chain variable domain of TCR clone 201893 (TRAV3, TRAJ21)
CAVREQDFNKFYF

SEQ ID NO: 403786 - protein, 13 aa, Homo sapiens
  CDR3 for beta chain variable domain of TCR clone 201893 (TRBV9, TRBJ2-1)
CASSPSGGNEQFC

SEQ ID NO: 403787 - protein, 15 aa, Homo sapiens
  CDR3 for alpha chain variable domain of TCR clone 201894 (TRAV17, TRAJ57)
CVTGPSQGGSEKLVF

SEQ ID NO: 403788 - protein, 14 aa, Homo sapiens
  CDR3 for beta chain variable domain of TCR clone 201894 (TRBV12-5, TRBJ2-5)
CASGSRTQQETQYF

SEQ ID NO: 403789 - protein, 18 aa, Homo sapiens
  CDR3 for alpha chain variable domain of TCR clone 201895 (TRAV26-1, TRAJ22)
CIVRVALISSGSARQLTF

SEQ ID NO: 403790 - protein, 11 aa, Homo sapiens
  CDR3 for beta chain variable domain of TCR clone 201895 (TRBV7-9, TRBJ2-3)
CASSGPDTQYF

SEQ ID NO: 403791 - protein, 16 aa, Homo sapiens
  CDR3 for alpha chain variable domain of TCR clone 201896 (TRAV30, TRAJ24)
CGTEIVDADSWGKFQF

SEQ ID NO: 403792 - protein, 12 aa, Homo sapiens
  CDR3 for beta chain variable domain of TCR clone 201896 (TRBV11-2, TRBJ2-1)
CASSPGNTEQFF

SEQ ID NO: 403793 - protein, 15 aa, Homo sapiens
  CDR3 for alpha chain variable domain of TCR clone 201897 (TRAV12-3, TRAJ42)
CAMSGHGGSQGNLIF

SEQ ID NO: 403794 - protein, 12 aa, Homo sapiens
  CDR3 for beta chain variable domain of TCR clone 201897 (TRBV19, TRBJ2-1)
CASSMQDTEQFF

SEQ ID NO: 403795 - protein, 17 aa, Homo sapiens
  CDR3 for alpha chain variable domain of TCR clone 201898 (TRAV3, TRAJ6)
CAVRDGPRAGGSYIPTF

SEQ ID NO: 403796 - protein, 14 aa, Homo sapiens
  CDR3 for beta chain variable domain of TCR clone 201898 (TRBV7-2, TRBJ2-1)
CASSPGLAGNEQFF

SEQ ID NO: 403797 - protein, 14 aa, Homo sapiens
  CDR3 for alpha chain variable domain of TCR clone 201899 (TRAV1-2, TRAJ16)
CAVNRFSDVQKLLF

SEQ ID NO: 403798 - protein, 15 aa, Homo sapiens
  CDR3 for beta chain variable domain of TCR clone 201899 (TRBV9, TRBJ1-6)
CASSVAGIGDSPLHF

SEQ ID NO: 403799 - protein, 13 aa, Homo sapiens
  CDR3 for alpha chain variable domain of TCR clone 201900 (TRAV35, TRAJ48)
CAGHEFGNEKLTF

SEQ ID NO: 403800 - protein, 13 aa, Homo sapiens
  CDR3 for beta chain variable domain of TCR clone 201900 (TRBV7-2, TRBJ2-2)
CASSLAVTGELFF

SEQ ID NO: 403801 - protein, 19 aa, Homo sapiens
  CDR3 for alpha chain variable domain of TCR clone 201901 (TRAV23/DV6, TRAJ49)
CAATPGQVCRSFQISRTLT

SEQ ID NO: 403802 - protein, 14 aa, Homo sapiens
  CDR3 for beta chain variable domain of TCR clone 201901 (TRBV7-3, TRBJ1-1)
CASSLKGGNTEAFF

SEQ ID NO: 403803 - protein, 14 aa, Homo sapiens
  CDR3 for alpha chain variable domain of TCR clone 201902 (TRAV21, TRAJ35)
CAVMPIGFGNVLHC

SEQ ID NO: 403804 - protein, 17 aa, Homo sapiens
  CDR3 for beta chain variable domain of TCR clone 201902 (TRBV20-1, TRBJ2-1)
CSASSSGLAGSYNEQFF

SEQ ID NO: 403805 - protein, 14 aa, Homo sapiens
  CDR3 for alpha chain variable domain of TCR clone 201903 (TRAV1-2, TRAJ8)
CDVREDTGFQKLVF

SEQ ID NO: 403806 - protein, 13 aa, Homo sapiens
  CDR3 for beta chain variable domain of TCR clone 201903 (TRBV7-7, TRBJ2-3)
CASSLSRADTQYF

SEQ ID NO: 403807 - protein, 16 aa, Homo sapiens
  CDR3 for alpha chain variable domain of TCR clone 201904 (TRAV3, TRAJ21)
CAVRDTERGNFNKFYF

SEQ ID NO: 403808 - protein, 13 aa, Homo sapiens
  CDR3 for beta chain variable domain of TCR clone 201904 (TRBV27, TRBJ2-7)
CASSLTTGYEQYF

SEQ ID NO: 403809 - protein, 15 aa, Homo sapiens
  CDR3 for alpha chain variable domain of TCR clone 201905 (TRAV22, TRAJ18)
CAASDRGSTLGRLNF

SEQ ID NO: 403810 - protein, 15 aa, Homo sapiens
  CDR3 for beta chain variable domain of TCR clone 201905 (TRBV3-1, TRBJ2-3)
CASSHSGGAGDTQYF

SEQ ID NO: 403811 - protein, 13 aa, Homo sapiens
  CDR3 for alpha chain variable domain of TCR clone 201906 (TRAV20, TRAJ37)
CAGCSSNTGKLIL

SEQ ID NO: 403812 - protein, 11 aa, Homo sapiens
  CDR3 for beta chain variable domain of TCR clone 201906 (TRBV12-4, TRBJ2-3)
CASTAKDTQYF

SEQ ID NO: 403813 - protein, 15 aa, Homo sapiens
  CDR3 for alpha chain variable domain of TCR clone 201907 (TRAV8-6, TRAJ26)
CAVSDQSPGGQNFVF

SEQ ID NO: 403814 - protein, 13 aa, Homo sapiens
  CDR3 for beta chain variable domain of TCR clone 201907 (TRBV27, TRBJ2-7)
CASSLRRRYEQYF

SEQ ID NO: 403815 - protein, 14 aa, Homo sapiens
  CDR3 for alpha chain variable domain of TCR clone 201908 (TRAV12-2, TRAJ17)
CAVLFKSAGNKLTF

SEQ ID NO: 403816 - protein, 17 aa, Homo sapiens
  CDR3 for beta chain variable domain of TCR clone 201908 (TRBV20-1, TRBJ2-2)
CSASGSGQGGLTGELFS

SEQ ID NO: 403817 - protein, 13 aa, Homo sapiens
  CDR3 for alpha chain variable domain of TCR clone 201909 (TRAV26-2, TRAJ39)
CIPFNNAGNMLTF

SEQ ID NO: 403818 - protein, 15 aa, Homo sapiens
  CDR3 for beta chain variable domain of TCR clone 201909 (TRBV29-1, TRBJ2-5)
CSVAGASGTQETQYF

SEQ ID NO: 403819 - protein, 14 aa, Homo sapiens
  CDR3 for alpha chain variable domain of TCR clone 201910 (TRAV21, TRAJ11)
CAVRRNSGYSTLTF

SEQ ID NO: 403820 - protein, 15 aa, Homo sapiens
  CDR3 for beta chain variable domain of TCR clone 201910 (TRBV28, TRBJ2-7)
CAISPGGRGFYEQYF

SEQ ID NO: 403821 - protein, 14 aa, Homo sapiens
  CDR3 for alpha chain variable domain of TCR clone 201911 (TRAV1-2, TRAJ16)
CAVNRFSDGQKLLF

SEQ ID NO: 403822 - protein, 14 aa, Homo sapiens
  CDR3 for beta chain variable domain of TCR clone 201911 (TRBV9, TRBJ1-6)
CSSVAGTGDSTLHF

SEQ ID NO: 403823 - protein, 10 aa, Homo sapiens
  CDR3 for alpha chain variable domain of TCR clone 201912 (TRAV23/DV6, TRAJ57)
CAASSTLSQG

SEQ ID NO: 403824 - protein, 14 aa, Homo sapiens
  CDR3 for beta chain variable domain of TCR clone 201912 (TRBV19, TRBJ2-7)
CASSIEASSYEQYF

SEQ ID NO: 403825 - protein, 12 aa, Homo sapiens
  CDR3 for alpha chain variable domain of TCR clone 201913 (TRAV12-3, TRAJ17)
CAMTLTGNELTF

SEQ ID NO: 403826 - protein, 16 aa, Homo sapiens
  CDR3 for beta chain variable domain of TCR clone 201913 (TRBV5-1, TRBJ2-2)
CASRNTGEANTGELFF

SEQ ID NO: 403827 - protein, 18 aa, Homo sapiens
  CDR3 for alpha chain variable domain of TCR clone 201914 (TRAV13-1, TRAJ52)
CSAKNPNAGGTSYGKLTF

SEQ ID NO: 403828 - protein, 15 aa, Homo sapiens
  CDR3 for beta chain variable domain of TCR clone 201914 (TRBV6-1, TRBJ2-3)
CASSERGGVTDTQYF

SEQ ID NO: 403829 - protein, 14 aa, Homo sapiens
  CDR3 for alpha chain variable domain of TCR clone 201915 (TRAV23/DV6, TRAJ11)
CAASLESGYSTLTF

SEQ ID NO: 403830 - protein, 17 aa, Homo sapiens
  CDR3 for beta chain variable domain of TCR clone 201915 (TRBV28, TRBJ2-7)
CASSPGLAGGDSSEQYF

SEQ ID NO: 403831 - protein, 15 aa, Homo sapiens
  CDR3 for alpha chain variable domain of TCR clone 201916 (TRAV29/DV5, TRAJ29)
CAASDRSSGNTPLVF

SEQ ID NO: 403832 - protein, 12 aa, Homo sapiens
  CDR3 for beta chain variable domain of TCR clone 201916 (TRBV7-9, TRBJ1-4)
CASSTDREKLFF

SEQ ID NO: 403833 - protein, 13 aa, Homo sapiens
  CDR3 for alpha chain variable domain of TCR clone 201917 (TRAV8-6, TRAJ40)
CAVSVTGTYKYIF

SEQ ID NO: 403834 - protein, 14 aa, Homo sapiens
  CDR3 for beta chain variable domain of TCR clone 201917 (TRBV7-8, TRBJ2-7)
CASSPRDRVYEQYF

SEQ ID NO: 403835 - protein, 12 aa, Homo sapiens
  CDR3 for alpha chain variable domain of TCR clone 201918 (TRAV13-2, TRAJ41)
CAKNVGRYALNF

SEQ ID NO: 403836 - protein, 12 aa, Homo sapiens
  CDR3 for beta chain variable domain of TCR clone 201918 (TRBV7-9, TRBJ1-1)
CASSLSGGVAVF

SEQ ID NO: 403837 - protein, 12 aa, Homo sapiens
  CDR3 for alpha chain variable domain of TCR clone 201919 (TRAV13-2, TRAJ23)
CAERHRGGKLIF

SEQ ID NO: 403838 - protein, 16 aa, Homo sapiens
  CDR3 for beta chain variable domain of TCR clone 201919 (TRBV4-1, TRBJ2-5)
CASSRADRAGGETQYF

SEQ ID NO: 403839 - protein, 13 aa, Homo sapiens
  CDR3 for alpha chain variable domain of TCR clone 201920 (TRAV8-2, TRAJ22)
CVVSEGSARQLTF

SEQ ID NO: 403840 - protein, 13 aa, Homo sapiens
  CDR3 for beta chain variable domain of TCR clone 201920 (TRBV5-8, TRBJ1-2)
CASSLGGNYGYTF

SEQ ID NO: 403841 - protein, 16 aa, Homo sapiens
  CDR3 for alpha chain variable domain of TCR clone 201921 (TRAV30, TRAJ24)
CGTEIVDADSWGKFQF

SEQ ID NO: 403842 - protein, 15 aa, Homo sapiens
  CDR3 for beta chain variable domain of TCR clone 201921 (TRBV20-1, TRBJ2-6)
CSTRDRGPGANVLTF

SEQ ID NO: 403843 - protein, 15 aa, Homo sapiens
  CDR3 for alpha chain variable domain of TCR clone 201922 (TRAV12-3, TRAJ6)
CAMSATTGGSYIPTF

SEQ ID NO: 403844 - protein, 15 aa, Homo sapiens
  CDR3 for beta chain variable domain of TCR clone 201922 (TRBV10-3, TRBJ2-1)
CAISESASGRKEQFF

SEQ ID NO: 403845 - protein, 10 aa, Homo sapiens
  CDR3 for alpha chain variable domain of TCR clone 201923 (TRAV2, TRAJ34)
CAVVNHKLIF

SEQ ID NO: 403846 - protein, 20 aa, Homo sapiens
  CDR3 for beta chain variable domain of TCR clone 201923 (TRBV19, TRBJ2-1)
CASSISRTVTSTRLNNEQFF

SEQ ID NO: 403847 - protein, 14 aa, Homo sapiens
  CDR3 for alpha chain variable domain of TCR clone 201924 (TRAV17, TRAJ37)
CATDGSSNTGRLIF

SEQ ID NO: 403848 - protein, 13 aa, Homo sapiens
  CDR3 for beta chain variable domain of TCR clone 201924 (TRBV11-2, TRBJ2-1)
CASSLDLVNEQFF

SEQ ID NO: 403849 - protein, 10 aa, Homo sapiens
  CDR3 for alpha chain variable domain of TCR clone 201925 (TRAV12-2, TRAJ52)
RSTSYGKLTF

SEQ ID NO: 403850 - protein, 13 aa, Homo sapiens
  CDR3 for beta chain variable domain of TCR clone 201925 (TRBV2, TRBJ2-5)
CASSGLVEETQYF

SEQ ID NO: 403851 - protein, 15 aa, Homo sapiens
  CDR3 for alpha chain variable domain of TCR clone 201926 (TRAV25, TRAJ52)
CAGTSGGTSYGKLTF

SEQ ID NO: 403852 - protein, 16 aa, Homo sapiens
  CDR3 for beta chain variable domain of TCR clone 201926 (TRBV15, TRBJ1-2)
FATSRGPRTGGGGYTF

SEQ ID NO: 403853 - protein, 14 aa, Homo sapiens
  CDR3 for alpha chain variable domain of TCR clone 201927 (TRAV26-1, TRAJ38)
CIADNAGNNRKLIW

SEQ ID NO: 403854 - protein, 14 aa, Homo sapiens
  CDR3 for beta chain variable domain of TCR clone 201927 (TRBV4-1, TRBJ2-7)
CASRLTSGSYEQYF

SEQ ID NO: 403855 - protein, 12 aa, Homo sapiens
  CDR3 for alpha chain variable domain of TCR clone 201928 (TRAV3, TRAJ20)
CAVRDPDYKPSF

SEQ ID NO: 403856 - protein, 13 aa, Homo sapiens
  CDR3 for beta chain variable domain of TCR clone 201928 (TRBV18, TRBJ1-1)
CASSPETKPEAFF

SEQ ID NO: 403857 - protein, 13 aa, Homo sapiens
  CDR3 for alpha chain variable domain of TCR clone 201929 (TRAV17, TRAJ21)
CATDGGNFNKFYF

SEQ ID NO: 403858 - protein, 17 aa, Homo sapiens
  CDR3 for beta chain variable domain of TCR clone 201929 (TRBV7-3, TRBJ2-3)
CASSLMKRMRGADTQYF

SEQ ID NO: 403859 - protein, 13 aa, Homo sapiens
  CDR3 for alpha chain variable domain of TCR clone 201930 (TRAV12-3, TRAJ13)
CAMGTGGYQNVTF

SEQ ID NO: 403860 - protein, 14 aa, Homo sapiens
  CDR3 for beta chain variable domain of TCR clone 201930 (TRBV7-2, TRBJ2-5)
CASSTGGELKTQYF

SEQ ID NO: 403861 - protein, 11 aa, Homo sapiens
  CDR3 for alpha chain variable domain of TCR clone 201931 (TRAV1-2, TRAJ11)
CAVRGYSTLTF

SEQ ID NO: 403862 - protein, 13 aa, Homo sapiens
  CDR3 for beta chain variable domain of TCR clone 201931 (TRBV5-1, TRBJ2-1)
CASSLGSYNEQFF

SEQ ID NO: 403863 - protein, 11 aa, Homo sapiens
  CDR3 for alpha chain variable domain of TCR clone 201932 (TRAV12-1, TRAJ31)
CVGRVQCQTHV

SEQ ID NO: 403864 - protein, 15 aa, Homo sapiens
  CDR3 for beta chain variable domain of TCR clone 201932 (TRBV5-1, TRBJ2-1)
CASSPPRAPYNEQFF

SEQ ID NO: 403865 - protein, 19 aa, Homo sapiens
  CDR3 for alpha chain variable domain of TCR clone 201933 (TRAV2, TRAJ20)
ILQVREADAAVYRDCQLSL

SEQ ID NO: 403866 - protein, 13 aa, Homo sapiens
  CDR3 for beta chain variable domain of TCR clone 201933 (TRBV15, TRBJ1-6)
CATSGGLNSPLHF

SEQ ID NO: 403867 - protein, 15 aa, Homo sapiens
  CDR3 for alpha chain variable domain of TCR clone 201934 (TRAV12-2, TRAJ8)
CAVREENTGFQKLVF

SEQ ID NO: 403868 - protein, 16 aa, Homo sapiens
  CDR3 for beta chain variable domain of TCR clone 201934 (TRBV7-3, TRBJ2-2)
CASSLKRGTLSGELFF

SEQ ID NO: 403869 - protein, 13 aa, Homo sapiens
  CDR3 for alpha chain variable domain of TCR clone 201935 (TRAV26-1, TRAJ41)
CIVRINSGYTLNF

SEQ ID NO: 403870 - protein, 13 aa, Homo sapiens
  CDR3 for beta chain variable domain of TCR clone 201935 (TRBV20-1, TRBJ1-5)
CSATAAGGQPQHF

SEQ ID NO: 403871 - protein, 12 aa, Homo sapiens
  CDR3 for alpha chain variable domain of TCR clone 201936 (TRAV26-1, TRAJ48)
CIAVFGNEKLTF

SEQ ID NO: 403872 - protein, 18 aa, Homo sapiens
  CDR3 for beta chain variable domain of TCR clone 201936 (TRBV7-2, TRBJ2-3)
CASSFETSRGRKADTQYF

SEQ ID NO: 403873 - protein, 11 aa, Homo sapiens
  CDR3 for alpha chain variable domain of TCR clone 201937 (TRAV1-1, TRAJ23)
CAVRQGGKLIF

SEQ ID NO: 403874 - protein, 13 aa, Homo sapiens
  CDR3 for beta chain variable domain of TCR clone 201937 (TRBV7-9, TRBJ2-5)
CASLPSGRETQYF

SEQ ID NO: 403875 - protein, 14 aa, Homo sapiens
  CDR3 for alpha chain variable domain of TCR clone 201938 (TRAV12-2, TRAJ17)
CAVLFKAAGNKLTF

SEQ ID NO: 403876 - protein, 14 aa, Homo sapiens
  CDR3 for beta chain variable domain of TCR clone 201938 (TRBV7-2, TRBJ1-2)
CASSQTGSTYGYTF

SEQ ID NO: 403877 - protein, 12 aa, Homo sapiens
  CDR3 for alpha chain variable domain of TCR clone 201939 (TRAV8-3, TRAJ41)
CAVALSGYALNF

SEQ ID NO: 403878 - protein, 11 aa, Homo sapiens
  CDR3 for beta chain variable domain of TCR clone 201939 (TRBV7-8, TRBJ2-7)
CASSLSLEQYF

SEQ ID NO: 403879 - protein, 13 aa, Homo sapiens
  CDR3 for alpha chain variable domain of TCR clone 201940 (TRAV29/DV5, TRAJ9)
CAASETGGFTTIF

SEQ ID NO: 403880 - protein, 14 aa, Homo sapiens
  CDR3 for beta chain variable domain of TCR clone 201940 (TRBV19, TRBJ1-5)
CASRAPDSFRAQHF

SEQ ID NO: 403881 - protein, 17 aa, Homo sapiens
  CDR3 for alpha chain variable domain of TCR clone 201941 (TRAV3, TRAJ6)
CAVRDGPRAGGSYIPTF

SEQ ID NO: 403882 - protein, 14 aa, Homo sapiens
  CDR3 for beta chain variable domain of TCR clone 201941 (TRBV7-2, TRBJ2-7)
CASSPTTSFYEQYV

SEQ ID NO: 403883 - protein, 11 aa, Homo sapiens
  CDR3 for alpha chain variable domain of TCR clone 201942 (TRAV21, TRAJ41)
CAVSSGYALNF

SEQ ID NO: 403884 - protein, 13 aa, Homo sapiens
  CDR3 for beta chain variable domain of TCR clone 201942 (TRBV7-9, TRBJ1-2)
CASSLKQNYGYTF

SEQ ID NO: 403885 - protein, 13 aa, Homo sapiens
  CDR3 for alpha chain variable domain of TCR clone 201943 (TRAV16, TRAJ54)
CALMVQGAQNLVF

SEQ ID NO: 403886 - protein, 12 aa, Homo sapiens
  CDR3 for beta chain variable domain of TCR clone 201943 (TRBV18, TRBJ2-7)
CASSTAMGEQYF

SEQ ID NO: 403887 - protein, 14 aa, Homo sapiens
  CDR3 for alpha chain variable domain of TCR clone 201944 (TRAV2, TRAJ9)
CAVEDRSGGFKTIF

SEQ ID NO: 403888 - protein, 16 aa, Homo sapiens
  CDR3 for beta chain variable domain of TCR clone 201944 (TRBV5-1, TRBJ2-3)
CASSLGLAVYTDTQYF

SEQ ID NO: 403889 - protein, 14 aa, Homo sapiens
  CDR3 for alpha chain variable domain of TCR clone 201945 (TRAV12-2, TRAJ9)
CAVNALEGGFKIIF

SEQ ID NO: 403890 - protein, 16 aa, Homo sapiens
  CDR3 for beta chain variable domain of TCR clone 201945 (TRBV19, TRBJ1-6)
CASSVAPVAGNSPLHF

SEQ ID NO: 403891 - protein, 14 aa, Homo sapiens
  CDR3 for alpha chain variable domain of TCR clone 201946 (TRAV1-2, TRAJ8)
CAVREDTGFQKLLL

SEQ ID NO: 403892 - protein, 16 aa, Homo sapiens
  CDR3 for beta chain variable domain of TCR clone 201946 (TRBV12-5, TRBJ2-5)
CASGPRTSGNQETQYF

SEQ ID NO: 403893 - protein, 13 aa, Homo sapiens
  CDR3 for alpha chain variable domain of TCR clone 201947 (TRAV12-1, TRAJ9)
CLVLNTEGFKTIF

SEQ ID NO: 403894 - protein, 13 aa, Homo sapiens
  CDR3 for beta chain variable domain of TCR clone 201947 (TRBV20-1, TRBJ1-1)
CSARGGGNTEAFF

SEQ ID NO: 403895 - protein, 10 aa, Homo sapiens
  CDR3 for alpha chain variable domain of TCR clone 201948 (TRAV12-3, TRAJ49)
CAMNDDQFYF

SEQ ID NO: 403896 - protein, 13 aa, Homo sapiens
  CDR3 for beta chain variable domain of TCR clone 201948 (TRBV27, TRBJ1-4)
CASSLMGDEKLFF

SEQ ID NO: 403897 - protein, 14 aa, Homo sapiens
  CDR3 for alpha chain variable domain of TCR clone 201949 (TRAV1-2, TRAJ16)
CAVNRFSDGQKLLF

SEQ ID NO: 403898 - protein, 17 aa, Homo sapiens
  CDR3 for beta chain variable domain of TCR clone 201949 (TRBV19, TRBJ2-2)
CASSIGTGGANTGELFF

SEQ ID NO: 403899 - protein, 16 aa, Homo sapiens
  CDR3 for alpha chain variable domain of TCR clone 201950 (TRAV36/DV7, TRAJ30)
CAVETYGLYRDDKIIF

SEQ ID NO: 403900 - protein, 15 aa, Homo sapiens
  CDR3 for beta chain variable domain of TCR clone 201950 (TRBV6-6, TRBJ2-5)
CASSYGKIIQETQYF

SEQ ID NO: 403901 - protein, 14 aa, Homo sapiens
  CDR3 for alpha chain variable domain of TCR clone 201951 (TRAV1-2, TRAJ16)
CAVNRFSDGQKLLF

SEQ ID NO: 403902 - protein, 13 aa, Homo sapiens
  CDR3 for beta chain variable domain of TCR clone 201951 (TRBV12-4, TRBJ1-2)
CASSLRQGKAYTF

SEQ ID NO: 403903 - protein, 14 aa, Homo sapiens
  CDR3 for alpha chain variable domain of TCR clone 201952 (TRAV13-1, TRAJ40)
CAASMTSGTYKYIF

SEQ ID NO: 403904 - protein, 14 aa, Homo sapiens
  CDR3 for beta chain variable domain of TCR clone 201952 (TRBV7-3, TRBJ2-1)
GRQPDGGGEVEQFF

SEQ ID NO: 403905 - protein, 16 aa, Homo sapiens
  CDR3 for alpha chain variable domain of TCR clone 201953 (TRAV30, TRAJ24)
CGTEIVDADSWGKFQF

SEQ ID NO: 403906 - protein, 18 aa, Homo sapiens
  CDR3 for beta chain variable domain of TCR clone 201953 (TRBV20-1, TRBJ2-6)
CSAETTPTHGSGANDLTF

SEQ ID NO: 403907 - protein, 10 aa, Homo sapiens
  CDR3 for alpha chain variable domain of TCR clone 201954 (TRAV13-2, TRAJ49)
CADTGNQFYF

SEQ ID NO: 403908 - protein, 13 aa, Homo sapiens
  CDR3 for beta chain variable domain of TCR clone 201954 (TRBV7-2, TRBJ2-4)
CASSREHANIQYF

SEQ ID NO: 403909 - protein, 13 aa, Homo sapiens
  CDR3 for alpha chain variable domain of TCR clone 201955 (TRAV3, TRAJ21)
CAVREPDFNKFYF

SEQ ID NO: 403910 - protein, 14 aa, Homo sapiens
  CDR3 for beta chain variable domain of TCR clone 201955 (TRBV6-1, TRBJ1-3)
CASVQGGGGNTIYC

SEQ ID NO: 403911 - protein, 16 aa, Homo sapiens
  CDR3 for alpha chain variable domain of TCR clone 201956 (TRAV12-3, TRAJ53)
CAMSPWSGGSNYKLTF

SEQ ID NO: 403912 - protein, 17 aa, Homo sapiens
  CDR3 for beta chain variable domain of TCR clone 201956 (TRBV28, TRBJ2-5)
CASSTTEGDALQETQYF

SEQ ID NO: 403913 - protein, 14 aa, Homo sapiens
  CDR3 for alpha chain variable domain of TCR clone 201957 (TRAV13-1, TRAJ35)
CAASKGGFGNVLHC

SEQ ID NO: 403914 - protein, 15 aa, Homo sapiens
  CDR3 for beta chain variable domain of TCR clone 201957 (TRBV3-1, TRBJ2-1)
CASSQQPSGGNEQFF

SEQ ID NO: 403915 - protein, 18 aa, Homo sapiens
  CDR3 for alpha chain variable domain of TCR clone 201958 (TRAV26-1, TRAJ52)
CIVRVAGAGGTSYGKLTF

SEQ ID NO: 403916 - protein, 18 aa, Homo sapiens
  CDR3 for beta chain variable domain of TCR clone 201958 (TRBV7-2, TRBJ2-3)
CASSLETSRGRKADTQYF

SEQ ID NO: 403917 - protein, 12 aa, Homo sapiens
  CDR3 for alpha chain variable domain of TCR clone 201959 (TRAV1-1, TRAJ20)
CAVREDDYKLSF

SEQ ID NO: 403918 - protein, 18 aa, Homo sapiens
  CDR3 for beta chain variable domain of TCR clone 201959 (TRBV20-1, TRBJ2-3)
CSASGLAGGPRTTDTQYF

SEQ ID NO: 403919 - protein, 13 aa, Homo sapiens
  CDR3 for alpha chain variable domain of TCR clone 201960 (TRAV8-6, TRAJ49)
CAVITNTGNQFYF

SEQ ID NO: 403920 - protein, 15 aa, Homo sapiens
  CDR3 for beta chain variable domain of TCR clone 201960 (TRBV18, TRBJ1-5)
CASSPSDRSNQPQQF

SEQ ID NO: 403921 - protein, 11 aa, Homo sapiens
  CDR3 for alpha chain variable domain of TCR clone 201961 (TRAV8-3, TRAJ15)
CAVGPGTALIF

SEQ ID NO: 403922 - protein, 14 aa, Homo sapiens
  CDR3 for beta chain variable domain of TCR clone 201961 (TRBV7-3, TRBJ1-1)
CASSLKGGNTEAFF

SEQ ID NO: 403923 - protein, 13 aa, Homo sapiens
  CDR3 for alpha chain variable domain of TCR clone 201962 (TRAV8-3, TRAJ28)
CAVGAVGSYQLTF

SEQ ID NO: 403924 - protein, 15 aa, Homo sapiens
  CDR3 for beta chain variable domain of TCR clone 201962 (TRBV14, TRBJ2-5)
CASSQGEAVQETQYF

SEQ ID NO: 403925 - protein, 12 aa, Homo sapiens
  CDR3 for alpha chain variable domain of TCR clone 201963 (TRAV16, TRAJ10)
CSRTGGGNQLTF

SEQ ID NO: 403926 - protein, 12 aa, Homo sapiens
  CDR3 for beta chain variable domain of TCR clone 201963 (TRBV11-3, TRBJ1-1)
CASSHRQGEAFF

SEQ ID NO: 403927 - protein, 14 aa, Homo sapiens
  CDR3 for alpha chain variable domain of TCR clone 201964 (TRAV9-2, TRAJ39)
CALYIYNAGNMLTF

SEQ ID NO: 403928 - protein, 15 aa, Homo sapiens
  CDR3 for beta chain variable domain of TCR clone 201964 (TRBV28, TRBJ1-3)
RASSMGWASGNTIYF

SEQ ID NO: 403929 - protein, 15 aa, Homo sapiens
  CDR3 for alpha chain variable domain of TCR clone 201965 (TRAV8-3, TRAJ27)
CAVGLSKTNAGKSTF

SEQ ID NO: 403930 - protein, 13 aa, Homo sapiens
  CDR3 for beta chain variable domain of TCR clone 201965 (TRBV20-1, TRBJ1-1)
CSAPLGGGTEAFF

SEQ ID NO: 403931 - protein, 13 aa, Homo sapiens
  CDR3 for alpha chain variable domain of TCR clone 201966 (TRAV27, TRAJ17)
CAGAANAGKKLTF

SEQ ID NO: 403932 - protein, 15 aa, Homo sapiens
  CDR3 for beta chain variable domain of TCR clone 201966 (TRBV5-1, TRBJ2-3)
CASRNQAGSTDTQYF

SEQ ID NO: 403933 - protein, 14 aa, Homo sapiens
  CDR3 for alpha chain variable domain of TCR clone 201967 (TRAV13-1, TRAJ44)
CAAKATGTASKLTF

SEQ ID NO: 403934 - protein, 14 aa, Homo sapiens
  CDR3 for beta chain variable domain of TCR clone 201967 (TRBV20-1, TRBJ2-1)
CSAQIGGSANEQFF

SEQ ID NO: 403935 - protein, 11 aa, Homo sapiens
  CDR3 for alpha chain variable domain of TCR clone 201968 (TRAV2, TRAJ21)
CAVFNSNKFYF

SEQ ID NO: 403936 - protein, 12 aa, Homo sapiens
  CDR3 for beta chain variable domain of TCR clone 201968 (TRBV19, TRBJ1-5)
CASSIAQQPQHF

SEQ ID NO: 403937 - protein, 12 aa, Homo sapiens
  CDR3 for alpha chain variable domain of TCR clone 201969 (TRAV29/DV5, TRAJ49)
CAATDTVTSSIL

SEQ ID NO: 403938 - protein, 12 aa, Homo sapiens
  CDR3 for beta chain variable domain of TCR clone 201969 (TRBV12-4, TRBJ2-7)
CASSLGGYEQYF

SEQ ID NO: 403939 - protein, 11 aa, Homo sapiens
  CDR3 for alpha chain variable domain of TCR clone 201970 (TRAV12-2, TRAJ49)
CAVNTGNQFYF

SEQ ID NO: 403940 - protein, 12 aa, Homo sapiens
  CDR3 for beta chain variable domain of TCR clone 201970 (TRBV2, TRBJ2-3)
CASSGRFGTQYF

SEQ ID NO: 403941 - protein, 22 aa, Homo sapiens
  CDR3 for alpha chain variable domain of TCR clone 201971 (TRAV40, )
CLLGDGIPDIQNPDPAVYQLRD

SEQ ID NO: 403942 - protein, 15 aa, Homo sapiens
  CDR3 for beta chain variable domain of TCR clone 201971 (TRBV20-1, TRBJ2-7)
CSARVPAAYFYEQYF

SEQ ID NO: 403943 - protein, 12 aa, Homo sapiens
  CDR3 for alpha chain variable domain of TCR clone 201972 (TRAV24, TRAJ37)
CAPSSNTGKLIF

SEQ ID NO: 403944 - protein, 14 aa, Homo sapiens
  CDR3 for beta chain variable domain of TCR clone 201972 (TRBV19, TRBJ2-1)
CASSKDRGQDEQFF

SEQ ID NO: 403945 - protein, 15 aa, Homo sapiens
  CDR3 for alpha chain variable domain of TCR clone 201973 (TRAV8-3, TRAJ11)
CAVGLLNSGYSTLTF

SEQ ID NO: 403946 - protein, 16 aa, Homo sapiens
  CDR3 for beta chain variable domain of TCR clone 201973 (TRBV7-3, TRBJ2-2)
CASSLKRVTLSGELSF

SEQ ID NO: 403947 - protein, 13 aa, Homo sapiens
  CDR3 for alpha chain variable domain of TCR clone 201974 (TRAV24, TRAJ37)
CAFSPGNTGKLIF

SEQ ID NO: 403948 - protein, 15 aa, Homo sapiens
  CDR3 for beta chain variable domain of TCR clone 201974 (TRBV7-6, TRBJ2-5)
GASSKPTGPQETQYF

SEQ ID NO: 403949 - protein, 14 aa, Homo sapiens
  CDR3 for alpha chain variable domain of TCR clone 201975 (TRAV1-2, TRAJ29)
CAVRELTSATPLVF

SEQ ID NO: 403950 - protein, 14 aa, Homo sapiens
  CDR3 for beta chain variable domain of TCR clone 201975 (TRBV3-1, TRBJ2-5)
CTSSQGPDQENQYF

SEQ ID NO: 403951 - protein, 13 aa, Homo sapiens
  CDR3 for alpha chain variable domain of TCR clone 201976 (TRAV24, TRAJ42)
CAFSTGSQGNLIF

SEQ ID NO: 403952 - protein, 16 aa, Homo sapiens
  CDR3 for beta chain variable domain of TCR clone 201976 (TRBV7-3, TRBJ2-2)
CASSLKRGTLSGELFF

SEQ ID NO: 403953 - protein, 14 aa, Homo sapiens
  CDR3 for alpha chain variable domain of TCR clone 201977 (TRAV12-3, TRAJ10)
SHLPLTGGGNKLTF

SEQ ID NO: 403954 - protein, 14 aa, Homo sapiens
  CDR3 for beta chain variable domain of TCR clone 201977 (TRBV7-9, TRBJ1-4)
CSSRTGGFNEKLFF

SEQ ID NO: 403955 - protein, 15 aa, Homo sapiens
  CDR3 for alpha chain variable domain of TCR clone 201978 (TRAV8-3, TRAJ45)
CALSYSGGGADGLTF

SEQ ID NO: 403956 - protein, 13 aa, Homo sapiens
  CDR3 for beta chain variable domain of TCR clone 201978 (TRBV11-2, TRBJ1-6)
CASSLAGVSPLHF

SEQ ID NO: 403957 - protein, 13 aa, Homo sapiens
  CDR3 for alpha chain variable domain of TCR clone 201979 (TRAV8-3, TRAJ8)
WDPMNTGFQKLVF

SEQ ID NO: 403958 - protein, 15 aa, Homo sapiens
  CDR3 for beta chain variable domain of TCR clone 201979 (TRBV5-1, TRBJ2-7)
CASSPQGRPLDEQYF

SEQ ID NO: 403959 - protein, 13 aa, Homo sapiens
  CDR3 for alpha chain variable domain of TCR clone 201980 (TRAV27, TRAJ28)
CAISGAGSYQLTF

SEQ ID NO: 403960 - protein, 13 aa, Homo sapiens
  CDR3 for beta chain variable domain of TCR clone 201980 (TRBV20-1, TRBJ1-1)
CSARGGGNTEAFF

SEQ ID NO: 403961 - protein, 12 aa, Homo sapiens
  CDR3 for alpha chain variable domain of TCR clone 201981 (TRAV12-3, TRAJ42)
CAPGGSQGNLNF

SEQ ID NO: 403962 - protein, 13 aa, Homo sapiens
  CDR3 for beta chain variable domain of TCR clone 201981 (TRBV5-7, TRBJ2-6)
CASTSSGAIVLTF

SEQ ID NO: 403963 - protein, 16 aa, Homo sapiens
  CDR3 for alpha chain variable domain of TCR clone 201982 (TRAV3, TRAJ37)
CAVRFRGSGNTGKLIL

SEQ ID NO: 403964 - protein, 16 aa, Homo sapiens
  CDR3 for beta chain variable domain of TCR clone 201982 (TRBV11-2, TRBJ2-7)
CASSPTTGGVSYEQYF

SEQ ID NO: 403965 - protein, 12 aa, Homo sapiens
  CDR3 for alpha chain variable domain of TCR clone 201983 (TRAV21, TRAJ23)
CAVMLQGGKLIF

SEQ ID NO: 403966 - protein, 13 aa, Homo sapiens
  CDR3 for beta chain variable domain of TCR clone 201983 (TRBV12-4, TRBJ1-2)
CASSLRQGKGYTF

SEQ ID NO: 403967 - protein, 16 aa, Homo sapiens
  CDR3 for alpha chain variable domain of TCR clone 201984 (TRAV16, TRAJ4)
CALCRMFSGGYNKLIF

SEQ ID NO: 403968 - protein, 19 aa, Homo sapiens
  CDR3 for beta chain variable domain of TCR clone 201984 (TRBV28, TRBJ2-7)
CASSYSGTSRLGWVYEQYF

SEQ ID NO: 403969 - protein, 12 aa, Homo sapiens
  CDR3 for alpha chain variable domain of TCR clone 201985 (TRAV34, TRAJ27)
CGADTNAGKSTF

SEQ ID NO: 403970 - protein, 17 aa, Homo sapiens
  CDR3 for beta chain variable domain of TCR clone 201985 (TRBV7-3, TRBJ2-2)
CASSLSGTSGGTGELFS

SEQ ID NO: 403971 - protein, 12 aa, Homo sapiens
  CDR3 for alpha chain variable domain of TCR clone 201986 (TRAV16, TRAJ10)
CSRTGGGNKLTF

SEQ ID NO: 403972 - protein, 13 aa, Homo sapiens
  CDR3 for beta chain variable domain of TCR clone 201986 (TRBV24-1, TRBJ2-3)
CATLEVSTDTQYF

SEQ ID NO: 403973 - protein, 18 aa, Homo sapiens
  CDR3 for alpha chain variable domain of TCR clone 201987 (TRAV1-1, TRAJ3)
CAVRFHSTGYSSASKIIF

SEQ ID NO: 403974 - protein, 13 aa, Homo sapiens
  CDR3 for beta chain variable domain of TCR clone 201987 (TRBV7-9, TRBJ2-3)
CASSPGSTDTQYF

SEQ ID NO: 403975 - protein, 12 aa, Homo sapiens
  CDR3 for alpha chain variable domain of TCR clone 201988 (TRAV2, TRAJ33)
CAVPDSNYQLIW

SEQ ID NO: 403976 - protein, 15 aa, Homo sapiens
  CDR3 for beta chain variable domain of TCR clone 201988 (TRBV29-1, TRBJ2-7)
CSVEFFDRGPYEQYF

SEQ ID NO: 403977 - protein, 18 aa, Homo sapiens
  CDR3 for alpha chain variable domain of TCR clone 201989 (TRAV13-1, TRAJ52)
CAAKNPNAGGTSYGKLTF

SEQ ID NO: 403978 - protein, 19 aa, Homo sapiens
  CDR3 for beta chain variable domain of TCR clone 201989 (TRBV25-1, TRBJ2-2)
CAILVYRVDRGRKTGELFF

SEQ ID NO: 403979 - protein, 16 aa, Homo sapiens
  CDR3 for alpha chain variable domain of TCR clone 201990 (TRAV27, TRAJ52)
CAGAGAGGTRYGKLTF

SEQ ID NO: 403980 - protein, 17 aa, Homo sapiens
  CDR3 for beta chain variable domain of TCR clone 201990 (TRBV24-1, TRBJ2-3)
CATSDLPSGEDTDTQYF

SEQ ID NO: 403981 - protein, 13 aa, Homo sapiens
  CDR3 for alpha chain variable domain of TCR clone 201991 (TRAV8-6, TRAJ40)
CAVSVTGTYNYIF

SEQ ID NO: 403982 - protein, 15 aa, Homo sapiens
  CDR3 for beta chain variable domain of TCR clone 201991 (TRBV4-1, TRBJ2-3)
CASSRGQGIPDTQYF

SEQ ID NO: 403983 - protein, 16 aa, Homo sapiens
  CDR3 for alpha chain variable domain of TCR clone 201992 (TRAV30, TRAJ49)
SAAQRVGPNTGNQFYF

SEQ ID NO: 403984 - protein, 16 aa, Homo sapiens
  CDR3 for beta chain variable domain of TCR clone 201992 (TRBV12-4, TRBJ1-5)
CASSRPVGGSNQPQHF

SEQ ID NO: 403985 - protein, 12 aa, Homo sapiens
  CDR3 for alpha chain variable domain of TCR clone 201993 (TRAV27, TRAJ13)
CAGAGGYQKVTF

SEQ ID NO: 403986 - protein, 15 aa, Homo sapiens
  CDR3 for beta chain variable domain of TCR clone 201993 (TRBV20-1, TRBJ2-6)
CSARDRGPGANVLAF

SEQ ID NO: 403987 - protein, 13 aa, Homo sapiens
  CDR3 for alpha chain variable domain of TCR clone 201994 (TRAV12-1, TRAJ33)
CGDAPDSNYRLIW

SEQ ID NO: 403988 - protein, 12 aa, Homo sapiens
  CDR3 for beta chain variable domain of TCR clone 201994 (TRBV11-2, TRBJ2-2)
CASSLGGGELFF

SEQ ID NO: 403989 - protein, 14 aa, Homo sapiens
  CDR3 for alpha chain variable domain of TCR clone 201995 (TRAV2, TRAJ9)
CAVEDLSGGFKTIF

SEQ ID NO: 403990 - protein, 14 aa, Homo sapiens
  CDR3 for beta chain variable domain of TCR clone 201995 (TRBV6-1, TRBJ1-3)
CASVQGGGGNTIYF

SEQ ID NO: 403991 - protein, 10 aa, Homo sapiens
  CDR3 for alpha chain variable domain of TCR clone 201996 (TRAV21, TRAJ34)
CVTNTDKLIF

SEQ ID NO: 403992 - protein, 16 aa, Homo sapiens
  CDR3 for beta chain variable domain of TCR clone 201996 (TRBV18, TRBJ1-1)
CASSPGVGGRGGEAFF

SEQ ID NO: 403993 - protein, 15 aa, Homo sapiens
  CDR3 for alpha chain variable domain of TCR clone 201997 (TRAV13-1, TRAJ9)
CAASTLNTGGFKTIF

SEQ ID NO: 403994 - protein, 13 aa, Homo sapiens
  CDR3 for beta chain variable domain of TCR clone 201997 (TRBV7-7, TRBJ1-1)
CASSLGANTEAFF

SEQ ID NO: 403995 - protein, 13 aa, Homo sapiens
  CDR3 for alpha chain variable domain of TCR clone 201998 (TRAV2, TRAJ40)
CAVVTSGTYKYIF

SEQ ID NO: 403996 - protein, 14 aa, Homo sapiens
  CDR3 for beta chain variable domain of TCR clone 201998 (TRBV11-3, TRBJ1-6)
CASSFSGCDSPLHF

SEQ ID NO: 403997 - protein, 12 aa, Homo sapiens
  CDR3 for alpha chain variable domain of TCR clone 201999 (TRAV2, TRAJ31)
CAVGDNNARLMF

SEQ ID NO: 403998 - protein, 15 aa, Homo sapiens
  CDR3 for beta chain variable domain of TCR clone 201999 (TRBV5-7, TRBJ2-7)
CASSPYFEGSYEQYF

SEQ ID NO: 403999 - protein, 16 aa, Homo sapiens
  CDR3 for alpha chain variable domain of TCR clone 202000 (TRAV13-2, TRAJ32)
CAENMNYGGATNKLIF

SEQ ID NO: 404000 - protein, 14 aa, Homo sapiens
  CDR3 for beta chain variable domain of TCR clone 202000 (TRBV15, TRBJ2-5)
CAISSTGYQETQYF

SEQ ID NO: 404001 - protein, 14 aa, Homo sapiens
  CDR3 for alpha chain variable domain of TCR clone 202001 (TRAV17, TRAJ12)
CATDGVDSSYKLIF

SEQ ID NO: 404002 - protein, 15 aa, Homo sapiens
  CDR3 for beta chain variable domain of TCR clone 202001 (TRBV3-1, TRBJ1-2)
CASSHPGTPGYGYTF

SEQ ID NO: 404003 - protein, 15 aa, Homo sapiens
  CDR3 for alpha chain variable domain of TCR clone 202002 (TRAV1-2, TRAJ38)
CAVRENAGNNRKLIG

SEQ ID NO: 404004 - protein, 13 aa, Homo sapiens
  CDR3 for beta chain variable domain of TCR clone 202002 (TRBV27, TRBJ1-2)
CASSPSHRGRYTF

SEQ ID NO: 404005 - protein, 16 aa, Homo sapiens
  CDR3 for alpha chain variable domain of TCR clone 202003 (TRAV26-1, TRAJ40)
CIVRALTTSGTYKYIF

SEQ ID NO: 404006 - protein, 12 aa, Homo sapiens
  CDR3 for beta chain variable domain of TCR clone 202003 (TRBV6-4, TRBJ2-7)
LSTSANSYEQYF

SEQ ID NO: 404007 - protein, 15 aa, Homo sapiens
  CDR3 for alpha chain variable domain of TCR clone 202004 (TRAV12-3, TRAJ49)
CAMAVTPNTGNQFDF

SEQ ID NO: 404008 - protein, 18 aa, Homo sapiens
  CDR3 for beta chain variable domain of TCR clone 202004 (TRBV4-1, TRBJ1-5)
CASSQDPRGQGLNQPQHF

SEQ ID NO: 404009 - protein, 12 aa, Homo sapiens
  CDR3 for alpha chain variable domain of TCR clone 202005 (TRAV12-3, TRAJ17)
CAMTLTGDKLTF

SEQ ID NO: 404010 - protein, 15 aa, Homo sapiens
  CDR3 for beta chain variable domain of TCR clone 202005 (TRBV20-1, TRBJ2-7)
CCARDRVSGMDEQYF

SEQ ID NO: 404011 - protein, 14 aa, Homo sapiens
  CDR3 for alpha chain variable domain of TCR clone 202006 (TRAV3, TRAJ9)
RAVRLNTGGFKTIF

SEQ ID NO: 404012 - protein, 16 aa, Homo sapiens
  CDR3 for beta chain variable domain of TCR clone 202006 (TRBV12-5, TRBJ2-5)
CASGPRTSGNQETQYF

SEQ ID NO: 404013 - protein, 13 aa, Homo sapiens
  CDR3 for alpha chain variable domain of TCR clone 202007 (TRAV17, TRAJ26)
CATGDNYGQNFVF

SEQ ID NO: 404014 - protein, 16 aa, Homo sapiens
  CDR3 for beta chain variable domain of TCR clone 202007 (TRBV2, TRBJ2-1)
CASSVGGSLSYNEQFF

SEQ ID NO: 404015 - protein, 14 aa, Homo sapiens
  CDR3 for alpha chain variable domain of TCR clone 202008 (TRAV1-2, TRAJ16)
CAVNRFSDGQKLLF

SEQ ID NO: 404016 - protein, 15 aa, Homo sapiens
  CDR3 for beta chain variable domain of TCR clone 202008 (TRBV3-1, TRBJ2-2)
CASSRAVRETGELFF

SEQ ID NO: 404017 - protein, 15 aa, Homo sapiens
  CDR3 for alpha chain variable domain of TCR clone 202009 (TRAV1-1, TRAJ22)
CALRVSSGSARQLTF

SEQ ID NO: 404018 - protein, 15 aa, Homo sapiens
  CDR3 for beta chain variable domain of TCR clone 202009 (TRBV20-1, TRBJ2-7)
CSARDRVSGMDEQYF

SEQ ID NO: 404019 - protein, 14 aa, Homo sapiens
  CDR3 for alpha chain variable domain of TCR clone 202010 (TRAV3, TRAJ9)
CAVRLNTGGFKTIF

SEQ ID NO: 404020 - protein, 16 aa, Homo sapiens
  CDR3 for beta chain variable domain of TCR clone 202010 (TRBV24-1, TRBJ2-3)
CATSDRRQDLTDTQYF

SEQ ID NO: 404021 - protein, 13 aa, Homo sapiens
  CDR3 for alpha chain variable domain of TCR clone 202011 (TRAV17, TRAJ5)
CAPMDTGRRALTF

SEQ ID NO: 404022 - protein, 14 aa, Homo sapiens
  CDR3 for beta chain variable domain of TCR clone 202011 (TRBV19, TRBJ2-3)
CASSIDLGGDTQYF

SEQ ID NO: 404023 - protein, 14 aa, Homo sapiens
  CDR3 for alpha chain variable domain of TCR clone 202012 (TRAV1-2, TRAJ16)
CAVNRFSDGQNLLF

SEQ ID NO: 404024 - protein, 11 aa, Homo sapiens
  CDR3 for beta chain variable domain of TCR clone 202012 (TRBV7-9, TRBJ2-3)
CASSPTDTQYF

SEQ ID NO: 404025 - protein, 15 aa, Homo sapiens
  CDR3 for alpha chain variable domain of TCR clone 202013 (TRAV29/DV5, TRAJ24)
CAASGATDSWGKFEF

SEQ ID NO: 404026 - protein, 20 aa, Homo sapiens
  CDR3 for beta chain variable domain of TCR clone 202013 (TRBV11-2, TRBJ2-2)
LRTRPCISVPAASLPGGCFF

SEQ ID NO: 404027 - protein, 14 aa, Homo sapiens
  CDR3 for alpha chain variable domain of TCR clone 202014 (TRAV8-2, TRAJ6)
CVVVSAGGSYIPTF

SEQ ID NO: 404028 - protein, 16 aa, Homo sapiens
  CDR3 for beta chain variable domain of TCR clone 202014 (TRBV7-6, TRBJ2-6)
CASSLPGLSGANVLTF

SEQ ID NO: 404029 - protein, 13 aa, Homo sapiens
  CDR3 for alpha chain variable domain of TCR clone 202015 (TRAV27, TRAJ6)
CAGGTRGSYIPTF

SEQ ID NO: 404030 - protein, 16 aa, Homo sapiens
  CDR3 for beta chain variable domain of TCR clone 202015 (TRBV11-2, TRBJ2-2)
CASRKPGQGFTGELFF

SEQ ID NO: 404031 - protein, 14 aa, Homo sapiens
  CDR3 for alpha chain variable domain of TCR clone 202016 (TRAV12-3, TRAJ10)
SHLPLTGGGNKLTF

SEQ ID NO: 404032 - protein, 15 aa, Homo sapiens
  CDR3 for beta chain variable domain of TCR clone 202016 (TRBV7-9, TRBJ2-7)
CASSLDLDRGYEQYF

SEQ ID NO: 404033 - protein, 16 aa, Homo sapiens
  CDR3 for alpha chain variable domain of TCR clone 202017 (TRAV12-2, TRAJ32)
CAVNLGQGGATNKLIF

SEQ ID NO: 404034 - protein, 12 aa, Homo sapiens
  CDR3 for beta chain variable domain of TCR clone 202017 (TRBV7-9, TRBJ1-4)
CASSTDREKLFF

SEQ ID NO: 404035 - protein, 13 aa, Homo sapiens
  CDR3 for alpha chain variable domain of TCR clone 202018 (TRAV21, TRAJ27)
CSARPGNAGKSTF

SEQ ID NO: 404036 - protein, 13 aa, Homo sapiens
  CDR3 for beta chain variable domain of TCR clone 202018 (TRBV4-2, TRBJ1-1)
CASSQAGNTEAFF

SEQ ID NO: 404037 - protein, 15 aa, Homo sapiens
  CDR3 for alpha chain variable domain of TCR clone 202019 (TRAV29/DV5, TRAJ53)
CAVSSSGGSNYKLTF

SEQ ID NO: 404038 - protein, 17 aa, Homo sapiens
  CDR3 for beta chain variable domain of TCR clone 202019 (TRBV4-1, TRBJ1-6)
CASSQDRNRDYNSPLLF

SEQ ID NO: 404039 - protein, 18 aa, Homo sapiens
  CDR3 for alpha chain variable domain of TCR clone 202020 (TRAV13-1, TRAJ52)
CAASKRSAGGTSYGKLTF

SEQ ID NO: 404040 - protein, 12 aa, Homo sapiens
  CDR3 for beta chain variable domain of TCR clone 202020 (TRBV7-2, TRBJ1-2)
CASRDSIYGYTF

SEQ ID NO: 404041 - protein, 12 aa, Homo sapiens
  CDR3 for alpha chain variable domain of TCR clone 202021 (TRAV12-1, TRAJ40)
CVFYSGTYKYIF

SEQ ID NO: 404042 - protein, 18 aa, Homo sapiens
  CDR3 for beta chain variable domain of TCR clone 202021 (TRBV12-4, TRBJ2-2)
CASSLIAGTRGRTGELFF

SEQ ID NO: 404043 - protein, 14 aa, Homo sapiens
  CDR3 for alpha chain variable domain of TCR clone 202022 (TRAV12-3, TRAJ29)
CAMILLSVNTPLVF

SEQ ID NO: 404044 - protein, 12 aa, Homo sapiens
  CDR3 for beta chain variable domain of TCR clone 202022 (TRBV11-2, TRBJ2-2)
CASSLGGGELFF

SEQ ID NO: 404045 - protein, 11 aa, Homo sapiens
  CDR3 for alpha chain variable domain of TCR clone 202023 (TRAV21, TRAJ11)
CAVNGYSTLTF

SEQ ID NO: 404046 - protein, 17 aa, Homo sapiens
  CDR3 for beta chain variable domain of TCR clone 202023 (TRBV7-3, TRBJ2-2)
CASSLSGTSGGTGELFF

SEQ ID NO: 404047 - protein, 17 aa, Homo sapiens
  CDR3 for alpha chain variable domain of TCR clone 202024 (TRAV4, TRAJ18)
CLVGERSWGSTLGRLYF

SEQ ID NO: 404048 - protein, 18 aa, Homo sapiens
  CDR3 for beta chain variable domain of TCR clone 202024 (TRBV11-2, TRBJ2-3)
CASSLGGASRGAPNTQYF

SEQ ID NO: 404049 - protein, 14 aa, Homo sapiens
  CDR3 for alpha chain variable domain of TCR clone 202025 (TRAV35, TRAJ50)
CAGHRKTSYDKVIF

SEQ ID NO: 404050 - protein, 13 aa, Homo sapiens
  CDR3 for beta chain variable domain of TCR clone 202025 (TRBV7-7, TRBJ2-3)
CASSLSRAETQYF

SEQ ID NO: 404051 - protein, 16 aa, Homo sapiens
  CDR3 for alpha chain variable domain of TCR clone 202026 (TRAV3, TRAJ10)
CAVRDMRAGGGNKLTF

SEQ ID NO: 404052 - protein, 13 aa, Homo sapiens
  CDR3 for beta chain variable domain of TCR clone 202026 (TRBV7-7, TRBJ2-5)
CASSRSGQETQYF

SEQ ID NO: 404053 - protein, 17 aa, Homo sapiens
  CDR3 for alpha chain variable domain of TCR clone 202027 (TRAV17, TRAJ52)
CATERPSGGTSYGKLTF

SEQ ID NO: 404054 - protein, 15 aa, Homo sapiens
  CDR3 for beta chain variable domain of TCR clone 202027 (TRBV19, TRBJ2-7)
CASRPTPGLSIEQYF

SEQ ID NO: 404055 - protein, 13 aa, Homo sapiens
  CDR3 for alpha chain variable domain of TCR clone 202028 (TRAV13-1, TRAJ5)
CAASGHGQESTYF

SEQ ID NO: 404056 - protein, 13 aa, Homo sapiens
  CDR3 for beta chain variable domain of TCR clone 202028 (TRBV5-4, TRBJ1-2)
CASSLKQNYGYTF

SEQ ID NO: 404057 - protein, 12 aa, Homo sapiens
  CDR3 for alpha chain variable domain of TCR clone 202029 (TRAV27, TRAJ35)
CAGADFGNVLHC

SEQ ID NO: 404058 - protein, 16 aa, Homo sapiens
  CDR3 for beta chain variable domain of TCR clone 202029 (TRBV6-1, TRBJ2-1)
CASILRQGSSYNEPFF

SEQ ID NO: 404059 - protein, 14 aa, Homo sapiens
  CDR3 for alpha chain variable domain of TCR clone 202030 (TRAV26-1, TRAJ39)
CTVFTNNAGNMLTF

SEQ ID NO: 404060 - protein, 15 aa, Homo sapiens
  CDR3 for beta chain variable domain of TCR clone 202030 (TRBV19, TRBJ2-4)
CASSLTGLTKNIQYF

SEQ ID NO: 404061 - protein, 18 aa, Homo sapiens
  CDR3 for alpha chain variable domain of TCR clone 202031 (TRAV21, TRAJ52)
CAVRPSPAGGTSYGKLTF

SEQ ID NO: 404062 - protein, 16 aa, Homo sapiens
  CDR3 for beta chain variable domain of TCR clone 202031 (TRBV4-2, TRBJ2-1)
CASSQETATPYNEQFL

SEQ ID NO: 404063 - protein, 16 aa, Homo sapiens
  CDR3 for alpha chain variable domain of TCR clone 202032 (TRAV26-1, TRAJ33)
CIVPFWGEDSNYQLIW

SEQ ID NO: 404064 - protein, 14 aa, Homo sapiens
  CDR3 for beta chain variable domain of TCR clone 202032 (TRBV6-3, TRBJ1-1)
CASSYHSKNTGAFF

SEQ ID NO: 404065 - protein, 15 aa, Homo sapiens
  CDR3 for alpha chain variable domain of TCR clone 202033 (TRAV8-3, TRAJ15)
CAVGAPNQAGTSLLF

SEQ ID NO: 404066 - protein, 14 aa, Homo sapiens
  CDR3 for beta chain variable domain of TCR clone 202033 (TRBV20-1, TRBJ2-1)
CSPSDEASYNEQFF

SEQ ID NO: 404067 - protein, 13 aa, Homo sapiens
  CDR3 for alpha chain variable domain of TCR clone 202034 (TRAV27, TRAJ45)
CRSSGGGADGLTF

SEQ ID NO: 404068 - protein, 18 aa, Homo sapiens
  CDR3 for beta chain variable domain of TCR clone 202034 (TRBV25-1, TRBJ1-2)
CASSGLQNGQGLIFGYTF

SEQ ID NO: 404069 - protein, 11 aa, Homo sapiens
  CDR3 for alpha chain variable domain of TCR clone 202035 (TRAV29/DV5, TRAJ47)
CAATYGNKLVF

SEQ ID NO: 404070 - protein, 15 aa, Homo sapiens
  CDR3 for beta chain variable domain of TCR clone 202035 (TRBV7-2, TRBJ2-1)
CASSSGLAGGNEQFF

SEQ ID NO: 404071 - protein, 13 aa, Homo sapiens
  CDR3 for alpha chain variable domain of TCR clone 202036 (TRAV35, TRAJ44)
CAGLSGTASKLTF

SEQ ID NO: 404072 - protein, 17 aa, Homo sapiens
  CDR3 for beta chain variable domain of TCR clone 202036 (TRBV7-8, TRBJ1-2)
CARSLRPLQGHLYGYTF

SEQ ID NO: 404073 - protein, 14 aa, Homo sapiens
  CDR3 for alpha chain variable domain of TCR clone 202037 (TRAV17, TRAJ12)
CATDEKDSSYKLIF

SEQ ID NO: 404074 - protein, 16 aa, Homo sapiens
  CDR3 for beta chain variable domain of TCR clone 202037 (TRBV11-2, TRBJ2-1)
CASSPRLAGVYHEQFF

SEQ ID NO: 404075 - protein, 14 aa, Homo sapiens
  CDR3 for alpha chain variable domain of TCR clone 202038 (TRAV29/DV5, TRAJ44)
CAASALGTASKLTF

SEQ ID NO: 404076 - protein, 13 aa, Homo sapiens
  CDR3 for beta chain variable domain of TCR clone 202038 (TRBV7-3, TRBJ1-5)
CASSLDSNQPQHF

SEQ ID NO: 404077 - protein, 11 aa, Homo sapiens
  CDR3 for alpha chain variable domain of TCR clone 202039 (TRAV12-3, TRAJ43)
CAMSVSNDMRF

SEQ ID NO: 404078 - protein, 13 aa, Homo sapiens
  CDR3 for beta chain variable domain of TCR clone 202039 (TRBV20-1, TRBJ1-1)
CSAPLGGDTEAVF

SEQ ID NO: 404079 - protein, 12 aa, Homo sapiens
  CDR3 for alpha chain variable domain of TCR clone 202040 (TRAV29/DV5, TRAJ53)
CAASGGNYKLTF

SEQ ID NO: 404080 - protein, 13 aa, Homo sapiens
  CDR3 for beta chain variable domain of TCR clone 202040 (TRBV4-2, TRBJ1-1)
CASSQAGNTEAFF

SEQ ID NO: 404081 - protein, 11 aa, Homo sapiens
  CDR3 for alpha chain variable domain of TCR clone 202041 (TRAV12-1, TRAJ43)
CIEYDNNDMRF

SEQ ID NO: 404082 - protein, 15 aa, Homo sapiens
  CDR3 for beta chain variable domain of TCR clone 202041 (TRBV18, TRBJ2-5)
CASSPRASEAETQYF

SEQ ID NO: 404083 - protein, 15 aa, Homo sapiens
  CDR3 for alpha chain variable domain of TCR clone 202042 (TRAV2, TRAJ13)
CCLLLCFRGFQKVTF

SEQ ID NO: 404084 - protein, 13 aa, Homo sapiens
  CDR3 for beta chain variable domain of TCR clone 202042 (TRBV12-4, TRBJ1-2)
CASSLRQGKGYTF

SEQ ID NO: 404085 - protein, 13 aa, Homo sapiens
  CDR3 for alpha chain variable domain of TCR clone 202043 (TRAV8-3, TRAJ10)
CAVFTGGGNKLTF

SEQ ID NO: 404086 - protein, 12 aa, Homo sapiens
  CDR3 for beta chain variable domain of TCR clone 202043 (TRBV2, TRBJ2-1)
CAYGPPGNEQFF

SEQ ID NO: 404087 - protein, 15 aa, Homo sapiens
  CDR3 for alpha chain variable domain of TCR clone 202044 (TRAV16, TRAJ4)
CALEDTSGGYNKLIF

SEQ ID NO: 404088 - protein, 13 aa, Homo sapiens
  CDR3 for beta chain variable domain of TCR clone 202044 (TRBV7-3, TRBJ2-7)
CASSQAGGYEQYF

SEQ ID NO: 404089 - protein, 13 aa, Homo sapiens
  CDR3 for alpha chain variable domain of TCR clone 202045 (TRAV2, TRAJ40)
CAVVTSRTYKYIF

SEQ ID NO: 404090 - protein, 14 aa, Homo sapiens
  CDR3 for beta chain variable domain of TCR clone 202045 (TRBV28, TRBJ2-1)
CASSYYTAYNEQFF

SEQ ID NO: 404091 - protein, 13 aa, Homo sapiens
  CDR3 for alpha chain variable domain of TCR clone 202046 (TRAV12-2, TRAJ20)
CAEYPSNDYKLSF

SEQ ID NO: 404092 - protein, 15 aa, Homo sapiens
  CDR3 for beta chain variable domain of TCR clone 202046 (TRBV27, TRBJ2-5)
CASSLYPRGGETQYF

SEQ ID NO: 404093 - protein, 12 aa, Homo sapiens
  CDR3 for alpha chain variable domain of TCR clone 202047 (TRAV16, TRAJ22)
CALAVSARQLSF

SEQ ID NO: 404094 - protein, 14 aa, Homo sapiens
  CDR3 for beta chain variable domain of TCR clone 202047 (TRBV11-2, TRBJ2-3)
CASSSIASTDTQYF

SEQ ID NO: 404095 - protein, 17 aa, Homo sapiens
  CDR3 for alpha chain variable domain of TCR clone 202048 (TRAV2, TRAJ36)
CAVEDRGNWGKQALLWD

SEQ ID NO: 404096 - protein, 14 aa, Homo sapiens
  CDR3 for beta chain variable domain of TCR clone 202048 (TRBV7-9, TRBJ2-5)
CASSLDTAQETQYF

SEQ ID NO: 404097 - protein, 13 aa, Homo sapiens
  CDR3 for alpha chain variable domain of TCR clone 202049 (TRAV21, TRAJ20)
CAVGLRVDYQLSF

SEQ ID NO: 404098 - protein, 13 aa, Homo sapiens
  CDR3 for beta chain variable domain of TCR clone 202049 (TRBV6-1, TRBJ1-1)
CASSRQGITEAFF

SEQ ID NO: 404099 - protein, 13 aa, Homo sapiens
  CDR3 for alpha chain variable domain of TCR clone 202050 (TRAV8-1, TRAJ8)
CAVNRTGFQKLVF

SEQ ID NO: 404100 - protein, 14 aa, Homo sapiens
  CDR3 for beta chain variable domain of TCR clone 202050 (TRBV7-6, TRBJ2-3)
CASSLGTVTDTQYF

SEQ ID NO: 404101 - protein, 12 aa, Homo sapiens
  CDR3 for alpha chain variable domain of TCR clone 202051 (TRAV21, TRAJ11)
CAATSGYSTLTF

SEQ ID NO: 404102 - protein, 13 aa, Homo sapiens
  CDR3 for beta chain variable domain of TCR clone 202051 (TRBV7-9, TRBJ2-3)
CASSPGSTDTQYF

SEQ ID NO: 404103 - protein, 16 aa, Homo sapiens
  CDR3 for alpha chain variable domain of TCR clone 202052 (TRAV3, TRAJ10)
CAVRDMRAGGGNKLTF

SEQ ID NO: 404104 - protein, 14 aa, Homo sapiens
  CDR3 for beta chain variable domain of TCR clone 202052 (TRBV25-1, TRBJ1-1)
CASTHLGGNTEDFF

SEQ ID NO: 404105 - protein, 14 aa, Homo sapiens
  CDR3 for alpha chain variable domain of TCR clone 202053 (TRAV20, TRAJ17)
CAVQARAAGNKLTF

SEQ ID NO: 404106 - protein, 17 aa, Homo sapiens
  CDR3 for beta chain variable domain of TCR clone 202053 (TRBV7-8, TRBJ2-6)
CASSAGTGGAGANVLTF

SEQ ID NO: 404107 - protein, 23 aa, Homo sapiens
  CDR3 for alpha chain variable domain of TCR clone 202054 (TRAV12-2, TRAJ36)
PLLIRDSQPSDSATLERANNLFF

SEQ ID NO: 404108 - protein, 16 aa, Homo sapiens
  CDR3 for beta chain variable domain of TCR clone 202054 (TRBV7-3, TRBJ2-2)
CASSLKRGTLSGELFF

SEQ ID NO: 404109 - protein, 14 aa, Homo sapiens
  CDR3 for alpha chain variable domain of TCR clone 202055 (TRAV26-1, TRAJ8)
CIVRVDTGFQKLVF

SEQ ID NO: 404110 - protein, 14 aa, Homo sapiens
  CDR3 for beta chain variable domain of TCR clone 202055 (TRBV12-5, TRBJ2-5)
CASGSRTHQETQYF

SEQ ID NO: 404111 - protein, 14 aa, Homo sapiens
  CDR3 for alpha chain variable domain of TCR clone 202056 (TRAV12-1, TRAJ43)
CVVNGRSNNNDMRF

SEQ ID NO: 404112 - protein, 14 aa, Homo sapiens
  CDR3 for beta chain variable domain of TCR clone 202056 (TRBV4-2, TRBJ1-4)
CASSQGATNEKLFF

SEQ ID NO: 404113 - protein, 14 aa, Homo sapiens
  CDR3 for alpha chain variable domain of TCR clone 202057 (TRAV17, TRAJ16)
CATADFSDGQKLLF

SEQ ID NO: 404114 - protein, 15 aa, Homo sapiens
  CDR3 for beta chain variable domain of TCR clone 202057 (TRBV18, TRBJ2-1)
CASSPSSASYNEQFF

SEQ ID NO: 404115 - protein, 12 aa, Homo sapiens
  CDR3 for alpha chain variable domain of TCR clone 202058 (TRAV2, TRAJ33)
CAVEDSNYQLIW

SEQ ID NO: 404116 - protein, 14 aa, Homo sapiens
  CDR3 for beta chain variable domain of TCR clone 202058 (TRBV19, TRBJ1-4)
CASSINRGGEKLVF

SEQ ID NO: 404117 - protein, 13 aa, Homo sapiens
  CDR3 for alpha chain variable domain of TCR clone 202059 (TRAV12-3, TRAJ33)
CAMSVNINYQLIW

SEQ ID NO: 404118 - protein, 16 aa, Homo sapiens
  CDR3 for beta chain variable domain of TCR clone 202059 (TRBV7-3, TRBJ2-2)
CASSLKRGTLSGELFF

SEQ ID NO: 404119 - protein, 12 aa, Homo sapiens
  CDR3 for alpha chain variable domain of TCR clone 202060 (TRAV21, TRAJ31)
CAVWGNNARLMF

SEQ ID NO: 404120 - protein, 17 aa, Homo sapiens
  CDR3 for beta chain variable domain of TCR clone 202060 (TRBV28, TRBJ2-5)
CASSTPEGDALQETQYF

SEQ ID NO: 404121 - protein, 16 aa, Homo sapiens
  CDR3 for alpha chain variable domain of TCR clone 202061 (TRAV12-2, TRAJ10)
CAVNRVHTGGGNKLTF

SEQ ID NO: 404122 - protein, 12 aa, Homo sapiens
  CDR3 for beta chain variable domain of TCR clone 202061 (TRBV28, TRBJ2-7)
CASSFSSYEQYF

SEQ ID NO: 404123 - protein, 12 aa, Homo sapiens
  CDR3 for alpha chain variable domain of TCR clone 202062 (TRAV12-3, TRAJ17)
CAMTLTGNKLTF

SEQ ID NO: 404124 - protein, 20 aa, Homo sapiens
  CDR3 for beta chain variable domain of TCR clone 202062 (TRBV7-8, TRBJ2-2)
CASSHLFPGPTSHITGELFF

SEQ ID NO: 404125 - protein, 14 aa, Homo sapiens
  CDR3 for alpha chain variable domain of TCR clone 202063 (TRAV12-2, TRAJ17)
CAALFKAAGNKLTF

SEQ ID NO: 404126 - protein, 16 aa, Homo sapiens
  CDR3 for beta chain variable domain of TCR clone 202063 (TRBV20-1, TRBJ2-2)
CSASASGIPGAVELFF

SEQ ID NO: 404127 - protein, 16 aa, Homo sapiens
  CDR3 for alpha chain variable domain of TCR clone 202064 (TRAV26-1, TRAJ45)
CIVEKYSGGGADGLTF

SEQ ID NO: 404128 - protein, 14 aa, Homo sapiens
  CDR3 for beta chain variable domain of TCR clone 202064 (TRBV12-5, TRBJ2-5)
CASGSRTHQETQYF

SEQ ID NO: 404129 - protein, 16 aa, Homo sapiens
  CDR3 for alpha chain variable domain of TCR clone 202065 (TRAV36/DV7, TRAJ33)
WRPGNKVQDSNYQLIW

SEQ ID NO: 404130 - protein, 15 aa, Homo sapiens
  CDR3 for beta chain variable domain of TCR clone 202065 (TRBV5-1, TRBJ2-1)
CASSPPRAPYNEQFF

SEQ ID NO: 404131 - protein, 13 aa, Homo sapiens
  CDR3 for alpha chain variable domain of TCR clone 202066 (TRAV38-1, TRAJ42)
CARWGGSQGNLIF

SEQ ID NO: 404132 - protein, 15 aa, Homo sapiens
  CDR3 for beta chain variable domain of TCR clone 202066 (TRBV7-3, TRBJ2-1)
CASSPTGGGEVEQFF

SEQ ID NO: 404133 - protein, 14 aa, Homo sapiens
  CDR3 for alpha chain variable domain of TCR clone 202067 (TRAV35, TRAJ33)
CWPRGRESNYQLIW

SEQ ID NO: 404134 - protein, 11 aa, Homo sapiens
  CDR3 for beta chain variable domain of TCR clone 202067 (TRBV10-3, TRBJ2-7)
CAISEVLEQYF

SEQ ID NO: 404135 - protein, 13 aa, Homo sapiens
  CDR3 for alpha chain variable domain of TCR clone 202068 (TRAV1-2, TRAJ9)
CAALNTGGFKTIF

SEQ ID NO: 404136 - protein, 14 aa, Homo sapiens
  CDR3 for beta chain variable domain of TCR clone 202068 (TRBV7-3, TRBJ2-1)
CASSLSGSYNEQFF

SEQ ID NO: 404137 - protein, 12 aa, Homo sapiens
  CDR3 for alpha chain variable domain of TCR clone 202069 (TRAV38-1, TRAJ47)
CAFETYGNKLVF

SEQ ID NO: 404138 - protein, 17 aa, Homo sapiens
  CDR3 for beta chain variable domain of TCR clone 202069 (TRBV5-7, TRBJ2-7)
CASSGGRPVPTSSTSGR

SEQ ID NO: 404139 - protein, 12 aa, Homo sapiens
  CDR3 for alpha chain variable domain of TCR clone 202070 (TRAV1-2, TRAJ7)
CAVAYGNNRLAF

SEQ ID NO: 404140 - protein, 16 aa, Homo sapiens
  CDR3 for beta chain variable domain of TCR clone 202070 (TRBV5-1, TRBJ2-7)
CASSPMTGALSYEHYF

SEQ ID NO: 404141 - protein, 11 aa, Homo sapiens
  CDR3 for alpha chain variable domain of TCR clone 202071 (TRAV27, TRAJ45)
CAGAQEEVLTD

SEQ ID NO: 404142 - protein, 15 aa, Homo sapiens
  CDR3 for beta chain variable domain of TCR clone 202071 (TRBV11-2, TRBJ2-2)
CASRPEGTSTGELFF

SEQ ID NO: 404143 - protein, 21 aa, Homo sapiens
  CDR3 for alpha chain variable domain of TCR clone 202072 (TRAV12-1, TRAJ32)
SSVIQPPTSMNYGGATNKLIF

SEQ ID NO: 404144 - protein, 15 aa, Homo sapiens
  CDR3 for beta chain variable domain of TCR clone 202072 (TRBV7-9, TRBJ2-2)
CASGPLDTVPGELSF

SEQ ID NO: 404145 - protein, 15 aa, Homo sapiens
  CDR3 for alpha chain variable domain of TCR clone 202073 (TRAV3, TRAJ32)
CAVSSYGCATNKLIF

SEQ ID NO: 404146 - protein, 16 aa, Homo sapiens
  CDR3 for beta chain variable domain of TCR clone 202073 (TRBV5-1, TRBJ2-5)
CASSLSLAGAQETQYF

SEQ ID NO: 404147 - protein, 13 aa, Homo sapiens
  CDR3 for alpha chain variable domain of TCR clone 202074 (TRAV2, TRAJ21)
CAVEDLDFNKFYF

SEQ ID NO: 404148 - protein, 14 aa, Homo sapiens
  CDR3 for beta chain variable domain of TCR clone 202074 (TRBV19, TRBJ2-1)
CASEVTGARNEQFF

SEQ ID NO: 404149 - protein, 16 aa, Homo sapiens
  CDR3 for alpha chain variable domain of TCR clone 202075 (TRAV3, TRAJ10)
CAVRDMRAGGGNKRTF

SEQ ID NO: 404150 - protein, 14 aa, Homo sapiens
  CDR3 for beta chain variable domain of TCR clone 202075 (TRBV6-6, TRBJ2-7)
CASSDSGAGYEQYF

SEQ ID NO: 404151 - protein, 18 aa, Homo sapiens
  CDR3 for alpha chain variable domain of TCR clone 202076 (TRAV26-1, TRAJ22)
CIVRVALISSGSARQLTF

SEQ ID NO: 404152 - protein, 13 aa, Homo sapiens
  CDR3 for beta chain variable domain of TCR clone 202076 (TRBV13, TRBJ2-5)
CASSPAVGETQYF

SEQ ID NO: 404153 - protein, 13 aa, Homo sapiens
  CDR3 for alpha chain variable domain of TCR clone 202077 (TRAV17, TRAJ26)
CATVDNYGQNFVF

SEQ ID NO: 404154 - protein, 14 aa, Homo sapiens
  CDR3 for beta chain variable domain of TCR clone 202077 (TRBV6-1, TRBJ1-3)
CASVQGGGGNTIYV

SEQ ID NO: 404155 - protein, 15 aa, Homo sapiens
  CDR3 for alpha chain variable domain of TCR clone 202078 (TRAV23/DV6, TRAJ30)
CAASSQESRDDKIIS

SEQ ID NO: 404156 - protein, 14 aa, Homo sapiens
  CDR3 for beta chain variable domain of TCR clone 202078 (TRBV10-3, TRBJ1-2)
CAISAGGRVDGYTF

SEQ ID NO: 404157 - protein, 14 aa, Homo sapiens
  CDR3 for alpha chain variable domain of TCR clone 202079 (TRAV13-2, TRAJ57)
CAENFQGGSEKLVF

SEQ ID NO: 404158 - protein, 16 aa, Homo sapiens
  CDR3 for beta chain variable domain of TCR clone 202079 (TRBV12-5, TRBJ2-5)
CASGPRTSGNQETQYF

SEQ ID NO: 404159 - protein, 18 aa, Homo sapiens
  CDR3 for alpha chain variable domain of TCR clone 202080 (TRAV13-1, TRAJ45)
CAAPPQEYSGGGADGPTF

SEQ ID NO: 404160 - protein, 12 aa, Homo sapiens
  CDR3 for beta chain variable domain of TCR clone 202080 (TRBV11-2, TRBJ2-2)
CASSLGGGELFF

SEQ ID NO: 404161 - protein, 13 aa, Homo sapiens
  CDR3 for alpha chain variable domain of TCR clone 202081 (TRAV12-2, TRAJ10)
CAVLTGGGNKLTF

SEQ ID NO: 404162 - protein, 14 aa, Homo sapiens
  CDR3 for beta chain variable domain of TCR clone 202081 (TRBV6-1, TRBJ1-3)
CASVQGGGGNTIYF

SEQ ID NO: 404163 - protein, 16 aa, Homo sapiens
  CDR3 for alpha chain variable domain of TCR clone 202082 (TRAV3, TRAJ37)
CAVRGKGSGNTGNLIF

SEQ ID NO: 404164 - protein, 15 aa, Homo sapiens
  CDR3 for beta chain variable domain of TCR clone 202082 (TRBV7-9, TRBJ1-6)
CASSSPGRGNSPLHF

SEQ ID NO: 404165 - protein, 16 aa, Homo sapiens
  CDR3 for alpha chain variable domain of TCR clone 202083 (TRAV16, TRAJ42)
CARKMNYGGSQGNLIF

SEQ ID NO: 404166 - protein, 12 aa, Homo sapiens
  CDR3 for beta chain variable domain of TCR clone 202083 (TRBV20-1, TRBJ2-7)
CSTSPPSYEQYF

SEQ ID NO: 404167 - protein, 14 aa, Homo sapiens
  CDR3 for alpha chain variable domain of TCR clone 202084 (TRAV26-2, TRAJ27)
FILRDISDAGRSTF

SEQ ID NO: 404168 - protein, 15 aa, Homo sapiens
  CDR3 for beta chain variable domain of TCR clone 202084 (TRBV10-3, TRBJ2-7)
CATREQGLRSYEQYF

SEQ ID NO: 404169 - protein, 14 aa, Homo sapiens
  CDR3 for alpha chain variable domain of TCR clone 202085 (TRAV8-2, TRAJ37)
CVVSISGNTGKLIF

SEQ ID NO: 404170 - protein, 13 aa, Homo sapiens
  CDR3 for beta chain variable domain of TCR clone 202085 (TRBV7-8, TRBJ2-7)
RRVRRTEMGEQYF

SEQ ID NO: 404171 - protein, 16 aa, Homo sapiens
  CDR3 for alpha chain variable domain of TCR clone 202086 (TRAV12-2, TRAJ32)
CAVNLGQGGATNKLIF

SEQ ID NO: 404172 - protein, 15 aa, Homo sapiens
  CDR3 for beta chain variable domain of TCR clone 202086 (TRBV20-1, TRBJ2-7)
CSARGPLAGGREQYF

SEQ ID NO: 404173 - protein, 14 aa, Homo sapiens
  CDR3 for alpha chain variable domain of TCR clone 202087 (TRAV12-2, TRAJ11)
CAVEGGSGYSTLTF

SEQ ID NO: 404174 - protein, 13 aa, Homo sapiens
  CDR3 for beta chain variable domain of TCR clone 202087 (TRBV25-1, TRBJ2-7)
CASSEDGDYEQYF

SEQ ID NO: 404175 - protein, 13 aa, Homo sapiens
  CDR3 for alpha chain variable domain of TCR clone 202088 (TRAV22, TRAJ29)
CAVGGSGKKPLVF

SEQ ID NO: 404176 - protein, 13 aa, Homo sapiens
  CDR3 for beta chain variable domain of TCR clone 202088 (TRBV19, TRBJ2-7)
CASRKAGGSEQYF

SEQ ID NO: 404177 - protein, 14 aa, Homo sapiens
  CDR3 for alpha chain variable domain of TCR clone 202089 (TRAV17, TRAJ12)
CATDEKDSSYKLIF

SEQ ID NO: 404178 - protein, 13 aa, Homo sapiens
  CDR3 for beta chain variable domain of TCR clone 202089 (TRBV5-5, TRBJ1-2)
CASSFWRGEDYTF

SEQ ID NO: 404179 - protein, 11 aa, Homo sapiens
  CDR3 for alpha chain variable domain of TCR clone 202090 (TRAV12-1, TRAJ30)
CVVNGQDKIIF

SEQ ID NO: 404180 - protein, 14 aa, Homo sapiens
  CDR3 for beta chain variable domain of TCR clone 202090 (TRBV7-3, TRBJ2-1)
CASSLAGGTNEQFF

SEQ ID NO: 404181 - protein, 14 aa, Homo sapiens
  CDR3 for alpha chain variable domain of TCR clone 202091 (TRAV26-1, TRAJ31)
CIALPPNNNARLMF

SEQ ID NO: 404182 - protein, 16 aa, Homo sapiens
  CDR3 for beta chain variable domain of TCR clone 202091 (TRBV10-2, TRBJ2-7)
RASSESPGSSGSEQYF

SEQ ID NO: 404183 - protein, 14 aa, Homo sapiens
  CDR3 for alpha chain variable domain of TCR clone 202092 (TRAV9-2, TRAJ39)
CALYIYNAGNMLTF

SEQ ID NO: 404184 - protein, 18 aa, Homo sapiens
  CDR3 for beta chain variable domain of TCR clone 202092 (TRBV4-3, TRBJ1-6)
CASSQETPASSYNSPLHF

SEQ ID NO: 404185 - protein, 17 aa, Homo sapiens
  CDR3 for alpha chain variable domain of TCR clone 202093 (TRAV4, TRAJ42)
CLVGVLNYGGSQGNLIF

SEQ ID NO: 404186 - protein, 13 aa, Homo sapiens
  CDR3 for beta chain variable domain of TCR clone 202093 (TRBV4-1, TRBJ1-1)
CASSRKMNTEAFF

SEQ ID NO: 404187 - protein, 13 aa, Homo sapiens
  CDR3 for alpha chain variable domain of TCR clone 202094 (TRAV12-3, TRAJ43)
CAVIRPNNNDMRF

SEQ ID NO: 404188 - protein, 12 aa, Homo sapiens
  CDR3 for beta chain variable domain of TCR clone 202094 (TRBV11-2, TRBJ2-5)
CASGLGQETQYF

SEQ ID NO: 404189 - protein, 17 aa, Homo sapiens
  CDR3 for alpha chain variable domain of TCR clone 202095 (TRAV27, TRAJ13)
CAGARILGVTRKLPLNL

SEQ ID NO: 404190 - protein, 16 aa, Homo sapiens
  CDR3 for beta chain variable domain of TCR clone 202095 (TRBV7-6, TRBJ2-1)
CIAVPAAWGGADEQFF

SEQ ID NO: 404191 - protein, 14 aa, Homo sapiens
  CDR3 for alpha chain variable domain of TCR clone 202096 (TRAV12-1, TRAJ12)
CVVTGMDSSYKLIF

SEQ ID NO: 404192 - protein, 14 aa, Homo sapiens
  CDR3 for beta chain variable domain of TCR clone 202096 (TRBV4-1, TRBJ2-7)
CASSPVAGGDEQYF

SEQ ID NO: 404193 - protein, 12 aa, Homo sapiens
  CDR3 for alpha chain variable domain of TCR clone 202097 (TRAV29/DV5, TRAJ34)
CAASSGTDKLIF

SEQ ID NO: 404194 - protein, 13 aa, Homo sapiens
  CDR3 for beta chain variable domain of TCR clone 202097 (TRBV7-3, TRBJ1-1)
CASSQDWGAEAFF

SEQ ID NO: 404195 - protein, 15 aa, Homo sapiens
  CDR3 for alpha chain variable domain of TCR clone 202098 (TRAV8-4, TRAJ53)
CAVSDGGGSNYKLTF

SEQ ID NO: 404196 - protein, 17 aa, Homo sapiens
  CDR3 for beta chain variable domain of TCR clone 202098 (TRBV7-8, TRBJ2-6)
CDSSAGTGGAGANVLTF

SEQ ID NO: 404197 - protein, 13 aa, Homo sapiens
  CDR3 for alpha chain variable domain of TCR clone 202099 (TRAV21, TRAJ27)
CAARPGNAGKSTF

SEQ ID NO: 404198 - protein, 14 aa, Homo sapiens
  CDR3 for beta chain variable domain of TCR clone 202099 (TRBV11-2, TRBJ2-7)
CASSLGAGAYAQYF

SEQ ID NO: 404199 - protein, 21 aa, Homo sapiens
  CDR3 for alpha chain variable domain of TCR clone 202100 (TRAV12-1, TRAJ37)
CVVNGGLWQHRQTNLWARDNF

SEQ ID NO: 404200 - protein, 16 aa, Homo sapiens
  CDR3 for beta chain variable domain of TCR clone 202100 (TRBV6-6, TRBJ2-3)
CASSYSHAGSTDTQYF

SEQ ID NO: 404201 - protein, 16 aa, Homo sapiens
  CDR3 for alpha chain variable domain of TCR clone 202101 (TRAV16, TRAJ4)
CALSRMFSGGYNKLIF

SEQ ID NO: 404202 - protein, 14 aa, Homo sapiens
  CDR3 for beta chain variable domain of TCR clone 202101 (TRBV7-9, TRBJ2-2)
CASSLVQDTGELFF

SEQ ID NO: 404203 - protein, 14 aa, Homo sapiens
  CDR3 for alpha chain variable domain of TCR clone 202102 (TRAV19, TRAJ49)
CALSEANTGNQVYF

SEQ ID NO: 404204 - protein, 14 aa, Homo sapiens
  CDR3 for beta chain variable domain of TCR clone 202102 (TRBV4-1, TRBJ1-2)
CASSQDGQVRGYTF

SEQ ID NO: 404205 - protein, 15 aa, Homo sapiens
  CDR3 for alpha chain variable domain of TCR clone 202103 (TRAV21, TRAJ53)
CATLNSVGSNYKLTV

SEQ ID NO: 404206 - protein, 12 aa, Homo sapiens
  CDR3 for beta chain variable domain of TCR clone 202103 (TRBV7-8, TRBJ2-7)
CASSLGDREQYF

SEQ ID NO: 404207 - protein, 13 aa, Homo sapiens
  CDR3 for alpha chain variable domain of TCR clone 202104 (TRAV12-3, TRAJ13)
CAMSSGGYQKVTF

SEQ ID NO: 404208 - protein, 13 aa, Homo sapiens
  CDR3 for beta chain variable domain of TCR clone 202104 (TRBV20-1, TRBJ1-1)
CSAPPGGQTEAFF

SEQ ID NO: 404209 - protein, 13 aa, Homo sapiens
  CDR3 for alpha chain variable domain of TCR clone 202105 (TRAV8-3, TRAJ28)
CAVGAIGIYQLTF

SEQ ID NO: 404210 - protein, 15 aa, Homo sapiens
  CDR3 for beta chain variable domain of TCR clone 202105 (TRBV7-9, TRBJ1-5)
CASSQGHQPNQPQHF

SEQ ID NO: 404211 - protein, 19 aa, Homo sapiens
  CDR3 for alpha chain variable domain of TCR clone 202106 (TRAV2, TRAJ20)
ILQVREADAAVYRDCKLSF

SEQ ID NO: 404212 - protein, 13 aa, Homo sapiens
  CDR3 for beta chain variable domain of TCR clone 202106 (TRBV7-9, TRBJ2-1)
CASSLDVGNEQFF

SEQ ID NO: 404213 - protein, 14 aa, Homo sapiens
  CDR3 for alpha chain variable domain of TCR clone 202107 (TRAV21, TRAJ23)
CAIMIYNQGGKLIF

SEQ ID NO: 404214 - protein, 18 aa, Homo sapiens
  CDR3 for beta chain variable domain of TCR clone 202107 (TRBV20-1, TRBJ2-6)
CSAATTPTHGSGANVLTF

SEQ ID NO: 404215 - protein, 17 aa, Homo sapiens
  CDR3 for alpha chain variable domain of TCR clone 202108 (TRAV16, TRAJ58)
CITVLSNGETSGSRLPF

SEQ ID NO: 404216 - protein, 17 aa, Homo sapiens
  CDR3 for beta chain variable domain of TCR clone 202108 (TRBV18, TRBJ2-1)
CASSKGLSGGADNEQFF

SEQ ID NO: 404217 - protein, 13 aa, Homo sapiens
  CDR3 for alpha chain variable domain of TCR clone 202109 (TRAV27, TRAJ6)
CAGGTRGSYIPTF

SEQ ID NO: 404218 - protein, 17 aa, Homo sapiens
  CDR3 for beta chain variable domain of TCR clone 202109 (TRBV11-2, TRBJ1-3)
CASSLSPWFGTPYILER

SEQ ID NO: 404219 - protein, 11 aa, Homo sapiens
  CDR3 for alpha chain variable domain of TCR clone 202110 (TRAV27, TRAJ40)
SLTSGTYKYIF

SEQ ID NO: 404220 - protein, 12 aa, Homo sapiens
  CDR3 for beta chain variable domain of TCR clone 202110 (TRBV18, TRBJ2-3)
SQLNQNTDTQYF

SEQ ID NO: 404221 - protein, 13 aa, Homo sapiens
  CDR3 for alpha chain variable domain of TCR clone 202111 (TRAV27, TRAJ29)
CAGGRSGNTHLVF

SEQ ID NO: 404222 - protein, 14 aa, Homo sapiens
  CDR3 for beta chain variable domain of TCR clone 202111 (TRBV7-9, TRBJ2-7)
CASSMEQGAGEQYF

SEQ ID NO: 404223 - protein, 18 aa, Homo sapiens
  CDR3 for alpha chain variable domain of TCR clone 202112 (TRAV21, TRAJ52)
CAVRPSPAGGPSYGKLTF

SEQ ID NO: 404224 - protein, 14 aa, Homo sapiens
  CDR3 for beta chain variable domain of TCR clone 202112 (TRBV25-1, TRBJ1-1)
CASTHLGGNTEAFF

SEQ ID NO: 404225 - protein, 12 aa, Homo sapiens
  CDR3 for alpha chain variable domain of TCR clone 202113 (TRAV13-1, TRAJ9)
CASHTGGFKTIF

SEQ ID NO: 404226 - protein, 17 aa, Homo sapiens
  CDR3 for beta chain variable domain of TCR clone 202113 (TRBV11-2, TRBJ2-3)
CQQLGGASRGAPNTQYF

SEQ ID NO: 404227 - protein, 10 aa, Homo sapiens
  CDR3 for alpha chain variable domain of TCR clone 202114 (TRAV38-2/DV8, TRAJ40)
CASGTYKYIF

SEQ ID NO: 404228 - protein, 15 aa, Homo sapiens
  CDR3 for beta chain variable domain of TCR clone 202114 (TRBV7-8, TRBJ2-7)
CASSLERAGSYEHYF

SEQ ID NO: 404229 - protein, 11 aa, Homo sapiens
  CDR3 for alpha chain variable domain of TCR clone 202115 (TRAV3, TRAJ21)
CAVGNFNKFYF

SEQ ID NO: 404230 - protein, 16 aa, Homo sapiens
  CDR3 for beta chain variable domain of TCR clone 202115 (TRBV11-2, TRBJ1-2)
CASSLDRGGNNYGYTF

SEQ ID NO: 404231 - protein, 17 aa, Homo sapiens
  CDR3 for alpha chain variable domain of TCR clone 202116 (TRAV26-2, TRAJ42)
CILRDVGYGGSQGNLIF

SEQ ID NO: 404232 - protein, 14 aa, Homo sapiens
  CDR3 for beta chain variable domain of TCR clone 202116 (TRBV15, TRBJ2-3)
CATRSGTSTDTQYF

SEQ ID NO: 404233 - protein, 15 aa, Homo sapiens
  CDR3 for alpha chain variable domain of TCR clone 202117 (TRAV13-2, TRAJ10)
CAENRDTGGGNKLPF

SEQ ID NO: 404234 - protein, 16 aa, Homo sapiens
  CDR3 for beta chain variable domain of TCR clone 202117 (TRBV2, TRBJ1-3)
CASSRTGGSTGNTIYF

SEQ ID NO: 404235 - protein, 14 aa, Homo sapiens
  CDR3 for alpha chain variable domain of TCR clone 202118 (TRAV3, TRAJ24)
CAVILTDSWGKLQF

SEQ ID NO: 404236 - protein, 14 aa, Homo sapiens
  CDR3 for beta chain variable domain of TCR clone 202118 (TRBV7-8, TRBJ2-3)
CASSLEAGTDTQYF

SEQ ID NO: 404237 - protein, 13 aa, Homo sapiens
  CDR3 for alpha chain variable domain of TCR clone 202119 (TRAV1-2, TRAJ9)
CAALNTGGFKTIF

SEQ ID NO: 404238 - protein, 13 aa, Homo sapiens
  CDR3 for beta chain variable domain of TCR clone 202119 (TRBV27, TRBJ2-1)
CASSSGSYNEQFF

SEQ ID NO: 404239 - protein, 15 aa, Homo sapiens
  CDR3 for alpha chain variable domain of TCR clone 202120 (TRAV21, TRAJ53)
CATLNSGGSNYKLTF

SEQ ID NO: 404240 - protein, 16 aa, Homo sapiens
  CDR3 for beta chain variable domain of TCR clone 202120 (TRBV2, TRBJ2-2)
CASSAFGDANTGELFF

SEQ ID NO: 404241 - protein, 13 aa, Homo sapiens
  CDR3 for alpha chain variable domain of TCR clone 202121 (TRAV29/DV5, TRAJ31)
CAASRNNNARLML

SEQ ID NO: 404242 - protein, 14 aa, Homo sapiens
  CDR3 for beta chain variable domain of TCR clone 202121 (TRBV11-2, TRBJ2-5)
CASSRTGGIETQYF

SEQ ID NO: 404243 - protein, 12 aa, Homo sapiens
  CDR3 for alpha chain variable domain of TCR clone 202122 (TRAV16, TRAJ10)
CSRTGGVNKLTF

SEQ ID NO: 404244 - protein, 12 aa, Homo sapiens
  CDR3 for beta chain variable domain of TCR clone 202122 (TRBV11-3, TRBJ1-1)
CASSHRQGEAFF

SEQ ID NO: 404245 - protein, 17 aa, Homo sapiens
  CDR3 for alpha chain variable domain of TCR clone 202123 (TRAV4, TRAJ42)
CLVGVLNYGGSQGNLIF

SEQ ID NO: 404246 - protein, 13 aa, Homo sapiens
  CDR3 for beta chain variable domain of TCR clone 202123 (TRBV11-2, TRBJ1-3)
CASSLEPVNTIYF

SEQ ID NO: 404247 - protein, 23 aa, Homo sapiens
  CDR3 for alpha chain variable domain of TCR clone 202124 (TRAV12-2, TRAJ36)
SLLIRGSQPSDSATLERANNLFF

SEQ ID NO: 404248 - protein, 16 aa, Homo sapiens
  CDR3 for beta chain variable domain of TCR clone 202124 (TRBV7-3, TRBJ2-2)
CASSLKRGTLSGELFF

SEQ ID NO: 404249 - protein, 11 aa, Homo sapiens
  CDR3 for alpha chain variable domain of TCR clone 202125 (TRAV1-2, TRAJ13)
GRSGGYQKVTF

SEQ ID NO: 404250 - protein, 18 aa, Homo sapiens
  CDR3 for beta chain variable domain of TCR clone 202125 (TRBV13, TRBJ2-4)
CAIIDQKHSVLRRRDPAL

SEQ ID NO: 404251 - protein, 16 aa, Homo sapiens
  CDR3 for alpha chain variable domain of TCR clone 202126 (TRAV8-4, TRAJ32)
CAVSEDYGGATNKLIF

SEQ ID NO: 404252 - protein, 20 aa, Homo sapiens
  CDR3 for beta chain variable domain of TCR clone 202126 (TRBV7-8, TRBJ2-2)
CASSHLFPGPTIHITGELFF

SEQ ID NO: 404253 - protein, 15 aa, Homo sapiens
  CDR3 for alpha chain variable domain of TCR clone 202127 (TRAV25, TRAJ52)
CAGRPGGTSYGKLTF

SEQ ID NO: 404254 - protein, 17 aa, Homo sapiens
  CDR3 for beta chain variable domain of TCR clone 202127 (TRBV7-8, TRBJ2-6)
CASSAGIGGAWANDLTF

SEQ ID NO: 404255 - protein, 23 aa, Homo sapiens
  CDR3 for alpha chain variable domain of TCR clone 202128 (TRAV12-2, TRAJ36)
SLLIRDSQPSDSATLERANNLFF

SEQ ID NO: 404256 - protein, 13 aa, Homo sapiens
  CDR3 for beta chain variable domain of TCR clone 202128 (TRBV2, TRBJ1-6)
CASGRGGISPLHF

SEQ ID NO: 404257 - protein, 13 aa, Homo sapiens
  CDR3 for alpha chain variable domain of TCR clone 202129 (TRAV1-2, TRAJ9)
CAALNTGGFKTIF

SEQ ID NO: 404258 - protein, 15 aa, Homo sapiens
  CDR3 for beta chain variable domain of TCR clone 202129 (TRBV20-1, TRBJ2-7)
CSARDRVSGVDEQYF

SEQ ID NO: 404259 - protein, 18 aa, Homo sapiens
  CDR3 for alpha chain variable domain of TCR clone 202130 (TRAV26-2, TRAJ45)
CILRVDKYSGGGADGLTF

SEQ ID NO: 404260 - protein, 15 aa, Homo sapiens
  CDR3 for beta chain variable domain of TCR clone 202130 (TRBV5-1, TRBJ2-2)
CASSSQGGNTGELFF

SEQ ID NO: 404261 - protein, 16 aa, Homo sapiens
  CDR3 for alpha chain variable domain of TCR clone 202131 (TRAV3, TRAJ37)
CAVRVRGSGNTGKLIF

SEQ ID NO: 404262 - protein, 15 aa, Homo sapiens
  CDR3 for beta chain variable domain of TCR clone 202131 (TRBV3-1, TRBJ2-1)
YASSPRDSGFNEQFF

SEQ ID NO: 404263 - protein, 11 aa, Homo sapiens
  CDR3 for alpha chain variable domain of TCR clone 202132 (TRAV13-2, TRAJ57)
CAGGGSEKLVF

SEQ ID NO: 404264 - protein, 17 aa, Homo sapiens
  CDR3 for beta chain variable domain of TCR clone 202132 (TRBV7-3, TRBJ2-3)
CASSLMKRMRGADTQYF

SEQ ID NO: 404265 - protein, 18 aa, Homo sapiens
  CDR3 for alpha chain variable domain of TCR clone 202133 (TRAV21, TRAJ52)
CAVRPSPPGGTSYGKLTF

SEQ ID NO: 404266 - protein, 15 aa, Homo sapiens
  CDR3 for beta chain variable domain of TCR clone 202133 (TRBV7-9, TRBJ1-4)
CASSARTGGNEKLFF

SEQ ID NO: 404267 - protein, 14 aa, Homo sapiens
  CDR3 for alpha chain variable domain of TCR clone 202134 (TRAV1-2, TRAJ8)
CAVREDTGFQKLVF

SEQ ID NO: 404268 - protein, 16 aa, Homo sapiens
  CDR3 for beta chain variable domain of TCR clone 202134 (TRBV24-1, TRBJ2-3)
WATSDPGTGATDTQYF

SEQ ID NO: 404269 - protein, 10 aa, Homo sapiens
  CDR3 for alpha chain variable domain of TCR clone 202135 (TRAV36/DV7, TRAJ48)
CAVGNEKLNF

SEQ ID NO: 404270 - protein, 16 aa, Homo sapiens
  CDR3 for beta chain variable domain of TCR clone 202135 (TRBV15, TRBJ2-3)
CATRLSGGRAPDTQYF

SEQ ID NO: 404271 - protein, 12 aa, Homo sapiens
  CDR3 for alpha chain variable domain of TCR clone 202136 (TRAV3, TRAJ27)
CAVRDGAGKSTF

SEQ ID NO: 404272 - protein, 13 aa, Homo sapiens
  CDR3 for beta chain variable domain of TCR clone 202136 (TRBV10-3, TRBJ1-2)
CAINADLNYGYTL

SEQ ID NO: 404273 - protein, 16 aa, Homo sapiens
  CDR3 for alpha chain variable domain of TCR clone 202137 (TRAV3, TRAJ37)
CAVRGKGSGNTGKLIF

SEQ ID NO: 404274 - protein, 13 aa, Homo sapiens
  CDR3 for beta chain variable domain of TCR clone 202137 (TRBV14, TRBJ2-7)
CASSQDRRHEQYF

SEQ ID NO: 404275 - protein, 12 aa, Homo sapiens
  CDR3 for alpha chain variable domain of TCR clone 202138 (TRAV25, TRAJ48)
RAGDFGNEKLTF

SEQ ID NO: 404276 - protein, 12 aa, Homo sapiens
  CDR3 for beta chain variable domain of TCR clone 202138 (TRBV2, TRBJ2-5)
CASKEYGETQYF

SEQ ID NO: 404277 - protein, 10 aa, Homo sapiens
  CDR3 for alpha chain variable domain of TCR clone 202139 (TRAV12-2, TRAJ49)
CAVRRNQFYF

SEQ ID NO: 404278 - protein, 17 aa, Homo sapiens
  CDR3 for beta chain variable domain of TCR clone 202139 (TRBV7-3, TRBJ2-5)
CASSLGSGRSGSETQYF

SEQ ID NO: 404279 - protein, 12 aa, Homo sapiens
  CDR3 for alpha chain variable domain of TCR clone 202140 (TRAV12-3, TRAJ41)
CAMSYSGYALNF

SEQ ID NO: 404280 - protein, 19 aa, Homo sapiens
  CDR3 for beta chain variable domain of TCR clone 202140 (TRBV7-3, TRBJ2-6)
CLECGAPGIGGDGANDLTF

SEQ ID NO: 404281 - protein, 15 aa, Homo sapiens
  CDR3 for alpha chain variable domain of TCR clone 202141 (TRAV8-3, TRAJ45)
CASSYSGGGADGLTF

SEQ ID NO: 404282 - protein, 15 aa, Homo sapiens
  CDR3 for beta chain variable domain of TCR clone 202141 (TRBV20-1, TRBJ1-4)
CSARREWGVNEKLFF

SEQ ID NO: 404283 - protein, 16 aa, Homo sapiens
  CDR3 for alpha chain variable domain of TCR clone 202142 (TRAV3, TRAJ21)
CAVRDIERGNFNKFYF

SEQ ID NO: 404284 - protein, 13 aa, Homo sapiens
  CDR3 for beta chain variable domain of TCR clone 202142 (TRBV27, TRBJ2-7)
CASSLMTGYEQYF

SEQ ID NO: 404285 - protein, 13 aa, Homo sapiens
  CDR3 for alpha chain variable domain of TCR clone 202143 (TRAV17, TRAJ22)
CAHHSGSARQLTF

SEQ ID NO: 404286 - protein, 16 aa, Homo sapiens
  CDR3 for beta chain variable domain of TCR clone 202143 (TRBV4-1, TRBJ1-2)
CASSQDAGQVLYGYTS

SEQ ID NO: 404287 - protein, 15 aa, Homo sapiens
  CDR3 for alpha chain variable domain of TCR clone 202144 (TRAV21, TRAJ53)
CATLNSGGSNYKLTF

SEQ ID NO: 404288 - protein, 15 aa, Homo sapiens
  CDR3 for beta chain variable domain of TCR clone 202144 (TRBV28, TRBJ2-7)
CASSLISGGSYEQYF

SEQ ID NO: 404289 - protein, 16 aa, Homo sapiens
  CDR3 for alpha chain variable domain of TCR clone 202145 (TRAV4, TRAJ22)
CLVGDLYSGSARQRTF

SEQ ID NO: 404290 - protein, 16 aa, Homo sapiens
  CDR3 for beta chain variable domain of TCR clone 202145 (TRBV7-9, TRBJ2-1)
CASSDVAWGSYNEQFF

SEQ ID NO: 404291 - protein, 14 aa, Homo sapiens
  CDR3 for alpha chain variable domain of TCR clone 202146 (TRAV13-2, TRAJ17)
CAENSKAAGNKLTF

SEQ ID NO: 404292 - protein, 12 aa, Homo sapiens
  CDR3 for beta chain variable domain of TCR clone 202146 (TRBV7-9, TRBJ2-5)
CASSPNIETQYF

SEQ ID NO: 404293 - protein, 14 aa, Homo sapiens
  CDR3 for alpha chain variable domain of TCR clone 202147 (TRAV2, TRAJ9)
CAVEVRRGGFKTIF

SEQ ID NO: 404294 - protein, 13 aa, Homo sapiens
  CDR3 for beta chain variable domain of TCR clone 202147 (TRBV27, TRBJ1-1)
CASSLSIGAEAFF

SEQ ID NO: 404295 - protein, 10 aa, Homo sapiens
  CDR3 for alpha chain variable domain of TCR clone 202148 (TRAV16, TRAJ22)
SAMYLRQLTF

SEQ ID NO: 404296 - protein, 11 aa, Homo sapiens
  CDR3 for beta chain variable domain of TCR clone 202148 (TRBV7-2, TRBJ2-7)
CASSSGLWQYF

SEQ ID NO: 404297 - protein, 16 aa, Homo sapiens
  CDR3 for alpha chain variable domain of TCR clone 202149 (TRAV30, TRAJ24)
CGTEIVDADSWGKFKF

SEQ ID NO: 404298 - protein, 15 aa, Homo sapiens
  CDR3 for beta chain variable domain of TCR clone 202149 (TRBV18, TRBJ2-1)
CASLPDRGRDNEQFF

SEQ ID NO: 404299 - protein, 14 aa, Homo sapiens
  CDR3 for alpha chain variable domain of TCR clone 202150 (TRAV1-2, TRAJ8)
CAVREDTGFQKLVF

SEQ ID NO: 404300 - protein, 18 aa, Homo sapiens
  CDR3 for beta chain variable domain of TCR clone 202150 (TRBV20-1, TRBJ2-6)
CSAETTPTHGAGANVLTF

SEQ ID NO: 404301 - protein, 14 aa, Homo sapiens
  CDR3 for alpha chain variable domain of TCR clone 202151 (TRAV16, TRAJ33)
CALSAMDSNYQLIW

SEQ ID NO: 404302 - protein, 15 aa, Homo sapiens
  CDR3 for beta chain variable domain of TCR clone 202151 (TRBV19, TRBJ1-2)
CASSVGQVLNYGYTF

SEQ ID NO: 404303 - protein, 18 aa, Homo sapiens
  CDR3 for alpha chain variable domain of TCR clone 202152 (TRAV13-2, TRAJ52)
CAETPLNAGGTSYGKLTF

SEQ ID NO: 404304 - protein, 15 aa, Homo sapiens
  CDR3 for beta chain variable domain of TCR clone 202152 (TRBV7-3, TRBJ2-2)
CASSETGQGTGELFF

SEQ ID NO: 404305 - protein, 13 aa, Homo sapiens
  CDR3 for alpha chain variable domain of TCR clone 202153 (TRAV21, TRAJ20)
CAVGVFADYKLSL

SEQ ID NO: 404306 - protein, 14 aa, Homo sapiens
  CDR3 for beta chain variable domain of TCR clone 202153 (TRBV4-2, TRBJ1-4)
CASSPSSGNEKLFF

SEQ ID NO: 404307 - protein, 15 aa, Homo sapiens
  CDR3 for alpha chain variable domain of TCR clone 202154 (TRAV34, TRAJ38)
CGADFTPGNNRKLIW

SEQ ID NO: 404308 - protein, 15 aa, Homo sapiens
  CDR3 for beta chain variable domain of TCR clone 202154 (TRBV7-3, TRBJ2-1)
CASSLAGAGADEQFF

SEQ ID NO: 404309 - protein, 13 aa, Homo sapiens
  CDR3 for alpha chain variable domain of TCR clone 202155 (TRAV1-2, TRAJ9)
CAVLNTGGFKTIF

SEQ ID NO: 404310 - protein, 17 aa, Homo sapiens
  CDR3 for beta chain variable domain of TCR clone 202155 (TRBV13, TRBJ2-3)
YASSLSRVAGGRNTQYF

SEQ ID NO: 404311 - protein, 10 aa, Homo sapiens
  CDR3 for alpha chain variable domain of TCR clone 202156 (TRAV16, TRAJ22)
SAMYLRQLTF

SEQ ID NO: 404312 - protein, 12 aa, Homo sapiens
  CDR3 for beta chain variable domain of TCR clone 202156 (TRBV5-5, TRBJ2-5)
CASSYFGETQYF

SEQ ID NO: 404313 - protein, 13 aa, Homo sapiens
  CDR3 for alpha chain variable domain of TCR clone 202157 (TRAV13-2, TRAJ48)
CAEMDFGNEKLTF

SEQ ID NO: 404314 - protein, 15 aa, Homo sapiens
  CDR3 for beta chain variable domain of TCR clone 202157 (TRBV7-3, TRBJ2-1)
CASSQRWGALIEQFF

SEQ ID NO: 404315 - protein, 15 aa, Homo sapiens
  CDR3 for alpha chain variable domain of TCR clone 202158 (TRAV12-2, TRAJ53)
CAVNGGGGSNYKLTF

SEQ ID NO: 404316 - protein, 17 aa, Homo sapiens
  CDR3 for beta chain variable domain of TCR clone 202158 (TRBV7-3, TRBJ2-3)
CASSLMKRMRGADTQDF

SEQ ID NO: 404317 - protein, 10 aa, Homo sapiens
  CDR3 for alpha chain variable domain of TCR clone 202159 (TRAV2, TRAJ34)
CAVVNDKLIF

SEQ ID NO: 404318 - protein, 15 aa, Homo sapiens
  CDR3 for beta chain variable domain of TCR clone 202159 (TRBV11-1, TRBJ2-1)
CASSGQAEPYNEQFF

SEQ ID NO: 404319 - protein, 13 aa, Homo sapiens
  CDR3 for alpha chain variable domain of TCR clone 202160 (TRAV2, TRAJ40)
CAVVTSGTYKYIF

SEQ ID NO: 404320 - protein, 15 aa, Homo sapiens
  CDR3 for beta chain variable domain of TCR clone 202160 (TRBV4-1, TRBJ2-5)
CASSQSRGDQETQYF

SEQ ID NO: 404321 - protein, 14 aa, Homo sapiens
  CDR3 for alpha chain variable domain of TCR clone 202161 (TRAV35, TRAJ22)
CAGLRPGSARQLTF

SEQ ID NO: 404322 - protein, 15 aa, Homo sapiens
  CDR3 for beta chain variable domain of TCR clone 202161 (TRBV12-4, TRBJ2-5)
HASSPPTGLQETQYF

SEQ ID NO: 404323 - protein, 12 aa, Homo sapiens
  CDR3 for alpha chain variable domain of TCR clone 202162 (TRAV13-2, TRAJ8)
CAPWLGFQKLVF

SEQ ID NO: 404324 - protein, 13 aa, Homo sapiens
  CDR3 for beta chain variable domain of TCR clone 202162 (TRBV20-1, TRBJ1-1)
CSAPPGGHTEAFF

SEQ ID NO: 404325 - protein, 19 aa, Homo sapiens
  CDR3 for alpha chain variable domain of TCR clone 202163 (TRAV38-1, TRAJ53)
CDFMKHGLESGGSNYKLTF

SEQ ID NO: 404326 - protein, 13 aa, Homo sapiens
  CDR3 for beta chain variable domain of TCR clone 202163 (TRBV19, TRBJ2-7)
CASSPRQSYEQYF

SEQ ID NO: 404327 - protein, 15 aa, Homo sapiens
  CDR3 for alpha chain variable domain of TCR clone 202164 (TRAV12-2, TRAJ53)
CAVNGGGGSNYKLTF

SEQ ID NO: 404328 - protein, 17 aa, Homo sapiens
  CDR3 for beta chain variable domain of TCR clone 202164 (TRBV6-1, TRBJ1-3)
CASVQGGGVETPYILER

SEQ ID NO: 404329 - protein, 12 aa, Homo sapiens
  CDR3 for alpha chain variable domain of TCR clone 202165 (TRAV8-6, TRAJ33)
CAVTDSNYQLIW

SEQ ID NO: 404330 - protein, 13 aa, Homo sapiens
  CDR3 for beta chain variable domain of TCR clone 202165 (TRBV7-9, TRBJ2-3)
CASSPGSTDTQYF

SEQ ID NO: 404331 - protein, 13 aa, Homo sapiens
  CDR3 for alpha chain variable domain of TCR clone 202166 (TRAV21, TRAJ26)
CAVLDNYGQNFVL

SEQ ID NO: 404332 - protein, 16 aa, Homo sapiens
  CDR3 for beta chain variable domain of TCR clone 202166 (TRBV29-1, TRBJ2-2)
CSVETRASGNTGELFF

SEQ ID NO: 404333 - protein, 14 aa, Homo sapiens
  CDR3 for alpha chain variable domain of TCR clone 202167 (TRAV21, TRAJ35)
CAVMPIGFGNVLHW

SEQ ID NO: 404334 - protein, 12 aa, Homo sapiens
  CDR3 for beta chain variable domain of TCR clone 202167 (TRBV7-9, TRBJ2-7)
CASSIKREEQYF

SEQ ID NO: 404335 - protein, 10 aa, Homo sapiens
  CDR3 for alpha chain variable domain of TCR clone 202168 (TRAV26-1, TRAJ42)
YGGSQGNLIF

SEQ ID NO: 404336 - protein, 16 aa, Homo sapiens
  CDR3 for beta chain variable domain of TCR clone 202168 (TRBV7-3, TRBJ2-2)
CASSLKRGTLSGELFF

SEQ ID NO: 404337 - protein, 14 aa, Homo sapiens
  CDR3 for alpha chain variable domain of TCR clone 202169 (TRAV2, TRAJ3)
CAVRPYSSASKIIF

SEQ ID NO: 404338 - protein, 17 aa, Homo sapiens
  CDR3 for beta chain variable domain of TCR clone 202169 (TRBV7-6, TRBJ2-5)
CASSSPQAGYPSDTQYF

SEQ ID NO: 404339 - protein, 10 aa, Homo sapiens
  CDR3 for alpha chain variable domain of TCR clone 202170 (TRAV23/DV6, TRAJ57)
CVASSTLSQG

SEQ ID NO: 404340 - protein, 14 aa, Homo sapiens
  CDR3 for beta chain variable domain of TCR clone 202170 (TRBV7-2, TRBJ2-7)
CASSPKTSFYEQYF

SEQ ID NO: 404341 - protein, 13 aa, Homo sapiens
  CDR3 for alpha chain variable domain of TCR clone 202171 (TRAV2, TRAJ29)
CAAGWPGNTPLVF

SEQ ID NO: 404342 - protein, 13 aa, Homo sapiens
  CDR3 for beta chain variable domain of TCR clone 202171 (TRBV14, TRBJ1-2)
CASSEDRRYGYTF

SEQ ID NO: 404343 - protein, 14 aa, Homo sapiens
  CDR3 for alpha chain variable domain of TCR clone 202172 (TRAV12-2, TRAJ9)
CAVNMEGGGFKTIF

SEQ ID NO: 404344 - protein, 13 aa, Homo sapiens
  CDR3 for beta chain variable domain of TCR clone 202172 (TRBV15, TRBJ1-6)
CATSGGLNSPLHF

SEQ ID NO: 404345 - protein, 14 aa, Homo sapiens
  CDR3 for alpha chain variable domain of TCR clone 202173 (TRAV21, TRAJ35)
CAVMPIGFGNVMHF

SEQ ID NO: 404346 - protein, 12 aa, Homo sapiens
  CDR3 for beta chain variable domain of TCR clone 202173 (TRBV7-9, TRBJ2-7)
CASSIKREEQYF

SEQ ID NO: 404347 - protein, 13 aa, Homo sapiens
  CDR3 for alpha chain variable domain of TCR clone 202174 (TRAV8-3, TRAJ37)
CAVPSSNTGKLIF

SEQ ID NO: 404348 - protein, 12 aa, Homo sapiens
  CDR3 for beta chain variable domain of TCR clone 202174 (TRBV11-2, TRBJ2-1)
CASGPGNNEQFF

SEQ ID NO: 404349 - protein, 13 aa, Homo sapiens
  CDR3 for alpha chain variable domain of TCR clone 202175 (TRAV12-2, TRAJ30)
CAVNLNRDDKIIF

SEQ ID NO: 404350 - protein, 14 aa, Homo sapiens
  CDR3 for beta chain variable domain of TCR clone 202175 (TRBV4-1, TRBJ2-2)
CASSQAVNTGELFF

SEQ ID NO: 404351 - protein, 15 aa, Homo sapiens
  CDR3 for alpha chain variable domain of TCR clone 202176 (TRAV25, TRAJ53)
CAATGGGGSNYKLTF

SEQ ID NO: 404352 - protein, 15 aa, Homo sapiens
  CDR3 for beta chain variable domain of TCR clone 202176 (TRBV7-2, TRBJ2-3)
CASSLNLRDTDTQYF

SEQ ID NO: 404353 - protein, 16 aa, Homo sapiens
  CDR3 for alpha chain variable domain of TCR clone 202177 (TRAV8-3, TRAJ52)
CAVQPAAGTSYGKLTF

SEQ ID NO: 404354 - protein, 15 aa, Homo sapiens
  CDR3 for beta chain variable domain of TCR clone 202177 (TRBV11-2, TRBJ2-7)
CASSFAGGVATEQYF

SEQ ID NO: 404355 - protein, 12 aa, Homo sapiens
  CDR3 for alpha chain variable domain of TCR clone 202178 (TRAV12-2, TRAJ10)
WGVKGGGNKLTF

SEQ ID NO: 404356 - protein, 16 aa, Homo sapiens
  CDR3 for beta chain variable domain of TCR clone 202178 (TRBV6-4, TRBJ1-2)
CASSEAVGDPNYGYTF

SEQ ID NO: 404357 - protein, 17 aa, Homo sapiens
  CDR3 for alpha chain variable domain of TCR clone 202179 (TRAV3, TRAJ6)
CAVRDCPRAGGRYIPTF

SEQ ID NO: 404358 - protein, 14 aa, Homo sapiens
  CDR3 for beta chain variable domain of TCR clone 202179 (TRBV7-2, TRBJ2-7)
CASSPKTSFYEQYF

SEQ ID NO: 404359 - protein, 16 aa, Homo sapiens
  CDR3 for alpha chain variable domain of TCR clone 202180 (TRAV26-1, TRAJ44)
IASSESRTGTASKLTF

SEQ ID NO: 404360 - protein, 13 aa, Homo sapiens
  CDR3 for beta chain variable domain of TCR clone 202180 (TRBV7-2, TRBJ1-5)
CASSFARNQPKHF

SEQ ID NO: 404361 - protein, 16 aa, Homo sapiens
  CDR3 for alpha chain variable domain of TCR clone 202181 (TRAV27, TRAJ13)
CAGAKSDSGGYQKVTF

SEQ ID NO: 404362 - protein, 16 aa, Homo sapiens
  CDR3 for beta chain variable domain of TCR clone 202181 (TRBV2, TRBJ2-3)
CASSTSVEGVTDTQYF

SEQ ID NO: 404363 - protein, 11 aa, Homo sapiens
  CDR3 for alpha chain variable domain of TCR clone 202182 (TRAV17, TRAJ36)
CAPTGANNLFF

SEQ ID NO: 404364 - protein, 12 aa, Homo sapiens
  CDR3 for beta chain variable domain of TCR clone 202182 (TRBV20-1, TRBJ1-1)
QCSSRGHTEAFF

SEQ ID NO: 404365 - protein, 13 aa, Homo sapiens
  CDR3 for alpha chain variable domain of TCR clone 202183 (TRAV38-2/DV8, TRAJ34)
CAYRTWNTDKLIF

SEQ ID NO: 404366 - protein, 13 aa, Homo sapiens
  CDR3 for beta chain variable domain of TCR clone 202183 (TRBV18, TRBJ1-1)
CASSGGRNTEAFF

SEQ ID NO: 404367 - protein, 18 aa, Homo sapiens
  CDR3 for alpha chain variable domain of TCR clone 202184 (TRAV1-2, TRAJ8)
CLLPCAVREDTGFQKLVF

SEQ ID NO: 404368 - protein, 18 aa, Homo sapiens
  CDR3 for beta chain variable domain of TCR clone 202184 (TRBV20-1, TRBJ2-6)
CSAETTPTHGSGANVLTF

SEQ ID NO: 404369 - protein, 16 aa, Homo sapiens
  CDR3 for alpha chain variable domain of TCR clone 202185 (TRAV4, TRAJ22)
CVLLTRGGGSARQLTF

SEQ ID NO: 404370 - protein, 14 aa, Homo sapiens
  CDR3 for beta chain variable domain of TCR clone 202185 (TRBV20-1, TRBJ1-1)
CSARAVNGYTEAFF

SEQ ID NO: 404371 - protein, 17 aa, Homo sapiens
  CDR3 for alpha chain variable domain of TCR clone 202186 (TRAV4, TRAJ13)
CLVGVQGSSGGYQKVTF

SEQ ID NO: 404372 - protein, 16 aa, Homo sapiens
  CDR3 for beta chain variable domain of TCR clone 202186 (TRBV6-1, TRBJ2-5)
CASSETLDRGAETQYF

SEQ ID NO: 404373 - protein, 15 aa, Homo sapiens
  CDR3 for alpha chain variable domain of TCR clone 202187 (TRAV17, TRAJ48)
CATDDTNFGNEKLTF

SEQ ID NO: 404374 - protein, 14 aa, Homo sapiens
  CDR3 for beta chain variable domain of TCR clone 202187 (TRBV10-3, TRBJ1-3)
CAIRGQRAGNTIYF

SEQ ID NO: 404375 - protein, 14 aa, Homo sapiens
  CDR3 for alpha chain variable domain of TCR clone 202188 (TRAV26-1, TRAJ38)
CIADNAGNNRKLIW

SEQ ID NO: 404376 - protein, 13 aa, Homo sapiens
  CDR3 for beta chain variable domain of TCR clone 202188 (TRBV4-1, TRBJ2-7)
CASSQGQAYEQDF

SEQ ID NO: 404377 - protein, 16 aa, Homo sapiens
  CDR3 for alpha chain variable domain of TCR clone 202189 (TRAV12-2, TRAJ10)
CAVNRVLTGGGNKLTF

SEQ ID NO: 404378 - protein, 16 aa, Homo sapiens
  CDR3 for beta chain variable domain of TCR clone 202189 (TRBV12-5, TRBJ2-5)
CASCPRTSGNQGTQYF

SEQ ID NO: 404379 - protein, 12 aa, Homo sapiens
  CDR3 for alpha chain variable domain of TCR clone 202190 (TRAV8-6, TRAJ43)
CAVSNNNNAMRF

SEQ ID NO: 404380 - protein, 15 aa, Homo sapiens
  CDR3 for beta chain variable domain of TCR clone 202190 (TRBV7-3, TRBJ2-6)
CASSLGGSGANVLTF

SEQ ID NO: 404381 - protein, 12 aa, Homo sapiens
  CDR3 for alpha chain variable domain of TCR clone 202191 (TRAV13-2, TRAJ8)
CAPWLGFQKLVF

SEQ ID NO: 404382 - protein, 16 aa, Homo sapiens
  CDR3 for beta chain variable domain of TCR clone 202191 (TRBV12-4, TRBJ2-5)
CASSFFVRGRQETQYF

SEQ ID NO: 404383 - protein, 15 aa, Homo sapiens
  CDR3 for alpha chain variable domain of TCR clone 202192 (TRAV3, TRAJ9)
CAVRARNTGGFKNIF

SEQ ID NO: 404384 - protein, 13 aa, Homo sapiens
  CDR3 for beta chain variable domain of TCR clone 202192 (TRBV5-4, TRBJ2-5)
CASSPVSQETQYF

SEQ ID NO: 404385 - protein, 14 aa, Homo sapiens
  CDR3 for alpha chain variable domain of TCR clone 202193 (TRAV26-1, TRAJ38)
CIADNAGNNRKLIW

SEQ ID NO: 404386 - protein, 15 aa, Homo sapiens
  CDR3 for beta chain variable domain of TCR clone 202193 (TRBV12-4, TRBJ2-5)
CASSPPTGLQETQYF

SEQ ID NO: 404387 - protein, 13 aa, Homo sapiens
  CDR3 for alpha chain variable domain of TCR clone 202194 (TRAV12-1, TRAJ12)
CGDEMDSSYKLIF

SEQ ID NO: 404388 - protein, 14 aa, Homo sapiens
  CDR3 for beta chain variable domain of TCR clone 202194 (TRBV4-1, TRBJ2-7)
CASSPVAGGDEQYF

SEQ ID NO: 404389 - protein, 17 aa, Homo sapiens
  CDR3 for alpha chain variable domain of TCR clone 202195 (TRAV17, TRAJ52)
CATERPSGGTSYGKLTF

SEQ ID NO: 404390 - protein, 13 aa, Homo sapiens
  CDR3 for beta chain variable domain of TCR clone 202195 (TRBV6-4, TRBJ1-5)
CASSADLNQPQQF

SEQ ID NO: 404391 - protein, 13 aa, Homo sapiens
  CDR3 for alpha chain variable domain of TCR clone 202196 (TRAV27, TRAJ29)
CAGAHSGNTPLVF

SEQ ID NO: 404392 - protein, 15 aa, Homo sapiens
  CDR3 for beta chain variable domain of TCR clone 202196 (TRBV5-5, TRBJ1-5)
CASSSTPGSNQPQHF

SEQ ID NO: 404393 - protein, 16 aa, Homo sapiens
  CDR3 for alpha chain variable domain of TCR clone 202197 (TRAV30, TRAJ24)
CGTEIVDADSWGKFQF

SEQ ID NO: 404394 - protein, 15 aa, Homo sapiens
  CDR3 for beta chain variable domain of TCR clone 202197 (TRBV11-2, TRBJ2-1)
CASSSPSTRYNEQFF

SEQ ID NO: 404395 - protein, 15 aa, Homo sapiens
  CDR3 for alpha chain variable domain of TCR clone 202198 (TRAV26-1, TRAJ23)
CIVRVAGYQGGKLIF

SEQ ID NO: 404396 - protein, 13 aa, Homo sapiens
  CDR3 for beta chain variable domain of TCR clone 202198 (TRBV18, TRBJ2-7)
CASQSGGGYEQYF

SEQ ID NO: 404397 - protein, 17 aa, Homo sapiens
  CDR3 for alpha chain variable domain of TCR clone 202199 (TRAV4, TRAJ18)
CLVGERSVGSTLGRRYC

SEQ ID NO: 404398 - protein, 18 aa, Homo sapiens
  CDR3 for beta chain variable domain of TCR clone 202199 (TRBV11-2, TRBJ2-3)
CASSLGGASRGAPNTQYF

SEQ ID NO: 404399 - protein, 19 aa, Homo sapiens
  CDR3 for alpha chain variable domain of TCR clone 202200 (TRAV26-1, TRAJ52)
CIVRAHRNAGGTSYGKLTF

SEQ ID NO: 404400 - protein, 15 aa, Homo sapiens
  CDR3 for beta chain variable domain of TCR clone 202200 (TRBV11-3, TRBJ2-3)
CASLKDGREGDTQYF

SEQ ID NO: 404401 - protein, 14 aa, Homo sapiens
  CDR3 for alpha chain variable domain of TCR clone 202201 (TRAV19, TRAJ45)
CALKGGGGADGLTF

SEQ ID NO: 404402 - protein, 13 aa, Homo sapiens
  CDR3 for beta chain variable domain of TCR clone 202201 (TRBV7-2, TRBJ2-2)
CASSSVRAGELFF

SEQ ID NO: 404403 - protein, 13 aa, Homo sapiens
  CDR3 for alpha chain variable domain of TCR clone 202202 (TRAV12-3, TRAJ36)
CAMRRPGANNPFF

SEQ ID NO: 404404 - protein, 18 aa, Homo sapiens
  CDR3 for beta chain variable domain of TCR clone 202202 (TRBV11-1, TRBJ2-2)
CASSREAGGPGNTGELFF

SEQ ID NO: 404405 - protein, 14 aa, Homo sapiens
  CDR3 for alpha chain variable domain of TCR clone 202203 (TRAV1-2, TRAJ16)
CAVNRFSDGRKLLF

SEQ ID NO: 404406 - protein, 15 aa, Homo sapiens
  CDR3 for beta chain variable domain of TCR clone 202203 (TRBV4-2, TRBJ2-1)
CASSQDVGLAGEQFF

SEQ ID NO: 404407 - protein, 13 aa, Homo sapiens
  CDR3 for alpha chain variable domain of TCR clone 202204 (TRAV27, TRAJ41)
CAGEGNSGYALNF

SEQ ID NO: 404408 - protein, 16 aa, Homo sapiens
  CDR3 for beta chain variable domain of TCR clone 202204 (TRBV4-1, TRBJ1-3)
CASSQDELLAGNTIYF

SEQ ID NO: 404409 - protein, 16 aa, Homo sapiens
  CDR3 for alpha chain variable domain of TCR clone 202205 (TRAV3, TRAJ10)
CAVRDMRAGGGNKLTF

SEQ ID NO: 404410 - protein, 14 aa, Homo sapiens
  CDR3 for beta chain variable domain of TCR clone 202205 (TRBV25-1, TRBJ1-1)
CASAHLGGNTEAFF

SEQ ID NO: 404411 - protein, 17 aa, Homo sapiens
  CDR3 for alpha chain variable domain of TCR clone 202206 (TRAV3, TRAJ6)
CAVRDGPRAGGSYIPTY

SEQ ID NO: 404412 - protein, 14 aa, Homo sapiens
  CDR3 for beta chain variable domain of TCR clone 202206 (TRBV7-2, TRBJ2-7)
CASSPKTSFYVQYF

SEQ ID NO: 404413 - protein, 15 aa, Homo sapiens
  CDR3 for alpha chain variable domain of TCR clone 202207 (TRAV38-1, TRAJ28)
CAFIRSGSGSYQLTF

SEQ ID NO: 404414 - protein, 14 aa, Homo sapiens
  CDR3 for beta chain variable domain of TCR clone 202207 (TRBV4-3, TRBJ1-1)
CASSQGWTPARAFF

SEQ ID NO: 404415 - protein, 23 aa, Homo sapiens
  CDR3 for alpha chain variable domain of TCR clone 202208 (TRAV30, TRAJ43)
CTLRPPSSVTQEPTSAALSDMRF

SEQ ID NO: 404416 - protein, 13 aa, Homo sapiens
  CDR3 for beta chain variable domain of TCR clone 202208 (TRBV12-4, TRBJ2-2)
CASSIAGSGELFF

SEQ ID NO: 404417 - protein, 16 aa, Homo sapiens
  CDR3 for alpha chain variable domain of TCR clone 202209 (TRAV3, TRAJ21)
CAVRDIERGNFNKFYF

SEQ ID NO: 404418 - protein, 19 aa, Homo sapiens
  CDR3 for beta chain variable domain of TCR clone 202209 (TRBV7-8, TRBJ2-1)
CQQLRRRGLAGVWYNEQFF

SEQ ID NO: 404419 - protein, 13 aa, Homo sapiens
  CDR3 for alpha chain variable domain of TCR clone 202210 (TRAV3, TRAJ20)
CAVRDTGDYKLSF

SEQ ID NO: 404420 - protein, 12 aa, Homo sapiens
  CDR3 for beta chain variable domain of TCR clone 202210 (TRBV29-1, TRBJ2-3)
CSVTGAADTQYF

SEQ ID NO: 404421 - protein, 14 aa, Homo sapiens
  CDR3 for alpha chain variable domain of TCR clone 202211 (TRAV8-4, TRAJ9)
CAVTFNTGGFKTIF

SEQ ID NO: 404422 - protein, 15 aa, Homo sapiens
  CDR3 for beta chain variable domain of TCR clone 202211 (TRBV7-9, TRBJ2-2)
CAGSPETGAGGELFF

SEQ ID NO: 404423 - protein, 11 aa, Homo sapiens
  CDR3 for alpha chain variable domain of TCR clone 202212 (TRAV13-1, TRAJ20)
CAASKNYKLSF

SEQ ID NO: 404424 - protein, 16 aa, Homo sapiens
  CDR3 for beta chain variable domain of TCR clone 202212 (TRBV20-1, TRBJ1-4)
CSAPGQGVLTNEKLFF

SEQ ID NO: 404425 - protein, 22 aa, Homo sapiens
  CDR3 for alpha chain variable domain of TCR clone 202213 (TRAV12-2, TRAJ32)
CSSETPSPVIQPPTSATNKLIF

SEQ ID NO: 404426 - protein, 15 aa, Homo sapiens
  CDR3 for beta chain variable domain of TCR clone 202213 (TRBV28, TRBJ2-5)
CASSADRGRGETQYF

SEQ ID NO: 404427 - protein, 21 aa, Homo sapiens
  CDR3 for alpha chain variable domain of TCR clone 202214 (TRAV8-3, TRAJ10)
CAVGHTHGRRKQTHLWDRHTA

SEQ ID NO: 404428 - protein, 10 aa, Homo sapiens
  CDR3 for beta chain variable domain of TCR clone 202214 (TRBV20-1, TRBJ2-5)
CSARFETQYF

SEQ ID NO: 404429 - protein, 13 aa, Homo sapiens
  CDR3 for alpha chain variable domain of TCR clone 202215 (TRAV1-2, TRAJ12)
CAVSMDRSYKLIF

SEQ ID NO: 404430 - protein, 14 aa, Homo sapiens
  CDR3 for beta chain variable domain of TCR clone 202215 (TRBV19, TRBJ2-1)
CASSSGRDYNEQFF

SEQ ID NO: 404431 - protein, 15 aa, Homo sapiens
  CDR3 for alpha chain variable domain of TCR clone 202216 (TRAV26-1, TRAJ22)
CIVRVSFCFCKVTDL

SEQ ID NO: 404432 - protein, 13 aa, Homo sapiens
  CDR3 for beta chain variable domain of TCR clone 202216 (TRBV7-9, TRBJ1-2)
CASSLKQNYGYTF

SEQ ID NO: 404433 - protein, 16 aa, Homo sapiens
  CDR3 for alpha chain variable domain of TCR clone 202217 (TRAV30, TRAJ24)
CGTEIVDADSWGKFQF

SEQ ID NO: 404434 - protein, 15 aa, Homo sapiens
  CDR3 for beta chain variable domain of TCR clone 202217 (TRBV4-1, TRBJ2-1)
CASSQVLAGGDEQFF

SEQ ID NO: 404435 - protein, 15 aa, Homo sapiens
  CDR3 for alpha chain variable domain of TCR clone 202218 (TRAV26-1, TRAJ29)
CIGRVEGSGNTPLVF

SEQ ID NO: 404436 - protein, 14 aa, Homo sapiens
  CDR3 for beta chain variable domain of TCR clone 202218 (TRBV18, TRBJ2-5)
YASSPGVSQETQYF

SEQ ID NO: 404437 - protein, 15 aa, Homo sapiens
  CDR3 for alpha chain variable domain of TCR clone 202219 (TRAV3, TRAJ5)
CAVRDRKTGRRALTF

SEQ ID NO: 404438 - protein, 17 aa, Homo sapiens
  CDR3 for beta chain variable domain of TCR clone 202219 (TRBV13, TRBJ2-3)
CASSLSRVAGGRNTQYF

SEQ ID NO: 404439 - protein, 17 aa, Homo sapiens
  CDR3 for alpha chain variable domain of TCR clone 202220 (TRAV3, TRAJ7)
CAVRDMFPLEGTTDSLL

SEQ ID NO: 404440 - protein, 17 aa, Homo sapiens
  CDR3 for beta chain variable domain of TCR clone 202220 (TRBV15, TRBJ1-2)
CATSGREIDVVNYGYTF

SEQ ID NO: 404441 - protein, 14 aa, Homo sapiens
  CDR3 for alpha chain variable domain of TCR clone 202221 (TRAV4, TRAJ26)
CLVGPQNYGQNFGF

SEQ ID NO: 404442 - protein, 17 aa, Homo sapiens
  CDR3 for beta chain variable domain of TCR clone 202221 (TRBV20-1, TRBJ2-1)
CSASSSGLAGSYNEQFF

SEQ ID NO: 404443 - protein, 15 aa, Homo sapiens
  CDR3 for alpha chain variable domain of TCR clone 202222 (TRAV3, TRAJ20)
CAVRDIKLSDYKLSF

SEQ ID NO: 404444 - protein, 12 aa, Homo sapiens
  CDR3 for beta chain variable domain of TCR clone 202222 (TRBV7-8, TRBJ2-7)
CASSLGDREQYF

SEQ ID NO: 404445 - protein, 14 aa, Homo sapiens
  CDR3 for alpha chain variable domain of TCR clone 202223 (TRAV21, TRAJ3)
CAVMGYSRASKIIF

SEQ ID NO: 404446 - protein, 15 aa, Homo sapiens
  CDR3 for beta chain variable domain of TCR clone 202223 (TRBV5-1, TRBJ2-7)
CASSLNGGPAREQYF

SEQ ID NO: 404447 - protein, 15 aa, Homo sapiens
  CDR3 for alpha chain variable domain of TCR clone 202224 (TRAV17, TRAJ35)
CATAFVIGFGNVLHC

SEQ ID NO: 404448 - protein, 14 aa, Homo sapiens
  CDR3 for beta chain variable domain of TCR clone 202224 (TRBV12-4, TRBJ1-1)
CASSLGTGGTEAFF

SEQ ID NO: 404449 - protein, 14 aa, Homo sapiens
  CDR3 for alpha chain variable domain of TCR clone 202225 (TRAV1-2, TRAJ29)
CAVRTDSGNTPLVF

SEQ ID NO: 404450 - protein, 14 aa, Homo sapiens
  CDR3 for beta chain variable domain of TCR clone 202225 (TRBV7-2, TRBJ2-7)
CASSPKTSFYEQYL

SEQ ID NO: 404451 - protein, 15 aa, Homo sapiens
  CDR3 for alpha chain variable domain of TCR clone 202226 (TRAV30, TRAJ32)
CGTEILGGATNKLIF

SEQ ID NO: 404452 - protein, 14 aa, Homo sapiens
  CDR3 for beta chain variable domain of TCR clone 202226 (TRBV18, TRBJ2-7)
CASSPRGGAYEQYF

SEQ ID NO: 404453 - protein, 12 aa, Homo sapiens
  CDR3 for alpha chain variable domain of TCR clone 202227 (TRAV21, TRAJ49)
YAVRNTGNQFYF

SEQ ID NO: 404454 - protein, 12 aa, Homo sapiens
  CDR3 for beta chain variable domain of TCR clone 202227 (TRBV7-9, TRBJ2-7)
CATRTDAYEQYF

SEQ ID NO: 404455 - protein, 14 aa, Homo sapiens
  CDR3 for alpha chain variable domain of TCR clone 202228 (TRAV12-3, TRAJ33)
CAMSVPGSNYHLIW

SEQ ID NO: 404456 - protein, 12 aa, Homo sapiens
  CDR3 for beta chain variable domain of TCR clone 202228 (TRBV7-8, TRBJ2-7)
CASSLGDREQYF

SEQ ID NO: 404457 - protein, 18 aa, Homo sapiens
  CDR3 for alpha chain variable domain of TCR clone 202229 (TRAV26-1, TRAJ52)
CIVRVAGAGGTSYGKLTF

SEQ ID NO: 404458 - protein, 13 aa, Homo sapiens
  CDR3 for beta chain variable domain of TCR clone 202229 (TRBV12-4, TRBJ1-2)
CASSLRQGKGYTF

SEQ ID NO: 404459 - protein, 10 aa, Homo sapiens
  CDR3 for alpha chain variable domain of TCR clone 202230 (TRAV30, TRAJ32)
CGTEKDMVVL

SEQ ID NO: 404460 - protein, 13 aa, Homo sapiens
  CDR3 for beta chain variable domain of TCR clone 202230 (TRBV10-3, TRBJ2-7)
CASKLAVKYEQYF

SEQ ID NO: 404461 - protein, 12 aa, Homo sapiens
  CDR3 for alpha chain variable domain of TCR clone 202231 (TRAV3, TRAJ20)
CAVRDPDYKLSF

SEQ ID NO: 404462 - protein, 16 aa, Homo sapiens
  CDR3 for beta chain variable domain of TCR clone 202231 (TRBV6-1, TRBJ2-1)
CASILRQGSSYNEQFF

SEQ ID NO: 404463 - protein, 14 aa, Homo sapiens
  CDR3 for alpha chain variable domain of TCR clone 202232 (TRAV17, TRAJ54)
CATDANQGAQKLVF

SEQ ID NO: 404464 - protein, 15 aa, Homo sapiens
  CDR3 for beta chain variable domain of TCR clone 202232 (TRBV27, TRBJ2-1)
CASSLARGAYNEQFF

SEQ ID NO: 404465 - protein, 11 aa, Homo sapiens
  CDR3 for alpha chain variable domain of TCR clone 202233 (TRAV12-2, TRAJ43)
CAAYNNNDMRF

SEQ ID NO: 404466 - protein, 13 aa, Homo sapiens
  CDR3 for beta chain variable domain of TCR clone 202233 (TRBV29-1, TRBJ2-2)
CSTTGVNTGELFF

SEQ ID NO: 404467 - protein, 14 aa, Homo sapiens
  CDR3 for alpha chain variable domain of TCR clone 202234 (TRAV21, TRAJ35)
CAVMPIGVGNVLHC

SEQ ID NO: 404468 - protein, 12 aa, Homo sapiens
  CDR3 for beta chain variable domain of TCR clone 202234 (TRBV7-9, TRBJ2-7)
CASSIKRAEQYF

SEQ ID NO: 404469 - protein, 18 aa, Homo sapiens
  CDR3 for alpha chain variable domain of TCR clone 202235 (TRAV1-1, TRAJ42)
CAVSPSAFYGGSQGNLMF

SEQ ID NO: 404470 - protein, 14 aa, Homo sapiens
  CDR3 for beta chain variable domain of TCR clone 202235 (TRBV6-3, TRBJ2-7)
CASSYSTGGDEQYF

SEQ ID NO: 404471 - protein, 16 aa, Homo sapiens
  CDR3 for alpha chain variable domain of TCR clone 202236 (TRAV3, TRAJ37)
CAVRPHGSGNTGKLIF

SEQ ID NO: 404472 - protein, 16 aa, Homo sapiens
  CDR3 for beta chain variable domain of TCR clone 202236 (TRBV7-9, TRBJ2-1)
CASSDVAGGSYNEQFF

SEQ ID NO: 404473 - protein, 12 aa, Homo sapiens
  CDR3 for alpha chain variable domain of TCR clone 202237 (TRAV12-3, TRAJ3)
CAIDSSASKIIF

SEQ ID NO: 404474 - protein, 16 aa, Homo sapiens
  CDR3 for beta chain variable domain of TCR clone 202237 (TRBV7-9, TRBJ2-3)
CQQLRGSGAYPDTQYF

SEQ ID NO: 404475 - protein, 23 aa, Homo sapiens
  CDR3 for alpha chain variable domain of TCR clone 202238 (TRAV2, TRAJ32)
CAFTMVVLQTSSSLELSLCLLSS

SEQ ID NO: 404476 - protein, 16 aa, Homo sapiens
  CDR3 for beta chain variable domain of TCR clone 202238 (TRBV7-9, TRBJ2-7)
CASSYPDREGGYEQYF

SEQ ID NO: 404477 - protein, 16 aa, Homo sapiens
  CDR3 for alpha chain variable domain of TCR clone 202239 (TRAV10, TRAJ10)
CVVSDVLTGGGNKLTF

SEQ ID NO: 404478 - protein, 17 aa, Homo sapiens
  CDR3 for beta chain variable domain of TCR clone 202239 (TRBV11-2, TRBJ2-1)
CASSLYPPGVEYNEQFF

SEQ ID NO: 404479 - protein, 15 aa, Homo sapiens
  CDR3 for alpha chain variable domain of TCR clone 202240 (TRAV26-1, TRAJ29)
CIVRVEGSGNTPLVF

SEQ ID NO: 404480 - protein, 14 aa, Homo sapiens
  CDR3 for beta chain variable domain of TCR clone 202240 (TRBV5-1, TRBJ1-1)
CASSTEGMNTEAFF

SEQ ID NO: 404481 - protein, 11 aa, Homo sapiens
  CDR3 for alpha chain variable domain of TCR clone 202241 (TRAV39, TRAJ49)
CAVDISTQFYF

SEQ ID NO: 404482 - protein, 11 aa, Homo sapiens
  CDR3 for beta chain variable domain of TCR clone 202241 (TRBV7-8, TRBJ2-7)
CASSLSLEQFF

SEQ ID NO: 404483 - protein, 13 aa, Homo sapiens
  CDR3 for alpha chain variable domain of TCR clone 202242 (TRAV25, TRAJ26)
CAGMDNYGQNFVF

SEQ ID NO: 404484 - protein, 15 aa, Homo sapiens
  CDR3 for beta chain variable domain of TCR clone 202242 (TRBV28, TRBJ2-1)
CASSLGTRLYNEQFF

SEQ ID NO: 404485 - protein, 15 aa, Homo sapiens
  CDR3 for alpha chain variable domain of TCR clone 202243 (TRAV21, TRAJ53)
CAPLNSGVSNYKLTF

SEQ ID NO: 404486 - protein, 16 aa, Homo sapiens
  CDR3 for beta chain variable domain of TCR clone 202243 (TRBV12-4, TRBJ1-5)
CASSRPVGGSNQPQHF

SEQ ID NO: 404487 - protein, 13 aa, Homo sapiens
  CDR3 for alpha chain variable domain of TCR clone 202244 (TRAV17, TRAJ5)
SALRGTGRRALTF

SEQ ID NO: 404488 - protein, 17 aa, Homo sapiens
  CDR3 for beta chain variable domain of TCR clone 202244 (TRBV7-2, TRBJ2-7)
CASSLVGAGGARNEQYF

SEQ ID NO: 404489 - protein, 16 aa, Homo sapiens
  CDR3 for alpha chain variable domain of TCR clone 202245 (TRAV16, TRAJ4)
CITVLPFSGGYNKLIL

SEQ ID NO: 404490 - protein, 14 aa, Homo sapiens
  CDR3 for beta chain variable domain of TCR clone 202245 (TRBV19, TRBJ2-7)
CASSMGQGAIGQYF

SEQ ID NO: 404491 - protein, 13 aa, Homo sapiens
  CDR3 for alpha chain variable domain of TCR clone 202246 (TRAV1-1, TRAJ9)
CADKNTGGFKTFF

SEQ ID NO: 404492 - protein, 17 aa, Homo sapiens
  CDR3 for beta chain variable domain of TCR clone 202246 (TRBV13, TRBJ2-3)
CASSLSRVAGGRNTQYF

SEQ ID NO: 404493 - protein, 15 aa, Homo sapiens
  CDR3 for alpha chain variable domain of TCR clone 202247 (TRAV17, TRAJ57)
CSTGPSQGGSEKLVF

SEQ ID NO: 404494 - protein, 16 aa, Homo sapiens
  CDR3 for beta chain variable domain of TCR clone 202247 (TRBV12-4, TRBJ1-5)
RASSRPVGGSNQPQHF

SEQ ID NO: 404495 - protein, 14 aa, Homo sapiens
  CDR3 for alpha chain variable domain of TCR clone 202248 (TRAV12-3, TRAJ58)
CAMSTETSGSRMTF

SEQ ID NO: 404496 - protein, 12 aa, Homo sapiens
  CDR3 for beta chain variable domain of TCR clone 202248 (TRBV7-8, TRBJ2-7)
CASSLGDREQYF

SEQ ID NO: 404497 - protein, 17 aa, Homo sapiens
  CDR3 for alpha chain variable domain of TCR clone 202249 (TRAV20, TRAJ45)
CAVQGMYSGGGADGLTF

SEQ ID NO: 404498 - protein, 14 aa, Homo sapiens
  CDR3 for beta chain variable domain of TCR clone 202249 (TRBV6-5, TRBJ1-2)
CASTRGGGSDGYTF

SEQ ID NO: 404499 - protein, 13 aa, Homo sapiens
  CDR3 for alpha chain variable domain of TCR clone 202250 (TRAV27, TRAJ6)
CAGGTRGRYVPTF

SEQ ID NO: 404500 - protein, 15 aa, Homo sapiens
  CDR3 for beta chain variable domain of TCR clone 202250 (TRBV11-2, TRBJ1-3)
CASSLSPLVRDTIYF

SEQ ID NO: 404501 - protein, 12 aa, Homo sapiens
  CDR3 for alpha chain variable domain of TCR clone 202251 (TRAV12-3, TRAJ20)
CAMVRGDYKLSF

SEQ ID NO: 404502 - protein, 12 aa, Homo sapiens
  CDR3 for beta chain variable domain of TCR clone 202251 (TRBV11-2, TRBJ2-2)
CASSFGGGELFF

SEQ ID NO: 404503 - protein, 12 aa, Homo sapiens
  CDR3 for alpha chain variable domain of TCR clone 202252 (TRAV21, TRAJ33)
CAKMDSNYQLIC

SEQ ID NO: 404504 - protein, 12 aa, Homo sapiens
  CDR3 for beta chain variable domain of TCR clone 202252 (TRBV7-8, TRBJ2-7)
CASSLGDREQYF

SEQ ID NO: 404505 - protein, 13 aa, Homo sapiens
  CDR3 for alpha chain variable domain of TCR clone 202253 (TRAV3, TRAJ16)
CAVRDRNGQKLLF

SEQ ID NO: 404506 - protein, 14 aa, Homo sapiens
  CDR3 for beta chain variable domain of TCR clone 202253 (TRBV18, TRBJ2-7)
CASSPRGGAYEQYF

SEQ ID NO: 404507 - protein, 15 aa, Homo sapiens
  CDR3 for alpha chain variable domain of TCR clone 202254 (TRAV4, TRAJ8)
CLVGEQHTGFQQLVF

SEQ ID NO: 404508 - protein, 15 aa, Homo sapiens
  CDR3 for beta chain variable domain of TCR clone 202254 (TRBV7-9, TRBJ2-5)
CASSNRDYLQETQYF

SEQ ID NO: 404509 - protein, 14 aa, Homo sapiens
  CDR3 for alpha chain variable domain of TCR clone 202255 (TRAV1-2, TRAJ8)
CAVREDTGFPKLVF

SEQ ID NO: 404510 - protein, 14 aa, Homo sapiens
  CDR3 for beta chain variable domain of TCR clone 202255 (TRBV5-4, TRBJ1-1)
CASSLDSRRDEAFF

SEQ ID NO: 404511 - protein, 16 aa, Homo sapiens
  CDR3 for alpha chain variable domain of TCR clone 202256 (TRAV30, TRAJ24)
CGTEIVDADSWGKFQF

SEQ ID NO: 404512 - protein, 16 aa, Homo sapiens
  CDR3 for beta chain variable domain of TCR clone 202256 (TRBV9, TRBJ2-7)
CASSAGPDRSPYEQYF

SEQ ID NO: 404513 - protein, 13 aa, Homo sapiens
  CDR3 for alpha chain variable domain of TCR clone 202257 (TRAV8-3, TRAJ21)
CAVGAYNFNKFYF

SEQ ID NO: 404514 - protein, 13 aa, Homo sapiens
  CDR3 for beta chain variable domain of TCR clone 202257 (TRBV20-1, TRBJ1-1)
CSARGGGNTEAFF

SEQ ID NO: 404515 - protein, 10 aa, Homo sapiens
  CDR3 for alpha chain variable domain of TCR clone 202258 (TRAV16, TRAJ21)
CVYNFNKFYF

SEQ ID NO: 404516 - protein, 13 aa, Homo sapiens
  CDR3 for beta chain variable domain of TCR clone 202258 (TRBV7-2, TRBJ2-2)
CASSSVRAGELFF

SEQ ID NO: 404517 - protein, 14 aa, Homo sapiens
  CDR3 for alpha chain variable domain of TCR clone 202259 (TRAV20, TRAJ32)
CCGRYGGATNKLIF

SEQ ID NO: 404518 - protein, 16 aa, Homo sapiens
  CDR3 for beta chain variable domain of TCR clone 202259 (TRBV19, TRBJ2-2)
CASRSRGTGATGELFF

SEQ ID NO: 404519 - protein, 14 aa, Homo sapiens
  CDR3 for alpha chain variable domain of TCR clone 202260 (TRAV1-2, TRAJ8)
CSVREDTGFQKLVF

SEQ ID NO: 404520 - protein, 12 aa, Homo sapiens
  CDR3 for beta chain variable domain of TCR clone 202260 (TRBV7-8, TRBJ2-7)
CASSLGDREQYF

SEQ ID NO: 404521 - protein, 15 aa, Homo sapiens
  CDR3 for alpha chain variable domain of TCR clone 202261 (TRAV25, TRAJ52)
CAGTSGGTRYGKLTF

SEQ ID NO: 404522 - protein, 16 aa, Homo sapiens
  CDR3 for beta chain variable domain of TCR clone 202261 (TRBV4-1, TRBJ2-3)
CASSQSTSGAEDTQYF

SEQ ID NO: 404523 - protein, 15 aa, Homo sapiens
  CDR3 for alpha chain variable domain of TCR clone 202262 (TRAV17, TRAJ57)
CATGPSQGGSEKLVF

SEQ ID NO: 404524 - protein, 13 aa, Homo sapiens
  CDR3 for beta chain variable domain of TCR clone 202262 (TRBV18, TRBJ2-5)
CASSLQGQETQYF

SEQ ID NO: 404525 - protein, 13 aa, Homo sapiens
  CDR3 for alpha chain variable domain of TCR clone 202263 (TRAV35, TRAJ20)
CAGPLSNDYKLSF

SEQ ID NO: 404526 - protein, 14 aa, Homo sapiens
  CDR3 for beta chain variable domain of TCR clone 202263 (TRBV9, TRBJ2-7)
CARSVGVGSYEQYF

SEQ ID NO: 404527 - protein, 18 aa, Homo sapiens
  CDR3 for alpha chain variable domain of TCR clone 202264 (TRAV12-2, )
CAVEDIQNPDPAVYQLSD

SEQ ID NO: 404528 - protein, 18 aa, Homo sapiens
  CDR3 for beta chain variable domain of TCR clone 202264 (TRBV11-2, TRBJ2-3)
CASSLGGASRGAPNTQYF

SEQ ID NO: 404529 - protein, 12 aa, Homo sapiens
  CDR3 for alpha chain variable domain of TCR clone 202265 (TRAV1-1, TRAJ23)
CAVTNQGGKLIF

SEQ ID NO: 404530 - protein, 14 aa, Homo sapiens
  CDR3 for beta chain variable domain of TCR clone 202265 (TRBV7-9, TRBJ2-2)
CASSLVQDTGELFF

SEQ ID NO: 404531 - protein, 15 aa, Homo sapiens
  CDR3 for alpha chain variable domain of TCR clone 202266 (TRAV2, TRAJ13)
CATPSYSGGYQKVTF

SEQ ID NO: 404532 - protein, 15 aa, Homo sapiens
  CDR3 for beta chain variable domain of TCR clone 202266 (TRBV27, TRBJ2-7)
CASSPIVTGAYEQYF

SEQ ID NO: 404533 - protein, 15 aa, Homo sapiens
  CDR3 for alpha chain variable domain of TCR clone 202267 (TRAV20, TRAJ53)
CAVQASGGSNYKLTF

SEQ ID NO: 404534 - protein, 15 aa, Homo sapiens
  CDR3 for beta chain variable domain of TCR clone 202267 (TRBV2, TRBJ2-2)
CASSRQGPNTGELFF

SEQ ID NO: 404535 - protein, 12 aa, Homo sapiens
  CDR3 for alpha chain variable domain of TCR clone 202268 (TRAV23/DV6, TRAJ27)
CAASKRAGKSTF

SEQ ID NO: 404536 - protein, 13 aa, Homo sapiens
  CDR3 for beta chain variable domain of TCR clone 202268 (TRBV6-3, TRBJ1-2)
CASSRQGGYGYTF

SEQ ID NO: 404537 - protein, 14 aa, Homo sapiens
  CDR3 for alpha chain variable domain of TCR clone 202269 (TRAV12-2, TRAJ52)
CAVPGGTSYGKLTF

SEQ ID NO: 404538 - protein, 12 aa, Homo sapiens
  CDR3 for beta chain variable domain of TCR clone 202269 (TRBV18, TRBJ2-1)
CASSPGTSEGFS

SEQ ID NO: 404539 - protein, 15 aa, Homo sapiens
  CDR3 for alpha chain variable domain of TCR clone 202270 (TRAV20, TRAJ50)
CAVRQMKTSYDKVIF

SEQ ID NO: 404540 - protein, 18 aa, Homo sapiens
  CDR3 for beta chain variable domain of TCR clone 202270 (TRBV12-4, TRBJ2-2)
CASSLVAGTRGRTGELFF

SEQ ID NO: 404541 - protein, 10 aa, Homo sapiens
  CDR3 for alpha chain variable domain of TCR clone 202271 (TRAV9-2, TRAJ41)
CALSLREFRV

SEQ ID NO: 404542 - protein, 13 aa, Homo sapiens
  CDR3 for beta chain variable domain of TCR clone 202271 (TRBV7-3, TRBJ1-1)
CASSQDWGAEAFF

SEQ ID NO: 404543 - protein, 14 aa, Homo sapiens
  CDR3 for alpha chain variable domain of TCR clone 202272 (TRAV12-2, TRAJ17)
CAVNIKAAGNKLTF

SEQ ID NO: 404544 - protein, 16 aa, Homo sapiens
  CDR3 for beta chain variable domain of TCR clone 202272 (TRBV7-2, TRBJ2-7)
CASSLVMGVGSYEQYF

SEQ ID NO: 404545 - protein, 17 aa, Homo sapiens
  CDR3 for alpha chain variable domain of TCR clone 202273 (TRAV13-1, TRAJ52)
CAASSGAGGTSYGKVTF

SEQ ID NO: 404546 - protein, 14 aa, Homo sapiens
  CDR3 for beta chain variable domain of TCR clone 202273 (TRBV12-4, TRBJ2-3)
CASTIAGWGDTQYF

SEQ ID NO: 404547 - protein, 10 aa, Homo sapiens
  CDR3 for alpha chain variable domain of TCR clone 202274 (TRAV3, TRAJ6)
CAVSRVPIQE

SEQ ID NO: 404548 - protein, 18 aa, Homo sapiens
  CDR3 for beta chain variable domain of TCR clone 202274 (TRBV7-2, TRBJ2-3)
CASSLETSRGRKADTQYF

SEQ ID NO: 404549 - protein, 15 aa, Homo sapiens
  CDR3 for alpha chain variable domain of TCR clone 202275 (TRAV26-1, TRAJ44)
CIVRANTGTASKLTF

SEQ ID NO: 404550 - protein, 14 aa, Homo sapiens
  CDR3 for beta chain variable domain of TCR clone 202275 (TRBV12-4, TRBJ2-2)
CASSSGGNTGELFF

SEQ ID NO: 404551 - protein, 16 aa, Homo sapiens
  CDR3 for alpha chain variable domain of TCR clone 202276 (TRAV30, TRAJ49)
SAAQRVGPNTGNQFSF

SEQ ID NO: 404552 - protein, 15 aa, Homo sapiens
  CDR3 for beta chain variable domain of TCR clone 202276 (TRBV2, TRBJ2-1)
CASSELAGSYNEQFF

SEQ ID NO: 404553 - protein, 13 aa, Homo sapiens
  CDR3 for alpha chain variable domain of TCR clone 202277 (TRAV8-2, TRAJ21)
CVVSQYNFNKFYF

SEQ ID NO: 404554 - protein, 16 aa, Homo sapiens
  CDR3 for beta chain variable domain of TCR clone 202277 (TRBV7-3, TRBJ2-2)
CASSLKRGTLSGELFF

SEQ ID NO: 404555 - protein, 13 aa, Homo sapiens
  CDR3 for alpha chain variable domain of TCR clone 202278 (TRAV2, TRAJ40)
CAVVTSGTYKYIF

SEQ ID NO: 404556 - protein, 14 aa, Homo sapiens
  CDR3 for beta chain variable domain of TCR clone 202278 (TRBV24-1, TRBJ2-7)
VTTPWDQLYYEQYF

SEQ ID NO: 404557 - protein, 11 aa, Homo sapiens
  CDR3 for alpha chain variable domain of TCR clone 202279 (TRAV1-1, TRAJ23)
CAVRQGGKLIF

SEQ ID NO: 404558 - protein, 15 aa, Homo sapiens
  CDR3 for beta chain variable domain of TCR clone 202279 (TRBV28, TRBJ1-5)
CASSDQVYSNQPQHF

SEQ ID NO: 404559 - protein, 14 aa, Homo sapiens
  CDR3 for alpha chain variable domain of TCR clone 202280 (TRAV13-2, TRAJ17)
CAENSKAAGNKLTF

SEQ ID NO: 404560 - protein, 15 aa, Homo sapiens
  CDR3 for beta chain variable domain of TCR clone 202280 (TRBV12-4, TRBJ2-1)
CASIKSFSGYNEQFF

SEQ ID NO: 404561 - protein, 19 aa, Homo sapiens
  CDR3 for alpha chain variable domain of TCR clone 202281 (TRAV12-1, TRAJ45)
CVVTHDVGYSGGGADGLTF

SEQ ID NO: 404562 - protein, 19 aa, Homo sapiens
  CDR3 for beta chain variable domain of TCR clone 202281 (TRBV7-3, TRBJ2-7)
CASSLTGVAGGWPSYEQYF

SEQ ID NO: 404563 - protein, 13 aa, Homo sapiens
  CDR3 for alpha chain variable domain of TCR clone 202282 (TRAV8-4, TRAJ30)
CAVSVNRDAKIIF

SEQ ID NO: 404564 - protein, 17 aa, Homo sapiens
  CDR3 for beta chain variable domain of TCR clone 202282 (TRBV20-1, TRBJ2-1)
CSASSSGLAGSYNEQFF

SEQ ID NO: 404565 - protein, 14 aa, Homo sapiens
  CDR3 for alpha chain variable domain of TCR clone 202283 (TRAV12-2, TRAJ13)
CAVKKTGGYQKVTF

SEQ ID NO: 404566 - protein, 15 aa, Homo sapiens
  CDR3 for beta chain variable domain of TCR clone 202283 (TRBV11-1, TRBJ2-7)
CASSLNYGASYEQYF

SEQ ID NO: 404567 - protein, 15 aa, Homo sapiens
  CDR3 for alpha chain variable domain of TCR clone 202284 (TRAV8-4, TRAJ3)
CAVSDPYSSPSKIIF

SEQ ID NO: 404568 - protein, 16 aa, Homo sapiens
  CDR3 for beta chain variable domain of TCR clone 202284 (TRBV2, TRBJ2-1)
CASSVGGSLSYNEQFF

SEQ ID NO: 404569 - protein, 12 aa, Homo sapiens
  CDR3 for alpha chain variable domain of TCR clone 202285 (TRAV3, TRAJ20)
CAVRDGDYKLSF

SEQ ID NO: 404570 - protein, 13 aa, Homo sapiens
  CDR3 for beta chain variable domain of TCR clone 202285 (TRBV9, TRBJ2-1)
CASSIGQGGEQFF

SEQ ID NO: 404571 - protein, 19 aa, Homo sapiens
  CDR3 for alpha chain variable domain of TCR clone 202286 (TRAV1-2, TRAJ26)
CLLPLCCERPDSYGQNFVF

SEQ ID NO: 404572 - protein, 14 aa, Homo sapiens
  CDR3 for beta chain variable domain of TCR clone 202286 (TRBV19, TRBJ2-1)
CASPTFVLSGEQFF

SEQ ID NO: 404573 - protein, 15 aa, Homo sapiens
  CDR3 for alpha chain variable domain of TCR clone 202287 (TRAV14/DV4, TRAJ12)
CAMREERDSSYKLIF

SEQ ID NO: 404574 - protein, 16 aa, Homo sapiens
  CDR3 for beta chain variable domain of TCR clone 202287 (TRBV11-2, TRBJ1-2)
CASSLDRGGNNYGYIF

SEQ ID NO: 404575 - protein, 14 aa, Homo sapiens
  CDR3 for alpha chain variable domain of TCR clone 202288 (TRAV35, TRAJ33)
CAGSSQDSNYQLIW

SEQ ID NO: 404576 - protein, 13 aa, Homo sapiens
  CDR3 for beta chain variable domain of TCR clone 202288 (TRBV7-2, TRBJ2-2)
CASSSVRAGELFF

SEQ ID NO: 404577 - protein, 12 aa, Homo sapiens
  CDR3 for alpha chain variable domain of TCR clone 202289 (TRAV30, TRAJ43)
CGPEERGNDMRF

SEQ ID NO: 404578 - protein, 13 aa, Homo sapiens
  CDR3 for beta chain variable domain of TCR clone 202289 (TRBV27, TRBJ2-7)
CASSCSQGYEQYF

SEQ ID NO: 404579 - protein, 16 aa, Homo sapiens
  CDR3 for alpha chain variable domain of TCR clone 202290 (TRAV12-2, TRAJ6)
CAAPLAGSGGSYIPTF

SEQ ID NO: 404580 - protein, 10 aa, Homo sapiens
  CDR3 for beta chain variable domain of TCR clone 202290 (TRBV28, TRBJ1-2)
CTSSSDRAVF

SEQ ID NO: 404581 - protein, 14 aa, Homo sapiens
  CDR3 for alpha chain variable domain of TCR clone 202291 (TRAV35, TRAJ13)
CAGSPSGGYLKVTF

SEQ ID NO: 404582 - protein, 13 aa, Homo sapiens
  CDR3 for beta chain variable domain of TCR clone 202291 (TRBV29-1, TRBJ1-1)
CSVGDSRNTEAFF

SEQ ID NO: 404583 - protein, 13 aa, Homo sapiens
  CDR3 for alpha chain variable domain of TCR clone 202292 (TRAV2, TRAJ40)
CAVVTSVTYKYIF

SEQ ID NO: 404584 - protein, 17 aa, Homo sapiens
  CDR3 for beta chain variable domain of TCR clone 202292 (TRBV7-3, TRBJ2-3)
CASSLMKRMRGADTQYF

SEQ ID NO: 404585 - protein, 12 aa, Homo sapiens
  CDR3 for alpha chain variable domain of TCR clone 202293 (TRAV12-3, TRAJ17)
CAMTLTGNKLTF

SEQ ID NO: 404586 - protein, 12 aa, Homo sapiens
  CDR3 for beta chain variable domain of TCR clone 202293 (TRBV20-1, TRBJ2-5)
CSAPRSQETQYF

SEQ ID NO: 404587 - protein, 16 aa, Homo sapiens
  CDR3 for alpha chain variable domain of TCR clone 202294 (TRAV4, TRAJ22)
CLVGDLYSGSARQLTF

SEQ ID NO: 404588 - protein, 16 aa, Homo sapiens
  CDR3 for beta chain variable domain of TCR clone 202294 (TRBV7-9, TRBJ2-1)
CASRDVAGGSYNEQFF

SEQ ID NO: 404589 - protein, 10 aa, Homo sapiens
  CDR3 for alpha chain variable domain of TCR clone 202295 (TRAV12-3, TRAJ50)
CAMSAMVNLL

SEQ ID NO: 404590 - protein, 14 aa, Homo sapiens
  CDR3 for beta chain variable domain of TCR clone 202295 (TRBV11-2, TRBJ2-1)
CASTTGQGNNEQFF

SEQ ID NO: 404591 - protein, 17 aa, Homo sapiens
  CDR3 for alpha chain variable domain of TCR clone 202296 (TRAV26-2, TRAJ42)
CILRDESYGRSQGNLIF

SEQ ID NO: 404592 - protein, 15 aa, Homo sapiens
  CDR3 for beta chain variable domain of TCR clone 202296 (TRBV6-6, TRBJ2-7)
CASSYSYGGSYEQYF

SEQ ID NO: 404593 - protein, 12 aa, Homo sapiens
  CDR3 for alpha chain variable domain of TCR clone 202297 (TRAV8-3, TRAJ26)
CAGDNYGQNFVF

SEQ ID NO: 404594 - protein, 12 aa, Homo sapiens
  CDR3 for beta chain variable domain of TCR clone 202297 (TRBV11-2, TRBJ2-1)
CASSPGNNEHFF

SEQ ID NO: 404595 - protein, 14 aa, Homo sapiens
  CDR3 for alpha chain variable domain of TCR clone 202298 (TRAV8-1, TRAJ47)
CAVNAVGYGNKLVF

SEQ ID NO: 404596 - protein, 13 aa, Homo sapiens
  CDR3 for beta chain variable domain of TCR clone 202298 (TRBV27, TRBJ2-7)
CASSFGDSHEQYF

SEQ ID NO: 404597 - protein, 11 aa, Homo sapiens
  CDR3 for alpha chain variable domain of TCR clone 202299 (TRAV3, TRAJ49)
CAPITGNQFYF

SEQ ID NO: 404598 - protein, 16 aa, Homo sapiens
  CDR3 for beta chain variable domain of TCR clone 202299 (TRBV5-1, TRBJ2-3)
CAISVFPMSSTETQYF

SEQ ID NO: 404599 - protein, 12 aa, Homo sapiens
  CDR3 for alpha chain variable domain of TCR clone 202300 (TRAV3, TRAJ43)
CAVRDPNNDMCF

SEQ ID NO: 404600 - protein, 15 aa, Homo sapiens
  CDR3 for beta chain variable domain of TCR clone 202300 (TRBV6-5, TRBJ1-5)
CASSLGTGFDQPQHF

SEQ ID NO: 404601 - protein, 12 aa, Homo sapiens
  CDR3 for alpha chain variable domain of TCR clone 202301 (TRAV17, TRAJ49)
CATVTTGNQFYF

SEQ ID NO: 404602 - protein, 14 aa, Homo sapiens
  CDR3 for beta chain variable domain of TCR clone 202301 (TRBV27, TRBJ2-1)
CASSATGGYNEQFF

SEQ ID NO: 404603 - protein, 13 aa, Homo sapiens
  CDR3 for alpha chain variable domain of TCR clone 202302 (TRAV21, TRAJ20)
CAVGLRVDYKLSF

SEQ ID NO: 404604 - protein, 15 aa, Homo sapiens
  CDR3 for beta chain variable domain of TCR clone 202302 (TRBV7-2, TRBJ2-1)
CASSLVLAGGNEQFF

SEQ ID NO: 404605 - protein, 14 aa, Homo sapiens
  CDR3 for alpha chain variable domain of TCR clone 202303 (TRAV23/DV6, TRAJ23)
CAAGTYNQGGKLIF

SEQ ID NO: 404606 - protein, 17 aa, Homo sapiens
  CDR3 for beta chain variable domain of TCR clone 202303 (TRBV4-2, TRBJ1-1)
CASSQVATGGMNTEAFF

SEQ ID NO: 404607 - protein, 14 aa, Homo sapiens
  CDR3 for alpha chain variable domain of TCR clone 202304 (TRAV1-1, TRAJ34)
CAVSPSYNTDKLIF

SEQ ID NO: 404608 - protein, 13 aa, Homo sapiens
  CDR3 for beta chain variable domain of TCR clone 202304 (TRBV19, TRBJ1-2)
CASSVPGQDGYTF

SEQ ID NO: 404609 - protein, 15 aa, Homo sapiens
  CDR3 for alpha chain variable domain of TCR clone 202305 (TRAV1-2, TRAJ9)
FAVRDDGTGGFKTIF

SEQ ID NO: 404610 - protein, 16 aa, Homo sapiens
  CDR3 for beta chain variable domain of TCR clone 202305 (TRBV7-2, TRBJ1-6)
CASSSFESSYNSPLHF

SEQ ID NO: 404611 - protein, 13 aa, Homo sapiens
  CDR3 for alpha chain variable domain of TCR clone 202306 (TRAV6, TRAJ4)
CALLRGGYNKRIF

SEQ ID NO: 404612 - protein, 16 aa, Homo sapiens
  CDR3 for beta chain variable domain of TCR clone 202306 (TRBV5-1, TRBJ2-1)
CASSIRSGGSYNEQFF

SEQ ID NO: 404613 - protein, 18 aa, Homo sapiens
  CDR3 for alpha chain variable domain of TCR clone 202307 (TRAV12-3, TRAJ28)
CAMSARGYSGAGSYQLTF

SEQ ID NO: 404614 - protein, 15 aa, Homo sapiens
  CDR3 for beta chain variable domain of TCR clone 202307 (TRBV5-1, TRBJ2-3)
CASSVTSGSTDTQYF

SEQ ID NO: 404615 - protein, 21 aa, Homo sapiens
  CDR3 for alpha chain variable domain of TCR clone 202308 (TRAV27, TRAJ3)
TAAQPGDTGLPRGSSASKIIF

SEQ ID NO: 404616 - protein, 15 aa, Homo sapiens
  CDR3 for beta chain variable domain of TCR clone 202308 (TRBV28, TRBJ1-3)
CASSMGWASGNTIYF

SEQ ID NO: 404617 - protein, 23 aa, Homo sapiens
  CDR3 for alpha chain variable domain of TCR clone 202309 (TRAV3, TRAJ42)
CAVRRLEEAKEISSLETALNSLL

SEQ ID NO: 404618 - protein, 14 aa, Homo sapiens
  CDR3 for beta chain variable domain of TCR clone 202309 (TRBV19, TRBJ2-5)
CASSSSGIQETQYF

SEQ ID NO: 404619 - protein, 12 aa, Homo sapiens
  CDR3 for alpha chain variable domain of TCR clone 202310 (TRAV12-2, TRAJ34)
CAVSYNTDKPIF

SEQ ID NO: 404620 - protein, 16 aa, Homo sapiens
  CDR3 for beta chain variable domain of TCR clone 202310 (TRBV27, TRBJ2-5)
CASSYGPGGQKETQYF

SEQ ID NO: 404621 - protein, 13 aa, Homo sapiens
  CDR3 for alpha chain variable domain of TCR clone 202311 (TRAV13-1, TRAJ10)
CAALEGGGNKHTF

SEQ ID NO: 404622 - protein, 15 aa, Homo sapiens
  CDR3 for beta chain variable domain of TCR clone 202311 (TRBV19, TRBJ1-1)
CSSTSGQIQNTEAFF

SEQ ID NO: 404623 - protein, 16 aa, Homo sapiens
  CDR3 for alpha chain variable domain of TCR clone 202312 (TRAV30, TRAJ24)
CGTEIADADSWGKFQF

SEQ ID NO: 404624 - protein, 14 aa, Homo sapiens
  CDR3 for beta chain variable domain of TCR clone 202312 (TRBV4-1, TRBJ2-2)
CASSQAVNTGELFF

SEQ ID NO: 404625 - protein, 14 aa, Homo sapiens
  CDR3 for alpha chain variable domain of TCR clone 202313 (TRAV12-2, TRAJ13)
CAVKKTGGYQKVPF

SEQ ID NO: 404626 - protein, 14 aa, Homo sapiens
  CDR3 for beta chain variable domain of TCR clone 202313 (TRBV12-5, TRBJ2-5)
CASGSRTHQETQYF

SEQ ID NO: 404627 - protein, 12 aa, Homo sapiens
  CDR3 for alpha chain variable domain of TCR clone 202314 (TRAV29/DV5, TRAJ34)
CAASGNTDKLIF

SEQ ID NO: 404628 - protein, 14 aa, Homo sapiens
  CDR3 for beta chain variable domain of TCR clone 202314 (TRBV2, TRBJ1-5)
CASSENRGGQPQHF

SEQ ID NO: 404629 - protein, 15 aa, Homo sapiens
  CDR3 for alpha chain variable domain of TCR clone 202315 (TRAV12-1, TRAJ45)
CVVLSGGGGADGLTF

SEQ ID NO: 404630 - protein, 16 aa, Homo sapiens
  CDR3 for beta chain variable domain of TCR clone 202315 (TRBV6-5, TRBJ2-1)
CASSETLAGHYNEQYF

SEQ ID NO: 404631 - protein, 14 aa, Homo sapiens
  CDR3 for alpha chain variable domain of TCR clone 202316 (TRAV26-1, TRAJ21)
CIVRPPYNFNKFYF

SEQ ID NO: 404632 - protein, 13 aa, Homo sapiens
  CDR3 for beta chain variable domain of TCR clone 202316 (TRBV19, TRBJ2-7)
CASRKAGGSEQYF

SEQ ID NO: 404633 - protein, 12 aa, Homo sapiens
  CDR3 for alpha chain variable domain of TCR clone 202317 (TRAV16, TRAJ10)
VSRTGGGNKLTF

SEQ ID NO: 404634 - protein, 15 aa, Homo sapiens
  CDR3 for beta chain variable domain of TCR clone 202317 (TRBV6-3, TRBJ2-7)
CASSSPGTVFYEQYF

SEQ ID NO: 404635 - protein, 14 aa, Homo sapiens
  CDR3 for alpha chain variable domain of TCR clone 202318 (TRAV13-1, TRAJ35)
CAASKGGFGNVLHF

SEQ ID NO: 404636 - protein, 14 aa, Homo sapiens
  CDR3 for beta chain variable domain of TCR clone 202318 (TRBV12-4, TRBJ1-1)
CASSFDRVNTEAFF

SEQ ID NO: 404637 - protein, 16 aa, Homo sapiens
  CDR3 for alpha chain variable domain of TCR clone 202319 (TRAV3, TRAJ10)
CAVRDMRAGGGNKLTF

SEQ ID NO: 404638 - protein, 13 aa, Homo sapiens
  CDR3 for beta chain variable domain of TCR clone 202319 (TRBV4-2, TRBJ1-1)
CASSQAGNTEAFF

SEQ ID NO: 404639 - protein, 14 aa, Homo sapiens
  CDR3 for alpha chain variable domain of TCR clone 202320 (TRAV9-2, TRAJ39)
CALYIYNAGSMLTF

SEQ ID NO: 404640 - protein, 15 aa, Homo sapiens
  CDR3 for beta chain variable domain of TCR clone 202320 (TRBV12-4, TRBJ2-5)
CASSPPTGLQETQYF

SEQ ID NO: 404641 - protein, 16 aa, Homo sapiens
  CDR3 for alpha chain variable domain of TCR clone 202321 (TRAV3, TRAJ37)
CAVRGKGYGNTGKLIF

SEQ ID NO: 404642 - protein, 13 aa, Homo sapiens
  CDR3 for beta chain variable domain of TCR clone 202321 (TRBV10-3, TRBJ1-2)
CAISERDSYGYTF

SEQ ID NO: 404643 - protein, 14 aa, Homo sapiens
  CDR3 for alpha chain variable domain of TCR clone 202322 (TRAV12-2, TRAJ13)
CAVKKTGGYQKVTF

SEQ ID NO: 404644 - protein, 16 aa, Homo sapiens
  CDR3 for beta chain variable domain of TCR clone 202322 (TRBV5-1, TRBJ1-1)
CASSSGGNALNTEAFF

SEQ ID NO: 404645 - protein, 14 aa, Homo sapiens
  CDR3 for alpha chain variable domain of TCR clone 202323 (TRAV29/DV5, TRAJ36)
CAARRKTGANNLFF

SEQ ID NO: 404646 - protein, 14 aa, Homo sapiens
  CDR3 for beta chain variable domain of TCR clone 202323 (TRBV12-5, TRBJ2-5)
CASGSRTHQETQCF

SEQ ID NO: 404647 - protein, 13 aa, Homo sapiens
  CDR3 for alpha chain variable domain of TCR clone 202324 (TRAV12-1, TRAJ8)
CVGMGPGFQKLVF

SEQ ID NO: 404648 - protein, 11 aa, Homo sapiens
  CDR3 for beta chain variable domain of TCR clone 202324 (TRBV18, TRBJ1-2)
CASSPLNGYTF

SEQ ID NO: 404649 - protein, 12 aa, Homo sapiens
  CDR3 for alpha chain variable domain of TCR clone 202325 (TRAV12-3, TRAJ17)
CAMTLTGNKLTF

SEQ ID NO: 404650 - protein, 12 aa, Homo sapiens
  CDR3 for beta chain variable domain of TCR clone 202325 (TRBV14, TRBJ2-7)
CASSSLKGEQYF

SEQ ID NO: 404651 - protein, 17 aa, Homo sapiens
  CDR3 for alpha chain variable domain of TCR clone 202326 (TRAV26-1, TRAJ53)
CIVRVEDSGGSNYKLTF

SEQ ID NO: 404652 - protein, 13 aa, Homo sapiens
  CDR3 for beta chain variable domain of TCR clone 202326 (TRBV12-4, TRBJ1-2)
CASSLRQGKGYTF

SEQ ID NO: 404653 - protein, 16 aa, Homo sapiens
  CDR3 for alpha chain variable domain of TCR clone 202327 (TRAV17, TRAJ36)
CATVSLNWGKPPLLWD

SEQ ID NO: 404654 - protein, 13 aa, Homo sapiens
  CDR3 for beta chain variable domain of TCR clone 202327 (TRBV4-1, TRBJ1-1)
CASSQLGTGEAFF

SEQ ID NO: 404655 - protein, 14 aa, Homo sapiens
  CDR3 for alpha chain variable domain of TCR clone 202328 (TRAV1-1, TRAJ27)
CAVIYNTNAGKSTF

SEQ ID NO: 404656 - protein, 15 aa, Homo sapiens
  CDR3 for beta chain variable domain of TCR clone 202328 (TRBV7-2, TRBJ2-1)
CASSSGLAGGNEQYF

SEQ ID NO: 404657 - protein, 16 aa, Homo sapiens
  CDR3 for alpha chain variable domain of TCR clone 202329 (TRAV26-1, TRAJ44)
CIVRVGNTGTASKLTF

SEQ ID NO: 404658 - protein, 14 aa, Homo sapiens
  CDR3 for beta chain variable domain of TCR clone 202329 (TRBV19, TRBJ2-7)
CASSIFAGTYEQYF

SEQ ID NO: 404659 - protein, 13 aa, Homo sapiens
  CDR3 for alpha chain variable domain of TCR clone 202330 (TRAV36/DV7, TRAJ49)
CAGDSNTGNQFYF

SEQ ID NO: 404660 - protein, 18 aa, Homo sapiens
  CDR3 for beta chain variable domain of TCR clone 202330 (TRBV5-1, TRBJ1-1)
CASSKTGTEVGLKLSLDK

SEQ ID NO: 404661 - protein, 14 aa, Homo sapiens
  CDR3 for alpha chain variable domain of TCR clone 202331 (TRAV13-1, TRAJ44)
CAAKATGTASKLTF

SEQ ID NO: 404662 - protein, 17 aa, Homo sapiens
  CDR3 for beta chain variable domain of TCR clone 202331 (TRBV7-3, TRBJ2-3)
CPSSLMKRMRGADTQYF

SEQ ID NO: 404663 - protein, 16 aa, Homo sapiens
  CDR3 for alpha chain variable domain of TCR clone 202332 (TRAV3, TRAJ10)
CAVRDMRSGGGNKLTF

SEQ ID NO: 404664 - protein, 15 aa, Homo sapiens
  CDR3 for beta chain variable domain of TCR clone 202332 (TRBV11-2, TRBJ1-6)
CASTGFGTAVSPLHF

SEQ ID NO: 404665 - protein, 10 aa, Homo sapiens
  CDR3 for alpha chain variable domain of TCR clone 202333 (TRAV30, TRAJ48)
CGIGNEKLTF

SEQ ID NO: 404666 - protein, 16 aa, Homo sapiens
  CDR3 for beta chain variable domain of TCR clone 202333 (TRBV7-7, TRBJ2-1)
CASSLASGTSYNEQFF

SEQ ID NO: 404667 - protein, 18 aa, Homo sapiens
  CDR3 for alpha chain variable domain of TCR clone 202334 (TRAV21, TRAJ52)
CAVGPPNAGGTSYGKLTF

SEQ ID NO: 404668 - protein, 17 aa, Homo sapiens
  CDR3 for beta chain variable domain of TCR clone 202334 (TRBV13, TRBJ2-3)
CASSLSRVAGGRNTQYF

SEQ ID NO: 404669 - protein, 11 aa, Homo sapiens
  CDR3 for alpha chain variable domain of TCR clone 202335 (TRAV12-2, TRAJ43)
CASPIGNDMRF

SEQ ID NO: 404670 - protein, 13 aa, Homo sapiens
  CDR3 for beta chain variable domain of TCR clone 202335 (TRBV7-3, TRBJ1-2)
CASSLKRGYGYAF

SEQ ID NO: 404671 - protein, 11 aa, Homo sapiens
  CDR3 for alpha chain variable domain of TCR clone 202336 (TRAV6, TRAJ41)
CALNSGYALNF

SEQ ID NO: 404672 - protein, 15 aa, Homo sapiens
  CDR3 for beta chain variable domain of TCR clone 202336 (TRBV7-3, TRBJ2-1)
CASSPTGGGEVEQFF

SEQ ID NO: 404673 - protein, 12 aa, Homo sapiens
  CDR3 for alpha chain variable domain of TCR clone 202337 (TRAV13-1, TRAJ11)
CAGPSGYSTLTF

SEQ ID NO: 404674 - protein, 14 aa, Homo sapiens
  CDR3 for beta chain variable domain of TCR clone 202337 (TRBV15, TRBJ2-5)
CATSGDRGQETQYF

SEQ ID NO: 404675 - protein, 14 aa, Homo sapiens
  CDR3 for alpha chain variable domain of TCR clone 202338 (TRAV1-2, TRAJ16)
CAVNRFSDGQKLLF

SEQ ID NO: 404676 - protein, 16 aa, Homo sapiens
  CDR3 for beta chain variable domain of TCR clone 202338 (TRBV19, TRBJ2-2)
CGSSFPGQGLAGELFF

SEQ ID NO: 404677 - protein, 13 aa, Homo sapiens
  CDR3 for alpha chain variable domain of TCR clone 202339 (TRAV12-2, TRAJ45)
CAARGGGADGPTF

SEQ ID NO: 404678 - protein, 13 aa, Homo sapiens
  CDR3 for beta chain variable domain of TCR clone 202339 (TRBV6-5, TRBJ2-5)
CASRTAGRETQYF

SEQ ID NO: 404679 - protein, 13 aa, Homo sapiens
  CDR3 for alpha chain variable domain of TCR clone 202340 (TRAV8-3, TRAJ36)
CAVGATGANNLFF

SEQ ID NO: 404680 - protein, 15 aa, Homo sapiens
  CDR3 for beta chain variable domain of TCR clone 202340 (TRBV7-6, TRBJ1-2)
CASSSGGRGGYGYTF

SEQ ID NO: 404681 - protein, 14 aa, Homo sapiens
  CDR3 for alpha chain variable domain of TCR clone 202341 (TRAV3, TRAJ34)
CAVRDINNTDKLIF

SEQ ID NO: 404682 - protein, 13 aa, Homo sapiens
  CDR3 for beta chain variable domain of TCR clone 202341 (TRBV20-1, TRBJ1-1)
CSARGGWNTEAFF

SEQ ID NO: 404683 - protein, 14 aa, Homo sapiens
  CDR3 for alpha chain variable domain of TCR clone 202342 (TRAV12-3, TRAJ15)
CAMIPPQAGTALIF

SEQ ID NO: 404684 - protein, 12 aa, Homo sapiens
  CDR3 for beta chain variable domain of TCR clone 202342 (TRBV11-2, TRBJ2-2)
CASSFGGRELFF

SEQ ID NO: 404685 - protein, 19 aa, Homo sapiens
  CDR3 for alpha chain variable domain of TCR clone 202343 (TRAV21, TRAJ45)
CAVEAPRGDQEEVLTDVPF

SEQ ID NO: 404686 - protein, 12 aa, Homo sapiens
  CDR3 for beta chain variable domain of TCR clone 202343 (TRBV29-1, TRBJ1-3)
CSTRDSGNTIYF

SEQ ID NO: 404687 - protein, 15 aa, Homo sapiens
  CDR3 for alpha chain variable domain of TCR clone 202344 (TRAV27, TRAJ38)
CAARRNAGNNRKLIW

SEQ ID NO: 404688 - protein, 17 aa, Homo sapiens
  CDR3 for beta chain variable domain of TCR clone 202344 (TRBV12-4, TRBJ2-3)
CASSGPGLAGGADTQYF

SEQ ID NO: 404689 - protein, 17 aa, Homo sapiens
  CDR3 for alpha chain variable domain of TCR clone 202345 (TRAV3, TRAJ6)
CAVRYGPRAGGSYIPTF

SEQ ID NO: 404690 - protein, 20 aa, Homo sapiens
  CDR3 for beta chain variable domain of TCR clone 202345 (TRBV28, TRBJ2-1)
CASTRIGRSPGLAGGNEQFF

SEQ ID NO: 404691 - protein, 18 aa, Homo sapiens
  CDR3 for alpha chain variable domain of TCR clone 202346 (TRAV26-1, TRAJ22)
CIVRVALISSGSARQLTF

SEQ ID NO: 404692 - protein, 13 aa, Homo sapiens
  CDR3 for beta chain variable domain of TCR clone 202346 (TRBV11-2, TRBJ2-7)
CASSGTRPYEQYF

SEQ ID NO: 404693 - protein, 16 aa, Homo sapiens
  CDR3 for alpha chain variable domain of TCR clone 202347 (TRAV3, TRAJ37)
CAVRGKGSGNTGKLIL

SEQ ID NO: 404694 - protein, 13 aa, Homo sapiens
  CDR3 for beta chain variable domain of TCR clone 202347 (TRBV20-1, TRBJ1-1)
CSARGGGNTEAFF

SEQ ID NO: 404695 - protein, 14 aa, Homo sapiens
  CDR3 for alpha chain variable domain of TCR clone 202348 (TRAV23/DV6, TRAJ39)
CAASIGNAGNMLTF

SEQ ID NO: 404696 - protein, 12 aa, Homo sapiens
  CDR3 for beta chain variable domain of TCR clone 202348 (TRBV20-1, TRBJ2-5)
CSVGTGSEIQYF

SEQ ID NO: 404697 - protein, 15 aa, Homo sapiens
  CDR3 for alpha chain variable domain of TCR clone 202349 (TRAV12-1, TRAJ44)
CVVFVNTGTASKLTF

SEQ ID NO: 404698 - protein, 15 aa, Homo sapiens
  CDR3 for beta chain variable domain of TCR clone 202349 (TRBV10-3, TRBJ2-3)
CAISLTSGGTDTQYF

SEQ ID NO: 404699 - protein, 12 aa, Homo sapiens
  CDR3 for alpha chain variable domain of TCR clone 202350 (TRAV3, TRAJ43)
CAVRDPTNDMRF

SEQ ID NO: 404700 - protein, 15 aa, Homo sapiens
  CDR3 for beta chain variable domain of TCR clone 202350 (TRBV27, TRBJ1-5)
CASSLGTGFDQPQHF

SEQ ID NO: 404701 - protein, 14 aa, Homo sapiens
  CDR3 for alpha chain variable domain of TCR clone 202351 (TRAV1-2, TRAJ16)
CAVNRFSDGQKLLF

SEQ ID NO: 404702 - protein, 16 aa, Homo sapiens
  CDR3 for beta chain variable domain of TCR clone 202351 (TRBV20-1, TRBJ1-2)
CSASMGQGVASYGYTF

SEQ ID NO: 404703 - protein, 16 aa, Homo sapiens
  CDR3 for alpha chain variable domain of TCR clone 202352 (TRAV14/DV4, TRAJ54)
CAMREGRIQGAQKLVF

SEQ ID NO: 404704 - protein, 15 aa, Homo sapiens
  CDR3 for beta chain variable domain of TCR clone 202352 (TRBV18, TRBJ2-7)
CASSPRSGTAYEQYF

SEQ ID NO: 404705 - protein, 13 aa, Homo sapiens
  CDR3 for alpha chain variable domain of TCR clone 202353 (TRAV36/DV7, TRAJ49)
CAGDSNTGNQFYF

SEQ ID NO: 404706 - protein, 12 aa, Homo sapiens
  CDR3 for beta chain variable domain of TCR clone 202353 (TRBV11-2, TRBJ2-2)
CASSRGGGELFF

SEQ ID NO: 404707 - protein, 11 aa, Homo sapiens
  CDR3 for alpha chain variable domain of TCR clone 202354 (TRAV25, TRAJ39)
CENNAGNMLTF

SEQ ID NO: 404708 - protein, 13 aa, Homo sapiens
  CDR3 for beta chain variable domain of TCR clone 202354 (TRBV5-5, TRBJ1-2)
CASSFWRGEDYSF

SEQ ID NO: 404709 - protein, 14 aa, Homo sapiens
  CDR3 for alpha chain variable domain of TCR clone 202355 (TRAV35, TRAJ50)
YAGHRKTSYDKVIF

SEQ ID NO: 404710 - protein, 13 aa, Homo sapiens
  CDR3 for beta chain variable domain of TCR clone 202355 (TRBV7-7, TRBJ2-3)
CASSLSRADTQDF

SEQ ID NO: 404711 - protein, 13 aa, Homo sapiens
  CDR3 for alpha chain variable domain of TCR clone 202356 (TRAV12-3, TRAJ13)
CAMSSGGYQKVTF

SEQ ID NO: 404712 - protein, 14 aa, Homo sapiens
  CDR3 for beta chain variable domain of TCR clone 202356 (TRBV4-2, TRBJ2-1)
CASGLDRAYNEQFF

SEQ ID NO: 404713 - protein, 15 aa, Homo sapiens
  CDR3 for alpha chain variable domain of TCR clone 202357 (TRAV8-4, TRAJ29)
CAVSEDFRGKTPLVF

SEQ ID NO: 404714 - protein, 12 aa, Homo sapiens
  CDR3 for beta chain variable domain of TCR clone 202357 (TRBV14, TRBJ2-7)
CASSSLKGEQYI

SEQ ID NO: 404715 - protein, 12 aa, Homo sapiens
  CDR3 for alpha chain variable domain of TCR clone 202358 (TRAV27, TRAJ9)
CAGESGGFKTIF

SEQ ID NO: 404716 - protein, 14 aa, Homo sapiens
  CDR3 for beta chain variable domain of TCR clone 202358 (TRBV6-1, TRBJ2-1)
CASANDGFYNEQFF

SEQ ID NO: 404717 - protein, 15 aa, Homo sapiens
  CDR3 for alpha chain variable domain of TCR clone 202359 (TRAV12-3, TRAJ42)
CATSGHGGSQGNLIF

SEQ ID NO: 404718 - protein, 13 aa, Homo sapiens
  CDR3 for beta chain variable domain of TCR clone 202359 (TRBV19, TRBJ2-5)
CASSGRAGETQYF

SEQ ID NO: 404719 - protein, 13 aa, Homo sapiens
  CDR3 for alpha chain variable domain of TCR clone 202360 (TRAV12-1, TRAJ35)
CVVRGGFGNVLHC

SEQ ID NO: 404720 - protein, 13 aa, Homo sapiens
  CDR3 for beta chain variable domain of TCR clone 202360 (TRBV19, TRBJ2-1)
CASTSSDVGEQFF

SEQ ID NO: 404721 - protein, 13 aa, Homo sapiens
  CDR3 for alpha chain variable domain of TCR clone 202361 (TRAV20, TRAJ34)
CAVRSYNTDKLIF

SEQ ID NO: 404722 - protein, 13 aa, Homo sapiens
  CDR3 for beta chain variable domain of TCR clone 202361 (TRBV20-1, TRBJ1-1)
CSARGGGNTEAFF

SEQ ID NO: 404723 - protein, 14 aa, Homo sapiens
  CDR3 for alpha chain variable domain of TCR clone 202362 (TRAV23/DV6, TRAJ4)
CATNLSGGYNKLIF

SEQ ID NO: 404724 - protein, 11 aa, Homo sapiens
  CDR3 for beta chain variable domain of TCR clone 202362 (TRBV7-9, TRBJ2-3)
CASSPTDTQYF

SEQ ID NO: 404725 - protein, 15 aa, Homo sapiens
  CDR3 for alpha chain variable domain of TCR clone 202363 (TRAV4, TRAJ39)
CLVGPNNSAGNMLTF

SEQ ID NO: 404726 - protein, 16 aa, Homo sapiens
  CDR3 for beta chain variable domain of TCR clone 202363 (TRBV13, TRBJ2-2)
RASSPRTGEHTGELFF

SEQ ID NO: 404727 - protein, 14 aa, Homo sapiens
  CDR3 for alpha chain variable domain of TCR clone 202364 (TRAV12-2, TRAJ5)
CAVNGSTGRRALTF

SEQ ID NO: 404728 - protein, 14 aa, Homo sapiens
  CDR3 for beta chain variable domain of TCR clone 202364 (TRBV6-6, TRBJ1-4)
CASRTDREYEKLFF

SEQ ID NO: 404729 - protein, 11 aa, Homo sapiens
  CDR3 for alpha chain variable domain of TCR clone 202365 (TRAV23/DV6, TRAJ58)
CAARLLRGETS

SEQ ID NO: 404730 - protein, 13 aa, Homo sapiens
  CDR3 for beta chain variable domain of TCR clone 202365 (TRBV7-9, TRBJ2-7)
CASSFAGAYEQYF

SEQ ID NO: 404731 - protein, 12 aa, Homo sapiens
  CDR3 for alpha chain variable domain of TCR clone 202366 (TRAV12-3, TRAJ5)
CAMDTGRRALTF

SEQ ID NO: 404732 - protein, 17 aa, Homo sapiens
  CDR3 for beta chain variable domain of TCR clone 202366 (TRBV11-2, TRBJ2-1)
CASSLYPPGVEYNEQFF

SEQ ID NO: 404733 - protein, 16 aa, Homo sapiens
  CDR3 for alpha chain variable domain of TCR clone 202367 (TRAV3, TRAJ37)
CAVRPHGSGNTGKLIF

SEQ ID NO: 404734 - protein, 14 aa, Homo sapiens
  CDR3 for beta chain variable domain of TCR clone 202367 (TRBV5-5, TRBJ2-7)
CASSLGQGTYEQYF

SEQ ID NO: 404735 - protein, 16 aa, Homo sapiens
  CDR3 for alpha chain variable domain of TCR clone 202368 (TRAV3, TRAJ10)
CAVRDMRAGGGNKLTF

SEQ ID NO: 404736 - protein, 15 aa, Homo sapiens
  CDR3 for beta chain variable domain of TCR clone 202368 (TRBV6-4, TRBJ2-1)
CASSSGTSGYNEQFF

SEQ ID NO: 404737 - protein, 12 aa, Homo sapiens
  CDR3 for alpha chain variable domain of TCR clone 202369 (TRAV3, TRAJ43)
CAVRDPNNDMSF

SEQ ID NO: 404738 - protein, 15 aa, Homo sapiens
  CDR3 for beta chain variable domain of TCR clone 202369 (TRBV6-5, TRBJ2-1)
CASSYDAGAGNEQFF

SEQ ID NO: 404739 - protein, 15 aa, Homo sapiens
  CDR3 for alpha chain variable domain of TCR clone 202370 (TRAV3, TRAJ42)
CAVRGDTGSQGNLIF

SEQ ID NO: 404740 - protein, 14 aa, Homo sapiens
  CDR3 for beta chain variable domain of TCR clone 202370 (TRBV19, TRBJ1-2)
CASSSLFARDVYTF

SEQ ID NO: 404741 - protein, 15 aa, Homo sapiens
  CDR3 for alpha chain variable domain of TCR clone 202371 (TRAV34, TRAJ38)
CGADFTPGNNRKLIW

SEQ ID NO: 404742 - protein, 15 aa, Homo sapiens
  CDR3 for beta chain variable domain of TCR clone 202371 (TRBV11-2, TRBJ1-6)
CASSLDPWAVSPLHF

SEQ ID NO: 404743 - protein, 14 aa, Homo sapiens
  CDR3 for alpha chain variable domain of TCR clone 202372 (TRAV12-3, TRAJ10)
SHLPLTGGGNKLTF

SEQ ID NO: 404744 - protein, 13 aa, Homo sapiens
  CDR3 for beta chain variable domain of TCR clone 202372 (TRBV13, TRBJ2-7)
CASSLERGWKKYF

SEQ ID NO: 404745 - protein, 18 aa, Homo sapiens
  CDR3 for alpha chain variable domain of TCR clone 202373 (TRAV21, TRAJ52)
CAVRPSPAGGTSYGKLKF

SEQ ID NO: 404746 - protein, 17 aa, Homo sapiens
  CDR3 for beta chain variable domain of TCR clone 202373 (TRBV4-1, TRBJ1-4)
CASSQEGPRGVEEKLFF

SEQ ID NO: 404747 - protein, 15 aa, Homo sapiens
  CDR3 for alpha chain variable domain of TCR clone 202374 (TRAV13-1, TRAJ43)
CAATPELGGNSDIRF

SEQ ID NO: 404748 - protein, 15 aa, Homo sapiens
  CDR3 for beta chain variable domain of TCR clone 202374 (TRBV10-2, TRBJ2-6)
CASSEQGTGANVLTF

SEQ ID NO: 404749 - protein, 12 aa, Homo sapiens
  CDR3 for alpha chain variable domain of TCR clone 202375 (TRAV12-3, TRAJ17)
CAMTLTCNKLTF

SEQ ID NO: 404750 - protein, 15 aa, Homo sapiens
  CDR3 for beta chain variable domain of TCR clone 202375 (TRBV20-1, TRBJ2-7)
RSARDRVSGMDEQYF

SEQ ID NO: 404751 - protein, 13 aa, Homo sapiens
  CDR3 for alpha chain variable domain of TCR clone 202376 (TRAV26-1, TRAJ35)
CIVSRRVGEMLHC

SEQ ID NO: 404752 - protein, 17 aa, Homo sapiens
  CDR3 for beta chain variable domain of TCR clone 202376 (TRBV7-9, TRBJ2-7)
CASSFVGSRGGAYEQYF

SEQ ID NO: 404753 - protein, 14 aa, Homo sapiens
  CDR3 for alpha chain variable domain of TCR clone 202377 (TRAV26-1, TRAJ38)
CIADNAGNNRKLIW

SEQ ID NO: 404754 - protein, 12 aa, Homo sapiens
  CDR3 for beta chain variable domain of TCR clone 202377 (TRBV5-1, TRBJ2-7)
CASSFGGYEQYF

SEQ ID NO: 404755 - protein, 12 aa, Homo sapiens
  CDR3 for alpha chain variable domain of TCR clone 202378 (TRAV25, TRAJ16)
CAGQQDGQKLLF

SEQ ID NO: 404756 - protein, 14 aa, Homo sapiens
  CDR3 for beta chain variable domain of TCR clone 202378 (TRBV12-4, TRBJ2-1)
CASSLGQGAYEQFF

SEQ ID NO: 404757 - protein, 11 aa, Homo sapiens
  CDR3 for alpha chain variable domain of TCR clone 202379 (TRAV21, TRAJ34)
CAHYNTDKLIS

SEQ ID NO: 404758 - protein, 16 aa, Homo sapiens
  CDR3 for beta chain variable domain of TCR clone 202379 (TRBV7-2, TRBJ2-7)
CASSRPGTGLVHEQYF

SEQ ID NO: 404759 - protein, 17 aa, Homo sapiens
  CDR3 for alpha chain variable domain of TCR clone 202380 (TRAV38-2/DV8, TRAJ28)
CAFLTLYFGAGSYQLTF

SEQ ID NO: 404760 - protein, 14 aa, Homo sapiens
  CDR3 for beta chain variable domain of TCR clone 202380 (TRBV7-2, TRBJ2-5)
CASSLSGGGETQYF

SEQ ID NO: 404761 - protein, 11 aa, Homo sapiens
  CDR3 for alpha chain variable domain of TCR clone 202381 (TRAV13-1, TRAJ5)
CAPKGRRALTL

SEQ ID NO: 404762 - protein, 17 aa, Homo sapiens
  CDR3 for beta chain variable domain of TCR clone 202381 (TRBV28, TRBJ2-5)
CASSTPEGDALQETQYF

SEQ ID NO: 404763 - protein, 16 aa, Homo sapiens
  CDR3 for alpha chain variable domain of TCR clone 202382 (TRAV35, TRAJ28)
CAGQKYSGAGSYQPTF

SEQ ID NO: 404764 - protein, 16 aa, Homo sapiens
  CDR3 for beta chain variable domain of TCR clone 202382 (TRBV7-3, TRBJ2-2)
CASSLKRGTLSGELFF

SEQ ID NO: 404765 - protein, 13 aa, Homo sapiens
  CDR3 for alpha chain variable domain of TCR clone 202383 (TRAV3, TRAJ27)
CAVRPLDAGKSTF

SEQ ID NO: 404766 - protein, 12 aa, Homo sapiens
  CDR3 for beta chain variable domain of TCR clone 202383 (TRBV6-1, TRBJ2-7)
CASSDYSYEQYF

SEQ ID NO: 404767 - protein, 13 aa, Homo sapiens
  CDR3 for alpha chain variable domain of TCR clone 202384 (TRAV21, TRAJ27)
CAARPGNAGKSTF

SEQ ID NO: 404768 - protein, 14 aa, Homo sapiens
  CDR3 for beta chain variable domain of TCR clone 202384 (TRBV11-2, TRBJ2-7)
CASSLGAGAYEEYF

SEQ ID NO: 404769 - protein, 12 aa, Homo sapiens
  CDR3 for alpha chain variable domain of TCR clone 202385 (TRAV12-2, TRAJ10)
WGVTGGGNKLPF

SEQ ID NO: 404770 - protein, 14 aa, Homo sapiens
  CDR3 for beta chain variable domain of TCR clone 202385 (TRBV27, TRBJ2-7)
CASATGTERREQYF

SEQ ID NO: 404771 - protein, 12 aa, Homo sapiens
  CDR3 for alpha chain variable domain of TCR clone 202386 (TRAV36/DV7, TRAJ26)
CAVDNYGQNFVF

SEQ ID NO: 404772 - protein, 16 aa, Homo sapiens
  CDR3 for beta chain variable domain of TCR clone 202386 (TRBV7-3, TRBJ2-2)
WASSLTGTGTTGELFF

SEQ ID NO: 404773 - protein, 14 aa, Homo sapiens
  CDR3 for alpha chain variable domain of TCR clone 202387 (TRAV1-1, TRAJ27)
CAVIYNTNAGKSTL

SEQ ID NO: 404774 - protein, 13 aa, Homo sapiens
  CDR3 for beta chain variable domain of TCR clone 202387 (TRBV12-5, TRBJ1-2)
CASGVRTGNGYTF

SEQ ID NO: 404775 - protein, 11 aa, Homo sapiens
  CDR3 for alpha chain variable domain of TCR clone 202388 (TRAV1-2, TRAJ20)
CAVSNDYKLSF

SEQ ID NO: 404776 - protein, 13 aa, Homo sapiens
  CDR3 for beta chain variable domain of TCR clone 202388 (TRBV19, TRBJ2-7)
CASSIDRTYEQYF

SEQ ID NO: 404777 - protein, 11 aa, Homo sapiens
  CDR3 for alpha chain variable domain of TCR clone 202389 (TRAV12-1, TRAJ43)
CVVIRNNDMRF

SEQ ID NO: 404778 - protein, 14 aa, Homo sapiens
  CDR3 for beta chain variable domain of TCR clone 202389 (TRBV7-3, TRBJ2-1)
CASSLAGGTNEQFF

SEQ ID NO: 404779 - protein, 14 aa, Homo sapiens
  CDR3 for alpha chain variable domain of TCR clone 202390 (TRAV25, TRAJ35)
CARRMEGFGNVLHC

SEQ ID NO: 404780 - protein, 16 aa, Homo sapiens
  CDR3 for beta chain variable domain of TCR clone 202390 (TRBV28, TRBJ2-7)
CASSFPDRRLTYEQYF

SEQ ID NO: 404781 - protein, 14 aa, Homo sapiens
  CDR3 for alpha chain variable domain of TCR clone 202391 (TRAV12-3, TRAJ39)
SATYLSNAGNMLTF

SEQ ID NO: 404782 - protein, 13 aa, Homo sapiens
  CDR3 for beta chain variable domain of TCR clone 202391 (TRBV28, TRBJ1-2)
CAGSPGNRNGYTF

SEQ ID NO: 404783 - protein, 13 aa, Homo sapiens
  CDR3 for alpha chain variable domain of TCR clone 202392 (TRAV27, TRAJ45)
CRSSGGGAAGLTF

SEQ ID NO: 404784 - protein, 17 aa, Homo sapiens
  CDR3 for beta chain variable domain of TCR clone 202392 (TRBV10-3, TRBJ2-4)
CTSVPSVNKGSKNIQYF

SEQ ID NO: 404785 - protein, 23 aa, Homo sapiens
  CDR3 for alpha chain variable domain of TCR clone 202393 (TRAV2, TRAJ9)
CAVEDRGTGGFKLSLEQEQDYLL

SEQ ID NO: 404786 - protein, 16 aa, Homo sapiens
  CDR3 for beta chain variable domain of TCR clone 202393 (TRBV24-1, TRBJ2-3)
CATSDPGTGATDTQYF

SEQ ID NO: 404787 - protein, 16 aa, Homo sapiens
  CDR3 for alpha chain variable domain of TCR clone 202394 (TRAV23/DV6, TRAJ9)
CAASIGGNTGGFKTIF

SEQ ID NO: 404788 - protein, 10 aa, Homo sapiens
  CDR3 for beta chain variable domain of TCR clone 202394 (TRBV24-1, TRBJ2-2)
CATSEADLER

SEQ ID NO: 404789 - protein, 19 aa, Homo sapiens
  CDR3 for alpha chain variable domain of TCR clone 202395 (TRAV38-1, TRAJ53)
CAFMKHGLESGGSNYKLTF

SEQ ID NO: 404790 - protein, 11 aa, Homo sapiens
  CDR3 for beta chain variable domain of TCR clone 202395 (TRBV29-1, TRBJ1-1)
CSVEVNVITFF

SEQ ID NO: 404791 - protein, 16 aa, Homo sapiens
  CDR3 for alpha chain variable domain of TCR clone 202396 (TRAV23/DV6, TRAJ9)
CAASIGGNTGGFKTIF

SEQ ID NO: 404792 - protein, 14 aa, Homo sapiens
  CDR3 for beta chain variable domain of TCR clone 202396 (TRBV19, TRBJ2-5)
CASSSSGIQETQYC

SEQ ID NO: 404793 - protein, 13 aa, Homo sapiens
  CDR3 for alpha chain variable domain of TCR clone 202397 (TRAV20, TRAJ49)
CAVQVRTGNQSYF

SEQ ID NO: 404794 - protein, 14 aa, Homo sapiens
  CDR3 for beta chain variable domain of TCR clone 202397 (TRBV5-1, TRBJ1-1)
CASSLQGASTEAFF

SEQ ID NO: 404795 - protein, 12 aa, Homo sapiens
  CDR3 for alpha chain variable domain of TCR clone 202398 (TRAV3, TRAJ26)
CAVRDYGQNFVF

SEQ ID NO: 404796 - protein, 13 aa, Homo sapiens
  CDR3 for beta chain variable domain of TCR clone 202398 (TRBV7-3, TRBJ2-5)
CASSFRGGETQYF

SEQ ID NO: 404797 - protein, 14 aa, Homo sapiens
  CDR3 for alpha chain variable domain of TCR clone 202399 (TRAV23/DV6, TRAJ57)
CAASKQGGSEKPVF

SEQ ID NO: 404798 - protein, 13 aa, Homo sapiens
  CDR3 for beta chain variable domain of TCR clone 202399 (TRBV11-2, TRBJ2-7)
CASSSYPSYEQYF

SEQ ID NO: 404799 - protein, 14 aa, Homo sapiens
  CDR3 for alpha chain variable domain of TCR clone 202400 (TRAV1-2, TRAJ16)
CAVNRFSDGQKLLF

SEQ ID NO: 404800 - protein, 15 aa, Homo sapiens
  CDR3 for beta chain variable domain of TCR clone 202400 (TRBV7-6, TRBJ2-5)
CASSSGLAGVETQYF

SEQ ID NO: 404801 - protein, 14 aa, Homo sapiens
  CDR3 for alpha chain variable domain of TCR clone 202401 (TRAV29/DV5, TRAJ36)
CPARRKTGANNLFF

SEQ ID NO: 404802 - protein, 14 aa, Homo sapiens
  CDR3 for beta chain variable domain of TCR clone 202401 (TRBV12-5, TRBJ2-5)
CASGSRTHQETQYF

SEQ ID NO: 404803 - protein, 15 aa, Homo sapiens
  CDR3 for alpha chain variable domain of TCR clone 202402 (TRAV40, TRAJ56)
CLLHPDTGANSKLTF

SEQ ID NO: 404804 - protein, 14 aa, Homo sapiens
  CDR3 for beta chain variable domain of TCR clone 202402 (TRBV12-5, TRBJ2-5)
CASGSRTHQETQYF

SEQ ID NO: 404805 - protein, 12 aa, Homo sapiens
  CDR3 for alpha chain variable domain of TCR clone 202403 (TRAV27, TRAJ37)
CADSGNTGKLIF

SEQ ID NO: 404806 - protein, 13 aa, Homo sapiens
  CDR3 for beta chain variable domain of TCR clone 202403 (TRBV12-4, TRBJ1-2)
CASSLRQGKGYTF

SEQ ID NO: 404807 - protein, 14 aa, Homo sapiens
  CDR3 for alpha chain variable domain of TCR clone 202404 (TRAV8-1, TRAJ5)
CAVRTDTGRKHLLL

SEQ ID NO: 404808 - protein, 12 aa, Homo sapiens
  CDR3 for beta chain variable domain of TCR clone 202404 (TRBV11-2, TRBJ2-1)
CASSPGNNEQFF

SEQ ID NO: 404809 - protein, 15 aa, Homo sapiens
  CDR3 for alpha chain variable domain of TCR clone 202405 (TRAV13-1, TRAJ52)
CAASSPSTSYGKLTF

SEQ ID NO: 404810 - protein, 14 aa, Homo sapiens
  CDR3 for beta chain variable domain of TCR clone 202405 (TRBV12-5, TRBJ2-5)
CASGSRTHQETQYF

SEQ ID NO: 404811 - protein, 23 aa, Homo sapiens
  CDR3 for alpha chain variable domain of TCR clone 202406 (TRAV12-1, TRAJ23)
SSVIQPPTSVWWYGDNQGGKLIF

SEQ ID NO: 404812 - protein, 20 aa, Homo sapiens
  CDR3 for beta chain variable domain of TCR clone 202406 (TRBV7-8, TRBJ2-2)
CASSHLFPGPTIHITGELFF

SEQ ID NO: 404813 - protein, 11 aa, Homo sapiens
  CDR3 for alpha chain variable domain of TCR clone 202407 (TRAV3, TRAJ21)
CAVGNFNKFYF

SEQ ID NO: 404814 - protein, 12 aa, Homo sapiens
  CDR3 for beta chain variable domain of TCR clone 202407 (TRBV12-4, TRBJ2-1)
CVSSLVRVEQFF

SEQ ID NO: 404815 - protein, 13 aa, Homo sapiens
  CDR3 for alpha chain variable domain of TCR clone 202408 (TRAV8-3, TRAJ4)
WVFYSGGYNKLIF

SEQ ID NO: 404816 - protein, 15 aa, Homo sapiens
  CDR3 for beta chain variable domain of TCR clone 202408 (TRBV7-9, TRBJ2-5)
CASSRRTGGGETQYF

SEQ ID NO: 404817 - protein, 13 aa, Homo sapiens
  CDR3 for alpha chain variable domain of TCR clone 202409 (TRAV26-1, TRAJ29)
CIVRRSGNTPLVC

SEQ ID NO: 404818 - protein, 16 aa, Homo sapiens
  CDR3 for beta chain variable domain of TCR clone 202409 (TRBV11-2, TRBJ2-7)
CASSLAPTGVNYEQYF

SEQ ID NO: 404819 - protein, 14 aa, Homo sapiens
  CDR3 for alpha chain variable domain of TCR clone 202410 (TRAV1-2, TRAJ8)
CAVREDTGFQKLLF

SEQ ID NO: 404820 - protein, 15 aa, Homo sapiens
  CDR3 for beta chain variable domain of TCR clone 202410 (TRBV6-6, TRBJ2-3)
CASSFTGGKADTQYF

SEQ ID NO: 404821 - protein, 15 aa, Homo sapiens
  CDR3 for alpha chain variable domain of TCR clone 202411 (TRAV20, TRAJ53)
CAVQASGGSNYKLTF

SEQ ID NO: 404822 - protein, 12 aa, Homo sapiens
  CDR3 for beta chain variable domain of TCR clone 202411 (TRBV7-8, TRBJ2-7)
CVSSLGDREQYF

SEQ ID NO: 404823 - protein, 17 aa, Homo sapiens
  CDR3 for alpha chain variable domain of TCR clone 202412 (TRAV23/DV6, TRAJ58)
CASRLLRGETSGSRLTF

SEQ ID NO: 404824 - protein, 13 aa, Homo sapiens
  CDR3 for beta chain variable domain of TCR clone 202412 (TRBV6-4, TRBJ1-5)
CASSADLNQPQHF

SEQ ID NO: 404825 - protein, 13 aa, Homo sapiens
  CDR3 for alpha chain variable domain of TCR clone 202413 (TRAV8-3, TRAJ48)
CAVVPFGNEKLTF

SEQ ID NO: 404826 - protein, 15 aa, Homo sapiens
  CDR3 for beta chain variable domain of TCR clone 202413 (TRBV11-2, TRBJ2-1)
CTSSSPSTRYNEQFF

SEQ ID NO: 404827 - protein, 13 aa, Homo sapiens
  CDR3 for alpha chain variable domain of TCR clone 202414 (TRAV26-2, TRAJ43)
CILRAVNNNDMRF

SEQ ID NO: 404828 - protein, 14 aa, Homo sapiens
  CDR3 for beta chain variable domain of TCR clone 202414 (TRBV4-1, TRBJ2-2)
CASSQAVNTGELSF

SEQ ID NO: 404829 - protein, 11 aa, Homo sapiens
  CDR3 for alpha chain variable domain of TCR clone 202415 (TRAV12-1, TRAJ26)
CVVAYGQNFVF

SEQ ID NO: 404830 - protein, 13 aa, Homo sapiens
  CDR3 for beta chain variable domain of TCR clone 202415 (TRBV7-2, TRBJ2-4)
CASSREHSNIQYF

SEQ ID NO: 404831 - protein, 13 aa, Homo sapiens
  CDR3 for alpha chain variable domain of TCR clone 202416 (TRAV12-2, TRAJ20)
CAVNRFDDYKLSF

SEQ ID NO: 404832 - protein, 13 aa, Homo sapiens
  CDR3 for beta chain variable domain of TCR clone 202416 (TRBV18, TRBJ1-1)
CASSGGRNTEAFS

SEQ ID NO: 404833 - protein, 13 aa, Homo sapiens
  CDR3 for alpha chain variable domain of TCR clone 202417 (TRAV39, TRAJ49)
CAVDRNTGNQFYF

SEQ ID NO: 404834 - protein, 15 aa, Homo sapiens
  CDR3 for beta chain variable domain of TCR clone 202417 (TRBV19, TRBJ2-1)
CASSIVRGEGREQFF

SEQ ID NO: 404835 - protein, 14 aa, Homo sapiens
  CDR3 for alpha chain variable domain of TCR clone 202418 (TRAV13-2, TRAJ41)
CAERPDWAGYALNF

SEQ ID NO: 404836 - protein, 16 aa, Homo sapiens
  CDR3 for beta chain variable domain of TCR clone 202418 (TRBV9, TRBJ2-3)
CASSGTSGKDTETQYF

SEQ ID NO: 404837 - protein, 14 aa, Homo sapiens
  CDR3 for alpha chain variable domain of TCR clone 202419 (TRAV17, TRAJ57)
CATDPQGGSAKLVF

SEQ ID NO: 404838 - protein, 18 aa, Homo sapiens
  CDR3 for beta chain variable domain of TCR clone 202419 (TRBV6-6, TRBJ1-3)
CASSYSKWDSISGDTIYF

SEQ ID NO: 404839 - protein, 13 aa, Homo sapiens
  CDR3 for alpha chain variable domain of TCR clone 202420 (TRAV1-2, TRAJ9)
CAALNTGGFKTIF

SEQ ID NO: 404840 - protein, 13 aa, Homo sapiens
  CDR3 for beta chain variable domain of TCR clone 202420 (TRBV5-1, TRBJ2-7)
CASIGTDSYEQYF

SEQ ID NO: 404841 - protein, 15 aa, Homo sapiens
  CDR3 for alpha chain variable domain of TCR clone 202421 (TRAV12-3, TRAJ6)
CAVSATTGGSYIPTF

SEQ ID NO: 404842 - protein, 15 aa, Homo sapiens
  CDR3 for beta chain variable domain of TCR clone 202421 (TRBV7-6, TRBJ1-5)
CASSQSSGINQPQHF

SEQ ID NO: 404843 - protein, 15 aa, Homo sapiens
  CDR3 for alpha chain variable domain of TCR clone 202422 (TRAV12-1, TRAJ10)
CVVNKLTGGGNKLIF

SEQ ID NO: 404844 - protein, 17 aa, Homo sapiens
  CDR3 for beta chain variable domain of TCR clone 202422 (TRBV5-1, TRBJ1-6)
CASSPSLQVSDNSPLHF

SEQ ID NO: 404845 - protein, 11 aa, Homo sapiens
  CDR3 for alpha chain variable domain of TCR clone 202423 (TRAV21, TRAJ11)
CAANGYSTLTF

SEQ ID NO: 404846 - protein, 11 aa, Homo sapiens
  CDR3 for beta chain variable domain of TCR clone 202423 (TRBV19, TRBJ1-1)
CASSIVSEAFF

SEQ ID NO: 404847 - protein, 12 aa, Homo sapiens
  CDR3 for alpha chain variable domain of TCR clone 202424 (TRAV13-2, TRAJ42)
CAEGGSQGNLIF

SEQ ID NO: 404848 - protein, 13 aa, Homo sapiens
  CDR3 for beta chain variable domain of TCR clone 202424 (TRBV27, TRBJ2-1)
FASSLSRSHEQFV

SEQ ID NO: 404849 - protein, 17 aa, Homo sapiens
  CDR3 for alpha chain variable domain of TCR clone 202425 (TRAV3, TRAJ42)
CAVRDRGYGGSQGNLIF

SEQ ID NO: 404850 - protein, 20 aa, Homo sapiens
  CDR3 for beta chain variable domain of TCR clone 202425 (TRBV28, TRBJ2-1)
CASTPIGRSPGLAGGNEQFF

SEQ ID NO: 404851 - protein, 12 aa, Homo sapiens
  CDR3 for alpha chain variable domain of TCR clone 202426 (TRAV1-2, TRAJ42)
CVAGGSQGNLIF

SEQ ID NO: 404852 - protein, 18 aa, Homo sapiens
  CDR3 for beta chain variable domain of TCR clone 202426 (TRBV7-3, TRBJ2-1)
CASSLTLASGRAMVSSSS

SEQ ID NO: 404853 - protein, 18 aa, Homo sapiens
  CDR3 for alpha chain variable domain of TCR clone 202427 (TRAV26-1, TRAJ23)
CIVSVGLEVWNQGGKLIF

SEQ ID NO: 404854 - protein, 15 aa, Homo sapiens
  CDR3 for beta chain variable domain of TCR clone 202427 (TRBV19, TRBJ1-1)
CASTSGQIQNTEAFF

SEQ ID NO: 404855 - protein, 12 aa, Homo sapiens
  CDR3 for alpha chain variable domain of TCR clone 202428 (TRAV13-2, TRAJ23)
CAESHRGGKLIF

SEQ ID NO: 404856 - protein, 15 aa, Homo sapiens
  CDR3 for beta chain variable domain of TCR clone 202428 (TRBV4-1, TRBJ1-4)
CASSDTGGTNEKLFF

SEQ ID NO: 404857 - protein, 14 aa, Homo sapiens
  CDR3 for alpha chain variable domain of TCR clone 202429 (TRAV1-2, TRAJ10)
CAVRVTRGGNKLTF

SEQ ID NO: 404858 - protein, 12 aa, Homo sapiens
  CDR3 for beta chain variable domain of TCR clone 202429 (TRBV5-4, TRBJ1-1)
CASSVGQTEAFF

SEQ ID NO: 404859 - protein, 14 aa, Homo sapiens
  CDR3 for alpha chain variable domain of TCR clone 202430 (TRAV30, TRAJ33)
CGTVAPRSNYQLIW

SEQ ID NO: 404860 - protein, 16 aa, Homo sapiens
  CDR3 for beta chain variable domain of TCR clone 202430 (TRBV3-1, TRBJ2-5)
CASSPGQFNGCGTQYF

SEQ ID NO: 404861 - protein, 14 aa, Homo sapiens
  CDR3 for alpha chain variable domain of TCR clone 202431 (TRAV2, TRAJ29)
CAGPFQYGNTPLVF

SEQ ID NO: 404862 - protein, 15 aa, Homo sapiens
  CDR3 for beta chain variable domain of TCR clone 202431 (TRBV18, TRBJ2-7)
CASSPLQGRTYEQYF

SEQ ID NO: 404863 - protein, 14 aa, Homo sapiens
  CDR3 for alpha chain variable domain of TCR clone 202432 (TRAV16, TRAJ54)
CALSLIQGAQKLVF

SEQ ID NO: 404864 - protein, 14 aa, Homo sapiens
  CDR3 for beta chain variable domain of TCR clone 202432 (TRBV12-5, TRBJ2-5)
CASGSRTHQETQYF

SEQ ID NO: 404865 - protein, 13 aa, Homo sapiens
  CDR3 for alpha chain variable domain of TCR clone 202433 (TRAV12-3, TRAJ7)
CAMSASGTNRLAF

SEQ ID NO: 404866 - protein, 14 aa, Homo sapiens
  CDR3 for beta chain variable domain of TCR clone 202433 (TRBV13, TRBJ2-5)
CASSLGPRGETQYF

SEQ ID NO: 404867 - protein, 15 aa, Homo sapiens
  CDR3 for alpha chain variable domain of TCR clone 202434 (TRAV35, TRAJ40)
CAGQLGTSGTYKYIF

SEQ ID NO: 404868 - protein, 14 aa, Homo sapiens
  CDR3 for beta chain variable domain of TCR clone 202434 (TRBV7-3, TRBJ2-7)
CASSLAGGTNEQFF

SEQ ID NO: 404869 - protein, 15 aa, Homo sapiens
  CDR3 for alpha chain variable domain of TCR clone 202435 (TRAV17, TRAJ57)
CATGPSPGGSEKPVF

SEQ ID NO: 404870 - protein, 16 aa, Homo sapiens
  CDR3 for beta chain variable domain of TCR clone 202435 (TRBV12-4, TRBJ1-5)
CASSRPVGGSNQPQHF

SEQ ID NO: 404871 - protein, 15 aa, Homo sapiens
  CDR3 for alpha chain variable domain of TCR clone 202436 (TRAV13-1, TRAJ32)
CAASIYGGATNKLIF

SEQ ID NO: 404872 - protein, 15 aa, Homo sapiens
  CDR3 for beta chain variable domain of TCR clone 202436 (TRBV7-9, TRBJ1-5)
CASSQGHQPNQPQHF

SEQ ID NO: 404873 - protein, 15 aa, Homo sapiens
  CDR3 for alpha chain variable domain of TCR clone 202437 (TRAV13-2, TRAJ8)
CAPGGRNTGFQKLVF

SEQ ID NO: 404874 - protein, 18 aa, Homo sapiens
  CDR3 for beta chain variable domain of TCR clone 202437 (TRBV11-2, TRBJ2-6)
CASSLNPFLGTGANVLTF

SEQ ID NO: 404875 - protein, 15 aa, Homo sapiens
  CDR3 for alpha chain variable domain of TCR clone 202438 (TRAV8-6, TRAJ10)
CAVSDQAGGGNKLTF

SEQ ID NO: 404876 - protein, 13 aa, Homo sapiens
  CDR3 for beta chain variable domain of TCR clone 202438 (TRBV10-2, TRBJ2-3)
CASSESGDRTQYF

SEQ ID NO: 404877 - protein, 17 aa, Homo sapiens
  CDR3 for alpha chain variable domain of TCR clone 202439 (TRAV3, TRAJ42)
CAVRDRDYGGSQGTLIF

SEQ ID NO: 404878 - protein, 14 aa, Homo sapiens
  CDR3 for beta chain variable domain of TCR clone 202439 (TRBV19, TRBJ2-5)
CASSMTGQQETQYF

SEQ ID NO: 404879 - protein, 14 aa, Homo sapiens
  CDR3 for alpha chain variable domain of TCR clone 202440 (TRAV1-2, TRAJ16)
CAVNRFSDGQKLLF

SEQ ID NO: 404880 - protein, 16 aa, Homo sapiens
  CDR3 for beta chain variable domain of TCR clone 202440 (TRBV18, TRBJ1-5)
CASSPYRVEGNQPLHF

SEQ ID NO: 404881 - protein, 16 aa, Homo sapiens
  CDR3 for alpha chain variable domain of TCR clone 202441 (TRAV8-3, TRAJ13)
CAVGAYPSGGYQKVTF

SEQ ID NO: 404882 - protein, 13 aa, Homo sapiens
  CDR3 for beta chain variable domain of TCR clone 202441 (TRBV7-9, TRBJ1-2)
CASSLKQNYGDTF

SEQ ID NO: 404883 - protein, 17 aa, Homo sapiens
  CDR3 for alpha chain variable domain of TCR clone 202442 (TRAV3, TRAJ38)
CAVRDCLNAGNNRKLIW

SEQ ID NO: 404884 - protein, 14 aa, Homo sapiens
  CDR3 for beta chain variable domain of TCR clone 202442 (TRBV20-1, TRBJ2-1)
CSAHPGLPYNEQFF

SEQ ID NO: 404885 - protein, 15 aa, Homo sapiens
  CDR3 for alpha chain variable domain of TCR clone 202443 (TRAV17, TRAJ48)
CATDETNFGNEKLTF

SEQ ID NO: 404886 - protein, 14 aa, Homo sapiens
  CDR3 for beta chain variable domain of TCR clone 202443 (TRBV10-3, TRBJ1-3)
CAIRGQRAGNTIDF

SEQ ID NO: 404887 - protein, 16 aa, Homo sapiens
  CDR3 for alpha chain variable domain of TCR clone 202444 (TRAV30, TRAJ24)
CGTEIVDADSWGKFQF

SEQ ID NO: 404888 - protein, 12 aa, Homo sapiens
  CDR3 for beta chain variable domain of TCR clone 202444 (TRBV7-8, TRBJ2-1)
CASSLGHNEQFF

SEQ ID NO: 404889 - protein, 16 aa, Homo sapiens
  CDR3 for alpha chain variable domain of TCR clone 202445 (TRAV30, TRAJ24)
CGTEIVDADSRGKFQF

SEQ ID NO: 404890 - protein, 13 aa, Homo sapiens
  CDR3 for beta chain variable domain of TCR clone 202445 (TRBV12-5, TRBJ2-5)
SSGSRTHQETQYF

SEQ ID NO: 404891 - protein, 13 aa, Homo sapiens
  CDR3 for alpha chain variable domain of TCR clone 202446 (TRAV2, TRAJ40)
CAVVTSGTYKYIF

SEQ ID NO: 404892 - protein, 13 aa, Homo sapiens
  CDR3 for beta chain variable domain of TCR clone 202446 (TRBV12-4, TRBJ2-1)
CASSFQGYNEQFF

SEQ ID NO: 404893 - protein, 12 aa, Homo sapiens
  CDR3 for alpha chain variable domain of TCR clone 202447 (TRAV12-3, TRAJ17)
CAMTLTGNKLTF

SEQ ID NO: 404894 - protein, 12 aa, Homo sapiens
  CDR3 for beta chain variable domain of TCR clone 202447 (TRBV2, TRBJ2-1)
CAYGPPCNEQFF

SEQ ID NO: 404895 - protein, 14 aa, Homo sapiens
  CDR3 for alpha chain variable domain of TCR clone 202448 (TRAV29/DV5, TRAJ36)
CAARRKTGANNLFF

SEQ ID NO: 404896 - protein, 17 aa, Homo sapiens
  CDR3 for beta chain variable domain of TCR clone 202448 (TRBV25-1, TRBJ2-7)
CQPQQPPRTGVTYEQYF

SEQ ID NO: 404897 - protein, 15 aa, Homo sapiens
  CDR3 for alpha chain variable domain of TCR clone 202449 (TRAV3, TRAJ37)
CAVIRRSSNTGKLIF

SEQ ID NO: 404898 - protein, 16 aa, Homo sapiens
  CDR3 for beta chain variable domain of TCR clone 202449 (TRBV19, TRBJ2-1)
CASSKAGPSSYNEQFF

SEQ ID NO: 404899 - protein, 21 aa, Homo sapiens
  CDR3 for alpha chain variable domain of TCR clone 202450 (TRAV1-1, TRAJ6)
CAVRREEATYLHLEEEPALLF

SEQ ID NO: 404900 - protein, 15 aa, Homo sapiens
  CDR3 for beta chain variable domain of TCR clone 202450 (TRBV6-6, TRBJ2-1)
CATRQGVSTYNEQFF

SEQ ID NO: 404901 - protein, 15 aa, Homo sapiens
  CDR3 for alpha chain variable domain of TCR clone 202451 (TRAV4, TRAJ32)
CLVGEDGGATNKLIF

SEQ ID NO: 404902 - protein, 16 aa, Homo sapiens
  CDR3 for beta chain variable domain of TCR clone 202451 (TRBV13, TRBJ2-2)
CASSTRTGEHTGELFF

SEQ ID NO: 404903 - protein, 15 aa, Homo sapiens
  CDR3 for alpha chain variable domain of TCR clone 202452 (TRAV12-1, TRAJ44)
CVVDTLQGTASKLTF

SEQ ID NO: 404904 - protein, 14 aa, Homo sapiens
  CDR3 for beta chain variable domain of TCR clone 202452 (TRBV7-9, TRBJ2-1)
CASSPRDSLYEQFF

SEQ ID NO: 404905 - protein, 14 aa, Homo sapiens
  CDR3 for alpha chain variable domain of TCR clone 202453 (TRAV9-2, TRAJ39)
CALYIYNAGNMLTF

SEQ ID NO: 404906 - protein, 14 aa, Homo sapiens
  CDR3 for beta chain variable domain of TCR clone 202453 (TRBV6-1, TRBJ1-3)
CASVKGGGGNTIYF

SEQ ID NO: 404907 - protein, 17 aa, Homo sapiens
  CDR3 for alpha chain variable domain of TCR clone 202454 (TRAV3, TRAJ6)
CAVRDGPRDGGRYIPTF

SEQ ID NO: 404908 - protein, 13 aa, Homo sapiens
  CDR3 for beta chain variable domain of TCR clone 202454 (TRBV27, TRBJ2-1)
CASRTLGVGEQFF

SEQ ID NO: 404909 - protein, 13 aa, Homo sapiens
  CDR3 for alpha chain variable domain of TCR clone 202455 (TRAV21, TRAJ20)
CAVGLRVDYKLSF

SEQ ID NO: 404910 - protein, 12 aa, Homo sapiens
  CDR3 for beta chain variable domain of TCR clone 202455 (TRBV14, TRBJ2-4)
CASSNLKSIQYF

SEQ ID NO: 404911 - protein, 11 aa, Homo sapiens
  CDR3 for alpha chain variable domain of TCR clone 202456 (TRAV3, TRAJ21)
CAVGNFNKFYF

SEQ ID NO: 404912 - protein, 16 aa, Homo sapiens
  CDR3 for beta chain variable domain of TCR clone 202456 (TRBV19, TRBJ2-1)
RASSRAGPGSYNEQFF

SEQ ID NO: 404913 - protein, 15 aa, Homo sapiens
  CDR3 for alpha chain variable domain of TCR clone 202457 (TRAV12-3, TRAJ6)
CAMSATTGGSYIPTF

SEQ ID NO: 404914 - protein, 16 aa, Homo sapiens
  CDR3 for beta chain variable domain of TCR clone 202457 (TRBV20-1, TRBJ1-2)
CSASMGQGVANYSYAF

SEQ ID NO: 404915 - protein, 15 aa, Homo sapiens
  CDR3 for alpha chain variable domain of TCR clone 202458 (TRAV2, TRAJ24)
CAVEVLTDSWGKFQF

SEQ ID NO: 404916 - protein, 13 aa, Homo sapiens
  CDR3 for beta chain variable domain of TCR clone 202458 (TRBV10-2, TRBJ2-7)
RASGTSGGYEQYF

SEQ ID NO: 404917 - protein, 13 aa, Homo sapiens
  CDR3 for alpha chain variable domain of TCR clone 202459 (TRAV2, TRAJ15)
CAVASQAGTALIF

SEQ ID NO: 404918 - protein, 16 aa, Homo sapiens
  CDR3 for beta chain variable domain of TCR clone 202459 (TRBV5-1, TRBJ2-3)
CASSLAAGTSTDTQYF

SEQ ID NO: 404919 - protein, 13 aa, Homo sapiens
  CDR3 for alpha chain variable domain of TCR clone 202460 (TRAV27, TRAJ24)
CAGVTDSWGKFQF

SEQ ID NO: 404920 - protein, 15 aa, Homo sapiens
  CDR3 for beta chain variable domain of TCR clone 202460 (TRBV20-1, TRBJ2-7)
CSARDRVSGMDEQYF

SEQ ID NO: 404921 - protein, 12 aa, Homo sapiens
  CDR3 for alpha chain variable domain of TCR clone 202461 (TRAV8-3, TRAJ20)
CAVDFNDCKLSF

SEQ ID NO: 404922 - protein, 14 aa, Homo sapiens
  CDR3 for beta chain variable domain of TCR clone 202461 (TRBV12-5, TRBJ2-5)
CASGSRTHQETQYF

SEQ ID NO: 404923 - protein, 15 aa, Homo sapiens
  CDR3 for alpha chain variable domain of TCR clone 202462 (TRAV12-2, TRAJ8)
CAVREENTGFQKLVF

SEQ ID NO: 404924 - protein, 16 aa, Homo sapiens
  CDR3 for beta chain variable domain of TCR clone 202462 (TRBV7-3, TRBJ2-1)
CASSLEGYRSYNEQFF

SEQ ID NO: 404925 - protein, 15 aa, Homo sapiens
  CDR3 for alpha chain variable domain of TCR clone 202463 (TRAV8-3, TRAJ45)
RASSYSGGGADGLTF

SEQ ID NO: 404926 - protein, 13 aa, Homo sapiens
  CDR3 for beta chain variable domain of TCR clone 202463 (TRBV10-3, TRBJ2-7)
CASKRAVNYEQYF

SEQ ID NO: 404927 - protein, 14 aa, Homo sapiens
  CDR3 for alpha chain variable domain of TCR clone 202464 (TRAV38-1, TRAJ45)
CAYYSGGGADGLTF

SEQ ID NO: 404928 - protein, 13 aa, Homo sapiens
  CDR3 for beta chain variable domain of TCR clone 202464 (TRBV20-1, TRBJ1-2)
CSATGIQGSGYTF

SEQ ID NO: 404929 - protein, 17 aa, Homo sapiens
  CDR3 for alpha chain variable domain of TCR clone 202465 (TRAV17, TRAJ7)
CATLGRLAFGKGNQVVV

SEQ ID NO: 404930 - protein, 13 aa, Homo sapiens
  CDR3 for beta chain variable domain of TCR clone 202465 (TRBV12-4, TRBJ2-7)
CASCLERVREQYF

SEQ ID NO: 404931 - protein, 17 aa, Homo sapiens
  CDR3 for alpha chain variable domain of TCR clone 202466 (TRAV8-1, TRAJ43)
CAVTKDMRFGAGTRLTV

SEQ ID NO: 404932 - protein, 17 aa, Homo sapiens
  CDR3 for beta chain variable domain of TCR clone 202466 (TRBV5-4, TRBJ2-1)
CASSSAGGRGPYNEQFF

SEQ ID NO: 404933 - protein, 15 aa, Homo sapiens
  CDR3 for alpha chain variable domain of TCR clone 202467 (TRAV29/DV5, TRAJ28)
CAASVMGAGSYQLTL

SEQ ID NO: 404934 - protein, 14 aa, Homo sapiens
  CDR3 for beta chain variable domain of TCR clone 202467 (TRBV7-2, TRBJ1-5)
CASSWVGENQPQHF

SEQ ID NO: 404935 - protein, 16 aa, Homo sapiens
  CDR3 for alpha chain variable domain of TCR clone 202468 (TRAV12-3, TRAJ53)
CAMSTGGGGSNYKLTF

SEQ ID NO: 404936 - protein, 11 aa, Homo sapiens
  CDR3 for beta chain variable domain of TCR clone 202468 (TRBV29-1, TRBJ2-5)
CSEDRTGIQYF

SEQ ID NO: 404937 - protein, 13 aa, Homo sapiens
  CDR3 for alpha chain variable domain of TCR clone 202469 (TRAV17, TRAJ33)
CATDADRNYQLIW

SEQ ID NO: 404938 - protein, 17 aa, Homo sapiens
  CDR3 for beta chain variable domain of TCR clone 202469 (TRBV20-1, TRBJ2-3)
CSAVSPGLAGGQDTQYF

SEQ ID NO: 404939 - protein, 15 aa, Homo sapiens
  CDR3 for alpha chain variable domain of TCR clone 202470 (TRAV17, TRAJ35)
CATAFVIGFGNVLHG

SEQ ID NO: 404940 - protein, 14 aa, Homo sapiens
  CDR3 for beta chain variable domain of TCR clone 202470 (TRBV12-5, TRBJ2-5)
CASGSRTHQETQYF

SEQ ID NO: 404941 - protein, 13 aa, Homo sapiens
  CDR3 for alpha chain variable domain of TCR clone 202471 (TRAV20, TRAJ31)
CAVQAIGGARLMF

SEQ ID NO: 404942 - protein, 17 aa, Homo sapiens
  CDR3 for beta chain variable domain of TCR clone 202471 (TRBV10-3, TRBJ2-5)
CAISAGLAGAPLETQYF

SEQ ID NO: 404943 - protein, 11 aa, Homo sapiens
  CDR3 for alpha chain variable domain of TCR clone 202472 (TRAV12-1, TRAJ21)
WVVYNFNKFYF

SEQ ID NO: 404944 - protein, 14 aa, Homo sapiens
  CDR3 for beta chain variable domain of TCR clone 202472 (TRBV19, TRBJ2-7)
CASSMGQGAIEQYF

SEQ ID NO: 404945 - protein, 14 aa, Homo sapiens
  CDR3 for alpha chain variable domain of TCR clone 202473 (TRAV38-1, TRAJ45)
CASHSGGGADGLTF

SEQ ID NO: 404946 - protein, 14 aa, Homo sapiens
  CDR3 for beta chain variable domain of TCR clone 202473 (TRBV18, TRBJ2-3)
CASSGLADTDTQYF

SEQ ID NO: 404947 - protein, 13 aa, Homo sapiens
  CDR3 for alpha chain variable domain of TCR clone 202474 (TRAV2, TRAJ15)
CAVASQAGTALIF

SEQ ID NO: 404948 - protein, 16 aa, Homo sapiens
  CDR3 for beta chain variable domain of TCR clone 202474 (TRBV20-1, TRBJ1-4)
CSAPGQGLLTNDKLFF

SEQ ID NO: 404949 - protein, 15 aa, Homo sapiens
  CDR3 for alpha chain variable domain of TCR clone 202475 (TRAV8-4, TRAJ37)
CGVTYGSSNTGKLIF

SEQ ID NO: 404950 - protein, 13 aa, Homo sapiens
  CDR3 for beta chain variable domain of TCR clone 202475 (TRBV12-4, TRBJ2-5)
CASSLGGSRTQYF

SEQ ID NO: 404951 - protein, 14 aa, Homo sapiens
  CDR3 for alpha chain variable domain of TCR clone 202476 (TRAV1-2, TRAJ16)
CAVNRFSDGQKLLF

SEQ ID NO: 404952 - protein, 14 aa, Homo sapiens
  CDR3 for beta chain variable domain of TCR clone 202476 (TRBV7-2, TRBJ1-2)
CASSRGGTNYGYTF

SEQ ID NO: 404953 - protein, 12 aa, Homo sapiens
  CDR3 for alpha chain variable domain of TCR clone 202477 (TRAV27, TRAJ9)
CAGESGGFKTIF

SEQ ID NO: 404954 - protein, 13 aa, Homo sapiens
  CDR3 for beta chain variable domain of TCR clone 202477 (TRBV15, TRBJ1-6)
CATSGGLNSPLHF

SEQ ID NO: 404955 - protein, 17 aa, Homo sapiens
  CDR3 for alpha chain variable domain of TCR clone 202478 (TRAV36/DV7, TRAJ52)
WAVAQRAGGTSYGKLTL

SEQ ID NO: 404956 - protein, 14 aa, Homo sapiens
  CDR3 for beta chain variable domain of TCR clone 202478 (TRBV19, TRBJ2-1)
CASPTFVLSGEQFF

SEQ ID NO: 404957 - protein, 14 aa, Homo sapiens
  CDR3 for alpha chain variable domain of TCR clone 202479 (TRAV1-2, TRAJ8)
CAVREDTGFQKLVF

SEQ ID NO: 404958 - protein, 15 aa, Homo sapiens
  CDR3 for beta chain variable domain of TCR clone 202479 (TRBV20-1, TRBJ2-7)
CSAIEGRDSLYEQYF

SEQ ID NO: 404959 - protein, 13 aa, Homo sapiens
  CDR3 for alpha chain variable domain of TCR clone 202480 (TRAV38-2/DV8, TRAJ34)
CAYRTWNTDKLIF

SEQ ID NO: 404960 - protein, 14 aa, Homo sapiens
  CDR3 for beta chain variable domain of TCR clone 202480 (TRBV5-4, TRBJ1-1)
CASSLDSRRDEAFF

SEQ ID NO: 404961 - protein, 13 aa, Homo sapiens
  CDR3 for alpha chain variable domain of TCR clone 202481 (TRAV13-1, TRAJ20)
CAARVLNDYKLSF

SEQ ID NO: 404962 - protein, 16 aa, Homo sapiens
  CDR3 for beta chain variable domain of TCR clone 202481 (TRBV11-1, TRBJ1-1)
CATNPRDRAFNTEAFF

SEQ ID NO: 404963 - protein, 14 aa, Homo sapiens
  CDR3 for alpha chain variable domain of TCR clone 202482 (TRAV12-3, TRAJ10)
SHLPLTGGGNKLTF

SEQ ID NO: 404964 - protein, 16 aa, Homo sapiens
  CDR3 for beta chain variable domain of TCR clone 202482 (TRBV6-5, TRBJ2-7)
CASSPGGREWTYEQYF

SEQ ID NO: 404965 - protein, 14 aa, Homo sapiens
  CDR3 for alpha chain variable domain of TCR clone 202483 (TRAV13-1, TRAJ35)
CTASKGGFGNVLHC

SEQ ID NO: 404966 - protein, 13 aa, Homo sapiens
  CDR3 for beta chain variable domain of TCR clone 202483 (TRBV7-3, TRBJ1-1)
CASSRDWGAEAFF

SEQ ID NO: 404967 - protein, 13 aa, Homo sapiens
  CDR3 for alpha chain variable domain of TCR clone 202484 (TRAV27, TRAJ56)
CAGKPGANSKLTF

SEQ ID NO: 404968 - protein, 18 aa, Homo sapiens
  CDR3 for beta chain variable domain of TCR clone 202484 (TRBV11-2, TRBJ2-3)
FASSLGGASRGAPNTQYF

SEQ ID NO: 404969 - protein, 13 aa, Homo sapiens
  CDR3 for alpha chain variable domain of TCR clone 202485 (TRAV27, TRAJ6)
CAGGTRGSYIPTF

SEQ ID NO: 404970 - protein, 16 aa, Homo sapiens
  CDR3 for beta chain variable domain of TCR clone 202485 (TRBV27, TRBJ2-2)
CASSFRGLVRTGELFF

SEQ ID NO: 404971 - protein, 12 aa, Homo sapiens
  CDR3 for alpha chain variable domain of TCR clone 202486 (TRAV1-2, TRAJ36)
CALDRGANNLFF

SEQ ID NO: 404972 - protein, 15 aa, Homo sapiens
  CDR3 for beta chain variable domain of TCR clone 202486 (TRBV7-9, TRBJ2-5)
CASSDTGRGRETQYF

SEQ ID NO: 404973 - protein, 13 aa, Homo sapiens
  CDR3 for alpha chain variable domain of TCR clone 202487 (TRAV2, TRAJ40)
CAVVTSVTYKYIF

SEQ ID NO: 404974 - protein, 16 aa, Homo sapiens
  CDR3 for beta chain variable domain of TCR clone 202487 (TRBV19, TRBJ2-2)
CASRSPGTGATGELFF

SEQ ID NO: 404975 - protein, 14 aa, Homo sapiens
  CDR3 for alpha chain variable domain of TCR clone 202488 (TRAV1-2, TRAJ8)
CAVREDTGFQELGF

SEQ ID NO: 404976 - protein, 16 aa, Homo sapiens
  CDR3 for beta chain variable domain of TCR clone 202488 (TRBV7-3, TRBJ2-2)
CASSLKRGTLSGELFF

SEQ ID NO: 404977 - protein, 14 aa, Homo sapiens
  CDR3 for alpha chain variable domain of TCR clone 202489 (TRAV13-2, TRAJ23)
CAENTYNQGGKLIF

SEQ ID NO: 404978 - protein, 16 aa, Homo sapiens
  CDR3 for beta chain variable domain of TCR clone 202489 (TRBV11-2, TRBJ2-7)
CASSLAPTGVNYEQYF

SEQ ID NO: 404979 - protein, 12 aa, Homo sapiens
  CDR3 for alpha chain variable domain of TCR clone 202490 (TRAV12-1, TRAJ17)
CAMTLTGNKLNF

SEQ ID NO: 404980 - protein, 15 aa, Homo sapiens
  CDR3 for beta chain variable domain of TCR clone 202490 (TRBV20-1, TRBJ2-7)
CSARDRVSGMDEQYF

SEQ ID NO: 404981 - protein, 16 aa, Homo sapiens
  CDR3 for alpha chain variable domain of TCR clone 202491 (TRAV3, TRAJ10)
CAVRDMRAGGGNKLTF

SEQ ID NO: 404982 - protein, 15 aa, Homo sapiens
  CDR3 for beta chain variable domain of TCR clone 202491 (TRBV19, TRBJ1-5)
CASSPEGRPNQPQHF

SEQ ID NO: 404983 - protein, 11 aa, Homo sapiens
  CDR3 for alpha chain variable domain of TCR clone 202492 (TRAV2, TRAJ33)
CAVESNYQLIW

SEQ ID NO: 404984 - protein, 15 aa, Homo sapiens
  CDR3 for beta chain variable domain of TCR clone 202492 (TRBV12-4, TRBJ1-6)
CASSLGGQGTSPLHF

SEQ ID NO: 404985 - protein, 14 aa, Homo sapiens
  CDR3 for alpha chain variable domain of TCR clone 202493 (TRAV26-1, TRAJ45)
CIEVTGGGADGLTF

SEQ ID NO: 404986 - protein, 14 aa, Homo sapiens
  CDR3 for beta chain variable domain of TCR clone 202493 (TRBV12-4, TRBJ2-7)
CASSPKTSFYEQYF

SEQ ID NO: 404987 - protein, 13 aa, Homo sapiens
  CDR3 for alpha chain variable domain of TCR clone 202494 (TRAV2, TRAJ15)
CAVASQAGTARIF

SEQ ID NO: 404988 - protein, 16 aa, Homo sapiens
  CDR3 for beta chain variable domain of TCR clone 202494 (TRBV18, TRBJ1-5)
CASSPYRVEGNQPQHF

SEQ ID NO: 404989 - protein, 14 aa, Homo sapiens
  CDR3 for alpha chain variable domain of TCR clone 202495 (TRAV12-2, TRAJ13)
CAVKKTGGYQKVTF

SEQ ID NO: 404990 - protein, 15 aa, Homo sapiens
  CDR3 for beta chain variable domain of TCR clone 202495 (TRBV11-2, TRBJ2-2)
CASSSDRVNDGELFF

SEQ ID NO: 404991 - protein, 15 aa, Homo sapiens
  CDR3 for alpha chain variable domain of TCR clone 202496 (TRAV8-4, TRAJ3)
CAVTGENLGQQCFQD

SEQ ID NO: 404992 - protein, 16 aa, Homo sapiens
  CDR3 for beta chain variable domain of TCR clone 202496 (TRBV29-1, TRBJ2-7)
CSVEVVGTSGSYEQYF

SEQ ID NO: 404993 - protein, 13 aa, Homo sapiens
  CDR3 for alpha chain variable domain of TCR clone 202497 (TRAV17, TRAJ9)
CATDYTGGFKAIF

SEQ ID NO: 404994 - protein, 13 aa, Homo sapiens
  CDR3 for beta chain variable domain of TCR clone 202497 (TRBV7-9, TRBJ1-2)
CASSLKQNYGYTF

SEQ ID NO: 404995 - protein, 17 aa, Homo sapiens
  CDR3 for alpha chain variable domain of TCR clone 202498 (TRAV3, TRAJ6)
CAVRDGPRSGGSYIPTF

SEQ ID NO: 404996 - protein, 13 aa, Homo sapiens
  CDR3 for beta chain variable domain of TCR clone 202498 (TRBV20-1, TRBJ1-1)
CSARGGGNTEAFF

SEQ ID NO: 404997 - protein, 11 aa, Homo sapiens
  CDR3 for alpha chain variable domain of TCR clone 202499 (TRAV1-2, TRAJ31)
CAVSNNASLMF

SEQ ID NO: 404998 - protein, 15 aa, Homo sapiens
  CDR3 for beta chain variable domain of TCR clone 202499 (TRBV28, TRBJ2-1)
CASSIIAGGRSEQFF

SEQ ID NO: 404999 - protein, 15 aa, Homo sapiens
  CDR3 for alpha chain variable domain of TCR clone 202500 (TRAV21, TRAJ53)
CATLNSGGSNYKLTF

SEQ ID NO: 405000 - protein, 14 aa, Homo sapiens
  CDR3 for beta chain variable domain of TCR clone 202500 (TRBV18, TRBJ2-5)
CASSPPGHQETQYY

SEQ ID NO: 405001 - protein, 16 aa, Homo sapiens
  CDR3 for alpha chain variable domain of TCR clone 202501 (TRAV12-1, TRAJ13)
CVVNLEVSGGYQKVTF

SEQ ID NO: 405002 - protein, 15 aa, Homo sapiens
  CDR3 for beta chain variable domain of TCR clone 202501 (TRBV5-1, TRBJ2-1)
CASSPPRAPYNEQFF

SEQ ID NO: 405003 - protein, 13 aa, Homo sapiens
  CDR3 for alpha chain variable domain of TCR clone 202502 (TRAV12-2, TRAJ12)
CAVNGDSSYKLTF

SEQ ID NO: 405004 - protein, 13 aa, Homo sapiens
  CDR3 for beta chain variable domain of TCR clone 202502 (TRBV20-1, TRBJ2-2)
CSALSGGAGELFF

SEQ ID NO: 405005 - protein, 14 aa, Homo sapiens
  CDR3 for alpha chain variable domain of TCR clone 202503 (TRAV1-2, TRAJ16)
CAVNRFSDGQKLLF

SEQ ID NO: 405006 - protein, 16 aa, Homo sapiens
  CDR3 for beta chain variable domain of TCR clone 202503 (TRBV20-1, TRBJ1-4)
CSAPGQGLLTNKKLFF

SEQ ID NO: 405007 - protein, 11 aa, Homo sapiens
  CDR3 for alpha chain variable domain of TCR clone 202504 (TRAV12-2, TRAJ33)
CAVGSNYQLIW

SEQ ID NO: 405008 - protein, 14 aa, Homo sapiens
  CDR3 for beta chain variable domain of TCR clone 202504 (TRBV2, TRBJ2-7)
CASSLTSGGYEQYF

SEQ ID NO: 405009 - protein, 14 aa, Homo sapiens
  CDR3 for alpha chain variable domain of TCR clone 202505 (TRAV26-1, TRAJ38)
CIADNAGNNRKLIW

SEQ ID NO: 405010 - protein, 17 aa, Homo sapiens
  CDR3 for beta chain variable domain of TCR clone 202505 (TRBV20-1, TRBJ2-1)
CSARDPLAGVWDNEQFF

SEQ ID NO: 405011 - protein, 14 aa, Homo sapiens
  CDR3 for alpha chain variable domain of TCR clone 202506 (TRAV12-2, TRAJ40)
CAVKIPSGTYKYIF

SEQ ID NO: 405012 - protein, 14 aa, Homo sapiens
  CDR3 for beta chain variable domain of TCR clone 202506 (TRBV4-1, TRBJ1-1)
CASSRSGQSFEAFF

SEQ ID NO: 405013 - protein, 11 aa, Homo sapiens
  CDR3 for alpha chain variable domain of TCR clone 202507 (TRAV29/DV5, TRAJ47)
CAAQRGNKLFF

SEQ ID NO: 405014 - protein, 12 aa, Homo sapiens
  CDR3 for beta chain variable domain of TCR clone 202507 (TRBV11-2, TRBJ2-7)
CASSLPTYEQYF

SEQ ID NO: 405015 - protein, 11 aa, Homo sapiens
  CDR3 for alpha chain variable domain of TCR clone 202508 (TRAV1-2, TRAJ20)
CAVANDYKLSF

SEQ ID NO: 405016 - protein, 16 aa, Homo sapiens
  CDR3 for beta chain variable domain of TCR clone 202508 (TRBV11-2, TRBJ1-2)
CASSLDTGGADYGYTF

SEQ ID NO: 405017 - protein, 18 aa, Homo sapiens
  CDR3 for alpha chain variable domain of TCR clone 202509 (TRAV30, TRAJ24)
CGTEIVYADSWGNSSLEQ

SEQ ID NO: 405018 - protein, 15 aa, Homo sapiens
  CDR3 for beta chain variable domain of TCR clone 202509 (TRBV20-1, TRBJ2-7)
CSARDRVSGMDEQYF

SEQ ID NO: 405019 - protein, 14 aa, Homo sapiens
  CDR3 for alpha chain variable domain of TCR clone 202510 (TRAV12-1, TRAJ45)
CVVNVGGGADGVTF

SEQ ID NO: 405020 - protein, 14 aa, Homo sapiens
  CDR3 for beta chain variable domain of TCR clone 202510 (TRBV29-1, TRBJ2-3)
CSVEPGTRTDTQYF

SEQ ID NO: 405021 - protein, 14 aa, Homo sapiens
  CDR3 for alpha chain variable domain of TCR clone 202511 (TRAV13-1, TRAJ44)
CAAKATGTASKLTF

SEQ ID NO: 405022 - protein, 17 aa, Homo sapiens
  CDR3 for beta chain variable domain of TCR clone 202511 (TRBV20-1, TRBJ2-2)
CSASGSGQGGLTGELFF

SEQ ID NO: 405023 - protein, 14 aa, Homo sapiens
  CDR3 for alpha chain variable domain of TCR clone 202512 (TRAV12-3, TRAJ12)
CASVRMDSSYKLIF

SEQ ID NO: 405024 - protein, 16 aa, Homo sapiens
  CDR3 for beta chain variable domain of TCR clone 202512 (TRBV19, TRBJ2-2)
FASRSPGTGATGELFF

SEQ ID NO: 405025 - protein, 10 aa, Homo sapiens
  CDR3 for alpha chain variable domain of TCR clone 202513 (TRAV30, TRAJ48)
CGIGNEKLTF

SEQ ID NO: 405026 - protein, 13 aa, Homo sapiens
  CDR3 for beta chain variable domain of TCR clone 202513 (TRBV7-6, TRBJ2-3)
CQRRGGGTDTQYF

SEQ ID NO: 405027 - protein, 12 aa, Homo sapiens
  CDR3 for alpha chain variable domain of TCR clone 202514 (TRAV27, TRAJ35)
CAGADFGNVLHC

SEQ ID NO: 405028 - protein, 16 aa, Homo sapiens
  CDR3 for beta chain variable domain of TCR clone 202514 (TRBV6-1, TRBJ2-1)
CASILRQGSCYNEQFF

SEQ ID NO: 405029 - protein, 14 aa, Homo sapiens
  CDR3 for alpha chain variable domain of TCR clone 202515 (TRAV12-2, TRAJ13)
CAVKKTGGYQKVTF

SEQ ID NO: 405030 - protein, 14 aa, Homo sapiens
  CDR3 for beta chain variable domain of TCR clone 202515 (TRBV7-2, TRBJ2-7)
CASSLRWEVNEQYF

SEQ ID NO: 405031 - protein, 13 aa, Homo sapiens
  CDR3 for alpha chain variable domain of TCR clone 202516 (TRAV3, TRAJ15)
CAVRDQAGTALIF

SEQ ID NO: 405032 - protein, 15 aa, Homo sapiens
  CDR3 for beta chain variable domain of TCR clone 202516 (TRBV11-1, TRBJ2-7)
CASRLNYGASYEQYF

SEQ ID NO: 405033 - protein, 10 aa, Homo sapiens
  CDR3 for alpha chain variable domain of TCR clone 202517 (TRAV1-2, TRAJ18)
CAVRGEAQPW

SEQ ID NO: 405034 - protein, 14 aa, Homo sapiens
  CDR3 for beta chain variable domain of TCR clone 202517 (TRBV25-1, TRBJ1-1)
CASTHLGGNTEAFF

SEQ ID NO: 405035 - protein, 13 aa, Homo sapiens
  CDR3 for alpha chain variable domain of TCR clone 202518 (TRAV25, TRAJ54)
CAGTIQVAQKLVF

SEQ ID NO: 405036 - protein, 15 aa, Homo sapiens
  CDR3 for beta chain variable domain of TCR clone 202518 (TRBV19, TRBJ1-5)
CASSILTGENQPQHF

SEQ ID NO: 405037 - protein, 14 aa, Homo sapiens
  CDR3 for alpha chain variable domain of TCR clone 202519 (TRAV13-1, TRAJ40)
CAAHPTSGTYKYIF

SEQ ID NO: 405038 - protein, 15 aa, Homo sapiens
  CDR3 for beta chain variable domain of TCR clone 202519 (TRBV11-2, TRBJ2-2)
CARSPSGGGTGELFF

SEQ ID NO: 405039 - protein, 20 aa, Homo sapiens
  CDR3 for alpha chain variable domain of TCR clone 202520 (TRAV12-1, TRAJ44)
SSPSLRVLDLPTGTASKLTF

SEQ ID NO: 405040 - protein, 13 aa, Homo sapiens
  CDR3 for beta chain variable domain of TCR clone 202520 (TRBV6-5, TRBJ2-5)
CASSPQGGETQYF

SEQ ID NO: 405041 - protein, 11 aa, Homo sapiens
  CDR3 for alpha chain variable domain of TCR clone 202521 (TRAV3, TRAJ21)
CAVGTFSKFYF

SEQ ID NO: 405042 - protein, 16 aa, Homo sapiens
  CDR3 for beta chain variable domain of TCR clone 202521 (TRBV19, TRBJ2-1)
CASSKAGPSSYNEQFF

SEQ ID NO: 405043 - protein, 14 aa, Homo sapiens
  CDR3 for alpha chain variable domain of TCR clone 202522 (TRAV12-2, TRAJ13)
CAAKKTGGYQKVTF

SEQ ID NO: 405044 - protein, 15 aa, Homo sapiens
  CDR3 for beta chain variable domain of TCR clone 202522 (TRBV7-9, TRBJ1-5)
CASSQGHQPNQPQHF

SEQ ID NO: 405045 - protein, 15 aa, Homo sapiens
  CDR3 for alpha chain variable domain of TCR clone 202523 (TRAV17, TRAJ56)
CATDANTGANSKLTF

SEQ ID NO: 405046 - protein, 14 aa, Homo sapiens
  CDR3 for beta chain variable domain of TCR clone 202523 (TRBV19, TRBJ1-5)
CASSLGTGGQPQRF

SEQ ID NO: 405047 - protein, 15 aa, Homo sapiens
  CDR3 for alpha chain variable domain of TCR clone 202524 (TRAV20, TRAJ53)
CAVQASGGSNYKLTF

SEQ ID NO: 405048 - protein, 14 aa, Homo sapiens
  CDR3 for beta chain variable domain of TCR clone 202524 (TRBV7-2, TRBJ1-2)
CGSSQTGSTYGYTF

SEQ ID NO: 405049 - protein, 17 aa, Homo sapiens
  CDR3 for alpha chain variable domain of TCR clone 202525 (TRAV4, TRAJ18)
CLVGERSVGSTLGRLYF

SEQ ID NO: 405050 - protein, 14 aa, Homo sapiens
  CDR3 for beta chain variable domain of TCR clone 202525 (TRBV2, TRBJ1-5)
CASSENRGGQPQHF

SEQ ID NO: 405051 - protein, 15 aa, Homo sapiens
  CDR3 for alpha chain variable domain of TCR clone 202526 (TRAV17, TRAJ56)
CATDANTGANSKLTF

SEQ ID NO: 405052 - protein, 12 aa, Homo sapiens
  CDR3 for beta chain variable domain of TCR clone 202526 (TRBV7-8, TRBJ2-7)
CASSLGEREQYF

SEQ ID NO: 405053 - protein, 15 aa, Homo sapiens
  CDR3 for alpha chain variable domain of TCR clone 202527 (TRAV3, TRAJ4)
CAVRDGTGGYNKLIF

SEQ ID NO: 405054 - protein, 16 aa, Homo sapiens
  CDR3 for beta chain variable domain of TCR clone 202527 (TRBV5-1, TRBJ2-1)
CASSIRSGGSYNEQFF

SEQ ID NO: 405055 - protein, 18 aa, Homo sapiens
  CDR3 for alpha chain variable domain of TCR clone 202528 (TRAV12-2, )
CAVEDIQNPDPAVYQLTN

SEQ ID NO: 405056 - protein, 18 aa, Homo sapiens
  CDR3 for beta chain variable domain of TCR clone 202528 (TRBV11-2, TRBJ2-3)
CASSLGGASRGAPNTQYF

SEQ ID NO: 405057 - protein, 13 aa, Homo sapiens
  CDR3 for alpha chain variable domain of TCR clone 202529 (TRAV12-1, TRAJ26)
CVVRRNYGQNFVF

SEQ ID NO: 405058 - protein, 14 aa, Homo sapiens
  CDR3 for beta chain variable domain of TCR clone 202529 (TRBV7-6, TRBJ2-3)
CASSLRTVTDTQYF

SEQ ID NO: 405059 - protein, 11 aa, Homo sapiens
  CDR3 for alpha chain variable domain of TCR clone 202530 (TRAV21, TRAJ39)
LLVNAGNMLTF

SEQ ID NO: 405060 - protein, 18 aa, Homo sapiens
  CDR3 for beta chain variable domain of TCR clone 202530 (TRBV7-2, TRBJ2-7)
CASSLSGRRLAGGYEQYF

SEQ ID NO: 405061 - protein, 16 aa, Homo sapiens
  CDR3 for alpha chain variable domain of TCR clone 202531 (TRAV16, TRAJ42)
CALSGYYGGRQGNLIF

SEQ ID NO: 405062 - protein, 14 aa, Homo sapiens
  CDR3 for beta chain variable domain of TCR clone 202531 (TRBV3-1, TRBJ2-5)
CASSQAVRQETQYF

SEQ ID NO: 405063 - protein, 15 aa, Homo sapiens
  CDR3 for alpha chain variable domain of TCR clone 202532 (TRAV5, TRAJ33)
CADAPAMDSNYQLIW

SEQ ID NO: 405064 - protein, 12 aa, Homo sapiens
  CDR3 for beta chain variable domain of TCR clone 202532 (TRBV6-3, TRBJ2-7)
CASSLTPYEQYF

SEQ ID NO: 405065 - protein, 15 aa, Homo sapiens
  CDR3 for alpha chain variable domain of TCR clone 202533 (TRAV27, TRAJ38)
CAARRNAGNNRKLIW

SEQ ID NO: 405066 - protein, 13 aa, Homo sapiens
  CDR3 for beta chain variable domain of TCR clone 202533 (TRBV27, TRBJ2-1)
CASSVGRIWGQFF

SEQ ID NO: 405067 - protein, 15 aa, Homo sapiens
  CDR3 for alpha chain variable domain of TCR clone 202534 (TRAV8-3, TRAJ45)
CASSYSGGGADGLTF

SEQ ID NO: 405068 - protein, 13 aa, Homo sapiens
  CDR3 for beta chain variable domain of TCR clone 202534 (TRBV27, TRBJ2-1)
CASRTLGVGEQFF

SEQ ID NO: 405069 - protein, 16 aa, Homo sapiens
  CDR3 for alpha chain variable domain of TCR clone 202535 (TRAV16, TRAJ4)
CALSRMFPVGYNKLIF

SEQ ID NO: 405070 - protein, 12 aa, Homo sapiens
  CDR3 for beta chain variable domain of TCR clone 202535 (TRBV29-1, TRBJ2-3)
CSVTGGADTQYF

SEQ ID NO: 405071 - protein, 18 aa, Homo sapiens
  CDR3 for alpha chain variable domain of TCR clone 202536 (TRAV21, TRAJ52)
CAVRPSPARGTSYGKLTF

SEQ ID NO: 405072 - protein, 15 aa, Homo sapiens
  CDR3 for beta chain variable domain of TCR clone 202536 (TRBV20-1, TRBJ2-7)
GSARDRVSGMDEQYF

SEQ ID NO: 405073 - protein, 12 aa, Homo sapiens
  CDR3 for alpha chain variable domain of TCR clone 202537 (TRAV3, TRAJ7)
CADLLWEQQTRF

SEQ ID NO: 405074 - protein, 12 aa, Homo sapiens
  CDR3 for beta chain variable domain of TCR clone 202537 (TRBV7-3, TRBJ2-5)
CQQLPWGETQYF

SEQ ID NO: 405075 - protein, 15 aa, Homo sapiens
  CDR3 for alpha chain variable domain of TCR clone 202538 (TRAV17, TRAJ56)
CATEPFTGANSKLTF

SEQ ID NO: 405076 - protein, 15 aa, Homo sapiens
  CDR3 for beta chain variable domain of TCR clone 202538 (TRBV28, TRBJ1-5)
CASSKTGGYVQAQHF

SEQ ID NO: 405077 - protein, 15 aa, Homo sapiens
  CDR3 for alpha chain variable domain of TCR clone 202539 (TRAV17, TRAJ16)
CATALRFSDGQKLLF

SEQ ID NO: 405078 - protein, 15 aa, Homo sapiens
  CDR3 for beta chain variable domain of TCR clone 202539 (TRBV5-4, TRBJ2-6)
CASSYSNAGANVLTF

SEQ ID NO: 405079 - protein, 15 aa, Homo sapiens
  CDR3 for alpha chain variable domain of TCR clone 202540 (TRAV8-3, TRAJ40)
CAVGPYTSGTYKYVF

SEQ ID NO: 405080 - protein, 16 aa, Homo sapiens
  CDR3 for beta chain variable domain of TCR clone 202540 (TRBV7-2, TRBJ2-7)
CASSLDPGGGSGEQYF

SEQ ID NO: 405081 - protein, 15 aa, Homo sapiens
  CDR3 for alpha chain variable domain of TCR clone 202541 (TRAV26-1, TRAJ47)
CIVRVGWGYGNKLVF

SEQ ID NO: 405082 - protein, 13 aa, Homo sapiens
  CDR3 for beta chain variable domain of TCR clone 202541 (TRBV27, TRBJ1-1)
CASSLSIGAEAFF

SEQ ID NO: 405083 - protein, 16 aa, Homo sapiens
  CDR3 for alpha chain variable domain of TCR clone 202542 (TRAV12-2, TRAJ40)
CAVIRGGTSGTYKYIF

SEQ ID NO: 405084 - protein, 14 aa, Homo sapiens
  CDR3 for beta chain variable domain of TCR clone 202542 (TRBV20-1, TRBJ2-5)
CSARDGRAGETQDF

SEQ ID NO: 405085 - protein, 11 aa, Homo sapiens
  CDR3 for alpha chain variable domain of TCR clone 202543 (TRAV25, TRAJ49)
CEGGTGNQFYF

SEQ ID NO: 405086 - protein, 12 aa, Homo sapiens
  CDR3 for beta chain variable domain of TCR clone 202543 (TRBV6-5, TRBJ2-1)
CASRNDRGQQFF

SEQ ID NO: 405087 - protein, 13 aa, Homo sapiens
  CDR3 for alpha chain variable domain of TCR clone 202544 (TRAV21, TRAJ8)
CAAPNTGFQNLVF

SEQ ID NO: 405088 - protein, 13 aa, Homo sapiens
  CDR3 for beta chain variable domain of TCR clone 202544 (TRBV6-3, TRBJ2-3)
CASTLQGIDTQYF

SEQ ID NO: 405089 - protein, 13 aa, Homo sapiens
  CDR3 for alpha chain variable domain of TCR clone 202545 (TRAV14/DV4, TRAJ23)
CAMREVKGGKLIF

SEQ ID NO: 405090 - protein, 15 aa, Homo sapiens
  CDR3 for beta chain variable domain of TCR clone 202545 (TRBV6-3, TRBJ2-1)
CASSYASDSYNAQFF

SEQ ID NO: 405091 - protein, 14 aa, Homo sapiens
  CDR3 for alpha chain variable domain of TCR clone 202546 (TRAV12-2, TRAJ13)
CAVKQTGGYQKVTF

SEQ ID NO: 405092 - protein, 15 aa, Homo sapiens
  CDR3 for beta chain variable domain of TCR clone 202546 (TRBV28, TRBJ2-5)
CASSPPWSYQETQYF

SEQ ID NO: 405093 - protein, 16 aa, Homo sapiens
  CDR3 for alpha chain variable domain of TCR clone 202547 (TRAV3, TRAJ10)
CAVRDMRAGGGNKLTF

SEQ ID NO: 405094 - protein, 16 aa, Homo sapiens
  CDR3 for beta chain variable domain of TCR clone 202547 (TRBV7-2, TRBJ2-5)
CASSLESAGGRETQYF

SEQ ID NO: 405095 - protein, 14 aa, Homo sapiens
  CDR3 for alpha chain variable domain of TCR clone 202548 (TRAV35, TRAJ33)
CAGSSQDSNYQLIW

SEQ ID NO: 405096 - protein, 15 aa, Homo sapiens
  CDR3 for beta chain variable domain of TCR clone 202548 (TRBV5-1, TRBJ1-4)
FAPAAWKDGNEELFF

SEQ ID NO: 405097 - protein, 13 aa, Homo sapiens
  CDR3 for alpha chain variable domain of TCR clone 202549 (TRAV35, TRAJ36)
CAGPRIGANNLFF

SEQ ID NO: 405098 - protein, 13 aa, Homo sapiens
  CDR3 for beta chain variable domain of TCR clone 202549 (TRBV7-9, TRBJ2-7)
CASSAGLQYEQYF

SEQ ID NO: 405099 - protein, 11 aa, Homo sapiens
  CDR3 for alpha chain variable domain of TCR clone 202550 (TRAV12-2, TRAJ21)
CAVRNFNKFYF

SEQ ID NO: 405100 - protein, 13 aa, Homo sapiens
  CDR3 for beta chain variable domain of TCR clone 202550 (TRBV7-9, TRBJ1-2)
CASSLKQNYGYTF

SEQ ID NO: 405101 - protein, 13 aa, Homo sapiens
  CDR3 for alpha chain variable domain of TCR clone 202551 (TRAV2, TRAJ11)
CAVEEIGYSTLTF

SEQ ID NO: 405102 - protein, 14 aa, Homo sapiens
  CDR3 for beta chain variable domain of TCR clone 202551 (TRBV6-3, TRBJ2-2)
CASTYTPDTGELFF

SEQ ID NO: 405103 - protein, 15 aa, Homo sapiens
  CDR3 for alpha chain variable domain of TCR clone 202552 (TRAV21, TRAJ45)
CCELGVRRRCYGLTF

SEQ ID NO: 405104 - protein, 14 aa, Homo sapiens
  CDR3 for beta chain variable domain of TCR clone 202552 (TRBV4-2, TRBJ1-2)
CASSPGGSNYGYTF

SEQ ID NO: 405105 - protein, 15 aa, Homo sapiens
  CDR3 for alpha chain variable domain of TCR clone 202553 (TRAV1-2, TRAJ12)
CAVIPEVDSSYKLIF

SEQ ID NO: 405106 - protein, 12 aa, Homo sapiens
  CDR3 for beta chain variable domain of TCR clone 202553 (TRBV20-1, TRBJ1-2)
CSASHPSGRYTF

SEQ ID NO: 405107 - protein, 12 aa, Homo sapiens
  CDR3 for alpha chain variable domain of TCR clone 202554 (TRAV3, TRAJ20)
CAVRDPDYKLSF

SEQ ID NO: 405108 - protein, 12 aa, Homo sapiens
  CDR3 for beta chain variable domain of TCR clone 202554 (TRBV27, TRBJ2-5)
CASSPTGETQYF

SEQ ID NO: 405109 - protein, 12 aa, Homo sapiens
  CDR3 for alpha chain variable domain of TCR clone 202555 (TRAV21, TRAJ33)
CAKMDSNYQLIW

SEQ ID NO: 405110 - protein, 14 aa, Homo sapiens
  CDR3 for beta chain variable domain of TCR clone 202555 (TRBV2, TRBJ2-7)
CASSLTSGGYEQYC

SEQ ID NO: 405111 - protein, 15 aa, Homo sapiens
  CDR3 for alpha chain variable domain of TCR clone 202556 (TRAV12-2, TRAJ43)
CAFHMRFGAGTRLTV

SEQ ID NO: 405112 - protein, 18 aa, Homo sapiens
  CDR3 for beta chain variable domain of TCR clone 202556 (TRBV20-1, TRBJ2-3)
CSASGLAGGPGTTDTQYF

SEQ ID NO: 405113 - protein, 17 aa, Homo sapiens
  CDR3 for alpha chain variable domain of TCR clone 202557 (TRAV23/DV6, TRAJ57)
CSASSNLSQGGSEKLVF

SEQ ID NO: 405114 - protein, 14 aa, Homo sapiens
  CDR3 for beta chain variable domain of TCR clone 202557 (TRBV25-1, TRBJ1-1)
CASTHLGGNTEAFF

SEQ ID NO: 405115 - protein, 13 aa, Homo sapiens
  CDR3 for alpha chain variable domain of TCR clone 202558 (TRAV12-1, TRAJ6)
CVVYPGGSYIPTF

SEQ ID NO: 405116 - protein, 16 aa, Homo sapiens
  CDR3 for beta chain variable domain of TCR clone 202558 (TRBV12-5, TRBJ2-5)
CASGPRTSGNQETQYF

SEQ ID NO: 405117 - protein, 14 aa, Homo sapiens
  CDR3 for alpha chain variable domain of TCR clone 202559 (TRAV12-1, TRAJ17)
CVVNYKAAGNKLTF

SEQ ID NO: 405118 - protein, 15 aa, Homo sapiens
  CDR3 for beta chain variable domain of TCR clone 202559 (TRBV7-2, TRBJ2-1)
CASTHGTAIYNEQFF

SEQ ID NO: 405119 - protein, 13 aa, Homo sapiens
  CDR3 for alpha chain variable domain of TCR clone 202560 (TRAV12-2, TRAJ4)
CAVRSGGYNKLIF

SEQ ID NO: 405120 - protein, 13 aa, Homo sapiens
  CDR3 for beta chain variable domain of TCR clone 202560 (TRBV25-1, TRBJ1-1)
CASSGQVRAEAFF

SEQ ID NO: 405121 - protein, 18 aa, Homo sapiens
  CDR3 for alpha chain variable domain of TCR clone 202561 (TRAV12-3, TRAJ52)
CAMSRTNAGGTSYGKLKF

SEQ ID NO: 405122 - protein, 17 aa, Homo sapiens
  CDR3 for beta chain variable domain of TCR clone 202561 (TRBV7-3, TRBJ2-3)
CASSLMKWMRGADTQYF

SEQ ID NO: 405123 - protein, 17 aa, Homo sapiens
  CDR3 for alpha chain variable domain of TCR clone 202562 (TRAV13-1, TRAJ28)
CAASPPYSGAGSYQITF

SEQ ID NO: 405124 - protein, 12 aa, Homo sapiens
  CDR3 for beta chain variable domain of TCR clone 202562 (TRBV11-2, TRBJ2-2)
CASSLPTGELFF

SEQ ID NO: 405125 - protein, 13 aa, Homo sapiens
  CDR3 for alpha chain variable domain of TCR clone 202563 (TRAV12-3, TRAJ13)
CAMGTGGYQKVTF

SEQ ID NO: 405126 - protein, 16 aa, Homo sapiens
  CDR3 for beta chain variable domain of TCR clone 202563 (TRBV9, TRBJ2-1)
CASSVGGGGSYNEQFF

SEQ ID NO: 405127 - protein, 13 aa, Homo sapiens
  CDR3 for alpha chain variable domain of TCR clone 202564 (TRAV2, TRAJ40)
CAVVTSGTYKYIF

SEQ ID NO: 405128 - protein, 16 aa, Homo sapiens
  CDR3 for beta chain variable domain of TCR clone 202564 (TRBV7-3, TRBJ2-1)
CVSSLEGYRSYNEQFF

SEQ ID NO: 405129 - protein, 14 aa, Homo sapiens
  CDR3 for alpha chain variable domain of TCR clone 202565 (TRAV1-1, TRAJ27)
CAVIYNTNACKSTF

SEQ ID NO: 405130 - protein, 15 aa, Homo sapiens
  CDR3 for beta chain variable domain of TCR clone 202565 (TRBV7-2, TRBJ2-1)
CASSSGLAGGNEQSF

SEQ ID NO: 405131 - protein, 15 aa, Homo sapiens
  CDR3 for alpha chain variable domain of TCR clone 202566 (TRAV27, TRAJ38)
CAARRNAGNNRKLTW

SEQ ID NO: 405132 - protein, 13 aa, Homo sapiens
  CDR3 for beta chain variable domain of TCR clone 202566 (TRBV7-3, TRBJ2-1)
CASSLDSYNEQFF

SEQ ID NO: 405133 - protein, 14 aa, Homo sapiens
  CDR3 for alpha chain variable domain of TCR clone 202567 (TRAV12-3, TRAJ11)
CAMTTNSGYSTLTF

SEQ ID NO: 405134 - protein, 16 aa, Homo sapiens
  CDR3 for beta chain variable domain of TCR clone 202567 (TRBV20-1, TRBJ1-1)
CSASALTQGMNTEAFF

SEQ ID NO: 405135 - protein, 10 aa, Homo sapiens
  CDR3 for alpha chain variable domain of TCR clone 202568 (TRAV23/DV6, TRAJ57)
CAASSTLSQG

SEQ ID NO: 405136 - protein, 15 aa, Homo sapiens
  CDR3 for beta chain variable domain of TCR clone 202568 (TRBV7-3, TRBJ2-1)
CASSLTSGSYNEQFF

SEQ ID NO: 405137 - protein, 17 aa, Homo sapiens
  CDR3 for alpha chain variable domain of TCR clone 202569 (TRAV12-2, TRAJ48)
CASNEKLTFGPGTRLTI

SEQ ID NO: 405138 - protein, 15 aa, Homo sapiens
  CDR3 for beta chain variable domain of TCR clone 202569 (TRBV5-1, TRBJ2-1)
CASSQAGYWCNEQFF

SEQ ID NO: 405139 - protein, 13 aa, Homo sapiens
  CDR3 for alpha chain variable domain of TCR clone 202570 (TRAV12-2, TRAJ13)
CREEDWGYQKVTF

SEQ ID NO: 405140 - protein, 14 aa, Homo sapiens
  CDR3 for beta chain variable domain of TCR clone 202570 (TRBV10-3, TRBJ2-1)
CAISSDLAYNEQFF

SEQ ID NO: 405141 - protein, 15 aa, Homo sapiens
  CDR3 for alpha chain variable domain of TCR clone 202571 (TRAV21, TRAJ52)
CAVRGGGTSYGKLTF

SEQ ID NO: 405142 - protein, 15 aa, Homo sapiens
  CDR3 for beta chain variable domain of TCR clone 202571 (TRBV19, TRBJ1-2)
CASSVGQVLNYGYTF

SEQ ID NO: 405143 - protein, 19 aa, Homo sapiens
  CDR3 for alpha chain variable domain of TCR clone 202572 (TRAV25, TRAJ43)
TATQTTDVGTYFCAVFMRF

SEQ ID NO: 405144 - protein, 18 aa, Homo sapiens
  CDR3 for beta chain variable domain of TCR clone 202572 (TRBV6-6, TRBJ1-3)
CASSYSKWDSISGNTIYF

SEQ ID NO: 405145 - protein, 20 aa, Homo sapiens
  CDR3 for alpha chain variable domain of TCR clone 202573 (TRAV14/DV4, TRAJ22)
CAMREGPFSISSGAARQLTF

SEQ ID NO: 405146 - protein, 13 aa, Homo sapiens
  CDR3 for beta chain variable domain of TCR clone 202573 (TRBV4-2, TRBJ2-3)
CASSQDWQHTQYF

SEQ ID NO: 405147 - protein, 12 aa, Homo sapiens
  CDR3 for alpha chain variable domain of TCR clone 202574 (TRAV13-1, TRAJ21)
CAAKEGFNKFYF

SEQ ID NO: 405148 - protein, 14 aa, Homo sapiens
  CDR3 for beta chain variable domain of TCR clone 202574 (TRBV5-4, TRBJ1-1)
CARSLDSRRDEAFF

SEQ ID NO: 405149 - protein, 10 aa, Homo sapiens
  CDR3 for alpha chain variable domain of TCR clone 202575 (TRAV12-1, TRAJ33)
CVASNYKLIW

SEQ ID NO: 405150 - protein, 15 aa, Homo sapiens
  CDR3 for beta chain variable domain of TCR clone 202575 (TRBV5-4, TRBJ1-4)
CASSHGDGENEKLFF

SEQ ID NO: 405151 - protein, 17 aa, Homo sapiens
  CDR3 for alpha chain variable domain of TCR clone 202576 (TRAV3, TRAJ6)
CAVRDGPRAGGSYIPTF

SEQ ID NO: 405152 - protein, 17 aa, Homo sapiens
  CDR3 for beta chain variable domain of TCR clone 202576 (TRBV7-2, TRBJ2-3)
CASSLMKRMRGADTQYF

SEQ ID NO: 405153 - protein, 13 aa, Homo sapiens
  CDR3 for alpha chain variable domain of TCR clone 202577 (TRAV17, TRAJ9)
CATDYTGGFKTIF

SEQ ID NO: 405154 - protein, 11 aa, Homo sapiens
  CDR3 for beta chain variable domain of TCR clone 202577 (TRBV11-2, TRBJ2-2)
CASSLPGELFF

SEQ ID NO: 405155 - protein, 18 aa, Homo sapiens
  CDR3 for alpha chain variable domain of TCR clone 202578 (TRAV3, TRAJ17)
CAVRARRGGRSCRQQANF

SEQ ID NO: 405156 - protein, 14 aa, Homo sapiens
  CDR3 for beta chain variable domain of TCR clone 202578 (TRBV4-1, TRBJ2-2)
CSCSQAVSTGELFF

SEQ ID NO: 405157 - protein, 13 aa, Homo sapiens
  CDR3 for alpha chain variable domain of TCR clone 202579 (TRAV13-1, TRAJ9)
CAASGTGGFKTIF

SEQ ID NO: 405158 - protein, 13 aa, Homo sapiens
  CDR3 for beta chain variable domain of TCR clone 202579 (TRBV12-4, TRBJ2-7)
CASSLERVSEQYF

SEQ ID NO: 405159 - protein, 11 aa, Homo sapiens
  CDR3 for alpha chain variable domain of TCR clone 202580 (TRAV22, TRAJ30)
CAGNRDDKIIF

SEQ ID NO: 405160 - protein, 14 aa, Homo sapiens
  CDR3 for beta chain variable domain of TCR clone 202580 (TRBV12-5, TRBJ2-5)
CASGSRTHQETQYF

SEQ ID NO: 405161 - protein, 14 aa, Homo sapiens
  CDR3 for alpha chain variable domain of TCR clone 202581 (TRAV12-2, TRAJ40)
CAVKIPSGTYKYIF

SEQ ID NO: 405162 - protein, 17 aa, Homo sapiens
  CDR3 for beta chain variable domain of TCR clone 202581 (TRBV7-6, TRBJ2-5)
CASSPGLADPWGETQYF

SEQ ID NO: 405163 - protein, 12 aa, Homo sapiens
  CDR3 for alpha chain variable domain of TCR clone 202582 (TRAV12-2, TRAJ15)
CAVNQAGTALII

SEQ ID NO: 405164 - protein, 14 aa, Homo sapiens
  CDR3 for beta chain variable domain of TCR clone 202582 (TRBV2, TRBJ2-7)
CASSRDRSSYEQYF

SEQ ID NO: 405165 - protein, 13 aa, Homo sapiens
  CDR3 for alpha chain variable domain of TCR clone 202583 (TRAV8-6, TRAJ8)
CAVSNTGFRKLVF

SEQ ID NO: 405166 - protein, 17 aa, Homo sapiens
  CDR3 for beta chain variable domain of TCR clone 202583 (TRBV28, TRBJ2-5)
CASSRQGGLSGAETQYF

SEQ ID NO: 405167 - protein, 12 aa, Homo sapiens
  CDR3 for alpha chain variable domain of TCR clone 202584 (TRAV12-3, TRAJ17)
CAMTLKGNKLTF

SEQ ID NO: 405168 - protein, 15 aa, Homo sapiens
  CDR3 for beta chain variable domain of TCR clone 202584 (TRBV6-6, TRBJ2-5)
CAGSPGGGLEETQYF

SEQ ID NO: 405169 - protein, 15 aa, Homo sapiens
  CDR3 for alpha chain variable domain of TCR clone 202585 (TRAV8-3, TRAJ27)
CAVGPSKTNAGTSTF

SEQ ID NO: 405170 - protein, 12 aa, Homo sapiens
  CDR3 for beta chain variable domain of TCR clone 202585 (TRBV11-2, TRBJ2-2)
CASSLGGGELFF

SEQ ID NO: 405171 - protein, 14 aa, Homo sapiens
  CDR3 for alpha chain variable domain of TCR clone 202586 (TRAV13-1, TRAJ40)
CAASMTSGTYKYIF

SEQ ID NO: 405172 - protein, 16 aa, Homo sapiens
  CDR3 for beta chain variable domain of TCR clone 202586 (TRBV6-1, TRBJ1-2)
CASSGAWQGRSHGYTF

SEQ ID NO: 405173 - protein, 12 aa, Homo sapiens
  CDR3 for alpha chain variable domain of TCR clone 202587 (TRAV21, TRAJ23)
CAVGPQGGKLIF

SEQ ID NO: 405174 - protein, 14 aa, Homo sapiens
  CDR3 for beta chain variable domain of TCR clone 202587 (TRBV5-1, TRBJ2-5)
CASSLAGKQETQYF

SEQ ID NO: 405175 - protein, 15 aa, Homo sapiens
  CDR3 for alpha chain variable domain of TCR clone 202588 (TRAV13-2, TRAJ10)
CAENKIGGGGNKLTF

SEQ ID NO: 405176 - protein, 14 aa, Homo sapiens
  CDR3 for beta chain variable domain of TCR clone 202588 (TRBV7-2, TRBJ2-7)
CASSPKTSFYEQYF

SEQ ID NO: 405177 - protein, 14 aa, Homo sapiens
  CDR3 for alpha chain variable domain of TCR clone 202589 (TRAV9-2, TRAJ13)
CALSDSGGYQKVTF

SEQ ID NO: 405178 - protein, 12 aa, Homo sapiens
  CDR3 for beta chain variable domain of TCR clone 202589 (TRBV2, TRBJ2-1)
CAYGPPGNEQFF

SEQ ID NO: 405179 - protein, 14 aa, Homo sapiens
  CDR3 for alpha chain variable domain of TCR clone 202590 (TRAV1-2, TRAJ16)
CAVNRFSDGQKLLF

SEQ ID NO: 405180 - protein, 17 aa, Homo sapiens
  CDR3 for beta chain variable domain of TCR clone 202590 (TRBV11-2, TRBJ2-3)
CQQLRGASRGAPNTQYF

SEQ ID NO: 405181 - protein, 16 aa, Homo sapiens
  CDR3 for alpha chain variable domain of TCR clone 202591 (TRAV20, TRAJ28)
CAVRDPSGAGSYQLTF

SEQ ID NO: 405182 - protein, 15 aa, Homo sapiens
  CDR3 for beta chain variable domain of TCR clone 202591 (TRBV7-3, TRBJ2-2)
CASSETGQGTGELFF

SEQ ID NO: 405183 - protein, 13 aa, Homo sapiens
  CDR3 for alpha chain variable domain of TCR clone 202592 (TRAV12-3, TRAJ21)
CAPGPHNFNKFYF

SEQ ID NO: 405184 - protein, 12 aa, Homo sapiens
  CDR3 for beta chain variable domain of TCR clone 202592 (TRBV6-5, TRBJ2-7)
CASSDRQNEQYF

SEQ ID NO: 405185 - protein, 12 aa, Homo sapiens
  CDR3 for alpha chain variable domain of TCR clone 202593 (TRAV3, TRAJ26)
CAMRDYGQNFVF

SEQ ID NO: 405186 - protein, 16 aa, Homo sapiens
  CDR3 for beta chain variable domain of TCR clone 202593 (TRBV11-2, TRBJ1-2)
CASSPSGREANYGYTF

SEQ ID NO: 405187 - protein, 17 aa, Homo sapiens
  CDR3 for alpha chain variable domain of TCR clone 202594 (TRAV1-2, TRAJ8)
CAVRDPDENTGFQKLVF

SEQ ID NO: 405188 - protein, 16 aa, Homo sapiens
  CDR3 for beta chain variable domain of TCR clone 202594 (TRBV7-9, TRBJ2-2)
CASSGFGGANTGELFF

SEQ ID NO: 405189 - protein, 15 aa, Homo sapiens
  CDR3 for alpha chain variable domain of TCR clone 202595 (TRAV4, TRAJ36)
CLVGDRQTGANNLVF

SEQ ID NO: 405190 - protein, 15 aa, Homo sapiens
  CDR3 for beta chain variable domain of TCR clone 202595 (TRBV7-6, TRBJ2-1)
CASSSLAGEGNEQFF

SEQ ID NO: 405191 - protein, 15 aa, Homo sapiens
  CDR3 for alpha chain variable domain of TCR clone 202596 (TRAV38-1, TRAJ37)
CAFIQGSGNTGKLIF

SEQ ID NO: 405192 - protein, 12 aa, Homo sapiens
  CDR3 for beta chain variable domain of TCR clone 202596 (TRBV7-9, TRBJ2-7)
CASSFGSYEQYF

SEQ ID NO: 405193 - protein, 16 aa, Homo sapiens
  CDR3 for alpha chain variable domain of TCR clone 202597 (TRAV30, TRAJ24)
CGTEIEDADSWGKFQF

SEQ ID NO: 405194 - protein, 14 aa, Homo sapiens
  CDR3 for beta chain variable domain of TCR clone 202597 (TRBV12-5, TRBJ2-5)
CASGSRTQQETQYF

SEQ ID NO: 405195 - protein, 17 aa, Homo sapiens
  CDR3 for alpha chain variable domain of TCR clone 202598 (TRAV24, TRAJ42)
CAFRVKNYGGSQGNLIF

SEQ ID NO: 405196 - protein, 13 aa, Homo sapiens
  CDR3 for beta chain variable domain of TCR clone 202598 (TRBV18, TRBJ1-1)
CASSGGRNTEAFF

SEQ ID NO: 405197 - protein, 15 aa, Homo sapiens
  CDR3 for alpha chain variable domain of TCR clone 202599 (TRAV21, TRAJ13)
CAVRPTSGGYQKVTV

SEQ ID NO: 405198 - protein, 18 aa, Homo sapiens
  CDR3 for beta chain variable domain of TCR clone 202599 (TRBV11-3, TRBJ2-1)
CASSSYPGGRDSYNEQFF

SEQ ID NO: 405199 - protein, 15 aa, Homo sapiens
  CDR3 for alpha chain variable domain of TCR clone 202600 (TRAV26-1, TRAJ29)
CIVRVEGSGNTPLVF

SEQ ID NO: 405200 - protein, 17 aa, Homo sapiens
  CDR3 for beta chain variable domain of TCR clone 202600 (TRBV28, TRBJ2-5)
CASSTPDGDALQETQYF

SEQ ID NO: 405201 - protein, 13 aa, Homo sapiens
  CDR3 for alpha chain variable domain of TCR clone 202601 (TRAV12-1, TRAJ9)
CVVLNTGGFKTIF

SEQ ID NO: 405202 - protein, 11 aa, Homo sapiens
  CDR3 for beta chain variable domain of TCR clone 202601 (TRBV6-3, TRBJ2-3)
CATGQADTQYF

SEQ ID NO: 405203 - protein, 11 aa, Homo sapiens
  CDR3 for alpha chain variable domain of TCR clone 202602 (TRAV12-1, TRAJ30)
CVVNGQDKIIF

SEQ ID NO: 405204 - protein, 12 aa, Homo sapiens
  CDR3 for beta chain variable domain of TCR clone 202602 (TRBV27, TRBJ2-2)
CASKLFTGGLFF

SEQ ID NO: 405205 - protein, 15 aa, Homo sapiens
  CDR3 for alpha chain variable domain of TCR clone 202603 (TRAV26-2, TRAJ28)
CILVESGAGSYQHTF

SEQ ID NO: 405206 - protein, 11 aa, Homo sapiens
  CDR3 for beta chain variable domain of TCR clone 202603 (TRBV25-1, TRBJ2-7)
CASSTSYEQYF

SEQ ID NO: 405207 - protein, 13 aa, Homo sapiens
  CDR3 for alpha chain variable domain of TCR clone 202604 (TRAV35, TRAJ57)
CAGPQGGSERLVF

SEQ ID NO: 405208 - protein, 16 aa, Homo sapiens
  CDR3 for beta chain variable domain of TCR clone 202604 (TRBV7-2, TRBJ1-5)
CASSWTGGPGNQPQHF

SEQ ID NO: 405209 - protein, 11 aa, Homo sapiens
  CDR3 for alpha chain variable domain of TCR clone 202605 (TRAV13-2, TRAJ23)
CAESPRGKLIF

SEQ ID NO: 405210 - protein, 13 aa, Homo sapiens
  CDR3 for beta chain variable domain of TCR clone 202605 (TRBV24-1, TRBJ1-4)
CATNNGRSEKLFF

SEQ ID NO: 405211 - protein, 13 aa, Homo sapiens
  CDR3 for alpha chain variable domain of TCR clone 202606 (TRAV12-2, TRAJ52)
CAVSGTSYGKLTF

SEQ ID NO: 405212 - protein, 15 aa, Homo sapiens
  CDR3 for beta chain variable domain of TCR clone 202606 (TRBV7-3, TRBJ2-2)
CASSETGQGTGELFF

SEQ ID NO: 405213 - protein, 12 aa, Homo sapiens
  CDR3 for alpha chain variable domain of TCR clone 202607 (TRAV26-1, TRAJ26)
CIVYNYGPNFVF

SEQ ID NO: 405214 - protein, 15 aa, Homo sapiens
  CDR3 for beta chain variable domain of TCR clone 202607 (TRBV7-2, TRBJ2-3)
CASSLRGGSTDTQYF

SEQ ID NO: 405215 - protein, 12 aa, Homo sapiens
  CDR3 for alpha chain variable domain of TCR clone 202608 (TRAV12-3, TRAJ17)
CAMTLTGNKLAF

SEQ ID NO: 405216 - protein, 13 aa, Homo sapiens
  CDR3 for beta chain variable domain of TCR clone 202608 (TRBV27, TRBJ1-1)
CASSLSIGAEAFF

SEQ ID NO: 405217 - protein, 15 aa, Homo sapiens
  CDR3 for alpha chain variable domain of TCR clone 202609 (TRAV26-1, TRAJ29)
CIVRVEGSGNTPLVF

SEQ ID NO: 405218 - protein, 13 aa, Homo sapiens
  CDR3 for beta chain variable domain of TCR clone 202609 (TRBV19, TRBJ2-5)
CASSGRAGETQYF

SEQ ID NO: 405219 - protein, 16 aa, Homo sapiens
  CDR3 for alpha chain variable domain of TCR clone 202610 (TRAV23/DV6, TRAJ9)
CAAIIGGNTGGFKTIF

SEQ ID NO: 405220 - protein, 17 aa, Homo sapiens
  CDR3 for beta chain variable domain of TCR clone 202610 (TRBV13, TRBJ2-3)
CASSLSRVAGGRNTQYF

SEQ ID NO: 405221 - protein, 19 aa, Homo sapiens
  CDR3 for alpha chain variable domain of TCR clone 202611 (TRAV23/DV6, TRAJ9)
CSKHRLNGAGHTGGFKTIF

SEQ ID NO: 405222 - protein, 15 aa, Homo sapiens
  CDR3 for beta chain variable domain of TCR clone 202611 (TRBV6-3, TRBJ2-1)
CASSYASDSYNEQFF

SEQ ID NO: 405223 - protein, 11 aa, Homo sapiens
  CDR3 for alpha chain variable domain of TCR clone 202612 (TRAV17, TRAJ31)
CATSNNARLMF

SEQ ID NO: 405224 - protein, 14 aa, Homo sapiens
  CDR3 for beta chain variable domain of TCR clone 202612 (TRBV18, TRBJ2-7)
CANSPRGGAYEQYF

SEQ ID NO: 405225 - protein, 15 aa, Homo sapiens
  CDR3 for alpha chain variable domain of TCR clone 202613 (TRAV3, TRAJ4)
CAVRDGTGGYNKLIF

SEQ ID NO: 405226 - protein, 15 aa, Homo sapiens
  CDR3 for beta chain variable domain of TCR clone 202613 (TRBV20-1, TRBJ2-1)
CSARGIGGTYDEQFF

SEQ ID NO: 405227 - protein, 14 aa, Homo sapiens
  CDR3 for alpha chain variable domain of TCR clone 202614 (TRAV12-3, TRAJ10)
SHLPLTGGGNKLTF

SEQ ID NO: 405228 - protein, 12 aa, Homo sapiens
  CDR3 for beta chain variable domain of TCR clone 202614 (TRBV27, TRBJ2-1)
CASRGFYNEQFF

SEQ ID NO: 405229 - protein, 14 aa, Homo sapiens
  CDR3 for alpha chain variable domain of TCR clone 202615 (TRAV13-1, TRAJ12)
CAASYMDSSYKLIF

SEQ ID NO: 405230 - protein, 12 aa, Homo sapiens
  CDR3 for beta chain variable domain of TCR clone 202615 (TRBV2, TRBJ2-5)
CQLRRNPRDQYF

SEQ ID NO: 405231 - protein, 22 aa, Homo sapiens
  CDR3 for alpha chain variable domain of TCR clone 202616 (TRAV1-2, TRAJ37)
CAVRDFMALATQQTNLWARDNF

SEQ ID NO: 405232 - protein, 14 aa, Homo sapiens
  CDR3 for beta chain variable domain of TCR clone 202616 (TRBV2, TRBJ2-5)
CASSEVLAQETQYF

SEQ ID NO: 405233 - protein, 13 aa, Homo sapiens
  CDR3 for alpha chain variable domain of TCR clone 202617 (TRAV13-1, TRAJ5)
CAASDTGRRALTF

SEQ ID NO: 405234 - protein, 13 aa, Homo sapiens
  CDR3 for beta chain variable domain of TCR clone 202617 (TRBV20-1, TRBJ1-5)
CSARARGLHTQHF

SEQ ID NO: 405235 - protein, 14 aa, Homo sapiens
  CDR3 for alpha chain variable domain of TCR clone 202618 (TRAV26-1, TRAJ26)
CIVRATFLGQNFVF

SEQ ID NO: 405236 - protein, 16 aa, Homo sapiens
  CDR3 for beta chain variable domain of TCR clone 202618 (TRBV12-4, TRBJ2-5)
CASSFFVRGRQETQYF

SEQ ID NO: 405237 - protein, 11 aa, Homo sapiens
  CDR3 for alpha chain variable domain of TCR clone 202619 (TRAV21, TRAJ48)
CAVDGNEELTF

SEQ ID NO: 405238 - protein, 15 aa, Homo sapiens
  CDR3 for beta chain variable domain of TCR clone 202619 (TRBV6-6, TRBJ2-5)
CASSPGGGLEETQYF

SEQ ID NO: 405239 - protein, 13 aa, Homo sapiens
  CDR3 for alpha chain variable domain of TCR clone 202620 (TRAV8-3, TRAJ43)
CAVGPDNNNGMRF

SEQ ID NO: 405240 - protein, 14 aa, Homo sapiens
  CDR3 for beta chain variable domain of TCR clone 202620 (TRBV20-1, TRBJ1-3)
CSASPTGAGNTIYF

SEQ ID NO: 405241 - protein, 14 aa, Homo sapiens
  CDR3 for alpha chain variable domain of TCR clone 202621 (TRAV29/DV5, TRAJ36)
CAARRKTGATNLFF

SEQ ID NO: 405242 - protein, 13 aa, Homo sapiens
  CDR3 for beta chain variable domain of TCR clone 202621 (TRBV15, TRBJ1-6)
CATSGGLNSPLHF

SEQ ID NO: 405243 - protein, 14 aa, Homo sapiens
  CDR3 for alpha chain variable domain of TCR clone 202622 (TRAV1-2, TRAJ16)
CAVNRFSDGQKLLF

SEQ ID NO: 405244 - protein, 11 aa, Homo sapiens
  CDR3 for beta chain variable domain of TCR clone 202622 (TRBV11-2, TRBJ2-2)
CSSLGGGELFF

SEQ ID NO: 405245 - protein, 12 aa, Homo sapiens
  CDR3 for alpha chain variable domain of TCR clone 202623 (TRAV8-4, TRAJ43)
CAVSGNNNDMRF

SEQ ID NO: 405246 - protein, 15 aa, Homo sapiens
  CDR3 for beta chain variable domain of TCR clone 202623 (TRBV11-3, TRBJ2-3)
CASLKDGREGDTQYF

SEQ ID NO: 405247 - protein, 13 aa, Homo sapiens
  CDR3 for alpha chain variable domain of TCR clone 202624 (TRAV6, TRAJ5)
CAPKATGRRALTF

SEQ ID NO: 405248 - protein, 14 aa, Homo sapiens
  CDR3 for beta chain variable domain of TCR clone 202624 (TRBV4-2, TRBJ2-5)
CASSQDRGRETQYF

SEQ ID NO: 405249 - protein, 17 aa, Homo sapiens
  CDR3 for alpha chain variable domain of TCR clone 202625 (TRAV3, TRAJ6)
CAVRDGPRAGGSYIHTL

SEQ ID NO: 405250 - protein, 14 aa, Homo sapiens
  CDR3 for beta chain variable domain of TCR clone 202625 (TRBV7-2, TRBJ2-7)
CASSPKTSFYEQYF

SEQ ID NO: 405251 - protein, 16 aa, Homo sapiens
  CDR3 for alpha chain variable domain of TCR clone 202626 (TRAV35, TRAJ28)
CAGQKYSGAGSYQLTF

SEQ ID NO: 405252 - protein, 16 aa, Homo sapiens
  CDR3 for beta chain variable domain of TCR clone 202626 (TRBV7-3, TRBJ2-2)
CASSLKRGTSSGELFF

SEQ ID NO: 405253 - protein, 14 aa, Homo sapiens
  CDR3 for alpha chain variable domain of TCR clone 202627 (TRAV12-3, TRAJ10)
SHLPLPGGGNKLTF

SEQ ID NO: 405254 - protein, 11 aa, Homo sapiens
  CDR3 for beta chain variable domain of TCR clone 202627 (TRBV11-2, TRBJ2-2)
CASSLPGELFF

SEQ ID NO: 405255 - protein, 13 aa, Homo sapiens
  CDR3 for alpha chain variable domain of TCR clone 202628 (TRAV12-2, TRAJ10)
CAVPTGGGNKLTF

SEQ ID NO: 405256 - protein, 15 aa, Homo sapiens
  CDR3 for beta chain variable domain of TCR clone 202628 (TRBV7-6, TRBJ2-1)
CASSLGGQSHNEQFF

SEQ ID NO: 405257 - protein, 14 aa, Homo sapiens
  CDR3 for alpha chain variable domain of TCR clone 202629 (TRAV3, TRAJ26)
CCERPDNYGQNFVF

SEQ ID NO: 405258 - protein, 17 aa, Homo sapiens
  CDR3 for beta chain variable domain of TCR clone 202629 (TRBV13, TRBJ2-3)
CASSLSRVAGGEEYAVF

SEQ ID NO: 405259 - protein, 16 aa, Homo sapiens
  CDR3 for alpha chain variable domain of TCR clone 202630 (TRAV12-3, TRAJ53)
CAMSPGSGGRNYKLTF

SEQ ID NO: 405260 - protein, 13 aa, Homo sapiens
  CDR3 for beta chain variable domain of TCR clone 202630 (TRBV7-2, TRBJ2-5)
CASSQTSVETQYF

SEQ ID NO: 405261 - protein, 13 aa, Homo sapiens
  CDR3 for alpha chain variable domain of TCR clone 202631 (TRAV3, TRAJ21)
CAVREPDFNKSYF

SEQ ID NO: 405262 - protein, 15 aa, Homo sapiens
  CDR3 for beta chain variable domain of TCR clone 202631 (TRBV6-1, TRBJ2-1)
CASSELRGQYNEQFF

SEQ ID NO: 405263 - protein, 14 aa, Homo sapiens
  CDR3 for alpha chain variable domain of TCR clone 202632 (TRAV3, TRAJ7)
CAVREEVREQQTRF

SEQ ID NO: 405264 - protein, 12 aa, Homo sapiens
  CDR3 for beta chain variable domain of TCR clone 202632 (TRBV7-8, TRBJ2-7)
CASSLGDREQYF

SEQ ID NO: 405265 - protein, 14 aa, Homo sapiens
  CDR3 for alpha chain variable domain of TCR clone 202633 (TRAV12-2, TRAJ40)
CAVKIPSGTYKYIF

SEQ ID NO: 405266 - protein, 14 aa, Homo sapiens
  CDR3 for beta chain variable domain of TCR clone 202633 (TRBV20-1, TRBJ2-7)
CSAKRGRSSYEQYF

SEQ ID NO: 405267 - protein, 12 aa, Homo sapiens
  CDR3 for alpha chain variable domain of TCR clone 202634 (TRAV26-2, TRAJ21)
CILKGNFNKFYF

SEQ ID NO: 405268 - protein, 14 aa, Homo sapiens
  CDR3 for beta chain variable domain of TCR clone 202634 (TRBV7-9, TRBJ1-1)
CSSTPLQSYTEAFF

SEQ ID NO: 405269 - protein, 15 aa, Homo sapiens
  CDR3 for alpha chain variable domain of TCR clone 202635 (TRAV13-1, TRAJ27)
CAARELNTNAGKSTF

SEQ ID NO: 405270 - protein, 12 aa, Homo sapiens
  CDR3 for beta chain variable domain of TCR clone 202635 (TRBV7-8, TRBJ2-7)
CASSRGDREQYF

SEQ ID NO: 405271 - protein, 16 aa, Homo sapiens
  CDR3 for alpha chain variable domain of TCR clone 202636 (TRAV3, TRAJ37)
CAVRGKGSGNTGKLIF

SEQ ID NO: 405272 - protein, 12 aa, Homo sapiens
  CDR3 for beta chain variable domain of TCR clone 202636 (TRBV11-2, TRBJ2-2)
CASGLGGGELFF

SEQ ID NO: 405273 - protein, 18 aa, Homo sapiens
  CDR3 for alpha chain variable domain of TCR clone 202637 (TRAV21, TRAJ52)
CAVRPSPAGGTSYGKLTF

SEQ ID NO: 405274 - protein, 13 aa, Homo sapiens
  CDR3 for beta chain variable domain of TCR clone 202637 (TRBV10-3, TRBJ2-7)
CASKLAENYEQYF

SEQ ID NO: 405275 - protein, 14 aa, Homo sapiens
  CDR3 for alpha chain variable domain of TCR clone 202638 (TRAV1-2, TRAJ8)
CAVREYTGFQKLVF

SEQ ID NO: 405276 - protein, 18 aa, Homo sapiens
  CDR3 for beta chain variable domain of TCR clone 202638 (TRBV20-1, TRBJ2-6)
CSAETTPTHGSGANVLTF

SEQ ID NO: 405277 - protein, 16 aa, Homo sapiens
  CDR3 for alpha chain variable domain of TCR clone 202639 (TRAV3, TRAJ10)
CAARDMRAGGGNKLTL

SEQ ID NO: 405278 - protein, 17 aa, Homo sapiens
  CDR3 for beta chain variable domain of TCR clone 202639 (TRBV14, TRBJ2-1)
CASSQDRRVSSYNEQFF

SEQ ID NO: 405279 - protein, 16 aa, Homo sapiens
  CDR3 for alpha chain variable domain of TCR clone 202640 (TRAV16, TRAJ52)
CAPSAASGTSYGKLTF

SEQ ID NO: 405280 - protein, 12 aa, Homo sapiens
  CDR3 for beta chain variable domain of TCR clone 202640 (TRBV12-4, TRBJ1-3)
CASSFSGNTIYF

SEQ ID NO: 405281 - protein, 16 aa, Homo sapiens
  CDR3 for alpha chain variable domain of TCR clone 202641 (TRAV30, TRAJ24)
CGTEIVDAASWGKFQF

SEQ ID NO: 405282 - protein, 20 aa, Homo sapiens
  CDR3 for beta chain variable domain of TCR clone 202641 (TRBV7-8, TRBJ2-2)
CASSHLFPGPTIHITGELFF

SEQ ID NO: 405283 - protein, 13 aa, Homo sapiens
  CDR3 for alpha chain variable domain of TCR clone 202642 (TRAV8-6, TRAJ21)
CAASPSSLNKFYF

SEQ ID NO: 405284 - protein, 18 aa, Homo sapiens
  CDR3 for beta chain variable domain of TCR clone 202642 (TRBV11-2, TRBJ2-3)
CASSLGGASRGAPNTQYF

SEQ ID NO: 405285 - protein, 15 aa, Homo sapiens
  CDR3 for alpha chain variable domain of TCR clone 202643 (TRAV8-4, TRAJ8)
CAVRDLNTGFQKLVF

SEQ ID NO: 405286 - protein, 13 aa, Homo sapiens
  CDR3 for beta chain variable domain of TCR clone 202643 (TRBV4-2, TRBJ1-1)
CASSQAGNTEAFF

SEQ ID NO: 405287 - protein, 12 aa, Homo sapiens
  CDR3 for alpha chain variable domain of TCR clone 202644 (TRAV8-3, TRAJ45)
IVLGGGADGLTF

SEQ ID NO: 405288 - protein, 13 aa, Homo sapiens
  CDR3 for beta chain variable domain of TCR clone 202644 (TRBV10-3, TRBJ2-7)
CASELAVNYEQYF

SEQ ID NO: 405289 - protein, 13 aa, Homo sapiens
  CDR3 for alpha chain variable domain of TCR clone 202645 (TRAV8-4, TRAJ10)
CAAFTGGGNKPTF

SEQ ID NO: 405290 - protein, 13 aa, Homo sapiens
  CDR3 for beta chain variable domain of TCR clone 202645 (TRBV7-9, TRBJ1-2)
CASSLKQNYGYTF

SEQ ID NO: 405291 - protein, 13 aa, Homo sapiens
  CDR3 for alpha chain variable domain of TCR clone 202646 (TRAV23/DV6, TRAJ21)
CAASREQLQQILL

SEQ ID NO: 405292 - protein, 16 aa, Homo sapiens
  CDR3 for beta chain variable domain of TCR clone 202646 (TRBV20-1, TRBJ2-3)
CSAVSDRGPIADTQYF

SEQ ID NO: 405293 - protein, 13 aa, Homo sapiens
  CDR3 for alpha chain variable domain of TCR clone 202647 (TRAV30, TRAJ49)
CGTESQPVTSSIL

SEQ ID NO: 405294 - protein, 14 aa, Homo sapiens
  CDR3 for beta chain variable domain of TCR clone 202647 (TRBV19, TRBJ2-1)
CASPTFVLSGEQFF

SEQ ID NO: 405295 - protein, 11 aa, Homo sapiens
  CDR3 for alpha chain variable domain of TCR clone 202648 (TRAV2, TRAJ20)
CAVSDDYKLRF

SEQ ID NO: 405296 - protein, 20 aa, Homo sapiens
  CDR3 for beta chain variable domain of TCR clone 202648 (TRBV19, TRBJ2-1)
CASSISRTVTSTRLNNEQFF

SEQ ID NO: 405297 - protein, 16 aa, Homo sapiens
  CDR3 for alpha chain variable domain of TCR clone 202649 (TRAV4, TRAJ5)
CLVGPDHGHGQESTYF

SEQ ID NO: 405298 - protein, 13 aa, Homo sapiens
  CDR3 for beta chain variable domain of TCR clone 202649 (TRBV27, TRBJ2-1)
CASRTLGVGEQFF

SEQ ID NO: 405299 - protein, 14 aa, Homo sapiens
  CDR3 for alpha chain variable domain of TCR clone 202650 (TRAV1-2, TRAJ8)
CAVREDTGFQKLVF

SEQ ID NO: 405300 - protein, 19 aa, Homo sapiens
  CDR3 for beta chain variable domain of TCR clone 202650 (TRBV11-3, TRBJ2-2)
CASSTRPGAKTTTTGELFF

SEQ ID NO: 405301 - protein, 14 aa, Homo sapiens
  CDR3 for alpha chain variable domain of TCR clone 202651 (TRAV17, TRAJ35)
CATDRQALGMCCIA

SEQ ID NO: 405302 - protein, 19 aa, Homo sapiens
  CDR3 for beta chain variable domain of TCR clone 202651 (TRBV11-3, TRBJ2-2)
CASSTRPGAKTTNTGELFF

SEQ ID NO: 405303 - protein, 15 aa, Homo sapiens
  CDR3 for alpha chain variable domain of TCR clone 202652 (TRAV3, TRAJ13)
CAVRVYSGGYQKVTF

SEQ ID NO: 405304 - protein, 16 aa, Homo sapiens
  CDR3 for beta chain variable domain of TCR clone 202652 (TRBV11-2, TRBJ2-2)
CASSLRTGNLIGELFF

SEQ ID NO: 405305 - protein, 11 aa, Homo sapiens
  CDR3 for alpha chain variable domain of TCR clone 202653 (TRAV8-3, TRAJ49)
CAVNTGNQFYF

SEQ ID NO: 405306 - protein, 22 aa, Homo sapiens
  CDR3 for beta chain variable domain of TCR clone 202653 (TRBV11-2, TRBJ1-4)
CASSLDITRRGIPRKDNEKLFF

SEQ ID NO: 405307 - protein, 16 aa, Homo sapiens
  CDR3 for alpha chain variable domain of TCR clone 202654 (TRAV8-3, TRAJ13)
CAVGAYPSGGYQKVTF

SEQ ID NO: 405308 - protein, 16 aa, Homo sapiens
  CDR3 for beta chain variable domain of TCR clone 202654 (TRBV7-3, TRBJ2-1)
CASSLEGYRSYNEQFF

SEQ ID NO: 405309 - protein, 15 aa, Homo sapiens
  CDR3 for alpha chain variable domain of TCR clone 202655 (TRAV12-3, TRAJ6)
CAMSATTGGSYIPTF

SEQ ID NO: 405310 - protein, 19 aa, Homo sapiens
  CDR3 for beta chain variable domain of TCR clone 202655 (TRBV7-3, TRBJ1-2)
CASSFPQGNDGELWLHLRF

SEQ ID NO: 405311 - protein, 16 aa, Homo sapiens
  CDR3 for alpha chain variable domain of TCR clone 202656 (TRAV3, TRAJ23)
CAVKIGIYNQGGKLIF

SEQ ID NO: 405312 - protein, 17 aa, Homo sapiens
  CDR3 for beta chain variable domain of TCR clone 202656 (TRBV10-3, TRBJ2-6)
CAISESTAPSGANVLIF

SEQ ID NO: 405313 - protein, 16 aa, Homo sapiens
  CDR3 for alpha chain variable domain of TCR clone 202657 (TRAV12-3, TRAJ45)
CAMGWGSGGSADGLTF

SEQ ID NO: 405314 - protein, 18 aa, Homo sapiens
  CDR3 for beta chain variable domain of TCR clone 202657 (TRBV12-4, TRBJ2-2)
CASSLVAGTRGRTGELFF

SEQ ID NO: 405315 - protein, 13 aa, Homo sapiens
  CDR3 for alpha chain variable domain of TCR clone 202658 (TRAV8-3, TRAJ36)
CAVGTTGANNLFF

SEQ ID NO: 405316 - protein, 13 aa, Homo sapiens
  CDR3 for beta chain variable domain of TCR clone 202658 (TRBV6-1, TRBJ1-1)
CASSRQGNTEAFF

SEQ ID NO: 405317 - protein, 11 aa, Homo sapiens
  CDR3 for alpha chain variable domain of TCR clone 202659 (TRAV1-2, TRAJ20)
CDVSNDYKLSF

SEQ ID NO: 405318 - protein, 19 aa, Homo sapiens
  CDR3 for beta chain variable domain of TCR clone 202659 (TRBV11-3, TRBJ2-2)
CASSTRPGAKTTNTGELFF

SEQ ID NO: 405319 - protein, 14 aa, Homo sapiens
  CDR3 for alpha chain variable domain of TCR clone 202660 (TRAV1-2, TRAJ8)
CAGREDTGFQKLVF

SEQ ID NO: 405320 - protein, 12 aa, Homo sapiens
  CDR3 for beta chain variable domain of TCR clone 202660 (TRBV14, TRBJ2-5)
CASSQLKETQYF

SEQ ID NO: 405321 - protein, 15 aa, Homo sapiens
  CDR3 for alpha chain variable domain of TCR clone 202661 (TRAV13-1, TRAJ53)
YAAHSPGGSNYQLTF

SEQ ID NO: 405322 - protein, 16 aa, Homo sapiens
  CDR3 for beta chain variable domain of TCR clone 202661 (TRBV2, TRBJ2-3)
CASSTSVEGVTDTQYF

SEQ ID NO: 405323 - protein, 12 aa, Homo sapiens
  CDR3 for alpha chain variable domain of TCR clone 202662 (TRAV12-3, TRAJ34)
CAMGYNTDTLIF

SEQ ID NO: 405324 - protein, 15 aa, Homo sapiens
  CDR3 for beta chain variable domain of TCR clone 202662 (TRBV28, TRBJ2-1)
CASSIIAGGRSEQFF

SEQ ID NO: 405325 - protein, 12 aa, Homo sapiens
  CDR3 for alpha chain variable domain of TCR clone 202663 (TRAV38-1, TRAJ47)
CAFETYGNRLVF

SEQ ID NO: 405326 - protein, 15 aa, Homo sapiens
  CDR3 for beta chain variable domain of TCR clone 202663 (TRBV5-7, TRBJ2-7)
CASSGGRPVPYEQYF

SEQ ID NO: 405327 - protein, 17 aa, Homo sapiens
  CDR3 for alpha chain variable domain of TCR clone 202664 (TRAV3, TRAJ6)
CAVSRRTDTGGSYIPIF

SEQ ID NO: 405328 - protein, 18 aa, Homo sapiens
  CDR3 for beta chain variable domain of TCR clone 202664 (TRBV7-2, TRBJ2-3)
CASSLETSRGRKADTQYF

SEQ ID NO: 405329 - protein, 13 aa, Homo sapiens
  CDR3 for alpha chain variable domain of TCR clone 202665 (TRAV21, TRAJ57)
CAVTPGGSEKLVF

SEQ ID NO: 405330 - protein, 11 aa, Homo sapiens
  CDR3 for beta chain variable domain of TCR clone 202665 (TRBV11-2, TRBJ2-2)
CASSLPGELFF

SEQ ID NO: 405331 - protein, 13 aa, Homo sapiens
  CDR3 for alpha chain variable domain of TCR clone 202666 (TRAV23/DV6, TRAJ44)
TRGNTGTASKLTF

SEQ ID NO: 405332 - protein, 15 aa, Homo sapiens
  CDR3 for beta chain variable domain of TCR clone 202666 (TRBV7-2, TRBJ1-2)
CASSLVSGGDYGYTF

SEQ ID NO: 405333 - protein, 12 aa, Homo sapiens
  CDR3 for alpha chain variable domain of TCR clone 202667 (TRAV12-1, TRAJ34)
CVVAGATDKLIF

SEQ ID NO: 405334 - protein, 16 aa, Homo sapiens
  CDR3 for beta chain variable domain of TCR clone 202667 (TRBV5-4, TRBJ2-3)
CASQQPGAGGADTQYF

SEQ ID NO: 405335 - protein, 12 aa, Homo sapiens
  CDR3 for alpha chain variable domain of TCR clone 202668 (TRAV12-3, TRAJ17)
CAMTLTGNKLTF

SEQ ID NO: 405336 - protein, 15 aa, Homo sapiens
  CDR3 for beta chain variable domain of TCR clone 202668 (TRBV20-1, TRBJ2-7)
CSARKRVSGMDEQYF

SEQ ID NO: 405337 - protein, 18 aa, Homo sapiens
  CDR3 for alpha chain variable domain of TCR clone 202669 (TRAV12-2, )
CAVEDIQNPDPAAYQLRD

SEQ ID NO: 405338 - protein, 20 aa, Homo sapiens
  CDR3 for beta chain variable domain of TCR clone 202669 (TRBV11-3, TRBJ2-7)
CASSQRTSGSLRAVLRAGHQ

SEQ ID NO: 405339 - protein, 11 aa, Homo sapiens
  CDR3 for alpha chain variable domain of TCR clone 202670 (TRAV12-2, TRAJ31)
CAILNNARLKF

SEQ ID NO: 405340 - protein, 13 aa, Homo sapiens
  CDR3 for beta chain variable domain of TCR clone 202670 (TRBV20-1, TRBJ1-1)
CSARLGQGTEAFF

SEQ ID NO: 405341 - protein, 17 aa, Homo sapiens
  CDR3 for alpha chain variable domain of TCR clone 202671 (TRAV3, TRAJ6)
CAVRDGPRAGGSYIPTF

SEQ ID NO: 405342 - protein, 13 aa, Homo sapiens
  CDR3 for beta chain variable domain of TCR clone 202671 (TRBV27, TRBJ2-1)
CTSRTLGVGEQFF

SEQ ID NO: 405343 - protein, 15 aa, Homo sapiens
  CDR3 for alpha chain variable domain of TCR clone 202672 (TRAV40, TRAJ45)
CLLGDLGGGSDGLTF

SEQ ID NO: 405344 - protein, 13 aa, Homo sapiens
  CDR3 for beta chain variable domain of TCR clone 202672 (TRBV7-9, TRBJ1-2)
CANSLKQNYGYTF

SEQ ID NO: 405345 - protein, 20 aa, Homo sapiens
  CDR3 for alpha chain variable domain of TCR clone 202673 (TRAV8-3, TRAJ6)
CAAREEATYLHLEEEPALLF

SEQ ID NO: 405346 - protein, 15 aa, Homo sapiens
  CDR3 for beta chain variable domain of TCR clone 202673 (TRBV4-1, TRBJ2-3)
CASSNLAGGRDTQYF

SEQ ID NO: 405347 - protein, 14 aa, Homo sapiens
  CDR3 for alpha chain variable domain of TCR clone 202674 (TRAV9-2, TRAJ6)
CALSDPGGSYIPTF

SEQ ID NO: 405348 - protein, 19 aa, Homo sapiens
  CDR3 for beta chain variable domain of TCR clone 202674 (TRBV19, TRBJ2-2)
SISVPADLPGQGPPGSCFF

SEQ ID NO: 405349 - protein, 20 aa, Homo sapiens
  CDR3 for alpha chain variable domain of TCR clone 202675 (TRAV1-1, TRAJ39)
CLLLLRCESSAYNAGNMLTF

SEQ ID NO: 405350 - protein, 15 aa, Homo sapiens
  CDR3 for beta chain variable domain of TCR clone 202675 (TRBV7-2, TRBJ2-1)
CASSSGLAGGNEQFF

SEQ ID NO: 405351 - protein, 21 aa, Homo sapiens
  CDR3 for alpha chain variable domain of TCR clone 202676 (TRAV36/DV7, TRAJ39)
TATQTGDSAIYLPNAGNMLTF

SEQ ID NO: 405352 - protein, 16 aa, Homo sapiens
  CDR3 for beta chain variable domain of TCR clone 202676 (TRBV5-1, TRBJ2-2)
CASSSRTGGRTGELFF

SEQ ID NO: 405353 - protein, 15 aa, Homo sapiens
  CDR3 for alpha chain variable domain of TCR clone 202677 (TRAV8-3, TRAJ32)
CAVGPYGGAPNKLIF

SEQ ID NO: 405354 - protein, 14 aa, Homo sapiens
  CDR3 for beta chain variable domain of TCR clone 202677 (TRBV29-1, TRBJ2-2)
CSVLAETNTGELFF

SEQ ID NO: 405355 - protein, 14 aa, Homo sapiens
  CDR3 for alpha chain variable domain of TCR clone 202678 (TRAV1-1, TRAJ35)
CAVRSIGLGNVLHC

SEQ ID NO: 405356 - protein, 13 aa, Homo sapiens
  CDR3 for beta chain variable domain of TCR clone 202678 (TRBV10-3, TRBJ2-7)
CASKLAVSYEQYF

SEQ ID NO: 405357 - protein, 10 aa, Homo sapiens
  CDR3 for alpha chain variable domain of TCR clone 202679 (TRAV26-1, TRAJ40)
CIAGTYKYIF

SEQ ID NO: 405358 - protein, 15 aa, Homo sapiens
  CDR3 for beta chain variable domain of TCR clone 202679 (TRBV19, TRBJ2-1)
CASSSPGVPLDAQFF

SEQ ID NO: 405359 - protein, 13 aa, Homo sapiens
  CDR3 for alpha chain variable domain of TCR clone 202680 (TRAV3, TRAJ40)
CAVRGSGAYKYIF

SEQ ID NO: 405360 - protein, 13 aa, Homo sapiens
  CDR3 for beta chain variable domain of TCR clone 202680 (TRBV4-2, TRBJ1-1)
CASSQAGNTEAFF

SEQ ID NO: 405361 - protein, 14 aa, Homo sapiens
  CDR3 for alpha chain variable domain of TCR clone 202681 (TRAV12-1, TRAJ30)
CVVNIGNRDDKISF

SEQ ID NO: 405362 - protein, 14 aa, Homo sapiens
  CDR3 for beta chain variable domain of TCR clone 202681 (TRBV7-9, TRBJ2-5)
CASSPRPSGETQYF

SEQ ID NO: 405363 - protein, 12 aa, Homo sapiens
  CDR3 for alpha chain variable domain of TCR clone 202682 (TRAV12-3, TRAJ17)
CAMTLTGNKLTF

SEQ ID NO: 405364 - protein, 15 aa, Homo sapiens
  CDR3 for beta chain variable domain of TCR clone 202682 (TRBV20-1, TRBJ2-7)
CSARDRVSVMDEQYL

SEQ ID NO: 405365 - protein, 15 aa, Homo sapiens
  CDR3 for alpha chain variable domain of TCR clone 202683 (TRAV3, TRAJ3)
CAVRDRDSSASKIIF

SEQ ID NO: 405366 - protein, 18 aa, Homo sapiens
  CDR3 for beta chain variable domain of TCR clone 202683 (TRBV25-1, TRBJ1-2)
CASSGLQNGQGLIFGYPF

SEQ ID NO: 405367 - protein, 16 aa, Homo sapiens
  CDR3 for alpha chain variable domain of TCR clone 202684 (TRAV3, TRAJ37)
CAVRPHGSGNTGKLIF

SEQ ID NO: 405368 - protein, 13 aa, Homo sapiens
  CDR3 for beta chain variable domain of TCR clone 202684 (TRBV6-5, TRBJ1-2)
CASSYSQGVRYTF

SEQ ID NO: 405369 - protein, 12 aa, Homo sapiens
  CDR3 for alpha chain variable domain of TCR clone 202685 (TRAV12-3, TRAJ17)
CAMTLTGNKLTV

SEQ ID NO: 405370 - protein, 16 aa, Homo sapiens
  CDR3 for beta chain variable domain of TCR clone 202685 (TRBV20-1, TRBJ1-4)
CSAPGQGLLTNEKLFF

SEQ ID NO: 405371 - protein, 14 aa, Homo sapiens
  CDR3 for alpha chain variable domain of TCR clone 202686 (TRAV8-4, TRAJ13)
CAVTLSGGYQKVTF

SEQ ID NO: 405372 - protein, 15 aa, Homo sapiens
  CDR3 for beta chain variable domain of TCR clone 202686 (TRBV11-3, TRBJ2-2)
CASSYFSTGTGELFF

SEQ ID NO: 405373 - protein, 18 aa, Homo sapiens
  CDR3 for alpha chain variable domain of TCR clone 202687 (TRAV21, TRAJ52)
CAVRPSPAGGTSYGKLTF

SEQ ID NO: 405374 - protein, 17 aa, Homo sapiens
  CDR3 for beta chain variable domain of TCR clone 202687 (TRBV5-7, TRBJ1-1)
CASSLRFRGLMNTEAFF

SEQ ID NO: 405375 - protein, 14 aa, Homo sapiens
  CDR3 for alpha chain variable domain of TCR clone 202688 (TRAV8-3, TRAJ35)
CAVVPQGFGNVLYF

SEQ ID NO: 405376 - protein, 15 aa, Homo sapiens
  CDR3 for beta chain variable domain of TCR clone 202688 (TRBV6-1, TRBJ2-2)
CASSAGQGYTGELFF

SEQ ID NO: 405377 - protein, 14 aa, Homo sapiens
  CDR3 for alpha chain variable domain of TCR clone 202689 (TRAV13-2, TRAJ9)
CAENSFTGGFKTIF

SEQ ID NO: 405378 - protein, 13 aa, Homo sapiens
  CDR3 for beta chain variable domain of TCR clone 202689 (TRBV19, TRBJ2-7)
CAGSIDRTYEQYF

SEQ ID NO: 405379 - protein, 14 aa, Homo sapiens
  CDR3 for alpha chain variable domain of TCR clone 202690 (TRAV1-2, TRAJ16)
CAVNRFSDGPKLLF

SEQ ID NO: 405380 - protein, 15 aa, Homo sapiens
  CDR3 for beta chain variable domain of TCR clone 202690 (TRBV6-5, TRBJ2-1)
CASSYDAGAGNEQFF

SEQ ID NO: 405381 - protein, 19 aa, Homo sapiens
  CDR3 for alpha chain variable domain of TCR clone 202691 (TRAV21, TRAJ20)
GLVTQPPTSVLPNDYKLSF

SEQ ID NO: 405382 - protein, 16 aa, Homo sapiens
  CDR3 for beta chain variable domain of TCR clone 202691 (TRBV12-5, TRBJ2-5)
CASGPRTSGNQETQYF

SEQ ID NO: 405383 - protein, 14 aa, Homo sapiens
  CDR3 for alpha chain variable domain of TCR clone 202692 (TRAV3, TRAJ21)
CAVASQANFNKFYF

SEQ ID NO: 405384 - protein, 12 aa, Homo sapiens
  CDR3 for beta chain variable domain of TCR clone 202692 (TRBV6-3, TRBJ2-7)
CASSLTPYEQYF

SEQ ID NO: 405385 - protein, 15 aa, Homo sapiens
  CDR3 for alpha chain variable domain of TCR clone 202693 (TRAV35, TRAJ58)
CAGRRQETSGSRLTF

SEQ ID NO: 405386 - protein, 12 aa, Homo sapiens
  CDR3 for beta chain variable domain of TCR clone 202693 (TRBV7-8, TRBJ2-7)
CASSLGDREQYF

SEQ ID NO: 405387 - protein, 16 aa, Homo sapiens
  CDR3 for alpha chain variable domain of TCR clone 202694 (TRAV3, TRAJ37)
CAVRVRGSGNTGKLIY

SEQ ID NO: 405388 - protein, 13 aa, Homo sapiens
  CDR3 for beta chain variable domain of TCR clone 202694 (TRBV7-9, TRBJ1-2)
CASSLKQNYGYTF

SEQ ID NO: 405389 - protein, 14 aa, Homo sapiens
  CDR3 for alpha chain variable domain of TCR clone 202695 (TRAV16, TRAJ48)
CALTPGFGNEKLTF

SEQ ID NO: 405390 - protein, 13 aa, Homo sapiens
  CDR3 for beta chain variable domain of TCR clone 202695 (TRBV27, TRBJ1-1)
CASSLSIGAEAFF

SEQ ID NO: 405391 - protein, 12 aa, Homo sapiens
  CDR3 for alpha chain variable domain of TCR clone 202696 (TRAV27, TRAJ21)
CAGVRQLQQILL

SEQ ID NO: 405392 - protein, 18 aa, Homo sapiens
  CDR3 for beta chain variable domain of TCR clone 202696 (TRBV4-1, TRBJ1-5)
CASSQDPRGQGLNQPQHF

SEQ ID NO: 405393 - protein, 16 aa, Homo sapiens
  CDR3 for alpha chain variable domain of TCR clone 202697 (TRAV3, TRAJ21)
CAVRDLERGNFNKFYF

SEQ ID NO: 405394 - protein, 13 aa, Homo sapiens
  CDR3 for beta chain variable domain of TCR clone 202697 (TRBV4-2, TRBJ1-1)
CAISQAGNTEAFF

SEQ ID NO: 405395 - protein, 17 aa, Homo sapiens
  CDR3 for alpha chain variable domain of TCR clone 202698 (TRAV3, TRAJ6)
CAVRYGPRAGGSYLPTF

SEQ ID NO: 405396 - protein, 14 aa, Homo sapiens
  CDR3 for beta chain variable domain of TCR clone 202698 (TRBV7-2, TRBJ2-7)
CASSPKTSFYEQYF

SEQ ID NO: 405397 - protein, 14 aa, Homo sapiens
  CDR3 for alpha chain variable domain of TCR clone 202699 (TRAV1-2, TRAJ8)
CSVREDTGFPKLVF

SEQ ID NO: 405398 - protein, 15 aa, Homo sapiens
  CDR3 for beta chain variable domain of TCR clone 202699 (TRBV12-4, TRBJ2-5)
CASSPPTGLQETQYF

SEQ ID NO: 405399 - protein, 14 aa, Homo sapiens
  CDR3 for alpha chain variable domain of TCR clone 202700 (TRAV12-1, TRAJ30)
CVVNIGGRDDKIIF

SEQ ID NO: 405400 - protein, 14 aa, Homo sapiens
  CDR3 for beta chain variable domain of TCR clone 202700 (TRBV7-6, TRBJ2-3)
CASNSGGDANTQYF

SEQ ID NO: 405401 - protein, 12 aa, Homo sapiens
  CDR3 for alpha chain variable domain of TCR clone 202701 (TRAV20, TRAJ24)
CAVYNSWGKLQF

SEQ ID NO: 405402 - protein, 15 aa, Homo sapiens
  CDR3 for beta chain variable domain of TCR clone 202701 (TRBV20-1, TRBJ2-5)
CSAGVPPSGRETQYF

SEQ ID NO: 405403 - protein, 19 aa, Homo sapiens
  CDR3 for alpha chain variable domain of TCR clone 202702 (TRAV26-1, TRAJ22)
CCVLLHRWVFSGSARQLTF

SEQ ID NO: 405404 - protein, 15 aa, Homo sapiens
  CDR3 for beta chain variable domain of TCR clone 202702 (TRBV19, TRBJ2-4)
CASRGPRRGENIQYF

SEQ ID NO: 405405 - protein, 16 aa, Homo sapiens
  CDR3 for alpha chain variable domain of TCR clone 202703 (TRAV30, TRAJ24)
CGTEIVDADSWGKFQF

SEQ ID NO: 405406 - protein, 14 aa, Homo sapiens
  CDR3 for beta chain variable domain of TCR clone 202703 (TRBV11-3, TRBJ2-5)
CASSLGGHAETQYF

SEQ ID NO: 405407 - protein, 12 aa, Homo sapiens
  CDR3 for alpha chain variable domain of TCR clone 202704 (TRAV30, TRAJ43)
CGTEERGNEMRF

SEQ ID NO: 405408 - protein, 14 aa, Homo sapiens
  CDR3 for beta chain variable domain of TCR clone 202704 (TRBV12-5, TRBJ2-5)
CASGSRTHQETQYF

SEQ ID NO: 405409 - protein, 14 aa, Homo sapiens
  CDR3 for alpha chain variable domain of TCR clone 202705 (TRAV9-2, TRAJ39)
CAPYIYNAGNMLTF

SEQ ID NO: 405410 - protein, 13 aa, Homo sapiens
  CDR3 for beta chain variable domain of TCR clone 202705 (TRBV7-9, TRBJ1-2)
CASSLKQNYGYTF

SEQ ID NO: 405411 - protein, 14 aa, Homo sapiens
  CDR3 for alpha chain variable domain of TCR clone 202706 (TRAV13-1, TRAJ35)
CAASKGGFGKVLHC

SEQ ID NO: 405412 - protein, 15 aa, Homo sapiens
  CDR3 for beta chain variable domain of TCR clone 202706 (TRBV28, TRBJ2-1)
CASSGLAEVDNEQFF

SEQ ID NO: 405413 - protein, 12 aa, Homo sapiens
  CDR3 for alpha chain variable domain of TCR clone 202707 (TRAV21, TRAJ33)
CAKMDSNYQLIW

SEQ ID NO: 405414 - protein, 16 aa, Homo sapiens
  CDR3 for beta chain variable domain of TCR clone 202707 (TRBV19, TRBJ2-2)
CASSTARASNTGELFF

SEQ ID NO: 405415 - protein, 13 aa, Homo sapiens
  CDR3 for alpha chain variable domain of TCR clone 202708 (TRAV13-2, TRAJ15)
CAARPQAGTALIF

SEQ ID NO: 405416 - protein, 15 aa, Homo sapiens
  CDR3 for beta chain variable domain of TCR clone 202708 (TRBV11-2, TRBJ2-7)
CAGRFPGTGGYEQYF

SEQ ID NO: 405417 - protein, 12 aa, Homo sapiens
  CDR3 for alpha chain variable domain of TCR clone 202709 (TRAV38-2/DV8, TRAJ48)
CALWSGNEKLTF

SEQ ID NO: 405418 - protein, 15 aa, Homo sapiens
  CDR3 for beta chain variable domain of TCR clone 202709 (TRBV7-2, TRBJ2-3)
CASSSTGLETDTQYF

SEQ ID NO: 405419 - protein, 18 aa, Homo sapiens
  CDR3 for alpha chain variable domain of TCR clone 202710 (TRAV26-2, TRAJ54)
CILRDVEVGIHGAQKLVF

SEQ ID NO: 405420 - protein, 16 aa, Homo sapiens
  CDR3 for beta chain variable domain of TCR clone 202710 (TRBV6-1, TRBJ2-5)
CASSETLDRGAETQYF

SEQ ID NO: 405421 - protein, 12 aa, Homo sapiens
  CDR3 for alpha chain variable domain of TCR clone 202711 (TRAV12-3, TRAJ17)
CAMTLTGNKLTF

SEQ ID NO: 405422 - protein, 18 aa, Homo sapiens
  CDR3 for beta chain variable domain of TCR clone 202711 (TRBV4-3, TRBJ1-6)
GASSQETPASSYNSPLHV

SEQ ID NO: 405423 - protein, 11 aa, Homo sapiens
  CDR3 for alpha chain variable domain of TCR clone 202712 (TRAV35, TRAJ30)
CAGPGDDKIIF

SEQ ID NO: 405424 - protein, 14 aa, Homo sapiens
  CDR3 for beta chain variable domain of TCR clone 202712 (TRBV7-7, TRBJ1-6)
CASSQAGGGSPLHF

SEQ ID NO: 405425 - protein, 13 aa, Homo sapiens
  CDR3 for alpha chain variable domain of TCR clone 202713 (TRAV12-1, TRAJ11)
CVVNRAGYSTLPF

SEQ ID NO: 405426 - protein, 15 aa, Homo sapiens
  CDR3 for beta chain variable domain of TCR clone 202713 (TRBV7-3, TRBJ2-2)
CASSETGQGTGELFF

SEQ ID NO: 405427 - protein, 11 aa, Homo sapiens
  CDR3 for alpha chain variable domain of TCR clone 202714 (TRAV12-2, TRAJ31)
CAVMRWARLMF

SEQ ID NO: 405428 - protein, 15 aa, Homo sapiens
  CDR3 for beta chain variable domain of TCR clone 202714 (TRBV19, TRBJ2-7)
CASSIGGGLVNEQYF

SEQ ID NO: 405429 - protein, 12 aa, Homo sapiens
  CDR3 for alpha chain variable domain of TCR clone 202715 (TRAV21, TRAJ13)
PGPSGGYQKVTF

SEQ ID NO: 405430 - protein, 15 aa, Homo sapiens
  CDR3 for beta chain variable domain of TCR clone 202715 (TRBV7-9, TRBJ1-6)
CASRSPGRGNSPLHF

SEQ ID NO: 405431 - protein, 14 aa, Homo sapiens
  CDR3 for alpha chain variable domain of TCR clone 202716 (TRAV12-2, TRAJ13)
CAVKKTGGYQKVTF

SEQ ID NO: 405432 - protein, 14 aa, Homo sapiens
  CDR3 for beta chain variable domain of TCR clone 202716 (TRBV5-7, TRBJ2-1)
CASSSVANYNEQFF

SEQ ID NO: 405433 - protein, 11 aa, Homo sapiens
  CDR3 for alpha chain variable domain of TCR clone 202717 (TRAV12-3, TRAJ27)
CAMANAGKSTF

SEQ ID NO: 405434 - protein, 20 aa, Homo sapiens
  CDR3 for beta chain variable domain of TCR clone 202717 (TRBV7-8, TRBJ2-2)
CASSHLSPGPTIHITGELFF

SEQ ID NO: 405435 - protein, 13 aa, Homo sapiens
  CDR3 for alpha chain variable domain of TCR clone 202718 (TRAV21, TRAJ27)
CSARPGNAGKSTF

SEQ ID NO: 405436 - protein, 20 aa, Homo sapiens
  CDR3 for beta chain variable domain of TCR clone 202718 (TRBV4-2, TRBJ2-7)
CASSQASGGNLRAVLRAGHQ

SEQ ID NO: 405437 - protein, 17 aa, Homo sapiens
  CDR3 for alpha chain variable domain of TCR clone 202719 (TRAV3, TRAJ6)
CAVIDGPRAGGSYIPTF

SEQ ID NO: 405438 - protein, 16 aa, Homo sapiens
  CDR3 for beta chain variable domain of TCR clone 202719 (TRBV7-6, TRBJ2-7)
CASSGGTGALSYEQYF

SEQ ID NO: 405439 - protein, 13 aa, Homo sapiens
  CDR3 for alpha chain variable domain of TCR clone 202720 (TRAV3, TRAJ21)
CAVREPDFNKFYF

SEQ ID NO: 405440 - protein, 14 aa, Homo sapiens
  CDR3 for beta chain variable domain of TCR clone 202720 (TRBV4-1, TRBJ2-2)
CASSQAVNTGEPFF

SEQ ID NO: 405441 - protein, 14 aa, Homo sapiens
  CDR3 for alpha chain variable domain of TCR clone 202721 (TRAV12-2, TRAJ13)
CAVRKTGGYQKGTF

SEQ ID NO: 405442 - protein, 15 aa, Homo sapiens
  CDR3 for beta chain variable domain of TCR clone 202721 (TRBV27, TRBJ2-1)
CASSNGGGSSNEQFF

SEQ ID NO: 405443 - protein, 19 aa, Homo sapiens
  CDR3 for alpha chain variable domain of TCR clone 202722 (TRAV38-1, TRAJ53)
CAFMKHGLESGGSNYKLTF

SEQ ID NO: 405444 - protein, 16 aa, Homo sapiens
  CDR3 for beta chain variable domain of TCR clone 202722 (TRBV5-1, TRBJ2-7)
CASSLVAGGPSGEQYF

SEQ ID NO: 405445 - protein, 14 aa, Homo sapiens
  CDR3 for alpha chain variable domain of TCR clone 202723 (TRAV12-2, TRAJ13)
CAVKKTGGYQKVTF

SEQ ID NO: 405446 - protein, 14 aa, Homo sapiens
  CDR3 for beta chain variable domain of TCR clone 202723 (TRBV7-3, TRBJ1-1)
CASSLGTGYTEAVF

SEQ ID NO: 405447 - protein, 13 aa, Homo sapiens
  CDR3 for alpha chain variable domain of TCR clone 202724 (TRAV1-2, TRAJ9)
CAVLNTGGFKTIF

SEQ ID NO: 405448 - protein, 17 aa, Homo sapiens
  CDR3 for beta chain variable domain of TCR clone 202724 (TRBV11-2, TRBJ2-1)
CASSLYPPGVEYNEQFF

SEQ ID NO: 405449 - protein, 13 aa, Homo sapiens
  CDR3 for alpha chain variable domain of TCR clone 202725 (TRAV36/DV7, TRAJ37)
CAVFSSNTAKLIF

SEQ ID NO: 405450 - protein, 12 aa, Homo sapiens
  CDR3 for beta chain variable domain of TCR clone 202725 (TRBV11-2, TRBJ2-2)
CASSLGGGELFF

SEQ ID NO: 405451 - protein, 17 aa, Homo sapiens
  CDR3 for alpha chain variable domain of TCR clone 202726 (TRAV8-6, TRAJ8)
CAVEEGIENTGFQKFVF

SEQ ID NO: 405452 - protein, 12 aa, Homo sapiens
  CDR3 for beta chain variable domain of TCR clone 202726 (TRBV19, TRBJ1-4)
CASKDWPGGLFF

SEQ ID NO: 405453 - protein, 14 aa, Homo sapiens
  CDR3 for alpha chain variable domain of TCR clone 202727 (TRAV1-1, TRAJ23)
CAVSIYNQGGKLIF

SEQ ID NO: 405454 - protein, 15 aa, Homo sapiens
  CDR3 for beta chain variable domain of TCR clone 202727 (TRBV28, TRBJ2-5)
CASSPGQGSIETQYF

SEQ ID NO: 405455 - protein, 13 aa, Homo sapiens
  CDR3 for alpha chain variable domain of TCR clone 202728 (TRAV2, TRAJ21)
CAVEDLNCNKFYF

SEQ ID NO: 405456 - protein, 15 aa, Homo sapiens
  CDR3 for beta chain variable domain of TCR clone 202728 (TRBV28, TRBJ2-5)
CASSPGQGSIETQYF

SEQ ID NO: 405457 - protein, 11 aa, Homo sapiens
  CDR3 for alpha chain variable domain of TCR clone 202729 (TRAV2, TRAJ13)
CASGGYQKVTF

SEQ ID NO: 405458 - protein, 16 aa, Homo sapiens
  CDR3 for beta chain variable domain of TCR clone 202729 (TRBV11-3, TRBJ2-7)
CASSPHGAGGPYEQYF

SEQ ID NO: 405459 - protein, 13 aa, Homo sapiens
  CDR3 for alpha chain variable domain of TCR clone 202730 (TRAV16, TRAJ21)
CLRLGHNFNKFYF

SEQ ID NO: 405460 - protein, 15 aa, Homo sapiens
  CDR3 for beta chain variable domain of TCR clone 202730 (TRBV19, TRBJ2-1)
CASSIQATSYNEQFF

SEQ ID NO: 405461 - protein, 13 aa, Homo sapiens
  CDR3 for alpha chain variable domain of TCR clone 202731 (TRAV14/DV4, TRAJ23)
CAMREVKGGKLIF

SEQ ID NO: 405462 - protein, 15 aa, Homo sapiens
  CDR3 for beta chain variable domain of TCR clone 202731 (TRBV6-3, TRBJ2-1)
CASSYASDSYNEQFL

SEQ ID NO: 405463 - protein, 13 aa, Homo sapiens
  CDR3 for alpha chain variable domain of TCR clone 202732 (TRAV3, TRAJ40)
CAVRGSGAYKYIF

SEQ ID NO: 405464 - protein, 15 aa, Homo sapiens
  CDR3 for beta chain variable domain of TCR clone 202732 (TRBV27, TRBJ1-5)
CAGSSSGTGNQPQHF

SEQ ID NO: 405465 - protein, 15 aa, Homo sapiens
  CDR3 for alpha chain variable domain of TCR clone 202733 (TRAV12-3, TRAJ6)
CAMSATTGGSYIPTF

SEQ ID NO: 405466 - protein, 18 aa, Homo sapiens
  CDR3 for beta chain variable domain of TCR clone 202733 (TRBV15, TRBJ2-3)
CATSRDGARSWDTDTQYF

SEQ ID NO: 405467 - protein, 14 aa, Homo sapiens
  CDR3 for alpha chain variable domain of TCR clone 202734 (TRAV1-2, TRAJ16)
CAVNRFSGGQKLLF

SEQ ID NO: 405468 - protein, 15 aa, Homo sapiens
  CDR3 for beta chain variable domain of TCR clone 202734 (TRBV9, TRBJ1-6)
CASSVAGTGDSHLHF

SEQ ID NO: 405469 - protein, 14 aa, Homo sapiens
  CDR3 for alpha chain variable domain of TCR clone 202735 (TRAV13-1, TRAJ39)
CAASYNNAGNMLTF

SEQ ID NO: 405470 - protein, 11 aa, Homo sapiens
  CDR3 for beta chain variable domain of TCR clone 202735 (TRBV19, TRBJ1-2)
CASRSGLRYTF

SEQ ID NO: 405471 - protein, 15 aa, Homo sapiens
  CDR3 for alpha chain variable domain of TCR clone 202736 (TRAV26-1, TRAJ29)
CIVRVEGSGNTPLVF

SEQ ID NO: 405472 - protein, 15 aa, Homo sapiens
  CDR3 for beta chain variable domain of TCR clone 202736 (TRBV7-9, TRBJ1-5)
CASSQGHQPNQTQHC

SEQ ID NO: 405473 - protein, 19 aa, Homo sapiens
  CDR3 for alpha chain variable domain of TCR clone 202737 (TRAV25, TRAJ43)
TAAQTTDVGTYFCAVFMRF

SEQ ID NO: 405474 - protein, 12 aa, Homo sapiens
  CDR3 for beta chain variable domain of TCR clone 202737 (TRBV11-2, TRBJ2-3)
CASSYRPDTQYF

SEQ ID NO: 405475 - protein, 18 aa, Homo sapiens
  CDR3 for alpha chain variable domain of TCR clone 202738 (TRAV21, TRAJ52)
CAVRPSPAGGTSYGKLTF

SEQ ID NO: 405476 - protein, 14 aa, Homo sapiens
  CDR3 for beta chain variable domain of TCR clone 202738 (TRBV5-5, TRBJ2-2)
CASSPLEVTGELFF

SEQ ID NO: 405477 - protein, 18 aa, Homo sapiens
  CDR3 for alpha chain variable domain of TCR clone 202739 (TRAV12-3, TRAJ52)
CAMSRTNAGGTSYGKLTF

SEQ ID NO: 405478 - protein, 14 aa, Homo sapiens
  CDR3 for beta chain variable domain of TCR clone 202739 (TRBV7-3, TRBJ1-1)
CASSFLTGTTEAFF

SEQ ID NO: 405479 - protein, 13 aa, Homo sapiens
  CDR3 for alpha chain variable domain of TCR clone 202740 (TRAV13-2, TRAJ48)
CAEMDFGNEQLTF

SEQ ID NO: 405480 - protein, 13 aa, Homo sapiens
  CDR3 for beta chain variable domain of TCR clone 202740 (TRBV7-9, TRBJ1-2)
CASSLKQNYGYTF

SEQ ID NO: 405481 - protein, 18 aa, Homo sapiens
  CDR3 for alpha chain variable domain of TCR clone 202741 (TRAV21, TRAJ52)
CAVRPSPAGGTSYGKLTF

SEQ ID NO: 405482 - protein, 14 aa, Homo sapiens
  CDR3 for beta chain variable domain of TCR clone 202741 (TRBV2, TRBJ2-1)
CASSDRAYYNEQFF

SEQ ID NO: 405483 - protein, 16 aa, Homo sapiens
  CDR3 for alpha chain variable domain of TCR clone 202742 (TRAV3, TRAJ6)
CAVRRTTSGGSYIPTF

SEQ ID NO: 405484 - protein, 14 aa, Homo sapiens
  CDR3 for beta chain variable domain of TCR clone 202742 (TRBV3-1, TRBJ1-5)
CANSTGDSNQPQHF

SEQ ID NO: 405485 - protein, 13 aa, Homo sapiens
  CDR3 for alpha chain variable domain of TCR clone 202743 (TRAV16, TRAJ26)
CITVLCLSQNFVF

SEQ ID NO: 405486 - protein, 12 aa, Homo sapiens
  CDR3 for beta chain variable domain of TCR clone 202743 (TRBV11-2, TRBJ2-1)
CASSPGNNEQFF

SEQ ID NO: 405487 - protein, 14 aa, Homo sapiens
  CDR3 for alpha chain variable domain of TCR clone 202744 (TRAV8-1, TRAJ13)
CAVKRSGGYQKVTF

SEQ ID NO: 405488 - protein, 16 aa, Homo sapiens
  CDR3 for beta chain variable domain of TCR clone 202744 (TRBV7-7, TRBJ2-1)
CASSLASGTSYNEQFF

SEQ ID NO: 405489 - protein, 14 aa, Homo sapiens
  CDR3 for alpha chain variable domain of TCR clone 202745 (TRAV8-4, TRAJ15)
CALTIREAGTALIF

SEQ ID NO: 405490 - protein, 13 aa, Homo sapiens
  CDR3 for beta chain variable domain of TCR clone 202745 (TRBV10-3, TRBJ2-7)
CAISEKGGYEQYF

SEQ ID NO: 405491 - protein, 12 aa, Homo sapiens
  CDR3 for alpha chain variable domain of TCR clone 202746 (TRAV25, TRAJ29)
CAGPRGNTPLVF

SEQ ID NO: 405492 - protein, 13 aa, Homo sapiens
  CDR3 for beta chain variable domain of TCR clone 202746 (TRBV10-2, TRBJ1-5)
CASSGNSNQPQHF

SEQ ID NO: 405493 - protein, 13 aa, Homo sapiens
  CDR3 for alpha chain variable domain of TCR clone 202747 (TRAV23/DV6, TRAJ47)
CSASSQYGNKLVF

SEQ ID NO: 405494 - protein, 15 aa, Homo sapiens
  CDR3 for beta chain variable domain of TCR clone 202747 (TRBV7-3, TRBJ2-1)
CASSLDGNSYNEQFF

SEQ ID NO: 405495 - protein, 12 aa, Homo sapiens
  CDR3 for alpha chain variable domain of TCR clone 202748 (TRAV26-1, TRAJ36)
CIVRVRADNLFF

SEQ ID NO: 405496 - protein, 14 aa, Homo sapiens
  CDR3 for beta chain variable domain of TCR clone 202748 (TRBV2, TRBJ2-1)
CASSEARQGVSEFF

SEQ ID NO: 405497 - protein, 14 aa, Homo sapiens
  CDR3 for alpha chain variable domain of TCR clone 202749 (TRAV38-1, TRAJ40)
CALRPTSGTYTYIF

SEQ ID NO: 405498 - protein, 14 aa, Homo sapiens
  CDR3 for beta chain variable domain of TCR clone 202749 (TRBV25-1, TRBJ1-1)
CASTHLGGNTEAFV

SEQ ID NO: 405499 - protein, 12 aa, Homo sapiens
  CDR3 for alpha chain variable domain of TCR clone 202750 (TRAV12-3, TRAJ17)
CAMTLTGNKLTF

SEQ ID NO: 405500 - protein, 12 aa, Homo sapiens
  CDR3 for beta chain variable domain of TCR clone 202750 (TRBV11-2, TRBJ2-7)
CASSLSTYEQYF

SEQ ID NO: 405501 - protein, 18 aa, Homo sapiens
  CDR3 for alpha chain variable domain of TCR clone 202751 (TRAV13-1, TRAJ52)
CAAKNPNAGGTSYGKLTF

SEQ ID NO: 405502 - protein, 14 aa, Homo sapiens
  CDR3 for beta chain variable domain of TCR clone 202751 (TRBV7-8, TRBJ2-7)
CASSPGLADYEQYF

SEQ ID NO: 405503 - protein, 13 aa, Homo sapiens
  CDR3 for alpha chain variable domain of TCR clone 202752 (TRAV8-1, TRAJ28)
CAVSGAGSYQLTF

SEQ ID NO: 405504 - protein, 13 aa, Homo sapiens
  CDR3 for beta chain variable domain of TCR clone 202752 (TRBV4-2, TRBJ1-1)
CASSQAGNTEAFF

SEQ ID NO: 405505 - protein, 15 aa, Homo sapiens
  CDR3 for alpha chain variable domain of TCR clone 202753 (TRAV20, TRAJ43)
CAVQAGKSSSNDMRF

SEQ ID NO: 405506 - protein, 14 aa, Homo sapiens
  CDR3 for beta chain variable domain of TCR clone 202753 (TRBV27, TRBJ2-1)
CASRHLGGGKEQFF

SEQ ID NO: 405507 - protein, 16 aa, Homo sapiens
  CDR3 for alpha chain variable domain of TCR clone 202754 (TRAV8-3, TRAJ42)
CAVGEGNGGSQGNLIF

SEQ ID NO: 405508 - protein, 16 aa, Homo sapiens
  CDR3 for beta chain variable domain of TCR clone 202754 (TRBV7-3, TRBJ2-1)
CASSKPLAGGYNEQFF

SEQ ID NO: 405509 - protein, 12 aa, Homo sapiens
  CDR3 for alpha chain variable domain of TCR clone 202755 (TRAV12-3, TRAJ17)
CAMTLTGNKLTF

SEQ ID NO: 405510 - protein, 10 aa, Homo sapiens
  CDR3 for beta chain variable domain of TCR clone 202755 (TRBV2, TRBJ2-2)
CASSQPGLAG

SEQ ID NO: 405511 - protein, 15 aa, Homo sapiens
  CDR3 for alpha chain variable domain of TCR clone 202756 (TRAV27, TRAJ38)
CAGRFNAGNNLKLIW

SEQ ID NO: 405512 - protein, 15 aa, Homo sapiens
  CDR3 for beta chain variable domain of TCR clone 202756 (TRBV2, TRBJ2-1)
CASSELAGSYNEQFF

SEQ ID NO: 405513 - protein, 14 aa, Homo sapiens
  CDR3 for alpha chain variable domain of TCR clone 202757 (TRAV13-2, TRAJ45)
FAEMSGGGADGLTF

SEQ ID NO: 405514 - protein, 11 aa, Homo sapiens
  CDR3 for beta chain variable domain of TCR clone 202757 (TRBV7-3, TRBJ2-5)
CASSLSETQYF

SEQ ID NO: 405515 - protein, 17 aa, Homo sapiens
  CDR3 for alpha chain variable domain of TCR clone 202758 (TRAV8-6, TRAJ58)
CAGSSWVGETSGSRLTF

SEQ ID NO: 405516 - protein, 14 aa, Homo sapiens
  CDR3 for beta chain variable domain of TCR clone 202758 (TRBV4-2, TRBJ2-1)
CASGLDRAYNEQFF

SEQ ID NO: 405517 - protein, 13 aa, Homo sapiens
  CDR3 for alpha chain variable domain of TCR clone 202759 (TRAV1-2, TRAJ9)
CAVLNTGGFKTIF

SEQ ID NO: 405518 - protein, 14 aa, Homo sapiens
  CDR3 for beta chain variable domain of TCR clone 202759 (TRBV7-3, TRBJ2-2)
CASSSGGYTGELFF

SEQ ID NO: 405519 - protein, 14 aa, Homo sapiens
  CDR3 for alpha chain variable domain of TCR clone 202760 (TRAV2, TRAJ37)
CAVDFSSNTGKLIF

SEQ ID NO: 405520 - protein, 14 aa, Homo sapiens
  CDR3 for beta chain variable domain of TCR clone 202760 (TRBV7-7, TRBJ2-7)
CASSLGRGVGEQYF

SEQ ID NO: 405521 - protein, 14 aa, Homo sapiens
  CDR3 for alpha chain variable domain of TCR clone 202761 (TRAV17, TRAJ53)
CATDAGGSNYKLTF

SEQ ID NO: 405522 - protein, 16 aa, Homo sapiens
  CDR3 for beta chain variable domain of TCR clone 202761 (TRBV29-1, TRBJ2-7)
CSIEVVGTSGSYEQYF

SEQ ID NO: 405523 - protein, 12 aa, Homo sapiens
  CDR3 for alpha chain variable domain of TCR clone 202762 (TRAV3, TRAJ20)
CAVRDGDYKLSF

SEQ ID NO: 405524 - protein, 16 aa, Homo sapiens
  CDR3 for beta chain variable domain of TCR clone 202762 (TRBV12-4, TRBJ2-2)
CASSSQVGGPGGELFF

SEQ ID NO: 405525 - protein, 13 aa, Homo sapiens
  CDR3 for alpha chain variable domain of TCR clone 202763 (TRAV23/DV6, TRAJ47)
CAASMTRGNKLVL

SEQ ID NO: 405526 - protein, 13 aa, Homo sapiens
  CDR3 for beta chain variable domain of TCR clone 202763 (TRBV9, TRBJ2-2)
CASSTFSSGELFF

SEQ ID NO: 405527 - protein, 12 aa, Homo sapiens
  CDR3 for alpha chain variable domain of TCR clone 202764 (TRAV8-3, TRAJ35)
CAVGSFGNVLHC

SEQ ID NO: 405528 - protein, 18 aa, Homo sapiens
  CDR3 for beta chain variable domain of TCR clone 202764 (TRBV25-1, TRBJ1-2)
CASSGLQNGQGLIFGYTF

SEQ ID NO: 405529 - protein, 15 aa, Homo sapiens
  CDR3 for alpha chain variable domain of TCR clone 202765 (TRAV35, TRAJ58)
CAGRRQETSGSRLTF

SEQ ID NO: 405530 - protein, 16 aa, Homo sapiens
  CDR3 for beta chain variable domain of TCR clone 202765 (TRBV2, TRBJ2-1)
CASSVGGSRSYNEQFF

SEQ ID NO: 405531 - protein, 14 aa, Homo sapiens
  CDR3 for alpha chain variable domain of TCR clone 202766 (TRAV13-1, TRAJ13)
CAAIPLVGYQKVTF

SEQ ID NO: 405532 - protein, 18 aa, Homo sapiens
  CDR3 for beta chain variable domain of TCR clone 202766 (TRBV11-2, TRBJ2-3)
CASSFGGASRGAPNTQYF

SEQ ID NO: 405533 - protein, 13 aa, Homo sapiens
  CDR3 for alpha chain variable domain of TCR clone 202767 (TRAV3, TRAJ21)
CAVREPDFNKFYF

SEQ ID NO: 405534 - protein, 18 aa, Homo sapiens
  CDR3 for beta chain variable domain of TCR clone 202767 (TRBV4-1, TRBJ2-1)
CASSLVGGELAGFNEQFF

SEQ ID NO: 405535 - protein, 12 aa, Homo sapiens
  CDR3 for alpha chain variable domain of TCR clone 202768 (TRAV8-3, TRAJ22)
FGGQSSTRQLTF

SEQ ID NO: 405536 - protein, 14 aa, Homo sapiens
  CDR3 for beta chain variable domain of TCR clone 202768 (TRBV19, TRBJ2-1)
CASPTFVLSGEQFF

SEQ ID NO: 405537 - protein, 15 aa, Homo sapiens
  CDR3 for alpha chain variable domain of TCR clone 202769 (TRAV13-1, TRAJ5)
CAASKADTGRRALTF

SEQ ID NO: 405538 - protein, 17 aa, Homo sapiens
  CDR3 for beta chain variable domain of TCR clone 202769 (TRBV7-3, TRBJ2-3)
CASSLMKRMRGADTQYF

SEQ ID NO: 405539 - protein, 17 aa, Homo sapiens
  CDR3 for alpha chain variable domain of TCR clone 202770 (TRAV3, TRAJ6)
CAVRDGPRAGGSYLPTF

SEQ ID NO: 405540 - protein, 14 aa, Homo sapiens
  CDR3 for beta chain variable domain of TCR clone 202770 (TRBV11-2, TRBJ2-5)
CASSRTGGIETQYF

SEQ ID NO: 405541 - protein, 16 aa, Homo sapiens
  CDR3 for alpha chain variable domain of TCR clone 202771 (TRAV17, TRAJ52)
CATGIIGGTSYGKLTF

SEQ ID NO: 405542 - protein, 12 aa, Homo sapiens
  CDR3 for beta chain variable domain of TCR clone 202771 (TRBV7-3, TRBJ2-1)
CASGFINNEQFF

SEQ ID NO: 405543 - protein, 15 aa, Homo sapiens
  CDR3 for alpha chain variable domain of TCR clone 202772 (TRAV21, TRAJ24)
CAARSSTDSWGKLQF

SEQ ID NO: 405544 - protein, 11 aa, Homo sapiens
  CDR3 for beta chain variable domain of TCR clone 202772 (TRBV11-2, TRBJ2-2)
CASSLPWELFF

SEQ ID NO: 405545 - protein, 12 aa, Homo sapiens
  CDR3 for alpha chain variable domain of TCR clone 202773 (TRAV12-3, TRAJ17)
CAMTHTGNKLTF

SEQ ID NO: 405546 - protein, 15 aa, Homo sapiens
  CDR3 for beta chain variable domain of TCR clone 202773 (TRBV20-1, TRBJ2-7)
CSARDRFSGMDEQYF

SEQ ID NO: 405547 - protein, 13 aa, Homo sapiens
  CDR3 for alpha chain variable domain of TCR clone 202774 (TRAV12-2, TRAJ42)
CAVQRGSQGNLIF

SEQ ID NO: 405548 - protein, 16 aa, Homo sapiens
  CDR3 for beta chain variable domain of TCR clone 202774 (TRBV9, TRBJ2-2)
CASSAMGKGNTGELFF

SEQ ID NO: 405549 - protein, 14 aa, Homo sapiens
  CDR3 for alpha chain variable domain of TCR clone 202775 (TRAV12-1, TRAJ17)
CVVNYKAAGNKLTF

SEQ ID NO: 405550 - protein, 15 aa, Homo sapiens
  CDR3 for beta chain variable domain of TCR clone 202775 (TRBV20-1, TRBJ2-7)
CSARERVSGMDEQYF

SEQ ID NO: 405551 - protein, 16 aa, Homo sapiens
  CDR3 for alpha chain variable domain of TCR clone 202776 (TRAV12-2, TRAJ45)
CAVNRGSGGGADGLTF

SEQ ID NO: 405552 - protein, 21 aa, Homo sapiens
  CDR3 for beta chain variable domain of TCR clone 202776 (TRBV23-1, TRBJ2-2)
CISAPFKEDRGVEKDTGELFF

SEQ ID NO: 405553 - protein, 14 aa, Homo sapiens
  CDR3 for alpha chain variable domain of TCR clone 202777 (TRAV1-2, TRAJ16)
YAVNRFSDGQKLLF

SEQ ID NO: 405554 - protein, 16 aa, Homo sapiens
  CDR3 for beta chain variable domain of TCR clone 202777 (TRBV7-2, TRBJ2-7)
CASSLDLSGGAYEQYF

SEQ ID NO: 405555 - protein, 15 aa, Homo sapiens
  CDR3 for alpha chain variable domain of TCR clone 202778 (TRAV21, TRAJ24)
CAARSSTDSWGKLQF

SEQ ID NO: 405556 - protein, 16 aa, Homo sapiens
  CDR3 for beta chain variable domain of TCR clone 202778 (TRBV7-8, TRBJ2-4)
CASSAERTLAKNIQYF

SEQ ID NO: 405557 - protein, 15 aa, Homo sapiens
  CDR3 for alpha chain variable domain of TCR clone 202779 (TRAV8-3, TRAJ45)
CASSYSGGGADGLTF

SEQ ID NO: 405558 - protein, 16 aa, Homo sapiens
  CDR3 for beta chain variable domain of TCR clone 202779 (TRBV19, TRBJ2-1)
CASSMGGGSSYNEQFF

SEQ ID NO: 405559 - protein, 18 aa, Homo sapiens
  CDR3 for alpha chain variable domain of TCR clone 202780 (TRAV21, TRAJ52)
CAVRPSPAGGTSYGTLTF

SEQ ID NO: 405560 - protein, 19 aa, Homo sapiens
  CDR3 for beta chain variable domain of TCR clone 202780 (TRBV12-4, TRBJ2-1)
CASTLAFDPRDKEANEQFF

SEQ ID NO: 405561 - protein, 11 aa, Homo sapiens
  CDR3 for alpha chain variable domain of TCR clone 202781 (TRAV12-3, TRAJ43)
CAMSVSNDMRF

SEQ ID NO: 405562 - protein, 13 aa, Homo sapiens
  CDR3 for beta chain variable domain of TCR clone 202781 (TRBV20-1, TRBJ1-1)
CSAPLVGGTKAFF

SEQ ID NO: 405563 - protein, 18 aa, Homo sapiens
  CDR3 for alpha chain variable domain of TCR clone 202782 (TRAV26-1, TRAJ52)
CIVRVEGAGGTSYGKLTF

SEQ ID NO: 405564 - protein, 13 aa, Homo sapiens
  CDR3 for beta chain variable domain of TCR clone 202782 (TRBV7-3, TRBJ1-2)
CASSLKRGYGYPF

SEQ ID NO: 405565 - protein, 15 aa, Homo sapiens
  CDR3 for alpha chain variable domain of TCR clone 202783 (TRAV13-1, TRAJ8)
CAASIPNTGFQKLVF

SEQ ID NO: 405566 - protein, 15 aa, Homo sapiens
  CDR3 for beta chain variable domain of TCR clone 202783 (TRBV19, TRBJ1-1)
CASTSGQIQNTEAFF

SEQ ID NO: 405567 - protein, 18 aa, Homo sapiens
  CDR3 for alpha chain variable domain of TCR clone 202784 (TRAV13-1, TRAJ52)
CAAKNPNAGGTSYGNLTF

SEQ ID NO: 405568 - protein, 15 aa, Homo sapiens
  CDR3 for beta chain variable domain of TCR clone 202784 (TRBV27, TRBJ2-1)
CASSNGGGSSNEQFF

SEQ ID NO: 405569 - protein, 13 aa, Homo sapiens
  CDR3 for alpha chain variable domain of TCR clone 202785 (TRAV27, TRAJ40)
CAGPPSGTYKYIF

SEQ ID NO: 405570 - protein, 13 aa, Homo sapiens
  CDR3 for beta chain variable domain of TCR clone 202785 (TRBV28, TRBJ1-2)
RAGRDRGNYGYTF

SEQ ID NO: 405571 - protein, 14 aa, Homo sapiens
  CDR3 for alpha chain variable domain of TCR clone 202786 (TRAV23/DV6, TRAJ22)
CAASVSASARQLTF

SEQ ID NO: 405572 - protein, 16 aa, Homo sapiens
  CDR3 for beta chain variable domain of TCR clone 202786 (TRBV19, TRBJ2-2)
CASSFPGQGLAGELFF

SEQ ID NO: 405573 - protein, 14 aa, Homo sapiens
  CDR3 for alpha chain variable domain of TCR clone 202787 (TRAV3, TRAJ34)
CAVRDINNTDMLIF

SEQ ID NO: 405574 - protein, 15 aa, Homo sapiens
  CDR3 for beta chain variable domain of TCR clone 202787 (TRBV20-1, TRBJ2-7)
CSARDRVSGMDEQYF

SEQ ID NO: 405575 - protein, 17 aa, Homo sapiens
  CDR3 for alpha chain variable domain of TCR clone 202788 (TRAV26-1, TRAJ53)
CIVRVDDCGGSNYKLTF

SEQ ID NO: 405576 - protein, 16 aa, Homo sapiens
  CDR3 for beta chain variable domain of TCR clone 202788 (TRBV19, TRBJ2-2)
CASTIGARAGAGELFF

SEQ ID NO: 405577 - protein, 14 aa, Homo sapiens
  CDR3 for alpha chain variable domain of TCR clone 202789 (TRAV12-2, TRAJ45)
CAVYSAGGADGITF

SEQ ID NO: 405578 - protein, 13 aa, Homo sapiens
  CDR3 for beta chain variable domain of TCR clone 202789 (TRBV7-7, TRBJ2-3)
CASSVSRADTQYF

SEQ ID NO: 405579 - protein, 14 aa, Homo sapiens
  CDR3 for alpha chain variable domain of TCR clone 202790 (TRAV1-2, TRAJ16)
CAVNRFSDGLKLLF

SEQ ID NO: 405580 - protein, 15 aa, Homo sapiens
  CDR3 for beta chain variable domain of TCR clone 202790 (TRBV5-1, TRBJ2-1)
CASSPPMAPYNEQFF

SEQ ID NO: 405581 - protein, 16 aa, Homo sapiens
  CDR3 for alpha chain variable domain of TCR clone 202791 (TRAV17, TRAJ35)
CATAEGGIGFGNVLHC

SEQ ID NO: 405582 - protein, 16 aa, Homo sapiens
  CDR3 for beta chain variable domain of TCR clone 202791 (TRBV6-5, TRBJ2-7)
CASSSDPTGGFYEQYF

SEQ ID NO: 405583 - protein, 21 aa, Homo sapiens
  CDR3 for alpha chain variable domain of TCR clone 202792 (TRAV10, TRAJ34)
CVVSGKHRQAHLWDWDQITSL

SEQ ID NO: 405584 - protein, 14 aa, Homo sapiens
  CDR3 for beta chain variable domain of TCR clone 202792 (TRBV19, TRBJ2-1)
CASPTFVVSGEQFF

SEQ ID NO: 405585 - protein, 17 aa, Homo sapiens
  CDR3 for alpha chain variable domain of TCR clone 202793 (TRAV13-1, TRAJ28)
CAASPPYSGAGSYQLTF

SEQ ID NO: 405586 - protein, 14 aa, Homo sapiens
  CDR3 for beta chain variable domain of TCR clone 202793 (TRBV5-5, TRBJ1-5)
CASSGQGVDQPQHF

SEQ ID NO: 405587 - protein, 14 aa, Homo sapiens
  CDR3 for alpha chain variable domain of TCR clone 202794 (TRAV12-2, TRAJ17)
CAVLFKAAGNKLTF

SEQ ID NO: 405588 - protein, 15 aa, Homo sapiens
  CDR3 for beta chain variable domain of TCR clone 202794 (TRBV28, TRBJ2-1)
CASSLDTSSYNEQFF

SEQ ID NO: 405589 - protein, 14 aa, Homo sapiens
  CDR3 for alpha chain variable domain of TCR clone 202795 (TRAV21, TRAJ23)
FAIMIYNQGGKLIF

SEQ ID NO: 405590 - protein, 18 aa, Homo sapiens
  CDR3 for beta chain variable domain of TCR clone 202795 (TRBV20-1, TRBJ2-6)
CSAETTPTHGSGANVLTF

SEQ ID NO: 405591 - protein, 12 aa, Homo sapiens
  CDR3 for alpha chain variable domain of TCR clone 202796 (TRAV12-3, TRAJ17)
CAMTLTGNKLTF

SEQ ID NO: 405592 - protein, 16 aa, Homo sapiens
  CDR3 for beta chain variable domain of TCR clone 202796 (TRBV28, TRBJ2-5)
CASSFSPAGGWETQYF

SEQ ID NO: 405593 - protein, 11 aa, Homo sapiens
  CDR3 for alpha chain variable domain of TCR clone 202797 (TRAV3, TRAJ21)
CAVGNFNKFYF

SEQ ID NO: 405594 - protein, 14 aa, Homo sapiens
  CDR3 for beta chain variable domain of TCR clone 202797 (TRBV15, TRBJ2-5)
CATSIGGLGETQYF

SEQ ID NO: 405595 - protein, 11 aa, Homo sapiens
  CDR3 for alpha chain variable domain of TCR clone 202798 (TRAV4, TRAJ31)
CLVGDNARLMF

SEQ ID NO: 405596 - protein, 16 aa, Homo sapiens
  CDR3 for beta chain variable domain of TCR clone 202798 (TRBV7-2, TRBJ2-5)
CASSSKWVSGKETQYF

SEQ ID NO: 405597 - protein, 14 aa, Homo sapiens
  CDR3 for alpha chain variable domain of TCR clone 202799 (TRAV35, TRAJ42)
CAGRYGGSQGNLIF

SEQ ID NO: 405598 - protein, 15 aa, Homo sapiens
  CDR3 for beta chain variable domain of TCR clone 202799 (TRBV6-5, TRBJ2-1)
CASSYDAGAGNEQFF

SEQ ID NO: 405599 - protein, 16 aa, Homo sapiens
  CDR3 for alpha chain variable domain of TCR clone 202800 (TRAV13-2, TRAJ53)
YAENANSGGSNYKLTF

SEQ ID NO: 405600 - protein, 19 aa, Homo sapiens
  CDR3 for beta chain variable domain of TCR clone 202800 (TRBV28, TRBJ2-7)
CASSYSGTSRLGWVYEQYF

SEQ ID NO: 405601 - protein, 15 aa, Homo sapiens
  CDR3 for alpha chain variable domain of TCR clone 202801 (TRAV3, TRAJ37)
CCERKGSGNTGKLIF

SEQ ID NO: 405602 - protein, 15 aa, Homo sapiens
  CDR3 for beta chain variable domain of TCR clone 202801 (TRBV7-9, TRBJ2-2)
CASGPLDTFPGELFF

SEQ ID NO: 405603 - protein, 15 aa, Homo sapiens
  CDR3 for alpha chain variable domain of TCR clone 202802 (TRAV3, TRAJ22)
CAVRDRGGSARQLTF

SEQ ID NO: 405604 - protein, 13 aa, Homo sapiens
  CDR3 for beta chain variable domain of TCR clone 202802 (TRBV7-3, TRBJ2-1)
CASIPVAYNEQFF

SEQ ID NO: 405605 - protein, 14 aa, Homo sapiens
  CDR3 for alpha chain variable domain of TCR clone 202803 (TRAV17, TRAJ57)
CATDPQGGSEKLVF

SEQ ID NO: 405606 - protein, 18 aa, Homo sapiens
  CDR3 for beta chain variable domain of TCR clone 202803 (TRBV6-6, TRBJ1-3)
CASSYSKWDSISGNTKYF

SEQ ID NO: 405607 - protein, 17 aa, Homo sapiens
  CDR3 for alpha chain variable domain of TCR clone 202804 (TRAV3, TRAJ6)
CAVSRRTDTGGSYIPKF

SEQ ID NO: 405608 - protein, 14 aa, Homo sapiens
  CDR3 for beta chain variable domain of TCR clone 202804 (TRBV7-2, TRBJ2-7)
CASSPKTSFYEQYF

SEQ ID NO: 405609 - protein, 14 aa, Homo sapiens
  CDR3 for alpha chain variable domain of TCR clone 202805 (TRAV3, TRAJ21)
CALGRGSTNFTLDL

SEQ ID NO: 405610 - protein, 14 aa, Homo sapiens
  CDR3 for beta chain variable domain of TCR clone 202805 (TRBV25-1, TRBJ1-1)
CASTHLGGNTEAFF

SEQ ID NO: 405611 - protein, 13 aa, Homo sapiens
  CDR3 for alpha chain variable domain of TCR clone 202806 (TRAV16, TRAJ28)
CALTGAGSYQLTF

SEQ ID NO: 405612 - protein, 16 aa, Homo sapiens
  CDR3 for beta chain variable domain of TCR clone 202806 (TRBV28, TRBJ1-5)
CASSLTGQGWNQAQHF

SEQ ID NO: 405613 - protein, 15 aa, Homo sapiens
  CDR3 for alpha chain variable domain of TCR clone 202807 (TRAV17, TRAJ4)
CATGTWSGGYNKLIF

SEQ ID NO: 405614 - protein, 11 aa, Homo sapiens
  CDR3 for beta chain variable domain of TCR clone 202807 (TRBV20-1, TRBJ2-5)
CSADRAETQYF

SEQ ID NO: 405615 - protein, 14 aa, Homo sapiens
  CDR3 for alpha chain variable domain of TCR clone 202808 (TRAV23/DV6, TRAJ3)
CAASMASSASKIIF

SEQ ID NO: 405616 - protein, 13 aa, Homo sapiens
  CDR3 for beta chain variable domain of TCR clone 202808 (TRBV27, TRBJ2-5)
CASFSRGLETKYF

SEQ ID NO: 405617 - protein, 15 aa, Homo sapiens
  CDR3 for alpha chain variable domain of TCR clone 202809 (TRAV12-1, TRAJ6)
CVVNCPLRRKLHTYI

SEQ ID NO: 405618 - protein, 15 aa, Homo sapiens
  CDR3 for beta chain variable domain of TCR clone 202809 (TRBV11-2, TRBJ2-1)
CASSLGTSGLNEQFF

SEQ ID NO: 405619 - protein, 14 aa, Homo sapiens
  CDR3 for alpha chain variable domain of TCR clone 202810 (TRAV12-2, TRAJ13)
CAVKKTGGYQKVTF

SEQ ID NO: 405620 - protein, 17 aa, Homo sapiens
  CDR3 for beta chain variable domain of TCR clone 202810 (TRBV28, TRBJ2-5)
CASSTPEGDALQETRYL

SEQ ID NO: 405621 - protein, 20 aa, Homo sapiens
  CDR3 for alpha chain variable domain of TCR clone 202811 (TRAV13-1, TRAJ10)
CAAKGHGRGKQTHLWDRHSA

SEQ ID NO: 405622 - protein, 13 aa, Homo sapiens
  CDR3 for beta chain variable domain of TCR clone 202811 (TRBV20-1, TRBJ1-1)
CSARGGGNTEAFF

SEQ ID NO: 405623 - protein, 16 aa, Homo sapiens
  CDR3 for alpha chain variable domain of TCR clone 202812 (TRAV13-1, TRAJ37)
CAASSLGSSNTGQLIF

SEQ ID NO: 405624 - protein, 12 aa, Homo sapiens
  CDR3 for beta chain variable domain of TCR clone 202812 (TRBV6-1, TRBJ2-5)
CASSEGRETQYF

SEQ ID NO: 405625 - protein, 13 aa, Homo sapiens
  CDR3 for alpha chain variable domain of TCR clone 202813 (TRAV29/DV5, TRAJ38)
CAANTGNNRKLIW

SEQ ID NO: 405626 - protein, 13 aa, Homo sapiens
  CDR3 for beta chain variable domain of TCR clone 202813 (TRBV7-9, TRBJ1-2)
CASSLKQNYGYTF

SEQ ID NO: 405627 - protein, 15 aa, Homo sapiens
  CDR3 for alpha chain variable domain of TCR clone 202814 (TRAV2, TRAJ15)
CAVEDREQAGTALIF

SEQ ID NO: 405628 - protein, 17 aa, Homo sapiens
  CDR3 for beta chain variable domain of TCR clone 202814 (TRBV19, TRBJ1-1)
CASSTRGLGTSNTEAFF

SEQ ID NO: 405629 - protein, 15 aa, Homo sapiens
  CDR3 for alpha chain variable domain of TCR clone 202815 (TRAV26-1, TRAJ23)
CIVRVLNNQGGKLIF

SEQ ID NO: 405630 - protein, 15 aa, Homo sapiens
  CDR3 for beta chain variable domain of TCR clone 202815 (TRBV7-3, TRBJ2-1)
CAISFGQSNYNEQFF

SEQ ID NO: 405631 - protein, 16 aa, Homo sapiens
  CDR3 for alpha chain variable domain of TCR clone 202816 (TRAV3, TRAJ5)
CAVRHLMDTGRRALTF

SEQ ID NO: 405632 - protein, 16 aa, Homo sapiens
  CDR3 for beta chain variable domain of TCR clone 202816 (TRBV4-2, TRBJ2-7)
CSSSQEGLANSYEQYF

SEQ ID NO: 405633 - protein, 14 aa, Homo sapiens
  CDR3 for alpha chain variable domain of TCR clone 202817 (TRAV12-3, TRAJ10)
SHLPLTGGGNKLTF

SEQ ID NO: 405634 - protein, 14 aa, Homo sapiens
  CDR3 for beta chain variable domain of TCR clone 202817 (TRBV6-1, TRBJ1-3)
CSSVQGGGGDTIYF

SEQ ID NO: 405635 - protein, 13 aa, Homo sapiens
  CDR3 for alpha chain variable domain of TCR clone 202818 (TRAV27, TRAJ49)
CAPRPYTGNQFYF

SEQ ID NO: 405636 - protein, 14 aa, Homo sapiens
  CDR3 for beta chain variable domain of TCR clone 202818 (TRBV7-9, TRBJ2-2)
CASSGLADTGELFF

SEQ ID NO: 405637 - protein, 13 aa, Homo sapiens
  CDR3 for alpha chain variable domain of TCR clone 202819 (TRAV20, TRAJ54)
CAVQAGGAQKLVF

SEQ ID NO: 405638 - protein, 12 aa, Homo sapiens
  CDR3 for beta chain variable domain of TCR clone 202819 (TRBV7-9, TRBJ2-7)
CASSIKREEQYF

SEQ ID NO: 405639 - protein, 12 aa, Homo sapiens
  CDR3 for alpha chain variable domain of TCR clone 202820 (TRAV22, TRAJ29)
CAPPSGNTPLVF

SEQ ID NO: 405640 - protein, 12 aa, Homo sapiens
  CDR3 for beta chain variable domain of TCR clone 202820 (TRBV11-2, TRBJ2-1)
CASSPGNNEQFF

SEQ ID NO: 405641 - protein, 15 aa, Homo sapiens
  CDR3 for alpha chain variable domain of TCR clone 202821 (TRAV27, TRAJ38)
CAARRNAGNNRKLIW

SEQ ID NO: 405642 - protein, 15 aa, Homo sapiens
  CDR3 for beta chain variable domain of TCR clone 202821 (TRBV4-1, TRBJ2-3)
CASSRGQGIPDTQYF

SEQ ID NO: 405643 - protein, 11 aa, Homo sapiens
  CDR3 for alpha chain variable domain of TCR clone 202822 (TRAV12-3, TRAJ41)
CAMNAREALNF

SEQ ID NO: 405644 - protein, 16 aa, Homo sapiens
  CDR3 for beta chain variable domain of TCR clone 202822 (TRBV7-8, TRBJ2-3)
CDSSTEGQRETDTQYF

SEQ ID NO: 405645 - protein, 14 aa, Homo sapiens
  CDR3 for alpha chain variable domain of TCR clone 202823 (TRAV8-4, TRAJ57)
CAVSFQGGSEKLVF

SEQ ID NO: 405646 - protein, 13 aa, Homo sapiens
  CDR3 for beta chain variable domain of TCR clone 202823 (TRBV7-9, TRBJ1-2)
CASSLKQNYGYTF

SEQ ID NO: 405647 - protein, 13 aa, Homo sapiens
  CDR3 for alpha chain variable domain of TCR clone 202824 (TRAV12-3, TRAJ40)
CAMSARGTYKYIF

SEQ ID NO: 405648 - protein, 16 aa, Homo sapiens
  CDR3 for beta chain variable domain of TCR clone 202824 (TRBV20-1, TRBJ2-3)
CSGKAGLAGGQDTQYF

SEQ ID NO: 405649 - protein, 12 aa, Homo sapiens
  CDR3 for alpha chain variable domain of TCR clone 202825 (TRAV12-3, TRAJ17)
CAMTLTGNKLTF

SEQ ID NO: 405650 - protein, 12 aa, Homo sapiens
  CDR3 for beta chain variable domain of TCR clone 202825 (TRBV28, TRBJ1-6)
CASSLLRGGIAF

SEQ ID NO: 405651 - protein, 14 aa, Homo sapiens
  CDR3 for alpha chain variable domain of TCR clone 202826 (TRAV26-1, TRAJ21)
CIVRPPYNFNKFYF

SEQ ID NO: 405652 - protein, 19 aa, Homo sapiens
  CDR3 for beta chain variable domain of TCR clone 202826 (TRBV25-1, TRBJ2-2)
CAILVYRVDRGRKTGELFF

SEQ ID NO: 405653 - protein, 12 aa, Homo sapiens
  CDR3 for alpha chain variable domain of TCR clone 202827 (TRAV12-3, TRAJ17)
CAMTLTGNKLTF

SEQ ID NO: 405654 - protein, 15 aa, Homo sapiens
  CDR3 for beta chain variable domain of TCR clone 202827 (TRBV6-6, TRBJ2-5)
CAGIPGGGLEETQYF

SEQ ID NO: 405655 - protein, 11 aa, Homo sapiens
  CDR3 for alpha chain variable domain of TCR clone 202828 (TRAV8-6, TRAJ34)
CAVWNTDKLIF

SEQ ID NO: 405656 - protein, 16 aa, Homo sapiens
  CDR3 for beta chain variable domain of TCR clone 202828 (TRBV5-1, TRBJ2-7)
CASSYASTSAGGEQYF

SEQ ID NO: 405657 - protein, 13 aa, Homo sapiens
  CDR3 for alpha chain variable domain of TCR clone 202829 (TRAV2, TRAJ40)
CAVVTSGTYKYIF

SEQ ID NO: 405658 - protein, 14 aa, Homo sapiens
  CDR3 for beta chain variable domain of TCR clone 202829 (TRBV19, TRBJ2-1)
CASPTCVLRGEQFF

SEQ ID NO: 405659 - protein, 14 aa, Homo sapiens
  CDR3 for alpha chain variable domain of TCR clone 202830 (TRAV34, TRAJ44)
CGADGTGTASKLTF

SEQ ID NO: 405660 - protein, 15 aa, Homo sapiens
  CDR3 for beta chain variable domain of TCR clone 202830 (TRBV5-1, TRBJ2-1)
CASSPPGAPYNEQFF

SEQ ID NO: 405661 - protein, 17 aa, Homo sapiens
  CDR3 for alpha chain variable domain of TCR clone 202831 (TRAV23/DV6, TRAJ57)
CAASSTLSQGGPEKLVF

SEQ ID NO: 405662 - protein, 14 aa, Homo sapiens
  CDR3 for beta chain variable domain of TCR clone 202831 (TRBV25-1, TRBJ1-1)
CASTHVGGNTEAFF

SEQ ID NO: 405663 - protein, 14 aa, Homo sapiens
  CDR3 for alpha chain variable domain of TCR clone 202832 (TRAV12-3, TRAJ10)
SHLPLTGGGNKLTF

SEQ ID NO: 405664 - protein, 16 aa, Homo sapiens
  CDR3 for beta chain variable domain of TCR clone 202832 (TRBV19, TRBJ2-1)
CVSSKAGPSSYNEQFF

SEQ ID NO: 405665 - protein, 12 aa, Homo sapiens
  CDR3 for alpha chain variable domain of TCR clone 202833 (TRAV12-3, TRAJ41)
CAMSYSGYAPNF

SEQ ID NO: 405666 - protein, 14 aa, Homo sapiens
  CDR3 for beta chain variable domain of TCR clone 202833 (TRBV7-2, TRBJ1-1)
CASSFLTGTTEAFF

SEQ ID NO: 405667 - protein, 15 aa, Homo sapiens
  CDR3 for alpha chain variable domain of TCR clone 202834 (TRAV23/DV6, TRAJ37)
CAAGEGSSKTGKLIF

SEQ ID NO: 405668 - protein, 17 aa, Homo sapiens
  CDR3 for beta chain variable domain of TCR clone 202834 (TRBV20-1, TRBJ2-7)
CSATRAGGVAGVEEQYF

SEQ ID NO: 405669 - protein, 13 aa, Homo sapiens
  CDR3 for alpha chain variable domain of TCR clone 202835 (TRAV6, TRAJ20)
CALAVSNDYKLSF

SEQ ID NO: 405670 - protein, 16 aa, Homo sapiens
  CDR3 for beta chain variable domain of TCR clone 202835 (TRBV7-9, TRBJ2-1)
CASSDVAGGSYIEQFF

SEQ ID NO: 405671 - protein, 14 aa, Homo sapiens
  CDR3 for alpha chain variable domain of TCR clone 202836 (TRAV26-1, TRAJ21)
CIVRTPYNFNKFYF

SEQ ID NO: 405672 - protein, 14 aa, Homo sapiens
  CDR3 for beta chain variable domain of TCR clone 202836 (TRBV19, TRBJ2-1)
CASPTFVLSGEQFF

SEQ ID NO: 405673 - protein, 14 aa, Homo sapiens
  CDR3 for alpha chain variable domain of TCR clone 202837 (TRAV19, TRAJ15)
CALSEDQAGTALIF

SEQ ID NO: 405674 - protein, 12 aa, Homo sapiens
  CDR3 for beta chain variable domain of TCR clone 202837 (TRBV7-9, TRBJ2-7)
CATRTDAYEQYF

SEQ ID NO: 405675 - protein, 12 aa, Homo sapiens
  CDR3 for alpha chain variable domain of TCR clone 202838 (TRAV8-3, TRAJ6)
CALAGVSYIPTF

SEQ ID NO: 405676 - protein, 14 aa, Homo sapiens
  CDR3 for beta chain variable domain of TCR clone 202838 (TRBV27, TRBJ2-7)
CASATGTERREQYF

SEQ ID NO: 405677 - protein, 12 aa, Homo sapiens
  CDR3 for alpha chain variable domain of TCR clone 202839 (TRAV13-1, TRAJ52)
HAGGTSYGKLTF

SEQ ID NO: 405678 - protein, 17 aa, Homo sapiens
  CDR3 for beta chain variable domain of TCR clone 202839 (TRBV7-2, TRBJ2-2)
CASTLNEGRVSTGELFF

SEQ ID NO: 405679 - protein, 11 aa, Homo sapiens
  CDR3 for alpha chain variable domain of TCR clone 202840 (TRAV4, TRAJ31)
CLVGDNARLMF

SEQ ID NO: 405680 - protein, 13 aa, Homo sapiens
  CDR3 for beta chain variable domain of TCR clone 202840 (TRBV19, TRBJ1-2)
CASSVPGQDGYTF

SEQ ID NO: 405681 - protein, 13 aa, Homo sapiens
  CDR3 for alpha chain variable domain of TCR clone 202841 (TRAV12-3, TRAJ13)
CAMSSGGYQKVTF

SEQ ID NO: 405682 - protein, 15 aa, Homo sapiens
  CDR3 for beta chain variable domain of TCR clone 202841 (TRBV7-2, TRBJ2-1)
CASSSGLAGGNEQFF

SEQ ID NO: 405683 - protein, 15 aa, Homo sapiens
  CDR3 for alpha chain variable domain of TCR clone 202842 (TRAV21, TRAJ40)
CAVRPQTSGTYKYNF

SEQ ID NO: 405684 - protein, 18 aa, Homo sapiens
  CDR3 for beta chain variable domain of TCR clone 202842 (TRBV23-1, TRBJ2-3)
CISAPAVNRPASTDTQYF

SEQ ID NO: 405685 - protein, 15 aa, Homo sapiens
  CDR3 for alpha chain variable domain of TCR clone 202843 (TRAV2, TRAJ11)
CAVGGRISGYSTLTF

SEQ ID NO: 405686 - protein, 12 aa, Homo sapiens
  CDR3 for beta chain variable domain of TCR clone 202843 (TRBV5-4, TRBJ2-7)
CASSLEAYEQYF

SEQ ID NO: 405687 - protein, 15 aa, Homo sapiens
  CDR3 for alpha chain variable domain of TCR clone 202844 (TRAV26-1, TRAJ52)
CIVSDLGTSYGKLTF

SEQ ID NO: 405688 - protein, 14 aa, Homo sapiens
  CDR3 for beta chain variable domain of TCR clone 202844 (TRBV12-4, TRBJ1-1)
CASSLGTGGTEAFF

SEQ ID NO: 405689 - protein, 13 aa, Homo sapiens
  CDR3 for alpha chain variable domain of TCR clone 202845 (TRAV1-2, TRAJ26)
CAVRPNYGQNFVF

SEQ ID NO: 405690 - protein, 14 aa, Homo sapiens
  CDR3 for beta chain variable domain of TCR clone 202845 (TRBV4-1, TRBJ2-5)
CASGQDLALETQYF

SEQ ID NO: 405691 - protein, 13 aa, Homo sapiens
  CDR3 for alpha chain variable domain of TCR clone 202846 (TRAV29/DV5, TRAJ31)
CAASRNNNARLMF

SEQ ID NO: 405692 - protein, 16 aa, Homo sapiens
  CDR3 for beta chain variable domain of TCR clone 202846 (TRBV4-1, TRBJ2-3)
CASSQSTSGAEDTQYF

SEQ ID NO: 405693 - protein, 15 aa, Homo sapiens
  CDR3 for alpha chain variable domain of TCR clone 202847 (TRAV27, TRAJ38)
CAARRNAGNNRKLIW

SEQ ID NO: 405694 - protein, 16 aa, Homo sapiens
  CDR3 for beta chain variable domain of TCR clone 202847 (TRBV28, TRBJ1-5)
CASSFRGGYSNQPQHF

SEQ ID NO: 405695 - protein, 14 aa, Homo sapiens
  CDR3 for alpha chain variable domain of TCR clone 202848 (TRAV27, TRAJ15)
GAGFDNQAGTALIF

SEQ ID NO: 405696 - protein, 11 aa, Homo sapiens
  CDR3 for beta chain variable domain of TCR clone 202848 (TRBV29-1, TRBJ1-1)
CSVEVGTRTFF

SEQ ID NO: 405697 - protein, 14 aa, Homo sapiens
  CDR3 for alpha chain variable domain of TCR clone 202849 (TRAV1-1, TRAJ23)
CAVSIYNQGGKLIF

SEQ ID NO: 405698 - protein, 15 aa, Homo sapiens
  CDR3 for beta chain variable domain of TCR clone 202849 (TRBV20-1, TRBJ2-7)
CSAESGTSGAYEQYF

SEQ ID NO: 405699 - protein, 13 aa, Homo sapiens
  CDR3 for alpha chain variable domain of TCR clone 202850 (TRAV27, TRAJ41)
CAGERNSGCALNF

SEQ ID NO: 405700 - protein, 14 aa, Homo sapiens
  CDR3 for beta chain variable domain of TCR clone 202850 (TRBV7-2, TRBJ1-1)
CASSFLTGTTEAFF

SEQ ID NO: 405701 - protein, 19 aa, Homo sapiens
  CDR3 for alpha chain variable domain of TCR clone 202851 (TRAV17, TRAJ17)
CATDGRPGVIKAAGNKLTF

SEQ ID NO: 405702 - protein, 14 aa, Homo sapiens
  CDR3 for beta chain variable domain of TCR clone 202851 (TRBV7-9, TRBJ1-4)
CAITEGEANEKLFF

SEQ ID NO: 405703 - protein, 14 aa, Homo sapiens
  CDR3 for alpha chain variable domain of TCR clone 202852 (TRAV12-1, TRAJ43)
CVVSGRSNNNDMRF

SEQ ID NO: 405704 - protein, 13 aa, Homo sapiens
  CDR3 for beta chain variable domain of TCR clone 202852 (TRBV2, TRBJ1-4)
CASSELGVEKLFF

SEQ ID NO: 405705 - protein, 13 aa, Homo sapiens
  CDR3 for alpha chain variable domain of TCR clone 202853 (TRAV8-1, TRAJ34)
CAVNAGNTDKLIF

SEQ ID NO: 405706 - protein, 13 aa, Homo sapiens
  CDR3 for beta chain variable domain of TCR clone 202853 (TRBV20-1, TRBJ2-1)
CSAGAGAYNEQFF

SEQ ID NO: 405707 - protein, 18 aa, Homo sapiens
  CDR3 for alpha chain variable domain of TCR clone 202854 (TRAV3, TRAJ17)
SAVRARRGGRSCRQQANF

SEQ ID NO: 405708 - protein, 14 aa, Homo sapiens
  CDR3 for beta chain variable domain of TCR clone 202854 (TRBV4-1, TRBJ2-2)
CASSQAVNTGELFF

SEQ ID NO: 405709 - protein, 14 aa, Homo sapiens
  CDR3 for alpha chain variable domain of TCR clone 202855 (TRAV35, TRAJ22)
CAGLRPGSARQLTF

SEQ ID NO: 405710 - protein, 14 aa, Homo sapiens
  CDR3 for beta chain variable domain of TCR clone 202855 (TRBV11-3, TRBJ2-3)
CASSSGQGPDTKYF

SEQ ID NO: 405711 - protein, 13 aa, Homo sapiens
  CDR3 for alpha chain variable domain of TCR clone 202856 (TRAV12-1, TRAJ42)
CGGVGGSQGNLIF

SEQ ID NO: 405712 - protein, 15 aa, Homo sapiens
  CDR3 for beta chain variable domain of TCR clone 202856 (TRBV5-4, TRBJ1-4)
CASSSLGTGNEKLFF

SEQ ID NO: 405713 - protein, 13 aa, Homo sapiens
  CDR3 for alpha chain variable domain of TCR clone 202857 (TRAV12-1, TRAJ29)
CVVNGPGNTPLVF

SEQ ID NO: 405714 - protein, 16 aa, Homo sapiens
  CDR3 for beta chain variable domain of TCR clone 202857 (TRBV2, TRBJ2-7)
CASRKGSLGLVYEQYF

SEQ ID NO: 405715 - protein, 16 aa, Homo sapiens
  CDR3 for alpha chain variable domain of TCR clone 202858 (TRAV12-2, TRAJ32)
RAVNLGQGGATNKLIF

SEQ ID NO: 405716 - protein, 14 aa, Homo sapiens
  CDR3 for beta chain variable domain of TCR clone 202858 (TRBV19, TRBJ2-1)
CASPTFVLSGEQFF

SEQ ID NO: 405717 - protein, 14 aa, Homo sapiens
  CDR3 for alpha chain variable domain of TCR clone 202859 (TRAV12-3, TRAJ10)
SHLPLTGGGNKLTF

SEQ ID NO: 405718 - protein, 17 aa, Homo sapiens
  CDR3 for beta chain variable domain of TCR clone 202859 (TRBV5-1, TRBJ2-5)
CASSLRGVEGPIETQYF

SEQ ID NO: 405719 - protein, 15 aa, Homo sapiens
  CDR3 for alpha chain variable domain of TCR clone 202860 (TRAV3, TRAJ22)
SAVRDRGGSARQLTF

SEQ ID NO: 405720 - protein, 14 aa, Homo sapiens
  CDR3 for beta chain variable domain of TCR clone 202860 (TRBV25-1, TRBJ1-1)
CASTHLGGNTEAFF

SEQ ID NO: 405721 - protein, 11 aa, Homo sapiens
  CDR3 for alpha chain variable domain of TCR clone 202861 (TRAV3, TRAJ21)
SAVGNLNKFYF

SEQ ID NO: 405722 - protein, 16 aa, Homo sapiens
  CDR3 for beta chain variable domain of TCR clone 202861 (TRBV19, TRBJ2-1)
CASIKAGPSSYNEQFF

SEQ ID NO: 405723 - protein, 16 aa, Homo sapiens
  CDR3 for alpha chain variable domain of TCR clone 202862 (TRAV12-3, TRAJ18)
CAMRGSRGSTLGGLYF

SEQ ID NO: 405724 - protein, 19 aa, Homo sapiens
  CDR3 for beta chain variable domain of TCR clone 202862 (TRBV6-3, TRBJ2-7)
CASSYRTGLAGGVSGEQYF

SEQ ID NO: 405725 - protein, 14 aa, Homo sapiens
  CDR3 for alpha chain variable domain of TCR clone 202863 (TRAV20, TRAJ56)
CAVQFGGANSKLTF

SEQ ID NO: 405726 - protein, 14 aa, Homo sapiens
  CDR3 for beta chain variable domain of TCR clone 202863 (TRBV20-1, TRBJ2-7)
CSAKRGMSSYEQDF

SEQ ID NO: 405727 - protein, 21 aa, Homo sapiens
  CDR3 for alpha chain variable domain of TCR clone 202864 (TRAV1-1, TRAJ6)
CLLLLRCERLERTGGSYIPTF

SEQ ID NO: 405728 - protein, 15 aa, Homo sapiens
  CDR3 for beta chain variable domain of TCR clone 202864 (TRBV2, TRBJ2-1)
CASSELAGSYNEQFF

SEQ ID NO: 405729 - protein, 15 aa, Homo sapiens
  CDR3 for alpha chain variable domain of TCR clone 202865 (TRAV20, TRAJ43)
CAVQAGKSSNNAMRF

SEQ ID NO: 405730 - protein, 14 aa, Homo sapiens
  CDR3 for beta chain variable domain of TCR clone 202865 (TRBV25-1, TRBJ1-1)
CASTHLGGNTEAFF

SEQ ID NO: 405731 - protein, 16 aa, Homo sapiens
  CDR3 for alpha chain variable domain of TCR clone 202866 (TRAV3, TRAJ37)
CAVGGKGSGNTGKLIF

SEQ ID NO: 405732 - protein, 16 aa, Homo sapiens
  CDR3 for beta chain variable domain of TCR clone 202866 (TRBV28, TRBJ1-5)
CASSFRGGYSNQPQHF

SEQ ID NO: 405733 - protein, 16 aa, Homo sapiens
  CDR3 for alpha chain variable domain of TCR clone 202867 (TRAV25, TRAJ53)
CAGPKGSGGSNYKLTF

SEQ ID NO: 405734 - protein, 17 aa, Homo sapiens
  CDR3 for beta chain variable domain of TCR clone 202867 (TRBV11-3, TRBJ2-6)
CTSKWGQGLSGANVLTF

SEQ ID NO: 405735 - protein, 18 aa, Homo sapiens
  CDR3 for alpha chain variable domain of TCR clone 202868 (TRAV12-3, TRAJ10)
SPVIQPPTSDGRRKQTTF

SEQ ID NO: 405736 - protein, 15 aa, Homo sapiens
  CDR3 for beta chain variable domain of TCR clone 202868 (TRBV29-1, TRBJ2-6)
CSVGDRGSGANVLTF

SEQ ID NO: 405737 - protein, 13 aa, Homo sapiens
  CDR3 for alpha chain variable domain of TCR clone 202869 (TRAV13-1, TRAJ5)
CAARVTGRRALTF

SEQ ID NO: 405738 - protein, 15 aa, Homo sapiens
  CDR3 for beta chain variable domain of TCR clone 202869 (TRBV7-9, TRBJ2-7)
CASSPDGGLTYEQYF

SEQ ID NO: 405739 - protein, 16 aa, Homo sapiens
  CDR3 for alpha chain variable domain of TCR clone 202870 (TRAV1-1, TRAJ31)
CLLLLRCEANNARLMF

SEQ ID NO: 405740 - protein, 13 aa, Homo sapiens
  CDR3 for beta chain variable domain of TCR clone 202870 (TRBV19, TRBJ1-5)
CAGSGGRNQPQHF

SEQ ID NO: 405741 - protein, 13 aa, Homo sapiens
  CDR3 for alpha chain variable domain of TCR clone 202871 (TRAV26-1, TRAJ34)
CIVRGHNTAKLIF

SEQ ID NO: 405742 - protein, 15 aa, Homo sapiens
  CDR3 for beta chain variable domain of TCR clone 202871 (TRBV12-4, TRBJ2-5)
CASSPPTGLQETQYF

SEQ ID NO: 405743 - protein, 14 aa, Homo sapiens
  CDR3 for alpha chain variable domain of TCR clone 202872 (TRAV12-1, TRAJ12)
CVVKRMDSSYKLIF

SEQ ID NO: 405744 - protein, 13 aa, Homo sapiens
  CDR3 for beta chain variable domain of TCR clone 202872 (TRBV20-1, TRBJ1-1)
CSARGGGNTETFF

SEQ ID NO: 405745 - protein, 17 aa, Homo sapiens
  CDR3 for alpha chain variable domain of TCR clone 202873 (TRAV8-6, TRAJ8)
CAVKEGIENTGFQKLVF

SEQ ID NO: 405746 - protein, 14 aa, Homo sapiens
  CDR3 for beta chain variable domain of TCR clone 202873 (TRBV19, TRBJ1-4)
CASRTGLGDCFLAV

SEQ ID NO: 405747 - protein, 14 aa, Homo sapiens
  CDR3 for alpha chain variable domain of TCR clone 202874 (TRAV4, TRAJ6)
CLVGEAGGSYIPTF

SEQ ID NO: 405748 - protein, 16 aa, Homo sapiens
  CDR3 for beta chain variable domain of TCR clone 202874 (TRBV24-1, TRBJ2-3)
CATSDPGTGATDTQYF

SEQ ID NO: 405749 - protein, 15 aa, Homo sapiens
  CDR3 for alpha chain variable domain of TCR clone 202875 (TRAV8-3, TRAJ45)
CASSYSGGGADGLTF

SEQ ID NO: 405750 - protein, 13 aa, Homo sapiens
  CDR3 for beta chain variable domain of TCR clone 202875 (TRBV10-3, TRBJ2-7)
CASTRAVNYEQYF

SEQ ID NO: 405751 - protein, 14 aa, Homo sapiens
  CDR3 for alpha chain variable domain of TCR clone 202876 (TRAV10, TRAJ36)
CVVKYEGGANNRFF

SEQ ID NO: 405752 - protein, 16 aa, Homo sapiens
  CDR3 for beta chain variable domain of TCR clone 202876 (TRBV7-3, TRBJ2-2)
CASSLKRGTLSGELFF

SEQ ID NO: 405753 - protein, 13 aa, Homo sapiens
  CDR3 for alpha chain variable domain of TCR clone 202877 (TRAV38-1, TRAJ42)
CARWGGSQGNLIF

SEQ ID NO: 405754 - protein, 15 aa, Homo sapiens
  CDR3 for beta chain variable domain of TCR clone 202877 (TRBV5-1, TRBJ1-4)
FAPAAWKDGNEKLFF

SEQ ID NO: 405755 - protein, 23 aa, Homo sapiens
  CDR3 for alpha chain variable domain of TCR clone 202878 (TRAV12-2, TRAJ22)
CAVSFRAHPGPPIVSGSARQLTF

SEQ ID NO: 405756 - protein, 13 aa, Homo sapiens
  CDR3 for beta chain variable domain of TCR clone 202878 (TRBV12-4, TRBJ1-2)
CASSVDSNYGYTF

SEQ ID NO: 405757 - protein, 11 aa, Homo sapiens
  CDR3 for alpha chain variable domain of TCR clone 202879 (TRAV21, TRAJ48)
CAVDGNEQLTF

SEQ ID NO: 405758 - protein, 16 aa, Homo sapiens
  CDR3 for beta chain variable domain of TCR clone 202879 (TRBV12-4, TRBJ1-5)
CASSSGPRGSNQTQHF

SEQ ID NO: 405759 - protein, 14 aa, Homo sapiens
  CDR3 for alpha chain variable domain of TCR clone 202880 (TRAV12-3, TRAJ10)
SHLPLAGGGYKLTF

SEQ ID NO: 405760 - protein, 14 aa, Homo sapiens
  CDR3 for beta chain variable domain of TCR clone 202880 (TRBV19, TRBJ2-7)
CASTVQGRPYEQYF

SEQ ID NO: 405761 - protein, 15 aa, Homo sapiens
  CDR3 for alpha chain variable domain of TCR clone 202881 (TRAV17, TRAJ57)
CATGPSQGGSEKLVF

SEQ ID NO: 405762 - protein, 12 aa, Homo sapiens
  CDR3 for beta chain variable domain of TCR clone 202881 (TRBV7-9, TRBJ2-7)
CASSFGSYEQYF

SEQ ID NO: 405763 - protein, 12 aa, Homo sapiens
  CDR3 for alpha chain variable domain of TCR clone 202882 (TRAV12-1, TRAJ40)
CVVYSGTYKYIF

SEQ ID NO: 405764 - protein, 17 aa, Homo sapiens
  CDR3 for beta chain variable domain of TCR clone 202882 (TRBV11-3, TRBJ1-5)
CASSPLTGLRGYQPQHF

SEQ ID NO: 405765 - protein, 12 aa, Homo sapiens
  CDR3 for alpha chain variable domain of TCR clone 202883 (TRAV17, TRAJ20)
CATQSKDYKLSF

SEQ ID NO: 405766 - protein, 13 aa, Homo sapiens
  CDR3 for beta chain variable domain of TCR clone 202883 (TRBV10-3, TRBJ1-1)
CAIIPEGGTEAFF

SEQ ID NO: 405767 - protein, 14 aa, Homo sapiens
  CDR3 for alpha chain variable domain of TCR clone 202884 (TRAV12-2, TRAJ45)
CAVYSGGGADGLTF

SEQ ID NO: 405768 - protein, 15 aa, Homo sapiens
  CDR3 for beta chain variable domain of TCR clone 202884 (TRBV4-1, TRBJ2-7)
CASSQNTGRLYEQYF

SEQ ID NO: 405769 - protein, 14 aa, Homo sapiens
  CDR3 for alpha chain variable domain of TCR clone 202885 (TRAV12-2, TRAJ13)
CAVKKTGGYQKVTF

SEQ ID NO: 405770 - protein, 15 aa, Homo sapiens
  CDR3 for beta chain variable domain of TCR clone 202885 (TRBV20-1, TRBJ2-5)
CSASPLAGGQETQYF

SEQ ID NO: 405771 - protein, 12 aa, Homo sapiens
  CDR3 for alpha chain variable domain of TCR clone 202886 (TRAV12-3, TRAJ17)
CAMTLTGNKRTF

SEQ ID NO: 405772 - protein, 18 aa, Homo sapiens
  CDR3 for beta chain variable domain of TCR clone 202886 (TRBV4-3, TRBJ1-6)
CASSQATPASSYNSPLHF

SEQ ID NO: 405773 - protein, 20 aa, Homo sapiens
  CDR3 for alpha chain variable domain of TCR clone 202887 (TRAV27, TRAJ10)
ASTSVPSRGILTGGGNKLNF

SEQ ID NO: 405774 - protein, 15 aa, Homo sapiens
  CDR3 for beta chain variable domain of TCR clone 202887 (TRBV28, TRBJ2-1)
CASSGLAEVDNEQFF

SEQ ID NO: 405775 - protein, 10 aa, Homo sapiens
  CDR3 for alpha chain variable domain of TCR clone 202888 (TRAV13-1, TRAJ8)
CTAHFQKLVF

SEQ ID NO: 405776 - protein, 20 aa, Homo sapiens
  CDR3 for beta chain variable domain of TCR clone 202888 (TRBV3-1, TRBJ2-6)
CASSPRPGLEGGAGANVLTF

SEQ ID NO: 405777 - protein, 13 aa, Homo sapiens
  CDR3 for alpha chain variable domain of TCR clone 202889 (TRAV26-2, TRAJ43)
CILRAVNNNDMRF

SEQ ID NO: 405778 - protein, 16 aa, Homo sapiens
  CDR3 for beta chain variable domain of TCR clone 202889 (TRBV9, TRBJ2-1)
CASSVGGGGNYNEQFF

SEQ ID NO: 405779 - protein, 15 aa, Homo sapiens
  CDR3 for alpha chain variable domain of TCR clone 202890 (TRAV2, TRAJ22)
CAVPSRGGSPRQLTF

SEQ ID NO: 405780 - protein, 11 aa, Homo sapiens
  CDR3 for beta chain variable domain of TCR clone 202890 (TRBV27, TRBJ2-3)
CASSLGDTQYF

SEQ ID NO: 405781 - protein, 14 aa, Homo sapiens
  CDR3 for alpha chain variable domain of TCR clone 202891 (TRAV23/DV6, TRAJ45)
CAASWGGGAAGLTF

SEQ ID NO: 405782 - protein, 15 aa, Homo sapiens
  CDR3 for beta chain variable domain of TCR clone 202891 (TRBV4-2, TRBJ1-2)
CASSRNTGAGYGYTF

SEQ ID NO: 405783 - protein, 13 aa, Homo sapiens
  CDR3 for alpha chain variable domain of TCR clone 202892 (TRAV13-1, TRAJ9)
CAARGTGGFKTIF

SEQ ID NO: 405784 - protein, 12 aa, Homo sapiens
  CDR3 for beta chain variable domain of TCR clone 202892 (TRBV2, TRBJ2-1)
CAYGPHGNEQFF

SEQ ID NO: 405785 - protein, 13 aa, Homo sapiens
  CDR3 for alpha chain variable domain of TCR clone 202893 (TRAV27, TRAJ42)
CAGARGSQGNLIL

SEQ ID NO: 405786 - protein, 14 aa, Homo sapiens
  CDR3 for beta chain variable domain of TCR clone 202893 (TRBV20-1, TRBJ1-1)
CSAQTRIGGTEAFF

SEQ ID NO: 405787 - protein, 12 aa, Homo sapiens
  CDR3 for alpha chain variable domain of TCR clone 202894 (TRAV12-3, TRAJ21)
CAMFNNFNKFYF

SEQ ID NO: 405788 - protein, 14 aa, Homo sapiens
  CDR3 for beta chain variable domain of TCR clone 202894 (TRBV28, TRBJ2-1)
CASSIQGTVREQFF

SEQ ID NO: 405789 - protein, 11 aa, Homo sapiens
  CDR3 for alpha chain variable domain of TCR clone 202895 (TRAV4, TRAJ23)
CLVAPEGKLIF

SEQ ID NO: 405790 - protein, 15 aa, Homo sapiens
  CDR3 for beta chain variable domain of TCR clone 202895 (TRBV7-2, TRBJ2-1)
CASSFQADEYNEQFF

SEQ ID NO: 405791 - protein, 13 aa, Homo sapiens
  CDR3 for alpha chain variable domain of TCR clone 202896 (TRAV21, TRAJ27)
CAALNTNAGKSTF

SEQ ID NO: 405792 - protein, 18 aa, Homo sapiens
  CDR3 for beta chain variable domain of TCR clone 202896 (TRBV11-2, TRBJ2-3)
CASSLGGASRGAPNTQYF

SEQ ID NO: 405793 - protein, 14 aa, Homo sapiens
  CDR3 for alpha chain variable domain of TCR clone 202897 (TRAV12-2, TRAJ40)
CAVKIPSGTYKYIF

SEQ ID NO: 405794 - protein, 15 aa, Homo sapiens
  CDR3 for beta chain variable domain of TCR clone 202897 (TRBV9, TRBJ1-6)
CASSVAGTGDSPLHC

SEQ ID NO: 405795 - protein, 14 aa, Homo sapiens
  CDR3 for alpha chain variable domain of TCR clone 202898 (TRAV12-1, TRAJ17)
CVVNYKAAGNKLTF

SEQ ID NO: 405796 - protein, 17 aa, Homo sapiens
  CDR3 for beta chain variable domain of TCR clone 202898 (TRBV11-2, TRBJ2-1)
CASSLYPPGVEYNDQFF

SEQ ID NO: 405797 - protein, 15 aa, Homo sapiens
  CDR3 for alpha chain variable domain of TCR clone 202899 (TRAV12-1, TRAJ45)
CVALSGGGGADGLTF

SEQ ID NO: 405798 - protein, 15 aa, Homo sapiens
  CDR3 for beta chain variable domain of TCR clone 202899 (TRBV11-2, TRBJ1-3)
CASSAHSSSGNTIYF

SEQ ID NO: 405799 - protein, 16 aa, Homo sapiens
  CDR3 for alpha chain variable domain of TCR clone 202900 (TRAV30, TRAJ24)
CGTETVDADSWGKFKF

SEQ ID NO: 405800 - protein, 14 aa, Homo sapiens
  CDR3 for beta chain variable domain of TCR clone 202900 (TRBV12-5, TRBJ2-5)
CASGSRTHQETQYF

SEQ ID NO: 405801 - protein, 11 aa, Homo sapiens
  CDR3 for alpha chain variable domain of TCR clone 202901 (TRAV3, TRAJ21)
CAVGNFNKFYF

SEQ ID NO: 405802 - protein, 20 aa, Homo sapiens
  CDR3 for beta chain variable domain of TCR clone 202901 (TRBV7-8, TRBJ2-2)
CASRHLFPGPTVHITGELFF

SEQ ID NO: 405803 - protein, 13 aa, Homo sapiens
  CDR3 for alpha chain variable domain of TCR clone 202902 (TRAV1-2, TRAJ9)
CAVLNTGGFKTIF

SEQ ID NO: 405804 - protein, 12 aa, Homo sapiens
  CDR3 for beta chain variable domain of TCR clone 202902 (TRBV11-2, TRBJ2-2)
CASSLPTGELFF

SEQ ID NO: 405805 - protein, 14 aa, Homo sapiens
  CDR3 for alpha chain variable domain of TCR clone 202903 (TRAV2, TRAJ21)
CAVEDLNNFNKFYF

SEQ ID NO: 405806 - protein, 15 aa, Homo sapiens
  CDR3 for beta chain variable domain of TCR clone 202903 (TRBV19, TRBJ2-1)
CASSIQATSYNEQFF

SEQ ID NO: 405807 - protein, 14 aa, Homo sapiens
  CDR3 for alpha chain variable domain of TCR clone 202904 (TRAV12-3, TRAJ10)
SHLPLTGGGNKITF

SEQ ID NO: 405808 - protein, 15 aa, Homo sapiens
  CDR3 for beta chain variable domain of TCR clone 202904 (TRBV11-2, TRBJ1-3)
CASSLGGTVGNTIYF

SEQ ID NO: 405809 - protein, 17 aa, Homo sapiens
  CDR3 for alpha chain variable domain of TCR clone 202905 (TRAV8-6, TRAJ58)
CAVSSWVGETSGSRLTF

SEQ ID NO: 405810 - protein, 17 aa, Homo sapiens
  CDR3 for beta chain variable domain of TCR clone 202905 (TRBV4-3, TRBJ1-2)
CASSSRLQAGGSVGDTF

SEQ ID NO: 405811 - protein, 13 aa, Homo sapiens
  CDR3 for alpha chain variable domain of TCR clone 202906 (TRAV21, TRAJ20)
CAVGLRGDSKLSF

SEQ ID NO: 405812 - protein, 17 aa, Homo sapiens
  CDR3 for beta chain variable domain of TCR clone 202906 (TRBV13, TRBJ2-3)
CASSLSRVAGGRNTQYF

SEQ ID NO: 405813 - protein, 13 aa, Homo sapiens
  CDR3 for alpha chain variable domain of TCR clone 202907 (TRAV12-2, TRAJ18)
CAVRGSTLGRLYF

SEQ ID NO: 405814 - protein, 14 aa, Homo sapiens
  CDR3 for beta chain variable domain of TCR clone 202907 (TRBV7-8, TRBJ2-3)
CASSLEAGTDTQYF

SEQ ID NO: 405815 - protein, 15 aa, Homo sapiens
  CDR3 for alpha chain variable domain of TCR clone 202908 (TRAV23/DV6, TRAJ37)
CAAGEGSSNTGKLIF

SEQ ID NO: 405816 - protein, 13 aa, Homo sapiens
  CDR3 for beta chain variable domain of TCR clone 202908 (TRBV10-3, TRBJ2-7)
CASKLAVNYEQYF

SEQ ID NO: 405817 - protein, 13 aa, Homo sapiens
  CDR3 for alpha chain variable domain of TCR clone 202909 (TRAV8-4, TRAJ54)
CSVRIQGAQKLVF

SEQ ID NO: 405818 - protein, 12 aa, Homo sapiens
  CDR3 for beta chain variable domain of TCR clone 202909 (TRBV11-2, TRBJ2-2)
CASSLGGGELFF

SEQ ID NO: 405819 - protein, 16 aa, Homo sapiens
  CDR3 for alpha chain variable domain of TCR clone 202910 (TRAV12-2, TRAJ18)
CAVTTDRGSTLGRLDF

SEQ ID NO: 405820 - protein, 13 aa, Homo sapiens
  CDR3 for beta chain variable domain of TCR clone 202910 (TRBV19, TRBJ2-3)
CATWDKTTDTQYF

SEQ ID NO: 405821 - protein, 12 aa, Homo sapiens
  CDR3 for alpha chain variable domain of TCR clone 202911 (TRAV12-3, TRAJ17)
CAMTLTGNNLTF

SEQ ID NO: 405822 - protein, 15 aa, Homo sapiens
  CDR3 for beta chain variable domain of TCR clone 202911 (TRBV20-1, TRBJ2-7)
CSARDWVSGMDEQYF

SEQ ID NO: 405823 - protein, 14 aa, Homo sapiens
  CDR3 for alpha chain variable domain of TCR clone 202912 (TRAV13-1, TRAJ44)
CAAKATCTASKLTF

SEQ ID NO: 405824 - protein, 17 aa, Homo sapiens
  CDR3 for beta chain variable domain of TCR clone 202912 (TRBV7-3, TRBJ2-3)
CASSLRKRMRGADTQYF

SEQ ID NO: 405825 - protein, 13 aa, Homo sapiens
  CDR3 for alpha chain variable domain of TCR clone 202913 (TRAV8-3, TRAJ28)
CAVGAVGSYQLTF

SEQ ID NO: 405826 - protein, 15 aa, Homo sapiens
  CDR3 for beta chain variable domain of TCR clone 202913 (TRBV5-1, TRBJ2-5)
CASSFKGGDQETQYF

SEQ ID NO: 405827 - protein, 10 aa, Homo sapiens
  CDR3 for alpha chain variable domain of TCR clone 202914 (TRAV12-2, TRAJ48)
CAVTSEKLTF

SEQ ID NO: 405828 - protein, 13 aa, Homo sapiens
  CDR3 for beta chain variable domain of TCR clone 202914 (TRBV10-2, TRBJ2-7)
CASGASGGYEQYF

SEQ ID NO: 405829 - protein, 12 aa, Homo sapiens
  CDR3 for alpha chain variable domain of TCR clone 202915 (TRAV12-3, TRAJ4)
CAMTGAGTRLAV

SEQ ID NO: 405830 - protein, 14 aa, Homo sapiens
  CDR3 for beta chain variable domain of TCR clone 202915 (TRBV19, TRBJ2-1)
CGSSKDRGQDEQFF

SEQ ID NO: 405831 - protein, 12 aa, Homo sapiens
  CDR3 for alpha chain variable domain of TCR clone 202916 (TRAV38-1, TRAJ32)
CAPLGATNKLVF

SEQ ID NO: 405832 - protein, 14 aa, Homo sapiens
  CDR3 for beta chain variable domain of TCR clone 202916 (TRBV29-1, TRBJ2-5)
CSVETSGSGETQYF

SEQ ID NO: 405833 - protein, 18 aa, Homo sapiens
  CDR3 for alpha chain variable domain of TCR clone 202917 (TRAV21, TRAJ52)
CAVRPSQAGGTSYGKLTF

SEQ ID NO: 405834 - protein, 14 aa, Homo sapiens
  CDR3 for beta chain variable domain of TCR clone 202917 (TRBV11-1, TRBJ2-7)
CASSFRQGSYEQYF

SEQ ID NO: 405835 - protein, 13 aa, Homo sapiens
  CDR3 for alpha chain variable domain of TCR clone 202918 (TRAV3, TRAJ15)
CAVRDQAGTALIF

SEQ ID NO: 405836 - protein, 15 aa, Homo sapiens
  CDR3 for beta chain variable domain of TCR clone 202918 (TRBV11-1, TRBJ2-7)
CASSLNYWASYEHYF

SEQ ID NO: 405837 - protein, 13 aa, Homo sapiens
  CDR3 for alpha chain variable domain of TCR clone 202919 (TRAV2, TRAJ24)
CAVTTDSWGKLQF

SEQ ID NO: 405838 - protein, 14 aa, Homo sapiens
  CDR3 for beta chain variable domain of TCR clone 202919 (TRBV13, TRBJ2-5)
CASSLGRRQETQYF

SEQ ID NO: 405839 - protein, 13 aa, Homo sapiens
  CDR3 for alpha chain variable domain of TCR clone 202920 (TRAV3, TRAJ3)
CAVRALGASKIIF

SEQ ID NO: 405840 - protein, 17 aa, Homo sapiens
  CDR3 for beta chain variable domain of TCR clone 202920 (TRBV20-1, TRBJ2-1)
CSASSSGLAGSYNEQFF

SEQ ID NO: 405841 - protein, 16 aa, Homo sapiens
  CDR3 for alpha chain variable domain of TCR clone 202921 (TRAV26-1, TRAJ32)
CIVRTNYGGATNKLIF

SEQ ID NO: 405842 - protein, 12 aa, Homo sapiens
  CDR3 for beta chain variable domain of TCR clone 202921 (TRBV3-1, TRBJ2-1)
CASSQGSSGQFF

SEQ ID NO: 405843 - protein, 13 aa, Homo sapiens
  CDR3 for alpha chain variable domain of TCR clone 202922 (TRAV2, TRAJ40)
CAVVTSGTYKYIF

SEQ ID NO: 405844 - protein, 13 aa, Homo sapiens
  CDR3 for beta chain variable domain of TCR clone 202922 (TRBV7-9, TRBJ2-5)
CASLPSGRETRYF

SEQ ID NO: 405845 - protein, 10 aa, Homo sapiens
  CDR3 for alpha chain variable domain of TCR clone 202923 (TRAV1-2, TRAJ20)
CACNDYKLSF

SEQ ID NO: 405846 - protein, 16 aa, Homo sapiens
  CDR3 for beta chain variable domain of TCR clone 202923 (TRBV20-1, TRBJ2-1)
CSAIDLKQGMNNEQFF

SEQ ID NO: 405847 - protein, 14 aa, Homo sapiens
  CDR3 for alpha chain variable domain of TCR clone 202924 (TRAV35, TRAJ22)
CAGLRPGSARQLTF

SEQ ID NO: 405848 - protein, 14 aa, Homo sapiens
  CDR3 for beta chain variable domain of TCR clone 202924 (TRBV7-7, TRBJ2-2)
CATRQDSDTGELFF

SEQ ID NO: 405849 - protein, 13 aa, Homo sapiens
  CDR3 for alpha chain variable domain of TCR clone 202925 (TRAV8-6, TRAJ5)
CAVLDTGRKALTF

SEQ ID NO: 405850 - protein, 13 aa, Homo sapiens
  CDR3 for beta chain variable domain of TCR clone 202925 (TRBV12-4, TRBJ1-2)
CACSLRQGKGYTF

SEQ ID NO: 405851 - protein, 15 aa, Homo sapiens
  CDR3 for alpha chain variable domain of TCR clone 202926 (TRAV3, TRAJ40)
CAVRDVTSGTYKYIF

SEQ ID NO: 405852 - protein, 13 aa, Homo sapiens
  CDR3 for beta chain variable domain of TCR clone 202926 (TRBV7-9, TRBJ1-2)
CASSLKQNYDYTF

SEQ ID NO: 405853 - protein, 13 aa, Homo sapiens
  CDR3 for alpha chain variable domain of TCR clone 202927 (TRAV8-6, TRAJ49)
CAVITNTGNQFYF

SEQ ID NO: 405854 - protein, 12 aa, Homo sapiens
  CDR3 for beta chain variable domain of TCR clone 202927 (TRBV6-3, TRBJ2-7)
CASSEPGFEQYF

SEQ ID NO: 405855 - protein, 23 aa, Homo sapiens
  CDR3 for alpha chain variable domain of TCR clone 202928 (TRAV26-1, TRAJ38)
CIADNAGNNHIQNPDPAVYQMRD

SEQ ID NO: 405856 - protein, 14 aa, Homo sapiens
  CDR3 for beta chain variable domain of TCR clone 202928 (TRBV7-2, TRBJ2-7)
CASRSQGAAYEQYF

SEQ ID NO: 405857 - protein, 16 aa, Homo sapiens
  CDR3 for alpha chain variable domain of TCR clone 202929 (TRAV35, TRAJ28)
CAGYLYSGAGSYQLPF

SEQ ID NO: 405858 - protein, 16 aa, Homo sapiens
  CDR3 for beta chain variable domain of TCR clone 202929 (TRBV5-1, TRBJ2-1)
CASSHGLAGPQNEQFF

SEQ ID NO: 405859 - protein, 19 aa, Homo sapiens
  CDR3 for alpha chain variable domain of TCR clone 202930 (TRAV3, TRAJ6)
CAVRDRNPSRSGGSYIPTF

SEQ ID NO: 405860 - protein, 14 aa, Homo sapiens
  CDR3 for beta chain variable domain of TCR clone 202930 (TRBV4-1, TRBJ2-2)
CASSQAVNTGELFF

SEQ ID NO: 405861 - protein, 13 aa, Homo sapiens
  CDR3 for alpha chain variable domain of TCR clone 202931 (TRAV12-2, TRAJ37)
CAGGSGNTGKLIF

SEQ ID NO: 405862 - protein, 13 aa, Homo sapiens
  CDR3 for beta chain variable domain of TCR clone 202931 (TRBV12-4, TRBJ2-7)
CASSPTETYEQYF

SEQ ID NO: 405863 - protein, 13 aa, Homo sapiens
  CDR3 for alpha chain variable domain of TCR clone 202932 (TRAV8-4, TRAJ30)
CAVSVNRDDKIIF

SEQ ID NO: 405864 - protein, 12 aa, Homo sapiens
  CDR3 for beta chain variable domain of TCR clone 202932 (TRBV7-9, TRBJ2-7)
CASSIKREEQYF

SEQ ID NO: 405865 - protein, 13 aa, Homo sapiens
  CDR3 for alpha chain variable domain of TCR clone 202933 (TRAV17, TRAJ5)
CAPMDAGRRALTF

SEQ ID NO: 405866 - protein, 13 aa, Homo sapiens
  CDR3 for beta chain variable domain of TCR clone 202933 (TRBV7-9, TRBJ1-2)
CASSLKQNYGYTF

SEQ ID NO: 405867 - protein, 13 aa, Homo sapiens
  CDR3 for alpha chain variable domain of TCR clone 202934 (TRAV17, TRAJ30)
CATGGNRDDKIIF

SEQ ID NO: 405868 - protein, 16 aa, Homo sapiens
  CDR3 for beta chain variable domain of TCR clone 202934 (TRBV11-2, TRBJ2-7)
CASSTVTAPKTYEQYF

SEQ ID NO: 405869 - protein, 12 aa, Homo sapiens
  CDR3 for alpha chain variable domain of TCR clone 202935 (TRAV26-2, TRAJ21)
CILKGNFNKFYF

SEQ ID NO: 405870 - protein, 17 aa, Homo sapiens
  CDR3 for beta chain variable domain of TCR clone 202935 (TRBV20-1, TRBJ2-7)
CSATRAGGVAGVEEQYF

SEQ ID NO: 405871 - protein, 11 aa, Homo sapiens
  CDR3 for alpha chain variable domain of TCR clone 202936 (TRAV3, TRAJ49)
CAPITGNQFYF

SEQ ID NO: 405872 - protein, 16 aa, Homo sapiens
  CDR3 for beta chain variable domain of TCR clone 202936 (TRBV5-1, TRBJ2-3)
CASSGFPMSGTDTQYF

SEQ ID NO: 405873 - protein, 12 aa, Homo sapiens
  CDR3 for alpha chain variable domain of TCR clone 202937 (TRAV2, TRAJ32)
CAVGGATNKLIF

SEQ ID NO: 405874 - protein, 16 aa, Homo sapiens
  CDR3 for beta chain variable domain of TCR clone 202937 (TRBV7-3, TRBJ2-2)
CASSLKRGTLPGELFF

SEQ ID NO: 405875 - protein, 14 aa, Homo sapiens
  CDR3 for alpha chain variable domain of TCR clone 202938 (TRAV21, TRAJ48)
CAVRQGFGNEKLTL

SEQ ID NO: 405876 - protein, 15 aa, Homo sapiens
  CDR3 for beta chain variable domain of TCR clone 202938 (TRBV10-3, TRBJ2-3)
CAISLTSGGTDTQYF

SEQ ID NO: 405877 - protein, 14 aa, Homo sapiens
  CDR3 for alpha chain variable domain of TCR clone 202939 (TRAV6, TRAJ37)
CALGSPGNTGKLIF

SEQ ID NO: 405878 - protein, 15 aa, Homo sapiens
  CDR3 for beta chain variable domain of TCR clone 202939 (TRBV2, TRBJ2-1)
CASSEEREGDNEQFF

SEQ ID NO: 405879 - protein, 16 aa, Homo sapiens
  CDR3 for alpha chain variable domain of TCR clone 202940 (TRAV35, TRAJ28)
CAGQRYSGAGSYQRTF

SEQ ID NO: 405880 - protein, 13 aa, Homo sapiens
  CDR3 for beta chain variable domain of TCR clone 202940 (TRBV19, TRBJ1-2)
CASSQGQVYGYTF

SEQ ID NO: 405881 - protein, 14 aa, Homo sapiens
  CDR3 for alpha chain variable domain of TCR clone 202941 (TRAV26-1, TRAJ44)
CISPLPGTASKLTF

SEQ ID NO: 405882 - protein, 15 aa, Homo sapiens
  CDR3 for beta chain variable domain of TCR clone 202941 (TRBV7-9, TRBJ2-1)
CASSFVGAGKNEQFF

SEQ ID NO: 405883 - protein, 12 aa, Homo sapiens
  CDR3 for alpha chain variable domain of TCR clone 202942 (TRAV22, TRAJ29)
CAPPSGNTPLVF

SEQ ID NO: 405884 - protein, 13 aa, Homo sapiens
  CDR3 for beta chain variable domain of TCR clone 202942 (TRBV10-3, TRBJ2-7)
CASKLAVNYEQCF

SEQ ID NO: 405885 - protein, 13 aa, Homo sapiens
  CDR3 for alpha chain variable domain of TCR clone 202943 (TRAV20, TRAJ48)
CAVHLFGNERLTF

SEQ ID NO: 405886 - protein, 15 aa, Homo sapiens
  CDR3 for beta chain variable domain of TCR clone 202943 (TRBV6-5, TRBJ2-6)
CASSQWEAGANVLTF

SEQ ID NO: 405887 - protein, 16 aa, Homo sapiens
  CDR3 for alpha chain variable domain of TCR clone 202944 (TRAV13-1, TRAJ37)
CAASSLGSSNTGKLIF

SEQ ID NO: 405888 - protein, 15 aa, Homo sapiens
  CDR3 for beta chain variable domain of TCR clone 202944 (TRBV6-1, TRBJ2-5)
CASSSGRTIQETQYF

SEQ ID NO: 405889 - protein, 18 aa, Homo sapiens
  CDR3 for alpha chain variable domain of TCR clone 202945 (TRAV21, TRAJ52)
CALRPSPAGGTSYGKLTF

SEQ ID NO: 405890 - protein, 15 aa, Homo sapiens
  CDR3 for beta chain variable domain of TCR clone 202945 (TRBV5-1, TRBJ2-3)
CASSVTSGSTDTQYF

SEQ ID NO: 405891 - protein, 13 aa, Homo sapiens
  CDR3 for alpha chain variable domain of TCR clone 202946 (TRAV8-3, TRAJ43)
CAVGRDNNNDMRF

SEQ ID NO: 405892 - protein, 13 aa, Homo sapiens
  CDR3 for beta chain variable domain of TCR clone 202946 (TRBV29-1, TRBJ2-1)
CSVEGGRVNEQFF

SEQ ID NO: 405893 - protein, 16 aa, Homo sapiens
  CDR3 for alpha chain variable domain of TCR clone 202947 (TRAV26-1, TRAJ58)
IASSESGETSGSRLTF

SEQ ID NO: 405894 - protein, 21 aa, Homo sapiens
  CDR3 for beta chain variable domain of TCR clone 202947 (TRBV7-2, TRBJ2-5)
GRVSRCQQPRQGRKSRETQYF

SEQ ID NO: 405895 - protein, 15 aa, Homo sapiens
  CDR3 for alpha chain variable domain of TCR clone 202948 (TRAV12-3, TRAJ49)
CAMADTPNTGNQFYF

SEQ ID NO: 405896 - protein, 18 aa, Homo sapiens
  CDR3 for beta chain variable domain of TCR clone 202948 (TRBV4-1, TRBJ1-5)
CASSQDPRGQGLNQPQHF

SEQ ID NO: 405897 - protein, 15 aa, Homo sapiens
  CDR3 for alpha chain variable domain of TCR clone 202949 (TRAV2, TRAJ15)
CAVEDPGQAGTALIF

SEQ ID NO: 405898 - protein, 13 aa, Homo sapiens
  CDR3 for beta chain variable domain of TCR clone 202949 (TRBV10-2, TRBJ2-7)
CASGASGGYEQYF

SEQ ID NO: 405899 - protein, 12 aa, Homo sapiens
  CDR3 for alpha chain variable domain of TCR clone 202950 (TRAV2, TRAJ31)
CAVEDNNARLMF

SEQ ID NO: 405900 - protein, 12 aa, Homo sapiens
  CDR3 for beta chain variable domain of TCR clone 202950 (TRBV11-2, TRBJ2-1)
CASSPGNNEQFF

SEQ ID NO: 405901 - protein, 14 aa, Homo sapiens
  CDR3 for alpha chain variable domain of TCR clone 202951 (TRAV17, TRAJ12)
CATDEKDSSDKLIF

SEQ ID NO: 405902 - protein, 16 aa, Homo sapiens
  CDR3 for beta chain variable domain of TCR clone 202951 (TRBV11-2, TRBJ2-1)
CASSPRLAGVYNEQFF

SEQ ID NO: 405903 - protein, 18 aa, Homo sapiens
  CDR3 for alpha chain variable domain of TCR clone 202952 (TRAV35, TRAJ28)
CAGHNYPLSGAGSYPLTF

SEQ ID NO: 405904 - protein, 12 aa, Homo sapiens
  CDR3 for beta chain variable domain of TCR clone 202952 (TRBV7-9, TRBJ1-1)
CASSLEGTEAFF

SEQ ID NO: 405905 - protein, 15 aa, Homo sapiens
  CDR3 for alpha chain variable domain of TCR clone 202953 (TRAV16, TRAJ16)
CALQGGGSDGQKLLF

SEQ ID NO: 405906 - protein, 14 aa, Homo sapiens
  CDR3 for beta chain variable domain of TCR clone 202953 (TRBV18, TRBJ2-7)
CASSPRGGAYEQYF

SEQ ID NO: 405907 - protein, 14 aa, Homo sapiens
  CDR3 for alpha chain variable domain of TCR clone 202954 (TRAV12-1, TRAJ13)
CVVIDSGGYQKVTF

SEQ ID NO: 405908 - protein, 12 aa, Homo sapiens
  CDR3 for beta chain variable domain of TCR clone 202954 (TRBV5-1, TRBJ2-3)
CASSFLTDTQYF

SEQ ID NO: 405909 - protein, 13 aa, Homo sapiens
  CDR3 for alpha chain variable domain of TCR clone 202955 (TRAV26-1, TRAJ34)
CIASSYNTDKLIF

SEQ ID NO: 405910 - protein, 16 aa, Homo sapiens
  CDR3 for beta chain variable domain of TCR clone 202955 (TRBV25-1, TRBJ1-1)
CASSGDRDRGRIEAFF

SEQ ID NO: 405911 - protein, 15 aa, Homo sapiens
  CDR3 for alpha chain variable domain of TCR clone 202956 (TRAV26-1, TRAJ44)
CIARVPFGTASKLTF

SEQ ID NO: 405912 - protein, 14 aa, Homo sapiens
  CDR3 for beta chain variable domain of TCR clone 202956 (TRBV18, TRBJ2-5)
CASSPGVSQETQYF

SEQ ID NO: 405913 - protein, 11 aa, Homo sapiens
  CDR3 for alpha chain variable domain of TCR clone 202957 (TRAV21, TRAJ48)
CAVDGNEQLTF

SEQ ID NO: 405914 - protein, 15 aa, Homo sapiens
  CDR3 for beta chain variable domain of TCR clone 202957 (TRBV27, TRBJ2-1)
CASSNGGGSSNEQFF

SEQ ID NO: 405915 - protein, 14 aa, Homo sapiens
  CDR3 for alpha chain variable domain of TCR clone 202958 (TRAV17, TRAJ16)
CATADFSDGQKLLF

SEQ ID NO: 405916 - protein, 13 aa, Homo sapiens
  CDR3 for beta chain variable domain of TCR clone 202958 (TRBV18, TRBJ1-1)
CASSPETKPEAFF

SEQ ID NO: 405917 - protein, 14 aa, Homo sapiens
  CDR3 for alpha chain variable domain of TCR clone 202959 (TRAV21, TRAJ37)
CAVKGSSNTVKLIF

SEQ ID NO: 405918 - protein, 14 aa, Homo sapiens
  CDR3 for beta chain variable domain of TCR clone 202959 (TRBV7-2, TRBJ2-1)
CASSRGGARNEQFF

SEQ ID NO: 405919 - protein, 11 aa, Homo sapiens
  CDR3 for alpha chain variable domain of TCR clone 202960 (TRAV21, TRAJ34)
CADYNTDKLIF

SEQ ID NO: 405920 - protein, 11 aa, Homo sapiens
  CDR3 for beta chain variable domain of TCR clone 202960 (TRBV29-1, TRBJ2-5)
CSEDRTGTQYF

SEQ ID NO: 405921 - protein, 14 aa, Homo sapiens
  CDR3 for alpha chain variable domain of TCR clone 202961 (TRAV26-1, TRAJ44)
CIARTTGPASKLTF

SEQ ID NO: 405922 - protein, 14 aa, Homo sapiens
  CDR3 for beta chain variable domain of TCR clone 202961 (TRBV19, TRBJ2-7)
CASSIEASSYEQYF

SEQ ID NO: 405923 - protein, 14 aa, Homo sapiens
  CDR3 for alpha chain variable domain of TCR clone 202962 (TRAV3, TRAJ17)
CAVRDAAAGNQLTF

SEQ ID NO: 405924 - protein, 15 aa, Homo sapiens
  CDR3 for beta chain variable domain of TCR clone 202962 (TRBV9, TRBJ1-6)
RASSVAGTGDSPLHF

SEQ ID NO: 405925 - protein, 12 aa, Homo sapiens
  CDR3 for alpha chain variable domain of TCR clone 202963 (TRAV16, TRAJ10)
CSRTGGGNKLTF

SEQ ID NO: 405926 - protein, 12 aa, Homo sapiens
  CDR3 for beta chain variable domain of TCR clone 202963 (TRBV11-3, TRBJ1-1)
CAGSHRQGEAFF

SEQ ID NO: 405927 - protein, 13 aa, Homo sapiens
  CDR3 for alpha chain variable domain of TCR clone 202964 (TRAV8-6, TRAJ34)
CAVSDQGTDKLIF

SEQ ID NO: 405928 - protein, 13 aa, Homo sapiens
  CDR3 for beta chain variable domain of TCR clone 202964 (TRBV10-3, TRBJ2-7)
CASKLAVNYEQYF

SEQ ID NO: 405929 - protein, 12 aa, Homo sapiens
  CDR3 for alpha chain variable domain of TCR clone 202965 (TRAV16, TRAJ26)
CALRSYGQNFVF

SEQ ID NO: 405930 - protein, 16 aa, Homo sapiens
  CDR3 for beta chain variable domain of TCR clone 202965 (TRBV12-4, TRBJ1-5)
CASSRPVWGSNQPQHF

SEQ ID NO: 405931 - protein, 12 aa, Homo sapiens
  CDR3 for alpha chain variable domain of TCR clone 202966 (TRAV38-1, TRAJ30)
CAFESEDDKIIF

SEQ ID NO: 405932 - protein, 16 aa, Homo sapiens
  CDR3 for beta chain variable domain of TCR clone 202966 (TRBV29-1, TRBJ2-7)
CSVEDAEDGTAYEQYF

SEQ ID NO: 405933 - protein, 16 aa, Homo sapiens
  CDR3 for alpha chain variable domain of TCR clone 202967 (TRAV12-3, TRAJ53)
CAMSPGSGGSNYKLTF

SEQ ID NO: 405934 - protein, 15 aa, Homo sapiens
  CDR3 for beta chain variable domain of TCR clone 202967 (TRBV10-3, TRBJ2-7)
CAISAQAGGPYEQYF

SEQ ID NO: 405935 - protein, 14 aa, Homo sapiens
  CDR3 for alpha chain variable domain of TCR clone 202968 (TRAV8-4, TRAJ9)
CAVRINTGGFKTIF

SEQ ID NO: 405936 - protein, 15 aa, Homo sapiens
  CDR3 for beta chain variable domain of TCR clone 202968 (TRBV10-2, TRBJ2-6)
CASSEHGTGANVLTF

SEQ ID NO: 405937 - protein, 11 aa, Homo sapiens
  CDR3 for alpha chain variable domain of TCR clone 202969 (TRAV12-2, TRAJ26)
CSVNNGQNFVF

SEQ ID NO: 405938 - protein, 11 aa, Homo sapiens
  CDR3 for beta chain variable domain of TCR clone 202969 (TRBV12-4, TRBJ2-5)
CASSFQGAQYF

SEQ ID NO: 405939 - protein, 16 aa, Homo sapiens
  CDR3 for alpha chain variable domain of TCR clone 202970 (TRAV12-3, TRAJ53)
CAMSPGSGVSNYKLTF

SEQ ID NO: 405940 - protein, 20 aa, Homo sapiens
  CDR3 for beta chain variable domain of TCR clone 202970 (TRBV7-8, TRBJ2-2)
CASSHLFPGPTIHITGELFF

SEQ ID NO: 405941 - protein, 11 aa, Homo sapiens
  CDR3 for alpha chain variable domain of TCR clone 202971 (TRAV12-3, TRAJ16)
LTGGDGQNLLF

SEQ ID NO: 405942 - protein, 13 aa, Homo sapiens
  CDR3 for beta chain variable domain of TCR clone 202971 (TRBV12-4, TRBJ1-4)
CASAMGHNEKLFF

SEQ ID NO: 405943 - protein, 12 aa, Homo sapiens
  CDR3 for alpha chain variable domain of TCR clone 202972 (TRAV12-3, TRAJ17)
CAMTLTGDKLNF

SEQ ID NO: 405944 - protein, 15 aa, Homo sapiens
  CDR3 for beta chain variable domain of TCR clone 202972 (TRBV20-1, TRBJ2-7)
CSARDRVSGMDEQYF

SEQ ID NO: 405945 - protein, 15 aa, Homo sapiens
  CDR3 for alpha chain variable domain of TCR clone 202973 (TRAV3, TRAJ5)
CAVRDLDTGSRALTF

SEQ ID NO: 405946 - protein, 13 aa, Homo sapiens
  CDR3 for beta chain variable domain of TCR clone 202973 (TRBV12-4, TRBJ2-7)
CASSPTEAYEQYF

SEQ ID NO: 405947 - protein, 14 aa, Homo sapiens
  CDR3 for alpha chain variable domain of TCR clone 202974 (TRAV12-3, TRAJ57)
CAMSAWGGSEKLVF

SEQ ID NO: 405948 - protein, 14 aa, Homo sapiens
  CDR3 for beta chain variable domain of TCR clone 202974 (TRBV18, TRBJ2-5)
CASSPGVSQETQYL

SEQ ID NO: 405949 - protein, 14 aa, Homo sapiens
  CDR3 for alpha chain variable domain of TCR clone 202975 (TRAV1-2, TRAJ16)
CAVNRFSDGQKLLF

SEQ ID NO: 405950 - protein, 15 aa, Homo sapiens
  CDR3 for beta chain variable domain of TCR clone 202975 (TRBV20-1, TRBJ2-7)
CIARDRVSGMDEQYF

SEQ ID NO: 405951 - protein, 11 aa, Homo sapiens
  CDR3 for alpha chain variable domain of TCR clone 202976 (TRAV12-1, TRAJ8)
CVVTGFQKLVF

SEQ ID NO: 405952 - protein, 13 aa, Homo sapiens
  CDR3 for beta chain variable domain of TCR clone 202976 (TRBV24-1, TRBJ2-2)
CATSDWFTGELFF

SEQ ID NO: 405953 - protein, 13 aa, Homo sapiens
  CDR3 for alpha chain variable domain of TCR clone 202977 (TRAV8-3, TRAJ36)
CAVGATGANNLFF

SEQ ID NO: 405954 - protein, 16 aa, Homo sapiens
  CDR3 for beta chain variable domain of TCR clone 202977 (TRBV19, TRBJ2-2)
CASSFPGQGLAGELFF

SEQ ID NO: 405955 - protein, 11 aa, Homo sapiens
  CDR3 for alpha chain variable domain of TCR clone 202978 (TRAV13-1, TRAJ6)
CAAVAYIWTRN

SEQ ID NO: 405956 - protein, 14 aa, Homo sapiens
  CDR3 for beta chain variable domain of TCR clone 202978 (TRBV28, TRBJ2-3)
CASSLTDLLDTQYF

SEQ ID NO: 405957 - protein, 13 aa, Homo sapiens
  CDR3 for alpha chain variable domain of TCR clone 202979 (TRAV13-1, TRAJ40)
YAAISPGTYKYIF

SEQ ID NO: 405958 - protein, 13 aa, Homo sapiens
  CDR3 for beta chain variable domain of TCR clone 202979 (TRBV10-3, TRBJ2-7)
CAIRAGGPHEQYF

SEQ ID NO: 405959 - protein, 14 aa, Homo sapiens
  CDR3 for alpha chain variable domain of TCR clone 202980 (TRAV8-3, TRAJ21)
CAVGLNPRSDNFYF

SEQ ID NO: 405960 - protein, 11 aa, Homo sapiens
  CDR3 for beta chain variable domain of TCR clone 202980 (TRBV6-3, TRBJ2-3)
CATGQADTQYF

SEQ ID NO: 405961 - protein, 14 aa, Homo sapiens
  CDR3 for alpha chain variable domain of TCR clone 202981 (TRAV13-1, TRAJ35)
CAASKGGFGNVLHC

SEQ ID NO: 405962 - protein, 15 aa, Homo sapiens
  CDR3 for beta chain variable domain of TCR clone 202981 (TRBV5-1, TRBJ2-5)
CASSFKGGDQETQYF

SEQ ID NO: 405963 - protein, 17 aa, Homo sapiens
  CDR3 for alpha chain variable domain of TCR clone 202982 (TRAV3, TRAJ28)
CAVREAYSGAGSYQLTF

SEQ ID NO: 405964 - protein, 14 aa, Homo sapiens
  CDR3 for beta chain variable domain of TCR clone 202982 (TRBV4-2, TRBJ1-5)
CASSRDRGNQPQHF

SEQ ID NO: 405965 - protein, 11 aa, Homo sapiens
  CDR3 for alpha chain variable domain of TCR clone 202983 (TRAV2, TRAJ13)
CASGGYQTVTF

SEQ ID NO: 405966 - protein, 15 aa, Homo sapiens
  CDR3 for beta chain variable domain of TCR clone 202983 (TRBV11-2, TRBJ2-2)
CASSSDRVNAGELFF

SEQ ID NO: 405967 - protein, 15 aa, Homo sapiens
  CDR3 for alpha chain variable domain of TCR clone 202984 (TRAV16, TRAJ17)
CALSGNKAAGNKLTF

SEQ ID NO: 405968 - protein, 16 aa, Homo sapiens
  CDR3 for beta chain variable domain of TCR clone 202984 (TRBV12-4, TRBJ1-5)
CASSRPVGGSNQPQHF

SEQ ID NO: 405969 - protein, 12 aa, Homo sapiens
  CDR3 for alpha chain variable domain of TCR clone 202985 (TRAV1-2, TRAJ24)
CAVGGSWGKFQF

SEQ ID NO: 405970 - protein, 15 aa, Homo sapiens
  CDR3 for beta chain variable domain of TCR clone 202985 (TRBV6-1, TRBJ2-7)
CASSEGVGNAYEQYF

SEQ ID NO: 405971 - protein, 12 aa, Homo sapiens
  CDR3 for alpha chain variable domain of TCR clone 202986 (TRAV12-3, TRAJ20)
CAMVRGDYKLSF

SEQ ID NO: 405972 - protein, 16 aa, Homo sapiens
  CDR3 for beta chain variable domain of TCR clone 202986 (TRBV5-1, TRBJ2-3)
CASSLGLALYTDTQYF

SEQ ID NO: 405973 - protein, 14 aa, Homo sapiens
  CDR3 for alpha chain variable domain of TCR clone 202987 (TRAV3, TRAJ36)
CAVRDGSGANNLFF

SEQ ID NO: 405974 - protein, 16 aa, Homo sapiens
  CDR3 for beta chain variable domain of TCR clone 202987 (TRBV20-1, TRBJ2-6)
CSAREGPGVGANVLTF

SEQ ID NO: 405975 - protein, 13 aa, Homo sapiens
  CDR3 for alpha chain variable domain of TCR clone 202988 (TRAV21, TRAJ37)
CAVSSGNTGKLIF

SEQ ID NO: 405976 - protein, 17 aa, Homo sapiens
  CDR3 for beta chain variable domain of TCR clone 202988 (TRBV13, TRBJ2-3)
CASSLSRVAGGRNTQYF

SEQ ID NO: 405977 - protein, 17 aa, Homo sapiens
  CDR3 for alpha chain variable domain of TCR clone 202989 (TRAV3, TRAJ42)
CAVRDRDYGGSQGNLTF

SEQ ID NO: 405978 - protein, 15 aa, Homo sapiens
  CDR3 for beta chain variable domain of TCR clone 202989 (TRBV2, TRBJ2-1)
CATQARLVMIGEQFF

SEQ ID NO: 405979 - protein, 13 aa, Homo sapiens
  CDR3 for alpha chain variable domain of TCR clone 202990 (TRAV4, TRAJ42)
CLVVGGSQGNLIF

SEQ ID NO: 405980 - protein, 16 aa, Homo sapiens
  CDR3 for beta chain variable domain of TCR clone 202990 (TRBV5-1, TRBJ2-3)
CASSLQGRVGADTQYF

SEQ ID NO: 405981 - protein, 15 aa, Homo sapiens
  CDR3 for alpha chain variable domain of TCR clone 202991 (TRAV2, TRAJ15)
CAVEDLGQAGTALIF

SEQ ID NO: 405982 - protein, 13 aa, Homo sapiens
  CDR3 for beta chain variable domain of TCR clone 202991 (TRBV12-4, TRBJ2-5)
CASSLGGSRTQYF

SEQ ID NO: 405983 - protein, 23 aa, Homo sapiens
  CDR3 for alpha chain variable domain of TCR clone 202992 (TRAV17, TRAJ36)
CAPTGQTTSSLGLERDSPLFPIS

SEQ ID NO: 405984 - protein, 12 aa, Homo sapiens
  CDR3 for beta chain variable domain of TCR clone 202992 (TRBV29-1, TRBJ2-3)
CSVVLGADTQYF

SEQ ID NO: 405985 - protein, 13 aa, Homo sapiens
  CDR3 for alpha chain variable domain of TCR clone 202993 (TRAV35, TRAJ36)
CAGPQIGANNLFF

SEQ ID NO: 405986 - protein, 16 aa, Homo sapiens
  CDR3 for beta chain variable domain of TCR clone 202993 (TRBV6-5, TRBJ2-1)
CASSYSLAGGYNEQFF

SEQ ID NO: 405987 - protein, 15 aa, Homo sapiens
  CDR3 for alpha chain variable domain of TCR clone 202994 (TRAV16, TRAJ20)
CALKGGLRADYKLSF

SEQ ID NO: 405988 - protein, 16 aa, Homo sapiens
  CDR3 for beta chain variable domain of TCR clone 202994 (TRBV11-3, TRBJ2-2)
CASSSRTSPGTGDLFF

SEQ ID NO: 405989 - protein, 12 aa, Homo sapiens
  CDR3 for alpha chain variable domain of TCR clone 202995 (TRAV26-1, TRAJ43)
CIVRGNNNDMSF

SEQ ID NO: 405990 - protein, 13 aa, Homo sapiens
  CDR3 for beta chain variable domain of TCR clone 202995 (TRBV20-1, TRBJ2-3)
CSAIYPGADTQYF

SEQ ID NO: 405991 - protein, 15 aa, Homo sapiens
  CDR3 for alpha chain variable domain of TCR clone 202996 (TRAV25, TRAJ52)
CAGRPGGTSYGKLTF

SEQ ID NO: 405992 - protein, 17 aa, Homo sapiens
  CDR3 for beta chain variable domain of TCR clone 202996 (TRBV7-8, TRBJ2-6)
CASSGGTGGAGANALTF

SEQ ID NO: 405993 - protein, 12 aa, Homo sapiens
  CDR3 for alpha chain variable domain of TCR clone 202997 (TRAV12-2, TRAJ10)
WGGTGGGNKLTF

SEQ ID NO: 405994 - protein, 14 aa, Homo sapiens
  CDR3 for beta chain variable domain of TCR clone 202997 (TRBV27, TRBJ2-7)
CASATGTERREQYF

SEQ ID NO: 405995 - protein, 14 aa, Homo sapiens
  CDR3 for alpha chain variable domain of TCR clone 202998 (TRAV12-1, TRAJ4)
CVVPLKSGYNKLIF

SEQ ID NO: 405996 - protein, 13 aa, Homo sapiens
  CDR3 for beta chain variable domain of TCR clone 202998 (TRBV2, TRBJ1-5)
CATAGPGNQPQHF

SEQ ID NO: 405997 - protein, 13 aa, Homo sapiens
  CDR3 for alpha chain variable domain of TCR clone 202999 (TRAV9-2, TRAJ53)
CARSGCSNYKLTF

SEQ ID NO: 405998 - protein, 16 aa, Homo sapiens
  CDR3 for beta chain variable domain of TCR clone 202999 (TRBV20-1, TRBJ2-1)
CSALTWTSGSYNEQFF

SEQ ID NO: 405999 - protein, 12 aa, Homo sapiens
  CDR3 for alpha chain variable domain of TCR clone 203000 (TRAV21, TRAJ23)
CAVMLQGGKLIF

SEQ ID NO: 406000 - protein, 12 aa, Homo sapiens
  CDR3 for beta chain variable domain of TCR clone 203000 (TRBV14, TRBJ2-5)
CASSQLKETQYF

SEQ ID NO: 406001 - protein, 12 aa, Homo sapiens
  CDR3 for alpha chain variable domain of TCR clone 203001 (TRAV3, TRAJ31)
CAVRPRGPRLMF

SEQ ID NO: 406002 - protein, 17 aa, Homo sapiens
  CDR3 for beta chain variable domain of TCR clone 203001 (TRBV7-9, TRBJ1-5)
CASSASQGGYSNQPQNF

SEQ ID NO: 406003 - protein, 13 aa, Homo sapiens
  CDR3 for alpha chain variable domain of TCR clone 203002 (TRAV8-4, TRAJ10)
CAAFTGGGNKFTF

SEQ ID NO: 406004 - protein, 15 aa, Homo sapiens
  CDR3 for beta chain variable domain of TCR clone 203002 (TRBV6-3, TRBJ2-7)
CASSSPGTVFYEQYF

SEQ ID NO: 406005 - protein, 11 aa, Homo sapiens
  CDR3 for alpha chain variable domain of TCR clone 203003 (TRAV8-4, TRAJ20)
CAVTNVLTTTS

SEQ ID NO: 406006 - protein, 15 aa, Homo sapiens
  CDR3 for beta chain variable domain of TCR clone 203003 (TRBV19, TRBJ1-5)
CASSIVWADNQPQHF

SEQ ID NO: 406007 - protein, 11 aa, Homo sapiens
  CDR3 for alpha chain variable domain of TCR clone 203004 (TRAV3, TRAJ21)
CAVGNFNKFYF

SEQ ID NO: 406008 - protein, 16 aa, Homo sapiens
  CDR3 for beta chain variable domain of TCR clone 203004 (TRBV19, TRBJ2-1)
CASSRAGPSSYNEHFF

SEQ ID NO: 406009 - protein, 14 aa, Homo sapiens
  CDR3 for alpha chain variable domain of TCR clone 203005 (TRAV3, TRAJ13)
CAVSYSGGYQKVTF

SEQ ID NO: 406010 - protein, 15 aa, Homo sapiens
  CDR3 for beta chain variable domain of TCR clone 203005 (TRBV7-2, TRBJ1-3)
CASSLQAGGEDTIYF

SEQ ID NO: 406011 - protein, 12 aa, Homo sapiens
  CDR3 for alpha chain variable domain of TCR clone 203006 (TRAV8-3, TRAJ26)
FAGDNYGQNFVF

SEQ ID NO: 406012 - protein, 15 aa, Homo sapiens
  CDR3 for beta chain variable domain of TCR clone 203006 (TRBV9, TRBJ2-1)
CASSLAGSYYNEQFF

SEQ ID NO: 406013 - protein, 12 aa, Homo sapiens
  CDR3 for alpha chain variable domain of TCR clone 203007 (TRAV13-1, TRAJ21)
RAAKEGFNKFYF

SEQ ID NO: 406014 - protein, 15 aa, Homo sapiens
  CDR3 for beta chain variable domain of TCR clone 203007 (TRBV12-4, TRBJ2-5)
CASSPPTGLQETQYF

SEQ ID NO: 406015 - protein, 15 aa, Homo sapiens
  CDR3 for alpha chain variable domain of TCR clone 203008 (TRAV3, TRAJ29)
CAVREFNSGNTPLVF

SEQ ID NO: 406016 - protein, 16 aa, Homo sapiens
  CDR3 for beta chain variable domain of TCR clone 203008 (TRBV7-6, TRBJ2-7)
CQQLSSASGNSYEQYF

SEQ ID NO: 406017 - protein, 16 aa, Homo sapiens
  CDR3 for alpha chain variable domain of TCR clone 203009 (TRAV30, TRAJ24)
GGTEIVDADSWGKFQF

SEQ ID NO: 406018 - protein, 17 aa, Homo sapiens
  CDR3 for beta chain variable domain of TCR clone 203009 (TRBV20-1, TRBJ2-1)
CSARDPLAGVWDNEQFF

SEQ ID NO: 406019 - protein, 11 aa, Homo sapiens
  CDR3 for alpha chain variable domain of TCR clone 203010 (TRAV3, TRAJ21)
CAVGNFNKFYF

SEQ ID NO: 406020 - protein, 16 aa, Homo sapiens
  CDR3 for beta chain variable domain of TCR clone 203010 (TRBV4-1, TRBJ2-7)
CASSHDPTGYSYEQYF

SEQ ID NO: 406021 - protein, 12 aa, Homo sapiens
  CDR3 for alpha chain variable domain of TCR clone 203011 (TRAV35, TRAJ49)
CAGWNTGNQFYF

SEQ ID NO: 406022 - protein, 15 aa, Homo sapiens
  CDR3 for beta chain variable domain of TCR clone 203011 (TRBV11-3, TRBJ2-3)
CASLKDGREGDTQYF

SEQ ID NO: 406023 - protein, 13 aa, Homo sapiens
  CDR3 for alpha chain variable domain of TCR clone 203012 (TRAV8-6, TRAJ40)
CAGSVTGTYKYIF

SEQ ID NO: 406024 - protein, 15 aa, Homo sapiens
  CDR3 for beta chain variable domain of TCR clone 203012 (TRBV4-1, TRBJ2-3)
CASGRGQGIPDTQYF

SEQ ID NO: 406025 - protein, 11 aa, Homo sapiens
  CDR3 for alpha chain variable domain of TCR clone 203013 (TRAV1-1, TRAJ23)
CAVRQGGKLIF

SEQ ID NO: 406026 - protein, 16 aa, Homo sapiens
  CDR3 for beta chain variable domain of TCR clone 203013 (TRBV9, TRBJ2-1)
CASSVGGGGNYNEQFF

SEQ ID NO: 406027 - protein, 17 aa, Homo sapiens
  CDR3 for alpha chain variable domain of TCR clone 203014 (TRAV23/DV6, TRAJ57)
CAASSTLSQGGSEKLVF

SEQ ID NO: 406028 - protein, 14 aa, Homo sapiens
  CDR3 for beta chain variable domain of TCR clone 203014 (TRBV25-1, TRBJ1-1)
CASTHLGGNPEGFF

SEQ ID NO: 406029 - protein, 16 aa, Homo sapiens
  CDR3 for alpha chain variable domain of TCR clone 203015 (TRAV30, TRAJ24)
CGTEIVDADCWGKFQF

SEQ ID NO: 406030 - protein, 15 aa, Homo sapiens
  CDR3 for beta chain variable domain of TCR clone 203015 (TRBV20-1, TRBJ2-4)
CSARDLTGGPNIQYF

SEQ ID NO: 406031 - protein, 18 aa, Homo sapiens
  CDR3 for alpha chain variable domain of TCR clone 203016 (TRAV21, TRAJ52)
CAVRPSPAGGTSYGKMTF

SEQ ID NO: 406032 - protein, 13 aa, Homo sapiens
  CDR3 for beta chain variable domain of TCR clone 203016 (TRBV29-1, TRBJ2-1)
CSVEGGRVNEQFF

SEQ ID NO: 406033 - protein, 19 aa, Homo sapiens
  CDR3 for alpha chain variable domain of TCR clone 203017 (TRAV1-2, TRAJ26)
CLLPLCCARPDNYGQNFVF

SEQ ID NO: 406034 - protein, 12 aa, Homo sapiens
  CDR3 for beta chain variable domain of TCR clone 203017 (TRBV20-1, TRBJ2-1)
CSAQYTYNEQFF

SEQ ID NO: 406035 - protein, 15 aa, Homo sapiens
  CDR3 for alpha chain variable domain of TCR clone 203018 (TRAV26-1, TRAJ29)
CIVRVEGSGNTPLVF

SEQ ID NO: 406036 - protein, 15 aa, Homo sapiens
  CDR3 for beta chain variable domain of TCR clone 203018 (TRBV27, TRBJ2-5)
CASSLYPRGGETQYF

SEQ ID NO: 406037 - protein, 13 aa, Homo sapiens
  CDR3 for alpha chain variable domain of TCR clone 203019 (TRAV3, TRAJ29)
CAVRDIIDTPLVF

SEQ ID NO: 406038 - protein, 14 aa, Homo sapiens
  CDR3 for beta chain variable domain of TCR clone 203019 (TRBV27, TRBJ2-1)
CASSATGGYNEQFS

SEQ ID NO: 406039 - protein, 13 aa, Homo sapiens
  CDR3 for alpha chain variable domain of TCR clone 203020 (TRAV8-2, TRAJ43)
CVVSDHGDNDMRF

SEQ ID NO: 406040 - protein, 12 aa, Homo sapiens
  CDR3 for beta chain variable domain of TCR clone 203020 (TRBV7-9, TRBJ2-7)
CASRTGFDEQYF

SEQ ID NO: 406041 - protein, 13 aa, Homo sapiens
  CDR3 for alpha chain variable domain of TCR clone 203021 (TRAV29/DV5, TRAJ31)
CVASRNNNARLMF

SEQ ID NO: 406042 - protein, 12 aa, Homo sapiens
  CDR3 for beta chain variable domain of TCR clone 203021 (TRBV14, TRBJ1-1)
CASSQLKGLAFF

SEQ ID NO: 406043 - protein, 13 aa, Homo sapiens
  CDR3 for alpha chain variable domain of TCR clone 203022 (TRAV12-1, TRAJ49)
CVVNTNTGNQFYF

SEQ ID NO: 406044 - protein, 15 aa, Homo sapiens
  CDR3 for beta chain variable domain of TCR clone 203022 (TRBV20-1, TRBJ2-7)
CSARDRVSGMDEQYF

SEQ ID NO: 406045 - protein, 13 aa, Homo sapiens
  CDR3 for alpha chain variable domain of TCR clone 203023 (TRAV21, TRAJ56)
CAVRTGANSKMTF

SEQ ID NO: 406046 - protein, 15 aa, Homo sapiens
  CDR3 for beta chain variable domain of TCR clone 203023 (TRBV7-9, TRBJ1-1)
CASSHRGTVNTEAFF

SEQ ID NO: 406047 - protein, 15 aa, Homo sapiens
  CDR3 for alpha chain variable domain of TCR clone 203024 (TRAV3, TRAJ5)
CAVRDLDTGRRALTF

SEQ ID NO: 406048 - protein, 15 aa, Homo sapiens
  CDR3 for beta chain variable domain of TCR clone 203024 (TRBV4-2, TRBJ1-2)
CASSQRTGGRDGYTF

SEQ ID NO: 406049 - protein, 14 aa, Homo sapiens
  CDR3 for alpha chain variable domain of TCR clone 203025 (TRAV12-3, TRAJ29)
CAMILLSGNTPLVF

SEQ ID NO: 406050 - protein, 15 aa, Homo sapiens
  CDR3 for beta chain variable domain of TCR clone 203025 (TRBV12-4, TRBJ2-5)
CASSPPTGLQETQYF

SEQ ID NO: 406051 - protein, 13 aa, Homo sapiens
  CDR3 for alpha chain variable domain of TCR clone 203026 (TRAV27, TRAJ29)
CAGAHSGKTPLVF

SEQ ID NO: 406052 - protein, 15 aa, Homo sapiens
  CDR3 for beta chain variable domain of TCR clone 203026 (TRBV15, TRBJ1-4)
CATSRDMGSYEKLFF

SEQ ID NO: 406053 - protein, 17 aa, Homo sapiens
  CDR3 for alpha chain variable domain of TCR clone 203027 (TRAV3, TRAJ6)
CAVRDCPRAGGSYIPTF

SEQ ID NO: 406054 - protein, 18 aa, Homo sapiens
  CDR3 for beta chain variable domain of TCR clone 203027 (TRBV7-2, TRBJ2-3)
CASSLGGASRGAPNTQYF

SEQ ID NO: 406055 - protein, 13 aa, Homo sapiens
  CDR3 for alpha chain variable domain of TCR clone 203028 (TRAV13-1, TRAJ20)
CAARVSNDYKLSF

SEQ ID NO: 406056 - protein, 12 aa, Homo sapiens
  CDR3 for beta chain variable domain of TCR clone 203028 (TRBV20-1, TRBJ2-1)
CGARLGTDEQFF

SEQ ID NO: 406057 - protein, 15 aa, Homo sapiens
  CDR3 for alpha chain variable domain of TCR clone 203029 (TRAV8-2, TRAJ16)
CVVSDGFSDGQKLLF

SEQ ID NO: 406058 - protein, 13 aa, Homo sapiens
  CDR3 for beta chain variable domain of TCR clone 203029 (TRBV2, TRBJ1-1)
CASSVLMNTEAFF

SEQ ID NO: 406059 - protein, 12 aa, Homo sapiens
  CDR3 for alpha chain variable domain of TCR clone 203030 (TRAV13-1, TRAJ21)
CAAKEGFIKFYF

SEQ ID NO: 406060 - protein, 14 aa, Homo sapiens
  CDR3 for beta chain variable domain of TCR clone 203030 (TRBV6-1, TRBJ1-3)
CASVQGGGGNTIYF

SEQ ID NO: 406061 - protein, 17 aa, Homo sapiens
  CDR3 for alpha chain variable domain of TCR clone 203031 (TRAV12-2, TRAJ6)
CAPQGPPRAGGSYIPTF

SEQ ID NO: 406062 - protein, 13 aa, Homo sapiens
  CDR3 for beta chain variable domain of TCR clone 203031 (TRBV20-1, TRBJ2-7)
CSASPFSSYEQYC

SEQ ID NO: 406063 - protein, 12 aa, Homo sapiens
  CDR3 for alpha chain variable domain of TCR clone 203032 (TRAV13-1, TRAJ53)
CAAGGRHYKLTF

SEQ ID NO: 406064 - protein, 11 aa, Homo sapiens
  CDR3 for beta chain variable domain of TCR clone 203032 (TRBV2, TRBJ1-1)
CASREGTEAFF

SEQ ID NO: 406065 - protein, 13 aa, Homo sapiens
  CDR3 for alpha chain variable domain of TCR clone 203033 (TRAV8-2, TRAJ43)
CVVSDQGENDMRF

SEQ ID NO: 406066 - protein, 12 aa, Homo sapiens
  CDR3 for beta chain variable domain of TCR clone 203033 (TRBV7-9, TRBJ2-7)
CASRTGFDEQYF

SEQ ID NO: 406067 - protein, 14 aa, Homo sapiens
  CDR3 for alpha chain variable domain of TCR clone 203034 (TRAV2, TRAJ37)
CAVDFTSNTGKLIF

SEQ ID NO: 406068 - protein, 13 aa, Homo sapiens
  CDR3 for beta chain variable domain of TCR clone 203034 (TRBV19, TRBJ2-2)
CASSIWSTGELFF

SEQ ID NO: 406069 - protein, 14 aa, Homo sapiens
  CDR3 for alpha chain variable domain of TCR clone 203035 (TRAV16, TRAJ15)
CALSFNQAGTALIF

SEQ ID NO: 406070 - protein, 16 aa, Homo sapiens
  CDR3 for beta chain variable domain of TCR clone 203035 (TRBV9, TRBJ2-7)
CACSAGPDRSPYEQYF

SEQ ID NO: 406071 - protein, 14 aa, Homo sapiens
  CDR3 for alpha chain variable domain of TCR clone 203036 (TRAV17, TRAJ48)
CATEGNFGNEKLTF

SEQ ID NO: 406072 - protein, 14 aa, Homo sapiens
  CDR3 for beta chain variable domain of TCR clone 203036 (TRBV7-2, TRBJ2-7)
CASSPKTSFYEQYF

SEQ ID NO: 406073 - protein, 13 aa, Homo sapiens
  CDR3 for alpha chain variable domain of TCR clone 203037 (TRAV12-2, TRAJ39)
GAVNNNAGNMLTF

SEQ ID NO: 406074 - protein, 13 aa, Homo sapiens
  CDR3 for beta chain variable domain of TCR clone 203037 (TRBV2, TRBJ1-5)
CATAGPGNQPQHF

SEQ ID NO: 406075 - protein, 15 aa, Homo sapiens
  CDR3 for alpha chain variable domain of TCR clone 203038 (TRAV34, TRAJ38)
CGADFTPGNNRKLIW

SEQ ID NO: 406076 - protein, 14 aa, Homo sapiens
  CDR3 for beta chain variable domain of TCR clone 203038 (TRBV12-5, TRBJ2-5)
CASGARTHQETQYF

SEQ ID NO: 406077 - protein, 11 aa, Homo sapiens
  CDR3 for alpha chain variable domain of TCR clone 203039 (TRAV24, TRAJ49)
CASTTGNQFYF

SEQ ID NO: 406078 - protein, 14 aa, Homo sapiens
  CDR3 for beta chain variable domain of TCR clone 203039 (TRBV19, TRBJ2-1)
CASSPGLAPNEQFF

SEQ ID NO: 406079 - protein, 15 aa, Homo sapiens
  CDR3 for alpha chain variable domain of TCR clone 203040 (TRAV23/DV6, TRAJ44)
CAASGGTGTASTLTF

SEQ ID NO: 406080 - protein, 16 aa, Homo sapiens
  CDR3 for beta chain variable domain of TCR clone 203040 (TRBV20-1, TRBJ2-3)
CSALAFDTGDPDTQYF

SEQ ID NO: 406081 - protein, 14 aa, Homo sapiens
  CDR3 for alpha chain variable domain of TCR clone 203041 (TRAV2, TRAJ9)
CAVADRSGGFKTIF

SEQ ID NO: 406082 - protein, 17 aa, Homo sapiens
  CDR3 for beta chain variable domain of TCR clone 203041 (TRBV4-1, TRBJ2-7)
CASSRDPLGVRGGEQYF

SEQ ID NO: 406083 - protein, 15 aa, Homo sapiens
  CDR3 for alpha chain variable domain of TCR clone 203042 (TRAV17, TRAJ57)
CSTGPSQGGSEKLVF

SEQ ID NO: 406084 - protein, 16 aa, Homo sapiens
  CDR3 for beta chain variable domain of TCR clone 203042 (TRBV20-1, TRBJ2-2)
CSASASGIPGAGELFF

SEQ ID NO: 406085 - protein, 14 aa, Homo sapiens
  CDR3 for alpha chain variable domain of TCR clone 203043 (TRAV2, TRAJ37)
WAVDFTSNTGKLIF

SEQ ID NO: 406086 - protein, 15 aa, Homo sapiens
  CDR3 for beta chain variable domain of TCR clone 203043 (TRBV20-1, TRBJ1-1)
CSASRGVTGYTEAFF

SEQ ID NO: 406087 - protein, 16 aa, Homo sapiens
  CDR3 for alpha chain variable domain of TCR clone 203044 (TRAV13-1, TRAJ10)
CAASSHFTGGGNKLTF

SEQ ID NO: 406088 - protein, 15 aa, Homo sapiens
  CDR3 for beta chain variable domain of TCR clone 203044 (TRBV7-9, TRBJ1-6)
CASSSPGRGNSPLLF

SEQ ID NO: 406089 - protein, 15 aa, Homo sapiens
  CDR3 for alpha chain variable domain of TCR clone 203045 (TRAV13-2, TRAJ16)
CAENDRISDGKKLLF

SEQ ID NO: 406090 - protein, 14 aa, Homo sapiens
  CDR3 for beta chain variable domain of TCR clone 203045 (TRBV4-2, TRBJ1-5)
CASSRDRGNQPQHF

SEQ ID NO: 406091 - protein, 12 aa, Homo sapiens
  CDR3 for alpha chain variable domain of TCR clone 203046 (TRAV12-3, TRAJ20)
CAMVRGDYKLSF

SEQ ID NO: 406092 - protein, 13 aa, Homo sapiens
  CDR3 for beta chain variable domain of TCR clone 203046 (TRBV15, TRBJ2-5)
CATSQIGEETQYF

SEQ ID NO: 406093 - protein, 11 aa, Homo sapiens
  CDR3 for alpha chain variable domain of TCR clone 203047 (TRAV16, TRAJ23)
CALGGGGKLIF

SEQ ID NO: 406094 - protein, 15 aa, Homo sapiens
  CDR3 for beta chain variable domain of TCR clone 203047 (TRBV7-9, TRBJ1-6)
CASSSPGRGNSPLHF

SEQ ID NO: 406095 - protein, 12 aa, Homo sapiens
  CDR3 for alpha chain variable domain of TCR clone 203048 (TRAV29/DV5, TRAJ34)
CAARHNTDKFIF

SEQ ID NO: 406096 - protein, 15 aa, Homo sapiens
  CDR3 for beta chain variable domain of TCR clone 203048 (TRBV19, TRBJ2-7)
CASSPAGSGEALRYF

SEQ ID NO: 406097 - protein, 18 aa, Homo sapiens
  CDR3 for alpha chain variable domain of TCR clone 203049 (TRAV26-1, TRAJ52)
CIVRVEGAGGTSYGKLTF

SEQ ID NO: 406098 - protein, 15 aa, Homo sapiens
  CDR3 for beta chain variable domain of TCR clone 203049 (TRBV7-9, TRBJ1-6)
CASSSPGRGNSPLHF

SEQ ID NO: 406099 - protein, 13 aa, Homo sapiens
  CDR3 for alpha chain variable domain of TCR clone 203050 (TRAV20, TRAJ37)
CAGCSSNTGKLTF

SEQ ID NO: 406100 - protein, 11 aa, Homo sapiens
  CDR3 for beta chain variable domain of TCR clone 203050 (TRBV12-4, TRBJ2-3)
CAITATDTQYF

SEQ ID NO: 406101 - protein, 12 aa, Homo sapiens
  CDR3 for alpha chain variable domain of TCR clone 203051 (TRAV23/DV6, TRAJ32)
CSMPGATNKLIF

SEQ ID NO: 406102 - protein, 16 aa, Homo sapiens
  CDR3 for beta chain variable domain of TCR clone 203051 (TRBV6-1, TRBJ2-5)
CASSETLDRGAETQYF

SEQ ID NO: 406103 - protein, 15 aa, Homo sapiens
  CDR3 for alpha chain variable domain of TCR clone 203052 (TRAV3, TRAJ22)
FAVRDRGGSARQLTF

SEQ ID NO: 406104 - protein, 18 aa, Homo sapiens
  CDR3 for beta chain variable domain of TCR clone 203052 (TRBV28, TRBJ2-1)
CASSSTSGRANSYNEQFF

SEQ ID NO: 406105 - protein, 13 aa, Homo sapiens
  CDR3 for alpha chain variable domain of TCR clone 203053 (TRAV1-1, TRAJ11)
CAVRTSGYSTLTF

SEQ ID NO: 406106 - protein, 17 aa, Homo sapiens
  CDR3 for beta chain variable domain of TCR clone 203053 (TRBV2, TRBJ1-4)
CASSKRELTQGEEKLFF

SEQ ID NO: 406107 - protein, 12 aa, Homo sapiens
  CDR3 for alpha chain variable domain of TCR clone 203054 (TRAV12-3, TRAJ40)
CAMSSGTYKYTF

SEQ ID NO: 406108 - protein, 20 aa, Homo sapiens
  CDR3 for beta chain variable domain of TCR clone 203054 (TRBV7-8, TRBJ2-2)
CASSHLFPGPTIHITGELFF

SEQ ID NO: 406109 - protein, 18 aa, Homo sapiens
  CDR3 for alpha chain variable domain of TCR clone 203055 (TRAV21, TRAJ52)
CAVRHSPASGTSYGKLTF

SEQ ID NO: 406110 - protein, 17 aa, Homo sapiens
  CDR3 for beta chain variable domain of TCR clone 203055 (TRBV13, TRBJ2-3)
CASSLSRVAGGRNTQYF

SEQ ID NO: 406111 - protein, 11 aa, Homo sapiens
  CDR3 for alpha chain variable domain of TCR clone 203056 (TRAV23/DV6, TRAJ58)
CAARLLRGETS

SEQ ID NO: 406112 - protein, 14 aa, Homo sapiens
  CDR3 for beta chain variable domain of TCR clone 203056 (TRBV4-2, TRBJ2-1)
CASGLDRAYNEQFF

SEQ ID NO: 406113 - protein, 11 aa, Homo sapiens
  CDR3 for alpha chain variable domain of TCR clone 203057 (TRAV12-1, TRAJ21)
CVVNNFTEFYF

SEQ ID NO: 406114 - protein, 14 aa, Homo sapiens
  CDR3 for beta chain variable domain of TCR clone 203057 (TRBV15, TRBJ1-5)
CATSREQSNQPQHF

SEQ ID NO: 406115 - protein, 12 aa, Homo sapiens
  CDR3 for alpha chain variable domain of TCR clone 203058 (TRAV17, TRAJ39)
CATGAAGNMLTF

SEQ ID NO: 406116 - protein, 15 aa, Homo sapiens
  CDR3 for beta chain variable domain of TCR clone 203058 (TRBV19, TRBJ1-1)
CASTSGQIQNTEAFF

SEQ ID NO: 406117 - protein, 17 aa, Homo sapiens
  CDR3 for alpha chain variable domain of TCR clone 203059 (TRAV36/DV7, TRAJ42)
CAGGGMNYGGSQGNLIF

SEQ ID NO: 406118 - protein, 13 aa, Homo sapiens
  CDR3 for beta chain variable domain of TCR clone 203059 (TRBV5-5, TRBJ1-2)
CASSFWRGEDYAF

SEQ ID NO: 406119 - protein, 12 aa, Homo sapiens
  CDR3 for alpha chain variable domain of TCR clone 203060 (TRAV20, TRAJ39)
CAVGNAGNMLTF

SEQ ID NO: 406120 - protein, 16 aa, Homo sapiens
  CDR3 for beta chain variable domain of TCR clone 203060 (TRBV7-3, TRBJ2-2)
CASILKRGTLSGELFF

SEQ ID NO: 406121 - protein, 17 aa, Homo sapiens
  CDR3 for alpha chain variable domain of TCR clone 203061 (TRAV3, TRAJ6)
RAVRDGPRAGGSYIPTF

SEQ ID NO: 406122 - protein, 20 aa, Homo sapiens
  CDR3 for beta chain variable domain of TCR clone 203061 (TRBV28, TRBJ2-1)
CASTLIGRSPGLAGGNEQFF

SEQ ID NO: 406123 - protein, 14 aa, Homo sapiens
  CDR3 for alpha chain variable domain of TCR clone 203062 (TRAV17, TRAJ39)
CATDPVRAGNMLTF

SEQ ID NO: 406124 - protein, 15 aa, Homo sapiens
  CDR3 for beta chain variable domain of TCR clone 203062 (TRBV13, TRBJ1-5)
CPSSFGQGGVQPQHF

SEQ ID NO: 406125 - protein, 16 aa, Homo sapiens
  CDR3 for alpha chain variable domain of TCR clone 203063 (TRAV38-1, TRAJ32)
CAFMPFLGGATNKLIF

SEQ ID NO: 406126 - protein, 13 aa, Homo sapiens
  CDR3 for beta chain variable domain of TCR clone 203063 (TRBV7-7, TRBJ2-3)
CASSLSRADTQYF

SEQ ID NO: 406127 - protein, 15 aa, Homo sapiens
  CDR3 for alpha chain variable domain of TCR clone 203064 (TRAV23/DV6, TRAJ18)
CAARYRGSTLGRRYF

SEQ ID NO: 406128 - protein, 15 aa, Homo sapiens
  CDR3 for beta chain variable domain of TCR clone 203064 (TRBV7-2, TRBJ2-7)
CASSSPSGASSTSGR

SEQ ID NO: 406129 - protein, 14 aa, Homo sapiens
  CDR3 for alpha chain variable domain of TCR clone 203065 (TRAV12-3, TRAJ22)
WAMSLFGSARQLTF

SEQ ID NO: 406130 - protein, 11 aa, Homo sapiens
  CDR3 for beta chain variable domain of TCR clone 203065 (TRBV12-4, TRBJ2-2)
CASSSAGELFF

SEQ ID NO: 406131 - protein, 13 aa, Homo sapiens
  CDR3 for alpha chain variable domain of TCR clone 203066 (TRAV27, TRAJ39)
CAGVNNAGNILTF

SEQ ID NO: 406132 - protein, 19 aa, Homo sapiens
  CDR3 for beta chain variable domain of TCR clone 203066 (TRBV5-1, TRBJ2-3)
CASSLWLAGGITTTDTQYF

SEQ ID NO: 406133 - protein, 15 aa, Homo sapiens
  CDR3 for alpha chain variable domain of TCR clone 203067 (TRAV17, TRAJ57)
CATGPSQGGYEKLVF

SEQ ID NO: 406134 - protein, 18 aa, Homo sapiens
  CDR3 for beta chain variable domain of TCR clone 203067 (TRBV7-9, TRBJ2-7)
CASSLTTSGSRTWYEQYF

SEQ ID NO: 406135 - protein, 16 aa, Homo sapiens
  CDR3 for alpha chain variable domain of TCR clone 203068 (TRAV26-1, TRAJ38)
WIVRVELGGNNRKLIW

SEQ ID NO: 406136 - protein, 14 aa, Homo sapiens
  CDR3 for beta chain variable domain of TCR clone 203068 (TRBV5-1, TRBJ2-3)
CASSPGLAADTQYF

SEQ ID NO: 406137 - protein, 13 aa, Homo sapiens
  CDR3 for alpha chain variable domain of TCR clone 203069 (TRAV17, TRAJ5)
CALRGRAGEHLLL

SEQ ID NO: 406138 - protein, 15 aa, Homo sapiens
  CDR3 for beta chain variable domain of TCR clone 203069 (TRBV6-1, TRBJ1-5)
CASSELREGNQPQHF

SEQ ID NO: 406139 - protein, 13 aa, Homo sapiens
  CDR3 for alpha chain variable domain of TCR clone 203070 (TRAV23/DV6, TRAJ22)
CAPYSGSARQRTF

SEQ ID NO: 406140 - protein, 13 aa, Homo sapiens
  CDR3 for beta chain variable domain of TCR clone 203070 (TRBV6-1, TRBJ1-1)
CASSRQGNTEAFF

SEQ ID NO: 406141 - protein, 20 aa, Homo sapiens
  CDR3 for alpha chain variable domain of TCR clone 203071 (TRAV12-1, TRAJ42)
SSVIQPPTSVKGGSQGNLIF

SEQ ID NO: 406142 - protein, 15 aa, Homo sapiens
  CDR3 for beta chain variable domain of TCR clone 203071 (TRBV4-1, TRBJ2-7)
CASSQNTGRLCEQYF

SEQ ID NO: 406143 - protein, 14 aa, Homo sapiens
  CDR3 for alpha chain variable domain of TCR clone 203072 (TRAV13-1, TRAJ21)
CAARKASTNFTLDL

SEQ ID NO: 406144 - protein, 14 aa, Homo sapiens
  CDR3 for beta chain variable domain of TCR clone 203072 (TRBV5-4, TRBJ1-1)
CASSLDSRRDEAFF

SEQ ID NO: 406145 - protein, 14 aa, Homo sapiens
  CDR3 for alpha chain variable domain of TCR clone 203073 (TRAV1-2, TRAJ6)
CAVSLSGGSYIPTF

SEQ ID NO: 406146 - protein, 15 aa, Homo sapiens
  CDR3 for beta chain variable domain of TCR clone 203073 (TRBV28, TRBJ2-7)
CASSPGGTGFYEQYF

SEQ ID NO: 406147 - protein, 16 aa, Homo sapiens
  CDR3 for alpha chain variable domain of TCR clone 203074 (TRAV13-1, TRAJ45)
CAARGSRKGGADGLPF

SEQ ID NO: 406148 - protein, 13 aa, Homo sapiens
  CDR3 for beta chain variable domain of TCR clone 203074 (TRBV12-4, TRBJ2-5)
CASGKRGKETQYF

SEQ ID NO: 406149 - protein, 15 aa, Homo sapiens
  CDR3 for alpha chain variable domain of TCR clone 203075 (TRAV8-3, TRAJ35)
CAVGATIGFGYVLHC

SEQ ID NO: 406150 - protein, 11 aa, Homo sapiens
  CDR3 for beta chain variable domain of TCR clone 203075 (TRBV24-1, TRBJ2-5)
CATSVGETQYF

SEQ ID NO: 406151 - protein, 15 aa, Homo sapiens
  CDR3 for alpha chain variable domain of TCR clone 203076 (TRAV17, TRAJ22)
FATAALLGSARQLTF

SEQ ID NO: 406152 - protein, 13 aa, Homo sapiens
  CDR3 for beta chain variable domain of TCR clone 203076 (TRBV29-1, TRBJ2-3)
CSVVPQGGDTQYF

SEQ ID NO: 406153 - protein, 13 aa, Homo sapiens
  CDR3 for alpha chain variable domain of TCR clone 203077 (TRAV8-3, TRAJ43)
CAVVPYNNNDMRF

SEQ ID NO: 406154 - protein, 12 aa, Homo sapiens
  CDR3 for beta chain variable domain of TCR clone 203077 (TRBV24-1, TRBJ2-3)
CATSDSTDTQYF

SEQ ID NO: 406155 - protein, 15 aa, Homo sapiens
  CDR3 for alpha chain variable domain of TCR clone 203078 (TRAV3, TRAJ9)
CAVKARNTGGFKTIF

SEQ ID NO: 406156 - protein, 16 aa, Homo sapiens
  CDR3 for beta chain variable domain of TCR clone 203078 (TRBV12-5, TRBJ2-5)
CASGPRTSGNQETQYF

SEQ ID NO: 406157 - protein, 18 aa, Homo sapiens
  CDR3 for alpha chain variable domain of TCR clone 203079 (TRAV21, TRAJ52)
CAVRPSPAGGTSYGKLTF

SEQ ID NO: 406158 - protein, 14 aa, Homo sapiens
  CDR3 for beta chain variable domain of TCR clone 203079 (TRBV20-1, TRBJ2-7)
CSAPELAGVGEQYF

SEQ ID NO: 406159 - protein, 14 aa, Homo sapiens
  CDR3 for alpha chain variable domain of TCR clone 203080 (TRAV13-2, TRAJ11)
CRESSYSGYSTLTF

SEQ ID NO: 406160 - protein, 15 aa, Homo sapiens
  CDR3 for beta chain variable domain of TCR clone 203080 (TRBV7-9, TRBJ1-6)
CASSSPGRGNSPLHF

SEQ ID NO: 406161 - protein, 14 aa, Homo sapiens
  CDR3 for alpha chain variable domain of TCR clone 203081 (TRAV3, TRAJ37)
CAVKESGNTGKLMF

SEQ ID NO: 406162 - protein, 14 aa, Homo sapiens
  CDR3 for beta chain variable domain of TCR clone 203081 (TRBV2, TRBJ1-5)
CASSENRGGQPQHF

SEQ ID NO: 406163 - protein, 14 aa, Homo sapiens
  CDR3 for alpha chain variable domain of TCR clone 203082 (TRAV12-3, TRAJ6)
CAMSATGGSYIPTF

SEQ ID NO: 406164 - protein, 13 aa, Homo sapiens
  CDR3 for beta chain variable domain of TCR clone 203082 (TRBV14, TRBJ2-7)
CASSQDRRYEQYF

SEQ ID NO: 406165 - protein, 12 aa, Homo sapiens
  CDR3 for alpha chain variable domain of TCR clone 203083 (TRAV21, TRAJ13)
PGPSGGYQKVTF

SEQ ID NO: 406166 - protein, 13 aa, Homo sapiens
  CDR3 for beta chain variable domain of TCR clone 203083 (TRBV15, TRBJ1-2)
CATSREEGDGYTF

SEQ ID NO: 406167 - protein, 16 aa, Homo sapiens
  CDR3 for alpha chain variable domain of TCR clone 203084 (TRAV1-2, TRAJ10)
CAVRGVLTGGGNKLTF

SEQ ID NO: 406168 - protein, 13 aa, Homo sapiens
  CDR3 for beta chain variable domain of TCR clone 203084 (TRBV24-1, TRBJ2-2)
CATAATRTGELFF

SEQ ID NO: 406169 - protein, 18 aa, Homo sapiens
  CDR3 for alpha chain variable domain of TCR clone 203085 (TRAV21, TRAJ52)
CAVRPSPAGGTSYGKLTF

SEQ ID NO: 406170 - protein, 16 aa, Homo sapiens
  CDR3 for beta chain variable domain of TCR clone 203085 (TRBV18, TRBJ1-5)
CASSPSTGNSNQPQHF

SEQ ID NO: 406171 - protein, 14 aa, Homo sapiens
  CDR3 for alpha chain variable domain of TCR clone 203086 (TRAV17, TRAJ17)
CATDHRAAGNKLTF

SEQ ID NO: 406172 - protein, 13 aa, Homo sapiens
  CDR3 for beta chain variable domain of TCR clone 203086 (TRBV19, TRBJ2-7)
CASRKAGGSEQYF

SEQ ID NO: 406173 - protein, 15 aa, Homo sapiens
  CDR3 for alpha chain variable domain of TCR clone 203087 (TRAV3, TRAJ32)
CAVSSYGGATNKLIF

SEQ ID NO: 406174 - protein, 11 aa, Homo sapiens
  CDR3 for beta chain variable domain of TCR clone 203087 (TRBV29-1, TRBJ2-5)
CSVASGETQYF

SEQ ID NO: 406175 - protein, 11 aa, Homo sapiens
  CDR3 for alpha chain variable domain of TCR clone 203088 (TRAV23/DV6, TRAJ9)
CFHIGGFKTIF

SEQ ID NO: 406176 - protein, 16 aa, Homo sapiens
  CDR3 for beta chain variable domain of TCR clone 203088 (TRBV7-3, TRBJ2-3)
CASSPTGYQSTDTQYF

SEQ ID NO: 406177 - protein, 13 aa, Homo sapiens
  CDR3 for alpha chain variable domain of TCR clone 203089 (TRAV12-3, TRAJ47)
CAMKKEYGNKLVF

SEQ ID NO: 406178 - protein, 17 aa, Homo sapiens
  CDR3 for beta chain variable domain of TCR clone 203089 (TRBV18, TRBJ1-5)
CASSPTMGQGTNQPQHF

SEQ ID NO: 406179 - protein, 12 aa, Homo sapiens
  CDR3 for alpha chain variable domain of TCR clone 203090 (TRAV13-1, TRAJ21)
CAAKEGFDKFYF

SEQ ID NO: 406180 - protein, 13 aa, Homo sapiens
  CDR3 for beta chain variable domain of TCR clone 203090 (TRBV7-9, TRBJ2-1)
CASSLGTVNEQFF

SEQ ID NO: 406181 - protein, 16 aa, Homo sapiens
  CDR3 for alpha chain variable domain of TCR clone 203091 (TRAV14/DV4, TRAJ20)
CAMREGRSRDDYKLSF

SEQ ID NO: 406182 - protein, 17 aa, Homo sapiens
  CDR3 for beta chain variable domain of TCR clone 203091 (TRBV20-1, TRBJ2-7)
CSATRAGGVAGVEEQYF

SEQ ID NO: 406183 - protein, 14 aa, Homo sapiens
  CDR3 for alpha chain variable domain of TCR clone 203092 (TRAV9-2, TRAJ39)
CALYIYNAGNMLSF

SEQ ID NO: 406184 - protein, 15 aa, Homo sapiens
  CDR3 for beta chain variable domain of TCR clone 203092 (TRBV10-1, TRBJ2-3)
CASSATSGGFDTQYF

SEQ ID NO: 406185 - protein, 14 aa, Homo sapiens
  CDR3 for alpha chain variable domain of TCR clone 203093 (TRAV12-1, TRAJ45)
CVVNVGGGADGLTF

SEQ ID NO: 406186 - protein, 13 aa, Homo sapiens
  CDR3 for beta chain variable domain of TCR clone 203093 (TRBV29-1, TRBJ1-1)
CSVGDSRNTEAFF

SEQ ID NO: 406187 - protein, 14 aa, Homo sapiens
  CDR3 for alpha chain variable domain of TCR clone 203094 (TRAV1-2, TRAJ6)
CAVSLSGGSYIPTF

SEQ ID NO: 406188 - protein, 15 aa, Homo sapiens
  CDR3 for beta chain variable domain of TCR clone 203094 (TRBV28, TRBJ2-5)
CASSSGRTIQETQYF

SEQ ID NO: 406189 - protein, 13 aa, Homo sapiens
  CDR3 for alpha chain variable domain of TCR clone 203095 (TRAV16, TRAJ37)
CALGSGNTGKLIS

SEQ ID NO: 406190 - protein, 14 aa, Homo sapiens
  CDR3 for beta chain variable domain of TCR clone 203095 (TRBV27, TRBJ2-5)
CASSSLKGWETQYF

SEQ ID NO: 406191 - protein, 14 aa, Homo sapiens
  CDR3 for alpha chain variable domain of TCR clone 203096 (TRAV26-1, TRAJ38)
CIADNAGNNRKLIL

SEQ ID NO: 406192 - protein, 14 aa, Homo sapiens
  CDR3 for beta chain variable domain of TCR clone 203096 (TRBV20-1, TRBJ1-1)
CSAQTRIGGTEAFF

SEQ ID NO: 406193 - protein, 16 aa, Homo sapiens
  CDR3 for alpha chain variable domain of TCR clone 203097 (TRAV26-1, TRAJ47)
CIVRVVLSQYGNKLVF

SEQ ID NO: 406194 - protein, 16 aa, Homo sapiens
  CDR3 for beta chain variable domain of TCR clone 203097 (TRBV5-1, TRBJ2-1)
CASSFGVSGSDNEQFF

SEQ ID NO: 406195 - protein, 14 aa, Homo sapiens
  CDR3 for alpha chain variable domain of TCR clone 203098 (TRAV8-6, TRAJ8)
CAVNENTGFQKLVF

SEQ ID NO: 406196 - protein, 16 aa, Homo sapiens
  CDR3 for beta chain variable domain of TCR clone 203098 (TRBV20-1, TRBJ1-2)
CSASMGQGVANYGYTF

SEQ ID NO: 406197 - protein, 14 aa, Homo sapiens
  CDR3 for alpha chain variable domain of TCR clone 203099 (TRAV21, TRAJ15)
CAVSLNQAGTALIF

SEQ ID NO: 406198 - protein, 13 aa, Homo sapiens
  CDR3 for beta chain variable domain of TCR clone 203099 (TRBV18, TRBJ1-1)
CASSPETKPEAFF

SEQ ID NO: 406199 - protein, 14 aa, Homo sapiens
  CDR3 for alpha chain variable domain of TCR clone 203100 (TRAV13-1, TRAJ6)
CSASITGGSYIPTF

SEQ ID NO: 406200 - protein, 14 aa, Homo sapiens
  CDR3 for beta chain variable domain of TCR clone 203100 (TRBV7-2, TRBJ2-5)
CASSPRGSSETQYF

SEQ ID NO: 406201 - protein, 15 aa, Homo sapiens
  CDR3 for alpha chain variable domain of TCR clone 203101 (TRAV12-2, TRAJ52)
CAVTSGGTSYGKLTF

SEQ ID NO: 406202 - protein, 15 aa, Homo sapiens
  CDR3 for beta chain variable domain of TCR clone 203101 (TRBV7-2, TRBJ2-1)
CASIPGFISGNEQFF

SEQ ID NO: 406203 - protein, 15 aa, Homo sapiens
  CDR3 for alpha chain variable domain of TCR clone 203102 (TRAV8-3, TRAJ15)
CAVGAAHQAGTALIF

SEQ ID NO: 406204 - protein, 14 aa, Homo sapiens
  CDR3 for beta chain variable domain of TCR clone 203102 (TRBV20-1, TRBJ2-1)
CSPNDEASYNEQFF

SEQ ID NO: 406205 - protein, 15 aa, Homo sapiens
  CDR3 for alpha chain variable domain of TCR clone 203103 (TRAV3, TRAJ22)
CAVRDRGGSARQLTF

SEQ ID NO: 406206 - protein, 20 aa, Homo sapiens
  CDR3 for beta chain variable domain of TCR clone 203103 (TRBV11-2, TRBJ1-6)
CASSLVFATGGTVHPSTLGA

SEQ ID NO: 406207 - protein, 19 aa, Homo sapiens
  CDR3 for alpha chain variable domain of TCR clone 203104 (TRAV17, TRAJ40)
TASRAADTASYFCASTYIF

SEQ ID NO: 406208 - protein, 17 aa, Homo sapiens
  CDR3 for beta chain variable domain of TCR clone 203104 (TRBV11-2, TRBJ2-4)
CASSFLALGGAGDIQYF

SEQ ID NO: 406209 - protein, 13 aa, Homo sapiens
  CDR3 for alpha chain variable domain of TCR clone 203105 (TRAV21, TRAJ15)
CAVANQAGTALIF

SEQ ID NO: 406210 - protein, 14 aa, Homo sapiens
  CDR3 for beta chain variable domain of TCR clone 203105 (TRBV27, TRBJ2-1)
CAGSIAETYNEQFF

SEQ ID NO: 406211 - protein, 14 aa, Homo sapiens
  CDR3 for alpha chain variable domain of TCR clone 203106 (TRAV8-6, TRAJ33)
CAVSGMDSNYQLIW

SEQ ID NO: 406212 - protein, 14 aa, Homo sapiens
  CDR3 for beta chain variable domain of TCR clone 203106 (TRBV12-5, TRBJ2-5)
CASGSRTHQETQYF

SEQ ID NO: 406213 - protein, 14 aa, Homo sapiens
  CDR3 for alpha chain variable domain of TCR clone 203107 (TRAV6, TRAJ6)
CTLPTSGGSYIPTF

SEQ ID NO: 406214 - protein, 15 aa, Homo sapiens
  CDR3 for beta chain variable domain of TCR clone 203107 (TRBV20-1, TRBJ2-7)
CSAESGTSGAYEQYF

SEQ ID NO: 406215 - protein, 16 aa, Homo sapiens
  CDR3 for alpha chain variable domain of TCR clone 203108 (TRAV12-2, TRAJ18)
CAVTTDRGSTLGRLYV

SEQ ID NO: 406216 - protein, 14 aa, Homo sapiens
  CDR3 for beta chain variable domain of TCR clone 203108 (TRBV4-2, TRBJ1-5)
CASSQDSINQPQHF

SEQ ID NO: 406217 - protein, 11 aa, Homo sapiens
  CDR3 for alpha chain variable domain of TCR clone 203109 (TRAV21, TRAJ11)
CAVNGYSTLTF

SEQ ID NO: 406218 - protein, 15 aa, Homo sapiens
  CDR3 for beta chain variable domain of TCR clone 203109 (TRBV6-1, TRBJ1-5)
CATSDIDSKDQPQHF

SEQ ID NO: 406219 - protein, 11 aa, Homo sapiens
  CDR3 for alpha chain variable domain of TCR clone 203110 (TRAV13-1, TRAJ49)
CACAGGNQFYF

SEQ ID NO: 406220 - protein, 16 aa, Homo sapiens
  CDR3 for beta chain variable domain of TCR clone 203110 (TRBV11-2, TRBJ2-2)
CASSLRTGNLIGELFF

SEQ ID NO: 406221 - protein, 20 aa, Homo sapiens
  CDR3 for alpha chain variable domain of TCR clone 203111 (TRAV12-1, TRAJ42)
SSVIQPPTSVRGGSQGNLIF

SEQ ID NO: 406222 - protein, 18 aa, Homo sapiens
  CDR3 for beta chain variable domain of TCR clone 203111 (TRBV11-2, TRBJ2-3)
CASSLEGASRGAPNTQYF

SEQ ID NO: 406223 - protein, 18 aa, Homo sapiens
  CDR3 for alpha chain variable domain of TCR clone 203112 (TRAV26-1, TRAJ23)
CIVRVGLEVWNQGGKLIF

SEQ ID NO: 406224 - protein, 16 aa, Homo sapiens
  CDR3 for beta chain variable domain of TCR clone 203112 (TRBV12-4, TRBJ2-5)
CASSFFVRGRQDTQYF

SEQ ID NO: 406225 - protein, 17 aa, Homo sapiens
  CDR3 for alpha chain variable domain of TCR clone 203113 (TRAV17, TRAJ7)
CATLGRLAFGKGNQVVL

SEQ ID NO: 406226 - protein, 13 aa, Homo sapiens
  CDR3 for beta chain variable domain of TCR clone 203113 (TRBV12-4, TRBJ2-7)
CASSLERVREQYF

SEQ ID NO: 406227 - protein, 11 aa, Homo sapiens
  CDR3 for alpha chain variable domain of TCR clone 203114 (TRAV27, TRAJ47)
SIVEYGNELGF

SEQ ID NO: 406228 - protein, 18 aa, Homo sapiens
  CDR3 for beta chain variable domain of TCR clone 203114 (TRBV2, TRBJ2-1)
CASRGLAGGPRTYNEQFF

SEQ ID NO: 406229 - protein, 10 aa, Homo sapiens
  CDR3 for alpha chain variable domain of TCR clone 203115 (TRAV1-2, TRAJ31)
CVSEDARLMF

SEQ ID NO: 406230 - protein, 14 aa, Homo sapiens
  CDR3 for beta chain variable domain of TCR clone 203115 (TRBV19, TRBJ2-1)
CASPTFVLSGEQYF

SEQ ID NO: 406231 - protein, 16 aa, Homo sapiens
  CDR3 for alpha chain variable domain of TCR clone 203116 (TRAV26-1, TRAJ52)
CIVSNAGGTSYGKLTF

SEQ ID NO: 406232 - protein, 15 aa, Homo sapiens
  CDR3 for beta chain variable domain of TCR clone 203116 (TRBV7-3, TRBJ2-1)
CASSPTGGGEVVQFF

SEQ ID NO: 406233 - protein, 13 aa, Homo sapiens
  CDR3 for alpha chain variable domain of TCR clone 203117 (TRAV20, TRAJ48)
CAVHLFGNEKLTF

SEQ ID NO: 406234 - protein, 15 aa, Homo sapiens
  CDR3 for beta chain variable domain of TCR clone 203117 (TRBV27, TRBJ2-1)
CASSNGGGSSNEQFF

SEQ ID NO: 406235 - protein, 10 aa, Homo sapiens
  CDR3 for alpha chain variable domain of TCR clone 203118 (TRAV29/DV5, TRAJ48)
CPAGGEKLTF

SEQ ID NO: 406236 - protein, 14 aa, Homo sapiens
  CDR3 for beta chain variable domain of TCR clone 203118 (TRBV7-9, TRBJ2-5)
CASSLAPDQETQYF

SEQ ID NO: 406237 - protein, 14 aa, Homo sapiens
  CDR3 for alpha chain variable domain of TCR clone 203119 (TRAV1-2, TRAJ16)
CAVNRFSDGQKLLF

SEQ ID NO: 406238 - protein, 16 aa, Homo sapiens
  CDR3 for beta chain variable domain of TCR clone 203119 (TRBV10-3, TRBJ2-2)
CAISGETGANTGELFF

SEQ ID NO: 406239 - protein, 17 aa, Homo sapiens
  CDR3 for alpha chain variable domain of TCR clone 203120 (TRAV38-2/DV8, TRAJ28)
CAFLTLYSGAGSDQLTF

SEQ ID NO: 406240 - protein, 14 aa, Homo sapiens
  CDR3 for beta chain variable domain of TCR clone 203120 (TRBV7-2, TRBJ2-5)
CASSLAGGGETQYF

SEQ ID NO: 406241 - protein, 13 aa, Homo sapiens
  CDR3 for alpha chain variable domain of TCR clone 203121 (TRAV2, TRAJ15)
CAVASQSGTALIF

SEQ ID NO: 406242 - protein, 15 aa, Homo sapiens
  CDR3 for beta chain variable domain of TCR clone 203121 (TRBV11-2, TRBJ2-1)
CASSLGTSGLNEQFF

SEQ ID NO: 406243 - protein, 13 aa, Homo sapiens
  CDR3 for alpha chain variable domain of TCR clone 203122 (TRAV13-1, TRAJ49)
CATIWALGNQFYF

SEQ ID NO: 406244 - protein, 12 aa, Homo sapiens
  CDR3 for beta chain variable domain of TCR clone 203122 (TRBV7-8, TRBJ2-7)
CASSLGDREQYF

SEQ ID NO: 406245 - protein, 16 aa, Homo sapiens
  CDR3 for alpha chain variable domain of TCR clone 203123 (TRAV3, TRAJ37)
CAVRGRGSGTTGKLIF

SEQ ID NO: 406246 - protein, 13 aa, Homo sapiens
  CDR3 for beta chain variable domain of TCR clone 203123 (TRBV14, TRBJ2-7)
CASSQDRRGEQYF

SEQ ID NO: 406247 - protein, 14 aa, Homo sapiens
  CDR3 for alpha chain variable domain of TCR clone 203124 (TRAV13-1, TRAJ40)
CAASMTSGTYKYIF

SEQ ID NO: 406248 - protein, 13 aa, Homo sapiens
  CDR3 for beta chain variable domain of TCR clone 203124 (TRBV7-3, TRBJ1-5)
CASSLDSNQPQHF

SEQ ID NO: 406249 - protein, 16 aa, Homo sapiens
  CDR3 for alpha chain variable domain of TCR clone 203125 (TRAV12-3, TRAJ10)
CPMKKGITGGGNKLTF

SEQ ID NO: 406250 - protein, 12 aa, Homo sapiens
  CDR3 for beta chain variable domain of TCR clone 203125 (TRBV20-1, TRBJ2-7)
CSAITPTKEQYF

SEQ ID NO: 406251 - protein, 13 aa, Homo sapiens
  CDR3 for alpha chain variable domain of TCR clone 203126 (TRAV3, TRAJ21)
CAVREPDFNKFYF

SEQ ID NO: 406252 - protein, 17 aa, Homo sapiens
  CDR3 for beta chain variable domain of TCR clone 203126 (TRBV20-1, TRBJ1-6)
GSARGGYTFSYNSPLHF

SEQ ID NO: 406253 - protein, 15 aa, Homo sapiens
  CDR3 for alpha chain variable domain of TCR clone 203127 (TRAV12-3, TRAJ5)
CAMSGLGTGRRAFTF

SEQ ID NO: 406254 - protein, 15 aa, Homo sapiens
  CDR3 for beta chain variable domain of TCR clone 203127 (TRBV19, TRBJ1-1)
CASTSGQIQNTEAFF

SEQ ID NO: 406255 - protein, 10 aa, Homo sapiens
  CDR3 for alpha chain variable domain of TCR clone 203128 (TRAV21, TRAJ43)
CAVRIGDMRF

SEQ ID NO: 406256 - protein, 13 aa, Homo sapiens
  CDR3 for beta chain variable domain of TCR clone 203128 (TRBV20-1, TRBJ2-7)
CSDPGLADYEQYF

SEQ ID NO: 406257 - protein, 13 aa, Homo sapiens
  CDR3 for alpha chain variable domain of TCR clone 203129 (TRAV36/DV7, TRAJ33)
CAVDIDSNYQLIW

SEQ ID NO: 406258 - protein, 16 aa, Homo sapiens
  CDR3 for beta chain variable domain of TCR clone 203129 (TRBV15, TRBJ2-3)
CATRLSGGRAPDTQYF

SEQ ID NO: 406259 - protein, 13 aa, Homo sapiens
  CDR3 for alpha chain variable domain of TCR clone 203130 (TRAV21, TRAJ20)
CAVGLRVDYKLSF

SEQ ID NO: 406260 - protein, 15 aa, Homo sapiens
  CDR3 for beta chain variable domain of TCR clone 203130 (TRBV5-7, TRBJ2-7)
CASSSGPGRGHEQYF

SEQ ID NO: 406261 - protein, 14 aa, Homo sapiens
  CDR3 for alpha chain variable domain of TCR clone 203131 (TRAV38-1, TRAJ40)
CALRPTSGTYKSIF

SEQ ID NO: 406262 - protein, 13 aa, Homo sapiens
  CDR3 for beta chain variable domain of TCR clone 203131 (TRBV25-1, TRBJ1-1)
CQHPPGGNTEAFF

SEQ ID NO: 406263 - protein, 15 aa, Homo sapiens
  CDR3 for alpha chain variable domain of TCR clone 203132 (TRAV12-1, TRAJ44)
CVVFVNTGTASKLTF

SEQ ID NO: 406264 - protein, 17 aa, Homo sapiens
  CDR3 for beta chain variable domain of TCR clone 203132 (TRBV15, TRBJ1-2)
CATSGREIDVVNYGYTF

SEQ ID NO: 406265 - protein, 11 aa, Homo sapiens
  CDR3 for alpha chain variable domain of TCR clone 203133 (TRAV4, TRAJ31)
CLVGDNARLMF

SEQ ID NO: 406266 - protein, 12 aa, Homo sapiens
  CDR3 for beta chain variable domain of TCR clone 203133 (TRBV7-8, TRBJ2-7)
CASSLGDREQYF

SEQ ID NO: 406267 - protein, 10 aa, Homo sapiens
  CDR3 for alpha chain variable domain of TCR clone 203134 (TRAV12-2, TRAJ52)
RSTSYGKLTF

SEQ ID NO: 406268 - protein, 12 aa, Homo sapiens
  CDR3 for beta chain variable domain of TCR clone 203134 (TRBV5-1, TRBJ2-3)
CAISLAADTQYF

SEQ ID NO: 406269 - protein, 15 aa, Homo sapiens
  CDR3 for alpha chain variable domain of TCR clone 203135 (TRAV13-1, TRAJ16)
CAARYQMARSCSLQG

SEQ ID NO: 406270 - protein, 16 aa, Homo sapiens
  CDR3 for beta chain variable domain of TCR clone 203135 (TRBV28, TRBJ1-5)
CASSFRGGYSNQPQHF

SEQ ID NO: 406271 - protein, 12 aa, Homo sapiens
  CDR3 for alpha chain variable domain of TCR clone 203136 (TRAV17, TRAJ30)
CATDARDDKIIF

SEQ ID NO: 406272 - protein, 10 aa, Homo sapiens
  CDR3 for beta chain variable domain of TCR clone 203136 (TRBV20-1, TRBJ2-5)
CSARFETQYF

SEQ ID NO: 406273 - protein, 15 aa, Homo sapiens
  CDR3 for alpha chain variable domain of TCR clone 203137 (TRAV23/DV6, TRAJ4)
CAASPLRGGYNKLIF

SEQ ID NO: 406274 - protein, 14 aa, Homo sapiens
  CDR3 for beta chain variable domain of TCR clone 203137 (TRBV19, TRBJ2-1)
CASSRLASINEQFF

SEQ ID NO: 406275 - protein, 15 aa, Homo sapiens
  CDR3 for alpha chain variable domain of TCR clone 203138 (TRAV17, TRAJ57)
CATGPSQVGSEKLVF

SEQ ID NO: 406276 - protein, 16 aa, Homo sapiens
  CDR3 for beta chain variable domain of TCR clone 203138 (TRBV2, TRBJ2-1)
CASSVGGSLSYNEQFF

SEQ ID NO: 406277 - protein, 20 aa, Homo sapiens
  CDR3 for alpha chain variable domain of TCR clone 203139 (TRAV4, )
CLVGPHNYDIQNPDPAAYQL

SEQ ID NO: 406278 - protein, 17 aa, Homo sapiens
  CDR3 for beta chain variable domain of TCR clone 203139 (TRBV24-1, TRBJ2-1)
CATSDVSTSGTYNEQFF

SEQ ID NO: 406279 - protein, 15 aa, Homo sapiens
  CDR3 for alpha chain variable domain of TCR clone 203140 (TRAV17, TRAJ45)
CATAELGGGADVLTF

SEQ ID NO: 406280 - protein, 14 aa, Homo sapiens
  CDR3 for beta chain variable domain of TCR clone 203140 (TRBV3-1, TRBJ2-5)
CASSQAVRQETQYF

SEQ ID NO: 406281 - protein, 13 aa, Homo sapiens
  CDR3 for alpha chain variable domain of TCR clone 203141 (TRAV29/DV5, TRAJ31)
CAASRNNNARLMV

SEQ ID NO: 406282 - protein, 12 aa, Homo sapiens
  CDR3 for beta chain variable domain of TCR clone 203141 (TRBV14, TRBJ2-7)
CASSRYKDEQYF

SEQ ID NO: 406283 - protein, 17 aa, Homo sapiens
  CDR3 for alpha chain variable domain of TCR clone 203142 (TRAV16, TRAJ37)
CAFWPKNGSSNTGKLIF

SEQ ID NO: 406284 - protein, 17 aa, Homo sapiens
  CDR3 for beta chain variable domain of TCR clone 203142 (TRBV6-5, TRBJ2-7)
CASSYSFWGQVSYEQYF

SEQ ID NO: 406285 - protein, 14 aa, Homo sapiens
  CDR3 for alpha chain variable domain of TCR clone 203143 (TRAV1-2, TRAJ8)
CAVREDTGFQELVF

SEQ ID NO: 406286 - protein, 15 aa, Homo sapiens
  CDR3 for beta chain variable domain of TCR clone 203143 (TRBV5-5, TRBJ1-5)
CASSSTPGSNQPQHF

SEQ ID NO: 406287 - protein, 14 aa, Homo sapiens
  CDR3 for alpha chain variable domain of TCR clone 203144 (TRAV17, TRAJ54)
CATDANQGAQQLVF

SEQ ID NO: 406288 - protein, 14 aa, Homo sapiens
  CDR3 for beta chain variable domain of TCR clone 203144 (TRBV4-2, TRBJ2-1)
CASGLDRAYNEQFF

SEQ ID NO: 406289 - protein, 17 aa, Homo sapiens
  CDR3 for alpha chain variable domain of TCR clone 203145 (TRAV3, TRAJ42)
CAVRDRAYGGSQGNLIF

SEQ ID NO: 406290 - protein, 14 aa, Homo sapiens
  CDR3 for beta chain variable domain of TCR clone 203145 (TRBV25-1, TRBJ1-1)
CASAHLGGNTEAFF

SEQ ID NO: 406291 - protein, 15 aa, Homo sapiens
  CDR3 for alpha chain variable domain of TCR clone 203146 (TRAV38-2/DV8, TRAJ48)
CAYRSGGFGNEKLTF

SEQ ID NO: 406292 - protein, 16 aa, Homo sapiens
  CDR3 for beta chain variable domain of TCR clone 203146 (TRBV28, TRBJ2-7)
CASSPWVATGGLSQYF

SEQ ID NO: 406293 - protein, 12 aa, Homo sapiens
  CDR3 for alpha chain variable domain of TCR clone 203147 (TRAV12-3, TRAJ17)
CAMTLTGNNLTL

SEQ ID NO: 406294 - protein, 15 aa, Homo sapiens
  CDR3 for beta chain variable domain of TCR clone 203147 (TRBV20-1, TRBJ2-7)
CSARDRVSGLDEQYF

SEQ ID NO: 406295 - protein, 14 aa, Homo sapiens
  CDR3 for alpha chain variable domain of TCR clone 203148 (TRAV8-1, TRAJ9)
CAVNAWTGGFKTSF

SEQ ID NO: 406296 - protein, 16 aa, Homo sapiens
  CDR3 for beta chain variable domain of TCR clone 203148 (TRBV28, TRBJ2-2)
CASSLEGGSNTGELFF

SEQ ID NO: 406297 - protein, 15 aa, Homo sapiens
  CDR3 for alpha chain variable domain of TCR clone 203149 (TRAV8-2, TRAJ13)
CVVTPPSGGYQKVTF

SEQ ID NO: 406298 - protein, 15 aa, Homo sapiens
  CDR3 for beta chain variable domain of TCR clone 203149 (TRBV5-1, TRBJ2-1)
CASSLVANSYNEQFF

SEQ ID NO: 406299 - protein, 12 aa, Homo sapiens
  CDR3 for alpha chain variable domain of TCR clone 203150 (TRAV8-3, TRAJ26)
CAGDNYGQNLVF

SEQ ID NO: 406300 - protein, 17 aa, Homo sapiens
  CDR3 for beta chain variable domain of TCR clone 203150 (TRBV20-1, TRBJ2-1)
CSASSSGLAGSYNEQFF

SEQ ID NO: 406301 - protein, 14 aa, Homo sapiens
  CDR3 for alpha chain variable domain of TCR clone 203151 (TRAV12-2, TRAJ13)
CAVKKTGGYQKLTF

SEQ ID NO: 406302 - protein, 14 aa, Homo sapiens
  CDR3 for beta chain variable domain of TCR clone 203151 (TRBV12-5, TRBJ2-5)
CASGSRTHQETQYF

SEQ ID NO: 406303 - protein, 13 aa, Homo sapiens
  CDR3 for alpha chain variable domain of TCR clone 203152 (TRAV38-1, TRAJ42)
CARWGGSQGNLIF

SEQ ID NO: 406304 - protein, 13 aa, Homo sapiens
  CDR3 for beta chain variable domain of TCR clone 203152 (TRBV2, TRBJ1-1)
CASSEGGNTEAFF

SEQ ID NO: 406305 - protein, 12 aa, Homo sapiens
  CDR3 for alpha chain variable domain of TCR clone 203153 (TRAV12-1, TRAJ23)
CVVNWGGGQLIF

SEQ ID NO: 406306 - protein, 14 aa, Homo sapiens
  CDR3 for beta chain variable domain of TCR clone 203153 (TRBV27, TRBJ2-7)
CASSPQRGTYEQYF

SEQ ID NO: 406307 - protein, 17 aa, Homo sapiens
  CDR3 for alpha chain variable domain of TCR clone 203154 (TRAV8-3, TRAJ10)
EASNTVILTGGGNKLTF

SEQ ID NO: 406308 - protein, 17 aa, Homo sapiens
  CDR3 for beta chain variable domain of TCR clone 203154 (TRBV20-1, TRBJ2-2)
CSASGSGQGGLTGELFF

SEQ ID NO: 406309 - protein, 21 aa, Homo sapiens
  CDR3 for alpha chain variable domain of TCR clone 203155 (TRAV30, TRAJ34)
GLPAQLLRNLLLRHKSRKLIF

SEQ ID NO: 406310 - protein, 12 aa, Homo sapiens
  CDR3 for beta chain variable domain of TCR clone 203155 (TRBV19, TRBJ1-1)
CASSLSDTEAFF

SEQ ID NO: 406311 - protein, 17 aa, Homo sapiens
  CDR3 for alpha chain variable domain of TCR clone 203156 (TRAV3, TRAJ6)
CAVRDGPRAGGSYIPTF

SEQ ID NO: 406312 - protein, 16 aa, Homo sapiens
  CDR3 for beta chain variable domain of TCR clone 203156 (TRBV4-1, TRBJ2-1)
CASNQQGAWESNEQFF

SEQ ID NO: 406313 - protein, 15 aa, Homo sapiens
  CDR3 for alpha chain variable domain of TCR clone 203157 (TRAV17, TRAJ22)
CATVAPSGSARQLTF

SEQ ID NO: 406314 - protein, 14 aa, Homo sapiens
  CDR3 for beta chain variable domain of TCR clone 203157 (TRBV5-1, TRBJ2-1)
CASSALWAGNEQFF

SEQ ID NO: 406315 - protein, 15 aa, Homo sapiens
  CDR3 for alpha chain variable domain of TCR clone 203158 (TRAV12-1, TRAJ42)
CVVTRDGGSQGNLIF

SEQ ID NO: 406316 - protein, 14 aa, Homo sapiens
  CDR3 for beta chain variable domain of TCR clone 203158 (TRBV25-1, TRBJ1-1)
CASTHLGGNTEAFF

SEQ ID NO: 406317 - protein, 15 aa, Homo sapiens
  CDR3 for alpha chain variable domain of TCR clone 203159 (TRAV25, TRAJ52)
CAGTSGGTSYGKLTF

SEQ ID NO: 406318 - protein, 15 aa, Homo sapiens
  CDR3 for beta chain variable domain of TCR clone 203159 (TRBV7-2, TRBJ2-3)
CASSSTGLETDTQYF

SEQ ID NO: 406319 - protein, 11 aa, Homo sapiens
  CDR3 for alpha chain variable domain of TCR clone 203160 (TRAV13-1, TRAJ39)
CSSHAGNMLTF

SEQ ID NO: 406320 - protein, 15 aa, Homo sapiens
  CDR3 for beta chain variable domain of TCR clone 203160 (TRBV6-3, TRBJ2-7)
CASSSPGTVFYEQYF

SEQ ID NO: 406321 - protein, 12 aa, Homo sapiens
  CDR3 for alpha chain variable domain of TCR clone 203161 (TRAV8-3, TRAJ20)
CAVGANDYKLSF

SEQ ID NO: 406322 - protein, 15 aa, Homo sapiens
  CDR3 for beta chain variable domain of TCR clone 203161 (TRBV27, TRBJ2-1)
CASSNGGGSSSEQFF

SEQ ID NO: 406323 - protein, 13 aa, Homo sapiens
  CDR3 for alpha chain variable domain of TCR clone 203162 (TRAV8-3, TRAJ28)
CAVGAVGSYQLTF

SEQ ID NO: 406324 - protein, 15 aa, Homo sapiens
  CDR3 for beta chain variable domain of TCR clone 203162 (TRBV2, TRBJ2-5)
CASTRDGGPQETQYF

SEQ ID NO: 406325 - protein, 15 aa, Homo sapiens
  CDR3 for alpha chain variable domain of TCR clone 203163 (TRAV27, TRAJ38)
CAARRNAGNNRKLIW

SEQ ID NO: 406326 - protein, 15 aa, Homo sapiens
  CDR3 for beta chain variable domain of TCR clone 203163 (TRBV20-1, TRBJ1-1)
CSARAGGTLKLSLDK

SEQ ID NO: 406327 - protein, 14 aa, Homo sapiens
  CDR3 for alpha chain variable domain of TCR clone 203164 (TRAV12-2, TRAJ44)
CAVNPAGTASKLTF

SEQ ID NO: 406328 - protein, 12 aa, Homo sapiens
  CDR3 for beta chain variable domain of TCR clone 203164 (TRBV11-2, TRBJ2-5)
CASSLVGETQYF

SEQ ID NO: 406329 - protein, 14 aa, Homo sapiens
  CDR3 for alpha chain variable domain of TCR clone 203165 (TRAV20, TRAJ32)
CCGRYCGATNKLIF

SEQ ID NO: 406330 - protein, 16 aa, Homo sapiens
  CDR3 for beta chain variable domain of TCR clone 203165 (TRBV19, TRBJ2-2)
CASRSPGTGATGELFF

SEQ ID NO: 406331 - protein, 13 aa, Homo sapiens
  CDR3 for alpha chain variable domain of TCR clone 203166 (TRAV21, TRAJ34)
CAVSEGDTDKLIF

SEQ ID NO: 406332 - protein, 13 aa, Homo sapiens
  CDR3 for beta chain variable domain of TCR clone 203166 (TRBV2, TRBJ2-3)
CASIIPASDTQYF

SEQ ID NO: 406333 - protein, 13 aa, Homo sapiens
  CDR3 for alpha chain variable domain of TCR clone 203167 (TRAV13-1, TRAJ32)
CAASNGWWCYKQA

SEQ ID NO: 406334 - protein, 15 aa, Homo sapiens
  CDR3 for beta chain variable domain of TCR clone 203167 (TRBV20-1, TRBJ2-7)
CSARDRVSGMDEQYF

SEQ ID NO: 406335 - protein, 14 aa, Homo sapiens
  CDR3 for alpha chain variable domain of TCR clone 203168 (TRAV3, TRAJ9)
CAVRDDTGGFKTIF

SEQ ID NO: 406336 - protein, 18 aa, Homo sapiens
  CDR3 for beta chain variable domain of TCR clone 203168 (TRBV20-1, TRBJ2-6)
CSAETTTTHGAGANVLTF

SEQ ID NO: 406337 - protein, 14 aa, Homo sapiens
  CDR3 for alpha chain variable domain of TCR clone 203169 (TRAV8-3, TRAJ39)
CAVGANNAGNMLTF

SEQ ID NO: 406338 - protein, 11 aa, Homo sapiens
  CDR3 for beta chain variable domain of TCR clone 203169 (TRBV19, TRBJ2-2)
CASRYSGELFF

SEQ ID NO: 406339 - protein, 13 aa, Homo sapiens
  CDR3 for alpha chain variable domain of TCR clone 203170 (TRAV1-2, TRAJ12)
CAVSMDSSYKLIF

SEQ ID NO: 406340 - protein, 14 aa, Homo sapiens
  CDR3 for beta chain variable domain of TCR clone 203170 (TRBV6-1, TRBJ1-3)
CASVQGGGGNTIYF

SEQ ID NO: 406341 - protein, 13 aa, Homo sapiens
  CDR3 for alpha chain variable domain of TCR clone 203171 (TRAV17, TRAJ26)
CATVDNYGQNFVF

SEQ ID NO: 406342 - protein, 15 aa, Homo sapiens
  CDR3 for beta chain variable domain of TCR clone 203171 (TRBV28, TRBJ2-5)
CASSSPLGGGETQYF

SEQ ID NO: 406343 - protein, 16 aa, Homo sapiens
  CDR3 for alpha chain variable domain of TCR clone 203172 (TRAV30, TRAJ24)
CGTEMVDADSWGKFQF

SEQ ID NO: 406344 - protein, 12 aa, Homo sapiens
  CDR3 for beta chain variable domain of TCR clone 203172 (TRBV6-3, TRBJ2-7)
CASSLTPYEQYF

SEQ ID NO: 406345 - protein, 22 aa, Homo sapiens
  CDR3 for alpha chain variable domain of TCR clone 203173 (TRAV27, )
CAARRNAGTNHIQNPYPAVYQL

SEQ ID NO: 406346 - protein, 13 aa, Homo sapiens
  CDR3 for beta chain variable domain of TCR clone 203173 (TRBV12-5, TRBJ2-3)
CASGDRQSDTQYF

SEQ ID NO: 406347 - protein, 14 aa, Homo sapiens
  CDR3 for alpha chain variable domain of TCR clone 203174 (TRAV12-2, TRAJ32)
CAHTESGATNKLIF

SEQ ID NO: 406348 - protein, 14 aa, Homo sapiens
  CDR3 for beta chain variable domain of TCR clone 203174 (TRBV4-2, TRBJ2-3)
YASRETRAPGMKYF

SEQ ID NO: 406349 - protein, 12 aa, Homo sapiens
  CDR3 for alpha chain variable domain of TCR clone 203175 (TRAV21, TRAJ33)
CAKMDSNYQLIW

SEQ ID NO: 406350 - protein, 16 aa, Homo sapiens
  CDR3 for beta chain variable domain of TCR clone 203175 (TRBV5-4, TRBJ2-1)
CASSLALAGAYNEQFF

SEQ ID NO: 406351 - protein, 16 aa, Homo sapiens
  CDR3 for alpha chain variable domain of TCR clone 203176 (TRAV8-3, TRAJ8)
CSVPRDGNTGFQKLVF

SEQ ID NO: 406352 - protein, 15 aa, Homo sapiens
  CDR3 for beta chain variable domain of TCR clone 203176 (TRBV6-1, TRBJ2-6)
CASSSRPSGANVLTF

SEQ ID NO: 406353 - protein, 13 aa, Homo sapiens
  CDR3 for alpha chain variable domain of TCR clone 203177 (TRAV8-6, TRAJ8)
CAVSNTGFQKLVF

SEQ ID NO: 406354 - protein, 17 aa, Homo sapiens
  CDR3 for beta chain variable domain of TCR clone 203177 (TRBV11-2, TRBJ2-1)
CASSLYPPGVEYNEQFF

SEQ ID NO: 406355 - protein, 18 aa, Homo sapiens
  CDR3 for alpha chain variable domain of TCR clone 203178 (TRAV21, TRAJ52)
CAVRPSPAGGTSYGKLTF

SEQ ID NO: 406356 - protein, 13 aa, Homo sapiens
  CDR3 for beta chain variable domain of TCR clone 203178 (TRBV11-2, TRBJ2-1)
CASSLRLTHEQFF

SEQ ID NO: 406357 - protein, 11 aa, Homo sapiens
  CDR3 for alpha chain variable domain of TCR clone 203179 (TRAV1-1, TRAJ23)
CAVRQGGKLIF

SEQ ID NO: 406358 - protein, 15 aa, Homo sapiens
  CDR3 for beta chain variable domain of TCR clone 203179 (TRBV6-5, TRBJ2-1)
CASSYDAGACNEQFF

SEQ ID NO: 406359 - protein, 13 aa, Homo sapiens
  CDR3 for alpha chain variable domain of TCR clone 203180 (TRAV3, TRAJ29)
CAVRDIIDTPLVF

SEQ ID NO: 406360 - protein, 13 aa, Homo sapiens
  CDR3 for beta chain variable domain of TCR clone 203180 (TRBV7-2, TRBJ2-2)
CASSLAVTGELFF

SEQ ID NO: 406361 - protein, 13 aa, Homo sapiens
  CDR3 for alpha chain variable domain of TCR clone 203181 (TRAV20, TRAJ56)
CAVQAGANSKLTF

SEQ ID NO: 406362 - protein, 14 aa, Homo sapiens
  CDR3 for beta chain variable domain of TCR clone 203181 (TRBV28, TRBJ1-1)
CGSSPRTRWAEAFF

SEQ ID NO: 406363 - protein, 15 aa, Homo sapiens
  CDR3 for alpha chain variable domain of TCR clone 203182 (TRAV27, TRAJ33)
CAGADIMDSNYQLIW

SEQ ID NO: 406364 - protein, 13 aa, Homo sapiens
  CDR3 for beta chain variable domain of TCR clone 203182 (TRBV28, TRBJ1-2)
CASSLQGRGGYIF

SEQ ID NO: 406365 - protein, 18 aa, Homo sapiens
  CDR3 for alpha chain variable domain of TCR clone 203183 (TRAV12-3, TRAJ52)
CAMSVGGAGGTSYGKLTF

SEQ ID NO: 406366 - protein, 15 aa, Homo sapiens
  CDR3 for beta chain variable domain of TCR clone 203183 (TRBV10-1, TRBJ2-3)
CASSATSGGFDTQYF

SEQ ID NO: 406367 - protein, 15 aa, Homo sapiens
  CDR3 for alpha chain variable domain of TCR clone 203184 (TRAV27, TRAJ50)
CAGVGRGTPYDKGIV

SEQ ID NO: 406368 - protein, 14 aa, Homo sapiens
  CDR3 for beta chain variable domain of TCR clone 203184 (TRBV7-2, TRBJ1-1)
CASSFYDLNTEAFF

SEQ ID NO: 406369 - protein, 14 aa, Homo sapiens
  CDR3 for alpha chain variable domain of TCR clone 203185 (TRAV8-1, TRAJ34)
CALPRGTTSSSLGL

SEQ ID NO: 406370 - protein, 15 aa, Homo sapiens
  CDR3 for beta chain variable domain of TCR clone 203185 (TRBV4-3, TRBJ1-1)
CASSQELGRGTEAFF

SEQ ID NO: 406371 - protein, 15 aa, Homo sapiens
  CDR3 for alpha chain variable domain of TCR clone 203186 (TRAV21, TRAJ24)
CAARSSTDSWGNLQF

SEQ ID NO: 406372 - protein, 16 aa, Homo sapiens
  CDR3 for beta chain variable domain of TCR clone 203186 (TRBV7-3, TRBJ2-2)
CASSLKRGTLSGELFF

SEQ ID NO: 406373 - protein, 13 aa, Homo sapiens
  CDR3 for alpha chain variable domain of TCR clone 203187 (TRAV2, TRAJ40)
CAVVTSGTYKYNF

SEQ ID NO: 406374 - protein, 15 aa, Homo sapiens
  CDR3 for beta chain variable domain of TCR clone 203187 (TRBV27, TRBJ2-1)
CASSNGGGSSNEQFF

SEQ ID NO: 406375 - protein, 16 aa, Homo sapiens
  CDR3 for alpha chain variable domain of TCR clone 203188 (TRAV21, TRAJ17)
CAVRPGEEAAGNKLTF

SEQ ID NO: 406376 - protein, 15 aa, Homo sapiens
  CDR3 for beta chain variable domain of TCR clone 203188 (TRBV27, TRBJ2-5)
CASSLYPRGGETQYF

SEQ ID NO: 406377 - protein, 14 aa, Homo sapiens
  CDR3 for alpha chain variable domain of TCR clone 203189 (TRAV12-3, TRAJ9)
CAMSPNTGGFKTIF

SEQ ID NO: 406378 - protein, 13 aa, Homo sapiens
  CDR3 for beta chain variable domain of TCR clone 203189 (TRBV24-1, TRBJ2-3)
CATSTGGTDTQYF

SEQ ID NO: 406379 - protein, 11 aa, Homo sapiens
  CDR3 for alpha chain variable domain of TCR clone 203190 (TRAV4, TRAJ23)
CLVAPGGKLIF

SEQ ID NO: 406380 - protein, 15 aa, Homo sapiens
  CDR3 for beta chain variable domain of TCR clone 203190 (TRBV7-2, TRBJ2-1)
CASSFQADESNEQFF

SEQ ID NO: 406381 - protein, 14 aa, Homo sapiens
  CDR3 for alpha chain variable domain of TCR clone 203191 (TRAV3, TRAJ6)
CAVRRTGGSYIPTF

SEQ ID NO: 406382 - protein, 16 aa, Homo sapiens
  CDR3 for beta chain variable domain of TCR clone 203191 (TRBV19, TRBJ2-1)
CASSKAGPSSYNEQFF

SEQ ID NO: 406383 - protein, 12 aa, Homo sapiens
  CDR3 for alpha chain variable domain of TCR clone 203192 (TRAV3, TRAJ20)
CAVRDPDYKLSF

SEQ ID NO: 406384 - protein, 14 aa, Homo sapiens
  CDR3 for beta chain variable domain of TCR clone 203192 (TRBV27, TRBJ2-2)
CASSLGAATGELFF

SEQ ID NO: 406385 - protein, 14 aa, Homo sapiens
  CDR3 for alpha chain variable domain of TCR clone 203193 (TRAV12-3, TRAJ10)
SHLPLTGGGNKLTF

SEQ ID NO: 406386 - protein, 16 aa, Homo sapiens
  CDR3 for beta chain variable domain of TCR clone 203193 (TRBV7-3, TRBJ2-1)
CASSLVSGSSNNEQFF

SEQ ID NO: 406387 - protein, 18 aa, Homo sapiens
  CDR3 for alpha chain variable domain of TCR clone 203194 (TRAV21, TRAJ52)
CAVRPSPAGVTSYGKLTF

SEQ ID NO: 406388 - protein, 15 aa, Homo sapiens
  CDR3 for beta chain variable domain of TCR clone 203194 (TRBV7-9, TRBJ2-7)
CASSSSGLAVYEQYF

SEQ ID NO: 406389 - protein, 12 aa, Homo sapiens
  CDR3 for alpha chain variable domain of TCR clone 203195 (TRAV3, TRAJ31)
CAVRDVNARLMF

SEQ ID NO: 406390 - protein, 14 aa, Homo sapiens
  CDR3 for beta chain variable domain of TCR clone 203195 (TRBV25-1, TRBJ1-1)
CASTHLGGNTEAFF

SEQ ID NO: 406391 - protein, 16 aa, Homo sapiens
  CDR3 for alpha chain variable domain of TCR clone 203196 (TRAV30, TRAJ24)
CGTEIVDADSWGKFQF

SEQ ID NO: 406392 - protein, 17 aa, Homo sapiens
  CDR3 for beta chain variable domain of TCR clone 203196 (TRBV3-1, TRBJ2-2)
CASGQFRDKVDTGELFF

SEQ ID NO: 406393 - protein, 14 aa, Homo sapiens
  CDR3 for alpha chain variable domain of TCR clone 203197 (TRAV26-1, TRAJ21)
CIGRPPYNFNNFYF

SEQ ID NO: 406394 - protein, 14 aa, Homo sapiens
  CDR3 for beta chain variable domain of TCR clone 203197 (TRBV4-1, TRBJ2-2)
CASSQAVNTGELFF

SEQ ID NO: 406395 - protein, 12 aa, Homo sapiens
  CDR3 for alpha chain variable domain of TCR clone 203198 (TRAV38-1, TRAJ20)
CAFIWNDYKLSF

SEQ ID NO: 406396 - protein, 19 aa, Homo sapiens
  CDR3 for beta chain variable domain of TCR clone 203198 (TRBV11-2, TRBJ2-3)
CASSLTSGTRFRVTDTQYF

SEQ ID NO: 406397 - protein, 13 aa, Homo sapiens
  CDR3 for alpha chain variable domain of TCR clone 203199 (TRAV3, TRAJ21)
CAVREPDFNKFYF

SEQ ID NO: 406398 - protein, 18 aa, Homo sapiens
  CDR3 for beta chain variable domain of TCR clone 203199 (TRBV11-2, TRBJ2-3)
CASGLGGASRGAPNTQYF

SEQ ID NO: 406399 - protein, 15 aa, Homo sapiens
  CDR3 for alpha chain variable domain of TCR clone 203200 (TRAV38-2/DV8, TRAJ57)
CAYGRVFGKGTKLKV

SEQ ID NO: 406400 - protein, 15 aa, Homo sapiens
  CDR3 for beta chain variable domain of TCR clone 203200 (TRBV27, TRBJ1-5)
CASTFNRGSNQPQHF

SEQ ID NO: 406401 - protein, 14 aa, Homo sapiens
  CDR3 for alpha chain variable domain of TCR clone 203201 (TRAV12-3, TRAJ53)
CGATSGGGNYKLTF

SEQ ID NO: 406402 - protein, 13 aa, Homo sapiens
  CDR3 for beta chain variable domain of TCR clone 203201 (TRBV19, TRBJ1-5)
CASSTQDGQPQHF

SEQ ID NO: 406403 - protein, 14 aa, Homo sapiens
  CDR3 for alpha chain variable domain of TCR clone 203202 (TRAV12-2, TRAJ53)
CAVKGGGSNYKLTF

SEQ ID NO: 406404 - protein, 15 aa, Homo sapiens
  CDR3 for beta chain variable domain of TCR clone 203202 (TRBV11-2, TRBJ2-2)
CASSSDRVNARGLFF

SEQ ID NO: 406405 - protein, 16 aa, Homo sapiens
  CDR3 for alpha chain variable domain of TCR clone 203203 (TRAV26-1, TRAJ53)
CIVRVAMGGSNYKLTF

SEQ ID NO: 406406 - protein, 12 aa, Homo sapiens
  CDR3 for beta chain variable domain of TCR clone 203203 (TRBV7-9, TRBJ1-5)
CASSPQGKHQHF

SEQ ID NO: 406407 - protein, 15 aa, Homo sapiens
  CDR3 for alpha chain variable domain of TCR clone 203204 (TRAV2, TRAJ15)
CAVEDRNQAGTALIF

SEQ ID NO: 406408 - protein, 13 aa, Homo sapiens
  CDR3 for beta chain variable domain of TCR clone 203204 (TRBV10-3, TRBJ2-7)
CASKLVVNYEQYF

SEQ ID NO: 406409 - protein, 11 aa, Homo sapiens
  CDR3 for alpha chain variable domain of TCR clone 203205 (TRAV12-2, TRAJ31)
CAVTRWARLMV

SEQ ID NO: 406410 - protein, 14 aa, Homo sapiens
  CDR3 for beta chain variable domain of TCR clone 203205 (TRBV25-1, TRBJ1-1)
CASTHLGENTEAFF

SEQ ID NO: 406411 - protein, 15 aa, Homo sapiens
  CDR3 for alpha chain variable domain of TCR clone 203206 (TRAV26-1, TRAJ44)
CIARVPFGTASKLTF

SEQ ID NO: 406412 - protein, 17 aa, Homo sapiens
  CDR3 for beta chain variable domain of TCR clone 203206 (TRBV24-1, TRBJ2-4)
CATSDAEARGVRNIQNF

SEQ ID NO: 406413 - protein, 14 aa, Homo sapiens
  CDR3 for alpha chain variable domain of TCR clone 203207 (TRAV16, TRAJ39)
CALSKNNAGNMLTF

SEQ ID NO: 406414 - protein, 16 aa, Homo sapiens
  CDR3 for beta chain variable domain of TCR clone 203207 (TRBV6-6, TRBJ2-1)
CASSYSFSGSYNEQFC

SEQ ID NO: 406415 - protein, 11 aa, Homo sapiens
  CDR3 for alpha chain variable domain of TCR clone 203208 (TRAV12-1, TRAJ30)
CVVNGQDKIIF

SEQ ID NO: 406416 - protein, 17 aa, Homo sapiens
  CDR3 for beta chain variable domain of TCR clone 203208 (TRBV11-1, TRBJ2-7)
CASSRGPGRGSSYEQYF

SEQ ID NO: 406417 - protein, 11 aa, Homo sapiens
  CDR3 for alpha chain variable domain of TCR clone 203209 (TRAV12-1, TRAJ30)
CVVNGQDKIIF

SEQ ID NO: 406418 - protein, 16 aa, Homo sapiens
  CDR3 for beta chain variable domain of TCR clone 203209 (TRBV2, TRBJ2-3)
CASSTSVEGVTDTQYF

SEQ ID NO: 406419 - protein, 16 aa, Homo sapiens
  CDR3 for alpha chain variable domain of TCR clone 203210 (TRAV30, TRAJ24)
CGTEIVDADSWGKFQV

SEQ ID NO: 406420 - protein, 13 aa, Homo sapiens
  CDR3 for beta chain variable domain of TCR clone 203210 (TRBV28, TRBJ2-7)
CASTPGLAGEQYF

SEQ ID NO: 406421 - protein, 11 aa, Homo sapiens
  CDR3 for alpha chain variable domain of TCR clone 203211 (TRAV35, TRAJ30)
CAGPGDEKIIF

SEQ ID NO: 406422 - protein, 12 aa, Homo sapiens
  CDR3 for beta chain variable domain of TCR clone 203211 (TRBV27, TRBJ2-1)
CASRGFYNEQFF

SEQ ID NO: 406423 - protein, 13 aa, Homo sapiens
  CDR3 for alpha chain variable domain of TCR clone 203212 (TRAV3, TRAJ27)
CAVRPLGAGKSTF

SEQ ID NO: 406424 - protein, 14 aa, Homo sapiens
  CDR3 for beta chain variable domain of TCR clone 203212 (TRBV25-1, TRBJ1-1)
SASTHLGGNTEAFF

SEQ ID NO: 406425 - protein, 15 aa, Homo sapiens
  CDR3 for alpha chain variable domain of TCR clone 203213 (TRAV3, TRAJ3)
CAARDRRSSASKIIF

SEQ ID NO: 406426 - protein, 13 aa, Homo sapiens
  CDR3 for beta chain variable domain of TCR clone 203213 (TRBV9, TRBJ2-5)
CASSPAGLGTQYF

SEQ ID NO: 406427 - protein, 11 aa, Homo sapiens
  CDR3 for alpha chain variable domain of TCR clone 203214 (TRAV2, TRAJ13)
CASGGYQKVTF

SEQ ID NO: 406428 - protein, 15 aa, Homo sapiens
  CDR3 for beta chain variable domain of TCR clone 203214 (TRBV11-3, TRBJ2-2)
CASSLVGTGAGELFF

SEQ ID NO: 406429 - protein, 16 aa, Homo sapiens
  CDR3 for alpha chain variable domain of TCR clone 203215 (TRAV12-2, TRAJ45)
CAVNMYSGGGADGLTF

SEQ ID NO: 406430 - protein, 15 aa, Homo sapiens
  CDR3 for beta chain variable domain of TCR clone 203215 (TRBV5-5, TRBJ1-5)
CASSLEGASNQPQHF

SEQ ID NO: 406431 - protein, 18 aa, Homo sapiens
  CDR3 for alpha chain variable domain of TCR clone 203216 (TRAV13-1, )
CAANDIQNPDPAVYQLRD

SEQ ID NO: 406432 - protein, 18 aa, Homo sapiens
  CDR3 for beta chain variable domain of TCR clone 203216 (TRBV25-1, TRBJ1-2)
CASSGLQNGQGLIFGYTF

SEQ ID NO: 406433 - protein, 15 aa, Homo sapiens
  CDR3 for alpha chain variable domain of TCR clone 203217 (TRAV12-2, TRAJ53)
YAVNGGGGSNYKLTF

SEQ ID NO: 406434 - protein, 12 aa, Homo sapiens
  CDR3 for beta chain variable domain of TCR clone 203217 (TRBV27, TRBJ1-6)
CASKLFQGPLHF

SEQ ID NO: 406435 - protein, 15 aa, Homo sapiens
  CDR3 for alpha chain variable domain of TCR clone 203218 (TRAV20, TRAJ53)
CAVQASGGSNYNLTF

SEQ ID NO: 406436 - protein, 12 aa, Homo sapiens
  CDR3 for beta chain variable domain of TCR clone 203218 (TRBV7-8, TRBJ2-7)
CASSLGDREQYF

SEQ ID NO: 406437 - protein, 12 aa, Homo sapiens
  CDR3 for alpha chain variable domain of TCR clone 203219 (TRAV21, TRAJ31)
CAVWGNNARLMF

SEQ ID NO: 406438 - protein, 16 aa, Homo sapiens
  CDR3 for beta chain variable domain of TCR clone 203219 (TRBV27, TRBJ2-5)
CASSYGPGGQKETQCF

SEQ ID NO: 406439 - protein, 12 aa, Homo sapiens
  CDR3 for alpha chain variable domain of TCR clone 203220 (TRAV9-2, TRAJ9)
CAMNTGGFKTIF

SEQ ID NO: 406440 - protein, 17 aa, Homo sapiens
  CDR3 for beta chain variable domain of TCR clone 203220 (TRBV28, TRBJ2-5)
CASSRRGGLAGAETQYF

SEQ ID NO: 406441 - protein, 14 aa, Homo sapiens
  CDR3 for alpha chain variable domain of TCR clone 203221 (TRAV26-1, TRAJ21)
CIVRPPYNFNKSYF

SEQ ID NO: 406442 - protein, 14 aa, Homo sapiens
  CDR3 for beta chain variable domain of TCR clone 203221 (TRBV11-3, TRBJ2-1)
CASSATTSGSIQFF

SEQ ID NO: 406443 - protein, 13 aa, Homo sapiens
  CDR3 for alpha chain variable domain of TCR clone 203222 (TRAV8-3, TRAJ43)
CAVGRDNNNDMRF

SEQ ID NO: 406444 - protein, 19 aa, Homo sapiens
  CDR3 for beta chain variable domain of TCR clone 203222 (TRBV7-2, TRBJ2-3)
CASSFLSRNWGGGTDTQYF

SEQ ID NO: 406445 - protein, 13 aa, Homo sapiens
  CDR3 for alpha chain variable domain of TCR clone 203223 (TRAV27, TRAJ17)
CAGAATAGNKLTF

SEQ ID NO: 406446 - protein, 15 aa, Homo sapiens
  CDR3 for beta chain variable domain of TCR clone 203223 (TRBV5-1, TRBJ2-3)
GASRNRAGSTDTQYF

SEQ ID NO: 406447 - protein, 14 aa, Homo sapiens
  CDR3 for alpha chain variable domain of TCR clone 203224 (TRAV29/DV5, TRAJ36)
CAARRKTGANNLFL

SEQ ID NO: 406448 - protein, 14 aa, Homo sapiens
  CDR3 for beta chain variable domain of TCR clone 203224 (TRBV12-5, TRBJ2-5)
CASGSRTHQDTQYF

SEQ ID NO: 406449 - protein, 13 aa, Homo sapiens
  CDR3 for alpha chain variable domain of TCR clone 203225 (TRAV3, TRAJ26)
CAVRPTPGQNFVF

SEQ ID NO: 406450 - protein, 17 aa, Homo sapiens
  CDR3 for beta chain variable domain of TCR clone 203225 (TRBV7-9, TRBJ1-1)
CASGLGIAGAENTEAFF

SEQ ID NO: 406451 - protein, 12 aa, Homo sapiens
  CDR3 for alpha chain variable domain of TCR clone 203226 (TRAV27, TRAJ11)
CRRLSGYSTLTF

SEQ ID NO: 406452 - protein, 15 aa, Homo sapiens
  CDR3 for beta chain variable domain of TCR clone 203226 (TRBV19, TRBJ2-7)
CASRPTPGLSIEQYF

SEQ ID NO: 406453 - protein, 13 aa, Homo sapiens
  CDR3 for alpha chain variable domain of TCR clone 203227 (TRAV8-1, TRAJ41)
CAVNPGSGYALNF

SEQ ID NO: 406454 - protein, 15 aa, Homo sapiens
  CDR3 for beta chain variable domain of TCR clone 203227 (TRBV7-8, TRBJ1-1)
CASSLGDSRNTEAFF

SEQ ID NO: 406455 - protein, 14 aa, Homo sapiens
  CDR3 for alpha chain variable domain of TCR clone 203228 (TRAV29/DV5, TRAJ36)
CAARRKTGANNLFF

SEQ ID NO: 406456 - protein, 14 aa, Homo sapiens
  CDR3 for beta chain variable domain of TCR clone 203228 (TRBV4-1, TRBJ2-2)
CASSLTENTGELFF

SEQ ID NO: 406457 - protein, 12 aa, Homo sapiens
  CDR3 for alpha chain variable domain of TCR clone 203229 (TRAV16, TRAJ10)
CSRTGGGNKLTF

SEQ ID NO: 406458 - protein, 11 aa, Homo sapiens
  CDR3 for beta chain variable domain of TCR clone 203229 (TRBV2, TRBJ1-1)
CRWTVSTEAFF

SEQ ID NO: 406459 - protein, 15 aa, Homo sapiens
  CDR3 for alpha chain variable domain of TCR clone 203230 (TRAV3, TRAJ5)
CAVRDLDTGRRALTF

SEQ ID NO: 406460 - protein, 13 aa, Homo sapiens
  CDR3 for beta chain variable domain of TCR clone 203230 (TRBV7-9, TRBJ1-4)
CATQIGPNEELFF

SEQ ID NO: 406461 - protein, 14 aa, Homo sapiens
  CDR3 for alpha chain variable domain of TCR clone 203231 (TRAV3, TRAJ16)
CAVSLFSDGQKLLF

SEQ ID NO: 406462 - protein, 14 aa, Homo sapiens
  CDR3 for beta chain variable domain of TCR clone 203231 (TRBV2, TRBJ2-1)
CASSDRAYYNEQFF

SEQ ID NO: 406463 - protein, 18 aa, Homo sapiens
  CDR3 for alpha chain variable domain of TCR clone 203232 (TRAV12-3, TRAJ52)
CAMSVGGAGCTSYGKLTF

SEQ ID NO: 406464 - protein, 14 aa, Homo sapiens
  CDR3 for beta chain variable domain of TCR clone 203232 (TRBV7-2, TRBJ2-7)
CASRSQGAAYEQYF

SEQ ID NO: 406465 - protein, 10 aa, Homo sapiens
  CDR3 for alpha chain variable domain of TCR clone 203233 (TRAV1-2, TRAJ20)
CVPNDYKLSF

SEQ ID NO: 406466 - protein, 14 aa, Homo sapiens
  CDR3 for beta chain variable domain of TCR clone 203233 (TRBV12-4, TRBJ1-1)
CASSLGTGGTEAFF

SEQ ID NO: 406467 - protein, 16 aa, Homo sapiens
  CDR3 for alpha chain variable domain of TCR clone 203234 (TRAV16, TRAJ52)
CALSGVGGTSYGKLTF

SEQ ID NO: 406468 - protein, 12 aa, Homo sapiens
  CDR3 for beta chain variable domain of TCR clone 203234 (TRBV7-9, TRBJ2-7)
CASSLEGYEQYF

SEQ ID NO: 406469 - protein, 16 aa, Homo sapiens
  CDR3 for alpha chain variable domain of TCR clone 203235 (TRAV30, TRAJ24)
CGTEFVDADSWGKFQI

SEQ ID NO: 406470 - protein, 14 aa, Homo sapiens
  CDR3 for beta chain variable domain of TCR clone 203235 (TRBV12-5, TRBJ2-5)
CASGSRTHQETQYF

SEQ ID NO: 406471 - protein, 13 aa, Homo sapiens
  CDR3 for alpha chain variable domain of TCR clone 203236 (TRAV26-2, TRAJ57)
CILRPSGSEKLVF

SEQ ID NO: 406472 - protein, 16 aa, Homo sapiens
  CDR3 for beta chain variable domain of TCR clone 203236 (TRBV28, TRBJ1-5)
CASSLTGQGWNQPQHF

SEQ ID NO: 406473 - protein, 16 aa, Homo sapiens
  CDR3 for alpha chain variable domain of TCR clone 203237 (TRAV29/DV5, TRAJ36)
CAASAHYQSGANNLSF

SEQ ID NO: 406474 - protein, 16 aa, Homo sapiens
  CDR3 for beta chain variable domain of TCR clone 203237 (TRBV4-2, TRBJ2-3)
CASSQELAGDTDTQYF

SEQ ID NO: 406475 - protein, 13 aa, Homo sapiens
  CDR3 for alpha chain variable domain of TCR clone 203238 (TRAV8-3, TRAJ4)
WVFYSGGYNKLII

SEQ ID NO: 406476 - protein, 16 aa, Homo sapiens
  CDR3 for beta chain variable domain of TCR clone 203238 (TRBV7-8, TRBJ2-3)
CASSTEGQRETDTQYF

SEQ ID NO: 406477 - protein, 12 aa, Homo sapiens
  CDR3 for alpha chain variable domain of TCR clone 203239 (TRAV21, TRAJ37)
CAVRGTTGKLIF

SEQ ID NO: 406478 - protein, 13 aa, Homo sapiens
  CDR3 for beta chain variable domain of TCR clone 203239 (TRBV19, TRBJ1-2)
CASSVPGQDGYTF

SEQ ID NO: 406479 - protein, 12 aa, Homo sapiens
  CDR3 for alpha chain variable domain of TCR clone 203240 (TRAV13-1, TRAJ11)
CAADSGYSTLTF

SEQ ID NO: 406480 - protein, 13 aa, Homo sapiens
  CDR3 for beta chain variable domain of TCR clone 203240 (TRBV7-6, TRBJ1-5)
CASSLTDNQPQHF

SEQ ID NO: 406481 - protein, 12 aa, Homo sapiens
  CDR3 for alpha chain variable domain of TCR clone 203241 (TRAV24, TRAJ40)
CALTSGTYKYIF

SEQ ID NO: 406482 - protein, 17 aa, Homo sapiens
  CDR3 for beta chain variable domain of TCR clone 203241 (TRBV11-2, TRBJ2-1)
CASSLYPPGVEYNEQFF

SEQ ID NO: 406483 - protein, 16 aa, Homo sapiens
  CDR3 for alpha chain variable domain of TCR clone 203242 (TRAV13-1, TRAJ37)
CAASSVGSSNTGKLIF

SEQ ID NO: 406484 - protein, 12 aa, Homo sapiens
  CDR3 for beta chain variable domain of TCR clone 203242 (TRBV6-1, TRBJ2-5)
CASSEGRETQYF

SEQ ID NO: 406485 - protein, 13 aa, Homo sapiens
  CDR3 for alpha chain variable domain of TCR clone 203243 (TRAV12-3, TRAJ6)
CANPSVGSYIPTF

SEQ ID NO: 406486 - protein, 14 aa, Homo sapiens
  CDR3 for beta chain variable domain of TCR clone 203243 (TRBV19, TRBJ1-1)
CASSRDRDATEAFF

SEQ ID NO: 406487 - protein, 13 aa, Homo sapiens
  CDR3 for alpha chain variable domain of TCR clone 203244 (TRAV29/DV5, TRAJ44)
CAASTGTASKLTF

SEQ ID NO: 406488 - protein, 13 aa, Homo sapiens
  CDR3 for beta chain variable domain of TCR clone 203244 (TRBV19, TRBJ2-7)
CASRKACGSEQYF

SEQ ID NO: 406489 - protein, 16 aa, Homo sapiens
  CDR3 for alpha chain variable domain of TCR clone 203245 (TRAV13-1, TRAJ10)
CAASSHFTGGGNKLTF

SEQ ID NO: 406490 - protein, 15 aa, Homo sapiens
  CDR3 for beta chain variable domain of TCR clone 203245 (TRBV7-9, TRBJ1-6)
CASSPPGRGNSPLHF

SEQ ID NO: 406491 - protein, 11 aa, Homo sapiens
  CDR3 for alpha chain variable domain of TCR clone 203246 (TRAV16, TRAJ33)
CALHSNYELIW

SEQ ID NO: 406492 - protein, 15 aa, Homo sapiens
  CDR3 for beta chain variable domain of TCR clone 203246 (TRBV4-1, TRBJ2-7)
CASSQQGQGFDEQYF

SEQ ID NO: 406493 - protein, 12 aa, Homo sapiens
  CDR3 for alpha chain variable domain of TCR clone 203247 (TRAV17, TRAJ12)
CATLRSSYKLIC

SEQ ID NO: 406494 - protein, 16 aa, Homo sapiens
  CDR3 for beta chain variable domain of TCR clone 203247 (TRBV28, TRBJ2-7)
CASSLFFETGGPEQYF

SEQ ID NO: 406495 - protein, 12 aa, Homo sapiens
  CDR3 for alpha chain variable domain of TCR clone 203248 (TRAV22, TRAJ29)
CAPPSGNTPLVF

SEQ ID NO: 406496 - protein, 14 aa, Homo sapiens
  CDR3 for beta chain variable domain of TCR clone 203248 (TRBV7-2, TRBJ2-5)
CASSPAGNQETQYF

SEQ ID NO: 406497 - protein, 14 aa, Homo sapiens
  CDR3 for alpha chain variable domain of TCR clone 203249 (TRAV38-2/DV8, TRAJ29)
CAYRSRSGNTPLVF

SEQ ID NO: 406498 - protein, 16 aa, Homo sapiens
  CDR3 for beta chain variable domain of TCR clone 203249 (TRBV27, TRBJ2-2)
CASSFRGLVRTGELFF

SEQ ID NO: 406499 - protein, 15 aa, Homo sapiens
  CDR3 for alpha chain variable domain of TCR clone 203250 (TRAV26-1, TRAJ29)
CIVRVEGSGNKTLVF

SEQ ID NO: 406500 - protein, 15 aa, Homo sapiens
  CDR3 for beta chain variable domain of TCR clone 203250 (TRBV7-9, TRBJ1-5)
CASSQGHQPNQPQHF

SEQ ID NO: 406501 - protein, 16 aa, Homo sapiens
  CDR3 for alpha chain variable domain of TCR clone 203251 (TRAV4, TRAJ22)
CLVGDLYPGSARQLTF

SEQ ID NO: 406502 - protein, 16 aa, Homo sapiens
  CDR3 for beta chain variable domain of TCR clone 203251 (TRBV7-9, TRBJ2-1)
CASSDVAGGAYNEQFF

SEQ ID NO: 406503 - protein, 11 aa, Homo sapiens
  CDR3 for alpha chain variable domain of TCR clone 203252 (TRAV17, TRAJ49)
CATDAGNQFYF

SEQ ID NO: 406504 - protein, 14 aa, Homo sapiens
  CDR3 for beta chain variable domain of TCR clone 203252 (TRBV7-2, TRBJ2-7)
CASSPKTSFYEQYF

SEQ ID NO: 406505 - protein, 16 aa, Homo sapiens
  CDR3 for alpha chain variable domain of TCR clone 203253 (TRAV1-2, TRAJ35)
CAVRGLTIGFGNVLHC

SEQ ID NO: 406506 - protein, 14 aa, Homo sapiens
  CDR3 for beta chain variable domain of TCR clone 203253 (TRBV19, TRBJ2-1)
CASGKSTQYNEQFF

SEQ ID NO: 406507 - protein, 15 aa, Homo sapiens
  CDR3 for alpha chain variable domain of TCR clone 203254 (TRAV8-4, TRAJ12)
CAVSDRVDSSYKLIF

SEQ ID NO: 406508 - protein, 13 aa, Homo sapiens
  CDR3 for beta chain variable domain of TCR clone 203254 (TRBV19, TRBJ1-2)
CASSVPGQDGYTF

SEQ ID NO: 406509 - protein, 13 aa, Homo sapiens
  CDR3 for alpha chain variable domain of TCR clone 203255 (TRAV3, TRAJ29)
CAVRDWGNTPLVF

SEQ ID NO: 406510 - protein, 15 aa, Homo sapiens
  CDR3 for beta chain variable domain of TCR clone 203255 (TRBV12-4, TRBJ2-5)
CASIGRTGEGETQYI

SEQ ID NO: 406511 - protein, 15 aa, Homo sapiens
  CDR3 for alpha chain variable domain of TCR clone 203256 (TRAV35, TRAJ52)
CAGPRGGTGYGELTF

SEQ ID NO: 406512 - protein, 14 aa, Homo sapiens
  CDR3 for beta chain variable domain of TCR clone 203256 (TRBV20-1, TRBJ2-7)
CSAWTALSSYEQYF

SEQ ID NO: 406513 - protein, 14 aa, Homo sapiens
  CDR3 for alpha chain variable domain of TCR clone 203257 (TRAV22, TRAJ37)
CASPYSGNTGTLIF

SEQ ID NO: 406514 - protein, 13 aa, Homo sapiens
  CDR3 for beta chain variable domain of TCR clone 203257 (TRBV20-1, TRBJ2-1)
CSAHGSSYNEQFF

SEQ ID NO: 406515 - protein, 12 aa, Homo sapiens
  CDR3 for alpha chain variable domain of TCR clone 203258 (TRAV17, TRAJ39)
CATGATGNMLTF

SEQ ID NO: 406516 - protein, 14 aa, Homo sapiens
  CDR3 for beta chain variable domain of TCR clone 203258 (TRBV7-9, TRBJ1-2)
CASSRQGANYGYTF

SEQ ID NO: 406517 - protein, 11 aa, Homo sapiens
  CDR3 for alpha chain variable domain of TCR clone 203259 (TRAV17, TRAJ9)
CGFTGGFKTIF

SEQ ID NO: 406518 - protein, 14 aa, Homo sapiens
  CDR3 for beta chain variable domain of TCR clone 203259 (TRBV7-9, TRBJ2-2)
CASSLVQDTGQLFF

SEQ ID NO: 406519 - protein, 11 aa, Homo sapiens
  CDR3 for alpha chain variable domain of TCR clone 203260 (TRAV1-1, TRAJ23)
CAVRQGGKLIF

SEQ ID NO: 406520 - protein, 20 aa, Homo sapiens
  CDR3 for beta chain variable domain of TCR clone 203260 (TRBV11-2, TRBJ1-6)
CSSSLVFATGGSVHPSSLGT

SEQ ID NO: 406521 - protein, 14 aa, Homo sapiens
  CDR3 for alpha chain variable domain of TCR clone 203261 (TRAV1-1, TRAJ27)
CAVIYNTNAGKSTF

SEQ ID NO: 406522 - protein, 15 aa, Homo sapiens
  CDR3 for beta chain variable domain of TCR clone 203261 (TRBV7-2, TRBJ2-1)
CASSSGLAGGNEQFF

SEQ ID NO: 406523 - protein, 19 aa, Homo sapiens
  CDR3 for alpha chain variable domain of TCR clone 203262 (TRAV12-1, TRAJ42)
SVIQPPTSVKGGSQGNLIF

SEQ ID NO: 406524 - protein, 15 aa, Homo sapiens
  CDR3 for beta chain variable domain of TCR clone 203262 (TRBV4-1, TRBJ2-7)
CASSQNTGRLYEQYF

SEQ ID NO: 406525 - protein, 14 aa, Homo sapiens
  CDR3 for alpha chain variable domain of TCR clone 203263 (TRAV13-1, TRAJ10)
CAAKEPGGGNKLTF

SEQ ID NO: 406526 - protein, 15 aa, Homo sapiens
  CDR3 for beta chain variable domain of TCR clone 203263 (TRBV11-1, TRBJ2-7)
CASSLNYGASYEQYF

SEQ ID NO: 406527 - protein, 16 aa, Homo sapiens
  CDR3 for alpha chain variable domain of TCR clone 203264 (TRAV16, TRAJ4)
CALSRMFSGGYNKLIF

SEQ ID NO: 406528 - protein, 15 aa, Homo sapiens
  CDR3 for beta chain variable domain of TCR clone 203264 (TRBV7-9, TRBJ2-7)
CASSSSGLAVYEQYF

SEQ ID NO: 406529 - protein, 15 aa, Homo sapiens
  CDR3 for alpha chain variable domain of TCR clone 203265 (TRAV8-1, TRAJ23)
CAVNSHYNQGGKLIF

SEQ ID NO: 406530 - protein, 17 aa, Homo sapiens
  CDR3 for beta chain variable domain of TCR clone 203265 (TRBV11-2, TRBJ1-6)
CASTLRVPGIHPSTLGT

SEQ ID NO: 406531 - protein, 14 aa, Homo sapiens
  CDR3 for alpha chain variable domain of TCR clone 203266 (TRAV26-1, TRAJ22)
CIVRVYGSARQLTF

SEQ ID NO: 406532 - protein, 17 aa, Homo sapiens
  CDR3 for beta chain variable domain of TCR clone 203266 (TRBV29-1, TRBJ2-3)
CSVEVLAGETSTDTQYF

SEQ ID NO: 406533 - protein, 11 aa, Homo sapiens
  CDR3 for alpha chain variable domain of TCR clone 203267 (TRAV3, TRAJ21)
CAVGNSNKFYF

SEQ ID NO: 406534 - protein, 17 aa, Homo sapiens
  CDR3 for beta chain variable domain of TCR clone 203267 (TRBV20-1, TRBJ2-1)
CSASSSGLAGSYNEQFF

SEQ ID NO: 406535 - protein, 12 aa, Homo sapiens
  CDR3 for alpha chain variable domain of TCR clone 203268 (TRAV12-2, TRAJ31)
CAVNKPDARLMF

SEQ ID NO: 406536 - protein, 17 aa, Homo sapiens
  CDR3 for beta chain variable domain of TCR clone 203268 (TRBV20-1, TRBJ1-6)
CSARGGYTVSYNSPHHF

SEQ ID NO: 406537 - protein, 12 aa, Homo sapiens
  CDR3 for alpha chain variable domain of TCR clone 203269 (TRAV17, TRAJ30)
CVPERRDDKIVF

SEQ ID NO: 406538 - protein, 14 aa, Homo sapiens
  CDR3 for beta chain variable domain of TCR clone 203269 (TRBV7-7, TRBJ2-2)
CASSRDRSTGELSF

SEQ ID NO: 406539 - protein, 10 aa, Homo sapiens
  CDR3 for alpha chain variable domain of TCR clone 203270 (TRAV21, TRAJ20)
CAVNVGRLQA

SEQ ID NO: 406540 - protein, 12 aa, Homo sapiens
  CDR3 for beta chain variable domain of TCR clone 203270 (TRBV12-4, TRBJ1-2)
CASSFIWLHLRF

SEQ ID NO: 406541 - protein, 15 aa, Homo sapiens
  CDR3 for alpha chain variable domain of TCR clone 203271 (TRAV27, TRAJ38)
CAARRYAGNNRKLIW

SEQ ID NO: 406542 - protein, 11 aa, Homo sapiens
  CDR3 for beta chain variable domain of TCR clone 203271 (TRBV12-4, TRBJ2-2)
CASSSAGELFF

SEQ ID NO: 406543 - protein, 15 aa, Homo sapiens
  CDR3 for alpha chain variable domain of TCR clone 203272 (TRAV12-1, TRAJ42)
CVVTRDGESQGNLIF

SEQ ID NO: 406544 - protein, 13 aa, Homo sapiens
  CDR3 for beta chain variable domain of TCR clone 203272 (TRBV27, TRBJ2-7)
CASSLTTGYEQYF

SEQ ID NO: 406545 - protein, 15 aa, Homo sapiens
  CDR3 for alpha chain variable domain of TCR clone 203273 (TRAV8-3, TRAJ11)
CAVGLLNSGYSTLTF

SEQ ID NO: 406546 - protein, 16 aa, Homo sapiens
  CDR3 for beta chain variable domain of TCR clone 203273 (TRBV7-9, TRBJ1-2)
CASSLGFSSGEDGYPF

SEQ ID NO: 406547 - protein, 14 aa, Homo sapiens
  CDR3 for alpha chain variable domain of TCR clone 203274 (TRAV8-3, TRAJ4)
CAVGAAGGYNKLIF

SEQ ID NO: 406548 - protein, 14 aa, Homo sapiens
  CDR3 for beta chain variable domain of TCR clone 203274 (TRBV13, TRBJ2-3)
CASSSGSPTDTQYF

SEQ ID NO: 406549 - protein, 10 aa, Homo sapiens
  CDR3 for alpha chain variable domain of TCR clone 203275 (TRAV30, TRAJ48)
CGIGNEKLTF

SEQ ID NO: 406550 - protein, 15 aa, Homo sapiens
  CDR3 for beta chain variable domain of TCR clone 203275 (TRBV5-1, TRBJ2-1)
CASSLASPYSNEQFF

SEQ ID NO: 406551 - protein, 17 aa, Homo sapiens
  CDR3 for alpha chain variable domain of TCR clone 203276 (TRAV3, TRAJ42)
CAVRDRDYGGSQGNLIF

SEQ ID NO: 406552 - protein, 14 aa, Homo sapiens
  CDR3 for beta chain variable domain of TCR clone 203276 (TRBV4-1, TRBJ1-1)
CASSRSGQSFEAFF

SEQ ID NO: 406553 - protein, 15 aa, Homo sapiens
  CDR3 for alpha chain variable domain of TCR clone 203277 (TRAV17, TRAJ16)
CATALRFSDGQKLLF

SEQ ID NO: 406554 - protein, 14 aa, Homo sapiens
  CDR3 for beta chain variable domain of TCR clone 203277 (TRBV7-2, TRBJ2-7)
CASSPKTSFCEQYF

SEQ ID NO: 406555 - protein, 14 aa, Homo sapiens
  CDR3 for alpha chain variable domain of TCR clone 203278 (TRAV17, TRAJ16)
CATADFSDGQKLLF

SEQ ID NO: 406556 - protein, 14 aa, Homo sapiens
  CDR3 for beta chain variable domain of TCR clone 203278 (TRBV19, TRBJ2-1)
CASGKSTQYNEQFF

SEQ ID NO: 406557 - protein, 17 aa, Homo sapiens
  CDR3 for alpha chain variable domain of TCR clone 203279 (TRAV3, TRAJ42)
CAVSDRDYGGSQGNLIF

SEQ ID NO: 406558 - protein, 15 aa, Homo sapiens
  CDR3 for beta chain variable domain of TCR clone 203279 (TRBV6-3, TRBJ2-7)
CASSSPGTVFYEQYF

SEQ ID NO: 406559 - protein, 15 aa, Homo sapiens
  CDR3 for alpha chain variable domain of TCR clone 203280 (TRAV16, TRAJ12)
CSKWPLRDSSYKLIF

SEQ ID NO: 406560 - protein, 16 aa, Homo sapiens
  CDR3 for beta chain variable domain of TCR clone 203280 (TRBV28, TRBJ1-5)
CASSFRGGYSNQPQHF

SEQ ID NO: 406561 - protein, 14 aa, Homo sapiens
  CDR3 for alpha chain variable domain of TCR clone 203281 (TRAV1-2, TRAJ16)
CAVNRFSDGEKLLF

SEQ ID NO: 406562 - protein, 15 aa, Homo sapiens
  CDR3 for beta chain variable domain of TCR clone 203281 (TRBV20-1, TRBJ2-7)
CSARDRASGMDEQYF

SEQ ID NO: 406563 - protein, 14 aa, Homo sapiens
  CDR3 for alpha chain variable domain of TCR clone 203282 (TRAV1-2, TRAJ8)
CAVREDTGFQKLLF

SEQ ID NO: 406564 - protein, 13 aa, Homo sapiens
  CDR3 for beta chain variable domain of TCR clone 203282 (TRBV7-9, TRBJ1-2)
CASSLKQNYGYTF

SEQ ID NO: 406565 - protein, 17 aa, Homo sapiens
  CDR3 for alpha chain variable domain of TCR clone 203283 (TRAV23/DV6, TRAJ57)
CAASSTLSQGGPEKLVF

SEQ ID NO: 406566 - protein, 14 aa, Homo sapiens
  CDR3 for beta chain variable domain of TCR clone 203283 (TRBV25-1, TRBJ1-1)
CASTHLGGNTEAFF

SEQ ID NO: 406567 - protein, 14 aa, Homo sapiens
  CDR3 for alpha chain variable domain of TCR clone 203284 (TRAV8-4, TRAJ29)
CAVSAVEGNTPLVF

SEQ ID NO: 406568 - protein, 13 aa, Homo sapiens
  CDR3 for beta chain variable domain of TCR clone 203284 (TRBV12-4, TRBJ2-7)
CASSFQGRYEKYF

SEQ ID NO: 406569 - protein, 13 aa, Homo sapiens
  CDR3 for alpha chain variable domain of TCR clone 203285 (TRAV12-1, TRAJ29)
CVVDTSGNTPLVF

SEQ ID NO: 406570 - protein, 13 aa, Homo sapiens
  CDR3 for beta chain variable domain of TCR clone 203285 (TRBV12-4, TRBJ2-7)
CASSPSRDTPRSF

SEQ ID NO: 406571 - protein, 15 aa, Homo sapiens
  CDR3 for alpha chain variable domain of TCR clone 203286 (TRAV8-2, TRAJ8)
CVVTDFPTGFQKLVF

SEQ ID NO: 406572 - protein, 14 aa, Homo sapiens
  CDR3 for beta chain variable domain of TCR clone 203286 (TRBV7-9, TRBJ1-2)
CASSLGPPQWPATF

SEQ ID NO: 406573 - protein, 14 aa, Homo sapiens
  CDR3 for alpha chain variable domain of TCR clone 203287 (TRAV13-2, TRAJ29)
CAEGTFETNTPLVF

SEQ ID NO: 406574 - protein, 13 aa, Homo sapiens
  CDR3 for beta chain variable domain of TCR clone 203287 (TRBV2, TRBJ1-1)
CANNLLRNTEAFF

SEQ ID NO: 406575 - protein, 15 aa, Homo sapiens
  CDR3 for alpha chain variable domain of TCR clone 203288 (TRAV4, TRAJ26)
CLVGGLDNYGQNFVF

SEQ ID NO: 406576 - protein, 13 aa, Homo sapiens
  CDR3 for beta chain variable domain of TCR clone 203288 (TRBV20-1, TRBJ2-5)
CRASLTGRETQYF

SEQ ID NO: 406577 - protein, 13 aa, Homo sapiens
  CDR3 for alpha chain variable domain of TCR clone 203289 (TRAV13-2, TRAJ13)
CAETAGGYQKVTF

SEQ ID NO: 406578 - protein, 15 aa, Homo sapiens
  CDR3 for beta chain variable domain of TCR clone 203289 (TRBV20-1, TRBJ1-5)
CSARVGRVVSQAQHF

SEQ ID NO: 406579 - protein, 17 aa, Homo sapiens
  CDR3 for alpha chain variable domain of TCR clone 203290 (TRAV3, TRAJ12)
CAVRDGGRMDSSYKLIF

SEQ ID NO: 406580 - protein, 15 aa, Homo sapiens
  CDR3 for beta chain variable domain of TCR clone 203290 (TRBV6-3, TRBJ2-7)
CASSSPGTVFYEQYF

SEQ ID NO: 406581 - protein, 15 aa, Homo sapiens
  CDR3 for alpha chain variable domain of TCR clone 203291 (TRAV20, TRAJ16)
CAVQIRFSDGQKLLF

SEQ ID NO: 406582 - protein, 15 aa, Homo sapiens
  CDR3 for beta chain variable domain of TCR clone 203291 (TRBV7-9, TRBJ1-5)
CASSQGHQPNQPQHF

SEQ ID NO: 406583 - protein, 14 aa, Homo sapiens
  CDR3 for alpha chain variable domain of TCR clone 203292 (TRAV26-1, TRAJ26)
CIVRATFLGQNFVF

SEQ ID NO: 406584 - protein, 15 aa, Homo sapiens
  CDR3 for beta chain variable domain of TCR clone 203292 (TRBV12-4, TRBJ2-7)
CQQIDRTGPSYEQYF

SEQ ID NO: 406585 - protein, 13 aa, Homo sapiens
  CDR3 for alpha chain variable domain of TCR clone 203293 (TRAV13-1, TRAJ21)
CAASIYNFNKFYF

SEQ ID NO: 406586 - protein, 15 aa, Homo sapiens
  CDR3 for beta chain variable domain of TCR clone 203293 (TRBV9, TRBJ1-6)
CASSVAGTGDSPLHF

SEQ ID NO: 406587 - protein, 15 aa, Homo sapiens
  CDR3 for alpha chain variable domain of TCR clone 203294 (TRAV13-1, TRAJ44)
CAASRGGGTASKLTF

SEQ ID NO: 406588 - protein, 14 aa, Homo sapiens
  CDR3 for beta chain variable domain of TCR clone 203294 (TRBV7-2, TRBJ2-5)
CASSPRGSSETQYC

SEQ ID NO: 406589 - protein, 20 aa, Homo sapiens
  CDR3 for alpha chain variable domain of TCR clone 203295 (TRAV4, TRAJ29)
CCVLLPRWCVPFSGNTPLVF

SEQ ID NO: 406590 - protein, 17 aa, Homo sapiens
  CDR3 for beta chain variable domain of TCR clone 203295 (TRBV25-1, TRBJ2-7)
CASSDARVVFSSYEQYF

SEQ ID NO: 406591 - protein, 13 aa, Homo sapiens
  CDR3 for alpha chain variable domain of TCR clone 203296 (TRAV12-2, TRAJ20)
CAVYPSNDYKTSF

SEQ ID NO: 406592 - protein, 12 aa, Homo sapiens
  CDR3 for beta chain variable domain of TCR clone 203296 (TRBV28, TRBJ1-2)
CASLTLAEGYTF

SEQ ID NO: 406593 - protein, 13 aa, Homo sapiens
  CDR3 for alpha chain variable domain of TCR clone 203297 (TRAV1-2, TRAJ9)
CAVLNTGGFKTIF

SEQ ID NO: 406594 - protein, 17 aa, Homo sapiens
  CDR3 for beta chain variable domain of TCR clone 203297 (TRBV13, TRBJ2-3)
CASSRSRVAGGRNTQYF

SEQ ID NO: 406595 - protein, 15 aa, Homo sapiens
  CDR3 for alpha chain variable domain of TCR clone 203298 (TRAV2, TRAJ9)
CAVEDRGTGGFKTIF

SEQ ID NO: 406596 - protein, 14 aa, Homo sapiens
  CDR3 for beta chain variable domain of TCR clone 203298 (TRBV4-1, TRBJ2-7)
CASSPVAGGDEQYF

SEQ ID NO: 406597 - protein, 13 aa, Homo sapiens
  CDR3 for alpha chain variable domain of TCR clone 203299 (TRAV8-3, TRAJ28)
CAVGAVGSYQLTF

SEQ ID NO: 406598 - protein, 13 aa, Homo sapiens
  CDR3 for beta chain variable domain of TCR clone 203299 (TRBV7-2, TRBJ1-2)
CASSLRQNYGYTF

SEQ ID NO: 406599 - protein, 13 aa, Homo sapiens
  CDR3 for alpha chain variable domain of TCR clone 203300 (TRAV16, TRAJ9)
CALRATGGFKTIF

SEQ ID NO: 406600 - protein, 16 aa, Homo sapiens
  CDR3 for beta chain variable domain of TCR clone 203300 (TRBV5-1, TRBJ1-3)
CASSRSGEGSGNTIYF

SEQ ID NO: 406601 - protein, 10 aa, Homo sapiens
  CDR3 for alpha chain variable domain of TCR clone 203301 (TRAV1-2, TRAJ31)
CVSEDARLMF

SEQ ID NO: 406602 - protein, 14 aa, Homo sapiens
  CDR3 for beta chain variable domain of TCR clone 203301 (TRBV19, TRBJ2-1)
CASPTFALGGEQFF

SEQ ID NO: 406603 - protein, 14 aa, Homo sapiens
  CDR3 for alpha chain variable domain of TCR clone 203302 (TRAV2, TRAJ9)
CAVDPNPGGFKTIF

SEQ ID NO: 406604 - protein, 13 aa, Homo sapiens
  CDR3 for beta chain variable domain of TCR clone 203302 (TRBV20-1, TRBJ2-1)
CSASTGASNEQFF

SEQ ID NO: 406605 - protein, 16 aa, Homo sapiens
  CDR3 for alpha chain variable domain of TCR clone 203303 (TRAV8-6, TRAJ22)
CAVSPIPSGSAWQLTF

SEQ ID NO: 406606 - protein, 14 aa, Homo sapiens
  CDR3 for beta chain variable domain of TCR clone 203303 (TRBV2, TRBJ2-1)
CASSARAAYNEQFF

SEQ ID NO: 406607 - protein, 10 aa, Homo sapiens
  CDR3 for alpha chain variable domain of TCR clone 203304 (TRAV12-3, TRAJ49)
CAMNDDQFYL

SEQ ID NO: 406608 - protein, 15 aa, Homo sapiens
  CDR3 for beta chain variable domain of TCR clone 203304 (TRBV19, TRBJ1-1)
CASTSGQIQNTEAFF

SEQ ID NO: 406609 - protein, 14 aa, Homo sapiens
  CDR3 for alpha chain variable domain of TCR clone 203305 (TRAV1-2, TRAJ16)
CAVNRFSDGQRLLF

SEQ ID NO: 406610 - protein, 15 aa, Homo sapiens
  CDR3 for beta chain variable domain of TCR clone 203305 (TRBV7-9, TRBJ1-6)
CASSSTGRGNSPLHF

SEQ ID NO: 406611 - protein, 13 aa, Homo sapiens
  CDR3 for alpha chain variable domain of TCR clone 203306 (TRAV17, TRAJ54)
CATVIQGAPKLVF

SEQ ID NO: 406612 - protein, 15 aa, Homo sapiens
  CDR3 for beta chain variable domain of TCR clone 203306 (TRBV13, TRBJ2-1)
CASSLLSGLNNEQFV

SEQ ID NO: 406613 - protein, 14 aa, Homo sapiens
  CDR3 for alpha chain variable domain of TCR clone 203307 (TRAV25, TRAJ23)
CAGQGDNQGGKLIF

SEQ ID NO: 406614 - protein, 12 aa, Homo sapiens
  CDR3 for beta chain variable domain of TCR clone 203307 (TRBV7-9, TRBJ1-1)
CASSLVRVEAFF

SEQ ID NO: 406615 - protein, 14 aa, Homo sapiens
  CDR3 for alpha chain variable domain of TCR clone 203308 (TRAV20, TRAJ10)
CAVRVEGGGNKLTF

SEQ ID NO: 406616 - protein, 18 aa, Homo sapiens
  CDR3 for beta chain variable domain of TCR clone 203308 (TRBV24-1, TRBJ2-1)
CATSHLMFLGRGVHEQFF

SEQ ID NO: 406617 - protein, 12 aa, Homo sapiens
  CDR3 for alpha chain variable domain of TCR clone 203309 (TRAV8-3, TRAJ40)
CAVTSGTYKYIF

SEQ ID NO: 406618 - protein, 13 aa, Homo sapiens
  CDR3 for beta chain variable domain of TCR clone 203309 (TRBV12-4, TRBJ2-3)
CSSGQGSTDTQYF

SEQ ID NO: 406619 - protein, 15 aa, Homo sapiens
  CDR3 for alpha chain variable domain of TCR clone 203310 (TRAV8-3, TRAJ6)
CAVGPLGGGSYIPTF

SEQ ID NO: 406620 - protein, 11 aa, Homo sapiens
  CDR3 for beta chain variable domain of TCR clone 203310 (TRBV29-1, TRBJ1-1)
CSVEVGTRTFF

SEQ ID NO: 406621 - protein, 12 aa, Homo sapiens
  CDR3 for alpha chain variable domain of TCR clone 203311 (TRAV13-2, TRAJ23)
CAERHRGGKLIF

SEQ ID NO: 406622 - protein, 19 aa, Homo sapiens
  CDR3 for beta chain variable domain of TCR clone 203311 (TRBV19, TRBJ2-5)
CASSIGQVTDVFLGETQYF

SEQ ID NO: 406623 - protein, 13 aa, Homo sapiens
  CDR3 for alpha chain variable domain of TCR clone 203312 (TRAV35, TRAJ42)
CAGFPGSQGNPIV

SEQ ID NO: 406624 - protein, 13 aa, Homo sapiens
  CDR3 for beta chain variable domain of TCR clone 203312 (TRBV29-1, TRBJ2-1)
CSVEGGRVNEQFF

SEQ ID NO: 406625 - protein, 15 aa, Homo sapiens
  CDR3 for alpha chain variable domain of TCR clone 203313 (TRAV26-1, TRAJ29)
CIVRVEGSGNTPLVF

SEQ ID NO: 406626 - protein, 17 aa, Homo sapiens
  CDR3 for beta chain variable domain of TCR clone 203313 (TRBV7-9, TRBJ2-3)
CASSPTVAGDLTDTQYF

SEQ ID NO: 406627 - protein, 18 aa, Homo sapiens
  CDR3 for alpha chain variable domain of TCR clone 203314 (TRAV21, TRAJ52)
CAVRPSPAGGTSYGKLTL

SEQ ID NO: 406628 - protein, 11 aa, Homo sapiens
  CDR3 for beta chain variable domain of TCR clone 203314 (TRBV29-1, TRBJ2-5)
CSEDRTGTQYF

SEQ ID NO: 406629 - protein, 14 aa, Homo sapiens
  CDR3 for alpha chain variable domain of TCR clone 203315 (TRAV12-1, TRAJ17)
CVVSYKAAGNKLTF

SEQ ID NO: 406630 - protein, 17 aa, Homo sapiens
  CDR3 for beta chain variable domain of TCR clone 203315 (TRBV20-1, TRBJ2-1)
CSASSSGLAGSYNAQFF

SEQ ID NO: 406631 - protein, 15 aa, Homo sapiens
  CDR3 for alpha chain variable domain of TCR clone 203316 (TRAV12-3, TRAJ11)
CAMSEENSGYSTLTF

SEQ ID NO: 406632 - protein, 20 aa, Homo sapiens
  CDR3 for beta chain variable domain of TCR clone 203316 (TRBV7-8, TRBJ2-2)
CASSHLFPGPTIHITAELFF

SEQ ID NO: 406633 - protein, 13 aa, Homo sapiens
  CDR3 for alpha chain variable domain of TCR clone 203317 (TRAV17, TRAJ5)
RATGDTGRRALTF

SEQ ID NO: 406634 - protein, 13 aa, Homo sapiens
  CDR3 for beta chain variable domain of TCR clone 203317 (TRBV19, TRBJ1-5)
CASSIEPVQPQHF

SEQ ID NO: 406635 - protein, 14 aa, Homo sapiens
  CDR3 for alpha chain variable domain of TCR clone 203318 (TRAV35, TRAJ50)
CAGHRKTSYDKVRF

SEQ ID NO: 406636 - protein, 13 aa, Homo sapiens
  CDR3 for beta chain variable domain of TCR clone 203318 (TRBV7-7, TRBJ2-3)
CASSLSRADTKDF

SEQ ID NO: 406637 - protein, 12 aa, Homo sapiens
  CDR3 for alpha chain variable domain of TCR clone 203319 (TRAV38-1, TRAJ32)
CAPLGATNKLIF

SEQ ID NO: 406638 - protein, 14 aa, Homo sapiens
  CDR3 for beta chain variable domain of TCR clone 203319 (TRBV29-1, TRBJ2-5)
GSVETSGSGETQYF

SEQ ID NO: 406639 - protein, 16 aa, Homo sapiens
  CDR3 for alpha chain variable domain of TCR clone 203320 (TRAV3, TRAJ10)
CAVRDMRAGGGNKLTF

SEQ ID NO: 406640 - protein, 12 aa, Homo sapiens
  CDR3 for beta chain variable domain of TCR clone 203320 (TRBV5-5, TRBJ2-5)
CASSYFGETQYF

SEQ ID NO: 406641 - protein, 17 aa, Homo sapiens
  CDR3 for alpha chain variable domain of TCR clone 203321 (TRAV3, TRAJ6)
CAVREGPRAGGSYIPTF

SEQ ID NO: 406642 - protein, 14 aa, Homo sapiens
  CDR3 for beta chain variable domain of TCR clone 203321 (TRBV7-2, TRBJ2-7)
CAGSPKTSFYEQYF

SEQ ID NO: 406643 - protein, 13 aa, Homo sapiens
  CDR3 for alpha chain variable domain of TCR clone 203322 (TRAV8-6, TRAJ48)
CAGVNFGNEKLTF

SEQ ID NO: 406644 - protein, 16 aa, Homo sapiens
  CDR3 for beta chain variable domain of TCR clone 203322 (TRBV4-2, TRBJ2-6)
CAGSQAMSSGANVLTF

SEQ ID NO: 406645 - protein, 14 aa, Homo sapiens
  CDR3 for alpha chain variable domain of TCR clone 203323 (TRAV29/DV5, TRAJ44)
CAAFLVGTASKLTF

SEQ ID NO: 406646 - protein, 15 aa, Homo sapiens
  CDR3 for beta chain variable domain of TCR clone 203323 (TRBV20-1, TRBJ2-7)
CSARDRVSGMDEQYF

SEQ ID NO: 406647 - protein, 18 aa, Homo sapiens
  CDR3 for alpha chain variable domain of TCR clone 203324 (TRAV21, TRAJ52)
GAVRPSPAGGTSYGKLTF

SEQ ID NO: 406648 - protein, 13 aa, Homo sapiens
  CDR3 for beta chain variable domain of TCR clone 203324 (TRBV2, TRBJ1-5)
CATAGPGNQPQHF

SEQ ID NO: 406649 - protein, 13 aa, Homo sapiens
  CDR3 for alpha chain variable domain of TCR clone 203325 (TRAV3, TRAJ21)
CAVREPDFNKFYF

SEQ ID NO: 406650 - protein, 16 aa, Homo sapiens
  CDR3 for beta chain variable domain of TCR clone 203325 (TRBV15, TRBJ2-1)
CATSRERLAGAYEQFF

SEQ ID NO: 406651 - protein, 12 aa, Homo sapiens
  CDR3 for alpha chain variable domain of TCR clone 203326 (TRAV12-3, TRAJ17)
CAMTLTGNKLAF

SEQ ID NO: 406652 - protein, 19 aa, Homo sapiens
  CDR3 for beta chain variable domain of TCR clone 203326 (TRBV25-1, TRBJ2-2)
CAILVYRVDRGRKTGELFF

SEQ ID NO: 406653 - protein, 18 aa, Homo sapiens
  CDR3 for alpha chain variable domain of TCR clone 203327 (TRAV26-1, TRAJ52)
CNVRVAGAGGTSYGKLTF

SEQ ID NO: 406654 - protein, 13 aa, Homo sapiens
  CDR3 for beta chain variable domain of TCR clone 203327 (TRBV7-8, TRBJ1-2)
CASSAQSYYGYTF

SEQ ID NO: 406655 - protein, 14 aa, Homo sapiens
  CDR3 for alpha chain variable domain of TCR clone 203328 (TRAV17, TRAJ35)
CATDRPGFRNVLHC

SEQ ID NO: 406656 - protein, 15 aa, Homo sapiens
  CDR3 for beta chain variable domain of TCR clone 203328 (TRBV28, TRBJ2-5)
CASSSGRVIQETQYF

SEQ ID NO: 406657 - protein, 12 aa, Homo sapiens
  CDR3 for alpha chain variable domain of TCR clone 203329 (TRAV1-2, TRAJ26)
CAVRYYGQNLVF

SEQ ID NO: 406658 - protein, 15 aa, Homo sapiens
  CDR3 for beta chain variable domain of TCR clone 203329 (TRBV28, TRBJ2-1)
CASSIIAGGRSEQFF

SEQ ID NO: 406659 - protein, 14 aa, Homo sapiens
  CDR3 for alpha chain variable domain of TCR clone 203330 (TRAV4, TRAJ9)
CLVGSGTGGFKTNF

SEQ ID NO: 406660 - protein, 14 aa, Homo sapiens
  CDR3 for beta chain variable domain of TCR clone 203330 (TRBV7-9, TRBJ2-4)
CASSLAMGGNIQYF

SEQ ID NO: 406661 - protein, 14 aa, Homo sapiens
  CDR3 for alpha chain variable domain of TCR clone 203331 (TRAV12-2, TRAJ45)
CALPERGGADGLTF

SEQ ID NO: 406662 - protein, 14 aa, Homo sapiens
  CDR3 for beta chain variable domain of TCR clone 203331 (TRBV6-3, TRBJ2-1)
CASLHSAYYNEQFF

SEQ ID NO: 406663 - protein, 17 aa, Homo sapiens
  CDR3 for alpha chain variable domain of TCR clone 203332 (TRAV12-1, TRAJ42)
SVVMRMNYGGSQGNLIF

SEQ ID NO: 406664 - protein, 13 aa, Homo sapiens
  CDR3 for beta chain variable domain of TCR clone 203332 (TRBV7-2, TRBJ1-1)
CASSLARPAEAFF

SEQ ID NO: 406665 - protein, 14 aa, Homo sapiens
  CDR3 for alpha chain variable domain of TCR clone 203333 (TRAV1-2, TRAJ16)
CAVNRFSDGQKLLF

SEQ ID NO: 406666 - protein, 16 aa, Homo sapiens
  CDR3 for beta chain variable domain of TCR clone 203333 (TRBV7-2, TRBJ1-3)
CASSRLEASSGNTIYF

SEQ ID NO: 406667 - protein, 16 aa, Homo sapiens
  CDR3 for alpha chain variable domain of TCR clone 203334 (TRAV12-1, TRAJ42)
CVVTPYSGGSQGNLIF

SEQ ID NO: 406668 - protein, 18 aa, Homo sapiens
  CDR3 for beta chain variable domain of TCR clone 203334 (TRBV24-1, TRBJ2-3)
CATSDLPRLAGGADTQYF

SEQ ID NO: 406669 - protein, 14 aa, Homo sapiens
  CDR3 for alpha chain variable domain of TCR clone 203335 (TRAV12-1, TRAJ8)
CVVNSNTGFQKLVF

SEQ ID NO: 406670 - protein, 17 aa, Homo sapiens
  CDR3 for beta chain variable domain of TCR clone 203335 (TRBV7-8, TRBJ2-6)
WASSAGTGGAGANDLTF

SEQ ID NO: 406671 - protein, 15 aa, Homo sapiens
  CDR3 for alpha chain variable domain of TCR clone 203336 (TRAV2, TRAJ44)
CAVEAYTGTASKLTF

SEQ ID NO: 406672 - protein, 17 aa, Homo sapiens
  CDR3 for beta chain variable domain of TCR clone 203336 (TRBV12-4, TRBJ2-1)
CASSPGLAGGRINEQFV

SEQ ID NO: 406673 - protein, 11 aa, Homo sapiens
  CDR3 for alpha chain variable domain of TCR clone 203337 (TRAV12-2, TRAJ33)
CAVTSNYQLIW

SEQ ID NO: 406674 - protein, 14 aa, Homo sapiens
  CDR3 for beta chain variable domain of TCR clone 203337 (TRBV28, TRBJ2-2)
FASRIRSGTGELFF

SEQ ID NO: 406675 - protein, 14 aa, Homo sapiens
  CDR3 for alpha chain variable domain of TCR clone 203338 (TRAV1-2, TRAJ8)
CAVREDTGFQKLVF

SEQ ID NO: 406676 - protein, 13 aa, Homo sapiens
  CDR3 for beta chain variable domain of TCR clone 203338 (TRBV7-2, TRBJ1-1)
CASSRNTNTEAFF

SEQ ID NO: 406677 - protein, 16 aa, Homo sapiens
  CDR3 for alpha chain variable domain of TCR clone 203339 (TRAV23/DV6, TRAJ9)
CAASIGGNTGGFKTIF

SEQ ID NO: 406678 - protein, 14 aa, Homo sapiens
  CDR3 for beta chain variable domain of TCR clone 203339 (TRBV9, TRBJ2-7)
CASSVGVGSYEQCL

SEQ ID NO: 406679 - protein, 15 aa, Homo sapiens
  CDR3 for alpha chain variable domain of TCR clone 203340 (TRAV3, TRAJ4)
CAVRDGTGGYNKLIF

SEQ ID NO: 406680 - protein, 13 aa, Homo sapiens
  CDR3 for beta chain variable domain of TCR clone 203340 (TRBV28, TRBJ1-1)
CASSLRPNTEAFF

SEQ ID NO: 406681 - protein, 12 aa, Homo sapiens
  CDR3 for alpha chain variable domain of TCR clone 203341 (TRAV8-4, TRAJ20)
CAVSDDDYKLSF

SEQ ID NO: 406682 - protein, 15 aa, Homo sapiens
  CDR3 for beta chain variable domain of TCR clone 203341 (TRBV7-8, TRBJ2-1)
CASSLAGGLYNEQFF

SEQ ID NO: 406683 - protein, 11 aa, Homo sapiens
  CDR3 for alpha chain variable domain of TCR clone 203342 (TRAV8-3, TRAJ34)
CAIPGKLIFGS

SEQ ID NO: 406684 - protein, 15 aa, Homo sapiens
  CDR3 for beta chain variable domain of TCR clone 203342 (TRBV5-7, TRBJ2-1)
CASSRRLAGDNEQFF

SEQ ID NO: 406685 - protein, 16 aa, Homo sapiens
  CDR3 for alpha chain variable domain of TCR clone 203343 (TRAV3, TRAJ37)
CAVRPHGSGHTGKLIF

SEQ ID NO: 406686 - protein, 11 aa, Homo sapiens
  CDR3 for beta chain variable domain of TCR clone 203343 (TRBV10-3, TRBJ2-7)
CAISEGLEQYF

SEQ ID NO: 406687 - protein, 13 aa, Homo sapiens
  CDR3 for alpha chain variable domain of TCR clone 203344 (TRAV8-2, TRAJ49)
GVGTPNTGNQFYF

SEQ ID NO: 406688 - protein, 15 aa, Homo sapiens
  CDR3 for beta chain variable domain of TCR clone 203344 (TRBV11-2, TRBJ2-1)
CASSLTSGGYNEQFF

SEQ ID NO: 406689 - protein, 15 aa, Homo sapiens
  CDR3 for alpha chain variable domain of TCR clone 203345 (TRAV8-3, TRAJ11)
YAVGLLNSGYSTLTF

SEQ ID NO: 406690 - protein, 13 aa, Homo sapiens
  CDR3 for beta chain variable domain of TCR clone 203345 (TRBV19, TRBJ2-7)
CASSPRQSYEQYF

SEQ ID NO: 406691 - protein, 15 aa, Homo sapiens
  CDR3 for alpha chain variable domain of TCR clone 203346 (TRAV21, TRAJ24)
CAARSSTASWGKLQF

SEQ ID NO: 406692 - protein, 11 aa, Homo sapiens
  CDR3 for beta chain variable domain of TCR clone 203346 (TRBV11-2, TRBJ2-2)
CASSLPGELFL

SEQ ID NO: 406693 - protein, 14 aa, Homo sapiens
  CDR3 for alpha chain variable domain of TCR clone 203347 (TRAV13-1, TRAJ5)
CAASPGSRRRALTF

SEQ ID NO: 406694 - protein, 17 aa, Homo sapiens
  CDR3 for beta chain variable domain of TCR clone 203347 (TRBV20-1, TRBJ2-1)
CSASSSGLAGAYNEQFF

SEQ ID NO: 406695 - protein, 15 aa, Homo sapiens
  CDR3 for alpha chain variable domain of TCR clone 203348 (TRAV35, TRAJ58)
CAGRRQETSGSRLTF

SEQ ID NO: 406696 - protein, 16 aa, Homo sapiens
  CDR3 for beta chain variable domain of TCR clone 203348 (TRBV2, TRBJ2-1)
CASSVGGYLSYNEQFF

SEQ ID NO: 406697 - protein, 11 aa, Homo sapiens
  CDR3 for alpha chain variable domain of TCR clone 203349 (TRAV21, TRAJ48)
CAVDGNEKLTF

SEQ ID NO: 406698 - protein, 13 aa, Homo sapiens
  CDR3 for beta chain variable domain of TCR clone 203349 (TRBV11-2, TRBJ1-2)
CASSLDSPSGYTF

SEQ ID NO: 406699 - protein, 20 aa, Homo sapiens
  CDR3 for alpha chain variable domain of TCR clone 203350 (TRAV1-1, TRAJ39)
CLLLLRCESSAYNAGNMLTF

SEQ ID NO: 406700 - protein, 12 aa, Homo sapiens
  CDR3 for beta chain variable domain of TCR clone 203350 (TRBV24-1, TRBJ1-1)
CATLYPDTEAFF

SEQ ID NO: 406701 - protein, 16 aa, Homo sapiens
  CDR3 for alpha chain variable domain of TCR clone 203351 (TRAV3, TRAJ37)
CAVRVRGTGNTGKRIF

SEQ ID NO: 406702 - protein, 16 aa, Homo sapiens
  CDR3 for beta chain variable domain of TCR clone 203351 (TRBV19, TRBJ2-1)
CASSKAGPSSYNEQFF

SEQ ID NO: 406703 - protein, 19 aa, Homo sapiens
  CDR3 for alpha chain variable domain of TCR clone 203352 (TRAV26-1, TRAJ52)
CIVRAHRNAGGTSYGKLTF

SEQ ID NO: 406704 - protein, 15 aa, Homo sapiens
  CDR3 for beta chain variable domain of TCR clone 203352 (TRBV7-8, TRBJ1-5)
CASSLAGQPNQPQHF

SEQ ID NO: 406705 - protein, 14 aa, Homo sapiens
  CDR3 for alpha chain variable domain of TCR clone 203353 (TRAV1-2, TRAJ16)
CAVNQFSDGQKLLF

SEQ ID NO: 406706 - protein, 15 aa, Homo sapiens
  CDR3 for beta chain variable domain of TCR clone 203353 (TRBV9, TRBJ1-6)
CASSVAGTGDSTLHF

SEQ ID NO: 406707 - protein, 14 aa, Homo sapiens
  CDR3 for alpha chain variable domain of TCR clone 203354 (TRAV36/DV7, TRAJ44)
CCGANTGTASKLTF

SEQ ID NO: 406708 - protein, 14 aa, Homo sapiens
  CDR3 for beta chain variable domain of TCR clone 203354 (TRBV25-1, TRBJ1-1)
CASTHLGGNTEDFF

SEQ ID NO: 406709 - protein, 17 aa, Homo sapiens
  CDR3 for alpha chain variable domain of TCR clone 203355 (TRAV3, TRAJ6)
CAVRDGPRAGGSYIPTF

SEQ ID NO: 406710 - protein, 13 aa, Homo sapiens
  CDR3 for beta chain variable domain of TCR clone 203355 (TRBV4-2, TRBJ1-1)
CASSQAGNTEAFF

SEQ ID NO: 406711 - protein, 13 aa, Homo sapiens
  CDR3 for alpha chain variable domain of TCR clone 203356 (TRAV20, TRAJ21)
CAVEGYNFNKFYF

SEQ ID NO: 406712 - protein, 12 aa, Homo sapiens
  CDR3 for beta chain variable domain of TCR clone 203356 (TRBV28, TRBJ2-6)
CAIQAGANVLTF

SEQ ID NO: 406713 - protein, 15 aa, Homo sapiens
  CDR3 for alpha chain variable domain of TCR clone 203357 (TRAV3, TRAJ22)
CAVRDRGGSARQLTL

SEQ ID NO: 406714 - protein, 14 aa, Homo sapiens
  CDR3 for beta chain variable domain of TCR clone 203357 (TRBV7-2, TRBJ2-1)
CASSLVAGRNEQFF

SEQ ID NO: 406715 - protein, 16 aa, Homo sapiens
  CDR3 for alpha chain variable domain of TCR clone 203358 (TRAV3, TRAJ37)
CAVRGKGSGNTGKLIF

SEQ ID NO: 406716 - protein, 12 aa, Homo sapiens
  CDR3 for beta chain variable domain of TCR clone 203358 (TRBV11-2, TRBJ2-2)
CASSLGGGELVF

SEQ ID NO: 406717 - protein, 13 aa, Homo sapiens
  CDR3 for alpha chain variable domain of TCR clone 203359 (TRAV12-2, TRAJ20)
CAVYPSNDYKLSF

SEQ ID NO: 406718 - protein, 14 aa, Homo sapiens
  CDR3 for beta chain variable domain of TCR clone 203359 (TRBV2, TRBJ2-3)
CASSEGQNTDTQYF

SEQ ID NO: 406719 - protein, 15 aa, Homo sapiens
  CDR3 for alpha chain variable domain of TCR clone 203360 (TRAV3, TRAJ40)
CAVRDVTSGTYKYIF

SEQ ID NO: 406720 - protein, 13 aa, Homo sapiens
  CDR3 for beta chain variable domain of TCR clone 203360 (TRBV7-9, TRBJ1-2)
CASSLRQNYGYTF

SEQ ID NO: 406721 - protein, 15 aa, Homo sapiens
  CDR3 for alpha chain variable domain of TCR clone 203361 (TRAV29/DV5, TRAJ49)
CAASERWTPVTSSIL

SEQ ID NO: 406722 - protein, 17 aa, Homo sapiens
  CDR3 for beta chain variable domain of TCR clone 203361 (TRBV13, TRBJ2-3)
CASSLSRVAGGRNTQYF

SEQ ID NO: 406723 - protein, 19 aa, Homo sapiens
  CDR3 for alpha chain variable domain of TCR clone 203362 (TRAV3, TRAJ6)
CAVRDRNPSRAGGSYIPTS

SEQ ID NO: 406724 - protein, 15 aa, Homo sapiens
  CDR3 for beta chain variable domain of TCR clone 203362 (TRBV18, TRBJ2-7)
CASSPTFMDSYEQYF

SEQ ID NO: 406725 - protein, 13 aa, Homo sapiens
  CDR3 for alpha chain variable domain of TCR clone 203363 (TRAV1-2, TRAJ9)
CDVLNTGGFKTIF

SEQ ID NO: 406726 - protein, 14 aa, Homo sapiens
  CDR3 for beta chain variable domain of TCR clone 203363 (TRBV19, TRBJ2-1)
CASPTFVLSGEQFF

SEQ ID NO: 406727 - protein, 17 aa, Homo sapiens
  CDR3 for alpha chain variable domain of TCR clone 203364 (TRAV3, TRAJ6)
CAVRDGPRAGGSYITTF

SEQ ID NO: 406728 - protein, 14 aa, Homo sapiens
  CDR3 for beta chain variable domain of TCR clone 203364 (TRBV7-2, TRBJ2-7)
CASSPKTSCYEQYF

SEQ ID NO: 406729 - protein, 11 aa, Homo sapiens
  CDR3 for alpha chain variable domain of TCR clone 203365 (TRAV25, TRAJ5)
CRGGGRRALTF

SEQ ID NO: 406730 - protein, 14 aa, Homo sapiens
  CDR3 for beta chain variable domain of TCR clone 203365 (TRBV20-1, TRBJ2-2)
CSAPDTANTGELFF

SEQ ID NO: 406731 - protein, 13 aa, Homo sapiens
  CDR3 for alpha chain variable domain of TCR clone 203366 (TRAV17, TRAJ9)
CATFLTGGFKTIF

SEQ ID NO: 406732 - protein, 14 aa, Homo sapiens
  CDR3 for beta chain variable domain of TCR clone 203366 (TRBV7-9, TRBJ2-1)
CASSPRDSLYEQFF

SEQ ID NO: 406733 - protein, 14 aa, Homo sapiens
  CDR3 for alpha chain variable domain of TCR clone 203367 (TRAV12-2, TRAJ24)
CAVTPADSWGKLQF

SEQ ID NO: 406734 - protein, 15 aa, Homo sapiens
  CDR3 for beta chain variable domain of TCR clone 203367 (TRBV2, TRBJ2-7)
CASSEGLARSYEQYF

SEQ ID NO: 406735 - protein, 14 aa, Homo sapiens
  CDR3 for alpha chain variable domain of TCR clone 203368 (TRAV12-1, TRAJ17)
CVVNYKAAGNKLTF

SEQ ID NO: 406736 - protein, 15 aa, Homo sapiens
  CDR3 for beta chain variable domain of TCR clone 203368 (TRBV28, TRBJ2-5)
CASSQTSGSLETQYF

SEQ ID NO: 406737 - protein, 14 aa, Homo sapiens
  CDR3 for alpha chain variable domain of TCR clone 203369 (TRAV12-2, TRAJ44)
CAVNLAGTASKITF

SEQ ID NO: 406738 - protein, 13 aa, Homo sapiens
  CDR3 for beta chain variable domain of TCR clone 203369 (TRBV4-2, TRBJ1-1)
CASSQAGNTEAFF

SEQ ID NO: 406739 - protein, 15 aa, Homo sapiens
  CDR3 for alpha chain variable domain of TCR clone 203370 (TRAV12-3, TRAJ5)
CAMSGLGTGRRALTF

SEQ ID NO: 406740 - protein, 16 aa, Homo sapiens
  CDR3 for beta chain variable domain of TCR clone 203370 (TRBV20-1, TRBJ2-3)
CSARLHSAGAIDAQYF

SEQ ID NO: 406741 - protein, 12 aa, Homo sapiens
  CDR3 for alpha chain variable domain of TCR clone 203371 (TRAV27, TRAJ33)
CAGDGSNYQLIW

SEQ ID NO: 406742 - protein, 15 aa, Homo sapiens
  CDR3 for beta chain variable domain of TCR clone 203371 (TRBV10-3, TRBJ2-3)
CAISLTSGGTDTQYF

SEQ ID NO: 406743 - protein, 14 aa, Homo sapiens
  CDR3 for alpha chain variable domain of TCR clone 203372 (TRAV21, TRAJ58)
CAVRRGRSGSRLTF

SEQ ID NO: 406744 - protein, 13 aa, Homo sapiens
  CDR3 for beta chain variable domain of TCR clone 203372 (TRBV7-2, TRBJ1-6)
CASGLKFDSPLHF

SEQ ID NO: 406745 - protein, 12 aa, Homo sapiens
  CDR3 for alpha chain variable domain of TCR clone 203373 (TRAV12-2, TRAJ9)
CAVTGGGFKTIF

SEQ ID NO: 406746 - protein, 14 aa, Homo sapiens
  CDR3 for beta chain variable domain of TCR clone 203373 (TRBV18, TRBJ2-5)
CASSPGVSQETQYF

SEQ ID NO: 406747 - protein, 15 aa, Homo sapiens
  CDR3 for alpha chain variable domain of TCR clone 203374 (TRAV17, TRAJ45)
TSVLRTGGGADGLTF

SEQ ID NO: 406748 - protein, 15 aa, Homo sapiens
  CDR3 for beta chain variable domain of TCR clone 203374 (TRBV5-7, TRBJ1-5)
CASSYGKLRDQPQHF

SEQ ID NO: 406749 - protein, 13 aa, Homo sapiens
  CDR3 for alpha chain variable domain of TCR clone 203375 (TRAV21, TRAJ57)
CAVPQGGSEKLVF

SEQ ID NO: 406750 - protein, 11 aa, Homo sapiens
  CDR3 for beta chain variable domain of TCR clone 203375 (TRBV11-2, TRBJ2-2)
CASSLPGELFF

SEQ ID NO: 406751 - protein, 12 aa, Homo sapiens
  CDR3 for alpha chain variable domain of TCR clone 203376 (TRAV12-1, TRAJ40)
CVVYSGTYKYIF

SEQ ID NO: 406752 - protein, 13 aa, Homo sapiens
  CDR3 for beta chain variable domain of TCR clone 203376 (TRBV12-4, TRBJ1-2)
CASRTDGNYGYTF

SEQ ID NO: 406753 - protein, 18 aa, Homo sapiens
  CDR3 for alpha chain variable domain of TCR clone 203377 (TRAV13-1, TRAJ52)
CAAKNPNAGGTSYGKLTF

SEQ ID NO: 406754 - protein, 15 aa, Homo sapiens
  CDR3 for beta chain variable domain of TCR clone 203377 (TRBV4-1, TRBJ2-5)
CASSQWDLYQETQYF

SEQ ID NO: 406755 - protein, 13 aa, Homo sapiens
  CDR3 for alpha chain variable domain of TCR clone 203378 (TRAV12-3, TRAJ46)
CAMKKSSGDKLSF

SEQ ID NO: 406756 - protein, 17 aa, Homo sapiens
  CDR3 for beta chain variable domain of TCR clone 203378 (TRBV3-1, TRBJ2-5)
CASSQGLAGMYQETQYF

SEQ ID NO: 406757 - protein, 13 aa, Homo sapiens
  CDR3 for alpha chain variable domain of TCR clone 203379 (TRAV8-1, TRAJ34)
CAVNAGNTAKLIF

SEQ ID NO: 406758 - protein, 13 aa, Homo sapiens
  CDR3 for beta chain variable domain of TCR clone 203379 (TRBV20-1, TRBJ2-1)
CSAGAGTYNEQFF

SEQ ID NO: 406759 - protein, 13 aa, Homo sapiens
  CDR3 for alpha chain variable domain of TCR clone 203380 (TRAV38-1, TRAJ42)
CARWGGGQGNLIF

SEQ ID NO: 406760 - protein, 16 aa, Homo sapiens
  CDR3 for beta chain variable domain of TCR clone 203380 (TRBV4-2, TRBJ2-3)
CASSQELAGDTDTQYF

SEQ ID NO: 406761 - protein, 15 aa, Homo sapiens
  CDR3 for alpha chain variable domain of TCR clone 203381 (TRAV3, TRAJ22)
CAVRDRGGSARQLTF

SEQ ID NO: 406762 - protein, 15 aa, Homo sapiens
  CDR3 for beta chain variable domain of TCR clone 203381 (TRBV7-6, TRBJ2-5)
CASSSGLAGVETQYF

SEQ ID NO: 406763 - protein, 14 aa, Homo sapiens
  CDR3 for alpha chain variable domain of TCR clone 203382 (TRAV12-3, TRAJ6)
CAMSATGGSYIPTF

SEQ ID NO: 406764 - protein, 17 aa, Homo sapiens
  CDR3 for beta chain variable domain of TCR clone 203382 (TRBV11-2, TRBJ2-1)
CASSLYPPGVEYNEQFF

SEQ ID NO: 406765 - protein, 14 aa, Homo sapiens
  CDR3 for alpha chain variable domain of TCR clone 203383 (TRAV35, TRAJ44)
CAGRSPGTASKLTF

SEQ ID NO: 406766 - protein, 16 aa, Homo sapiens
  CDR3 for beta chain variable domain of TCR clone 203383 (TRBV6-7, TRBJ1-1)
CASSYLSGLPNTEAFF

SEQ ID NO: 406767 - protein, 14 aa, Homo sapiens
  CDR3 for alpha chain variable domain of TCR clone 203384 (TRAV1-1, TRAJ23)
CAVSIYNKGGKLIF

SEQ ID NO: 406768 - protein, 15 aa, Homo sapiens
  CDR3 for beta chain variable domain of TCR clone 203384 (TRBV5-8, TRBJ2-2)
CASSLDRGATGELFF

SEQ ID NO: 406769 - protein, 10 aa, Homo sapiens
  CDR3 for alpha chain variable domain of TCR clone 203385 (TRAV8-4, TRAJ43)
CAVSADDMRF

SEQ ID NO: 406770 - protein, 15 aa, Homo sapiens
  CDR3 for beta chain variable domain of TCR clone 203385 (TRBV5-1, TRBJ2-3)
CASSVTSGSTDTHYF

SEQ ID NO: 406771 - protein, 14 aa, Homo sapiens
  CDR3 for alpha chain variable domain of TCR clone 203386 (TRAV8-1, TRAJ4)
CAVPFSGGYNKLIF

SEQ ID NO: 406772 - protein, 13 aa, Homo sapiens
  CDR3 for beta chain variable domain of TCR clone 203386 (TRBV19, TRBJ1-2)
CASSVPGQDGYTF

SEQ ID NO: 406773 - protein, 13 aa, Homo sapiens
  CDR3 for alpha chain variable domain of TCR clone 203387 (TRAV3, TRAJ21)
CAVREPDFNKFYF

SEQ ID NO: 406774 - protein, 17 aa, Homo sapiens
  CDR3 for beta chain variable domain of TCR clone 203387 (TRBV7-8, TRBJ2-6)
CASSAGTGGAGASVLTF

SEQ ID NO: 406775 - protein, 15 aa, Homo sapiens
  CDR3 for alpha chain variable domain of TCR clone 203388 (TRAV12-1, TRAJ42)
CVETRDGGSQGNLIF

SEQ ID NO: 406776 - protein, 14 aa, Homo sapiens
  CDR3 for beta chain variable domain of TCR clone 203388 (TRBV11-2, TRBJ2-3)
CASSLGGGANTQYF

SEQ ID NO: 406777 - protein, 14 aa, Homo sapiens
  CDR3 for alpha chain variable domain of TCR clone 203389 (TRAV16, TRAJ33)
CALSAMDSNYQLIW

SEQ ID NO: 406778 - protein, 16 aa, Homo sapiens
  CDR3 for beta chain variable domain of TCR clone 203389 (TRBV6-6, TRBJ1-5)
CASSYSTLVGNQPQHF

SEQ ID NO: 406779 - protein, 13 aa, Homo sapiens
  CDR3 for alpha chain variable domain of TCR clone 203390 (TRAV13-1, TRAJ43)
CAASKNNNNDMRF

SEQ ID NO: 406780 - protein, 13 aa, Homo sapiens
  CDR3 for beta chain variable domain of TCR clone 203390 (TRBV12-4, TRBJ2-7)
CASSPTETYEQYF

SEQ ID NO: 406781 - protein, 12 aa, Homo sapiens
  CDR3 for alpha chain variable domain of TCR clone 203391 (TRAV26-2, TRAJ48)
CILRKGNEKLTF

SEQ ID NO: 406782 - protein, 14 aa, Homo sapiens
  CDR3 for beta chain variable domain of TCR clone 203391 (TRBV28, TRBJ2-7)
CASSTLRGRFEQYC

SEQ ID NO: 406783 - protein, 12 aa, Homo sapiens
  CDR3 for alpha chain variable domain of TCR clone 203392 (TRAV12-1, TRAJ40)
CVVYPGTYKYIF

SEQ ID NO: 406784 - protein, 16 aa, Homo sapiens
  CDR3 for beta chain variable domain of TCR clone 203392 (TRBV7-6, TRBJ2-1)
CASSAPGPSSYNEQFF

SEQ ID NO: 406785 - protein, 11 aa, Homo sapiens
  CDR3 for alpha chain variable domain of TCR clone 203393 (TRAV12-1, TRAJ15)
CVVNAGTALIF

SEQ ID NO: 406786 - protein, 17 aa, Homo sapiens
  CDR3 for beta chain variable domain of TCR clone 203393 (TRBV2, TRBJ2-5)
CAGSPRGGGPSTSGQAR

SEQ ID NO: 406787 - protein, 14 aa, Homo sapiens
  CDR3 for alpha chain variable domain of TCR clone 203394 (TRAV13-1, TRAJ35)
CAASKGGFGHVLHC

SEQ ID NO: 406788 - protein, 14 aa, Homo sapiens
  CDR3 for beta chain variable domain of TCR clone 203394 (TRBV7-8, TRBJ2-3)
CASSFPDGQDTQYF

SEQ ID NO: 406789 - protein, 13 aa, Homo sapiens
  CDR3 for alpha chain variable domain of TCR clone 203395 (TRAV23/DV6, TRAJ17)
CAARGRAAGNTLT

SEQ ID NO: 406790 - protein, 13 aa, Homo sapiens
  CDR3 for beta chain variable domain of TCR clone 203395 (TRBV7-6, TRBJ1-2)
CASSLVADYGYTF

SEQ ID NO: 406791 - protein, 15 aa, Homo sapiens
  CDR3 for alpha chain variable domain of TCR clone 203396 (TRAV35, TRAJ40)
CAGQLGTSGTYKYIF

SEQ ID NO: 406792 - protein, 22 aa, Homo sapiens
  CDR3 for beta chain variable domain of TCR clone 203396 (TRBV7-3, TRBJ2-7)
GGTQPCISAPASSTGTGPEQYF

SEQ ID NO: 406793 - protein, 14 aa, Homo sapiens
  CDR3 for alpha chain variable domain of TCR clone 203397 (TRAV2, TRAJ42)
CAVVGGGSQGNLIF

SEQ ID NO: 406794 - protein, 16 aa, Homo sapiens
  CDR3 for beta chain variable domain of TCR clone 203397 (TRBV28, TRBJ1-5)
CASSLTGQGWNQPQHF

SEQ ID NO: 406795 - protein, 14 aa, Homo sapiens
  CDR3 for alpha chain variable domain of TCR clone 203398 (TRAV4, TRAJ9)
CLVGSGTGGFKTIF

SEQ ID NO: 406796 - protein, 15 aa, Homo sapiens
  CDR3 for beta chain variable domain of TCR clone 203398 (TRBV4-3, TRBJ2-1)
CASSQESAIYNEQFF

SEQ ID NO: 406797 - protein, 15 aa, Homo sapiens
  CDR3 for alpha chain variable domain of TCR clone 203399 (TRAV17, TRAJ23)
CATDAEDNQGGKLIF

SEQ ID NO: 406798 - protein, 12 aa, Homo sapiens
  CDR3 for beta chain variable domain of TCR clone 203399 (TRBV2, TRBJ2-1)
CAKPEGYNEQFF

SEQ ID NO: 406799 - protein, 16 aa, Homo sapiens
  CDR3 for alpha chain variable domain of TCR clone 203400 (TRAV27, TRAJ52)
CAGAGAGGTSFGKLTF

SEQ ID NO: 406800 - protein, 17 aa, Homo sapiens
  CDR3 for beta chain variable domain of TCR clone 203400 (TRBV24-1, TRBJ2-3)
CATSDLPSGEDTDTQYF

SEQ ID NO: 406801 - protein, 17 aa, Homo sapiens
  CDR3 for alpha chain variable domain of TCR clone 203401 (TRAV4, TRAJ42)
CLVGVLNYGGSQGNLIF

SEQ ID NO: 406802 - protein, 14 aa, Homo sapiens
  CDR3 for beta chain variable domain of TCR clone 203401 (TRBV6-1, TRBJ2-1)
CATFTSGQNNEQFF

SEQ ID NO: 406803 - protein, 16 aa, Homo sapiens
  CDR3 for alpha chain variable domain of TCR clone 203402 (TRAV8-3, TRAJ13)
CAVGAYPSGGYQKVTF

SEQ ID NO: 406804 - protein, 15 aa, Homo sapiens
  CDR3 for beta chain variable domain of TCR clone 203402 (TRBV6-3, TRBJ2-5)
CASRTRTSSRETQYF

SEQ ID NO: 406805 - protein, 14 aa, Homo sapiens
  CDR3 for alpha chain variable domain of TCR clone 203403 (TRAV12-3, TRAJ56)
CAMSVTGANSKLTF

SEQ ID NO: 406806 - protein, 15 aa, Homo sapiens
  CDR3 for beta chain variable domain of TCR clone 203403 (TRBV24-1, TRBJ2-1)
CATSGSGGFYNEQFF

SEQ ID NO: 406807 - protein, 11 aa, Homo sapiens
  CDR3 for alpha chain variable domain of TCR clone 203404 (TRAV17, TRAJ9)
CGFTGGFKTIF

SEQ ID NO: 406808 - protein, 14 aa, Homo sapiens
  CDR3 for beta chain variable domain of TCR clone 203404 (TRBV7-9, TRBJ2-2)
CASSLVQDTGGLFF

SEQ ID NO: 406809 - protein, 11 aa, Homo sapiens
  CDR3 for alpha chain variable domain of TCR clone 203405 (TRAV12-3, TRAJ27)
CARANAGKSTF

SEQ ID NO: 406810 - protein, 13 aa, Homo sapiens
  CDR3 for beta chain variable domain of TCR clone 203405 (TRBV20-1, TRBJ1-1)
CSARVGGNTEAFF

SEQ ID NO: 406811 - protein, 12 aa, Homo sapiens
  CDR3 for alpha chain variable domain of TCR clone 203406 (TRAV36/DV7, TRAJ54)
CAVVRGAQKLVF

SEQ ID NO: 406812 - protein, 12 aa, Homo sapiens
  CDR3 for beta chain variable domain of TCR clone 203406 (TRBV12-5, TRBJ2-5)
CASGQGVETQHF

SEQ ID NO: 406813 - protein, 14 aa, Homo sapiens
  CDR3 for alpha chain variable domain of TCR clone 203407 (TRAV17, TRAJ57)
CATDPQGGSEKLVF

SEQ ID NO: 406814 - protein, 14 aa, Homo sapiens
  CDR3 for beta chain variable domain of TCR clone 203407 (TRBV7-8, TRBJ2-7)
CASSPRDSVYEQYF

SEQ ID NO: 406815 - protein, 12 aa, Homo sapiens
  CDR3 for alpha chain variable domain of TCR clone 203408 (TRAV16, TRAJ10)
CSRTGGGNKLTF

SEQ ID NO: 406816 - protein, 13 aa, Homo sapiens
  CDR3 for beta chain variable domain of TCR clone 203408 (TRBV5-7, TRBJ1-1)
CASSLFQNTEAFF

SEQ ID NO: 406817 - protein, 13 aa, Homo sapiens
  CDR3 for alpha chain variable domain of TCR clone 203409 (TRAV20, TRAJ37)
CAVYSGNTGKLIF

SEQ ID NO: 406818 - protein, 16 aa, Homo sapiens
  CDR3 for beta chain variable domain of TCR clone 203409 (TRBV19, TRBJ2-1)
CASSKAGPSSYNEQFF

SEQ ID NO: 406819 - protein, 13 aa, Homo sapiens
  CDR3 for alpha chain variable domain of TCR clone 203410 (TRAV8-6, TRAJ40)
CAVSVTGTYKYIF

SEQ ID NO: 406820 - protein, 14 aa, Homo sapiens
  CDR3 for beta chain variable domain of TCR clone 203410 (TRBV4-1, TRBJ2-3)
CASPGTGNTRYAVF

SEQ ID NO: 406821 - protein, 13 aa, Homo sapiens
  CDR3 for alpha chain variable domain of TCR clone 203411 (TRAV13-1, TRAJ39)
CSKYSNAGNMLTF

SEQ ID NO: 406822 - protein, 15 aa, Homo sapiens
  CDR3 for beta chain variable domain of TCR clone 203411 (TRBV20-1, TRBJ1-1)
CSARGGGTLKLSLDK

SEQ ID NO: 406823 - protein, 10 aa, Homo sapiens
  CDR3 for alpha chain variable domain of TCR clone 203412 (TRAV8-2, TRAJ29)
CTGGNTPLVF

SEQ ID NO: 406824 - protein, 13 aa, Homo sapiens
  CDR3 for beta chain variable domain of TCR clone 203412 (TRBV20-1, TRBJ1-1)
CSARGGGNTESFF

SEQ ID NO: 406825 - protein, 15 aa, Homo sapiens
  CDR3 for alpha chain variable domain of TCR clone 203413 (TRAV26-1, TRAJ40)
CIVRVTTSGTYKYIF

SEQ ID NO: 406826 - protein, 12 aa, Homo sapiens
  CDR3 for beta chain variable domain of TCR clone 203413 (TRBV7-9, TRBJ1-4)
CASSTDREKLVF

SEQ ID NO: 406827 - protein, 14 aa, Homo sapiens
  CDR3 for alpha chain variable domain of TCR clone 203414 (TRAV12-2, TRAJ13)
CAVKKTVGYQKVTF

SEQ ID NO: 406828 - protein, 12 aa, Homo sapiens
  CDR3 for beta chain variable domain of TCR clone 203414 (TRBV29-1, TRBJ1-1)
CSESDGNTEAFF

SEQ ID NO: 406829 - protein, 20 aa, Homo sapiens
  CDR3 for alpha chain variable domain of TCR clone 203415 (TRAV12-3, TRAJ41)
SLSIRDSQPSDSATPEALNF

SEQ ID NO: 406830 - protein, 14 aa, Homo sapiens
  CDR3 for beta chain variable domain of TCR clone 203415 (TRBV7-8, TRBJ2-3)
CASSLEAGTDTQYF

SEQ ID NO: 406831 - protein, 14 aa, Homo sapiens
  CDR3 for alpha chain variable domain of TCR clone 203416 (TRAV14/DV4, TRAJ34)
CAMREGRPHRQAHL

SEQ ID NO: 406832 - protein, 15 aa, Homo sapiens
  CDR3 for beta chain variable domain of TCR clone 203416 (TRBV19, TRBJ1-2)
CASSVGQVFNYGDTF

SEQ ID NO: 406833 - protein, 14 aa, Homo sapiens
  CDR3 for alpha chain variable domain of TCR clone 203417 (TRAV1-1, TRAJ35)
CAVRSIGLGNVLHC

SEQ ID NO: 406834 - protein, 14 aa, Homo sapiens
  CDR3 for beta chain variable domain of TCR clone 203417 (TRBV19, TRBJ2-1)
CASPTFVLSGEQFF

SEQ ID NO: 406835 - protein, 15 aa, Homo sapiens
  CDR3 for alpha chain variable domain of TCR clone 203418 (TRAV17, TRAJ57)
CATGPSQGGSEKLVF

SEQ ID NO: 406836 - protein, 15 aa, Homo sapiens
  CDR3 for beta chain variable domain of TCR clone 203418 (TRBV9, TRBJ1-6)
CASGVAGTGDSPLHF

SEQ ID NO: 406837 - protein, 15 aa, Homo sapiens
  CDR3 for alpha chain variable domain of TCR clone 203419 (TRAV3, TRAJ20)
CAVRDIKLSDNKLSF

SEQ ID NO: 406838 - protein, 15 aa, Homo sapiens
  CDR3 for beta chain variable domain of TCR clone 203419 (TRBV7-9, TRBJ1-6)
RASSSPGRGNSPLHF

SEQ ID NO: 406839 - protein, 15 aa, Homo sapiens
  CDR3 for alpha chain variable domain of TCR clone 203420 (TRAV21, TRAJ53)
CATLNSGGSNYKLTF

SEQ ID NO: 406840 - protein, 16 aa, Homo sapiens
  CDR3 for beta chain variable domain of TCR clone 203420 (TRBV9, TRBJ2-1)
CASSVGGGGNYNEQFI

SEQ ID NO: 406841 - protein, 13 aa, Homo sapiens
  CDR3 for alpha chain variable domain of TCR clone 203421 (TRAV17, TRAJ9)
CATDYTGGFKTIF

SEQ ID NO: 406842 - protein, 14 aa, Homo sapiens
  CDR3 for beta chain variable domain of TCR clone 203421 (TRBV19, TRBJ2-5)
CACSMTGQQETQYF

SEQ ID NO: 406843 - protein, 22 aa, Homo sapiens
  CDR3 for alpha chain variable domain of TCR clone 203422 (TRAV8-2, TRAJ45)
HLTKPSAHMSDAAENSADGLTF

SEQ ID NO: 406844 - protein, 13 aa, Homo sapiens
  CDR3 for beta chain variable domain of TCR clone 203422 (TRBV7-3, TRBJ2-1)
CASSPVAYNEQFF

SEQ ID NO: 406845 - protein, 14 aa, Homo sapiens
  CDR3 for alpha chain variable domain of TCR clone 203423 (TRAV8-2, TRAJ37)
CGVSISGNTGKLIL

SEQ ID NO: 406846 - protein, 11 aa, Homo sapiens
  CDR3 for beta chain variable domain of TCR clone 203423 (TRBV18, TRBJ2-5)
CASSPRETQYF

SEQ ID NO: 406847 - protein, 14 aa, Homo sapiens
  CDR3 for alpha chain variable domain of TCR clone 203424 (TRAV8-3, TRAJ4)
CAVGAAGGYNKLIF

SEQ ID NO: 406848 - protein, 14 aa, Homo sapiens
  CDR3 for beta chain variable domain of TCR clone 203424 (TRBV5-4, TRBJ2-1)
CASSLDQGLNEQFF

SEQ ID NO: 406849 - protein, 15 aa, Homo sapiens
  CDR3 for alpha chain variable domain of TCR clone 203425 (TRAV3, TRAJ5)
CAVRDLDTGRRALTF

SEQ ID NO: 406850 - protein, 13 aa, Homo sapiens
  CDR3 for beta chain variable domain of TCR clone 203425 (TRBV12-4, TRBJ2-7)
CASSPTETWEQYF

SEQ ID NO: 406851 - protein, 12 aa, Homo sapiens
  CDR3 for alpha chain variable domain of TCR clone 203426 (TRAV13-1, TRAJ5)
CAVDTGRRALTF

SEQ ID NO: 406852 - protein, 16 aa, Homo sapiens
  CDR3 for beta chain variable domain of TCR clone 203426 (TRBV7-3, TRBJ2-2)
CASSLKRGTLSGELFF

SEQ ID NO: 406853 - protein, 12 aa, Homo sapiens
  CDR3 for alpha chain variable domain of TCR clone 203427 (TRAV8-3, TRAJ26)
CAGDNYGQNFVF

SEQ ID NO: 406854 - protein, 15 aa, Homo sapiens
  CDR3 for beta chain variable domain of TCR clone 203427 (TRBV7-2, TRBJ1-2)
CASSPRAGWNYGDTF

SEQ ID NO: 406855 - protein, 13 aa, Homo sapiens
  CDR3 for alpha chain variable domain of TCR clone 203428 (TRAV13-1, TRAJ39)
CSQYSNAGNMLTF

SEQ ID NO: 406856 - protein, 16 aa, Homo sapiens
  CDR3 for beta chain variable domain of TCR clone 203428 (TRBV20-1, TRBJ1-4)
CSVPGQGLLTNEKLFF

SEQ ID NO: 406857 - protein, 14 aa, Homo sapiens
  CDR3 for alpha chain variable domain of TCR clone 203429 (TRAV1-2, TRAJ29)
CAVRELTSATPLVF

SEQ ID NO: 406858 - protein, 14 aa, Homo sapiens
  CDR3 for beta chain variable domain of TCR clone 203429 (TRBV7-2, TRBJ2-1)
CASSLGVGYNEQFF

SEQ ID NO: 406859 - protein, 15 aa, Homo sapiens
  CDR3 for alpha chain variable domain of TCR clone 203430 (TRAV3, TRAJ5)
CAVRDLDTCRRALTF

SEQ ID NO: 406860 - protein, 13 aa, Homo sapiens
  CDR3 for beta chain variable domain of TCR clone 203430 (TRBV20-1, TRBJ2-5)
CSARDSKQATQYF

SEQ ID NO: 406861 - protein, 15 aa, Homo sapiens
  CDR3 for alpha chain variable domain of TCR clone 203431 (TRAV21, TRAJ45)
CAVSYSGGGADGLTF

SEQ ID NO: 406862 - protein, 13 aa, Homo sapiens
  CDR3 for beta chain variable domain of TCR clone 203431 (TRBV7-9, TRBJ2-3)
CASSAAGSDTQYF

SEQ ID NO: 406863 - protein, 14 aa, Homo sapiens
  CDR3 for alpha chain variable domain of TCR clone 203432 (TRAV40, TRAJ41)
CLLGPLNSGYALNF

SEQ ID NO: 406864 - protein, 11 aa, Homo sapiens
  CDR3 for beta chain variable domain of TCR clone 203432 (TRBV19, TRBJ2-7)
CASSILGEQYF

SEQ ID NO: 406865 - protein, 10 aa, Homo sapiens
  CDR3 for alpha chain variable domain of TCR clone 203433 (TRAV8-4, TRAJ43)
CAVSADDMRF

SEQ ID NO: 406866 - protein, 14 aa, Homo sapiens
  CDR3 for beta chain variable domain of TCR clone 203433 (TRBV4-2, TRBJ2-1)
CASGLDRAYNEQFF

SEQ ID NO: 406867 - protein, 17 aa, Homo sapiens
  CDR3 for alpha chain variable domain of TCR clone 203434 (TRAV3, TRAJ6)
CAVRDGPRAGGSNIPTF

SEQ ID NO: 406868 - protein, 15 aa, Homo sapiens
  CDR3 for beta chain variable domain of TCR clone 203434 (TRBV11-3, TRBJ2-7)
CASSPGPASSYEQYF

SEQ ID NO: 406869 - protein, 10 aa, Homo sapiens
  CDR3 for alpha chain variable domain of TCR clone 203435 (TRAV1-2, TRAJ31)
CVSEDARLMF

SEQ ID NO: 406870 - protein, 15 aa, Homo sapiens
  CDR3 for beta chain variable domain of TCR clone 203435 (TRBV5-4, TRBJ1-1)
CASSSLGWANTEAFF

SEQ ID NO: 406871 - protein, 19 aa, Homo sapiens
  CDR3 for alpha chain variable domain of TCR clone 203436 (TRAV26-1, TRAJ28)
CIVRVAHAYSGAGSYQLTF

SEQ ID NO: 406872 - protein, 12 aa, Homo sapiens
  CDR3 for beta chain variable domain of TCR clone 203436 (TRBV12-4, TRBJ2-7)
CASSLGGYEQYF

SEQ ID NO: 406873 - protein, 14 aa, Homo sapiens
  CDR3 for alpha chain variable domain of TCR clone 203437 (TRAV26-2, TRAJ31)
CILIPGNNNARLMF

SEQ ID NO: 406874 - protein, 13 aa, Homo sapiens
  CDR3 for beta chain variable domain of TCR clone 203437 (TRBV7-3, TRBJ2-1)
CASSQAGGDGQFF

SEQ ID NO: 406875 - protein, 11 aa, Homo sapiens
  CDR3 for alpha chain variable domain of TCR clone 203438 (TRAV3, TRAJ31)
CAALPGARLMF

SEQ ID NO: 406876 - protein, 12 aa, Homo sapiens
  CDR3 for beta chain variable domain of TCR clone 203438 (TRBV7-8, TRBJ2-7)
CASSLGDREQYF

SEQ ID NO: 406877 - protein, 13 aa, Homo sapiens
  CDR3 for alpha chain variable domain of TCR clone 203439 (TRAV12-1, TRAJ13)
CVVGTGGYQEVTF

SEQ ID NO: 406878 - protein, 16 aa, Homo sapiens
  CDR3 for beta chain variable domain of TCR clone 203439 (TRBV7-3, TRBJ2-1)
CASSLEGYRSYNEQFF

SEQ ID NO: 406879 - protein, 15 aa, Homo sapiens
  CDR3 for alpha chain variable domain of TCR clone 203440 (TRAV4, TRAJ39)
CLVGPNNNAGYMLTF

SEQ ID NO: 406880 - protein, 13 aa, Homo sapiens
  CDR3 for beta chain variable domain of TCR clone 203440 (TRBV11-2, TRBJ2-5)
CASSSTGEETQYF

SEQ ID NO: 406881 - protein, 11 aa, Homo sapiens
  CDR3 for alpha chain variable domain of TCR clone 203441 (TRAV35, TRAJ34)
CWARNTVKLIF

SEQ ID NO: 406882 - protein, 14 aa, Homo sapiens
  CDR3 for beta chain variable domain of TCR clone 203441 (TRBV5-1, TRBJ2-7)
CASSRGESLYEQYF

SEQ ID NO: 406883 - protein, 12 aa, Homo sapiens
  CDR3 for alpha chain variable domain of TCR clone 203442 (TRAV21, TRAJ33)
CTKMDSKYQLIW

SEQ ID NO: 406884 - protein, 14 aa, Homo sapiens
  CDR3 for beta chain variable domain of TCR clone 203442 (TRBV2, TRBJ2-7)
CASSLTSGGYEQYF

SEQ ID NO: 406885 - protein, 16 aa, Homo sapiens
  CDR3 for alpha chain variable domain of TCR clone 203443 (TRAV13-1, TRAJ18)
CAASRMRGSTLGRLYF

SEQ ID NO: 406886 - protein, 14 aa, Homo sapiens
  CDR3 for beta chain variable domain of TCR clone 203443 (TRBV12-5, TRBJ2-5)
CASGSRTHQETQYF

SEQ ID NO: 406887 - protein, 14 aa, Homo sapiens
  CDR3 for alpha chain variable domain of TCR clone 203444 (TRAV13-1, TRAJ24)
CAASPADSWGKFQF

SEQ ID NO: 406888 - protein, 14 aa, Homo sapiens
  CDR3 for beta chain variable domain of TCR clone 203444 (TRBV2, TRBJ1-1)
CASRSGTMNTGAFF

SEQ ID NO: 406889 - protein, 14 aa, Homo sapiens
  CDR3 for alpha chain variable domain of TCR clone 203445 (TRAV8-3, TRAJ4)
CAVGAAGGYNKLIF

SEQ ID NO: 406890 - protein, 16 aa, Homo sapiens
  CDR3 for beta chain variable domain of TCR clone 203445 (TRBV13, TRBJ2-2)
CASSTRTGEHTGELFF

SEQ ID NO: 406891 - protein, 13 aa, Homo sapiens
  CDR3 for alpha chain variable domain of TCR clone 203446 (TRAV25, TRAJ30)
CAGLVDRYDKIIF

SEQ ID NO: 406892 - protein, 17 aa, Homo sapiens
  CDR3 for beta chain variable domain of TCR clone 203446 (TRBV7-9, TRBJ2-6)
CASSFGAGYFGANVLTF

SEQ ID NO: 406893 - protein, 14 aa, Homo sapiens
  CDR3 for alpha chain variable domain of TCR clone 203447 (TRAV16, TRAJ33)
CALSAMDSNYQLLW

SEQ ID NO: 406894 - protein, 12 aa, Homo sapiens
  CDR3 for beta chain variable domain of TCR clone 203447 (TRBV5-1, TRBJ1-2)
CASSQDTYGYTF

SEQ ID NO: 406895 - protein, 14 aa, Homo sapiens
  CDR3 for alpha chain variable domain of TCR clone 203448 (TRAV12-2, TRAJ13)
CAVKKTGGYQKVTF

SEQ ID NO: 406896 - protein, 16 aa, Homo sapiens
  CDR3 for beta chain variable domain of TCR clone 203448 (TRBV5-1, TRBJ2-7)
CASSRGNHCTSSTSGR

SEQ ID NO: 406897 - protein, 13 aa, Homo sapiens
  CDR3 for alpha chain variable domain of TCR clone 203449 (TRAV30, TRAJ49)
CGTEPNTGIQFYF

SEQ ID NO: 406898 - protein, 14 aa, Homo sapiens
  CDR3 for beta chain variable domain of TCR clone 203449 (TRBV29-1, TRBJ2-1)
CSVEFRGIPFEQFF

SEQ ID NO: 406899 - protein, 12 aa, Homo sapiens
  CDR3 for alpha chain variable domain of TCR clone 203450 (TRAV2, TRAJ9)
CALGAGVFKTIF

SEQ ID NO: 406900 - protein, 16 aa, Homo sapiens
  CDR3 for beta chain variable domain of TCR clone 203450 (TRBV13, TRBJ2-2)
CASSPRTGEHTGELFF

SEQ ID NO: 406901 - protein, 16 aa, Homo sapiens
  CDR3 for alpha chain variable domain of TCR clone 203451 (TRAV30, TRAJ24)
CGTEIVDADSWGKFQF

SEQ ID NO: 406902 - protein, 15 aa, Homo sapiens
  CDR3 for beta chain variable domain of TCR clone 203451 (TRBV12-4, TRBJ2-2)
CASSPQPGSTGELFF

SEQ ID NO: 406903 - protein, 14 aa, Homo sapiens
  CDR3 for alpha chain variable domain of TCR clone 203452 (TRAV17, TRAJ57)
RATDPQGGSEKLVF

SEQ ID NO: 406904 - protein, 18 aa, Homo sapiens
  CDR3 for beta chain variable domain of TCR clone 203452 (TRBV25-1, TRBJ2-1)
CASSESRAGGPGYNEQFF

SEQ ID NO: 406905 - protein, 13 aa, Homo sapiens
  CDR3 for alpha chain variable domain of TCR clone 203453 (TRAV13-1, TRAJ39)
CAASIWAGNMLTF

SEQ ID NO: 406906 - protein, 12 aa, Homo sapiens
  CDR3 for beta chain variable domain of TCR clone 203453 (TRBV11-2, TRBJ1-3)
CQQLEPVNTIYF

SEQ ID NO: 406907 - protein, 13 aa, Homo sapiens
  CDR3 for alpha chain variable domain of TCR clone 203454 (TRAV23/DV6, TRAJ48)
CAAIPERNEKLTF

SEQ ID NO: 406908 - protein, 16 aa, Homo sapiens
  CDR3 for beta chain variable domain of TCR clone 203454 (TRBV19, TRBJ2-2)
CASRSPGTGATGELFF

SEQ ID NO: 406909 - protein, 13 aa, Homo sapiens
  CDR3 for alpha chain variable domain of TCR clone 203455 (TRAV21, TRAJ27)
CAERPGNAGKSTF

SEQ ID NO: 406910 - protein, 13 aa, Homo sapiens
  CDR3 for beta chain variable domain of TCR clone 203455 (TRBV7-3, TRBJ2-7)
CASSQAGGYEQYF

SEQ ID NO: 406911 - protein, 17 aa, Homo sapiens
  CDR3 for alpha chain variable domain of TCR clone 203456 (TRAV13-1, TRAJ23)
CAASKRFHRLRKAYLRT

SEQ ID NO: 406912 - protein, 14 aa, Homo sapiens
  CDR3 for beta chain variable domain of TCR clone 203456 (TRBV13, TRBJ2-5)
CASSLERVGETQYF

SEQ ID NO: 406913 - protein, 14 aa, Homo sapiens
  CDR3 for alpha chain variable domain of TCR clone 203457 (TRAV26-1, TRAJ38)
CIADNAGNNRKLIL

SEQ ID NO: 406914 - protein, 13 aa, Homo sapiens
  CDR3 for beta chain variable domain of TCR clone 203457 (TRBV20-1, TRBJ1-1)
CNARGGGNTEAFF

SEQ ID NO: 406915 - protein, 14 aa, Homo sapiens
  CDR3 for alpha chain variable domain of TCR clone 203458 (TRAV12-2, TRAJ3)
CAVKGYSSASKIIF

SEQ ID NO: 406916 - protein, 15 aa, Homo sapiens
  CDR3 for beta chain variable domain of TCR clone 203458 (TRBV7-3, TRBJ2-2)
CASSETGQGTGELFF

SEQ ID NO: 406917 - protein, 14 aa, Homo sapiens
  CDR3 for alpha chain variable domain of TCR clone 203459 (TRAV16, TRAJ39)
CALSKNNAGNMLTF

SEQ ID NO: 406918 - protein, 16 aa, Homo sapiens
  CDR3 for beta chain variable domain of TCR clone 203459 (TRBV6-6, TRBJ2-1)
CASSYSFSGTYNEQFF

SEQ ID NO: 406919 - protein, 12 aa, Homo sapiens
  CDR3 for alpha chain variable domain of TCR clone 203460 (TRAV27, TRAJ38)
CADAVMLATTIP

SEQ ID NO: 406920 - protein, 13 aa, Homo sapiens
  CDR3 for beta chain variable domain of TCR clone 203460 (TRBV12-5, TRBJ2-3)
CASGDRQSDTQYF

SEQ ID NO: 406921 - protein, 14 aa, Homo sapiens
  CDR3 for alpha chain variable domain of TCR clone 203461 (TRAV13-1, TRAJ44)
CSAKATGTASKLTF

SEQ ID NO: 406922 - protein, 16 aa, Homo sapiens
  CDR3 for beta chain variable domain of TCR clone 203461 (TRBV15, TRBJ1-2)
CATSRGPRTGGGGYTF

SEQ ID NO: 406923 - protein, 12 aa, Homo sapiens
  CDR3 for alpha chain variable domain of TCR clone 203462 (TRAV13-1, TRAJ53)
AASGGSNYKLTF

SEQ ID NO: 406924 - protein, 16 aa, Homo sapiens
  CDR3 for beta chain variable domain of TCR clone 203462 (TRBV28, TRBJ2-6)
CASSNRWGSGANVLTF

SEQ ID NO: 406925 - protein, 11 aa, Homo sapiens
  CDR3 for alpha chain variable domain of TCR clone 203463 (TRAV12-1, TRAJ43)
CVEYDNNDMRF

SEQ ID NO: 406926 - protein, 14 aa, Homo sapiens
  CDR3 for beta chain variable domain of TCR clone 203463 (TRBV19, TRBJ2-7)
CASSLRDRGYEQYF

SEQ ID NO: 406927 - protein, 16 aa, Homo sapiens
  CDR3 for alpha chain variable domain of TCR clone 203464 (TRAV12-3, TRAJ53)
CAMSPGSGGSNYKLTF

SEQ ID NO: 406928 - protein, 14 aa, Homo sapiens
  CDR3 for beta chain variable domain of TCR clone 203464 (TRBV7-2, TRBJ1-1)
CASSFLTGTTKAFF

SEQ ID NO: 406929 - protein, 11 aa, Homo sapiens
  CDR3 for alpha chain variable domain of TCR clone 203465 (TRAV13-1, TRAJ34)
CASSPTDKLIF

SEQ ID NO: 406930 - protein, 15 aa, Homo sapiens
  CDR3 for beta chain variable domain of TCR clone 203465 (TRBV10-2, TRBJ2-6)
CASSTQSPGANVLTF

SEQ ID NO: 406931 - protein, 13 aa, Homo sapiens
  CDR3 for alpha chain variable domain of TCR clone 203466 (TRAV13-1, TRAJ43)
CAASLSNNNDMRF

SEQ ID NO: 406932 - protein, 15 aa, Homo sapiens
  CDR3 for beta chain variable domain of TCR clone 203466 (TRBV5-1, TRBJ2-1)
CASSQAGYWWDEQFF

SEQ ID NO: 406933 - protein, 11 aa, Homo sapiens
  CDR3 for alpha chain variable domain of TCR clone 203467 (TRAV12-3, TRAJ41)
CAMNSREALNF

SEQ ID NO: 406934 - protein, 16 aa, Homo sapiens
  CDR3 for beta chain variable domain of TCR clone 203467 (TRBV7-8, TRBJ2-3)
CASSTEGQRETDTQYF

SEQ ID NO: 406935 - protein, 17 aa, Homo sapiens
  CDR3 for alpha chain variable domain of TCR clone 203468 (TRAV26-1, TRAJ37)
CIVRVITVSSNTGNLIF

SEQ ID NO: 406936 - protein, 13 aa, Homo sapiens
  CDR3 for beta chain variable domain of TCR clone 203468 (TRBV2, TRBJ2-7)
CASSVGGSGEQYF

SEQ ID NO: 406937 - protein, 15 aa, Homo sapiens
  CDR3 for alpha chain variable domain of TCR clone 203469 (TRAV17, TRAJ54)
CATTRSEQGAQKLVF

SEQ ID NO: 406938 - protein, 16 aa, Homo sapiens
  CDR3 for beta chain variable domain of TCR clone 203469 (TRBV4-3, TRBJ2-2)
CASSQDLSGGYGELFF

SEQ ID NO: 406939 - protein, 15 aa, Homo sapiens
  CDR3 for alpha chain variable domain of TCR clone 203470 (TRAV3, TRAJ5)
CAVRDLNTGRRALTF

SEQ ID NO: 406940 - protein, 14 aa, Homo sapiens
  CDR3 for beta chain variable domain of TCR clone 203470 (TRBV6-1, TRBJ1-3)
CASVQGGGGNTIYF

SEQ ID NO: 406941 - protein, 14 aa, Homo sapiens
  CDR3 for alpha chain variable domain of TCR clone 203471 (TRAV3, TRAJ21)
CAVRDAYNFNKFYF

SEQ ID NO: 406942 - protein, 13 aa, Homo sapiens
  CDR3 for beta chain variable domain of TCR clone 203471 (TRBV7-3, TRBJ1-2)
CASSLKRGYGYTF

SEQ ID NO: 406943 - protein, 15 aa, Homo sapiens
  CDR3 for alpha chain variable domain of TCR clone 203472 (TRAV21, TRAJ53)
CATLNSGGSNYKLTF

SEQ ID NO: 406944 - protein, 14 aa, Homo sapiens
  CDR3 for beta chain variable domain of TCR clone 203472 (TRBV7-8, TRBJ2-3)
CASSFPDGQDTQYF

SEQ ID NO: 406945 - protein, 12 aa, Homo sapiens
  CDR3 for alpha chain variable domain of TCR clone 203473 (TRAV12-3, TRAJ17)
CAMTLTGNELTF

SEQ ID NO: 406946 - protein, 14 aa, Homo sapiens
  CDR3 for beta chain variable domain of TCR clone 203473 (TRBV7-2, TRBJ2-5)
CASSPRGSSETQYF

SEQ ID NO: 406947 - protein, 13 aa, Homo sapiens
  CDR3 for alpha chain variable domain of TCR clone 203474 (TRAV8-6, TRAJ49)
CAVITNTGNQFYF

SEQ ID NO: 406948 - protein, 13 aa, Homo sapiens
  CDR3 for beta chain variable domain of TCR clone 203474 (TRBV7-2, TRBJ1-1)
CASNLKGAKVAFF

SEQ ID NO: 406949 - protein, 12 aa, Homo sapiens
  CDR3 for alpha chain variable domain of TCR clone 203475 (TRAV21, TRAJ23)
CAVMLQGGRLIC

SEQ ID NO: 406950 - protein, 14 aa, Homo sapiens
  CDR3 for beta chain variable domain of TCR clone 203475 (TRBV7-9, TRBJ1-4)
CAITEGEANEKLFF

SEQ ID NO: 406951 - protein, 12 aa, Homo sapiens
  CDR3 for alpha chain variable domain of TCR clone 203476 (TRAV1-1, TRAJ8)
CAGGTGFQKFVF

SEQ ID NO: 406952 - protein, 13 aa, Homo sapiens
  CDR3 for beta chain variable domain of TCR clone 203476 (TRBV7-9, TRBJ1-2)
CASSLKQNYGYTF

SEQ ID NO: 406953 - protein, 19 aa, Homo sapiens
  CDR3 for alpha chain variable domain of TCR clone 203477 (TRAV40, )
CLPIPDIQNPDPAVYQLRH

SEQ ID NO: 406954 - protein, 15 aa, Homo sapiens
  CDR3 for beta chain variable domain of TCR clone 203477 (TRBV2, TRBJ1-2)
CASSEIGGANYGYTF

SEQ ID NO: 406955 - protein, 14 aa, Homo sapiens
  CDR3 for alpha chain variable domain of TCR clone 203478 (TRAV3, TRAJ33)
SAVRDMGSNYQLIW

SEQ ID NO: 406956 - protein, 17 aa, Homo sapiens
  CDR3 for beta chain variable domain of TCR clone 203478 (TRBV19, TRBJ2-1)
CASSIWSAQPTHNEQFF

SEQ ID NO: 406957 - protein, 20 aa, Homo sapiens
  CDR3 for alpha chain variable domain of TCR clone 203479 (TRAV1-1, TRAJ4)
CLLLLRCEGFLSGGYNKLIF

SEQ ID NO: 406958 - protein, 16 aa, Homo sapiens
  CDR3 for beta chain variable domain of TCR clone 203479 (TRBV28, TRBJ1-4)
CASSTPYRGRSEKLFF

SEQ ID NO: 406959 - protein, 14 aa, Homo sapiens
  CDR3 for alpha chain variable domain of TCR clone 203480 (TRAV23/DV6, TRAJ57)
CAASNQGGSEKPVF

SEQ ID NO: 406960 - protein, 13 aa, Homo sapiens
  CDR3 for beta chain variable domain of TCR clone 203480 (TRBV11-2, TRBJ2-7)
CASSSYPSYEQYF

SEQ ID NO: 406961 - protein, 11 aa, Homo sapiens
  CDR3 for alpha chain variable domain of TCR clone 203481 (TRAV2, TRAJ13)
CASGGYQKVTF

SEQ ID NO: 406962 - protein, 17 aa, Homo sapiens
  CDR3 for beta chain variable domain of TCR clone 203481 (TRBV4-1, TRBJ2-5)
CASSQDLTGGPIETQYF

SEQ ID NO: 406963 - protein, 13 aa, Homo sapiens
  CDR3 for alpha chain variable domain of TCR clone 203482 (TRAV29/DV5, TRAJ34)
CAARVDNTDKLIF

SEQ ID NO: 406964 - protein, 17 aa, Homo sapiens
  CDR3 for beta chain variable domain of TCR clone 203482 (TRBV7-3, TRBJ2-5)
CASSLGRGRSGSETQYF

SEQ ID NO: 406965 - protein, 12 aa, Homo sapiens
  CDR3 for alpha chain variable domain of TCR clone 203483 (TRAV12-1, TRAJ40)
CVVYSGTYKYIF

SEQ ID NO: 406966 - protein, 18 aa, Homo sapiens
  CDR3 for beta chain variable domain of TCR clone 203483 (TRBV11-2, TRBJ2-3)
CASSFEGASRGAPNTQYF

SEQ ID NO: 406967 - protein, 15 aa, Homo sapiens
  CDR3 for alpha chain variable domain of TCR clone 203484 (TRAV20, TRAJ4)
CAVEGSSGSYNKLIF

SEQ ID NO: 406968 - protein, 14 aa, Homo sapiens
  CDR3 for beta chain variable domain of TCR clone 203484 (TRBV7-8, TRBJ2-7)
CASTLGGALGEQYF

SEQ ID NO: 406969 - protein, 13 aa, Homo sapiens
  CDR3 for alpha chain variable domain of TCR clone 203485 (TRAV3, TRAJ30)
CAVRDRGDDKFIF

SEQ ID NO: 406970 - protein, 14 aa, Homo sapiens
  CDR3 for beta chain variable domain of TCR clone 203485 (TRBV5-1, TRBJ1-1)
CASSRTTGDTEAFF

SEQ ID NO: 406971 - protein, 11 aa, Homo sapiens
  CDR3 for alpha chain variable domain of TCR clone 203486 (TRAV1-2, TRAJ40)
CAVPGTYKYIF

SEQ ID NO: 406972 - protein, 15 aa, Homo sapiens
  CDR3 for beta chain variable domain of TCR clone 203486 (TRBV5-7, TRBJ1-5)
CASSYGKVWDQTQHF

SEQ ID NO: 406973 - protein, 15 aa, Homo sapiens
  CDR3 for alpha chain variable domain of TCR clone 203487 (TRAV8-3, TRAJ45)
CVSSYSGGGADGLTF

SEQ ID NO: 406974 - protein, 13 aa, Homo sapiens
  CDR3 for beta chain variable domain of TCR clone 203487 (TRBV20-1, TRBJ2-2)
CSASAAGTGELFF

SEQ ID NO: 406975 - protein, 15 aa, Homo sapiens
  CDR3 for alpha chain variable domain of TCR clone 203488 (TRAV26-1, TRAJ40)
CIDRYATSGTYKYIF

SEQ ID NO: 406976 - protein, 11 aa, Homo sapiens
  CDR3 for beta chain variable domain of TCR clone 203488 (TRBV7-9, TRBJ2-1)
CASSSQKEQFF

SEQ ID NO: 406977 - protein, 13 aa, Homo sapiens
  CDR3 for alpha chain variable domain of TCR clone 203489 (TRAV8-2, TRAJ9)
CVVRATGDFKTIF

SEQ ID NO: 406978 - protein, 17 aa, Homo sapiens
  CDR3 for beta chain variable domain of TCR clone 203489 (TRBV11-2, TRBJ2-1)
CASSLYPPGVEYNEQFF

SEQ ID NO: 406979 - protein, 13 aa, Homo sapiens
  CDR3 for alpha chain variable domain of TCR clone 203490 (TRAV8-3, TRAJ44)
CAVVPGTASKLTF

SEQ ID NO: 406980 - protein, 13 aa, Homo sapiens
  CDR3 for beta chain variable domain of TCR clone 203490 (TRBV12-4, TRBJ1-2)
CASSLRQGKGYTF

SEQ ID NO: 406981 - protein, 12 aa, Homo sapiens
  CDR3 for alpha chain variable domain of TCR clone 203491 (TRAV8-3, TRAJ22)
FGGQSSAGQLTF

SEQ ID NO: 406982 - protein, 15 aa, Homo sapiens
  CDR3 for beta chain variable domain of TCR clone 203491 (TRBV20-1, TRBJ1-1)
CSASRGVTGNTEAFF

SEQ ID NO: 406983 - protein, 13 aa, Homo sapiens
  CDR3 for alpha chain variable domain of TCR clone 203492 (TRAV13-2, TRAJ40)
CAGLISGTYKYIF

SEQ ID NO: 406984 - protein, 14 aa, Homo sapiens
  CDR3 for beta chain variable domain of TCR clone 203492 (TRBV19, TRBJ1-5)
CASGTEVYNQHQHF

SEQ ID NO: 406985 - protein, 15 aa, Homo sapiens
  CDR3 for alpha chain variable domain of TCR clone 203493 (TRAV4, TRAJ39)
CLVGPHNNAGNMLTF

SEQ ID NO: 406986 - protein, 13 aa, Homo sapiens
  CDR3 for beta chain variable domain of TCR clone 203493 (TRBV11-2, TRBJ2-5)
CASSSTGEETQYA

SEQ ID NO: 406987 - protein, 16 aa, Homo sapiens
  CDR3 for alpha chain variable domain of TCR clone 203494 (TRAV20, TRAJ22)
CAVQASSSGSARQLTF

SEQ ID NO: 406988 - protein, 16 aa, Homo sapiens
  CDR3 for beta chain variable domain of TCR clone 203494 (TRBV11-3, TRBJ2-5)
CASSSVVAGSTETQYY

SEQ ID NO: 406989 - protein, 15 aa, Homo sapiens
  CDR3 for alpha chain variable domain of TCR clone 203495 (TRAV17, TRAJ16)
FATALRSSDGQKLLF

SEQ ID NO: 406990 - protein, 15 aa, Homo sapiens
  CDR3 for beta chain variable domain of TCR clone 203495 (TRBV20-1, TRBJ1-1)
CSASRGVTGNTEAFF

SEQ ID NO: 406991 - protein, 17 aa, Homo sapiens
  CDR3 for alpha chain variable domain of TCR clone 203496 (TRAV3, TRAJ6)
CAVRDGPRAGGSYIPTF

SEQ ID NO: 406992 - protein, 14 aa, Homo sapiens
  CDR3 for beta chain variable domain of TCR clone 203496 (TRBV7-2, TRBJ2-7)
CASGPKTSFYEQSF

SEQ ID NO: 406993 - protein, 14 aa, Homo sapiens
  CDR3 for alpha chain variable domain of TCR clone 203497 (TRAV1-2, TRAJ16)
CAVNRVSDGQKLLF

SEQ ID NO: 406994 - protein, 16 aa, Homo sapiens
  CDR3 for beta chain variable domain of TCR clone 203497 (TRBV12-4, TRBJ1-5)
CASSRPVGGSNQPQHF

SEQ ID NO: 406995 - protein, 15 aa, Homo sapiens
  CDR3 for alpha chain variable domain of TCR clone 203498 (TRAV27, TRAJ38)
CAARRNAGNNRKLIW

SEQ ID NO: 406996 - protein, 14 aa, Homo sapiens
  CDR3 for beta chain variable domain of TCR clone 203498 (TRBV13, TRBJ2-7)
CASSLKGASYEQYF

SEQ ID NO: 406997 - protein, 13 aa, Homo sapiens
  CDR3 for alpha chain variable domain of TCR clone 203499 (TRAV17, TRAJ22)
CAGRRGSARQLTS

SEQ ID NO: 406998 - protein, 14 aa, Homo sapiens
  CDR3 for beta chain variable domain of TCR clone 203499 (TRBV19, TRBJ1-1)
CASSITGWETEAFF

SEQ ID NO: 406999 - protein, 16 aa, Homo sapiens
  CDR3 for alpha chain variable domain of TCR clone 203500 (TRAV3, TRAJ10)
CAVRDMRAGGGNKLTF

SEQ ID NO: 407000 - protein, 14 aa, Homo sapiens
  CDR3 for beta chain variable domain of TCR clone 203500 (TRBV4-1, TRBJ2-2)
RASSRAVNTGELFF

SEQ ID NO: 407001 - protein, 15 aa, Homo sapiens
  CDR3 for alpha chain variable domain of TCR clone 203501 (TRAV19, TRAJ8)
CALSGPNTGFQKLVF

SEQ ID NO: 407002 - protein, 11 aa, Homo sapiens
  CDR3 for beta chain variable domain of TCR clone 203501 (TRBV11-2, TRBJ1-1)
CASSINTEAFF

SEQ ID NO: 407003 - protein, 12 aa, Homo sapiens
  CDR3 for alpha chain variable domain of TCR clone 203502 (TRAV20, TRAJ39)
CAVGNAGNMLTF

SEQ ID NO: 407004 - protein, 14 aa, Homo sapiens
  CDR3 for beta chain variable domain of TCR clone 203502 (TRBV20-1, TRBJ2-7)
CSAKRRRSSYEQYF

SEQ ID NO: 407005 - protein, 11 aa, Homo sapiens
  CDR3 for alpha chain variable domain of TCR clone 203503 (TRAV1-2, TRAJ20)
CAVANDYKLRF

SEQ ID NO: 407006 - protein, 15 aa, Homo sapiens
  CDR3 for beta chain variable domain of TCR clone 203503 (TRBV28, TRBJ2-1)
CASSIIAGGRSEQFF

SEQ ID NO: 407007 - protein, 13 aa, Homo sapiens
  CDR3 for alpha chain variable domain of TCR clone 203504 (TRAV12-2, TRAJ50)
CAVIVTSYDKVIF

SEQ ID NO: 407008 - protein, 15 aa, Homo sapiens
  CDR3 for beta chain variable domain of TCR clone 203504 (TRBV7-2, TRBJ1-2)
CASSPRAGWNYGYTF

SEQ ID NO: 407009 - protein, 16 aa, Homo sapiens
  CDR3 for alpha chain variable domain of TCR clone 203505 (TRAV12-3, TRAJ53)
CAMSPGSGGSNYKLTF

SEQ ID NO: 407010 - protein, 13 aa, Homo sapiens
  CDR3 for beta chain variable domain of TCR clone 203505 (TRBV11-2, TRBJ2-1)
CASSLDLVNEQFF

SEQ ID NO: 407011 - protein, 15 aa, Homo sapiens
  CDR3 for alpha chain variable domain of TCR clone 203506 (TRAV20, TRAJ6)
CAVRLQSGGSYIPTF

SEQ ID NO: 407012 - protein, 14 aa, Homo sapiens
  CDR3 for beta chain variable domain of TCR clone 203506 (TRBV12-4, TRBJ2-7)
CPSSASGGWYEQYF

SEQ ID NO: 407013 - protein, 15 aa, Homo sapiens
  CDR3 for alpha chain variable domain of TCR clone 203507 (TRAV8-3, TRAJ11)
CAVGLLNPGYSTLTF

SEQ ID NO: 407014 - protein, 15 aa, Homo sapiens
  CDR3 for beta chain variable domain of TCR clone 203507 (TRBV13, TRBJ2-1)
CASSVLSGLNNEQFF

SEQ ID NO: 407015 - protein, 14 aa, Homo sapiens
  CDR3 for alpha chain variable domain of TCR clone 203508 (TRAV21, TRAJ35)
CAVMPIGFGNVLNC

SEQ ID NO: 407016 - protein, 13 aa, Homo sapiens
  CDR3 for beta chain variable domain of TCR clone 203508 (TRBV23-1, TRAJ31)
CASRGKFNEKLFF

SEQ ID NO: 407017 - protein, 14 aa, Homo sapiens
  CDR3 for alpha chain variable domain of TCR clone 203509 (TRAV12-2, TRAJ40)
CAVKIPSGPYKYIF

SEQ ID NO: 407018 - protein, 17 aa, Homo sapiens
  CDR3 for beta chain variable domain of TCR clone 203509 (TRBV11-2, TRBJ2-1)
CASSLYPPGVEYNEQFF

SEQ ID NO: 407019 - protein, 13 aa, Homo sapiens
  CDR3 for alpha chain variable domain of TCR clone 203510 (TRAV2, TRAJ40)
CAVVTSGTYKYIF

SEQ ID NO: 407020 - protein, 16 aa, Homo sapiens
  CDR3 for beta chain variable domain of TCR clone 203510 (TRBV20-1, TRBJ1-4)
CSAPGQGLLTNEELFF

SEQ ID NO: 407021 - protein, 12 aa, Homo sapiens
  CDR3 for alpha chain variable domain of TCR clone 203511 (TRAV12-1, TRAJ16)
CVVFRDGQKLLF

SEQ ID NO: 407022 - protein, 15 aa, Homo sapiens
  CDR3 for beta chain variable domain of TCR clone 203511 (TRBV5-1, TRBJ2-1)
CASSPPRAPYNEQFF

SEQ ID NO: 407023 - protein, 17 aa, Homo sapiens
  CDR3 for alpha chain variable domain of TCR clone 203512 (TRAV13-1, TRAJ52)
CAAGRNAGGTSYGKLTF

SEQ ID NO: 407024 - protein, 16 aa, Homo sapiens
  CDR3 for beta chain variable domain of TCR clone 203512 (TRBV7-2, TRBJ2-1)
CASSQGGRRSFDEQFF

SEQ ID NO: 407025 - protein, 13 aa, Homo sapiens
  CDR3 for alpha chain variable domain of TCR clone 203513 (TRAV12-3, TRAJ33)
CAMSVNSNYLLIW

SEQ ID NO: 407026 - protein, 13 aa, Homo sapiens
  CDR3 for beta chain variable domain of TCR clone 203513 (TRBV7-2, TRBJ2-2)
CASSLAVTGELFF

SEQ ID NO: 407027 - protein, 14 aa, Homo sapiens
  CDR3 for alpha chain variable domain of TCR clone 203514 (TRAV2, TRAJ41)
CAVGTSNSGYALNF

SEQ ID NO: 407028 - protein, 14 aa, Homo sapiens
  CDR3 for beta chain variable domain of TCR clone 203514 (TRBV19, TRBJ2-1)
CASPTFVLSGEQFF

SEQ ID NO: 407029 - protein, 12 aa, Homo sapiens
  CDR3 for alpha chain variable domain of TCR clone 203515 (TRAV12-2, TRAJ10)
WGVTGGGNKLTF

SEQ ID NO: 407030 - protein, 14 aa, Homo sapiens
  CDR3 for beta chain variable domain of TCR clone 203515 (TRBV19, TRBJ2-7)
CASSMGQGAIEQYF

SEQ ID NO: 407031 - protein, 14 aa, Homo sapiens
  CDR3 for alpha chain variable domain of TCR clone 203516 (TRAV35, TRAJ13)
CAGFPSGGYQKVTF

SEQ ID NO: 407032 - protein, 13 aa, Homo sapiens
  CDR3 for beta chain variable domain of TCR clone 203516 (TRBV29-1, TRBJ1-1)
CSVGDSRNTEAFF

SEQ ID NO: 407033 - protein, 14 aa, Homo sapiens
  CDR3 for alpha chain variable domain of TCR clone 203517 (TRAV14/DV4, TRAJ15)
CAMRREQEGTALIF

SEQ ID NO: 407034 - protein, 16 aa, Homo sapiens
  CDR3 for beta chain variable domain of TCR clone 203517 (TRBV15, TRBJ2-3)
CATSRDLGIVTDTQYF

SEQ ID NO: 407035 - protein, 17 aa, Homo sapiens
  CDR3 for alpha chain variable domain of TCR clone 203518 (TRAV12-3, TRAJ52)
CAMTGLSGGTSYGKLTF

SEQ ID NO: 407036 - protein, 16 aa, Homo sapiens
  CDR3 for beta chain variable domain of TCR clone 203518 (TRBV18, TRBJ1-5)
CASSPRTGGGNQPQHF

SEQ ID NO: 407037 - protein, 11 aa, Homo sapiens
  CDR3 for alpha chain variable domain of TCR clone 203519 (TRAV12-2, TRAJ31)
CAILNIARLMF

SEQ ID NO: 407038 - protein, 13 aa, Homo sapiens
  CDR3 for beta chain variable domain of TCR clone 203519 (TRBV20-1, TRBJ1-1)
CSARLGQGTEAFF

SEQ ID NO: 407039 - protein, 12 aa, Homo sapiens
  CDR3 for alpha chain variable domain of TCR clone 203520 (TRAV21, TRAJ23)
CAVMLQGGKLIF

SEQ ID NO: 407040 - protein, 16 aa, Homo sapiens
  CDR3 for beta chain variable domain of TCR clone 203520 (TRBV7-9, TRBJ1-4)
CAITEGEANENCFLAV

SEQ ID NO: 407041 - protein, 13 aa, Homo sapiens
  CDR3 for alpha chain variable domain of TCR clone 203521 (TRAV13-2, TRAJ40)
CAEFTSGTYKYIF

SEQ ID NO: 407042 - protein, 14 aa, Homo sapiens
  CDR3 for beta chain variable domain of TCR clone 203521 (TRBV10-2, TRBJ1-5)
CASSSTGRNQPQHC

SEQ ID NO: 407043 - protein, 19 aa, Homo sapiens
  CDR3 for alpha chain variable domain of TCR clone 203522 (TRAV10, TRAJ43)
TASQLSDSASYPAPNDMRF

SEQ ID NO: 407044 - protein, 17 aa, Homo sapiens
  CDR3 for beta chain variable domain of TCR clone 203522 (TRBV7-3, TRBJ2-2)
CASSLSGTSGGTGELFF

SEQ ID NO: 407045 - protein, 14 aa, Homo sapiens
  CDR3 for alpha chain variable domain of TCR clone 203523 (TRAV38-1, TRAJ40)
CVLRPTSGTYRYIF

SEQ ID NO: 407046 - protein, 14 aa, Homo sapiens
  CDR3 for beta chain variable domain of TCR clone 203523 (TRBV25-1, TRBJ1-1)
CASTHLGGNTEAFF

SEQ ID NO: 407047 - protein, 13 aa, Homo sapiens
  CDR3 for alpha chain variable domain of TCR clone 203524 (TRAV21, TRAJ27)
CAARPGNAGKSTF

SEQ ID NO: 407048 - protein, 15 aa, Homo sapiens
  CDR3 for beta chain variable domain of TCR clone 203524 (TRBV7-9, TRBJ1-4)
CASSRTGGFNEKLFF

SEQ ID NO: 407049 - protein, 13 aa, Homo sapiens
  CDR3 for alpha chain variable domain of TCR clone 203525 (TRAV16, TRAJ54)
CALMVQGAQKLVF

SEQ ID NO: 407050 - protein, 12 aa, Homo sapiens
  CDR3 for beta chain variable domain of TCR clone 203525 (TRBV18, TRBJ2-7)
CASSTAMGEQYV

SEQ ID NO: 407051 - protein, 13 aa, Homo sapiens
  CDR3 for alpha chain variable domain of TCR clone 203526 (TRAV8-3, TRAJ47)
CAVGSSYGNKLVF

SEQ ID NO: 407052 - protein, 13 aa, Homo sapiens
  CDR3 for beta chain variable domain of TCR clone 203526 (TRBV28, TRBJ2-3)
CASSPPTTDTQYF

SEQ ID NO: 407053 - protein, 16 aa, Homo sapiens
  CDR3 for alpha chain variable domain of TCR clone 203527 (TRAV36/DV7, TRAJ33)
WRPGNKVQDSNYQLIW

SEQ ID NO: 407054 - protein, 15 aa, Homo sapiens
  CDR3 for beta chain variable domain of TCR clone 203527 (TRBV29-1, TRBJ2-1)
CSVGRHAVFYNEQFF

SEQ ID NO: 407055 - protein, 14 aa, Homo sapiens
  CDR3 for alpha chain variable domain of TCR clone 203528 (TRAV35, TRAJ10)
CAGILTGGGNKLTF

SEQ ID NO: 407056 - protein, 14 aa, Homo sapiens
  CDR3 for beta chain variable domain of TCR clone 203528 (TRBV11-2, TRBJ1-1)
CASSLDRYGTEAFF

SEQ ID NO: 407057 - protein, 12 aa, Homo sapiens
  CDR3 for alpha chain variable domain of TCR clone 203529 (TRAV12-3, TRAJ40)
CAMSSETYKYIF

SEQ ID NO: 407058 - protein, 15 aa, Homo sapiens
  CDR3 for beta chain variable domain of TCR clone 203529 (TRBV7-3, TRBJ2-2)
CASSETGQGTGELFF

SEQ ID NO: 407059 - protein, 16 aa, Homo sapiens
  CDR3 for alpha chain variable domain of TCR clone 203530 (TRAV16, TRAJ4)
CALSRMFSGGYNQLIF

SEQ ID NO: 407060 - protein, 16 aa, Homo sapiens
  CDR3 for beta chain variable domain of TCR clone 203530 (TRBV24-1, TRBJ2-3)
CDTSDPGTGATDTQYF

SEQ ID NO: 407061 - protein, 12 aa, Homo sapiens
  CDR3 for alpha chain variable domain of TCR clone 203531 (TRAV21, TRAJ49)
CAVNDGGNQFYF

SEQ ID NO: 407062 - protein, 14 aa, Homo sapiens
  CDR3 for beta chain variable domain of TCR clone 203531 (TRBV7-3, TRBJ2-1)
CASSLAGGTNEQFF

SEQ ID NO: 407063 - protein, 16 aa, Homo sapiens
  CDR3 for alpha chain variable domain of TCR clone 203532 (TRAV12-3, TRAJ53)
CAMSPGSGGSNYKLTF

SEQ ID NO: 407064 - protein, 13 aa, Homo sapiens
  CDR3 for beta chain variable domain of TCR clone 203532 (TRBV29-1, TRBJ2-1)
CSVEGGRVNEQFF

SEQ ID NO: 407065 - protein, 15 aa, Homo sapiens
  CDR3 for alpha chain variable domain of TCR clone 203533 (TRAV3, TRAJ5)
CAVRDLDTGRRALTF

SEQ ID NO: 407066 - protein, 15 aa, Homo sapiens
  CDR3 for beta chain variable domain of TCR clone 203533 (TRBV5-1, TRBJ2-7)
CASSLNGGPAREQYF

SEQ ID NO: 407067 - protein, 13 aa, Homo sapiens
  CDR3 for alpha chain variable domain of TCR clone 203534 (TRAV26-1, TRAJ29)
CIVRRSGNTPLVF

SEQ ID NO: 407068 - protein, 12 aa, Homo sapiens
  CDR3 for beta chain variable domain of TCR clone 203534 (TRBV28, TRBJ2-3)
CASSLYRDTQYF

SEQ ID NO: 407069 - protein, 14 aa, Homo sapiens
  CDR3 for alpha chain variable domain of TCR clone 203535 (TRAV6, TRAJ37)
CALGSQGNPGQLIF

SEQ ID NO: 407070 - protein, 15 aa, Homo sapiens
  CDR3 for beta chain variable domain of TCR clone 203535 (TRBV2, TRBJ2-1)
CASSEEREGDNEQFF

SEQ ID NO: 407071 - protein, 13 aa, Homo sapiens
  CDR3 for alpha chain variable domain of TCR clone 203536 (TRAV1-2, TRAJ12)
CAVFMDSSYKLIF

SEQ ID NO: 407072 - protein, 15 aa, Homo sapiens
  CDR3 for beta chain variable domain of TCR clone 203536 (TRBV27, TRBJ2-5)
CASSLIPSGGETQYF

SEQ ID NO: 407073 - protein, 15 aa, Homo sapiens
  CDR3 for alpha chain variable domain of TCR clone 203537 (TRAV8-3, TRAJ40)
CAAPSPGSGTYRYIF

SEQ ID NO: 407074 - protein, 13 aa, Homo sapiens
  CDR3 for beta chain variable domain of TCR clone 203537 (TRBV10-3, TRBJ2-7)
CASKLAVNYEQYF

SEQ ID NO: 407075 - protein, 14 aa, Homo sapiens
  CDR3 for alpha chain variable domain of TCR clone 203538 (TRAV8-3, TRAJ4)
CAVGAAGGYNKLFF

SEQ ID NO: 407076 - protein, 15 aa, Homo sapiens
  CDR3 for beta chain variable domain of TCR clone 203538 (TRBV6-5, TRBJ1-2)
CASSYSPPRFYGYTF

SEQ ID NO: 407077 - protein, 11 aa, Homo sapiens
  CDR3 for alpha chain variable domain of TCR clone 203539 (TRAV12-1, TRAJ30)
CVVNGQDKIIF

SEQ ID NO: 407078 - protein, 14 aa, Homo sapiens
  CDR3 for beta chain variable domain of TCR clone 203539 (TRBV4-1, TRBJ1-1)
CASSRSGQSFEAFF

SEQ ID NO: 407079 - protein, 13 aa, Homo sapiens
  CDR3 for alpha chain variable domain of TCR clone 203540 (TRAV1-2, TRAJ9)
CAALNTGGFNTIF

SEQ ID NO: 407080 - protein, 15 aa, Homo sapiens
  CDR3 for beta chain variable domain of TCR clone 203540 (TRBV20-1, TRBJ2-7)
CSARDRVSGMDEQYF

SEQ ID NO: 407081 - protein, 16 aa, Homo sapiens
  CDR3 for alpha chain variable domain of TCR clone 203541 (TRAV8-1, TRAJ33)
CAVNARGGDSNYQLIW

SEQ ID NO: 407082 - protein, 12 aa, Homo sapiens
  CDR3 for beta chain variable domain of TCR clone 203541 (TRBV12-4, TRBJ2-5)
CASSSAQETQYF

SEQ ID NO: 407083 - protein, 16 aa, Homo sapiens
  CDR3 for alpha chain variable domain of TCR clone 203542 (TRAV8-3, TRAJ18)
CAVALDRGSTRGRLYF

SEQ ID NO: 407084 - protein, 11 aa, Homo sapiens
  CDR3 for beta chain variable domain of TCR clone 203542 (TRBV29-1, TRBJ1-1)
CSVEILTEAFF

SEQ ID NO: 407085 - protein, 15 aa, Homo sapiens
  CDR3 for alpha chain variable domain of TCR clone 203543 (TRAV9-2, TRAJ10)
CALKVLTGGGNKLTF

SEQ ID NO: 407086 - protein, 16 aa, Homo sapiens
  CDR3 for beta chain variable domain of TCR clone 203543 (TRBV20-1, TRBJ2-5)
SAVRVGLAGGGETQYF

SEQ ID NO: 407087 - protein, 14 aa, Homo sapiens
  CDR3 for alpha chain variable domain of TCR clone 203544 (TRAV8-3, TRAJ4)
CAVGAAGGYNKLIF

SEQ ID NO: 407088 - protein, 14 aa, Homo sapiens
  CDR3 for beta chain variable domain of TCR clone 203544 (TRBV7-3, TRBJ1-5)
RASSFSGCNQPQHF

SEQ ID NO: 407089 - protein, 22 aa, Homo sapiens
  CDR3 for alpha chain variable domain of TCR clone 203545 (TRAV26-1, TRAJ42)
CIVRPIREEAKEISSLEKALNS

SEQ ID NO: 407090 - protein, 16 aa, Homo sapiens
  CDR3 for beta chain variable domain of TCR clone 203545 (TRBV7-3, TRBJ2-2)
CASSLKRGTLSGELFF

SEQ ID NO: 407091 - protein, 13 aa, Homo sapiens
  CDR3 for alpha chain variable domain of TCR clone 203546 (TRAV1-2, TRAJ12)
CAVSMDSSYKLIF

SEQ ID NO: 407092 - protein, 15 aa, Homo sapiens
  CDR3 for beta chain variable domain of TCR clone 203546 (TRBV27, TRBJ2-5)
CASSLILSGGETQYF

SEQ ID NO: 407093 - protein, 13 aa, Homo sapiens
  CDR3 for alpha chain variable domain of TCR clone 203547 (TRAV1-2, TRAJ9)
CAALNTGGFKTIF

SEQ ID NO: 407094 - protein, 17 aa, Homo sapiens
  CDR3 for beta chain variable domain of TCR clone 203547 (TRBV4-3, TRBJ2-1)
CASSQFSSGRASGEQFF

SEQ ID NO: 407095 - protein, 13 aa, Homo sapiens
  CDR3 for alpha chain variable domain of TCR clone 203548 (TRAV3, TRAJ29)
CAVRDIIDTPLVF

SEQ ID NO: 407096 - protein, 14 aa, Homo sapiens
  CDR3 for beta chain variable domain of TCR clone 203548 (TRBV28, TRBJ2-7)
CASSLLRISYEQYF

SEQ ID NO: 407097 - protein, 14 aa, Homo sapiens
  CDR3 for alpha chain variable domain of TCR clone 203549 (TRAV12-1, TRAJ8)
CVVNSNTGFQKLVF

SEQ ID NO: 407098 - protein, 16 aa, Homo sapiens
  CDR3 for beta chain variable domain of TCR clone 203549 (TRBV20-1, TRBJ2-2)
CSARDDRVGLTGQLFF

SEQ ID NO: 407099 - protein, 12 aa, Homo sapiens
  CDR3 for alpha chain variable domain of TCR clone 203550 (TRAV26-2, TRAJ21)
CILKGNFNKFYL

SEQ ID NO: 407100 - protein, 12 aa, Homo sapiens
  CDR3 for beta chain variable domain of TCR clone 203550 (TRBV12-4, TRBJ2-7)
CASSLGGYEQYF

SEQ ID NO: 407101 - protein, 14 aa, Homo sapiens
  CDR3 for alpha chain variable domain of TCR clone 203551 (TRAV29/DV5, TRAJ44)
CAASATGTASKLTF

SEQ ID NO: 407102 - protein, 13 aa, Homo sapiens
  CDR3 for beta chain variable domain of TCR clone 203551 (TRBV10-3, TRBJ2-7)
CASKLAVNYEQYF

SEQ ID NO: 407103 - protein, 13 aa, Homo sapiens
  CDR3 for alpha chain variable domain of TCR clone 203552 (TRAV17, TRAJ9)
CATDYTGGFKTIF

SEQ ID NO: 407104 - protein, 15 aa, Homo sapiens
  CDR3 for beta chain variable domain of TCR clone 203552 (TRBV10-2, TRBJ2-7)
CASWNRGQATYERYF

SEQ ID NO: 407105 - protein, 15 aa, Homo sapiens
  CDR3 for alpha chain variable domain of TCR clone 203553 (TRAV25, TRAJ52)
CAGRPGGTSYGKLTF

SEQ ID NO: 407106 - protein, 11 aa, Homo sapiens
  CDR3 for beta chain variable domain of TCR clone 203553 (TRBV7-8, TRBJ2-6)
CASSAGTGGRW

SEQ ID NO: 407107 - protein, 12 aa, Homo sapiens
  CDR3 for alpha chain variable domain of TCR clone 203554 (TRAV1-2, TRAJ33)
CAALDSNYQLIW

SEQ ID NO: 407108 - protein, 16 aa, Homo sapiens
  CDR3 for beta chain variable domain of TCR clone 203554 (TRBV7-2, TRBJ2-3)
CASSPWREVGTDTQYF

SEQ ID NO: 407109 - protein, 16 aa, Homo sapiens
  CDR3 for alpha chain variable domain of TCR clone 203555 (TRAV3, TRAJ37)
CAVRGKGSGNTGKLIF

SEQ ID NO: 407110 - protein, 13 aa, Homo sapiens
  CDR3 for beta chain variable domain of TCR clone 203555 (TRBV14, TRBJ2-7)
CASSQDRRNEQYF

SEQ ID NO: 407111 - protein, 10 aa, Homo sapiens
  CDR3 for alpha chain variable domain of TCR clone 203556 (TRAV21, TRAJ31)
CAVDNARLMF

SEQ ID NO: 407112 - protein, 14 aa, Homo sapiens
  CDR3 for beta chain variable domain of TCR clone 203556 (TRBV7-2, TRBJ2-7)
CASSLYPGRYEQYF

SEQ ID NO: 407113 - protein, 14 aa, Homo sapiens
  CDR3 for alpha chain variable domain of TCR clone 203557 (TRAV9-2, TRAJ39)
CALYIYNAGNMLTF

SEQ ID NO: 407114 - protein, 14 aa, Homo sapiens
  CDR3 for beta chain variable domain of TCR clone 203557 (TRBV2, TRBJ2-2)
CASSLFGGNGELFF

SEQ ID NO: 407115 - protein, 14 aa, Homo sapiens
  CDR3 for alpha chain variable domain of TCR clone 203558 (TRAV2, TRAJ3)
CAVDRYCSASKIIF

SEQ ID NO: 407116 - protein, 16 aa, Homo sapiens
  CDR3 for beta chain variable domain of TCR clone 203558 (TRBV20-1, TRBJ1-5)
CSAELPGQQTNQPQHF

SEQ ID NO: 407117 - protein, 14 aa, Homo sapiens
  CDR3 for alpha chain variable domain of TCR clone 203559 (TRAV1-2, TRAJ8)
CAVREDTGVQKLVF

SEQ ID NO: 407118 - protein, 15 aa, Homo sapiens
  CDR3 for beta chain variable domain of TCR clone 203559 (TRBV2, TRBJ2-7)
CASSEGLARSYEQYF

SEQ ID NO: 407119 - protein, 14 aa, Homo sapiens
  CDR3 for alpha chain variable domain of TCR clone 203560 (TRAV1-2, TRAJ16)
CAVNRFSDGQKLLL

SEQ ID NO: 407120 - protein, 14 aa, Homo sapiens
  CDR3 for beta chain variable domain of TCR clone 203560 (TRBV7-2, TRBJ2-7)
CASSLYPGRYEQYF

SEQ ID NO: 407121 - protein, 18 aa, Homo sapiens
  CDR3 for alpha chain variable domain of TCR clone 203561 (TRAV9-2, TRAJ52)
CALSRHNAGGTSYGKLTF

SEQ ID NO: 407122 - protein, 17 aa, Homo sapiens
  CDR3 for beta chain variable domain of TCR clone 203561 (TRBV7-3, TRBJ2-3)
CASSLMKRMRGADTQYF

SEQ ID NO: 407123 - protein, 13 aa, Homo sapiens
  CDR3 for alpha chain variable domain of TCR clone 203562 (TRAV41, TRAJ54)
CAVRIRGAQKLVF

SEQ ID NO: 407124 - protein, 15 aa, Homo sapiens
  CDR3 for beta chain variable domain of TCR clone 203562 (TRBV7-2, TRBJ2-1)
CASSSGLAGGNEQFF

SEQ ID NO: 407125 - protein, 14 aa, Homo sapiens
  CDR3 for alpha chain variable domain of TCR clone 203563 (TRAV16, TRAJ42)
CALLAGGSQGNLIF

SEQ ID NO: 407126 - protein, 15 aa, Homo sapiens
  CDR3 for beta chain variable domain of TCR clone 203563 (TRBV2, TRBJ2-7)
CASSEGLARSYEQYS

SEQ ID NO: 407127 - protein, 15 aa, Homo sapiens
  CDR3 for alpha chain variable domain of TCR clone 203564 (TRAV3, TRAJ9)
CAVRARNSGGFKTIF

SEQ ID NO: 407128 - protein, 15 aa, Homo sapiens
  CDR3 for beta chain variable domain of TCR clone 203564 (TRBV27, TRBJ1-1)
CASSPYADPYTEAFF

SEQ ID NO: 407129 - protein, 16 aa, Homo sapiens
  CDR3 for alpha chain variable domain of TCR clone 203565 (TRAV1-2, TRAJ16)
CAVNRFQMARSCSLQG

SEQ ID NO: 407130 - protein, 15 aa, Homo sapiens
  CDR3 for beta chain variable domain of TCR clone 203565 (TRBV3-1, TRBJ2-5)
CASSANLGGPEAQYF

SEQ ID NO: 407131 - protein, 14 aa, Homo sapiens
  CDR3 for alpha chain variable domain of TCR clone 203566 (TRAV9-2, TRAJ39)
CALYIYNAGNMLTF

SEQ ID NO: 407132 - protein, 21 aa, Homo sapiens
  CDR3 for beta chain variable domain of TCR clone 203566 (TRBV6-1, TRBJ1-3)
CASVQGGGKHHIFWRGKLAHC

SEQ ID NO: 407133 - protein, 16 aa, Homo sapiens
  CDR3 for alpha chain variable domain of TCR clone 203567 (TRAV8-3, TRAJ13)
CAVGAYPSGGYQKVTF

SEQ ID NO: 407134 - protein, 15 aa, Homo sapiens
  CDR3 for beta chain variable domain of TCR clone 203567 (TRBV19, TRBJ1-5)
SASSIVWADNQPQHF

SEQ ID NO: 407135 - protein, 13 aa, Homo sapiens
  CDR3 for alpha chain variable domain of TCR clone 203568 (TRAV12-1, TRAJ22)
CVVYSGSARQLTF

SEQ ID NO: 407136 - protein, 10 aa, Homo sapiens
  CDR3 for beta chain variable domain of TCR clone 203568 (TRBV6-3, TRBJ2-2)
CAGRDGELFF

SEQ ID NO: 407137 - protein, 14 aa, Homo sapiens
  CDR3 for alpha chain variable domain of TCR clone 203569 (TRAV23/DV6, TRAJ40)
CAASLTSGTYKYIF

SEQ ID NO: 407138 - protein, 15 aa, Homo sapiens
  CDR3 for beta chain variable domain of TCR clone 203569 (TRBV7-3, TRBJ2-2)
CASSETGQGTGELFF

SEQ ID NO: 407139 - protein, 12 aa, Homo sapiens
  CDR3 for alpha chain variable domain of TCR clone 203570 (TRAV12-2, TRAJ16)
CAVNLDGQKLLF

SEQ ID NO: 407140 - protein, 12 aa, Homo sapiens
  CDR3 for beta chain variable domain of TCR clone 203570 (TRBV5-7, TRBJ2-7)
CATSVQGGEQYF

SEQ ID NO: 407141 - protein, 14 aa, Homo sapiens
  CDR3 for alpha chain variable domain of TCR clone 203571 (TRAV1-2, TRAJ8)
CAVREDTGFQNLVF

SEQ ID NO: 407142 - protein, 11 aa, Homo sapiens
  CDR3 for beta chain variable domain of TCR clone 203571 (TRBV20-1, TRBJ2-5)
CSADRAETQYF

SEQ ID NO: 407143 - protein, 17 aa, Homo sapiens
  CDR3 for alpha chain variable domain of TCR clone 203572 (TRAV3, TRAJ6)
CPVRDGPRAVGSYIPTF

SEQ ID NO: 407144 - protein, 15 aa, Homo sapiens
  CDR3 for beta chain variable domain of TCR clone 203572 (TRBV11-3, TRBJ2-7)
CASSPGPASSYEQYF

SEQ ID NO: 407145 - protein, 14 aa, Homo sapiens
  CDR3 for alpha chain variable domain of TCR clone 203573 (TRAV1-2, TRAJ8)
CAVREDTGFQKLVF

SEQ ID NO: 407146 - protein, 19 aa, Homo sapiens
  CDR3 for beta chain variable domain of TCR clone 203573 (TRBV25-1, TRBJ2-2)
CAILVYRVDRGRNTGELFF

SEQ ID NO: 407147 - protein, 16 aa, Homo sapiens
  CDR3 for alpha chain variable domain of TCR clone 203574 (TRAV21, TRAJ37)
CAVRTASPSNTGKLIF

SEQ ID NO: 407148 - protein, 13 aa, Homo sapiens
  CDR3 for beta chain variable domain of TCR clone 203574 (TRBV7-9, TRBJ2-5)
CASLPSGRETQYF

SEQ ID NO: 407149 - protein, 15 aa, Homo sapiens
  CDR3 for alpha chain variable domain of TCR clone 203575 (TRAV27, TRAJ38)
CAGRFNAGNNRKLIW

SEQ ID NO: 407150 - protein, 13 aa, Homo sapiens
  CDR3 for beta chain variable domain of TCR clone 203575 (TRBV7-8, TRBJ2-7)
RRVRLTEMGEQYF

SEQ ID NO: 407151 - protein, 15 aa, Homo sapiens
  CDR3 for alpha chain variable domain of TCR clone 203576 (TRAV8-3, TRAJ27)
CAVGPSNTNAGKSTF

SEQ ID NO: 407152 - protein, 12 aa, Homo sapiens
  CDR3 for beta chain variable domain of TCR clone 203576 (TRBV11-2, TRBJ2-2)
CASSLGGGELFF

SEQ ID NO: 407153 - protein, 14 aa, Homo sapiens
  CDR3 for alpha chain variable domain of TCR clone 203577 (TRAV13-2, TRAJ22)
CADGTLGSARQLIF

SEQ ID NO: 407154 - protein, 16 aa, Homo sapiens
  CDR3 for beta chain variable domain of TCR clone 203577 (TRBV19, TRBJ2-1)
CASSSKGTRSYNEQFF

SEQ ID NO: 407155 - protein, 13 aa, Homo sapiens
  CDR3 for alpha chain variable domain of TCR clone 203578 (TRAV8-1, TRAJ15)
CAVKNQPGTALIF

SEQ ID NO: 407156 - protein, 15 aa, Homo sapiens
  CDR3 for beta chain variable domain of TCR clone 203578 (TRBV7-3, TRBJ2-7)
CASSLTPTGYDEQYF

SEQ ID NO: 407157 - protein, 12 aa, Homo sapiens
  CDR3 for alpha chain variable domain of TCR clone 203579 (TRAV12-2, TRAJ52)
IGGGTSYGKLTF

SEQ ID NO: 407158 - protein, 14 aa, Homo sapiens
  CDR3 for beta chain variable domain of TCR clone 203579 (TRBV7-3, TRBJ2-2)
CASSSGGYTGELFF

SEQ ID NO: 407159 - protein, 18 aa, Homo sapiens
  CDR3 for alpha chain variable domain of TCR clone 203580 (TRAV13-1, TRAJ17)
CAASIHGGCRQQANLWRR

SEQ ID NO: 407160 - protein, 14 aa, Homo sapiens
  CDR3 for beta chain variable domain of TCR clone 203580 (TRBV20-1, TRBJ2-4)
CSARDRGQGGIQYF

SEQ ID NO: 407161 - protein, 12 aa, Homo sapiens
  CDR3 for alpha chain variable domain of TCR clone 203581 (TRAV8-3, TRAJ26)
CAGDNYGQNFVF

SEQ ID NO: 407162 - protein, 14 aa, Homo sapiens
  CDR3 for beta chain variable domain of TCR clone 203581 (TRBV9, TRBJ2-1)
CQQPAGSSYNEQFF

SEQ ID NO: 407163 - protein, 14 aa, Homo sapiens
  CDR3 for alpha chain variable domain of TCR clone 203582 (TRAV1-2, TRAJ27)
CAVRSGTNAGKSTF

SEQ ID NO: 407164 - protein, 15 aa, Homo sapiens
  CDR3 for beta chain variable domain of TCR clone 203582 (TRBV18, TRBJ2-7)
CASAPLQGRTYEQYF

SEQ ID NO: 407165 - protein, 15 aa, Homo sapiens
  CDR3 for alpha chain variable domain of TCR clone 203583 (TRAV21, TRAJ37)
CAVRPTLSNTGTLIF

SEQ ID NO: 407166 - protein, 16 aa, Homo sapiens
  CDR3 for beta chain variable domain of TCR clone 203583 (TRBV24-1, TRBJ2-3)
CATSDRRQDLTDTKYF

SEQ ID NO: 407167 - protein, 14 aa, Homo sapiens
  CDR3 for alpha chain variable domain of TCR clone 203584 (TRAV12-3, TRAJ17)
CAMTLTGNKLTWRR

SEQ ID NO: 407168 - protein, 15 aa, Homo sapiens
  CDR3 for beta chain variable domain of TCR clone 203584 (TRBV20-1, TRBJ2-7)
CSARDRVSGMDEQYF

SEQ ID NO: 407169 - protein, 14 aa, Homo sapiens
  CDR3 for alpha chain variable domain of TCR clone 203585 (TRAV12-2, TRAJ17)
CAVLSKAAGNKLTF

SEQ ID NO: 407170 - protein, 17 aa, Homo sapiens
  CDR3 for beta chain variable domain of TCR clone 203585 (TRBV20-1, TRBJ2-2)
CSASGSGQGGVTGELFF

SEQ ID NO: 407171 - protein, 12 aa, Homo sapiens
  CDR3 for alpha chain variable domain of TCR clone 203586 (TRAV23/DV6, TRAJ3)
CAARAPQQCFQD

SEQ ID NO: 407172 - protein, 17 aa, Homo sapiens
  CDR3 for beta chain variable domain of TCR clone 203586 (TRBV7-9, TRBJ2-3)
CASSPTVAGDLTDTQYL

SEQ ID NO: 407173 - protein, 13 aa, Homo sapiens
  CDR3 for alpha chain variable domain of TCR clone 203587 (TRAV27, TRAJ27)
CAGGITNAGKTTF

SEQ ID NO: 407174 - protein, 13 aa, Homo sapiens
  CDR3 for beta chain variable domain of TCR clone 203587 (TRBV20-1, TRBJ1-2)
CSASLGVGYGYTF

SEQ ID NO: 407175 - protein, 15 aa, Homo sapiens
  CDR3 for alpha chain variable domain of TCR clone 203588 (TRAV17, TRAJ57)
CATGPSQGGSEKLVF

SEQ ID NO: 407176 - protein, 14 aa, Homo sapiens
  CDR3 for beta chain variable domain of TCR clone 203588 (TRBV11-2, TRBJ1-2)
CASSLYRGNYGYAF

SEQ ID NO: 407177 - protein, 14 aa, Homo sapiens
  CDR3 for alpha chain variable domain of TCR clone 203589 (TRAV38-1, TRAJ45)
CAYYSRGGADGLTF

SEQ ID NO: 407178 - protein, 20 aa, Homo sapiens
  CDR3 for beta chain variable domain of TCR clone 203589 (TRBV28, TRBJ2-1)
CASTPIGRSPGLAGGNEKFF

SEQ ID NO: 407179 - protein, 12 aa, Homo sapiens
  CDR3 for alpha chain variable domain of TCR clone 203590 (TRAV3, TRAJ31)
CAVRDGNARLMF

SEQ ID NO: 407180 - protein, 16 aa, Homo sapiens
  CDR3 for beta chain variable domain of TCR clone 203590 (TRBV11-2, TRBJ2-3)
CASSSRTSGGAGTQYF

SEQ ID NO: 407181 - protein, 16 aa, Homo sapiens
  CDR3 for alpha chain variable domain of TCR clone 203591 (TRAV38-1, TRAJ32)
CAFMPFLGGATNKLIF

SEQ ID NO: 407182 - protein, 16 aa, Homo sapiens
  CDR3 for beta chain variable domain of TCR clone 203591 (TRBV7-3, TRBJ2-2)
CASSLKRGTLSGELFF

SEQ ID NO: 407183 - protein, 16 aa, Homo sapiens
  CDR3 for alpha chain variable domain of TCR clone 203592 (TRAV3, TRAJ37)
CAVGGKGSGNTGKLIF

SEQ ID NO: 407184 - protein, 16 aa, Homo sapiens
  CDR3 for beta chain variable domain of TCR clone 203592 (TRBV12-5, TRBJ2-5)
CASGPRTSGNQETQYF

SEQ ID NO: 407185 - protein, 14 aa, Homo sapiens
  CDR3 for alpha chain variable domain of TCR clone 203593 (TRAV12-2, TRAJ33)
CAVKRARSNYQLIW

SEQ ID NO: 407186 - protein, 12 aa, Homo sapiens
  CDR3 for beta chain variable domain of TCR clone 203593 (TRBV14, TRBJ2-5)
CASSQLKETQYF

SEQ ID NO: 407187 - protein, 20 aa, Homo sapiens
  CDR3 for alpha chain variable domain of TCR clone 203594 (TRAV26-1, TRAJ42)
CCVLLHRQTYYGGSQGNLIF

SEQ ID NO: 407188 - protein, 15 aa, Homo sapiens
  CDR3 for beta chain variable domain of TCR clone 203594 (TRBV11-2, TRBJ2-1)
CASSLGPDSYNEQFF

SEQ ID NO: 407189 - protein, 14 aa, Homo sapiens
  CDR3 for alpha chain variable domain of TCR clone 203595 (TRAV17, TRAJ37)
CATVPSSNTGKLIF

SEQ ID NO: 407190 - protein, 17 aa, Homo sapiens
  CDR3 for beta chain variable domain of TCR clone 203595 (TRBV13, TRBJ2-3)
CASSLSRVAGGRNTQYF

SEQ ID NO: 407191 - protein, 12 aa, Homo sapiens
  CDR3 for alpha chain variable domain of TCR clone 203596 (TRAV8-3, TRAJ26)
CAGDNYGQNFVF

SEQ ID NO: 407192 - protein, 16 aa, Homo sapiens
  CDR3 for beta chain variable domain of TCR clone 203596 (TRBV7-2, TRBJ1-2)
CASSSNQDRRGHGYTF

SEQ ID NO: 407193 - protein, 15 aa, Homo sapiens
  CDR3 for alpha chain variable domain of TCR clone 203597 (TRAV21, TRAJ53)
CATLNSGGSNYKLTF

SEQ ID NO: 407194 - protein, 13 aa, Homo sapiens
  CDR3 for beta chain variable domain of TCR clone 203597 (TRBV7-9, TRBJ2-3)
CASSPGSTDAQYF

SEQ ID NO: 407195 - protein, 14 aa, Homo sapiens
  CDR3 for alpha chain variable domain of TCR clone 203598 (TRAV1-2, TRAJ8)
CAAREDTGFQKLVF

SEQ ID NO: 407196 - protein, 13 aa, Homo sapiens
  CDR3 for beta chain variable domain of TCR clone 203598 (TRBV12-4, TRBJ2-5)
CASRKRGKETQYF

SEQ ID NO: 407197 - protein, 14 aa, Homo sapiens
  CDR3 for alpha chain variable domain of TCR clone 203599 (TRAV12-2, TRAJ13)
CAVKKTGGYQKVTF

SEQ ID NO: 407198 - protein, 13 aa, Homo sapiens
  CDR3 for beta chain variable domain of TCR clone 203599 (TRBV7-9, TRBJ1-2)
CASSLKKNYGYTF

SEQ ID NO: 407199 - protein, 15 aa, Homo sapiens
  CDR3 for alpha chain variable domain of TCR clone 203600 (TRAV2, TRAJ9)
CAVAALNTGGFKTIF

SEQ ID NO: 407200 - protein, 14 aa, Homo sapiens
  CDR3 for beta chain variable domain of TCR clone 203600 (TRBV11-2, TRBJ2-1)
CASSPGSRDNEQFF

SEQ ID NO: 407201 - protein, 13 aa, Homo sapiens
  CDR3 for alpha chain variable domain of TCR clone 203601 (TRAV35, TRAJ40)
CARQLSGTYKYIF

SEQ ID NO: 407202 - protein, 14 aa, Homo sapiens
  CDR3 for beta chain variable domain of TCR clone 203601 (TRBV3-1, TRBJ2-5)
CASSLQLAGETQYF

SEQ ID NO: 407203 - protein, 11 aa, Homo sapiens
  CDR3 for alpha chain variable domain of TCR clone 203602 (TRAV35, TRAJ30)
CAGERDDKIIF

SEQ ID NO: 407204 - protein, 14 aa, Homo sapiens
  CDR3 for beta chain variable domain of TCR clone 203602 (TRBV4-2, TRBJ1-5)
CASSRDRGNQPQHF

SEQ ID NO: 407205 - protein, 13 aa, Homo sapiens
  CDR3 for alpha chain variable domain of TCR clone 203603 (TRAV20, TRAJ21)
CAVEGYNFNKFYF

SEQ ID NO: 407206 - protein, 15 aa, Homo sapiens
  CDR3 for beta chain variable domain of TCR clone 203603 (TRBV7-2, TRBJ2-1)
CASSLVGSSYNEQFF

SEQ ID NO: 407207 - protein, 14 aa, Homo sapiens
  CDR3 for alpha chain variable domain of TCR clone 203604 (TRAV12-2, TRAJ13)
CAVKETGGYQKVTF

SEQ ID NO: 407208 - protein, 13 aa, Homo sapiens
  CDR3 for beta chain variable domain of TCR clone 203604 (TRBV10-2, TRBJ2-7)
CASGASGGYEQYF

SEQ ID NO: 407209 - protein, 14 aa, Homo sapiens
  CDR3 for alpha chain variable domain of TCR clone 203605 (TRAV3, TRAJ7)
CAVREEEREQQTRF

SEQ ID NO: 407210 - protein, 14 aa, Homo sapiens
  CDR3 for beta chain variable domain of TCR clone 203605 (TRBV7-7, TRBJ2-2)
CASSARASGGELFL

SEQ ID NO: 407211 - protein, 13 aa, Homo sapiens
  CDR3 for alpha chain variable domain of TCR clone 203606 (TRAV12-1, TRAJ26)
CVVRRNYGQNFVF

SEQ ID NO: 407212 - protein, 14 aa, Homo sapiens
  CDR3 for beta chain variable domain of TCR clone 203606 (TRBV12-4, TRBJ1-3)
CASGQTVSGNTIYF

SEQ ID NO: 407213 - protein, 15 aa, Homo sapiens
  CDR3 for alpha chain variable domain of TCR clone 203607 (TRAV3, TRAJ22)
CAVRDLGGSARQLTF

SEQ ID NO: 407214 - protein, 14 aa, Homo sapiens
  CDR3 for beta chain variable domain of TCR clone 203607 (TRBV20-1, TRBJ2-5)
CSALVPGYQETQYF

SEQ ID NO: 407215 - protein, 15 aa, Homo sapiens
  CDR3 for alpha chain variable domain of TCR clone 203608 (TRAV3, TRAJ7)
CAVRDKDNGNNRLAF

SEQ ID NO: 407216 - protein, 13 aa, Homo sapiens
  CDR3 for beta chain variable domain of TCR clone 203608 (TRBV19, TRBJ1-2)
CASSVPGQDGYTF

SEQ ID NO: 407217 - protein, 12 aa, Homo sapiens
  CDR3 for alpha chain variable domain of TCR clone 203609 (TRAV12-3, TRAJ17)
CAMTLIGNKPTF

SEQ ID NO: 407218 - protein, 15 aa, Homo sapiens
  CDR3 for beta chain variable domain of TCR clone 203609 (TRBV20-1, TRBJ2-7)
CSARDRVSGMDEQYF

SEQ ID NO: 407219 - protein, 15 aa, Homo sapiens
  CDR3 for alpha chain variable domain of TCR clone 203610 (TRAV8-3, TRAJ45)
CASSHSGGGADGLTF

SEQ ID NO: 407220 - protein, 18 aa, Homo sapiens
  CDR3 for beta chain variable domain of TCR clone 203610 (TRBV7-2, TRBJ2-3)
CASSLKREGSGITDTQYF

SEQ ID NO: 407221 - protein, 14 aa, Homo sapiens
  CDR3 for alpha chain variable domain of TCR clone 203611 (TRAV12-2, TRAJ32)
CAHPESGATNKLIF

SEQ ID NO: 407222 - protein, 14 aa, Homo sapiens
  CDR3 for beta chain variable domain of TCR clone 203611 (TRBV4-2, TRBJ2-3)
CASRETSAPGMQYF

SEQ ID NO: 407223 - protein, 16 aa, Homo sapiens
  CDR3 for alpha chain variable domain of TCR clone 203612 (TRAV12-2, TRAJ40)
CAVIRGDTSGTYKYIF

SEQ ID NO: 407224 - protein, 16 aa, Homo sapiens
  CDR3 for beta chain variable domain of TCR clone 203612 (TRBV7-9, TRBJ2-1)
CASSDVAGGSYNEQFF

SEQ ID NO: 407225 - protein, 14 aa, Homo sapiens
  CDR3 for alpha chain variable domain of TCR clone 203613 (TRAV8-2, TRAJ11)
CVVSEKSGYSTLTF

SEQ ID NO: 407226 - protein, 16 aa, Homo sapiens
  CDR3 for beta chain variable domain of TCR clone 203613 (TRBV6-5, TRBJ2-1)
CASSYSLSGGYNEQFF

SEQ ID NO: 407227 - protein, 15 aa, Homo sapiens
  CDR3 for alpha chain variable domain of TCR clone 203614 (TRAV26-1, TRAJ12)
IASSELMDSSYKLIF

SEQ ID NO: 407228 - protein, 11 aa, Homo sapiens
  CDR3 for beta chain variable domain of TCR clone 203614 (TRBV7-9, TRBJ2-3)
CARSPPDTQYF

SEQ ID NO: 407229 - protein, 16 aa, Homo sapiens
  CDR3 for alpha chain variable domain of TCR clone 203615 (TRAV3, TRAJ37)
CAVRGKGSGNTGKLIF

SEQ ID NO: 407230 - protein, 15 aa, Homo sapiens
  CDR3 for beta chain variable domain of TCR clone 203615 (TRBV7-3, TRBJ2-1)
CASSPTGGGEVEQFF

SEQ ID NO: 407231 - protein, 19 aa, Homo sapiens
  CDR3 for alpha chain variable domain of TCR clone 203616 (TRAV2, TRAJ20)
ILQVREADAAVYRDCKLSF

SEQ ID NO: 407232 - protein, 15 aa, Homo sapiens
  CDR3 for beta chain variable domain of TCR clone 203616 (TRBV7-8, TRBJ2-1)
CASSLADSLYNEQFF

SEQ ID NO: 407233 - protein, 11 aa, Homo sapiens
  CDR3 for alpha chain variable domain of TCR clone 203617 (TRAV12-1, TRAJ21)
CVVNNSNKFYF

SEQ ID NO: 407234 - protein, 14 aa, Homo sapiens
  CDR3 for beta chain variable domain of TCR clone 203617 (TRBV15, TRBJ1-5)
CATSREQSNQPQHF

SEQ ID NO: 407235 - protein, 21 aa, Homo sapiens
  CDR3 for alpha chain variable domain of TCR clone 203618 (TRAV1-1, TRAJ6)
CLLLLRCERLERTGGSYIPTF

SEQ ID NO: 407236 - protein, 13 aa, Homo sapiens
  CDR3 for beta chain variable domain of TCR clone 203618 (TRBV10-2, TRBJ2-7)
CASGARGGYEQYF

SEQ ID NO: 407237 - protein, 14 aa, Homo sapiens
  CDR3 for alpha chain variable domain of TCR clone 203619 (TRAV38-1, TRAJ45)
CAYYSGGGADGLTF

SEQ ID NO: 407238 - protein, 15 aa, Homo sapiens
  CDR3 for beta chain variable domain of TCR clone 203619 (TRBV29-1, TRBJ2-1)
CSGRDRKSSYNEQFF

SEQ ID NO: 407239 - protein, 12 aa, Homo sapiens
  CDR3 for alpha chain variable domain of TCR clone 203620 (TRAV13-1, TRAJ21)
CAAKEGFTKFYF

SEQ ID NO: 407240 - protein, 14 aa, Homo sapiens
  CDR3 for beta chain variable domain of TCR clone 203620 (TRBV5-4, TRBJ1-1)
CASSLDSRRDEASF

SEQ ID NO: 407241 - protein, 15 aa, Homo sapiens
  CDR3 for alpha chain variable domain of TCR clone 203621 (TRAV8-3, TRAJ27)
CAVGPSKTNAVKSTF

SEQ ID NO: 407242 - protein, 14 aa, Homo sapiens
  CDR3 for beta chain variable domain of TCR clone 203621 (TRBV11-2, TRBJ2-7)
CASSLGAGAYEQYF

SEQ ID NO: 407243 - protein, 14 aa, Homo sapiens
  CDR3 for alpha chain variable domain of TCR clone 203622 (TRAV17, TRAJ57)
CATDPQGGSEKRVF

SEQ ID NO: 407244 - protein, 16 aa, Homo sapiens
  CDR3 for beta chain variable domain of TCR clone 203622 (TRBV20-1, TRBJ1-4)
CSAPVQGLLTNEKLFF

SEQ ID NO: 407245 - protein, 16 aa, Homo sapiens
  CDR3 for alpha chain variable domain of TCR clone 203623 (TRAV3, TRAJ5)
CAARNLMEPGRRALTF

SEQ ID NO: 407246 - protein, 16 aa, Homo sapiens
  CDR3 for beta chain variable domain of TCR clone 203623 (TRBV4-2, TRBJ2-7)
CASSQEGLANSYEQYF

SEQ ID NO: 407247 - protein, 16 aa, Homo sapiens
  CDR3 for alpha chain variable domain of TCR clone 203624 (TRAV25, TRAJ53)
CAGPKGSGGSNYKLTF

SEQ ID NO: 407248 - protein, 12 aa, Homo sapiens
  CDR3 for beta chain variable domain of TCR clone 203624 (TRBV11-2, TRBJ2-2)
CASSLGGGELFF

SEQ ID NO: 407249 - protein, 15 aa, Homo sapiens
  CDR3 for alpha chain variable domain of TCR clone 203625 (TRAV17, TRAJ57)
CATGPSQGGAEKLVF

SEQ ID NO: 407250 - protein, 15 aa, Homo sapiens
  CDR3 for beta chain variable domain of TCR clone 203625 (TRBV28, TRBJ2-7)
CASSLISGGSYEQYF

SEQ ID NO: 407251 - protein, 13 aa, Homo sapiens
  CDR3 for alpha chain variable domain of TCR clone 203626 (TRAV13-2, TRAJ13)
FADLSGGYQKVTF

SEQ ID NO: 407252 - protein, 15 aa, Homo sapiens
  CDR3 for beta chain variable domain of TCR clone 203626 (TRBV19, TRBJ1-1)
CASSIGGGRNTEAFF

SEQ ID NO: 407253 - protein, 14 aa, Homo sapiens
  CDR3 for alpha chain variable domain of TCR clone 203627 (TRAV12-2, TRAJ44)
CAVNPAGTASKLTF

SEQ ID NO: 407254 - protein, 15 aa, Homo sapiens
  CDR3 for beta chain variable domain of TCR clone 203627 (TRBV20-1, TRBJ1-6)
CSAPWGLDRPSTLGM

SEQ ID NO: 407255 - protein, 19 aa, Homo sapiens
  CDR3 for alpha chain variable domain of TCR clone 203628 (TRAV3, TRAJ6)
CAVRDRNHSRSGGSYIPPF

SEQ ID NO: 407256 - protein, 15 aa, Homo sapiens
  CDR3 for beta chain variable domain of TCR clone 203628 (TRBV18, TRBJ2-7)
CASSPTFMDSYEQYF

SEQ ID NO: 407257 - protein, 13 aa, Homo sapiens
  CDR3 for alpha chain variable domain of TCR clone 203629 (TRAV36/DV7, TRAJ37)
CAVFSSNTGKLIF

SEQ ID NO: 407258 - protein, 16 aa, Homo sapiens
  CDR3 for beta chain variable domain of TCR clone 203629 (TRBV3-1, TRBJ2-5)
RASSPGQFNGFGTQYF

SEQ ID NO: 407259 - protein, 14 aa, Homo sapiens
  CDR3 for alpha chain variable domain of TCR clone 203630 (TRAV3, TRAJ42)
CCETLGGSQGNLIF

SEQ ID NO: 407260 - protein, 14 aa, Homo sapiens
  CDR3 for beta chain variable domain of TCR clone 203630 (TRBV19, TRBJ2-5)
CASSSSGIQETQYV

SEQ ID NO: 407261 - protein, 15 aa, Homo sapiens
  CDR3 for alpha chain variable domain of TCR clone 203631 (TRAV35, TRAJ23)
CAVPLGNNQGGKLIF

SEQ ID NO: 407262 - protein, 14 aa, Homo sapiens
  CDR3 for beta chain variable domain of TCR clone 203631 (TRBV7-9, TRBJ1-1)
CASTPLQSYTEAFF

SEQ ID NO: 407263 - protein, 16 aa, Homo sapiens
  CDR3 for alpha chain variable domain of TCR clone 203632 (TRAV3, TRAJ21)
CAVRDIERGNFNKFYF

SEQ ID NO: 407264 - protein, 16 aa, Homo sapiens
  CDR3 for beta chain variable domain of TCR clone 203632 (TRBV7-6, TRBJ2-1)
CASSAPGPSSYNEQFF

SEQ ID NO: 407265 - protein, 15 aa, Homo sapiens
  CDR3 for alpha chain variable domain of TCR clone 203633 (TRAV12-1, TRAJ5)
CVVNTLETGRRALTF

SEQ ID NO: 407266 - protein, 13 aa, Homo sapiens
  CDR3 for beta chain variable domain of TCR clone 203633 (TRBV14, TRBJ1-5)
CASSQDRRGPQHF

SEQ ID NO: 407267 - protein, 12 aa, Homo sapiens
  CDR3 for alpha chain variable domain of TCR clone 203634 (TRAV3, TRAJ20)
CAVRDPDYKLSF

SEQ ID NO: 407268 - protein, 16 aa, Homo sapiens
  CDR3 for beta chain variable domain of TCR clone 203634 (TRBV4-3, TRBJ2-7)
CASSPRTSGRSYEQYF

SEQ ID NO: 407269 - protein, 15 aa, Homo sapiens
  CDR3 for alpha chain variable domain of TCR clone 203635 (TRAV23/DV6, TRAJ13)
CAAWPGGGGYQKVTL

SEQ ID NO: 407270 - protein, 14 aa, Homo sapiens
  CDR3 for beta chain variable domain of TCR clone 203635 (TRBV12-5, TRBJ2-5)
CASGSRTHQETQYF

SEQ ID NO: 407271 - protein, 18 aa, Homo sapiens
  CDR3 for alpha chain variable domain of TCR clone 203636 (TRAV13-1, TRAJ52)
CSAKNPNAGGTSYGKLTF

SEQ ID NO: 407272 - protein, 14 aa, Homo sapiens
  CDR3 for beta chain variable domain of TCR clone 203636 (TRBV4-1, TRBJ2-2)
CASSHAVNTGELFF

SEQ ID NO: 407273 - protein, 14 aa, Homo sapiens
  CDR3 for alpha chain variable domain of TCR clone 203637 (TRAV12-2, TRAJ6)
CASKWGGGGYIPTF

SEQ ID NO: 407274 - protein, 16 aa, Homo sapiens
  CDR3 for beta chain variable domain of TCR clone 203637 (TRBV12-4, TRBJ2-7)
CASSLIGGTGTYEQYF

SEQ ID NO: 407275 - protein, 13 aa, Homo sapiens
  CDR3 for alpha chain variable domain of TCR clone 203638 (TRAV8-3, TRAJ28)
CAVGAVGSYQLTF

SEQ ID NO: 407276 - protein, 14 aa, Homo sapiens
  CDR3 for beta chain variable domain of TCR clone 203638 (TRBV5-7, TRBJ1-1)
CASSLAGDWTEAFF

SEQ ID NO: 407277 - protein, 17 aa, Homo sapiens
  CDR3 for alpha chain variable domain of TCR clone 203639 (TRAV3, TRAJ38)
CAVRDCLNAGNNRKLIW

SEQ ID NO: 407278 - protein, 13 aa, Homo sapiens
  CDR3 for beta chain variable domain of TCR clone 203639 (TRBV23-1, TRBJ1-4)
CASRGNFNEKLFF

SEQ ID NO: 407279 - protein, 11 aa, Homo sapiens
  CDR3 for alpha chain variable domain of TCR clone 203640 (TRAV16, TRAJ42)
CALASQGNLIF

SEQ ID NO: 407280 - protein, 14 aa, Homo sapiens
  CDR3 for beta chain variable domain of TCR clone 203640 (TRBV7-6, TRBJ2-3)
CASSLGTVTDTQYF

SEQ ID NO: 407281 - protein, 12 aa, Homo sapiens
  CDR3 for alpha chain variable domain of TCR clone 203641 (TRAV12-3, TRAJ21)
CALFNHFNKFYF

SEQ ID NO: 407282 - protein, 16 aa, Homo sapiens
  CDR3 for beta chain variable domain of TCR clone 203641 (TRBV7-9, TRBJ1-2)
CASSLAPLRAAYGYTF

SEQ ID NO: 407283 - protein, 18 aa, Homo sapiens
  CDR3 for alpha chain variable domain of TCR clone 203642 (TRAV26-2, TRAJ45)
CILRVDKYSGGGADGLTF

SEQ ID NO: 407284 - protein, 11 aa, Homo sapiens
  CDR3 for beta chain variable domain of TCR clone 203642 (TRBV11-2, TRBJ2-2)
CASSLPGELFF

SEQ ID NO: 407285 - protein, 15 aa, Homo sapiens
  CDR3 for alpha chain variable domain of TCR clone 203643 (TRAV1-2, TRAJ31)
CVSEDATHVWRWNSA

SEQ ID NO: 407286 - protein, 14 aa, Homo sapiens
  CDR3 for beta chain variable domain of TCR clone 203643 (TRBV19, TRBJ2-1)
CASPTFVLSGEQFF

SEQ ID NO: 407287 - protein, 14 aa, Homo sapiens
  CDR3 for alpha chain variable domain of TCR clone 203644 (TRAV17, TRAJ31)
CATDLRSNNARLMF

SEQ ID NO: 407288 - protein, 14 aa, Homo sapiens
  CDR3 for beta chain variable domain of TCR clone 203644 (TRBV12-4, TRBJ2-5)
CASSLWQKQETQYF

SEQ ID NO: 407289 - protein, 15 aa, Homo sapiens
  CDR3 for alpha chain variable domain of TCR clone 203645 (TRAV3, TRAJ9)
CAVRDSNTGGFKTIF

SEQ ID NO: 407290 - protein, 16 aa, Homo sapiens
  CDR3 for beta chain variable domain of TCR clone 203645 (TRBV15, TRBJ2-1)
CATSPTTGQGMETQYF

SEQ ID NO: 407291 - protein, 14 aa, Homo sapiens
  CDR3 for alpha chain variable domain of TCR clone 203646 (TRAV17, TRAJ35)
CATDRPGFGNVLHC

SEQ ID NO: 407292 - protein, 15 aa, Homo sapiens
  CDR3 for beta chain variable domain of TCR clone 203646 (TRBV28, TRBJ2-5)
CASSSGSVIQETQYF

SEQ ID NO: 407293 - protein, 12 aa, Homo sapiens
  CDR3 for alpha chain variable domain of TCR clone 203647 (TRAV12-2, TRAJ16)
CAVAPDGQKLLF

SEQ ID NO: 407294 - protein, 16 aa, Homo sapiens
  CDR3 for beta chain variable domain of TCR clone 203647 (TRBV7-3, TRBJ2-1)
CASSLEGYRSYNEQFF

SEQ ID NO: 407295 - protein, 13 aa, Homo sapiens
  CDR3 for alpha chain variable domain of TCR clone 203648 (TRAV21, TRAJ20)
CAVGVFADYKLSF

SEQ ID NO: 407296 - protein, 17 aa, Homo sapiens
  CDR3 for beta chain variable domain of TCR clone 203648 (TRBV20-1, TRBJ2-1)
CSAPPRLAGTRYNEQFF

SEQ ID NO: 407297 - protein, 13 aa, Homo sapiens
  CDR3 for alpha chain variable domain of TCR clone 203649 (TRAV23/DV6, TRAJ12)
CAPRVDSSYKLIF

SEQ ID NO: 407298 - protein, 12 aa, Homo sapiens
  CDR3 for beta chain variable domain of TCR clone 203649 (TRBV7-6, TRBJ2-5)
CACSLSQETQYF

SEQ ID NO: 407299 - protein, 14 aa, Homo sapiens
  CDR3 for alpha chain variable domain of TCR clone 203650 (TRAV12-1, TRAJ26)
CVVKGSNYGQNFVF

SEQ ID NO: 407300 - protein, 14 aa, Homo sapiens
  CDR3 for beta chain variable domain of TCR clone 203650 (TRBV12-5, TRBJ2-5)
CASGSRTHQETQYF

SEQ ID NO: 407301 - protein, 14 aa, Homo sapiens
  CDR3 for alpha chain variable domain of TCR clone 203651 (TRAV1-2, TRAJ16)
CAVNRSSDGQKLLF

SEQ ID NO: 407302 - protein, 16 aa, Homo sapiens
  CDR3 for beta chain variable domain of TCR clone 203651 (TRBV12-4, TRBJ2-5)
CASSFFVRGRQETQYF

SEQ ID NO: 407303 - protein, 14 aa, Homo sapiens
  CDR3 for alpha chain variable domain of TCR clone 203652 (TRAV8-3, TRAJ17)
CCGCGKAAGNKLTF

SEQ ID NO: 407304 - protein, 14 aa, Homo sapiens
  CDR3 for beta chain variable domain of TCR clone 203652 (TRBV4-2, TRBJ1-2)
CASSQVGQNYGYAF

SEQ ID NO: 407305 - protein, 11 aa, Homo sapiens
  CDR3 for alpha chain variable domain of TCR clone 203653 (TRAV35, TRAJ34)
CWARNTDKLIF

SEQ ID NO: 407306 - protein, 14 aa, Homo sapiens
  CDR3 for beta chain variable domain of TCR clone 203653 (TRBV5-1, TRBJ2-7)
CASSRGESLYEQYY

SEQ ID NO: 407307 - protein, 18 aa, Homo sapiens
  CDR3 for alpha chain variable domain of TCR clone 203654 (TRAV21, TRAJ52)
CAVRPSPAGVTSYGKLTF

SEQ ID NO: 407308 - protein, 16 aa, Homo sapiens
  CDR3 for beta chain variable domain of TCR clone 203654 (TRBV13, TRBJ2-3)
CQQPLQGSGGRNTQYF

SEQ ID NO: 407309 - protein, 14 aa, Homo sapiens
  CDR3 for alpha chain variable domain of TCR clone 203655 (TRAV8-2, TRAJ37)
CVVSISGNTGILIF

SEQ ID NO: 407310 - protein, 13 aa, Homo sapiens
  CDR3 for beta chain variable domain of TCR clone 203655 (TRBV7-8, TRBJ2-7)
RRVRLTEMGEQYF

SEQ ID NO: 407311 - protein, 14 aa, Homo sapiens
  CDR3 for alpha chain variable domain of TCR clone 203656 (TRAV12-2, TRAJ53)
CRERGGGSNYKLTF

SEQ ID NO: 407312 - protein, 13 aa, Homo sapiens
  CDR3 for beta chain variable domain of TCR clone 203656 (TRBV10-3, TRBJ2-7)
CASKLALNYEQYF

SEQ ID NO: 407313 - protein, 14 aa, Homo sapiens
  CDR3 for alpha chain variable domain of TCR clone 203657 (TRAV12-2, TRAJ33)
CAVKRARSNYQLIW

SEQ ID NO: 407314 - protein, 16 aa, Homo sapiens
  CDR3 for beta chain variable domain of TCR clone 203657 (TRBV20-1, TRBJ2-1)
CSALTWTSGSYNEQFF

SEQ ID NO: 407315 - protein, 13 aa, Homo sapiens
  CDR3 for alpha chain variable domain of TCR clone 203658 (TRAV12-1, TRAJ33)
CGDAPDSNYQLIW

SEQ ID NO: 407316 - protein, 12 aa, Homo sapiens
  CDR3 for beta chain variable domain of TCR clone 203658 (TRBV5-7, TRBJ2-7)
CASSLGRYEQHF

SEQ ID NO: 407317 - protein, 16 aa, Homo sapiens
  CDR3 for alpha chain variable domain of TCR clone 203659 (TRAV30, TRAJ24)
CGTEIVDADSWGKFQF

SEQ ID NO: 407318 - protein, 15 aa, Homo sapiens
  CDR3 for beta chain variable domain of TCR clone 203659 (TRBV7-9, TRBJ1-4)
CASSARTGGNEKLFV

SEQ ID NO: 407319 - protein, 14 aa, Homo sapiens
  CDR3 for alpha chain variable domain of TCR clone 203660 (TRAV1-2, TRAJ16)
CAANRFSDGQKLLF

SEQ ID NO: 407320 - protein, 15 aa, Homo sapiens
  CDR3 for beta chain variable domain of TCR clone 203660 (TRBV2, TRBJ2-1)
CASSEEREGDNEQFF

SEQ ID NO: 407321 - protein, 14 aa, Homo sapiens
  CDR3 for alpha chain variable domain of TCR clone 203661 (TRAV16, TRAJ26)
CALSSANYGQNFVF

SEQ ID NO: 407322 - protein, 15 aa, Homo sapiens
  CDR3 for beta chain variable domain of TCR clone 203661 (TRBV28, TRBJ2-1)
CASSGLAEVDNEQFF

SEQ ID NO: 407323 - protein, 13 aa, Homo sapiens
  CDR3 for alpha chain variable domain of TCR clone 203662 (TRAV17, TRAJ22)
CAGRRGSARQRTF

SEQ ID NO: 407324 - protein, 14 aa, Homo sapiens
  CDR3 for beta chain variable domain of TCR clone 203662 (TRBV19, TRBJ1-1)
CASSITGWETEAFF

SEQ ID NO: 407325 - protein, 14 aa, Homo sapiens
  CDR3 for alpha chain variable domain of TCR clone 203663 (TRAV12-1, TRAJ4)
CVVPLKSGYNKLIF

SEQ ID NO: 407326 - protein, 13 aa, Homo sapiens
  CDR3 for beta chain variable domain of TCR clone 203663 (TRBV27, TRBJ2-7)
CASGRGGAYEQHF

SEQ ID NO: 407327 - protein, 13 aa, Homo sapiens
  CDR3 for alpha chain variable domain of TCR clone 203664 (TRAV8-3, TRAJ44)
CAVVAGTASKLTF

SEQ ID NO: 407328 - protein, 14 aa, Homo sapiens
  CDR3 for beta chain variable domain of TCR clone 203664 (TRBV11-2, TRBJ2-3)
CASSRLARTDTQYF

SEQ ID NO: 407329 - protein, 13 aa, Homo sapiens
  CDR3 for alpha chain variable domain of TCR clone 203665 (TRAV2, TRAJ40)
CAVVTSGTHKYIF

SEQ ID NO: 407330 - protein, 15 aa, Homo sapiens
  CDR3 for beta chain variable domain of TCR clone 203665 (TRBV7-9, TRBJ1-5)
CASSQGHQPNQPQHF

SEQ ID NO: 407331 - protein, 14 aa, Homo sapiens
  CDR3 for alpha chain variable domain of TCR clone 203666 (TRAV8-4, TRAJ13)
CAVTLSVGYQKVTF

SEQ ID NO: 407332 - protein, 14 aa, Homo sapiens
  CDR3 for beta chain variable domain of TCR clone 203666 (TRBV7-2, TRBJ1-2)
CTSSQTGSTYGYTL

SEQ ID NO: 407333 - protein, 17 aa, Homo sapiens
  CDR3 for alpha chain variable domain of TCR clone 203667 (TRAV3, TRAJ12)
CAVRDGGRMDSSYKLIF

SEQ ID NO: 407334 - protein, 16 aa, Homo sapiens
  CDR3 for beta chain variable domain of TCR clone 203667 (TRBV7-3, TRBJ2-1)
CASSLEGYRSYNEQFF

SEQ ID NO: 407335 - protein, 15 aa, Homo sapiens
  CDR3 for alpha chain variable domain of TCR clone 203668 (TRAV16, TRAJ17)
CALSGQEAAGNKLTF

SEQ ID NO: 407336 - protein, 16 aa, Homo sapiens
  CDR3 for beta chain variable domain of TCR clone 203668 (TRBV12-5, TRBJ2-5)
CASGPRTSGNQETQYF

SEQ ID NO: 407337 - protein, 12 aa, Homo sapiens
  CDR3 for alpha chain variable domain of TCR clone 203669 (TRAV5, TRAJ37)
CAETPHTGKLIF

SEQ ID NO: 407338 - protein, 17 aa, Homo sapiens
  CDR3 for beta chain variable domain of TCR clone 203669 (TRBV29-1, TRBJ2-3)
CSVPAFRASGGVDTQYF

SEQ ID NO: 407339 - protein, 15 aa, Homo sapiens
  CDR3 for alpha chain variable domain of TCR clone 203670 (TRAV3, TRAJ22)
CAVRDRGGSARQLTF

SEQ ID NO: 407340 - protein, 13 aa, Homo sapiens
  CDR3 for beta chain variable domain of TCR clone 203670 (TRBV12-4, TRBJ1-2)
CASSLRQGKGYTF

SEQ ID NO: 407341 - protein, 16 aa, Homo sapiens
  CDR3 for alpha chain variable domain of TCR clone 203671 (TRAV38-1, TRAJ56)
CAFMKRQTGANSKLTF

SEQ ID NO: 407342 - protein, 15 aa, Homo sapiens
  CDR3 for beta chain variable domain of TCR clone 203671 (TRBV20-1, TRBJ2-7)
CSARDRVSGIDEQYF

SEQ ID NO: 407343 - protein, 15 aa, Homo sapiens
  CDR3 for alpha chain variable domain of TCR clone 203672 (TRAV14/DV4, TRAJ26)
CAMRECQNYGQNFVF

SEQ ID NO: 407344 - protein, 13 aa, Homo sapiens
  CDR3 for beta chain variable domain of TCR clone 203672 (TRBV12-4, TRBJ2-1)
CASSFHSGSEQFF

SEQ ID NO: 407345 - protein, 14 aa, Homo sapiens
  CDR3 for alpha chain variable domain of TCR clone 203673 (TRAV35, TRAJ22)
CARLRPGSARQLTF

SEQ ID NO: 407346 - protein, 15 aa, Homo sapiens
  CDR3 for beta chain variable domain of TCR clone 203673 (TRBV12-4, TRBJ2-5)
RASSPPTGLQETQYF

SEQ ID NO: 407347 - protein, 13 aa, Homo sapiens
  CDR3 for alpha chain variable domain of TCR clone 203674 (TRAV3, TRAJ20)
CCEAFCNDYKLSF

SEQ ID NO: 407348 - protein, 15 aa, Homo sapiens
  CDR3 for beta chain variable domain of TCR clone 203674 (TRBV6-5, TRBJ2-1)
CASSYDARAGNEQFF

SEQ ID NO: 407349 - protein, 15 aa, Homo sapiens
  CDR3 for alpha chain variable domain of TCR clone 203675 (TRAV3, TRAJ4)
RAVRDGTGGYNKLIF

SEQ ID NO: 407350 - protein, 13 aa, Homo sapiens
  CDR3 for beta chain variable domain of TCR clone 203675 (TRBV12-5, TRBJ1-2)
CASGVRTGNGYTF

SEQ ID NO: 407351 - protein, 14 aa, Homo sapiens
  CDR3 for alpha chain variable domain of TCR clone 203676 (TRAV29/DV5, TRAJ49)
CAASLSNTGNQFYF

SEQ ID NO: 407352 - protein, 21 aa, Homo sapiens
  CDR3 for beta chain variable domain of TCR clone 203676 (TRBV9, TRBJ2-5)
CASRGRLAGGPEDPVLLARHA

SEQ ID NO: 407353 - protein, 13 aa, Homo sapiens
  CDR3 for alpha chain variable domain of TCR clone 203677 (TRAV13-1, TRAJ12)
CSKYMGSSYKLIF

SEQ ID NO: 407354 - protein, 14 aa, Homo sapiens
  CDR3 for beta chain variable domain of TCR clone 203677 (TRBV29-1, TRBJ2-3)
CSARAGAGTDTQNF

SEQ ID NO: 407355 - protein, 15 aa, Homo sapiens
  CDR3 for alpha chain variable domain of TCR clone 203678 (TRAV23/DV6, TRAJ13)
CAAWPGGGGYQKVTF

SEQ ID NO: 407356 - protein, 14 aa, Homo sapiens
  CDR3 for beta chain variable domain of TCR clone 203678 (TRBV20-1, TRBJ1-1)
CSAQTRIGGTEAFF

SEQ ID NO: 407357 - protein, 14 aa, Homo sapiens
  CDR3 for alpha chain variable domain of TCR clone 203679 (TRAV8-3, TRAJ16)
CAVDRFSDGQKLLF

SEQ ID NO: 407358 - protein, 15 aa, Homo sapiens
  CDR3 for beta chain variable domain of TCR clone 203679 (TRBV19, TRBJ2-4)
CASRGPRRGENIQYF

SEQ ID NO: 407359 - protein, 15 aa, Homo sapiens
  CDR3 for alpha chain variable domain of TCR clone 203680 (TRAV8-3, TRAJ11)
CAVGLLNSGYSTLTF

SEQ ID NO: 407360 - protein, 13 aa, Homo sapiens
  CDR3 for beta chain variable domain of TCR clone 203680 (TRBV7-9, TRBJ2-7)
CASSFAGAYEQYF

SEQ ID NO: 407361 - protein, 14 aa, Homo sapiens
  CDR3 for alpha chain variable domain of TCR clone 203681 (TRAV1-2, TRAJ8)
CAVREDTGFQTLVF

SEQ ID NO: 407362 - protein, 16 aa, Homo sapiens
  CDR3 for beta chain variable domain of TCR clone 203681 (TRBV12-5, TRBJ2-5)
CASGPRTSGNQETQYF

SEQ ID NO: 407363 - protein, 18 aa, Homo sapiens
  CDR3 for alpha chain variable domain of TCR clone 203682 (TRAV26-1, TRAJ22)
CIVRVSFWFCKAIDRCIW

SEQ ID NO: 407364 - protein, 13 aa, Homo sapiens
  CDR3 for beta chain variable domain of TCR clone 203682 (TRBV7-9, TRBJ1-2)
CASSLKQNYGYTF

SEQ ID NO: 407365 - protein, 17 aa, Homo sapiens
  CDR3 for alpha chain variable domain of TCR clone 203683 (TRAV26-1, TRAJ53)
CIVRVDDSGGSNYKLTF

SEQ ID NO: 407366 - protein, 16 aa, Homo sapiens
  CDR3 for beta chain variable domain of TCR clone 203683 (TRBV10-3, TRBJ2-1)
CAIRGGGRGDYNEQFF

SEQ ID NO: 407367 - protein, 10 aa, Homo sapiens
  CDR3 for alpha chain variable domain of TCR clone 203684 (TRAV12-1, TRAJ33)
CVASNYQLIW

SEQ ID NO: 407368 - protein, 13 aa, Homo sapiens
  CDR3 for beta chain variable domain of TCR clone 203684 (TRBV19, TRBJ1-2)
CASSVPGQDGYTF

SEQ ID NO: 407369 - protein, 16 aa, Homo sapiens
  CDR3 for alpha chain variable domain of TCR clone 203685 (TRAV4, TRAJ22)
SLVGDLYSGSARQLTF

SEQ ID NO: 407370 - protein, 14 aa, Homo sapiens
  CDR3 for beta chain variable domain of TCR clone 203685 (TRBV7-2, TRBJ2-2)
CASRGQGAAGELFF

SEQ ID NO: 407371 - protein, 14 aa, Homo sapiens
  CDR3 for alpha chain variable domain of TCR clone 203686 (TRAV13-1, TRAJ35)
CSASKGGFGNVLHC

SEQ ID NO: 407372 - protein, 13 aa, Homo sapiens
  CDR3 for beta chain variable domain of TCR clone 203686 (TRBV7-3, TRBJ1-1)
CASSQDWGADDFF

SEQ ID NO: 407373 - protein, 18 aa, Homo sapiens
  CDR3 for alpha chain variable domain of TCR clone 203687 (TRAV17, TRAJ45)
CATSLDLYSGGGADGLSF

SEQ ID NO: 407374 - protein, 15 aa, Homo sapiens
  CDR3 for beta chain variable domain of TCR clone 203687 (TRBV11-2, TRBJ2-1)
CASSKNRGLIYEQFF

SEQ ID NO: 407375 - protein, 13 aa, Homo sapiens
  CDR3 for alpha chain variable domain of TCR clone 203688 (TRAV21, TRAJ57)
CAVTQGGSEKLVF

SEQ ID NO: 407376 - protein, 16 aa, Homo sapiens
  CDR3 for beta chain variable domain of TCR clone 203688 (TRBV29-1, TRBJ2-7)
CSVEDAEGGAAYEQYF

SEQ ID NO: 407377 - protein, 14 aa, Homo sapiens
  CDR3 for alpha chain variable domain of TCR clone 203689 (TRAV9-2, TRAJ39)
CALYIYNAGNMLTL

SEQ ID NO: 407378 - protein, 14 aa, Homo sapiens
  CDR3 for beta chain variable domain of TCR clone 203689 (TRBV7-2, TRBJ2-7)
CASRSQGAAYEQYF

SEQ ID NO: 407379 - protein, 14 aa, Homo sapiens
  CDR3 for alpha chain variable domain of TCR clone 203690 (TRAV1-1, TRAJ27)
CAVIYNTNAGKSNF

SEQ ID NO: 407380 - protein, 13 aa, Homo sapiens
  CDR3 for beta chain variable domain of TCR clone 203690 (TRBV12-5, TRBJ1-2)
YASGVRTGNGYTF

SEQ ID NO: 407381 - protein, 16 aa, Homo sapiens
  CDR3 for alpha chain variable domain of TCR clone 203691 (TRAV3, TRAJ37)
CAVRGKGSGNTGKLIF

SEQ ID NO: 407382 - protein, 15 aa, Homo sapiens
  CDR3 for beta chain variable domain of TCR clone 203691 (TRBV6-5, TRBJ1-2)
CASSYSQAFNYGYTF

SEQ ID NO: 407383 - protein, 13 aa, Homo sapiens
  CDR3 for alpha chain variable domain of TCR clone 203692 (TRAV23/DV6, TRAJ47)
CAASSQYGNKLVF

SEQ ID NO: 407384 - protein, 14 aa, Homo sapiens
  CDR3 for beta chain variable domain of TCR clone 203692 (TRBV4-1, TRBJ2-2)
CASSQAVNTGELFF

SEQ ID NO: 407385 - protein, 13 aa, Homo sapiens
  CDR3 for alpha chain variable domain of TCR clone 203693 (TRAV26-1, TRAJ29)
CIVRRSGNTPLVF

SEQ ID NO: 407386 - protein, 13 aa, Homo sapiens
  CDR3 for beta chain variable domain of TCR clone 203693 (TRBV7-3, TRBJ1-1)
CASSQDWGAEAFF

SEQ ID NO: 407387 - protein, 16 aa, Homo sapiens
  CDR3 for alpha chain variable domain of TCR clone 203694 (TRAV26-1, TRAJ38)
CIVRVELGGNNRKLIW

SEQ ID NO: 407388 - protein, 14 aa, Homo sapiens
  CDR3 for beta chain variable domain of TCR clone 203694 (TRBV5-1, TRBJ2-3)
CASRPGLAADTQYF

SEQ ID NO: 407389 - protein, 12 aa, Homo sapiens
  CDR3 for alpha chain variable domain of TCR clone 203695 (TRAV8-4, TRAJ43)
CAVSVNNNDMRF

SEQ ID NO: 407390 - protein, 13 aa, Homo sapiens
  CDR3 for beta chain variable domain of TCR clone 203695 (TRBV24-1, TRBJ2-2)
CATSDWSTGELFF

SEQ ID NO: 407391 - protein, 16 aa, Homo sapiens
  CDR3 for alpha chain variable domain of TCR clone 203696 (TRAV1-2, TRAJ35)
CAVRGLTIGFGNVLHC

SEQ ID NO: 407392 - protein, 13 aa, Homo sapiens
  CDR3 for beta chain variable domain of TCR clone 203696 (TRBV12-4, TRBJ2-1)
CASRQPSNNEQFF

SEQ ID NO: 407393 - protein, 10 aa, Homo sapiens
  CDR3 for alpha chain variable domain of TCR clone 203697 (TRAV8-3, TRAJ33)
CAVGAIATIS

SEQ ID NO: 407394 - protein, 15 aa, Homo sapiens
  CDR3 for beta chain variable domain of TCR clone 203697 (TRBV20-1, TRBJ2-7)
CSARDRVSGMDEQYF

SEQ ID NO: 407395 - protein, 11 aa, Homo sapiens
  CDR3 for alpha chain variable domain of TCR clone 203698 (TRAV39, TRAJ49)
CAVDISTQFYF

SEQ ID NO: 407396 - protein, 16 aa, Homo sapiens
  CDR3 for beta chain variable domain of TCR clone 203698 (TRBV5-4, TRBJ2-3)
CASQQPGAGGADTQYF

SEQ ID NO: 407397 - protein, 20 aa, Homo sapiens
  CDR3 for alpha chain variable domain of TCR clone 203699 (TRAV12-1, TRAJ42)
SSVIQPPTSVKGGSQGNLIF

SEQ ID NO: 407398 - protein, 18 aa, Homo sapiens
  CDR3 for beta chain variable domain of TCR clone 203699 (TRBV11-2, TRBJ2-3)
CASSLGGSSRGAPNTQYF

SEQ ID NO: 407399 - protein, 15 aa, Homo sapiens
  CDR3 for alpha chain variable domain of TCR clone 203700 (TRAV8-3, TRAJ32)
CAVGPYGGATNKLIF

SEQ ID NO: 407400 - protein, 14 aa, Homo sapiens
  CDR3 for beta chain variable domain of TCR clone 203700 (TRBV29-1, TRBJ2-2)
CSVLAKTNTGELFF

SEQ ID NO: 407401 - protein, 13 aa, Homo sapiens
  CDR3 for alpha chain variable domain of TCR clone 203701 (TRAV21, TRAJ27)
CAARPGNAGKSTF

SEQ ID NO: 407402 - protein, 14 aa, Homo sapiens
  CDR3 for beta chain variable domain of TCR clone 203701 (TRBV4-2, TRBJ1-5)
CASSQDSINQPQHF

SEQ ID NO: 407403 - protein, 10 aa, Homo sapiens
  CDR3 for alpha chain variable domain of TCR clone 203702 (TRAV12-2, TRAJ20)
CAVYLYKLSF

SEQ ID NO: 407404 - protein, 18 aa, Homo sapiens
  CDR3 for beta chain variable domain of TCR clone 203702 (TRBV11-2, TRBJ2-3)
CASSLGGASRGAPTTQYF

SEQ ID NO: 407405 - protein, 13 aa, Homo sapiens
  CDR3 for alpha chain variable domain of TCR clone 203703 (TRAV21, TRAJ27)
CAARPGNAGNSTF

SEQ ID NO: 407406 - protein, 14 aa, Homo sapiens
  CDR3 for beta chain variable domain of TCR clone 203703 (TRBV7-7, TRBJ2-2)
CASSRDRSTGELFF

SEQ ID NO: 407407 - protein, 15 aa, Homo sapiens
  CDR3 for alpha chain variable domain of TCR clone 203704 (TRAV10, TRAJ22)
CVVRISSGSARQPTF

SEQ ID NO: 407408 - protein, 16 aa, Homo sapiens
  CDR3 for beta chain variable domain of TCR clone 203704 (TRBV12-4, TRBJ2-3)
CASSFISGSGIDTQYF

SEQ ID NO: 407409 - protein, 17 aa, Homo sapiens
  CDR3 for alpha chain variable domain of TCR clone 203705 (TRAV3, TRAJ42)
CAVRDRGYGGSQGNLIF

SEQ ID NO: 407410 - protein, 14 aa, Homo sapiens
  CDR3 for beta chain variable domain of TCR clone 203705 (TRBV19, TRBJ2-5)
CASSMTGQQETRYF

SEQ ID NO: 407411 - protein, 11 aa, Homo sapiens
  CDR3 for alpha chain variable domain of TCR clone 203706 (TRAV2, TRAJ33)
CAVDSNYQLIW

SEQ ID NO: 407412 - protein, 14 aa, Homo sapiens
  CDR3 for beta chain variable domain of TCR clone 203706 (TRBV5-7, TRBJ2-3)
CASSYFGQVHTQYF

SEQ ID NO: 407413 - protein, 18 aa, Homo sapiens
  CDR3 for alpha chain variable domain of TCR clone 203707 (TRAV21, TRAJ52)
CAVRPSPAGGTSYGKLKF

SEQ ID NO: 407414 - protein, 15 aa, Homo sapiens
  CDR3 for beta chain variable domain of TCR clone 203707 (TRBV27, TRBJ2-1)
CASSNGGGSSNEQFF

SEQ ID NO: 407415 - protein, 12 aa, Homo sapiens
  CDR3 for alpha chain variable domain of TCR clone 203708 (TRAV26-1, TRAJ23)
CIVTPQGGRLIF

SEQ ID NO: 407416 - protein, 13 aa, Homo sapiens
  CDR3 for beta chain variable domain of TCR clone 203708 (TRBV6-6, TRBJ1-5)
CASSRGSNQPQHF

SEQ ID NO: 407417 - protein, 15 aa, Homo sapiens
  CDR3 for alpha chain variable domain of TCR clone 203709 (TRAV12-1, TRAJ44)
CVVFVNTGTASKLTF

SEQ ID NO: 407418 - protein, 15 aa, Homo sapiens
  CDR3 for beta chain variable domain of TCR clone 203709 (TRBV4-2, TRBJ1-2)
CASSQRTGGRDGYTF

SEQ ID NO: 407419 - protein, 14 aa, Homo sapiens
  CDR3 for alpha chain variable domain of TCR clone 203710 (TRAV25, TRAJ22)
CAVRSSGSARQRTF

SEQ ID NO: 407420 - protein, 16 aa, Homo sapiens
  CDR3 for beta chain variable domain of TCR clone 203710 (TRBV4-2, TRBJ1-1)
CASSPSPGRAAPEAFF

SEQ ID NO: 407421 - protein, 14 aa, Homo sapiens
  CDR3 for alpha chain variable domain of TCR clone 203711 (TRAV1-2, TRAJ16)
FAVTRFSDGPKLLF

SEQ ID NO: 407422 - protein, 15 aa, Homo sapiens
  CDR3 for beta chain variable domain of TCR clone 203711 (TRBV9, TRBJ1-6)
CASSVAGTGDSPLHF

SEQ ID NO: 407423 - protein, 15 aa, Homo sapiens
  CDR3 for alpha chain variable domain of TCR clone 203712 (TRAV4, TRAJ39)
CLVGPNNNAGNMLTF

SEQ ID NO: 407424 - protein, 13 aa, Homo sapiens
  CDR3 for beta chain variable domain of TCR clone 203712 (TRBV11-2, TRBJ2-5)
CESSSTGEETQYF

SEQ ID NO: 407425 - protein, 13 aa, Homo sapiens
  CDR3 for alpha chain variable domain of TCR clone 203713 (TRAV27, TRAJ42)
CAGARGSQGNLSF

SEQ ID NO: 407426 - protein, 15 aa, Homo sapiens
  CDR3 for beta chain variable domain of TCR clone 203713 (TRBV10-3, TRBJ2-2)
CAIRTDREDTGELFF

SEQ ID NO: 407427 - protein, 15 aa, Homo sapiens
  CDR3 for alpha chain variable domain of TCR clone 203714 (TRAV17, TRAJ57)
CATGPSQGGSEKLVF

SEQ ID NO: 407428 - protein, 15 aa, Homo sapiens
  CDR3 for beta chain variable domain of TCR clone 203714 (TRBV7-2, TRBJ1-2)
CASSPRAGWNYVYTF

SEQ ID NO: 407429 - protein, 12 aa, Homo sapiens
  CDR3 for alpha chain variable domain of TCR clone 203715 (TRAV3, TRAJ20)
CAVRDHDYKPSF

SEQ ID NO: 407430 - protein, 13 aa, Homo sapiens
  CDR3 for beta chain variable domain of TCR clone 203715 (TRBV9, TRBJ2-7)
CASSVGQGGEQYL

SEQ ID NO: 407431 - protein, 12 aa, Homo sapiens
  CDR3 for alpha chain variable domain of TCR clone 203716 (TRAV12-2, TRAJ8)
CAVNTGFQKLVF

SEQ ID NO: 407432 - protein, 14 aa, Homo sapiens
  CDR3 for beta chain variable domain of TCR clone 203716 (TRBV12-5, TRBJ2-5)
CASGSRTHQETQYF

SEQ ID NO: 407433 - protein, 18 aa, Homo sapiens
  CDR3 for alpha chain variable domain of TCR clone 203717 (TRAV9-2, TRAJ52)
CALSRHNAGGTSYGKLTF

SEQ ID NO: 407434 - protein, 15 aa, Homo sapiens
  CDR3 for beta chain variable domain of TCR clone 203717 (TRBV7-9, TRBJ1-5)
CASSQGHQPNQPQHF

SEQ ID NO: 407435 - protein, 17 aa, Homo sapiens
  CDR3 for alpha chain variable domain of TCR clone 203718 (TRAV3, TRAJ6)
CAVRDGPRAGGSYIPTF

SEQ ID NO: 407436 - protein, 13 aa, Homo sapiens
  CDR3 for beta chain variable domain of TCR clone 203718 (TRBV7-2, TRBJ2-2)
CASISVRAGELFF

SEQ ID NO: 407437 - protein, 14 aa, Homo sapiens
  CDR3 for alpha chain variable domain of TCR clone 203719 (TRAV1-2, TRAJ8)
CAVREDTGFQKLVF

SEQ ID NO: 407438 - protein, 15 aa, Homo sapiens
  CDR3 for beta chain variable domain of TCR clone 203719 (TRBV7-8, TRBJ1-5)
CASSLEGSGNQPQHF

SEQ ID NO: 407439 - protein, 17 aa, Homo sapiens
  CDR3 for alpha chain variable domain of TCR clone 203720 (TRAV8-6, TRAJ58)
CAVSSWVGETSGSRLTF

SEQ ID NO: 407440 - protein, 14 aa, Homo sapiens
  CDR3 for beta chain variable domain of TCR clone 203720 (TRBV4-2, TRBJ2-1)
CASGLDRAYNEQFC

SEQ ID NO: 407441 - protein, 11 aa, Homo sapiens
  CDR3 for alpha chain variable domain of TCR clone 203721 (TRAV21, TRAJ34)
CAHYNTDKVIF

SEQ ID NO: 407442 - protein, 13 aa, Homo sapiens
  CDR3 for beta chain variable domain of TCR clone 203721 (TRBV7-6, TRBJ1-2)
CASSLVADYGYTF

SEQ ID NO: 407443 - protein, 14 aa, Homo sapiens
  CDR3 for alpha chain variable domain of TCR clone 203722 (TRAV35, TRAJ22)
CAGLRPGSARQLTF

SEQ ID NO: 407444 - protein, 13 aa, Homo sapiens
  CDR3 for beta chain variable domain of TCR clone 203722 (TRBV20-1, TRBJ1-1)
CSDRGGGNTEAFF

SEQ ID NO: 407445 - protein, 14 aa, Homo sapiens
  CDR3 for alpha chain variable domain of TCR clone 203723 (TRAV12-2, TRAJ26)
CAVNDYNYGQNFVF

SEQ ID NO: 407446 - protein, 13 aa, Homo sapiens
  CDR3 for beta chain variable domain of TCR clone 203723 (TRBV3-1, TRBJ2-5)
CASSPVLSETQYF

SEQ ID NO: 407447 - protein, 14 aa, Homo sapiens
  CDR3 for alpha chain variable domain of TCR clone 203724 (TRAV12-2, TRAJ13)
CSGKKTGGYQKVTF

SEQ ID NO: 407448 - protein, 16 aa, Homo sapiens
  CDR3 for beta chain variable domain of TCR clone 203724 (TRBV12-4, TRBJ1-5)
CASSSGPRGSNQPQHF

SEQ ID NO: 407449 - protein, 15 aa, Homo sapiens
  CDR3 for alpha chain variable domain of TCR clone 203725 (TRAV38-1, TRAJ48)
CAFTKHAGGNEKLTF

SEQ ID NO: 407450 - protein, 12 aa, Homo sapiens
  CDR3 for beta chain variable domain of TCR clone 203725 (TRBV11-2, TRBJ2-2)
CASSLGGGELFF

SEQ ID NO: 407451 - protein, 15 aa, Homo sapiens
  CDR3 for alpha chain variable domain of TCR clone 203726 (TRAV8-3, TRAJ45)
YASSYSGGGADGLTF

SEQ ID NO: 407452 - protein, 13 aa, Homo sapiens
  CDR3 for beta chain variable domain of TCR clone 203726 (TRBV10-3, TRBJ2-7)
CASKLAVNYEQYV

SEQ ID NO: 407453 - protein, 15 aa, Homo sapiens
  CDR3 for alpha chain variable domain of TCR clone 203727 (TRAV3, TRAJ7)
CAVRDKDNGNNRLAF

SEQ ID NO: 407454 - protein, 19 aa, Homo sapiens
  CDR3 for beta chain variable domain of TCR clone 203727 (TRBV5-8, TRBJ2-3)
CASSFLGTSGSRRTDTQYF

SEQ ID NO: 407455 - protein, 14 aa, Homo sapiens
  CDR3 for alpha chain variable domain of TCR clone 203728 (TRAV1-2, TRAJ16)
CAVNRFSDGQKLLF

SEQ ID NO: 407456 - protein, 15 aa, Homo sapiens
  CDR3 for beta chain variable domain of TCR clone 203728 (TRBV6-1, TRBJ2-3)
CASSERGGITDTQYY

SEQ ID NO: 407457 - protein, 21 aa, Homo sapiens
  CDR3 for alpha chain variable domain of TCR clone 203729 (TRAV30, TRAJ43)
GLPAQLLRNLLPIIELNDMRF

SEQ ID NO: 407458 - protein, 16 aa, Homo sapiens
  CDR3 for beta chain variable domain of TCR clone 203729 (TRBV6-1, TRBJ2-1)
CASILRQGSSYNEQFF

SEQ ID NO: 407459 - protein, 16 aa, Homo sapiens
  CDR3 for alpha chain variable domain of TCR clone 203730 (TRAV30, TRAJ24)
CGTEIVDADGWGKFQF

SEQ ID NO: 407460 - protein, 14 aa, Homo sapiens
  CDR3 for beta chain variable domain of TCR clone 203730 (TRBV18, TRBJ2-7)
CASSPRGGAYEQYF

SEQ ID NO: 407461 - protein, 11 aa, Homo sapiens
  CDR3 for alpha chain variable domain of TCR clone 203731 (TRAV3, TRAJ18)
CAVRDGRGSTR

SEQ ID NO: 407462 - protein, 17 aa, Homo sapiens
  CDR3 for beta chain variable domain of TCR clone 203731 (TRBV5-1, TRBJ2-3)
CASSKIGLADRTDTQYF

SEQ ID NO: 407463 - protein, 13 aa, Homo sapiens
  CDR3 for alpha chain variable domain of TCR clone 203732 (TRAV2, TRAJ40)
CAVVTSGAYKYIF

SEQ ID NO: 407464 - protein, 14 aa, Homo sapiens
  CDR3 for beta chain variable domain of TCR clone 203732 (TRBV10-3, TRBJ1-1)
CAISDGSGVTEAFF

SEQ ID NO: 407465 - protein, 14 aa, Homo sapiens
  CDR3 for alpha chain variable domain of TCR clone 203733 (TRAV26-1, TRAJ16)
CIVRVPSDGQKLLF

SEQ ID NO: 407466 - protein, 17 aa, Homo sapiens
  CDR3 for beta chain variable domain of TCR clone 203733 (TRBV20-1, TRBJ2-1)
CSASSSGLAGSYNEQIF

SEQ ID NO: 407467 - protein, 13 aa, Homo sapiens
  CDR3 for alpha chain variable domain of TCR clone 203734 (TRAV2, TRAJ24)
CAVTTDSWGKLQF

SEQ ID NO: 407468 - protein, 21 aa, Homo sapiens
  CDR3 for beta chain variable domain of TCR clone 203734 (TRBV4-2, TRBJ2-3)
PCSQKTRPCISVPAAPDTQYF

SEQ ID NO: 407469 - protein, 13 aa, Homo sapiens
  CDR3 for alpha chain variable domain of TCR clone 203735 (TRAV12-3, TRAJ33)
CAMGVSSNYQLIW

SEQ ID NO: 407470 - protein, 13 aa, Homo sapiens
  CDR3 for beta chain variable domain of TCR clone 203735 (TRBV7-2, TRBJ2-2)
CASSLAVTGELFF

SEQ ID NO: 407471 - protein, 21 aa, Homo sapiens
  CDR3 for alpha chain variable domain of TCR clone 203736 (TRAV21, TRAJ27)
CAARPGNAGKSTVGDETTLTV

SEQ ID NO: 407472 - protein, 14 aa, Homo sapiens
  CDR3 for beta chain variable domain of TCR clone 203736 (TRBV7-6, TRBJ2-3)
CASSLGTVTDTQYF

SEQ ID NO: 407473 - protein, 11 aa, Homo sapiens
  CDR3 for alpha chain variable domain of TCR clone 203737 (TRAV12-3, TRAJ27)
CAMANSGKSTF

SEQ ID NO: 407474 - protein, 12 aa, Homo sapiens
  CDR3 for beta chain variable domain of TCR clone 203737 (TRBV11-2, TRBJ2-2)
CASSLGGGELFF

SEQ ID NO: 407475 - protein, 11 aa, Homo sapiens
  CDR3 for alpha chain variable domain of TCR clone 203738 (TRAV3, TRAJ17)
PRGAAGNRLTF

SEQ ID NO: 407476 - protein, 12 aa, Homo sapiens
  CDR3 for beta chain variable domain of TCR clone 203738 (TRBV11-2, TRBJ2-2)
CASSLGGGELFF

SEQ ID NO: 407477 - protein, 16 aa, Homo sapiens
  CDR3 for alpha chain variable domain of TCR clone 203739 (TRAV30, TRAJ24)
CGTEMVDADSWGKFQF

SEQ ID NO: 407478 - protein, 14 aa, Homo sapiens
  CDR3 for beta chain variable domain of TCR clone 203739 (TRBV9, TRBJ2-7)
CASSVGVGSYEQYF

SEQ ID NO: 407479 - protein, 12 aa, Homo sapiens
  CDR3 for alpha chain variable domain of TCR clone 203740 (TRAV16, TRAJ56)
CAPTGANSKLTF

SEQ ID NO: 407480 - protein, 17 aa, Homo sapiens
  CDR3 for beta chain variable domain of TCR clone 203740 (TRBV27, TRBJ2-6)
CSSSLTGFASGANVLTY

SEQ ID NO: 407481 - protein, 16 aa, Homo sapiens
  CDR3 for alpha chain variable domain of TCR clone 203741 (TRAV3, TRAJ37)
CAVRGKGSGTTGKLIF

SEQ ID NO: 407482 - protein, 15 aa, Homo sapiens
  CDR3 for beta chain variable domain of TCR clone 203741 (TRBV7-9, TRBJ2-2)
CASGPLDTFPGELFF

SEQ ID NO: 407483 - protein, 14 aa, Homo sapiens
  CDR3 for alpha chain variable domain of TCR clone 203742 (TRAV1-2, TRAJ16)
CAVNRFSDGQKLLF

SEQ ID NO: 407484 - protein, 12 aa, Homo sapiens
  CDR3 for beta chain variable domain of TCR clone 203742 (TRBV14, TRBJ1-1)
CASSQLKGLAFV

SEQ ID NO: 407485 - protein, 16 aa, Homo sapiens
  CDR3 for alpha chain variable domain of TCR clone 203743 (TRAV30, TRAJ24)
CGTEIVDADSWETFQF

SEQ ID NO: 407486 - protein, 14 aa, Homo sapiens
  CDR3 for beta chain variable domain of TCR clone 203743 (TRBV20-1, TRBJ1-1)
CSAQTRIGGTEAFF

SEQ ID NO: 407487 - protein, 17 aa, Homo sapiens
  CDR3 for alpha chain variable domain of TCR clone 203744 (TRAV12-2, TRAJ6)
CAPQGPPRVGGSYIPTF

SEQ ID NO: 407488 - protein, 16 aa, Homo sapiens
  CDR3 for beta chain variable domain of TCR clone 203744 (TRBV19, TRBJ2-2)
CASSTARASNTGELFF

SEQ ID NO: 407489 - protein, 13 aa, Homo sapiens
  CDR3 for alpha chain variable domain of TCR clone 203745 (TRAV8-1, TRAJ30)
CAVNGRRDDKIII

SEQ ID NO: 407490 - protein, 15 aa, Homo sapiens
  CDR3 for beta chain variable domain of TCR clone 203745 (TRBV5-7, TRBJ1-5)
CASSYGKLWDQPQHF

SEQ ID NO: 407491 - protein, 14 aa, Homo sapiens
  CDR3 for alpha chain variable domain of TCR clone 203746 (TRAV23/DV6, TRAJ8)
WPASKAAGFQRLVF

SEQ ID NO: 407492 - protein, 15 aa, Homo sapiens
  CDR3 for beta chain variable domain of TCR clone 203746 (TRBV28, TRBJ2-3)
CASSPDRQGANTQYF

SEQ ID NO: 407493 - protein, 13 aa, Homo sapiens
  CDR3 for alpha chain variable domain of TCR clone 203747 (TRAV17, TRAJ40)
CAGALGGTYKYIF

SEQ ID NO: 407494 - protein, 16 aa, Homo sapiens
  CDR3 for beta chain variable domain of TCR clone 203747 (TRBV7-2, TRBJ1-4)
CASGLAPGRRDEKLFF

SEQ ID NO: 407495 - protein, 11 aa, Homo sapiens
  CDR3 for alpha chain variable domain of TCR clone 203748 (TRAV3, TRAJ21)
CAVGNFNKFYF

SEQ ID NO: 407496 - protein, 17 aa, Homo sapiens
  CDR3 for beta chain variable domain of TCR clone 203748 (TRBV19, TRBJ2-2)
CASSRNPGGFGTGELFF

SEQ ID NO: 407497 - protein, 16 aa, Homo sapiens
  CDR3 for alpha chain variable domain of TCR clone 203749 (TRAV3, TRAJ37)
CAVRVRGSGNTGKLIL

SEQ ID NO: 407498 - protein, 15 aa, Homo sapiens
  CDR3 for beta chain variable domain of TCR clone 203749 (TRBV3-1, TRBJ2-1)
CASSPRDSGFNEQFF

SEQ ID NO: 407499 - protein, 13 aa, Homo sapiens
  CDR3 for alpha chain variable domain of TCR clone 203750 (TRAV14/DV4, TRAJ15)
CNGRDQAGTALIF

SEQ ID NO: 407500 - protein, 16 aa, Homo sapiens
  CDR3 for beta chain variable domain of TCR clone 203750 (TRBV15, TRBJ2-3)
CATSRDLGIVTDTQYF

SEQ ID NO: 407501 - protein, 15 aa, Homo sapiens
  CDR3 for alpha chain variable domain of TCR clone 203751 (TRAV8-3, TRAJ41)
CAVGSNSNSGDALNF

SEQ ID NO: 407502 - protein, 17 aa, Homo sapiens
  CDR3 for beta chain variable domain of TCR clone 203751 (TRBV25-1, TRBJ2-1)
CASSAYGQVRGVYEQFF

SEQ ID NO: 407503 - protein, 11 aa, Homo sapiens
  CDR3 for alpha chain variable domain of TCR clone 203752 (TRAV12-3, TRAJ49)
CAANTGNQFYF

SEQ ID NO: 407504 - protein, 11 aa, Homo sapiens
  CDR3 for beta chain variable domain of TCR clone 203752 (TRBV11-2, TRBJ2-7)
CASSSGLWQYF

SEQ ID NO: 407505 - protein, 12 aa, Homo sapiens
  CDR3 for alpha chain variable domain of TCR clone 203753 (TRAV12-2, TRAJ31)
CAVNTPDERLMF

SEQ ID NO: 407506 - protein, 15 aa, Homo sapiens
  CDR3 for beta chain variable domain of TCR clone 203753 (TRBV4-2, TRBJ1-1)
CASSQDQGLNTEAFF

SEQ ID NO: 407507 - protein, 19 aa, Homo sapiens
  CDR3 for alpha chain variable domain of TCR clone 203754 (TRAV1-2, TRAJ26)
CLLPLCCERPDNYCQNFVF

SEQ ID NO: 407508 - protein, 13 aa, Homo sapiens
  CDR3 for beta chain variable domain of TCR clone 203754 (TRBV19, TRBJ1-2)
CASSQGQVYGYTF

SEQ ID NO: 407509 - protein, 11 aa, Homo sapiens
  CDR3 for alpha chain variable domain of TCR clone 203755 (TRAV13-1, TRAJ20)
CAASNDYKLSC

SEQ ID NO: 407510 - protein, 15 aa, Homo sapiens
  CDR3 for beta chain variable domain of TCR clone 203755 (TRBV28, TRBJ2-3)
CASSPDRQGANTQYF

SEQ ID NO: 407511 - protein, 21 aa, Homo sapiens
  CDR3 for alpha chain variable domain of TCR clone 203756 (TRAV8-4, TRAJ47)
HLTKPSAHMSDSAERGNKLVF

SEQ ID NO: 407512 - protein, 14 aa, Homo sapiens
  CDR3 for beta chain variable domain of TCR clone 203756 (TRBV7-9, TRBJ2-1)
CASSPRDSLYEQFF

SEQ ID NO: 407513 - protein, 17 aa, Homo sapiens
  CDR3 for alpha chain variable domain of TCR clone 203757 (TRAV3, TRAJ6)
CAVRDGPRAGGSSIPQF

SEQ ID NO: 407514 - protein, 14 aa, Homo sapiens
  CDR3 for beta chain variable domain of TCR clone 203757 (TRBV7-2, TRBJ2-7)
CASSPKTSFYEQYF

SEQ ID NO: 407515 - protein, 12 aa, Homo sapiens
  CDR3 for alpha chain variable domain of TCR clone 203758 (TRAV13-1, TRAJ49)
CAAPNTGNQFYF

SEQ ID NO: 407516 - protein, 17 aa, Homo sapiens
  CDR3 for beta chain variable domain of TCR clone 203758 (TRBV25-1, TRBJ2-7)
CASSDARVVFSSFEQYF

SEQ ID NO: 407517 - protein, 16 aa, Homo sapiens
  CDR3 for alpha chain variable domain of TCR clone 203759 (TRAV30, TRAJ24)
CGTEIVDADSWGKFQF

SEQ ID NO: 407518 - protein, 14 aa, Homo sapiens
  CDR3 for beta chain variable domain of TCR clone 203759 (TRBV4-1, TRBJ2-7)
CASRLTSGSYEQYF

SEQ ID NO: 407519 - protein, 15 aa, Homo sapiens
  CDR3 for alpha chain variable domain of TCR clone 203760 (TRAV12-2, TRAJ20)
CVVKGGFGAGTTVTV

SEQ ID NO: 407520 - protein, 13 aa, Homo sapiens
  CDR3 for beta chain variable domain of TCR clone 203760 (TRBV12-4, TRBJ2-7)
CASSPGQLYEQYF

SEQ ID NO: 407521 - protein, 18 aa, Homo sapiens
  CDR3 for alpha chain variable domain of TCR clone 203761 (TRAV9-2, TRAJ52)
CALSRHNAGGTSYGKLTF

SEQ ID NO: 407522 - protein, 13 aa, Homo sapiens
  CDR3 for beta chain variable domain of TCR clone 203761 (TRBV7-9, TRBJ1-2)
CASSLKQNYGQTF

SEQ ID NO: 407523 - protein, 16 aa, Homo sapiens
  CDR3 for alpha chain variable domain of TCR clone 203762 (TRAV12-3, TRAJ53)
CAMSPGSGGSNYKLTF

SEQ ID NO: 407524 - protein, 14 aa, Homo sapiens
  CDR3 for beta chain variable domain of TCR clone 203762 (TRBV20-1, TRBJ2-7)
CSSPELAGVGEQYF

SEQ ID NO: 407525 - protein, 14 aa, Homo sapiens
  CDR3 for alpha chain variable domain of TCR clone 203763 (TRAV14/DV4, TRAJ7)
CAMREAYGNNRLAF

SEQ ID NO: 407526 - protein, 15 aa, Homo sapiens
  CDR3 for beta chain variable domain of TCR clone 203763 (TRBV19, TRBJ2-1)
CASSINREASHEQFF

SEQ ID NO: 407527 - protein, 13 aa, Homo sapiens
  CDR3 for alpha chain variable domain of TCR clone 203764 (TRAV27, TRAJ45)
CRSSGGGADGLTF

SEQ ID NO: 407528 - protein, 15 aa, Homo sapiens
  CDR3 for beta chain variable domain of TCR clone 203764 (TRBV9, TRBJ2-2)
CASSAFAGASGELFF

SEQ ID NO: 407529 - protein, 12 aa, Homo sapiens
  CDR3 for alpha chain variable domain of TCR clone 203765 (TRAV12-2, TRAJ31)
CAVNTPDARLMV

SEQ ID NO: 407530 - protein, 12 aa, Homo sapiens
  CDR3 for beta chain variable domain of TCR clone 203765 (TRBV12-4, TRBJ2-7)
CASSLGGYEQYF

SEQ ID NO: 407531 - protein, 13 aa, Homo sapiens
  CDR3 for alpha chain variable domain of TCR clone 203766 (TRAV3, TRAJ21)
FAVREPDFNKFYF

SEQ ID NO: 407532 - protein, 14 aa, Homo sapiens
  CDR3 for beta chain variable domain of TCR clone 203766 (TRBV4-2, TRBJ2-1)
CASGLDRAYNEQFF

SEQ ID NO: 407533 - protein, 16 aa, Homo sapiens
  CDR3 for alpha chain variable domain of TCR clone 203767 (TRAV3, TRAJ37)
CAVRVRGSGNTGKLIF

SEQ ID NO: 407534 - protein, 13 aa, Homo sapiens
  CDR3 for beta chain variable domain of TCR clone 203767 (TRBV7-9, TRBJ1-2)
CASSLKQNYDYTF

SEQ ID NO: 407535 - protein, 17 aa, Homo sapiens
  CDR3 for alpha chain variable domain of TCR clone 203768 (TRAV23/DV6, TRAJ3)
CSNHFCFGWSSASKIIF

SEQ ID NO: 407536 - protein, 15 aa, Homo sapiens
  CDR3 for beta chain variable domain of TCR clone 203768 (TRBV19, TRBJ1-6)
CANSTQGAVGSPLVF

SEQ ID NO: 407537 - protein, 13 aa, Homo sapiens
  CDR3 for alpha chain variable domain of TCR clone 203769 (TRAV3, TRAJ3)
FAVRALGASKIIF

SEQ ID NO: 407538 - protein, 18 aa, Homo sapiens
  CDR3 for beta chain variable domain of TCR clone 203769 (TRBV12-4, TRBJ2-5)
CASSPSGGRDPVLRARHA

SEQ ID NO: 407539 - protein, 14 aa, Homo sapiens
  CDR3 for alpha chain variable domain of TCR clone 203770 (TRAV1-2, TRAJ16)
CAVNRFSDGQKLLF

SEQ ID NO: 407540 - protein, 14 aa, Homo sapiens
  CDR3 for beta chain variable domain of TCR clone 203770 (TRBV20-1, TRBJ1-5)
SAVPRTGVGQHQHF

SEQ ID NO: 407541 - protein, 14 aa, Homo sapiens
  CDR3 for alpha chain variable domain of TCR clone 203771 (TRAV30, TRAJ26)
CVTEIVSYGQNFVF

SEQ ID NO: 407542 - protein, 15 aa, Homo sapiens
  CDR3 for beta chain variable domain of TCR clone 203771 (TRBV7-2, TRBJ2-2)
CASSPTGANTGELFF

SEQ ID NO: 407543 - protein, 15 aa, Homo sapiens
  CDR3 for alpha chain variable domain of TCR clone 203772 (TRAV17, TRAJ57)
CATGPSQGGSEKLVS

SEQ ID NO: 407544 - protein, 16 aa, Homo sapiens
  CDR3 for beta chain variable domain of TCR clone 203772 (TRBV12-4, TRBJ1-5)
CAISRPVGGSNQPQHF

SEQ ID NO: 407545 - protein, 11 aa, Homo sapiens
  CDR3 for alpha chain variable domain of TCR clone 203773 (TRAV27, TRAJ20)
CAGAADYKLSF

SEQ ID NO: 407546 - protein, 13 aa, Homo sapiens
  CDR3 for beta chain variable domain of TCR clone 203773 (TRBV11-3, TRBJ1-2)
CASSQRTSRGYTF

SEQ ID NO: 407547 - protein, 16 aa, Homo sapiens
  CDR3 for alpha chain variable domain of TCR clone 203774 (TRAV13-1, TRAJ39)
CAASIVMQATCSPLEG

SEQ ID NO: 407548 - protein, 16 aa, Homo sapiens
  CDR3 for beta chain variable domain of TCR clone 203774 (TRBV20-1, TRBJ1-4)
CSATGQGLLTNEKLFF

SEQ ID NO: 407549 - protein, 17 aa, Homo sapiens
  CDR3 for alpha chain variable domain of TCR clone 203775 (TRAV3, TRAJ6)
CAVRDGPRAGGSYVPTF

SEQ ID NO: 407550 - protein, 14 aa, Homo sapiens
  CDR3 for beta chain variable domain of TCR clone 203775 (TRBV7-2, TRBJ2-7)
CASSPKTSFDEQYF

SEQ ID NO: 407551 - protein, 12 aa, Homo sapiens
  CDR3 for alpha chain variable domain of TCR clone 203776 (TRAV25, TRAJ53)
CQSGGSNYKLTF

SEQ ID NO: 407552 - protein, 15 aa, Homo sapiens
  CDR3 for beta chain variable domain of TCR clone 203776 (TRBV5-1, TRBJ2-2)
CASSWSSPNTGELFF

SEQ ID NO: 407553 - protein, 13 aa, Homo sapiens
  CDR3 for alpha chain variable domain of TCR clone 203777 (TRAV1-2, TRAJ7)
CAGPYYGNNRLAF

SEQ ID NO: 407554 - protein, 15 aa, Homo sapiens
  CDR3 for beta chain variable domain of TCR clone 203777 (TRBV27, TRBJ2-1)
CASSNGGGSSNEQFF

SEQ ID NO: 407555 - protein, 13 aa, Homo sapiens
  CDR3 for alpha chain variable domain of TCR clone 203778 (TRAV17, TRAJ33)
CATDADSNYQVIW

SEQ ID NO: 407556 - protein, 17 aa, Homo sapiens
  CDR3 for beta chain variable domain of TCR clone 203778 (TRBV20-1, TRBJ2-3)
CSAVSPGLAGGQDTQYF

SEQ ID NO: 407557 - protein, 14 aa, Homo sapiens
  CDR3 for alpha chain variable domain of TCR clone 203779 (TRAV20, TRAJ22)
CAVALGGSARQLSF

SEQ ID NO: 407558 - protein, 15 aa, Homo sapiens
  CDR3 for beta chain variable domain of TCR clone 203779 (TRBV7-2, TRBJ1-1)
CASSFAGDRDTEAFF

SEQ ID NO: 407559 - protein, 14 aa, Homo sapiens
  CDR3 for alpha chain variable domain of TCR clone 203780 (TRAV20, TRAJ56)
CAVQFGGANGKLTF

SEQ ID NO: 407560 - protein, 14 aa, Homo sapiens
  CDR3 for beta chain variable domain of TCR clone 203780 (TRBV20-1, TRBJ2-7)
CSAKRGRSSYEQYF

SEQ ID NO: 407561 - protein, 14 aa, Homo sapiens
  CDR3 for alpha chain variable domain of TCR clone 203781 (TRAV12-2, TRAJ40)
CAVKIPSGAYKYIF

SEQ ID NO: 407562 - protein, 13 aa, Homo sapiens
  CDR3 for beta chain variable domain of TCR clone 203781 (TRBV7-9, TRBJ1-2)
CASSLTQNYGYTF

SEQ ID NO: 407563 - protein, 13 aa, Homo sapiens
  CDR3 for alpha chain variable domain of TCR clone 203782 (TRAV13-2, TRAJ22)
CRDPSGSARQLTF

SEQ ID NO: 407564 - protein, 14 aa, Homo sapiens
  CDR3 for beta chain variable domain of TCR clone 203782 (TRBV25-1, TRBJ1-1)
CASTHLGGNTEAFF

SEQ ID NO: 407565 - protein, 17 aa, Homo sapiens
  CDR3 for alpha chain variable domain of TCR clone 203783 (TRAV23/DV6, TRAJ9)
CAASLSPPNTGGFTTIF

SEQ ID NO: 407566 - protein, 14 aa, Homo sapiens
  CDR3 for beta chain variable domain of TCR clone 203783 (TRBV11-2, TRBJ2-5)
CASSRTGGIETQYF

SEQ ID NO: 407567 - protein, 11 aa, Homo sapiens
  CDR3 for alpha chain variable domain of TCR clone 203784 (TRAV8-3, TRAJ49)
CAVNTGNQFYF

SEQ ID NO: 407568 - protein, 12 aa, Homo sapiens
  CDR3 for beta chain variable domain of TCR clone 203784 (TRBV11-2, TRBJ2-7)
CASTPPADEQYF

SEQ ID NO: 407569 - protein, 15 aa, Homo sapiens
  CDR3 for alpha chain variable domain of TCR clone 203785 (TRAV12-1, TRAJ44)
CVVDEYIGTASKLTF

SEQ ID NO: 407570 - protein, 14 aa, Homo sapiens
  CDR3 for beta chain variable domain of TCR clone 203785 (TRBV5-1, TRBJ1-2)
CASSLEPVNYGYTF

SEQ ID NO: 407571 - protein, 18 aa, Homo sapiens
  CDR3 for alpha chain variable domain of TCR clone 203786 (TRAV21, TRAJ53)
CAVKGGENSGGSNYKLTF

SEQ ID NO: 407572 - protein, 14 aa, Homo sapiens
  CDR3 for beta chain variable domain of TCR clone 203786 (TRBV6-1, TRBJ1-5)
CASSAGAGSKPQHF

SEQ ID NO: 407573 - protein, 17 aa, Homo sapiens
  CDR3 for alpha chain variable domain of TCR clone 203787 (TRAV12-1, TRAJ32)
CVVNMQGYGGATNKLIF

SEQ ID NO: 407574 - protein, 12 aa, Homo sapiens
  CDR3 for beta chain variable domain of TCR clone 203787 (TRBV19, TRBJ2-1)
CASSRQGAEQFF

SEQ ID NO: 407575 - protein, 14 aa, Homo sapiens
  CDR3 for alpha chain variable domain of TCR clone 203788 (TRAV35, TRAJ22)
CAGLRPGSARQLTF

SEQ ID NO: 407576 - protein, 14 aa, Homo sapiens
  CDR3 for beta chain variable domain of TCR clone 203788 (TRBV11-3, TRBJ2-3)
SASSSGQGPDTQYF

SEQ ID NO: 407577 - protein, 17 aa, Homo sapiens
  CDR3 for alpha chain variable domain of TCR clone 203789 (TRAV3, TRAJ42)
CAVRDRDYGGRQGNLIF

SEQ ID NO: 407578 - protein, 14 aa, Homo sapiens
  CDR3 for beta chain variable domain of TCR clone 203789 (TRBV19, TRBJ2-2)
CTSSGQGIAGELFF

SEQ ID NO: 407579 - protein, 12 aa, Homo sapiens
  CDR3 for alpha chain variable domain of TCR clone 203790 (TRAV26-1, TRAJ53)
CIEGGSNYKLTF

SEQ ID NO: 407580 - protein, 16 aa, Homo sapiens
  CDR3 for beta chain variable domain of TCR clone 203790 (TRBV19, TRBJ2-1)
CASSIQGGGSYNEQFF

SEQ ID NO: 407581 - protein, 14 aa, Homo sapiens
  CDR3 for alpha chain variable domain of TCR clone 203791 (TRAV9-2, TRAJ39)
CALYIYNAGNMLTF

SEQ ID NO: 407582 - protein, 14 aa, Homo sapiens
  CDR3 for beta chain variable domain of TCR clone 203791 (TRBV5-1, TRBJ1-1)
CASSFTGRNTEAFF

SEQ ID NO: 407583 - protein, 14 aa, Homo sapiens
  CDR3 for alpha chain variable domain of TCR clone 203792 (TRAV1-2, TRAJ16)
CAVNRFSDGQKMLF

SEQ ID NO: 407584 - protein, 17 aa, Homo sapiens
  CDR3 for beta chain variable domain of TCR clone 203792 (TRBV28, TRBJ2-5)
CASSTPEGDALQETQYF

SEQ ID NO: 407585 - protein, 15 aa, Homo sapiens
  CDR3 for alpha chain variable domain of TCR clone 203793 (TRAV4, TRAJ39)
CLVGPNNNAGNMLTF

SEQ ID NO: 407586 - protein, 13 aa, Homo sapiens
  CDR3 for beta chain variable domain of TCR clone 203793 (TRBV2, TRBJ2-7)
CASRVGGSGEQYF

SEQ ID NO: 407587 - protein, 21 aa, Homo sapiens
  CDR3 for alpha chain variable domain of TCR clone 203794 (TRAV8-3, TRAJ10)
CAVGHTHVRRKQTHLWDRHSA

SEQ ID NO: 407588 - protein, 10 aa, Homo sapiens
  CDR3 for beta chain variable domain of TCR clone 203794 (TRBV20-1, TRBJ2-5)
CSARFETQYF

SEQ ID NO: 407589 - protein, 11 aa, Homo sapiens
  CDR3 for alpha chain variable domain of TCR clone 203795 (TRAV2, TRAJ13)
CASGGYQKVTF

SEQ ID NO: 407590 - protein, 16 aa, Homo sapiens
  CDR3 for beta chain variable domain of TCR clone 203795 (TRBV20-1, TRBJ2-1)
CSAPGLAGSYSDEQFF

SEQ ID NO: 407591 - protein, 15 aa, Homo sapiens
  CDR3 for alpha chain variable domain of TCR clone 203796 (TRAV26-1, TRAJ22)
CIVRVSFWFCKATDL

SEQ ID NO: 407592 - protein, 14 aa, Homo sapiens
  CDR3 for beta chain variable domain of TCR clone 203796 (TRBV6-5, TRBJ2-7)
CASSYDRGLREQYF

SEQ ID NO: 407593 - protein, 17 aa, Homo sapiens
  CDR3 for alpha chain variable domain of TCR clone 203797 (TRAV12-2, TRAJ52)
CAVNPYAGGTSYGKLTF

SEQ ID NO: 407594 - protein, 15 aa, Homo sapiens
  CDR3 for beta chain variable domain of TCR clone 203797 (TRBV7-2, TRBJ2-1)
CASSFQADEYNEQFF

SEQ ID NO: 407595 - protein, 15 aa, Homo sapiens
  CDR3 for alpha chain variable domain of TCR clone 203798 (TRAV3, TRAJ22)
CAVRDRGGSARQLTF

SEQ ID NO: 407596 - protein, 15 aa, Homo sapiens
  CDR3 for beta chain variable domain of TCR clone 203798 (TRBV12-4, TRBJ2-2)
CASSFKSANTGELFF

SEQ ID NO: 407597 - protein, 13 aa, Homo sapiens
  CDR3 for alpha chain variable domain of TCR clone 203799 (TRAV12-2, TRAJ50)
CAVIVTSHDKVIF

SEQ ID NO: 407598 - protein, 14 aa, Homo sapiens
  CDR3 for beta chain variable domain of TCR clone 203799 (TRBV7-3, TRBJ1-1)
CASSLKGGNTEAFF

SEQ ID NO: 407599 - protein, 13 aa, Homo sapiens
  CDR3 for alpha chain variable domain of TCR clone 203800 (TRAV21, TRAJ57)
CAVIEGGSEKLVF

SEQ ID NO: 407600 - protein, 16 aa, Homo sapiens
  CDR3 for beta chain variable domain of TCR clone 203800 (TRBV19, TRBJ2-1)
CASSIQAGGSYNEQFF

SEQ ID NO: 407601 - protein, 14 aa, Homo sapiens
  CDR3 for alpha chain variable domain of TCR clone 203801 (TRAV26-1, TRAJ38)
CIADNAGNNRKLIW

SEQ ID NO: 407602 - protein, 14 aa, Homo sapiens
  CDR3 for beta chain variable domain of TCR clone 203801 (TRBV19, TRBJ2-1)
CASKDPSSYNEQFF

SEQ ID NO: 407603 - protein, 15 aa, Homo sapiens
  CDR3 for alpha chain variable domain of TCR clone 203802 (TRAV2, TRAJ15)
CAVEDRGQAGTALIF

SEQ ID NO: 407604 - protein, 12 aa, Homo sapiens
  CDR3 for beta chain variable domain of TCR clone 203802 (TRBV6-3, TRBJ2-1)
CASSGSYNEQFF

SEQ ID NO: 407605 - protein, 16 aa, Homo sapiens
  CDR3 for alpha chain variable domain of TCR clone 203803 (TRAV36/DV7, TRAJ33)
WRPGNKVQDSNYQLIW

SEQ ID NO: 407606 - protein, 15 aa, Homo sapiens
  CDR3 for beta chain variable domain of TCR clone 203803 (TRBV6-1, TRBJ2-3)
CASSERGGITDTQYF

SEQ ID NO: 407607 - protein, 22 aa, Homo sapiens
  CDR3 for alpha chain variable domain of TCR clone 203804 (TRAV2, TRAJ10)
ILQVREADAAVYYTGGGNKLTF

SEQ ID NO: 407608 - protein, 14 aa, Homo sapiens
  CDR3 for beta chain variable domain of TCR clone 203804 (TRBV18, TRBJ2-7)
CASSPRGGAYEQYF

SEQ ID NO: 407609 - protein, 13 aa, Homo sapiens
  CDR3 for alpha chain variable domain of TCR clone 203805 (TRAV20, TRAJ34)
CAFSSYNTDKLIF

SEQ ID NO: 407610 - protein, 13 aa, Homo sapiens
  CDR3 for beta chain variable domain of TCR clone 203805 (TRBV7-9, TRBJ1-2)
CASSLKQNYGYTF

SEQ ID NO: 407611 - protein, 14 aa, Homo sapiens
  CDR3 for alpha chain variable domain of TCR clone 203806 (TRAV1-2, TRAJ8)
CAVGEDTGFQKLVF

SEQ ID NO: 407612 - protein, 14 aa, Homo sapiens
  CDR3 for beta chain variable domain of TCR clone 203806 (TRBV15, TRBJ2-3)
CATRSGTSTDTQYF

SEQ ID NO: 407613 - protein, 13 aa, Homo sapiens
  CDR3 for alpha chain variable domain of TCR clone 203807 (TRAV12-1, TRAJ13)
CVVTSGGYQEVTF

SEQ ID NO: 407614 - protein, 14 aa, Homo sapiens
  CDR3 for beta chain variable domain of TCR clone 203807 (TRBV27, TRBJ2-7)
CASSLAGLSYEQYF

SEQ ID NO: 407615 - protein, 12 aa, Homo sapiens
  CDR3 for alpha chain variable domain of TCR clone 203808 (TRAV8-6, TRAJ43)
VAVSNNNNDMRF

SEQ ID NO: 407616 - protein, 15 aa, Homo sapiens
  CDR3 for beta chain variable domain of TCR clone 203808 (TRBV7-3, TRBJ2-6)
CASSLGGSGANVLTF

SEQ ID NO: 407617 - protein, 13 aa, Homo sapiens
  CDR3 for alpha chain variable domain of TCR clone 203809 (TRAV21, TRAJ20)
CAVCLRVGYKLSF

SEQ ID NO: 407618 - protein, 16 aa, Homo sapiens
  CDR3 for beta chain variable domain of TCR clone 203809 (TRBV9, TRBJ2-2)
CASSAMGKGNTGELFF

SEQ ID NO: 407619 - protein, 13 aa, Homo sapiens
  CDR3 for alpha chain variable domain of TCR clone 203810 (TRAV8-6, TRAJ50)
CAVIKTSYDKVIF

SEQ ID NO: 407620 - protein, 16 aa, Homo sapiens
  CDR3 for beta chain variable domain of TCR clone 203810 (TRBV7-2, TRBJ2-6)
CAILSGVSSGANVLTF

SEQ ID NO: 407621 - protein, 16 aa, Homo sapiens
  CDR3 for alpha chain variable domain of TCR clone 203811 (TRAV16, TRAJ4)
CALSRMFSGGYNKLIF

SEQ ID NO: 407622 - protein, 13 aa, Homo sapiens
  CDR3 for beta chain variable domain of TCR clone 203811 (TRBV20-1, TRBJ1-1)
CSARGGGNTEAFF

SEQ ID NO: 407623 - protein, 15 aa, Homo sapiens
  CDR3 for alpha chain variable domain of TCR clone 203812 (TRAV12-2, TRAJ53)
CAVNGGGGSNYKLTF

SEQ ID NO: 407624 - protein, 13 aa, Homo sapiens
  CDR3 for beta chain variable domain of TCR clone 203812 (TRBV11-2, TRBJ1-3)
CASSLEPVNTIYF

SEQ ID NO: 407625 - protein, 16 aa, Homo sapiens
  CDR3 for alpha chain variable domain of TCR clone 203813 (TRAV13-1, TRAJ18)
CAASRMRGSTLGRLYF

SEQ ID NO: 407626 - protein, 16 aa, Homo sapiens
  CDR3 for beta chain variable domain of TCR clone 203813 (TRBV27, TRBJ1-1)
CASSSRGRTGYTEAVF

SEQ ID NO: 407627 - protein, 14 aa, Homo sapiens
  CDR3 for alpha chain variable domain of TCR clone 203814 (TRAV8-2, TRAJ4)
CVVSPSGGYNKLIL

SEQ ID NO: 407628 - protein, 14 aa, Homo sapiens
  CDR3 for beta chain variable domain of TCR clone 203814 (TRBV7-2, TRBJ2-7)
CASSPKTSFYEQYF

SEQ ID NO: 407629 - protein, 17 aa, Homo sapiens
  CDR3 for alpha chain variable domain of TCR clone 203815 (TRAV29/DV5, TRAJ40)
CAASVIYTTSGTYKYIF

SEQ ID NO: 407630 - protein, 13 aa, Homo sapiens
  CDR3 for beta chain variable domain of TCR clone 203815 (TRBV12-4, TRBJ2-3)
CASSSPLGGTQYF

SEQ ID NO: 407631 - protein, 15 aa, Homo sapiens
  CDR3 for alpha chain variable domain of TCR clone 203816 (TRAV3, TRAJ22)
CAVRDRGGSARQLTF

SEQ ID NO: 407632 - protein, 12 aa, Homo sapiens
  CDR3 for beta chain variable domain of TCR clone 203816 (TRBV9, TRBJ1-2)
CASSVGDYGYTF

SEQ ID NO: 407633 - protein, 13 aa, Homo sapiens
  CDR3 for alpha chain variable domain of TCR clone 203817 (TRAV1-2, TRAJ9)
CAALNTGGFKTIF

SEQ ID NO: 407634 - protein, 16 aa, Homo sapiens
  CDR3 for beta chain variable domain of TCR clone 203817 (TRBV7-3, TRBJ2-5)
CASSLMGGASQETQYF

SEQ ID NO: 407635 - protein, 14 aa, Homo sapiens
  CDR3 for alpha chain variable domain of TCR clone 203818 (TRAV29/DV5, TRAJ49)
CAASAQNTGNQFYF

SEQ ID NO: 407636 - protein, 14 aa, Homo sapiens
  CDR3 for beta chain variable domain of TCR clone 203818 (TRBV20-1, TRBJ2-7)
CSASEPGEKYEQYF

SEQ ID NO: 407637 - protein, 14 aa, Homo sapiens
  CDR3 for alpha chain variable domain of TCR clone 203819 (TRAV26-1, TRAJ38)
FIADNAGNNRKLTW

SEQ ID NO: 407638 - protein, 13 aa, Homo sapiens
  CDR3 for beta chain variable domain of TCR clone 203819 (TRBV15, TRBJ1-6)
CATSGGLNSPLHF

SEQ ID NO: 407639 - protein, 13 aa, Homo sapiens
  CDR3 for alpha chain variable domain of TCR clone 203820 (TRAV21, TRAJ20)
CAVGLRVDYKLSF

SEQ ID NO: 407640 - protein, 16 aa, Homo sapiens
  CDR3 for beta chain variable domain of TCR clone 203820 (TRBV28, TRBJ2-3)
CASSFFRDPRLGTQYF

SEQ ID NO: 407641 - protein, 16 aa, Homo sapiens
  CDR3 for alpha chain variable domain of TCR clone 203821 (TRAV27, TRAJ13)
CAGAKSDSGGYQKVTF

SEQ ID NO: 407642 - protein, 13 aa, Homo sapiens
  CDR3 for beta chain variable domain of TCR clone 203821 (TRBV7-2, TRBJ2-1)
CAGSSQTSGEQFF

SEQ ID NO: 407643 - protein, 12 aa, Homo sapiens
  CDR3 for alpha chain variable domain of TCR clone 203822 (TRAV12-3, TRAJ17)
CAMTLTGNKLTF

SEQ ID NO: 407644 - protein, 16 aa, Homo sapiens
  CDR3 for beta chain variable domain of TCR clone 203822 (TRBV19, TRBJ2-1)
CASSKAGPSSYNERFF

SEQ ID NO: 407645 - protein, 12 aa, Homo sapiens
  CDR3 for alpha chain variable domain of TCR clone 203823 (TRAV8-3, TRAJ20)
CAVGANDYKLSF

SEQ ID NO: 407646 - protein, 12 aa, Homo sapiens
  CDR3 for beta chain variable domain of TCR clone 203823 (TRBV5-1, TRBJ1-2)
CASSQDTYGYTF

SEQ ID NO: 407647 - protein, 14 aa, Homo sapiens
  CDR3 for alpha chain variable domain of TCR clone 203824 (TRAV9-2, TRAJ39)
CALYIYNAGNMLTF

SEQ ID NO: 407648 - protein, 17 aa, Homo sapiens
  CDR3 for beta chain variable domain of TCR clone 203824 (TRBV7-2, TRBJ1-4)
CASSFKAGPTTNEKLFF

SEQ ID NO: 407649 - protein, 11 aa, Homo sapiens
  CDR3 for alpha chain variable domain of TCR clone 203825 (TRAV12-3, TRAJ27)
CAMANAGKSTF

SEQ ID NO: 407650 - protein, 16 aa, Homo sapiens
  CDR3 for beta chain variable domain of TCR clone 203825 (TRBV10-2, TRBJ1-5)
CASSRDRVYSNQPQHF

SEQ ID NO: 407651 - protein, 14 aa, Homo sapiens
  CDR3 for alpha chain variable domain of TCR clone 203826 (TRAV17, TRAJ12)
CAIRPMGSSYKLIF

SEQ ID NO: 407652 - protein, 11 aa, Homo sapiens
  CDR3 for beta chain variable domain of TCR clone 203826 (TRBV19, TRBJ1-1)
CASSIGSEAFF

SEQ ID NO: 407653 - protein, 13 aa, Homo sapiens
  CDR3 for alpha chain variable domain of TCR clone 203827 (TRAV26-2, TRAJ43)
CILRAVNNNDMRF

SEQ ID NO: 407654 - protein, 15 aa, Homo sapiens
  CDR3 for beta chain variable domain of TCR clone 203827 (TRBV19, TRBJ1-1)
CDSTSGQIQNTEAFF

SEQ ID NO: 407655 - protein, 12 aa, Homo sapiens
  CDR3 for alpha chain variable domain of TCR clone 203828 (TRAV13-1, TRAJ21)
CAAKEGFNKFYF

SEQ ID NO: 407656 - protein, 13 aa, Homo sapiens
  CDR3 for beta chain variable domain of TCR clone 203828 (TRBV11-2, TRBJ2-1)
CASSLGLAGGRFF

SEQ ID NO: 407657 - protein, 14 aa, Homo sapiens
  CDR3 for alpha chain variable domain of TCR clone 203829 (TRAV12-2, TRAJ22)
CAVRFYGSARQLTF

SEQ ID NO: 407658 - protein, 13 aa, Homo sapiens
  CDR3 for beta chain variable domain of TCR clone 203829 (TRBV6-1, TRBJ2-1)
CASTGTGLNEQFF

SEQ ID NO: 407659 - protein, 15 aa, Homo sapiens
  CDR3 for alpha chain variable domain of TCR clone 203830 (TRAV1-1, TRAJ20)
CAERDNVANDYKLSF

SEQ ID NO: 407660 - protein, 17 aa, Homo sapiens
  CDR3 for beta chain variable domain of TCR clone 203830 (TRBV7-2, TRBJ2-3)
CASSLAGGLAGTAGQYF

SEQ ID NO: 407661 - protein, 14 aa, Homo sapiens
  CDR3 for alpha chain variable domain of TCR clone 203831 (TRAV1-2, TRAJ16)
CAVNRFSDGQKLLF

SEQ ID NO: 407662 - protein, 16 aa, Homo sapiens
  CDR3 for beta chain variable domain of TCR clone 203831 (TRBV5-1, TRBJ2-5)
CASSFRRTSGQETQYF

SEQ ID NO: 407663 - protein, 16 aa, Homo sapiens
  CDR3 for alpha chain variable domain of TCR clone 203832 (TRAV3, TRAJ5)
CAVRNLMDAGRRALTF

SEQ ID NO: 407664 - protein, 16 aa, Homo sapiens
  CDR3 for beta chain variable domain of TCR clone 203832 (TRBV4-2, TRBJ2-7)
CASSQEGLANSYEQYF

SEQ ID NO: 407665 - protein, 14 aa, Homo sapiens
  CDR3 for alpha chain variable domain of TCR clone 203833 (TRAV12-3, TRAJ10)
SHLPLTGGGNKLTF

SEQ ID NO: 407666 - protein, 13 aa, Homo sapiens
  CDR3 for beta chain variable domain of TCR clone 203833 (TRBV11-2, TRBJ2-5)
CASGRGPSETQYF

SEQ ID NO: 407667 - protein, 12 aa, Homo sapiens
  CDR3 for alpha chain variable domain of TCR clone 203834 (TRAV26-2, TRAJ21)
CILKGNFNKFYF

SEQ ID NO: 407668 - protein, 14 aa, Homo sapiens
  CDR3 for beta chain variable domain of TCR clone 203834 (TRBV11-2, TRBJ2-3)
CASSRLARTDTQYF

SEQ ID NO: 407669 - protein, 13 aa, Homo sapiens
  CDR3 for alpha chain variable domain of TCR clone 203835 (TRAV27, TRAJ29)
CAGAHSGNTPLVF

SEQ ID NO: 407670 - protein, 13 aa, Homo sapiens
  CDR3 for beta chain variable domain of TCR clone 203835 (TRBV7-9, TRBJ2-5)
CASLSPGQETQYF

SEQ ID NO: 407671 - protein, 14 aa, Homo sapiens
  CDR3 for alpha chain variable domain of TCR clone 203836 (TRAV1-2, TRAJ16)
CAVNRFSDGQKLLF

SEQ ID NO: 407672 - protein, 12 aa, Homo sapiens
  CDR3 for beta chain variable domain of TCR clone 203836 (TRBV3-1, TRBJ2-1)
CASSQGSSAQFF

SEQ ID NO: 407673 - protein, 14 aa, Homo sapiens
  CDR3 for alpha chain variable domain of TCR clone 203837 (TRAV27, TRAJ23)
CAGAFDNQGGRLII

SEQ ID NO: 407674 - protein, 15 aa, Homo sapiens
  CDR3 for beta chain variable domain of TCR clone 203837 (TRBV7-3, TRBJ2-7)
CASSLTGQGKYEQYF

SEQ ID NO: 407675 - protein, 13 aa, Homo sapiens
  CDR3 for alpha chain variable domain of TCR clone 203838 (TRAV13-1, TRAJ43)
CAASLSNNNDMRF

SEQ ID NO: 407676 - protein, 14 aa, Homo sapiens
  CDR3 for beta chain variable domain of TCR clone 203838 (TRBV19, TRBJ2-1)
CASPTFVLSGEQFF

SEQ ID NO: 407677 - protein, 16 aa, Homo sapiens
  CDR3 for alpha chain variable domain of TCR clone 203839 (TRAV38-1, TRAJ56)
CAFMKRQTGADSKLTF

SEQ ID NO: 407678 - protein, 16 aa, Homo sapiens
  CDR3 for beta chain variable domain of TCR clone 203839 (TRBV7-3, TRBJ2-1)
CASSLEGYRSYNEQFF

SEQ ID NO: 407679 - protein, 13 aa, Homo sapiens
  CDR3 for alpha chain variable domain of TCR clone 203840 (TRAV27, TRAJ53)
CAGQGGSNYKLTF

SEQ ID NO: 407680 - protein, 14 aa, Homo sapiens
  CDR3 for beta chain variable domain of TCR clone 203840 (TRBV7-6, TRBJ2-3)
CASSLGTVTDTQYF

SEQ ID NO: 407681 - protein, 12 aa, Homo sapiens
  CDR3 for alpha chain variable domain of TCR clone 203841 (TRAV2, TRAJ31)
CAVEDNNAGLMF

SEQ ID NO: 407682 - protein, 20 aa, Homo sapiens
  CDR3 for beta chain variable domain of TCR clone 203841 (TRBV7-8, TRBJ2-2)
CASSHLFPGPTIHITGELFF

SEQ ID NO: 407683 - protein, 10 aa, Homo sapiens
  CDR3 for alpha chain variable domain of TCR clone 203842 (TRAV30, TRAJ48)
CGIGNEKLTF

SEQ ID NO: 407684 - protein, 16 aa, Homo sapiens
  CDR3 for beta chain variable domain of TCR clone 203842 (TRBV7-6, TRBJ2-1)
CASSAPGPSSYNEQFF

SEQ ID NO: 407685 - protein, 13 aa, Homo sapiens
  CDR3 for alpha chain variable domain of TCR clone 203843 (TRAV20, TRAJ20)
CAVQALNYYKLSF

SEQ ID NO: 407686 - protein, 13 aa, Homo sapiens
  CDR3 for beta chain variable domain of TCR clone 203843 (TRBV7-9, TRBJ1-4)
CASSLPGIEKLFF

SEQ ID NO: 407687 - protein, 14 aa, Homo sapiens
  CDR3 for alpha chain variable domain of TCR clone 203844 (TRAV36/DV7, TRAJ40)
CAVETTSGPYKYIF

SEQ ID NO: 407688 - protein, 13 aa, Homo sapiens
  CDR3 for beta chain variable domain of TCR clone 203844 (TRBV10-3, TRBJ2-5)
CAMTSGAGETQYF

SEQ ID NO: 407689 - protein, 13 aa, Homo sapiens
  CDR3 for alpha chain variable domain of TCR clone 203845 (TRAV2, TRAJ15)
RAVASQAGTALIF

SEQ ID NO: 407690 - protein, 15 aa, Homo sapiens
  CDR3 for beta chain variable domain of TCR clone 203845 (TRBV20-1, TRBJ2-1)
CSARGIGGTYNEQFF

SEQ ID NO: 407691 - protein, 18 aa, Homo sapiens
  CDR3 for alpha chain variable domain of TCR clone 203846 (TRAV26-1, TRAJ23)
CIVRVGLEVWNQGGKLIF

SEQ ID NO: 407692 - protein, 14 aa, Homo sapiens
  CDR3 for beta chain variable domain of TCR clone 203846 (TRBV5-1, TRBJ2-2)
CASSLGGGSGELFF

SEQ ID NO: 407693 - protein, 13 aa, Homo sapiens
  CDR3 for alpha chain variable domain of TCR clone 203847 (TRAV27, TRAJ29)
CAGAHSGNTPLVF

SEQ ID NO: 407694 - protein, 14 aa, Homo sapiens
  CDR3 for beta chain variable domain of TCR clone 203847 (TRBV7-9, TRBJ2-7)
CASSIEQGAGEQYF

SEQ ID NO: 407695 - protein, 13 aa, Homo sapiens
  CDR3 for alpha chain variable domain of TCR clone 203848 (TRAV12-2, TRAJ39)
CAVNNNAGNMLAF

SEQ ID NO: 407696 - protein, 13 aa, Homo sapiens
  CDR3 for beta chain variable domain of TCR clone 203848 (TRBV2, TRBJ1-5)
CATAGPGNQTQHF

SEQ ID NO: 407697 - protein, 14 aa, Homo sapiens
  CDR3 for alpha chain variable domain of TCR clone 203849 (TRAV12-2, TRAJ9)
CAVNMEGGGFKTIF

SEQ ID NO: 407698 - protein, 15 aa, Homo sapiens
  CDR3 for beta chain variable domain of TCR clone 203849 (TRBV28, TRBJ1-3)
CASSMGWASGNTIYF

SEQ ID NO: 407699 - protein, 10 aa, Homo sapiens
  CDR3 for alpha chain variable domain of TCR clone 203850 (TRAV12-2, TRAJ48)
CAVTSEKLNF

SEQ ID NO: 407700 - protein, 17 aa, Homo sapiens
  CDR3 for beta chain variable domain of TCR clone 203850 (TRBV11-1, TRBJ2-7)
CANSLTGSFGLDYEQYF

SEQ ID NO: 407701 - protein, 13 aa, Homo sapiens
  CDR3 for alpha chain variable domain of TCR clone 203851 (TRAV8-3, TRAJ43)
CAVGPDNNNDMRF

SEQ ID NO: 407702 - protein, 14 aa, Homo sapiens
  CDR3 for beta chain variable domain of TCR clone 203851 (TRBV19, TRBJ2-1)
CASPTVVLGGEQFF

SEQ ID NO: 407703 - protein, 14 aa, Homo sapiens
  CDR3 for alpha chain variable domain of TCR clone 203852 (TRAV13-1, TRAJ40)
CAASMTSGTYQYIF

SEQ ID NO: 407704 - protein, 13 aa, Homo sapiens
  CDR3 for beta chain variable domain of TCR clone 203852 (TRBV29-1, TRBJ2-1)
CSVEGGRVNEQFF

SEQ ID NO: 407705 - protein, 14 aa, Homo sapiens
  CDR3 for alpha chain variable domain of TCR clone 203853 (TRAV13-1, TRAJ44)
CAAKSTGTASKLTF

SEQ ID NO: 407706 - protein, 16 aa, Homo sapiens
  CDR3 for beta chain variable domain of TCR clone 203853 (TRBV7-9, TRBJ2-6)
CASSLKGPLRANVLTF

SEQ ID NO: 407707 - protein, 14 aa, Homo sapiens
  CDR3 for alpha chain variable domain of TCR clone 203854 (TRAV12-3, TRAJ33)
CAMSAGDSNYQLIW

SEQ ID NO: 407708 - protein, 12 aa, Homo sapiens
  CDR3 for beta chain variable domain of TCR clone 203854 (TRBV11-2, TRBJ2-4)
CGSSSASGSEYF

SEQ ID NO: 407709 - protein, 14 aa, Homo sapiens
  CDR3 for alpha chain variable domain of TCR clone 203855 (TRAV8-6, TRAJ35)
CAVSEKALGMCCIS

SEQ ID NO: 407710 - protein, 13 aa, Homo sapiens
  CDR3 for beta chain variable domain of TCR clone 203855 (TRBV11-2, TRBJ1-3)
CASSLEPVNTIYF

SEQ ID NO: 407711 - protein, 12 aa, Homo sapiens
  CDR3 for alpha chain variable domain of TCR clone 203856 (TRAV27, TRAJ35)
CAGADFENVLHC

SEQ ID NO: 407712 - protein, 15 aa, Homo sapiens
  CDR3 for beta chain variable domain of TCR clone 203856 (TRBV19, TRBJ2-1)
CASSISSGGYNEQFF

SEQ ID NO: 407713 - protein, 15 aa, Homo sapiens
  CDR3 for alpha chain variable domain of TCR clone 203857 (TRAV8-4, TRAJ8)
CAVSDLNTGFQKLVF

SEQ ID NO: 407714 - protein, 14 aa, Homo sapiens
  CDR3 for beta chain variable domain of TCR clone 203857 (TRBV2, TRBJ2-7)
CASSLTSGGYEQYF

SEQ ID NO: 407715 - protein, 18 aa, Homo sapiens
  CDR3 for alpha chain variable domain of TCR clone 203858 (TRAV9-2, TRAJ52)
LSLSRHNAGGTSYGKLTF

SEQ ID NO: 407716 - protein, 13 aa, Homo sapiens
  CDR3 for beta chain variable domain of TCR clone 203858 (TRBV7-9, TRBJ1-2)
CASSLKQNYGYTF

SEQ ID NO: 407717 - protein, 17 aa, Homo sapiens
  CDR3 for alpha chain variable domain of TCR clone 203859 (TRAV4, TRAJ18)
CLVVAAGRGSTLGRLYF

SEQ ID NO: 407718 - protein, 17 aa, Homo sapiens
  CDR3 for beta chain variable domain of TCR clone 203859 (TRBV7-8, TRBJ2-6)
CASSAGTGGAEANVLTF

SEQ ID NO: 407719 - protein, 14 aa, Homo sapiens
  CDR3 for alpha chain variable domain of TCR clone 203860 (TRAV8-3, TRAJ44)
CAVGLTGTASKLTF

SEQ ID NO: 407720 - protein, 12 aa, Homo sapiens
  CDR3 for beta chain variable domain of TCR clone 203860 (TRBV7-3, TRBJ2-1)
CASSLGFNEQFV

SEQ ID NO: 407721 - protein, 14 aa, Homo sapiens
  CDR3 for alpha chain variable domain of TCR clone 203861 (TRAV12-3, TRAJ10)
SHLPLTGGGNKLSF

SEQ ID NO: 407722 - protein, 13 aa, Homo sapiens
  CDR3 for beta chain variable domain of TCR clone 203861 (TRBV12-4, TRBJ1-1)
CASSPGTGFEAFF

SEQ ID NO: 407723 - protein, 14 aa, Homo sapiens
  CDR3 for alpha chain variable domain of TCR clone 203862 (TRAV29/DV5, TRAJ20)
CAASAPIEDYKLSF

SEQ ID NO: 407724 - protein, 14 aa, Homo sapiens
  CDR3 for beta chain variable domain of TCR clone 203862 (TRBV7-6, TRBJ2-1)
CASSLGGGADEQFF

SEQ ID NO: 407725 - protein, 17 aa, Homo sapiens
  CDR3 for alpha chain variable domain of TCR clone 203863 (TRAV12-2, TRAJ53)
CAPFTDSQEGSNYKLTF

SEQ ID NO: 407726 - protein, 14 aa, Homo sapiens
  CDR3 for beta chain variable domain of TCR clone 203863 (TRBV7-2, TRBJ2-7)
CASSLDPGPYEQYF

SEQ ID NO: 407727 - protein, 14 aa, Homo sapiens
  CDR3 for alpha chain variable domain of TCR clone 203864 (TRAV13-1, TRAJ29)
CAASSNSGNTPLVF

SEQ ID NO: 407728 - protein, 15 aa, Homo sapiens
  CDR3 for beta chain variable domain of TCR clone 203864 (TRBV11-3, TRBJ2-3)
CASLKDGREGDTQYF

SEQ ID NO: 407729 - protein, 13 aa, Homo sapiens
  CDR3 for alpha chain variable domain of TCR clone 203865 (TRAV8-3, TRAJ44)
CAVVPGTASKLTL

SEQ ID NO: 407730 - protein, 18 aa, Homo sapiens
  CDR3 for beta chain variable domain of TCR clone 203865 (TRBV7-9, TRBJ2-7)
CASSLTTSGSRTWYEQYF

SEQ ID NO: 407731 - protein, 13 aa, Homo sapiens
  CDR3 for alpha chain variable domain of TCR clone 203866 (TRAV2, TRAJ15)
CAVASQAGTALIF

SEQ ID NO: 407732 - protein, 15 aa, Homo sapiens
  CDR3 for beta chain variable domain of TCR clone 203866 (TRBV11-3, TRBJ2-7)
CASSPGPASSYEQYF

SEQ ID NO: 407733 - protein, 11 aa, Homo sapiens
  CDR3 for alpha chain variable domain of TCR clone 203867 (TRAV1-1, TRAJ23)
CVVRQGGKLIF

SEQ ID NO: 407734 - protein, 20 aa, Homo sapiens
  CDR3 for beta chain variable domain of TCR clone 203867 (TRBV7-8, TRBJ2-2)
CASSHLFPGPTVHITGELFF

SEQ ID NO: 407735 - protein, 18 aa, Homo sapiens
  CDR3 for alpha chain variable domain of TCR clone 203868 (TRAV21, TRAJ52)
CAVRPSPAGGASYGKLTF

SEQ ID NO: 407736 - protein, 13 aa, Homo sapiens
  CDR3 for beta chain variable domain of TCR clone 203868 (TRBV29-1, TRBJ2-2)
CSVYREDTGELFF

SEQ ID NO: 407737 - protein, 17 aa, Homo sapiens
  CDR3 for alpha chain variable domain of TCR clone 203869 (TRAV8-6, TRAJ22)
CAVSLYPSSGSARQLTF

SEQ ID NO: 407738 - protein, 13 aa, Homo sapiens
  CDR3 for beta chain variable domain of TCR clone 203869 (TRBV3-1, TRBJ1-1)
CASSQLQGAEAFF

SEQ ID NO: 407739 - protein, 11 aa, Homo sapiens
  CDR3 for alpha chain variable domain of TCR clone 203870 (TRAV2, TRAJ20)
CAVSYDYKLSF

SEQ ID NO: 407740 - protein, 20 aa, Homo sapiens
  CDR3 for beta chain variable domain of TCR clone 203870 (TRBV19, TRBJ2-1)
CASSISRTVTSTRLNNEQFF

SEQ ID NO: 407741 - protein, 11 aa, Homo sapiens
  CDR3 for alpha chain variable domain of TCR clone 203871 (TRAV8-4, TRAJ34)
CTVSWTDKLIF

SEQ ID NO: 407742 - protein, 17 aa, Homo sapiens
  CDR3 for beta chain variable domain of TCR clone 203871 (TRBV7-3, TRBJ2-2)
CASSLSGTSGGTGELFF

SEQ ID NO: 407743 - protein, 11 aa, Homo sapiens
  CDR3 for alpha chain variable domain of TCR clone 203872 (TRAV13-2, TRAJ15)
CVLRAGTALIF

SEQ ID NO: 407744 - protein, 16 aa, Homo sapiens
  CDR3 for beta chain variable domain of TCR clone 203872 (TRBV24-1, TRBJ2-2)
CATSDSSPGLSGELFF

SEQ ID NO: 407745 - protein, 13 aa, Homo sapiens
  CDR3 for alpha chain variable domain of TCR clone 203873 (TRAV12-3, TRAJ33)
CAMSVNSNHQLIW

SEQ ID NO: 407746 - protein, 13 aa, Homo sapiens
  CDR3 for beta chain variable domain of TCR clone 203873 (TRBV7-2, TRBJ2-2)
CASSVAVTGELFF

SEQ ID NO: 407747 - protein, 15 aa, Homo sapiens
  CDR3 for alpha chain variable domain of TCR clone 203874 (TRAV17, TRAJ22)
CSTAPISGSARQLTF

SEQ ID NO: 407748 - protein, 13 aa, Homo sapiens
  CDR3 for beta chain variable domain of TCR clone 203874 (TRBV6-5, TRBJ1-2)
CASSIDTYYGYTF

SEQ ID NO: 407749 - protein, 15 aa, Homo sapiens
  CDR3 for alpha chain variable domain of TCR clone 203875 (TRAV21, TRAJ57)
CAVTITQGGSEKLVF

SEQ ID NO: 407750 - protein, 14 aa, Homo sapiens
  CDR3 for beta chain variable domain of TCR clone 203875 (TRBV5-1, TRBJ2-2)
CASSLIWMPGELFF

SEQ ID NO: 407751 - protein, 13 aa, Homo sapiens
  CDR3 for alpha chain variable domain of TCR clone 203876 (TRAV1-1, TRAJ9)
CAAKNTGGFKTIF

SEQ ID NO: 407752 - protein, 16 aa, Homo sapiens
  CDR3 for beta chain variable domain of TCR clone 203876 (TRBV10-3, TRBJ2-6)
CAISTSGDRGANVLTF

SEQ ID NO: 407753 - protein, 19 aa, Homo sapiens
  CDR3 for alpha chain variable domain of TCR clone 203877 (TRAV1-2, TRAJ26)
CLLPLCCERPNNYGQNFVF

SEQ ID NO: 407754 - protein, 15 aa, Homo sapiens
  CDR3 for beta chain variable domain of TCR clone 203877 (TRBV9, TRBJ1-6)
CASSVAGTGDSPLHF

SEQ ID NO: 407755 - protein, 23 aa, Homo sapiens
  CDR3 for alpha chain variable domain of TCR clone 203878 (TRAV26-1, TRAJ38)
CIVRPLNAGNNHIQNPDHAVYQL

SEQ ID NO: 407756 - protein, 13 aa, Homo sapiens
  CDR3 for beta chain variable domain of TCR clone 203878 (TRBV18, TRBJ1-1)
CASSPNGDTEAFF

SEQ ID NO: 407757 - protein, 14 aa, Homo sapiens
  CDR3 for alpha chain variable domain of TCR clone 203879 (TRAV12-2, TRAJ40)
CAVKIPQGAYKYIF

SEQ ID NO: 407758 - protein, 14 aa, Homo sapiens
  CDR3 for beta chain variable domain of TCR clone 203879 (TRBV20-1, TRBJ1-1)
CSAQTRIGGTEAFF

SEQ ID NO: 407759 - protein, 15 aa, Homo sapiens
  CDR3 for alpha chain variable domain of TCR clone 203880 (TRAV25, TRAJ41)
CAGPWNSNFGYALNF

SEQ ID NO: 407760 - protein, 13 aa, Homo sapiens
  CDR3 for beta chain variable domain of TCR clone 203880 (TRBV15, TRBJ1-1)
CATSRGIQARAFF

SEQ ID NO: 407761 - protein, 12 aa, Homo sapiens
  CDR3 for alpha chain variable domain of TCR clone 203881 (TRAV21, TRAJ37)
CAVRGNTGKLIS

SEQ ID NO: 407762 - protein, 14 aa, Homo sapiens
  CDR3 for beta chain variable domain of TCR clone 203881 (TRBV19, TRBJ2-1)
CASEVTGARNEQFF

SEQ ID NO: 407763 - protein, 15 aa, Homo sapiens
  CDR3 for alpha chain variable domain of TCR clone 203882 (TRAV29/DV5, TRAJ40)
CAASAQGSGTYKSIF

SEQ ID NO: 407764 - protein, 15 aa, Homo sapiens
  CDR3 for beta chain variable domain of TCR clone 203882 (TRBV7-2, TRBJ2-3)
CASSLAGAFIDTQYF

SEQ ID NO: 407765 - protein, 15 aa, Homo sapiens
  CDR3 for alpha chain variable domain of TCR clone 203883 (TRAV12-1, TRAJ40)
CVVNSDTSGTYKYIF

SEQ ID NO: 407766 - protein, 13 aa, Homo sapiens
  CDR3 for beta chain variable domain of TCR clone 203883 (TRBV6-1, TRBJ2-1)
CASEGSSYNEQFF

SEQ ID NO: 407767 - protein, 16 aa, Homo sapiens
  CDR3 for alpha chain variable domain of TCR clone 203884 (TRAV30, TRAJ24)
CGTEIVDADSWGKFQV

SEQ ID NO: 407768 - protein, 12 aa, Homo sapiens
  CDR3 for beta chain variable domain of TCR clone 203884 (TRBV5-1, TRBJ1-2)
CASSQDTYGYTF

SEQ ID NO: 407769 - protein, 12 aa, Homo sapiens
  CDR3 for alpha chain variable domain of TCR clone 203885 (TRAV1-1, TRAJ30)
CAVRGRDDKIIF

SEQ ID NO: 407770 - protein, 14 aa, Homo sapiens
  CDR3 for beta chain variable domain of TCR clone 203885 (TRBV7-9, TRBJ1-1)
CASSWGQGDTEAFF

SEQ ID NO: 407771 - protein, 15 aa, Homo sapiens
  CDR3 for alpha chain variable domain of TCR clone 203886 (TRAV26-1, TRAJ29)
CIVRVEGSGNTPLIF

SEQ ID NO: 407772 - protein, 13 aa, Homo sapiens
  CDR3 for beta chain variable domain of TCR clone 203886 (TRBV7-9, TRBJ1-2)
CASSLKQNYGYTF

SEQ ID NO: 407773 - protein, 15 aa, Homo sapiens
  CDR3 for alpha chain variable domain of TCR clone 203887 (TRAV16, TRAJ58)
CALKRGNQWLEVDLW

SEQ ID NO: 407774 - protein, 17 aa, Homo sapiens
  CDR3 for beta chain variable domain of TCR clone 203887 (TRBV18, TRBJ2-1)
CASSKGLSGGADNEQFF

SEQ ID NO: 407775 - protein, 11 aa, Homo sapiens
  CDR3 for alpha chain variable domain of TCR clone 203888 (TRAV2, TRAJ13)
CASAGYQKVTF

SEQ ID NO: 407776 - protein, 15 aa, Homo sapiens
  CDR3 for beta chain variable domain of TCR clone 203888 (TRBV29-1, TRBJ2-1)
CSGRDRKSSYNEQFF

SEQ ID NO: 407777 - protein, 11 aa, Homo sapiens
  CDR3 for alpha chain variable domain of TCR clone 203889 (TRAV21, TRAJ48)
CAVDGNEKLTF

SEQ ID NO: 407778 - protein, 14 aa, Homo sapiens
  CDR3 for beta chain variable domain of TCR clone 203889 (TRBV7-3, TRBJ2-3)
CASSSTGVADTQYF

SEQ ID NO: 407779 - protein, 12 aa, Homo sapiens
  CDR3 for alpha chain variable domain of TCR clone 203890 (TRAV12-1, TRAJ40)
CVVYSGTYKSIF

SEQ ID NO: 407780 - protein, 14 aa, Homo sapiens
  CDR3 for beta chain variable domain of TCR clone 203890 (TRBV7-9, TRBJ2-5)
CASSLDTAQETQYF

SEQ ID NO: 407781 - protein, 12 aa, Homo sapiens
  CDR3 for alpha chain variable domain of TCR clone 203891 (TRAV12-3, TRAJ17)
CATTLTGNKLTF

SEQ ID NO: 407782 - protein, 15 aa, Homo sapiens
  CDR3 for beta chain variable domain of TCR clone 203891 (TRBV20-1, TRBJ2-7)
CSARDRVSGMDEQYL

SEQ ID NO: 407783 - protein, 12 aa, Homo sapiens
  CDR3 for alpha chain variable domain of TCR clone 203892 (TRAV23/DV6, TRAJ30)
CAASKGDDKIIF

SEQ ID NO: 407784 - protein, 18 aa, Homo sapiens
  CDR3 for beta chain variable domain of TCR clone 203892 (TRBV10-3, TRBJ2-3)
CAISESRVGQMRGDTQYF

SEQ ID NO: 407785 - protein, 14 aa, Homo sapiens
  CDR3 for alpha chain variable domain of TCR clone 203893 (TRAV12-1, TRAJ16)
CVVTLMASSCSLQG

SEQ ID NO: 407786 - protein, 13 aa, Homo sapiens
  CDR3 for beta chain variable domain of TCR clone 203893 (TRBV27, TRBJ1-4)
CASSLMGDEKLFF

SEQ ID NO: 407787 - protein, 12 aa, Homo sapiens
  CDR3 for alpha chain variable domain of TCR clone 203894 (TRAV8-3, TRAJ20)
CAVAANDYKLSS

SEQ ID NO: 407788 - protein, 16 aa, Homo sapiens
  CDR3 for beta chain variable domain of TCR clone 203894 (TRBV19, TRBJ2-2)
CASRSPGTGATGELFF

SEQ ID NO: 407789 - protein, 16 aa, Homo sapiens
  CDR3 for alpha chain variable domain of TCR clone 203895 (TRAV1-2, TRAJ31)
CAFFRCQIHVWRWNSA

SEQ ID NO: 407790 - protein, 13 aa, Homo sapiens
  CDR3 for beta chain variable domain of TCR clone 203895 (TRBV7-9, TRBJ1-2)
CASSLKQNYGYTF

SEQ ID NO: 407791 - protein, 15 aa, Homo sapiens
  CDR3 for alpha chain variable domain of TCR clone 203896 (TRAV21, TRAJ37)
CAVRPTLSNTGKLIF

SEQ ID NO: 407792 - protein, 16 aa, Homo sapiens
  CDR3 for beta chain variable domain of TCR clone 203896 (TRBV24-1, TRBJ2-3)
CATSDRRQDLTETQYF

SEQ ID NO: 407793 - protein, 10 aa, Homo sapiens
  CDR3 for alpha chain variable domain of TCR clone 203897 (TRAV12-3, TRAJ49)
CAMNDDQFYF

SEQ ID NO: 407794 - protein, 13 aa, Homo sapiens
  CDR3 for beta chain variable domain of TCR clone 203897 (TRBV12-4, TRBJ1-1)
CASSPGAGFEDFF

SEQ ID NO: 407795 - protein, 17 aa, Homo sapiens
  CDR3 for alpha chain variable domain of TCR clone 203898 (TRAV38-1, TRAJ45)
CAFMKHYMGGGADGLTF

SEQ ID NO: 407796 - protein, 15 aa, Homo sapiens
  CDR3 for beta chain variable domain of TCR clone 203898 (TRBV28, TRBJ2-1)
CASSPPGLADHEQFF

SEQ ID NO: 407797 - protein, 14 aa, Homo sapiens
  CDR3 for alpha chain variable domain of TCR clone 203899 (TRAV17, TRAJ57)
CATDPQGGSDKPVF

SEQ ID NO: 407798 - protein, 13 aa, Homo sapiens
  CDR3 for beta chain variable domain of TCR clone 203899 (TRBV19, TRBJ2-7)
CASSPRQSYEQYF

SEQ ID NO: 407799 - protein, 12 aa, Homo sapiens
  CDR3 for alpha chain variable domain of TCR clone 203900 (TRAV16, TRAJ9)
CALSSGGFTTIF

SEQ ID NO: 407800 - protein, 14 aa, Homo sapiens
  CDR3 for beta chain variable domain of TCR clone 203900 (TRBV7-9, TRBJ2-1)
CARSLAGPYNEQFF

SEQ ID NO: 407801 - protein, 14 aa, Homo sapiens
  CDR3 for alpha chain variable domain of TCR clone 203901 (TRAV1-2, TRAJ27)
CAVRSGANAGKSTF

SEQ ID NO: 407802 - protein, 15 aa, Homo sapiens
  CDR3 for beta chain variable domain of TCR clone 203901 (TRBV18, TRBJ2-7)
CASSPLQGRAYEQYF

SEQ ID NO: 407803 - protein, 13 aa, Homo sapiens
  CDR3 for alpha chain variable domain of TCR clone 203902 (TRAV1-1, TRAJ9)
CAAKNTGGFKTIL

SEQ ID NO: 407804 - protein, 14 aa, Homo sapiens
  CDR3 for beta chain variable domain of TCR clone 203902 (TRBV20-1, TRBJ2-1)
CSAQIVGSANEQFF

SEQ ID NO: 407805 - protein, 12 aa, Homo sapiens
  CDR3 for alpha chain variable domain of TCR clone 203903 (TRAV12-2, TRAJ10)
WWVTGGGNKLTF

SEQ ID NO: 407806 - protein, 15 aa, Homo sapiens
  CDR3 for beta chain variable domain of TCR clone 203903 (TRBV6-3, TRBJ2-7)
CASSSPGTVFYEQYF

SEQ ID NO: 407807 - protein, 11 aa, Homo sapiens
  CDR3 for alpha chain variable domain of TCR clone 203904 (TRAV21, TRAJ33)
CVKMDSNYQLM

SEQ ID NO: 407808 - protein, 14 aa, Homo sapiens
  CDR3 for beta chain variable domain of TCR clone 203904 (TRBV2, TRBJ2-7)
CASSLTSGGYEQYF

SEQ ID NO: 407809 - protein, 13 aa, Homo sapiens
  CDR3 for alpha chain variable domain of TCR clone 203905 (TRAV21, TRAJ27)
CAARPGNAGKSTF

SEQ ID NO: 407810 - protein, 15 aa, Homo sapiens
  CDR3 for beta chain variable domain of TCR clone 203905 (TRBV7-2, TRBJ2-7)
CASSLSSGRTYEQYF

SEQ ID NO: 407811 - protein, 11 aa, Homo sapiens
  CDR3 for alpha chain variable domain of TCR clone 203906 (TRAV1-2, TRAJ20)
CAVANDYKLSF

SEQ ID NO: 407812 - protein, 13 aa, Homo sapiens
  CDR3 for beta chain variable domain of TCR clone 203906 (TRBV7-9, TRBJ1-2)
CTSSLKQNYGYTF

SEQ ID NO: 407813 - protein, 14 aa, Homo sapiens
  CDR3 for alpha chain variable domain of TCR clone 203907 (TRAV8-3, TRAJ47)
CAVGAQGYGNKLVF

SEQ ID NO: 407814 - protein, 14 aa, Homo sapiens
  CDR3 for beta chain variable domain of TCR clone 203907 (TRBV7-3, TRBJ1-1)
CASSLKGGNTEAFF

SEQ ID NO: 407815 - protein, 15 aa, Homo sapiens
  CDR3 for alpha chain variable domain of TCR clone 203908 (TRAV1-2, TRAJ36)
CAASADQTGANNLLF

SEQ ID NO: 407816 - protein, 15 aa, Homo sapiens
  CDR3 for beta chain variable domain of TCR clone 203908 (TRBV5-1, TRBJ2-7)
CASSFSTDSVYEQYL

SEQ ID NO: 407817 - protein, 15 aa, Homo sapiens
  CDR3 for alpha chain variable domain of TCR clone 203909 (TRAV26-2, TRAJ13)
CILRDLSGGYQKVTF

SEQ ID NO: 407818 - protein, 15 aa, Homo sapiens
  CDR3 for beta chain variable domain of TCR clone 203909 (TRBV7-9, TRBJ2-2)
CASSPETGAGGELFF

SEQ ID NO: 407819 - protein, 14 aa, Homo sapiens
  CDR3 for alpha chain variable domain of TCR clone 203910 (TRAV23/DV6, TRAJ11)
CAASIESGYSTLTF

SEQ ID NO: 407820 - protein, 15 aa, Homo sapiens
  CDR3 for beta chain variable domain of TCR clone 203910 (TRBV28, TRBJ2-7)
CASSSPGTEPFEQYF

SEQ ID NO: 407821 - protein, 13 aa, Homo sapiens
  CDR3 for alpha chain variable domain of TCR clone 203911 (TRAV35, TRAJ43)
CAGYPYNNNDMRF

SEQ ID NO: 407822 - protein, 15 aa, Homo sapiens
  CDR3 for beta chain variable domain of TCR clone 203911 (TRBV25-1, TRBJ1-4)
CASSKRIATNEKLFL

SEQ ID NO: 407823 - protein, 12 aa, Homo sapiens
  CDR3 for alpha chain variable domain of TCR clone 203912 (TRAV27, TRAJ36)
CAGMTGANNLFF

SEQ ID NO: 407824 - protein, 16 aa, Homo sapiens
  CDR3 for beta chain variable domain of TCR clone 203912 (TRBV6-1, TRBJ1-3)
CASVQGGVETPYILER

SEQ ID NO: 407825 - protein, 16 aa, Homo sapiens
  CDR3 for alpha chain variable domain of TCR clone 203913 (TRAV14/DV4, TRAJ28)
CAMREVSSGAELPTHF

SEQ ID NO: 407826 - protein, 15 aa, Homo sapiens
  CDR3 for beta chain variable domain of TCR clone 203913 (TRBV11-2, TRBJ1-6)
CASTLRETGNSPLHF

SEQ ID NO: 407827 - protein, 14 aa, Homo sapiens
  CDR3 for alpha chain variable domain of TCR clone 203914 (TRAV8-1, TRAJ4)
CAVPFSGGYNKLIF

SEQ ID NO: 407828 - protein, 17 aa, Homo sapiens
  CDR3 for beta chain variable domain of TCR clone 203914 (TRBV11-2, TRBJ2-1)
CASSLYPPGVEYNEQFF

SEQ ID NO: 407829 - protein, 13 aa, Homo sapiens
  CDR3 for alpha chain variable domain of TCR clone 203915 (TRAV26-1, TRAJ39)
CIVRVEGRQHAHL

SEQ ID NO: 407830 - protein, 18 aa, Homo sapiens
  CDR3 for beta chain variable domain of TCR clone 203915 (TRBV7-9, TRBJ2-7)
CASSLTTSGSRTWYEQYF

SEQ ID NO: 407831 - protein, 13 aa, Homo sapiens
  CDR3 for alpha chain variable domain of TCR clone 203916 (TRAV1-2, TRAJ9)
CAALNTGGFKTIF

SEQ ID NO: 407832 - protein, 14 aa, Homo sapiens
  CDR3 for beta chain variable domain of TCR clone 203916 (TRBV20-1, TRBJ1-6)
CSARGTGYNSPLHF

SEQ ID NO: 407833 - protein, 16 aa, Homo sapiens
  CDR3 for alpha chain variable domain of TCR clone 203917 (TRAV30, TRAJ24)
CGTEIVAADSWGKFQF

SEQ ID NO: 407834 - protein, 14 aa, Homo sapiens
  CDR3 for beta chain variable domain of TCR clone 203917 (TRBV7-2, TRBJ2-7)
CASSPKTSFYEQYF

SEQ ID NO: 407835 - protein, 14 aa, Homo sapiens
  CDR3 for alpha chain variable domain of TCR clone 203918 (TRAV13-2, TRAJ32)
CAESLGGATNKLIF

SEQ ID NO: 407836 - protein, 14 aa, Homo sapiens
  CDR3 for beta chain variable domain of TCR clone 203918 (TRBV7-6, TRBJ2-3)
CASSLGTVTDTQYF

SEQ ID NO: 407837 - protein, 14 aa, Homo sapiens
  CDR3 for alpha chain variable domain of TCR clone 203919 (TRAV17, TRAJ57)
CATDPQGVSEKLVF

SEQ ID NO: 407838 - protein, 16 aa, Homo sapiens
  CDR3 for beta chain variable domain of TCR clone 203919 (TRBV20-1, TRBJ1-4)
CSAPGQGLLTNEKLFF

SEQ ID NO: 407839 - protein, 14 aa, Homo sapiens
  CDR3 for alpha chain variable domain of TCR clone 203920 (TRAV1-2, TRAJ16)
CAVNRFSDGQKPLF

SEQ ID NO: 407840 - protein, 13 aa, Homo sapiens
  CDR3 for beta chain variable domain of TCR clone 203920 (TRBV12-5, TRBJ2-3)
CASGDRQSDTQYF

SEQ ID NO: 407841 - protein, 14 aa, Homo sapiens
  CDR3 for alpha chain variable domain of TCR clone 203921 (TRAV13-1, TRAJ39)
CAASYNNAGNMLTF

SEQ ID NO: 407842 - protein, 13 aa, Homo sapiens
  CDR3 for beta chain variable domain of TCR clone 203921 (TRBV24-1, TRBJ1-4)
CATNSGRSEKLFF

SEQ ID NO: 407843 - protein, 13 aa, Homo sapiens
  CDR3 for alpha chain variable domain of TCR clone 203922 (TRAV8-6, TRAJ33)
CAVSEGSNYQLIW

SEQ ID NO: 407844 - protein, 16 aa, Homo sapiens
  CDR3 for beta chain variable domain of TCR clone 203922 (TRBV11-2, TRBJ1-1)
CASSLRQGGEHSKAFF

SEQ ID NO: 407845 - protein, 14 aa, Homo sapiens
  CDR3 for alpha chain variable domain of TCR clone 203923 (TRAV8-1, TRAJ5)
CAVSMDTGRRALTF

SEQ ID NO: 407846 - protein, 18 aa, Homo sapiens
  CDR3 for beta chain variable domain of TCR clone 203923 (TRBV11-2, TRBJ2-3)
CASSLGGASRGAPNTQYF

SEQ ID NO: 407847 - protein, 13 aa, Homo sapiens
  CDR3 for alpha chain variable domain of TCR clone 203924 (TRAV8-1, TRAJ23)
CAWRDNQGGKLIF

SEQ ID NO: 407848 - protein, 20 aa, Homo sapiens
  CDR3 for beta chain variable domain of TCR clone 203924 (TRBV7-8, TRBJ2-2)
CASSHLFPGPTIHITGELFF

SEQ ID NO: 407849 - protein, 11 aa, Homo sapiens
  CDR3 for alpha chain variable domain of TCR clone 203925 (TRAV23/DV6, TRAJ49)
CAVAPVTSSIL

SEQ ID NO: 407850 - protein, 16 aa, Homo sapiens
  CDR3 for beta chain variable domain of TCR clone 203925 (TRBV13, TRBJ2-2)
CASSPRTGEHTGELFF

SEQ ID NO: 407851 - protein, 16 aa, Homo sapiens
  CDR3 for alpha chain variable domain of TCR clone 203926 (TRAV30, TRAJ24)
CGTEIVDADGWGKLQF

SEQ ID NO: 407852 - protein, 14 aa, Homo sapiens
  CDR3 for beta chain variable domain of TCR clone 203926 (TRBV12-5, TRBJ2-5)
CASGSRTHQETQYF

SEQ ID NO: 407853 - protein, 14 aa, Homo sapiens
  CDR3 for alpha chain variable domain of TCR clone 203927 (TRAV13-1, TRAJ39)
CAASYNNAGNMLTF

SEQ ID NO: 407854 - protein, 12 aa, Homo sapiens
  CDR3 for beta chain variable domain of TCR clone 203927 (TRBV5-1, TRBJ2-7)
CASSLRGYEQYF

SEQ ID NO: 407855 - protein, 14 aa, Homo sapiens
  CDR3 for alpha chain variable domain of TCR clone 203928 (TRAV21, TRAJ21)
CAVKGFGYFNKFYF

SEQ ID NO: 407856 - protein, 13 aa, Homo sapiens
  CDR3 for beta chain variable domain of TCR clone 203928 (TRBV18, TRBJ1-1)
CASSPETKPEAFF

SEQ ID NO: 407857 - protein, 11 aa, Homo sapiens
  CDR3 for alpha chain variable domain of TCR clone 203929 (TRAV4, TRAJ31)
CLVGDNARLMF

SEQ ID NO: 407858 - protein, 15 aa, Homo sapiens
  CDR3 for beta chain variable domain of TCR clone 203929 (TRBV7-3, TRBJ2-6)
CASSRTGTGANVLTF

SEQ ID NO: 407859 - protein, 14 aa, Homo sapiens
  CDR3 for alpha chain variable domain of TCR clone 203930 (TRAV9-2, TRAJ39)
CALDIYNAGNMLTF

SEQ ID NO: 407860 - protein, 14 aa, Homo sapiens
  CDR3 for beta chain variable domain of TCR clone 203930 (TRBV9, TRBJ2-7)
CASSPLRAVGEQYF

SEQ ID NO: 407861 - protein, 14 aa, Homo sapiens
  CDR3 for alpha chain variable domain of TCR clone 203931 (TRAV9-2, TRAJ39)
CALYIYNAGNMLTF

SEQ ID NO: 407862 - protein, 15 aa, Homo sapiens
  CDR3 for beta chain variable domain of TCR clone 203931 (TRBV19, TRBJ1-2)
CASSVGQVLNYGYTL

SEQ ID NO: 407863 - protein, 15 aa, Homo sapiens
  CDR3 for alpha chain variable domain of TCR clone 203932 (TRAV8-2, TRAJ13)
CVVSDLSGGYQTVTF

SEQ ID NO: 407864 - protein, 13 aa, Homo sapiens
  CDR3 for beta chain variable domain of TCR clone 203932 (TRBV10-3, TRBJ2-7)
CASKLAVNYEQYF

SEQ ID NO: 407865 - protein, 23 aa, Homo sapiens
  CDR3 for alpha chain variable domain of TCR clone 203933 (TRAV12-2, TRAJ43)
SLLIRDSQPSDSATYPCAFDMRF

SEQ ID NO: 407866 - protein, 18 aa, Homo sapiens
  CDR3 for beta chain variable domain of TCR clone 203933 (TRBV20-1, TRBJ2-3)
CSASGLAGGPGSPDTQYF

SEQ ID NO: 407867 - protein, 11 aa, Homo sapiens
  CDR3 for alpha chain variable domain of TCR clone 203934 (TRAV2, TRAJ13)
CASGGYQKVNF

SEQ ID NO: 407868 - protein, 17 aa, Homo sapiens
  CDR3 for beta chain variable domain of TCR clone 203934 (TRBV20-1, TRBJ2-2)
CSASGSGQGGLTGELFF

SEQ ID NO: 407869 - protein, 13 aa, Homo sapiens
  CDR3 for alpha chain variable domain of TCR clone 203935 (TRAV12-3, TRAJ33)
CAMSVNSNYQLIW

SEQ ID NO: 407870 - protein, 14 aa, Homo sapiens
  CDR3 for beta chain variable domain of TCR clone 203935 (TRBV28, TRBJ2-1)
CASSYYTAYNEQFF

SEQ ID NO: 407871 - protein, 13 aa, Homo sapiens
  CDR3 for alpha chain variable domain of TCR clone 203936 (TRAV12-2, TRAJ9)
CAVLETGGFKTIF

SEQ ID NO: 407872 - protein, 15 aa, Homo sapiens
  CDR3 for beta chain variable domain of TCR clone 203936 (TRBV6-3, TRBJ2-7)
CASSRTGANLYEQYF

SEQ ID NO: 407873 - protein, 13 aa, Homo sapiens
  CDR3 for alpha chain variable domain of TCR clone 203937 (TRAV26-1, TRAJ34)
CIVRCHNTDKLIF

SEQ ID NO: 407874 - protein, 15 aa, Homo sapiens
  CDR3 for beta chain variable domain of TCR clone 203937 (TRBV4-1, TRBJ2-7)
CASSQEWGPSYEQCF

SEQ ID NO: 407875 - protein, 21 aa, Homo sapiens
  CDR3 for alpha chain variable domain of TCR clone 203938 (TRAV29/DV5, TRAJ32)
CSVLLCSKRGSWGGATNKLIF

SEQ ID NO: 407876 - protein, 15 aa, Homo sapiens
  CDR3 for beta chain variable domain of TCR clone 203938 (TRBV2, TRBJ2-1)
CASSEEREGDNEQFF

SEQ ID NO: 407877 - protein, 16 aa, Homo sapiens
  CDR3 for alpha chain variable domain of TCR clone 203939 (TRAV4, TRAJ18)
CLVGDTRGSTLGRLYF

SEQ ID NO: 407878 - protein, 15 aa, Homo sapiens
  CDR3 for beta chain variable domain of TCR clone 203939 (TRBV27, TRBJ2-3)
CASSLGLAATDTQYF

SEQ ID NO: 407879 - protein, 16 aa, Homo sapiens
  CDR3 for alpha chain variable domain of TCR clone 203940 (TRAV30, TRAJ24)
CGTEIVAADSWGKFPF

SEQ ID NO: 407880 - protein, 14 aa, Homo sapiens
  CDR3 for beta chain variable domain of TCR clone 203940 (TRBV12-5, TRBJ2-5)
CASGSRTHQETQYF

SEQ ID NO: 407881 - protein, 13 aa, Homo sapiens
  CDR3 for alpha chain variable domain of TCR clone 203941 (TRAV13-1, TRAJ39)
CAASIWAGNMLTF

SEQ ID NO: 407882 - protein, 17 aa, Homo sapiens
  CDR3 for beta chain variable domain of TCR clone 203941 (TRBV7-8, TRBJ1-2)
CASSLRPLQGHLYGYTF

SEQ ID NO: 407883 - protein, 12 aa, Homo sapiens
  CDR3 for alpha chain variable domain of TCR clone 203942 (TRAV12-3, TRAJ17)
CAMTLTGNKLTF

SEQ ID NO: 407884 - protein, 14 aa, Homo sapiens
  CDR3 for beta chain variable domain of TCR clone 203942 (TRBV7-3, TRBJ1-1)
CASSLKGGYTEAFF

SEQ ID NO: 407885 - protein, 16 aa, Homo sapiens
  CDR3 for alpha chain variable domain of TCR clone 203943 (TRAV30, TRAJ24)
CGTAIVDADSWGKFQF

SEQ ID NO: 407886 - protein, 13 aa, Homo sapiens
  CDR3 for beta chain variable domain of TCR clone 203943 (TRBV7-3, TRBJ1-1)
CASSQDWGAEAFF

SEQ ID NO: 407887 - protein, 12 aa, Homo sapiens
  CDR3 for alpha chain variable domain of TCR clone 203944 (TRAV13-2, TRAJ23)
CAERHRGGKLIF

SEQ ID NO: 407888 - protein, 13 aa, Homo sapiens
  CDR3 for beta chain variable domain of TCR clone 203944 (TRBV12-4, TRBJ1-2)
CASSSRQGKGYTF

SEQ ID NO: 407889 - protein, 14 aa, Homo sapiens
  CDR3 for alpha chain variable domain of TCR clone 203945 (TRAV12-3, TRAJ10)
SHLPLTGGGNKLTF

SEQ ID NO: 407890 - protein, 17 aa, Homo sapiens
  CDR3 for beta chain variable domain of TCR clone 203945 (TRBV19, TRBJ2-7)
CASSISFYDSYPYEQYL

SEQ ID NO: 407891 - protein, 13 aa, Homo sapiens
  CDR3 for alpha chain variable domain of TCR clone 203946 (TRAV30, TRAJ6)
CGFIEGGSYIPTF

SEQ ID NO: 407892 - protein, 13 aa, Homo sapiens
  CDR3 for beta chain variable domain of TCR clone 203946 (TRBV2, TRBJ1-1)
CARNPTGGFHAVF

SEQ ID NO: 407893 - protein, 14 aa, Homo sapiens
  CDR3 for alpha chain variable domain of TCR clone 203947 (TRAV29/DV5, TRAJ36)
CAARRKTGANNLFF

SEQ ID NO: 407894 - protein, 17 aa, Homo sapiens
  CDR3 for beta chain variable domain of TCR clone 203947 (TRBV7-9, TRBJ1-1)
CASSLGIAGAENTEAFF

SEQ ID NO: 407895 - protein, 16 aa, Homo sapiens
  CDR3 for alpha chain variable domain of TCR clone 203948 (TRAV3, TRAJ10)
CAVRDMRARGGNKLTF

SEQ ID NO: 407896 - protein, 14 aa, Homo sapiens
  CDR3 for beta chain variable domain of TCR clone 203948 (TRBV7-2, TRBJ1-1)
CASSFLTGTTEAFF

SEQ ID NO: 407897 - protein, 13 aa, Homo sapiens
  CDR3 for alpha chain variable domain of TCR clone 203949 (TRAV13-1, TRAJ32)
QVTDGGATNKLIF

SEQ ID NO: 407898 - protein, 15 aa, Homo sapiens
  CDR3 for beta chain variable domain of TCR clone 203949 (TRBV18, TRBJ2-1)
CASSPPSASYNEQFF

SEQ ID NO: 407899 - protein, 12 aa, Homo sapiens
  CDR3 for alpha chain variable domain of TCR clone 203950 (TRAV12-1, TRAJ40)
CVFYSGTYKYIF

SEQ ID NO: 407900 - protein, 14 aa, Homo sapiens
  CDR3 for beta chain variable domain of TCR clone 203950 (TRBV7-8, TRBJ2-3)
CASSLEAGTDTQYF

SEQ ID NO: 407901 - protein, 15 aa, Homo sapiens
  CDR3 for alpha chain variable domain of TCR clone 203951 (TRAV2, TRAJ22)
CAVPSRGGSARQLTF

SEQ ID NO: 407902 - protein, 16 aa, Homo sapiens
  CDR3 for beta chain variable domain of TCR clone 203951 (TRBV27, TRBJ2-2)
CASSFRGLVRTGELFF

SEQ ID NO: 407903 - protein, 13 aa, Homo sapiens
  CDR3 for alpha chain variable domain of TCR clone 203952 (TRAV12-1, TRAJ53)
CVVNAESNYKLTF

SEQ ID NO: 407904 - protein, 14 aa, Homo sapiens
  CDR3 for beta chain variable domain of TCR clone 203952 (TRBV19, TRBJ2-1)
CASPTFVLSGEQFF

SEQ ID NO: 407905 - protein, 11 aa, Homo sapiens
  CDR3 for alpha chain variable domain of TCR clone 203953 (TRAV26-1, TRAJ37)
CIVRVGRKLIF

SEQ ID NO: 407906 - protein, 14 aa, Homo sapiens
  CDR3 for beta chain variable domain of TCR clone 203953 (TRBV7-2, TRBJ2-7)
CASSPKTSFYEQYF

SEQ ID NO: 407907 - protein, 17 aa, Homo sapiens
  CDR3 for alpha chain variable domain of TCR clone 203954 (TRAV3, TRAJ6)
CAVRDGPRAGGSYIPTF

SEQ ID NO: 407908 - protein, 13 aa, Homo sapiens
  CDR3 for beta chain variable domain of TCR clone 203954 (TRBV19, TRBJ2-7)
CARSIDRTYEQYF

SEQ ID NO: 407909 - protein, 17 aa, Homo sapiens
  CDR3 for alpha chain variable domain of TCR clone 203955 (TRAV3, TRAJ7)
CAVRDMSPLEGTTDSLL

SEQ ID NO: 407910 - protein, 17 aa, Homo sapiens
  CDR3 for beta chain variable domain of TCR clone 203955 (TRBV15, TRBJ1-2)
CATSGREIDVVNYGYTC

SEQ ID NO: 407911 - protein, 18 aa, Homo sapiens
  CDR3 for alpha chain variable domain of TCR clone 203956 (TRAV21, TRAJ52)
CAVRPSPTGGTSYGKLTF

SEQ ID NO: 407912 - protein, 13 aa, Homo sapiens
  CDR3 for beta chain variable domain of TCR clone 203956 (TRBV29-1, TRBJ2-2)
CSVYREDTGELFF

SEQ ID NO: 407913 - protein, 14 aa, Homo sapiens
  CDR3 for alpha chain variable domain of TCR clone 203957 (TRAV1-2, TRAJ16)
CAVNRFSDGQKLLF

SEQ ID NO: 407914 - protein, 16 aa, Homo sapiens
  CDR3 for beta chain variable domain of TCR clone 203957 (TRBV7-2, TRBJ2-7)
CASSLALSGGAYEQYF

SEQ ID NO: 407915 - protein, 13 aa, Homo sapiens
  CDR3 for alpha chain variable domain of TCR clone 203958 (TRAV21, TRAJ27)
CAARPGNAGKSTF

SEQ ID NO: 407916 - protein, 11 aa, Homo sapiens
  CDR3 for beta chain variable domain of TCR clone 203958 (TRBV25-1, TRBJ1-2)
CASSGLVGYTF

SEQ ID NO: 407917 - protein, 15 aa, Homo sapiens
  CDR3 for alpha chain variable domain of TCR clone 203959 (TRAV2, TRAJ32)
CAVANYGGATNKLIF

SEQ ID NO: 407918 - protein, 15 aa, Homo sapiens
  CDR3 for beta chain variable domain of TCR clone 203959 (TRBV7-7, TRBJ2-5)
CASSQLERAEETRYF

SEQ ID NO: 407919 - protein, 15 aa, Homo sapiens
  CDR3 for alpha chain variable domain of TCR clone 203960 (TRAV2, TRAJ24)
CAVVRLKNSWGKLQF

SEQ ID NO: 407920 - protein, 19 aa, Homo sapiens
  CDR3 for beta chain variable domain of TCR clone 203960 (TRBV7-7, TRBJ2-3)
CIAVPAALGTSGSTDTQYF

SEQ ID NO: 407921 - protein, 11 aa, Homo sapiens
  CDR3 for alpha chain variable domain of TCR clone 203961 (TRAV35, TRAJ34)
CWARNTDKLIF

SEQ ID NO: 407922 - protein, 16 aa, Homo sapiens
  CDR3 for beta chain variable domain of TCR clone 203961 (TRBV2, TRBJ2-4)
CASSEAPGGEQNIQYF

SEQ ID NO: 407923 - protein, 11 aa, Homo sapiens
  CDR3 for alpha chain variable domain of TCR clone 203962 (TRAV2, TRAJ21)
CAVFNFNKFYF

SEQ ID NO: 407924 - protein, 14 aa, Homo sapiens
  CDR3 for beta chain variable domain of TCR clone 203962 (TRBV15, TRBJ2-3)
CATRSGPSADTQYF

SEQ ID NO: 407925 - protein, 10 aa, Homo sapiens
  CDR3 for alpha chain variable domain of TCR clone 203963 (TRAV8-4, TRAJ43)
CAGSADDMRF

SEQ ID NO: 407926 - protein, 14 aa, Homo sapiens
  CDR3 for beta chain variable domain of TCR clone 203963 (TRBV5-7, TRBJ1-1)
CASSLMGVNTEAFF

SEQ ID NO: 407927 - protein, 16 aa, Homo sapiens
  CDR3 for alpha chain variable domain of TCR clone 203964 (TRAV14/DV4, TRAJ12)
CARREVLMDSSYKLIF

SEQ ID NO: 407928 - protein, 13 aa, Homo sapiens
  CDR3 for beta chain variable domain of TCR clone 203964 (TRBV18, TRBJ1-1)
CASSGGRNTEAFF

SEQ ID NO: 407929 - protein, 16 aa, Homo sapiens
  CDR3 for alpha chain variable domain of TCR clone 203965 (TRAV30, TRAJ24)
CSTEIVGADSWGKFKF

SEQ ID NO: 407930 - protein, 14 aa, Homo sapiens
  CDR3 for beta chain variable domain of TCR clone 203965 (TRBV12-5, TRBJ2-5)
CASGSRTHQETQYF

SEQ ID NO: 407931 - protein, 13 aa, Homo sapiens
  CDR3 for alpha chain variable domain of TCR clone 203966 (TRAV21, TRAJ15)
CAVANQSGTALIF

SEQ ID NO: 407932 - protein, 13 aa, Homo sapiens
  CDR3 for beta chain variable domain of TCR clone 203966 (TRBV10-3, TRBJ2-7)
CASKLAVNYEQYF

SEQ ID NO: 407933 - protein, 12 aa, Homo sapiens
  CDR3 for alpha chain variable domain of TCR clone 203967 (TRAV8-6, TRAJ43)
CAVSNNNNDMRF

SEQ ID NO: 407934 - protein, 17 aa, Homo sapiens
  CDR3 for beta chain variable domain of TCR clone 203967 (TRBV7-3, TRBJ2-3)
CASSLMKRMRGADTQYF

SEQ ID NO: 407935 - protein, 16 aa, Homo sapiens
  CDR3 for alpha chain variable domain of TCR clone 203968 (TRAV8-3, TRAJ42)
CAVGEGNGGSQGNLIF

SEQ ID NO: 407936 - protein, 14 aa, Homo sapiens
  CDR3 for beta chain variable domain of TCR clone 203968 (TRBV7-2, TRBJ2-1)
CASGRGGARNEQFF

SEQ ID NO: 407937 - protein, 16 aa, Homo sapiens
  CDR3 for alpha chain variable domain of TCR clone 203969 (TRAV3, TRAJ37)
CAVRGKGSGNTGKLIF

SEQ ID NO: 407938 - protein, 15 aa, Homo sapiens
  CDR3 for beta chain variable domain of TCR clone 203969 (TRBV10-3, TRBJ2-6)
CATPAAASGANVLTF

SEQ ID NO: 407939 - protein, 15 aa, Homo sapiens
  CDR3 for alpha chain variable domain of TCR clone 203970 (TRAV12-3, TRAJ6)
CAMSATTGGSYIPTF

SEQ ID NO: 407940 - protein, 16 aa, Homo sapiens
  CDR3 for beta chain variable domain of TCR clone 203970 (TRBV24-1, TRBJ2-3)
CATSDPGTGATDTQYF

SEQ ID NO: 407941 - protein, 13 aa, Homo sapiens
  CDR3 for alpha chain variable domain of TCR clone 203971 (TRAV16, TRAJ15)
CALNNQAGTALIF

SEQ ID NO: 407942 - protein, 15 aa, Homo sapiens
  CDR3 for beta chain variable domain of TCR clone 203971 (TRBV6-1, TRBJ2-1)
CASSEAAYSYNEQFF

SEQ ID NO: 407943 - protein, 14 aa, Homo sapiens
  CDR3 for alpha chain variable domain of TCR clone 203972 (TRAV12-2, TRAJ11)
CAVEGGSGYSTLTF

SEQ ID NO: 407944 - protein, 15 aa, Homo sapiens
  CDR3 for beta chain variable domain of TCR clone 203972 (TRBV5-8, TRBJ2-3)
CASSLRAGSTDTQYF

SEQ ID NO: 407945 - protein, 15 aa, Homo sapiens
  CDR3 for alpha chain variable domain of TCR clone 203973 (TRAV8-3, TRAJ45)
CASSYSVGGADVLTF

SEQ ID NO: 407946 - protein, 13 aa, Homo sapiens
  CDR3 for beta chain variable domain of TCR clone 203973 (TRBV10-3, TRBJ2-7)
CASKLAVNYEQYF

SEQ ID NO: 407947 - protein, 10 aa, Homo sapiens
  CDR3 for alpha chain variable domain of TCR clone 203974 (TRAV12-1, TRAJ37)
ARGNTGKLIF

SEQ ID NO: 407948 - protein, 15 aa, Homo sapiens
  CDR3 for beta chain variable domain of TCR clone 203974 (TRBV11-2, TRBJ2-1)
CASSLGTSGLNEQFF

SEQ ID NO: 407949 - protein, 13 aa, Homo sapiens
  CDR3 for alpha chain variable domain of TCR clone 203975 (TRAV27, TRAJ56)
CAGQPGANSKLTF

SEQ ID NO: 407950 - protein, 18 aa, Homo sapiens
  CDR3 for beta chain variable domain of TCR clone 203975 (TRBV11-2, TRBJ2-3)
CASSLGGASRGAPNTQYF

SEQ ID NO: 407951 - protein, 13 aa, Homo sapiens
  CDR3 for alpha chain variable domain of TCR clone 203976 (TRAV21, TRAJ57)
CAVTQGGSEKLVF

SEQ ID NO: 407952 - protein, 14 aa, Homo sapiens
  CDR3 for beta chain variable domain of TCR clone 203976 (TRBV7-2, TRBJ2-7)
CASRSQGAAYEQYF

SEQ ID NO: 407953 - protein, 13 aa, Homo sapiens
  CDR3 for alpha chain variable domain of TCR clone 203977 (TRAV8-3, TRAJ43)
CAVVPYNNNDMRF

SEQ ID NO: 407954 - protein, 16 aa, Homo sapiens
  CDR3 for beta chain variable domain of TCR clone 203977 (TRBV7-2, TRBJ2-5)
CASSPFPTGGEENQYF

SEQ ID NO: 407955 - protein, 15 aa, Homo sapiens
  CDR3 for alpha chain variable domain of TCR clone 203978 (TRAV1-2, TRAJ18)
CAWEGRGSTLGRLYF

SEQ ID NO: 407956 - protein, 15 aa, Homo sapiens
  CDR3 for beta chain variable domain of TCR clone 203978 (TRBV28, TRBJ1-2)
CASIPQGSDDYGYTF

SEQ ID NO: 407957 - protein, 14 aa, Homo sapiens
  CDR3 for alpha chain variable domain of TCR clone 203979 (TRAV25, TRAJ12)
CAGCDMDSSYKLIF

SEQ ID NO: 407958 - protein, 17 aa, Homo sapiens
  CDR3 for beta chain variable domain of TCR clone 203979 (TRBV19, TRBJ2-6)
CASSTGQVFSGANVLTF

SEQ ID NO: 407959 - protein, 15 aa, Homo sapiens
  CDR3 for alpha chain variable domain of TCR clone 203980 (TRAV16, TRAJ17)
CALSQIKAAGNKLTF

SEQ ID NO: 407960 - protein, 13 aa, Homo sapiens
  CDR3 for beta chain variable domain of TCR clone 203980 (TRBV4-1, TRBJ2-2)
CASSQENTGELFF

SEQ ID NO: 407961 - protein, 13 aa, Homo sapiens
  CDR3 for alpha chain variable domain of TCR clone 203981 (TRAV3, TRAJ15)
CAVRDQAGTALIF

SEQ ID NO: 407962 - protein, 13 aa, Homo sapiens
  CDR3 for beta chain variable domain of TCR clone 203981 (TRBV7-3, TRBJ1-1)
CASSQDWGAEAFF

SEQ ID NO: 407963 - protein, 15 aa, Homo sapiens
  CDR3 for alpha chain variable domain of TCR clone 203982 (TRAV8-6, TRAJ10)
CAVSDQAGGGNKLTF

SEQ ID NO: 407964 - protein, 15 aa, Homo sapiens
  CDR3 for beta chain variable domain of TCR clone 203982 (TRBV3-1, TRBJ2-5)
CASRANLGGPETQYF

SEQ ID NO: 407965 - protein, 14 aa, Homo sapiens
  CDR3 for alpha chain variable domain of TCR clone 203983 (TRAV8-4, TRAJ5)
CAVSTDTGRRALTF

SEQ ID NO: 407966 - protein, 15 aa, Homo sapiens
  CDR3 for beta chain variable domain of TCR clone 203983 (TRBV7-8, TRBJ2-1)
CASSLHGGPYNEQFF

SEQ ID NO: 407967 - protein, 14 aa, Homo sapiens
  CDR3 for alpha chain variable domain of TCR clone 203984 (TRAV12-2, TRAJ44)
CAVNPAGTASKLTF

SEQ ID NO: 407968 - protein, 14 aa, Homo sapiens
  CDR3 for beta chain variable domain of TCR clone 203984 (TRBV20-1, TRBJ1-1)
CSAQTRIGGTEAFF

SEQ ID NO: 407969 - protein, 12 aa, Homo sapiens
  CDR3 for alpha chain variable domain of TCR clone 203985 (TRAV21, TRAJ11)
WSATSGYSTLTF

SEQ ID NO: 407970 - protein, 14 aa, Homo sapiens
  CDR3 for beta chain variable domain of TCR clone 203985 (TRBV20-1, TRBJ2-7)
CSAPELAGVGEQYF

SEQ ID NO: 407971 - protein, 14 aa, Homo sapiens
  CDR3 for alpha chain variable domain of TCR clone 203986 (TRAV16, TRAJ17)
CAPRIKAAGNKLTF

SEQ ID NO: 407972 - protein, 17 aa, Homo sapiens
  CDR3 for beta chain variable domain of TCR clone 203986 (TRBV7-2, TRBJ2-3)
CASSSCSGTRRADTQYF

SEQ ID NO: 407973 - protein, 15 aa, Homo sapiens
  CDR3 for alpha chain variable domain of TCR clone 203987 (TRAV8-3, TRAJ45)
CASSYSGGGADGLTF

SEQ ID NO: 407974 - protein, 16 aa, Homo sapiens
  CDR3 for beta chain variable domain of TCR clone 203987 (TRBV20-1, TRBJ2-2)
CSASDSGIPGAGELFF

SEQ ID NO: 407975 - protein, 11 aa, Homo sapiens
  CDR3 for alpha chain variable domain of TCR clone 203988 (TRAV2, TRAJ13)
CASGGDQKVTF

SEQ ID NO: 407976 - protein, 15 aa, Homo sapiens
  CDR3 for beta chain variable domain of TCR clone 203988 (TRBV25-1, TRBJ1-4)
CASSPGDSTHEKLFF

SEQ ID NO: 407977 - protein, 11 aa, Homo sapiens
  CDR3 for alpha chain variable domain of TCR clone 203989 (TRAV2, TRAJ13)
CASGGYQKVTF

SEQ ID NO: 407978 - protein, 18 aa, Homo sapiens
  CDR3 for beta chain variable domain of TCR clone 203989 (TRBV7-3, TRBJ2-3)
CASSSTGTYPGSTDTQYF

SEQ ID NO: 407979 - protein, 13 aa, Homo sapiens
  CDR3 for alpha chain variable domain of TCR clone 203990 (TRAV8-3, TRAJ44)
CAVVPGTASKLTF

SEQ ID NO: 407980 - protein, 14 aa, Homo sapiens
  CDR3 for beta chain variable domain of TCR clone 203990 (TRBV11-2, TRBJ2-3)
CAIRRLARTDTQYF

SEQ ID NO: 407981 - protein, 16 aa, Homo sapiens
  CDR3 for alpha chain variable domain of TCR clone 203991 (TRAV38-1, TRAJ56)
CAFMKRQTGANSKLTF

SEQ ID NO: 407982 - protein, 15 aa, Homo sapiens
  CDR3 for beta chain variable domain of TCR clone 203991 (TRBV6-1, TRBJ2-2)
CASSAGQGYTGELFF

SEQ ID NO: 407983 - protein, 17 aa, Homo sapiens
  CDR3 for alpha chain variable domain of TCR clone 203992 (TRAV8-6, TRAJ58)
CAVSSWVGETSGSRLTF

SEQ ID NO: 407984 - protein, 14 aa, Homo sapiens
  CDR3 for beta chain variable domain of TCR clone 203992 (TRBV4-2, TRBJ2-7)
CASSPKTSFYEQYF

SEQ ID NO: 407985 - protein, 17 aa, Homo sapiens
  CDR3 for alpha chain variable domain of TCR clone 203993 (TRAV3, TRAJ12)
CCERRDGTMDSSYKLIF

SEQ ID NO: 407986 - protein, 15 aa, Homo sapiens
  CDR3 for beta chain variable domain of TCR clone 203993 (TRBV5-5, TRBJ1-5)
CASSLKGGGEQPQHC

SEQ ID NO: 407987 - protein, 14 aa, Homo sapiens
  CDR3 for alpha chain variable domain of TCR clone 203994 (TRAV26-1, TRAJ38)
CIADNAGNNRKLIW

SEQ ID NO: 407988 - protein, 16 aa, Homo sapiens
  CDR3 for beta chain variable domain of TCR clone 203994 (TRBV15, TRBJ2-7)
CATSRDRGRRRGEQYF

SEQ ID NO: 407989 - protein, 13 aa, Homo sapiens
  CDR3 for alpha chain variable domain of TCR clone 203995 (TRAV8-6, TRAJ49)
CAVITNPGNQFYF

SEQ ID NO: 407990 - protein, 13 aa, Homo sapiens
  CDR3 for beta chain variable domain of TCR clone 203995 (TRBV10-3, TRBJ2-7)
CASKLAVNYEQYF

SEQ ID NO: 407991 - protein, 16 aa, Homo sapiens
  CDR3 for alpha chain variable domain of TCR clone 203996 (TRAV30, TRAJ24)
CGTEIVDADSWGKFQF

SEQ ID NO: 407992 - protein, 16 aa, Homo sapiens
  CDR3 for beta chain variable domain of TCR clone 203996 (TRBV4-2, TRBJ2-5)
CASSQELVGSQETQYF

SEQ ID NO: 407993 - protein, 15 aa, Homo sapiens
  CDR3 for alpha chain variable domain of TCR clone 203997 (TRAV23/DV6, TRAJ13)
CAAWPGGGGYQKVTC

SEQ ID NO: 407994 - protein, 17 aa, Homo sapiens
  CDR3 for beta chain variable domain of TCR clone 203997 (TRBV19, TRBJ2-7)
CASSISFYDSYPYEQYF

SEQ ID NO: 407995 - protein, 14 aa, Homo sapiens
  CDR3 for alpha chain variable domain of TCR clone 203998 (TRAV12-2, TRAJ40)
CTVKIPSGTYKYIF

SEQ ID NO: 407996 - protein, 14 aa, Homo sapiens
  CDR3 for beta chain variable domain of TCR clone 203998 (TRBV19, TRBJ2-1)
CASPTFVLSGEQFF

SEQ ID NO: 407997 - protein, 13 aa, Homo sapiens
  CDR3 for alpha chain variable domain of TCR clone 203999 (TRAV27, TRAJ6)
CAGGTRGSYKPTF

SEQ ID NO: 407998 - protein, 14 aa, Homo sapiens
  CDR3 for beta chain variable domain of TCR clone 203999 (TRBV6-3, TRBJ1-1)
CASSYQRRDTEAFF

SEQ ID NO: 407999 - protein, 15 aa, Homo sapiens
  CDR3 for alpha chain variable domain of TCR clone 204000 (TRAV26-1, TRAJ44)
CIVRIGTGTASKLTF

SEQ ID NO: 408000 - protein, 16 aa, Homo sapiens
  CDR3 for beta chain variable domain of TCR clone 204000 (TRBV7-2, TRBJ2-6)
CAILSGVSSGANVLTF

SEQ ID NO: 408001 - protein, 13 aa, Homo sapiens
  CDR3 for alpha chain variable domain of TCR clone 204001 (TRAV2, TRAJ10)
CAVETGGGNKLTF

SEQ ID NO: 408002 - protein, 14 aa, Homo sapiens
  CDR3 for beta chain variable domain of TCR clone 204001 (TRBV20-1, TRBJ2-3)
CSAGGRRGSDTQYF

SEQ ID NO: 408003 - protein, 13 aa, Homo sapiens
  CDR3 for alpha chain variable domain of TCR clone 204002 (TRAV27, TRAJ49)
CAPRPYTGNQFYF

SEQ ID NO: 408004 - protein, 18 aa, Homo sapiens
  CDR3 for beta chain variable domain of TCR clone 204002 (TRBV7-3, TRBJ2-5)
FASSFGGAAQGRWETQYF

SEQ ID NO: 408005 - protein, 17 aa, Homo sapiens
  CDR3 for alpha chain variable domain of TCR clone 204003 (TRAV12-2, TRAJ4)
CAVNVRPVSGGYNKLIF

SEQ ID NO: 408006 - protein, 17 aa, Homo sapiens
  CDR3 for beta chain variable domain of TCR clone 204003 (TRBV6-3, TRBJ2-1)
CACSYSSGTRGLDEQFF

SEQ ID NO: 408007 - protein, 12 aa, Homo sapiens
  CDR3 for alpha chain variable domain of TCR clone 204004 (TRAV27, TRAJ33)
CAGDGSNYQLIW

SEQ ID NO: 408008 - protein, 15 aa, Homo sapiens
  CDR3 for beta chain variable domain of TCR clone 204004 (TRBV6-5, TRBJ2-7)
CASSYWTSGNYEQYF

SEQ ID NO: 408009 - protein, 13 aa, Homo sapiens
  CDR3 for alpha chain variable domain of TCR clone 204005 (TRAV12-2, TRAJ18)
CAVRGSTLGRLYF

SEQ ID NO: 408010 - protein, 20 aa, Homo sapiens
  CDR3 for beta chain variable domain of TCR clone 204005 (TRBV7-8, TRBJ2-2)
CASSHVFPGPTIHITGELFF

SEQ ID NO: 408011 - protein, 15 aa, Homo sapiens
  CDR3 for alpha chain variable domain of TCR clone 204006 (TRAV8-3, TRAJ32)
CAVGPYGGATNKLIL

SEQ ID NO: 408012 - protein, 14 aa, Homo sapiens
  CDR3 for beta chain variable domain of TCR clone 204006 (TRBV29-1, TRBJ2-2)
CSVLAETNIGELFF

SEQ ID NO: 408013 - protein, 15 aa, Homo sapiens
  CDR3 for alpha chain variable domain of TCR clone 204007 (TRAV8-3, TRAJ45)
CASSYSGGGADGLTF

SEQ ID NO: 408014 - protein, 12 aa, Homo sapiens
  CDR3 for beta chain variable domain of TCR clone 204007 (TRBV7-9, TRBJ1-4)
CASSTDREKLFF

SEQ ID NO: 408015 - protein, 12 aa, Homo sapiens
  CDR3 for alpha chain variable domain of TCR clone 204008 (TRAV12-2, TRAJ10)
WGVTGGGNKLTF

SEQ ID NO: 408016 - protein, 14 aa, Homo sapiens
  CDR3 for beta chain variable domain of TCR clone 204008 (TRBV27, TRBJ2-7)
CASATGTERREQSF

SEQ ID NO: 408017 - protein, 15 aa, Homo sapiens
  CDR3 for alpha chain variable domain of TCR clone 204009 (TRAV14/DV4, TRAJ12)
CAMREERDSSYKLIF

SEQ ID NO: 408018 - protein, 16 aa, Homo sapiens
  CDR3 for beta chain variable domain of TCR clone 204009 (TRBV24-1, TRBJ2-3)
CATSDRRQDLTDTQYF

SEQ ID NO: 408019 - protein, 17 aa, Homo sapiens
  CDR3 for alpha chain variable domain of TCR clone 204010 (TRAV3, TRAJ42)
CAVRDRDYGGSEGNLIF

SEQ ID NO: 408020 - protein, 14 aa, Homo sapiens
  CDR3 for beta chain variable domain of TCR clone 204010 (TRBV19, TRBJ2-5)
CASSMTGQQETQYF

SEQ ID NO: 408021 - protein, 10 aa, Homo sapiens
  CDR3 for alpha chain variable domain of TCR clone 204011 (TRAV25, TRAJ20)
CAVNDYKLSF

SEQ ID NO: 408022 - protein, 17 aa, Homo sapiens
  CDR3 for beta chain variable domain of TCR clone 204011 (TRBV7-8, TRBJ1-2)
CASSLRPLQGHLYGYTF

SEQ ID NO: 408023 - protein, 12 aa, Homo sapiens
  CDR3 for alpha chain variable domain of TCR clone 204012 (TRAV21, TRAJ11)
CAATSGYSTLTF

SEQ ID NO: 408024 - protein, 13 aa, Homo sapiens
  CDR3 for beta chain variable domain of TCR clone 204012 (TRBV24-1, TRBJ1-2)
CATSGTALDGYTF

SEQ ID NO: 408025 - protein, 14 aa, Homo sapiens
  CDR3 for alpha chain variable domain of TCR clone 204013 (TRAV38-1, TRAJ31)
CAFMKHDNNARLMF

SEQ ID NO: 408026 - protein, 16 aa, Homo sapiens
  CDR3 for beta chain variable domain of TCR clone 204013 (TRBV23-1, TRBJ2-1)
CISAPATGPTYNEQLF

SEQ ID NO: 408027 - protein, 14 aa, Homo sapiens
  CDR3 for alpha chain variable domain of TCR clone 204014 (TRAV12-2, TRAJ24)
CAVTPADSWGKLKF

SEQ ID NO: 408028 - protein, 15 aa, Homo sapiens
  CDR3 for beta chain variable domain of TCR clone 204014 (TRBV15, TRBJ2-1)
CATSRPGQGLHEQFF

SEQ ID NO: 408029 - protein, 13 aa, Homo sapiens
  CDR3 for alpha chain variable domain of TCR clone 204015 (TRAV21, TRAJ57)
CAVTQGGSEKLVF

SEQ ID NO: 408030 - protein, 15 aa, Homo sapiens
  CDR3 for beta chain variable domain of TCR clone 204015 (TRBV10-3, TRBJ2-1)
CHPGGGRGDYNEQFF

SEQ ID NO: 408031 - protein, 14 aa, Homo sapiens
  CDR3 for alpha chain variable domain of TCR clone 204016 (TRAV38-1, TRAJ45)
CASHSGGGADGLTF

SEQ ID NO: 408032 - protein, 16 aa, Homo sapiens
  CDR3 for beta chain variable domain of TCR clone 204016 (TRBV27, TRBJ2-2)
CASSSRGLVRTGELCF

SEQ ID NO: 408033 - protein, 14 aa, Homo sapiens
  CDR3 for alpha chain variable domain of TCR clone 204017 (TRAV26-1, TRAJ38)
FIADNAGNNRKLIW

SEQ ID NO: 408034 - protein, 16 aa, Homo sapiens
  CDR3 for beta chain variable domain of TCR clone 204017 (TRBV19, TRBJ2-1)
CASSKAGPSSYNEQFF

SEQ ID NO: 408035 - protein, 14 aa, Homo sapiens
  CDR3 for alpha chain variable domain of TCR clone 204018 (TRAV21, TRAJ45)
CAANSGGGADGLTF

SEQ ID NO: 408036 - protein, 16 aa, Homo sapiens
  CDR3 for beta chain variable domain of TCR clone 204018 (TRBV5-1, TRBJ1-1)
CASSCGGPAMNTEAFF

SEQ ID NO: 408037 - protein, 17 aa, Homo sapiens
  CDR3 for alpha chain variable domain of TCR clone 204019 (TRAV3, TRAJ6)
CAVRDGPRAGGSYIPTF

SEQ ID NO: 408038 - protein, 15 aa, Homo sapiens
  CDR3 for beta chain variable domain of TCR clone 204019 (TRBV28, TRBJ2-6)
CASIDRASGADVLTF

SEQ ID NO: 408039 - protein, 14 aa, Homo sapiens
  CDR3 for alpha chain variable domain of TCR clone 204020 (TRAV1-2, TRAJ8)
CAVSEDTGFQKLVF

SEQ ID NO: 408040 - protein, 13 aa, Homo sapiens
  CDR3 for beta chain variable domain of TCR clone 204020 (TRBV4-2, TRBJ2-2)
CASEDRGTGELFF

SEQ ID NO: 408041 - protein, 14 aa, Homo sapiens
  CDR3 for alpha chain variable domain of TCR clone 204021 (TRAV17, TRAJ31)
CATVLRNNNARLMF

SEQ ID NO: 408042 - protein, 14 aa, Homo sapiens
  CDR3 for beta chain variable domain of TCR clone 204021 (TRBV12-4, TRBJ2-5)
CASSLWQKRETQYF

SEQ ID NO: 408043 - protein, 13 aa, Homo sapiens
  CDR3 for alpha chain variable domain of TCR clone 204022 (TRAV21, TRAJ27)
CAASPGDAGKSTF

SEQ ID NO: 408044 - protein, 14 aa, Homo sapiens
  CDR3 for beta chain variable domain of TCR clone 204022 (TRBV7-6, TRBJ2-3)
CASSLGTVTDTQYF

SEQ ID NO: 408045 - protein, 12 aa, Homo sapiens
  CDR3 for alpha chain variable domain of TCR clone 204023 (TRAV12-2, TRAJ10)
WGVTGGGNKLTF

SEQ ID NO: 408046 - protein, 13 aa, Homo sapiens
  CDR3 for beta chain variable domain of TCR clone 204023 (TRBV19, TRBJ2-7)
CASSIDRTYEQYF

SEQ ID NO: 408047 - protein, 12 aa, Homo sapiens
  CDR3 for alpha chain variable domain of TCR clone 204024 (TRAV35, TRAJ30)
CAGQLADDKIIF

SEQ ID NO: 408048 - protein, 17 aa, Homo sapiens
  CDR3 for beta chain variable domain of TCR clone 204024 (TRBV4-2, TRBJ2-5)
CASSPGRWRNCQETQYF

SEQ ID NO: 408049 - protein, 17 aa, Homo sapiens
  CDR3 for alpha chain variable domain of TCR clone 204025 (TRAV3, TRAJ12)
CAVRDGGRMDSSYKLIF

SEQ ID NO: 408050 - protein, 14 aa, Homo sapiens
  CDR3 for beta chain variable domain of TCR clone 204025 (TRBV18, TRBJ2-7)
CASSLQRAVYEQYF

SEQ ID NO: 408051 - protein, 11 aa, Homo sapiens
  CDR3 for alpha chain variable domain of TCR clone 204026 (TRAV12-2, TRAJ29)
CAMTLRSPLVF

SEQ ID NO: 408052 - protein, 16 aa, Homo sapiens
  CDR3 for beta chain variable domain of TCR clone 204026 (TRBV19, TRBJ1-5)
CASSIDRGGPRQPQHF

SEQ ID NO: 408053 - protein, 14 aa, Homo sapiens
  CDR3 for alpha chain variable domain of TCR clone 204027 (TRAV12-2, TRAJ13)
CAVKKTGGYQKVTF

SEQ ID NO: 408054 - protein, 12 aa, Homo sapiens
  CDR3 for beta chain variable domain of TCR clone 204027 (TRBV6-3, TRBJ2-7)
CASSLTPYEQFF

SEQ ID NO: 408055 - protein, 14 aa, Homo sapiens
  CDR3 for alpha chain variable domain of TCR clone 204028 (TRAV2, TRAJ9)
CAVEDRCGGFKTIF

SEQ ID NO: 408056 - protein, 18 aa, Homo sapiens
  CDR3 for beta chain variable domain of TCR clone 204028 (TRBV11-2, TRBJ2-3)
CASSLGGASRGAPNTQYF

SEQ ID NO: 408057 - protein, 13 aa, Homo sapiens
  CDR3 for alpha chain variable domain of TCR clone 204029 (TRAV38-1, TRAJ42)
CARWGGSQGNLIF

SEQ ID NO: 408058 - protein, 17 aa, Homo sapiens
  CDR3 for beta chain variable domain of TCR clone 204029 (TRBV20-1, TRBJ2-1)
CSARDPLAGVWDNEQFF

SEQ ID NO: 408059 - protein, 14 aa, Homo sapiens
  CDR3 for alpha chain variable domain of TCR clone 204030 (TRAV12-3, TRAJ10)
SHLPLTGGGNRLTF

SEQ ID NO: 408060 - protein, 12 aa, Homo sapiens
  CDR3 for beta chain variable domain of TCR clone 204030 (TRBV7-8, TRBJ2-7)
CASSLGDREQYF

SEQ ID NO: 408061 - protein, 10 aa, Homo sapiens
  CDR3 for alpha chain variable domain of TCR clone 204031 (TRAV16, TRAJ22)
SAMYLQQLTF

SEQ ID NO: 408062 - protein, 15 aa, Homo sapiens
  CDR3 for beta chain variable domain of TCR clone 204031 (TRBV7-9, TRBJ1-6)
CASSSPGRGNSALHF

SEQ ID NO: 408063 - protein, 13 aa, Homo sapiens
  CDR3 for alpha chain variable domain of TCR clone 204032 (TRAV35, TRAJ48)
CAGHEFGNEKLTF

SEQ ID NO: 408064 - protein, 13 aa, Homo sapiens
  CDR3 for beta chain variable domain of TCR clone 204032 (TRBV7-2, TRBJ1-6)
SASSLVGSSPLHF

SEQ ID NO: 408065 - protein, 15 aa, Homo sapiens
  CDR3 for alpha chain variable domain of TCR clone 204033 (TRAV3, TRAJ47)
CSVRDIGEYGNKLVV

SEQ ID NO: 408066 - protein, 14 aa, Homo sapiens
  CDR3 for beta chain variable domain of TCR clone 204033 (TRBV13, TRBJ2-5)
CASSLERVGETQYF

SEQ ID NO: 408067 - protein, 16 aa, Homo sapiens
  CDR3 for alpha chain variable domain of TCR clone 204034 (TRAV1-1, TRAJ29)
CAVRSTRNSGNTPLVF

SEQ ID NO: 408068 - protein, 16 aa, Homo sapiens
  CDR3 for beta chain variable domain of TCR clone 204034 (TRBV27, TRBJ1-1)
CASSSRGRTGYSEAFF

SEQ ID NO: 408069 - protein, 12 aa, Homo sapiens
  CDR3 for alpha chain variable domain of TCR clone 204035 (TRAV12-3, TRAJ17)
CAMTLTGNKLTF

SEQ ID NO: 408070 - protein, 12 aa, Homo sapiens
  CDR3 for beta chain variable domain of TCR clone 204035 (TRBV7-8, TRBJ2-2)
CASSFTSEELFF

SEQ ID NO: 408071 - protein, 12 aa, Homo sapiens
  CDR3 for alpha chain variable domain of TCR clone 204036 (TRAV13-1, TRAJ43)
CAASARSDDMRF

SEQ ID NO: 408072 - protein, 13 aa, Homo sapiens
  CDR3 for beta chain variable domain of TCR clone 204036 (TRBV6-3, TRBJ2-5)
CASSWAGEETQYF

SEQ ID NO: 408073 - protein, 12 aa, Homo sapiens
  CDR3 for alpha chain variable domain of TCR clone 204037 (TRAV38-2/DV8, TRAJ48)
CALLSGNEKLTF

SEQ ID NO: 408074 - protein, 15 aa, Homo sapiens
  CDR3 for beta chain variable domain of TCR clone 204037 (TRBV6-1, TRBJ2-1)
CASSELRRQYNEQFF

SEQ ID NO: 408075 - protein, 14 aa, Homo sapiens
  CDR3 for alpha chain variable domain of TCR clone 204038 (TRAV12-2, TRAJ13)
CAVKKTGGHQKVTF

SEQ ID NO: 408076 - protein, 20 aa, Homo sapiens
  CDR3 for beta chain variable domain of TCR clone 204038 (TRBV19, TRBJ2-1)
CASSISRTVTSTRLNNEQFF

SEQ ID NO: 408077 - protein, 13 aa, Homo sapiens
  CDR3 for alpha chain variable domain of TCR clone 204039 (TRAV26-2, TRAJ54)
CIPRVGGSQKLVF

SEQ ID NO: 408078 - protein, 16 aa, Homo sapiens
  CDR3 for beta chain variable domain of TCR clone 204039 (TRBV4-1, TRBJ1-1)
CASSSMSERPNTEAFF

SEQ ID NO: 408079 - protein, 18 aa, Homo sapiens
  CDR3 for alpha chain variable domain of TCR clone 204040 (TRAV21, TRAJ52)
CAVRPSPAGGTSYGKLTF

SEQ ID NO: 408080 - protein, 12 aa, Homo sapiens
  CDR3 for beta chain variable domain of TCR clone 204040 (TRBV7-3, TRBJ2-1)
CASSFQSGPQFF

SEQ ID NO: 408081 - protein, 14 aa, Homo sapiens
  CDR3 for alpha chain variable domain of TCR clone 204041 (TRAV8-3, TRAJ4)
CAVGASGGSNKLIV

SEQ ID NO: 408082 - protein, 16 aa, Homo sapiens
  CDR3 for beta chain variable domain of TCR clone 204041 (TRBV4-3, TRBJ2-2)
CASSHLQGSGTGELFF

SEQ ID NO: 408083 - protein, 15 aa, Homo sapiens
  CDR3 for alpha chain variable domain of TCR clone 204042 (TRAV26-1, TRAJ22)
CIVRASFWFCKATDI

SEQ ID NO: 408084 - protein, 13 aa, Homo sapiens
  CDR3 for beta chain variable domain of TCR clone 204042 (TRBV7-9, TRBJ1-2)
CASSLKQNYGYTF

SEQ ID NO: 408085 - protein, 13 aa, Homo sapiens
  CDR3 for alpha chain variable domain of TCR clone 204043 (TRAV30, TRAJ49)
CGTESQPVTSSIL

SEQ ID NO: 408086 - protein, 15 aa, Homo sapiens
  CDR3 for beta chain variable domain of TCR clone 204043 (TRBV4-2, TRBJ1-2)
CASSQRTGGRDGYTF

SEQ ID NO: 408087 - protein, 16 aa, Homo sapiens
  CDR3 for alpha chain variable domain of TCR clone 204044 (TRAV12-3, TRAJ53)
CAMSPGRGGSNYKLTF

SEQ ID NO: 408088 - protein, 11 aa, Homo sapiens
  CDR3 for beta chain variable domain of TCR clone 204044 (TRBV29-1, TRBJ2-5)
CSGDRTGTQYF

SEQ ID NO: 408089 - protein, 16 aa, Homo sapiens
  CDR3 for alpha chain variable domain of TCR clone 204045 (TRAV1-1, TRAJ29)
CAVRSTRNSGNTPLVF

SEQ ID NO: 408090 - protein, 14 aa, Homo sapiens
  CDR3 for beta chain variable domain of TCR clone 204045 (TRBV4-1, TRBJ2-2)
CASSQAVNTGELFF

SEQ ID NO: 408091 - protein, 12 aa, Homo sapiens
  CDR3 for alpha chain variable domain of TCR clone 204046 (TRAV8-3, TRAJ34)
CAVLTNTDELIF

SEQ ID NO: 408092 - protein, 15 aa, Homo sapiens
  CDR3 for beta chain variable domain of TCR clone 204046 (TRBV7-2, TRBJ2-7)
CASSLGIGNDYEQYF

SEQ ID NO: 408093 - protein, 15 aa, Homo sapiens
  CDR3 for alpha chain variable domain of TCR clone 204047 (TRAV17, TRAJ56)
CATEPFTGAISKLTF

SEQ ID NO: 408094 - protein, 15 aa, Homo sapiens
  CDR3 for beta chain variable domain of TCR clone 204047 (TRBV28, TRBJ1-5)
CASSRTGGYVQPQHF

SEQ ID NO: 408095 - protein, 11 aa, Homo sapiens
  CDR3 for alpha chain variable domain of TCR clone 204048 (TRAV2, TRAJ33)
CTLDSNYQLIW

SEQ ID NO: 408096 - protein, 15 aa, Homo sapiens
  CDR3 for beta chain variable domain of TCR clone 204048 (TRBV19, TRBJ1-2)
CASSVGQVLNYGYTF

SEQ ID NO: 408097 - protein, 17 aa, Homo sapiens
  CDR3 for alpha chain variable domain of TCR clone 204049 (TRAV3, TRAJ38)
CAVRDCLNAGNNRKRIW

SEQ ID NO: 408098 - protein, 13 aa, Homo sapiens
  CDR3 for beta chain variable domain of TCR clone 204049 (TRBV27, TRBJ2-1)
CASRTLGVGEQFF

SEQ ID NO: 408099 - protein, 15 aa, Homo sapiens
  CDR3 for alpha chain variable domain of TCR clone 204050 (TRAV34, TRAJ38)
CGADFTAGNNRKLIW

SEQ ID NO: 408100 - protein, 16 aa, Homo sapiens
  CDR3 for beta chain variable domain of TCR clone 204050 (TRBV12-5, TRBJ2-5)
CASGPRTSGNQETQYF

SEQ ID NO: 408101 - protein, 15 aa, Homo sapiens
  CDR3 for alpha chain variable domain of TCR clone 204051 (TRAV8-4, TRAJ37)
CAVTYGSTNTGKLIF

SEQ ID NO: 408102 - protein, 13 aa, Homo sapiens
  CDR3 for beta chain variable domain of TCR clone 204051 (TRBV12-4, TRBJ2-5)
CASSLGGSRTQYF

SEQ ID NO: 408103 - protein, 14 aa, Homo sapiens
  CDR3 for alpha chain variable domain of TCR clone 204052 (TRAV12-3, TRAJ10)
SHLPLTGGGNKLTF

SEQ ID NO: 408104 - protein, 15 aa, Homo sapiens
  CDR3 for beta chain variable domain of TCR clone 204052 (TRBV11-2, TRBJ1-3)
CASGLDGTVGNTIYF

SEQ ID NO: 408105 - protein, 15 aa, Homo sapiens
  CDR3 for alpha chain variable domain of TCR clone 204053 (TRAV21, TRAJ13)
CAVSRSFWGLPESYL

SEQ ID NO: 408106 - protein, 14 aa, Homo sapiens
  CDR3 for beta chain variable domain of TCR clone 204053 (TRBV19, TRBJ2-1)
CASPTFVLSGEQFF

SEQ ID NO: 408107 - protein, 12 aa, Homo sapiens
  CDR3 for alpha chain variable domain of TCR clone 204054 (TRAV4, TRAJ21)
CLVGDNLNKFYF

SEQ ID NO: 408108 - protein, 17 aa, Homo sapiens
  CDR3 for beta chain variable domain of TCR clone 204054 (TRBV3-1, TRBJ2-7)
CASSQDLTGLSSYEQYF

SEQ ID NO: 408109 - protein, 14 aa, Homo sapiens
  CDR3 for alpha chain variable domain of TCR clone 204055 (TRAV14/DV4, TRAJ54)
CAMREAPGAQKLGF

SEQ ID NO: 408110 - protein, 15 aa, Homo sapiens
  CDR3 for beta chain variable domain of TCR clone 204055 (TRBV5-1, TRBJ2-7)
CASSLNGGLAREQYF

SEQ ID NO: 408111 - protein, 10 aa, Homo sapiens
  CDR3 for alpha chain variable domain of TCR clone 204056 (TRAV23/DV6, TRAJ31)
CARGGARLMF

SEQ ID NO: 408112 - protein, 14 aa, Homo sapiens
  CDR3 for beta chain variable domain of TCR clone 204056 (TRBV7-8, TRBJ1-2)
CASSPDSLYYGYTF

SEQ ID NO: 408113 - protein, 15 aa, Homo sapiens
  CDR3 for alpha chain variable domain of TCR clone 204057 (TRAV20, TRAJ52)
CAVQARGTSYGKLTF

SEQ ID NO: 408114 - protein, 13 aa, Homo sapiens
  CDR3 for beta chain variable domain of TCR clone 204057 (TRBV7-9, TRBJ1-2)
CASSLKQNYGYTF

SEQ ID NO: 408115 - protein, 11 aa, Homo sapiens
  CDR3 for alpha chain variable domain of TCR clone 204058 (TRAV2, TRAJ37)
CAVDNTGKLSL

SEQ ID NO: 408116 - protein, 14 aa, Homo sapiens
  CDR3 for beta chain variable domain of TCR clone 204058 (TRBV20-1, TRBJ2-1)
CSATLAGGLGEQFF

SEQ ID NO: 408117 - protein, 14 aa, Homo sapiens
  CDR3 for alpha chain variable domain of TCR clone 204059 (TRAV8-6, TRAJ12)
CAVKAADSSYKLIF

SEQ ID NO: 408118 - protein, 13 aa, Homo sapiens
  CDR3 for beta chain variable domain of TCR clone 204059 (TRBV7-9, TRBJ1-2)
CASSLKQNYGYTF

SEQ ID NO: 408119 - protein, 18 aa, Homo sapiens
  CDR3 for alpha chain variable domain of TCR clone 204060 (TRAV21, TRAJ52)
CAVRPSPAGGTSYGKLTF

SEQ ID NO: 408120 - protein, 17 aa, Homo sapiens
  CDR3 for beta chain variable domain of TCR clone 204060 (TRBV5-1, TRBJ1-6)
CASSFGEVSSYNSPLRF

SEQ ID NO: 408121 - protein, 14 aa, Homo sapiens
  CDR3 for alpha chain variable domain of TCR clone 204061 (TRAV23/DV6, TRAJ57)
CAASNQGGSEKLVF

SEQ ID NO: 408122 - protein, 20 aa, Homo sapiens
  CDR3 for beta chain variable domain of TCR clone 204061 (TRBV28, TRBJ2-1)
CASTPIGRSPGLAGGNEQFF

SEQ ID NO: 408123 - protein, 12 aa, Homo sapiens
  CDR3 for alpha chain variable domain of TCR clone 204062 (TRAV26-1, TRAJ36)
CIVRVRADNLFF

SEQ ID NO: 408124 - protein, 16 aa, Homo sapiens
  CDR3 for beta chain variable domain of TCR clone 204062 (TRBV4-2, TRBJ2-3)
CASSQDGARGGVKQYF

SEQ ID NO: 408125 - protein, 13 aa, Homo sapiens
  CDR3 for alpha chain variable domain of TCR clone 204063 (TRAV12-1, TRAJ26)
CVVRRDYGQNFVF

SEQ ID NO: 408126 - protein, 14 aa, Homo sapiens
  CDR3 for beta chain variable domain of TCR clone 204063 (TRBV4-2, TRBJ2-1)
CASGLDRAYNEQFF

SEQ ID NO: 408127 - protein, 15 aa, Homo sapiens
  CDR3 for alpha chain variable domain of TCR clone 204064 (TRAV26-1, TRAJ42)
FIVRVKGGSQGKLIF

SEQ ID NO: 408128 - protein, 14 aa, Homo sapiens
  CDR3 for beta chain variable domain of TCR clone 204064 (TRBV19, TRBJ2-2)
CATTGHANTGELFF

SEQ ID NO: 408129 - protein, 12 aa, Homo sapiens
  CDR3 for alpha chain variable domain of TCR clone 204065 (TRAV17, TRAJ4)
CATDGGYNKLIF

SEQ ID NO: 408130 - protein, 16 aa, Homo sapiens
  CDR3 for beta chain variable domain of TCR clone 204065 (TRBV19, TRBJ2-1)
CASSKAGPSSYNEQFF

SEQ ID NO: 408131 - protein, 14 aa, Homo sapiens
  CDR3 for alpha chain variable domain of TCR clone 204066 (TRAV12-1, TRAJ17)
CVVNYKAAGNKLTF

SEQ ID NO: 408132 - protein, 12 aa, Homo sapiens
  CDR3 for beta chain variable domain of TCR clone 204066 (TRBV28, TRBJ2-6)
CAIQAGANVLTF

SEQ ID NO: 408133 - protein, 14 aa, Homo sapiens
  CDR3 for alpha chain variable domain of TCR clone 204067 (TRAV13-1, TRAJ20)
CAARPGSNDYKLSF

SEQ ID NO: 408134 - protein, 15 aa, Homo sapiens
  CDR3 for beta chain variable domain of TCR clone 204067 (TRBV4-1, TRBJ2-7)
CAISQQGQGFDEQYF

SEQ ID NO: 408135 - protein, 15 aa, Homo sapiens
  CDR3 for alpha chain variable domain of TCR clone 204068 (TRAV27, TRAJ38)
CAARRNAGNNRKLIW

SEQ ID NO: 408136 - protein, 16 aa, Homo sapiens
  CDR3 for beta chain variable domain of TCR clone 204068 (TRBV4-3, TRBJ2-1)
CASSPALDRGVNEQFF

SEQ ID NO: 408137 - protein, 13 aa, Homo sapiens
  CDR3 for alpha chain variable domain of TCR clone 204069 (TRAV8-3, TRAJ21)
CAVGAYNFNKFYF

SEQ ID NO: 408138 - protein, 16 aa, Homo sapiens
  CDR3 for beta chain variable domain of TCR clone 204069 (TRBV19, TRBJ2-1)
CASSMGGGSSYNEQFV

SEQ ID NO: 408139 - protein, 12 aa, Homo sapiens
  CDR3 for alpha chain variable domain of TCR clone 204070 (TRAV8-1, TRAJ23)
CAVGNQGGKLIF

SEQ ID NO: 408140 - protein, 16 aa, Homo sapiens
  CDR3 for beta chain variable domain of TCR clone 204070 (TRBV7-3, TRBJ2-2)
CASSLKRGTSSGELFF

SEQ ID NO: 408141 - protein, 16 aa, Homo sapiens
  CDR3 for alpha chain variable domain of TCR clone 204071 (TRAV12-1, TRAJ53)
CVVTSVAGGSNYKLTF

SEQ ID NO: 408142 - protein, 21 aa, Homo sapiens
  CDR3 for beta chain variable domain of TCR clone 204071 (TRBV4-2, TRBJ2-3)
PCSQKTRPCISVPAAPDTQYF

SEQ ID NO: 408143 - protein, 18 aa, Homo sapiens
  CDR3 for alpha chain variable domain of TCR clone 204072 (TRAV13-1, TRAJ45)
CAANAVADSGGGADGLTF

SEQ ID NO: 408144 - protein, 14 aa, Homo sapiens
  CDR3 for beta chain variable domain of TCR clone 204072 (TRBV19, TRBJ2-1)
CASEVTGARNEQFF

SEQ ID NO: 408145 - protein, 12 aa, Homo sapiens
  CDR3 for alpha chain variable domain of TCR clone 204073 (TRAV12-2, TRAJ20)
CAVRPSDYKLSF

SEQ ID NO: 408146 - protein, 14 aa, Homo sapiens
  CDR3 for beta chain variable domain of TCR clone 204073 (TRBV2, TRBJ2-7)
CASSLTSGGYEQYF

SEQ ID NO: 408147 - protein, 14 aa, Homo sapiens
  CDR3 for alpha chain variable domain of TCR clone 204074 (TRAV1-2, TRAJ8)
CAVREDTGFQKLVL

SEQ ID NO: 408148 - protein, 14 aa, Homo sapiens
  CDR3 for beta chain variable domain of TCR clone 204074 (TRBV7-2, TRBJ2-7)
CASSPKTSFYEQYF

SEQ ID NO: 408149 - protein, 14 aa, Homo sapiens
  CDR3 for alpha chain variable domain of TCR clone 204075 (TRAV26-1, TRAJ38)
CIADNAGNNRKLSW

SEQ ID NO: 408150 - protein, 15 aa, Homo sapiens
  CDR3 for beta chain variable domain of TCR clone 204075 (TRBV20-1, TRBJ1-1)
CSASRGVTGNTEAFF

SEQ ID NO: 408151 - protein, 12 aa, Homo sapiens
  CDR3 for alpha chain variable domain of TCR clone 204076 (TRAV17, TRAJ30)
CVPERRDDKIIF

SEQ ID NO: 408152 - protein, 14 aa, Homo sapiens
  CDR3 for beta chain variable domain of TCR clone 204076 (TRBV7-7, TRBJ2-2)
CASSRDRSTGELYF

SEQ ID NO: 408153 - protein, 13 aa, Homo sapiens
  CDR3 for alpha chain variable domain of TCR clone 204077 (TRAV12-1, TRAJ33)
CGDAPDSNYQLIW

SEQ ID NO: 408154 - protein, 12 aa, Homo sapiens
  CDR3 for beta chain variable domain of TCR clone 204077 (TRBV11-3, TRBJ2-2)
CASSLGGGELFF

SEQ ID NO: 408155 - protein, 15 aa, Homo sapiens
  CDR3 for alpha chain variable domain of TCR clone 204078 (TRAV8-1, TRAJ6)
CAVNTQPGGSYIPTF

SEQ ID NO: 408156 - protein, 14 aa, Homo sapiens
  CDR3 for beta chain variable domain of TCR clone 204078 (TRBV12-4, TRBJ2-1)
CASSLGQGASEQFF

SEQ ID NO: 408157 - protein, 12 aa, Homo sapiens
  CDR3 for alpha chain variable domain of TCR clone 204079 (TRAV12-3, TRAJ17)
CAMTLTGNKLTF

SEQ ID NO: 408158 - protein, 13 aa, Homo sapiens
  CDR3 for beta chain variable domain of TCR clone 204079 (TRBV18, TRBJ2-5)
CASSLQGQETQYF

SEQ ID NO: 408159 - protein, 20 aa, Homo sapiens
  CDR3 for alpha chain variable domain of TCR clone 204080 (TRAV4, TRAJ29)
CCVLLPRGCVPFSGNTPLVF

SEQ ID NO: 408160 - protein, 11 aa, Homo sapiens
  CDR3 for beta chain variable domain of TCR clone 204080 (TRBV7-9, TRBJ2-5)
CASSLGETQYF

SEQ ID NO: 408161 - protein, 14 aa, Homo sapiens
  CDR3 for alpha chain variable domain of TCR clone 204081 (TRAV26-1, TRAJ45)
CIEVTGGGADGLTF

SEQ ID NO: 408162 - protein, 19 aa, Homo sapiens
  CDR3 for beta chain variable domain of TCR clone 204081 (TRBV7-2, TRBJ2-3)
CASSFLSRNWGGGTDTQYF

SEQ ID NO: 408163 - protein, 13 aa, Homo sapiens
  CDR3 for alpha chain variable domain of TCR clone 204082 (TRAV13-2, TRAJ53)
CAENMGSNYKLTF

SEQ ID NO: 408164 - protein, 15 aa, Homo sapiens
  CDR3 for beta chain variable domain of TCR clone 204082 (TRBV20-1, TRBJ1-1)
CSASREVTGNTEALF

SEQ ID NO: 408165 - protein, 12 aa, Homo sapiens
  CDR3 for alpha chain variable domain of TCR clone 204083 (TRAV9-2, TRAJ26)
CALRGYGQNYVF

SEQ ID NO: 408166 - protein, 12 aa, Homo sapiens
  CDR3 for beta chain variable domain of TCR clone 204083 (TRBV29-1, TRBJ2-3)
CSVTGGADTQYF

SEQ ID NO: 408167 - protein, 14 aa, Homo sapiens
  CDR3 for alpha chain variable domain of TCR clone 204084 (TRAV9-2, TRAJ39)
CALYIYNAGNMLTF

SEQ ID NO: 408168 - protein, 12 aa, Homo sapiens
  CDR3 for beta chain variable domain of TCR clone 204084 (TRBV11-2, TRBJ2-2)
CASSIGGGELFF

SEQ ID NO: 408169 - protein, 17 aa, Homo sapiens
  CDR3 for alpha chain variable domain of TCR clone 204085 (TRAV3, TRAJ38)
CAGRDCLNAGNSRKLIW

SEQ ID NO: 408170 - protein, 13 aa, Homo sapiens
  CDR3 for beta chain variable domain of TCR clone 204085 (TRBV23-1, TRBJ1-4)
CASRGKFNEKLFF

SEQ ID NO: 408171 - protein, 14 aa, Homo sapiens
  CDR3 for alpha chain variable domain of TCR clone 204086 (TRAV17, TRAJ15)
CATAPNQAGTTLIF

SEQ ID NO: 408172 - protein, 14 aa, Homo sapiens
  CDR3 for beta chain variable domain of TCR clone 204086 (TRBV19, TRBJ2-7)
CASSMGQGAIEQYF

SEQ ID NO: 408173 - protein, 14 aa, Homo sapiens
  CDR3 for alpha chain variable domain of TCR clone 204087 (TRAV12-1, TRAJ37)
CVVTGSSNTGKLIF

SEQ ID NO: 408174 - protein, 20 aa, Homo sapiens
  CDR3 for beta chain variable domain of TCR clone 204087 (TRBV23-1, TRBJ2-5)
CISAPAVPERVLLIQETQYY

SEQ ID NO: 408175 - protein, 12 aa, Homo sapiens
  CDR3 for alpha chain variable domain of TCR clone 204088 (TRAV36/DV7, TRAJ54)
CAVVRGAQKLVF

SEQ ID NO: 408176 - protein, 13 aa, Homo sapiens
  CDR3 for beta chain variable domain of TCR clone 204088 (TRBV7-2, TRBJ1-5)
CASSPTSNQPQHF

SEQ ID NO: 408177 - protein, 11 aa, Homo sapiens
  CDR3 for alpha chain variable domain of TCR clone 204089 (TRAV25, TRAJ5)
CAGGGQESTYF

SEQ ID NO: 408178 - protein, 16 aa, Homo sapiens
  CDR3 for beta chain variable domain of TCR clone 204089 (TRBV11-2, TRBJ2-3)
CASSSRTSGGAGTQYF

SEQ ID NO: 408179 - protein, 11 aa, Homo sapiens
  CDR3 for alpha chain variable domain of TCR clone 204090 (TRAV1-1, TRAJ23)
CAVRQGGKLIF

SEQ ID NO: 408180 - protein, 20 aa, Homo sapiens
  CDR3 for beta chain variable domain of TCR clone 204090 (TRBV7-8, TRBJ2-2)
CASSHLFPGPTNHSTGELFF

SEQ ID NO: 408181 - protein, 16 aa, Homo sapiens
  CDR3 for alpha chain variable domain of TCR clone 204091 (TRAV16, TRAJ57)
CAPYLITQGGSEKLVF

SEQ ID NO: 408182 - protein, 12 aa, Homo sapiens
  CDR3 for beta chain variable domain of TCR clone 204091 (TRBV7-8, TRBJ2-7)
CASSLGDREQYF

SEQ ID NO: 408183 - protein, 14 aa, Homo sapiens
  CDR3 for alpha chain variable domain of TCR clone 204092 (TRAV8-3, TRAJ39)
CAVGANNAGDMLTL

SEQ ID NO: 408184 - protein, 16 aa, Homo sapiens
  CDR3 for beta chain variable domain of TCR clone 204092 (TRBV6-1, TRBJ2-5)
CASSETLDRGAETQYF

SEQ ID NO: 408185 - protein, 15 aa, Homo sapiens
  CDR3 for alpha chain variable domain of TCR clone 204093 (TRAV29/DV5, TRAJ29)
CAASERSSGNTPLVF

SEQ ID NO: 408186 - protein, 16 aa, Homo sapiens
  CDR3 for beta chain variable domain of TCR clone 204093 (TRBV7-3, TRBJ2-1)
CASSNPLAGGYNEQFF

SEQ ID NO: 408187 - protein, 14 aa, Homo sapiens
  CDR3 for alpha chain variable domain of TCR clone 204094 (TRAV1-2, TRAJ8)
CAVREDTGFQKLVF

SEQ ID NO: 408188 - protein, 12 aa, Homo sapiens
  CDR3 for beta chain variable domain of TCR clone 204094 (TRBV11-3, TRBJ2-1)
CASSRGNNEQFF

SEQ ID NO: 408189 - protein, 14 aa, Homo sapiens
  CDR3 for alpha chain variable domain of TCR clone 204095 (TRAV2, TRAJ23)
CAVGLRNQGGTLIF

SEQ ID NO: 408190 - protein, 15 aa, Homo sapiens
  CDR3 for beta chain variable domain of TCR clone 204095 (TRBV10-3, TRBJ2-1)
CAIRNGTSGHNEQFF

SEQ ID NO: 408191 - protein, 12 aa, Homo sapiens
  CDR3 for alpha chain variable domain of TCR clone 204096 (TRAV36/DV7, TRAJ54)
CAVVRGAQKLVF

SEQ ID NO: 408192 - protein, 13 aa, Homo sapiens
  CDR3 for beta chain variable domain of TCR clone 204096 (TRBV7-3, TRBJ2-5)
CASSFRGGETQYF

SEQ ID NO: 408193 - protein, 14 aa, Homo sapiens
  CDR3 for alpha chain variable domain of TCR clone 204097 (TRAV1-2, TRAJ16)
CAFNRFSDGQKLLF

SEQ ID NO: 408194 - protein, 14 aa, Homo sapiens
  CDR3 for beta chain variable domain of TCR clone 204097 (TRBV4-2, TRBJ2-1)
CASGLDRAYNEQFF

SEQ ID NO: 408195 - protein, 15 aa, Homo sapiens
  CDR3 for alpha chain variable domain of TCR clone 204098 (TRAV16, TRAJ20)
CALKGGLRAGYKLSF

SEQ ID NO: 408196 - protein, 16 aa, Homo sapiens
  CDR3 for beta chain variable domain of TCR clone 204098 (TRBV11-3, TRBJ2-2)
CASSSRTSPGTGELFF

SEQ ID NO: 408197 - protein, 13 aa, Homo sapiens
  CDR3 for alpha chain variable domain of TCR clone 204099 (TRAV8-3, TRAJ44)
CAVVPGTASKLTF

SEQ ID NO: 408198 - protein, 13 aa, Homo sapiens
  CDR3 for beta chain variable domain of TCR clone 204099 (TRBV20-1, TRBJ1-1)
CSARGGGNTEAFF

SEQ ID NO: 408199 - protein, 13 aa, Homo sapiens
  CDR3 for alpha chain variable domain of TCR clone 204100 (TRAV19, TRAJ57)
CALLQGGPEKLVF

SEQ ID NO: 408200 - protein, 14 aa, Homo sapiens
  CDR3 for beta chain variable domain of TCR clone 204100 (TRBV7-8, TRBJ2-7)
CASSPRDRVYEQYF

SEQ ID NO: 408201 - protein, 14 aa, Homo sapiens
  CDR3 for alpha chain variable domain of TCR clone 204101 (TRAV12-2, TRAJ13)
CAVKKTGGYQKVTL

SEQ ID NO: 408202 - protein, 13 aa, Homo sapiens
  CDR3 for beta chain variable domain of TCR clone 204101 (TRBV20-1, TRBJ1-1)
CSARGGGNTEAFF

SEQ ID NO: 408203 - protein, 14 aa, Homo sapiens
  CDR3 for alpha chain variable domain of TCR clone 204102 (TRAV3, TRAJ20)
CCEDIKLSDYKLSF

SEQ ID NO: 408204 - protein, 15 aa, Homo sapiens
  CDR3 for beta chain variable domain of TCR clone 204102 (TRBV7-9, TRBJ1-6)
CASSSPGRGNSPLHF

SEQ ID NO: 408205 - protein, 17 aa, Homo sapiens
  CDR3 for alpha chain variable domain of TCR clone 204103 (TRAV8-3, TRAJ32)
CAVGPLVYGGATNKLIF

SEQ ID NO: 408206 - protein, 15 aa, Homo sapiens
  CDR3 for beta chain variable domain of TCR clone 204103 (TRBV18, TRBJ1-2)
CASSPGNGLGYGYTF

SEQ ID NO: 408207 - protein, 13 aa, Homo sapiens
  CDR3 for alpha chain variable domain of TCR clone 204104 (TRAV12-2, TRAJ6)
CAARGGGSYIPTF

SEQ ID NO: 408208 - protein, 14 aa, Homo sapiens
  CDR3 for beta chain variable domain of TCR clone 204104 (TRBV4-2, TRBJ2-1)
CASGLDRAYNEQFF

SEQ ID NO: 408209 - protein, 16 aa, Homo sapiens
  CDR3 for alpha chain variable domain of TCR clone 204105 (TRAV30, TRAJ24)
CGTEIVDADSRGKFQF

SEQ ID NO: 408210 - protein, 15 aa, Homo sapiens
  CDR3 for beta chain variable domain of TCR clone 204105 (TRBV20-1, TRBJ2-6)
CSARDRGPGANVLTF

SEQ ID NO: 408211 - protein, 13 aa, Homo sapiens
  CDR3 for alpha chain variable domain of TCR clone 204106 (TRAV25, TRAJ30)
CAGRVHRDDKIIF

SEQ ID NO: 408212 - protein, 17 aa, Homo sapiens
  CDR3 for beta chain variable domain of TCR clone 204106 (TRBV7-9, TRBJ2-6)
CASSFGAGYSGANVLTF

SEQ ID NO: 408213 - protein, 13 aa, Homo sapiens
  CDR3 for alpha chain variable domain of TCR clone 204107 (TRAV30, TRAJ16)
CGTFGGDGQKLLF

SEQ ID NO: 408214 - protein, 13 aa, Homo sapiens
  CDR3 for beta chain variable domain of TCR clone 204107 (TRBV7-3, TRBJ2-1)
RASSLDSYNEQFF

SEQ ID NO: 408215 - protein, 15 aa, Homo sapiens
  CDR3 for alpha chain variable domain of TCR clone 204108 (TRAV27, TRAJ38)
CAARRNAGHNRKLIL

SEQ ID NO: 408216 - protein, 13 aa, Homo sapiens
  CDR3 for beta chain variable domain of TCR clone 204108 (TRBV12-5, TRBJ2-3)
CASGDRQSDTQYF

SEQ ID NO: 408217 - protein, 13 aa, Homo sapiens
  CDR3 for alpha chain variable domain of TCR clone 204109 (TRAV3, TRAJ21)
CAVRKPDFNKFYF

SEQ ID NO: 408218 - protein, 13 aa, Homo sapiens
  CDR3 for beta chain variable domain of TCR clone 204109 (TRBV20-1, TRBJ1-1)
CSARGGGNTEAFF

SEQ ID NO: 408219 - protein, 14 aa, Homo sapiens
  CDR3 for alpha chain variable domain of TCR clone 204110 (TRAV12-3, TRAJ10)
SHLPLTGGGNKLTF

SEQ ID NO: 408220 - protein, 16 aa, Homo sapiens
  CDR3 for beta chain variable domain of TCR clone 204110 (TRBV7-3, TRBJ2-2)
CASSLKRGTLSGELLF

SEQ ID NO: 408221 - protein, 17 aa, Homo sapiens
  CDR3 for alpha chain variable domain of TCR clone 204111 (TRAV13-1, TRAJ52)
CAAGRNAGGTSYGKLTF

SEQ ID NO: 408222 - protein, 15 aa, Homo sapiens
  CDR3 for beta chain variable domain of TCR clone 204111 (TRBV7-8, TRBJ2-7)
CASSPGVSGVYEQYF

SEQ ID NO: 408223 - protein, 13 aa, Homo sapiens
  CDR3 for alpha chain variable domain of TCR clone 204112 (TRAV17, TRAJ40)
CAGALGGTYKYIF

SEQ ID NO: 408224 - protein, 16 aa, Homo sapiens
  CDR3 for beta chain variable domain of TCR clone 204112 (TRBV11-2, TRBJ1-2)
CASSSDTGGADYGYTF

SEQ ID NO: 408225 - protein, 11 aa, Homo sapiens
  CDR3 for alpha chain variable domain of TCR clone 204113 (TRAV2, TRAJ33)
CAVESNYQLIW

SEQ ID NO: 408226 - protein, 15 aa, Homo sapiens
  CDR3 for beta chain variable domain of TCR clone 204113 (TRBV19, TRBJ1-1)
CASTSGQIQNTQAFF

SEQ ID NO: 408227 - protein, 14 aa, Homo sapiens
  CDR3 for alpha chain variable domain of TCR clone 204114 (TRAV12-3, TRAJ10)
SQLPLTGGGNKLTF

SEQ ID NO: 408228 - protein, 16 aa, Homo sapiens
  CDR3 for beta chain variable domain of TCR clone 204114 (TRBV28, TRBJ2-1)
CASSSPEYPRDNEQFF

SEQ ID NO: 408229 - protein, 10 aa, Homo sapiens
  CDR3 for alpha chain variable domain of TCR clone 204115 (TRAV38-1, TRAJ34)
CAFMDDKLFF

SEQ ID NO: 408230 - protein, 14 aa, Homo sapiens
  CDR3 for beta chain variable domain of TCR clone 204115 (TRBV7-2, TRBJ2-2)
CASSLNSNTGELFF

SEQ ID NO: 408231 - protein, 12 aa, Homo sapiens
  CDR3 for alpha chain variable domain of TCR clone 204116 (TRAV1-2, TRAJ24)
CAVGGSWGKVQF

SEQ ID NO: 408232 - protein, 13 aa, Homo sapiens
  CDR3 for beta chain variable domain of TCR clone 204116 (TRBV20-1, TRBJ1-1)
CSASKRGLTEAFF

SEQ ID NO: 408233 - protein, 15 aa, Homo sapiens
  CDR3 for alpha chain variable domain of TCR clone 204117 (TRAV27, TRAJ38)
CAARRNAGNNRKLIW

SEQ ID NO: 408234 - protein, 13 aa, Homo sapiens
  CDR3 for beta chain variable domain of TCR clone 204117 (TRBV7-9, TRBJ1-1)
CASSLAGVTEAFF

SEQ ID NO: 408235 - protein, 15 aa, Homo sapiens
  CDR3 for alpha chain variable domain of TCR clone 204118 (TRAV27, TRAJ38)
CAGRFNAGNNRKLIW

SEQ ID NO: 408236 - protein, 16 aa, Homo sapiens
  CDR3 for beta chain variable domain of TCR clone 204118 (TRBV10-2, TRBJ1-5)
CASSRDRDYSNQPQHF

SEQ ID NO: 408237 - protein, 14 aa, Homo sapiens
  CDR3 for alpha chain variable domain of TCR clone 204119 (TRAV12-3, TRAJ10)
SHLPLTGGGNKLTF

SEQ ID NO: 408238 - protein, 14 aa, Homo sapiens
  CDR3 for beta chain variable domain of TCR clone 204119 (TRBV5-7, TRBJ2-7)
CASSGGLSSYEQYF

SEQ ID NO: 408239 - protein, 15 aa, Homo sapiens
  CDR3 for alpha chain variable domain of TCR clone 204120 (TRAV3, TRAJ47)
CAVRDIGEYGNKLVF

SEQ ID NO: 408240 - protein, 15 aa, Homo sapiens
  CDR3 for beta chain variable domain of TCR clone 204120 (TRBV6-5, TRBJ2-1)
CASSYDAGAGNEQFF

SEQ ID NO: 408241 - protein, 15 aa, Homo sapiens
  CDR3 for alpha chain variable domain of TCR clone 204121 (TRAV27, TRAJ38)
CAARRNAGHHRKLIW

SEQ ID NO: 408242 - protein, 13 aa, Homo sapiens
  CDR3 for beta chain variable domain of TCR clone 204121 (TRBV12-5, TRBJ2-3)
CASGDRQSDTQYF

SEQ ID NO: 408243 - protein, 15 aa, Homo sapiens
  CDR3 for alpha chain variable domain of TCR clone 204122 (TRAV3, TRAJ9)
CAARDSNTVGFKTIF

SEQ ID NO: 408244 - protein, 16 aa, Homo sapiens
  CDR3 for beta chain variable domain of TCR clone 204122 (TRBV15, TRBJ2-5)
CATSPTTGQGMETQYF

SEQ ID NO: 408245 - protein, 15 aa, Homo sapiens
  CDR3 for alpha chain variable domain of TCR clone 204123 (TRAV8-4, TRAJ29)
CAVSEDFRGNTPLVF

SEQ ID NO: 408246 - protein, 13 aa, Homo sapiens
  CDR3 for beta chain variable domain of TCR clone 204123 (TRBV2, TRBJ1-1)
CASRWTVNTEAFF

SEQ ID NO: 408247 - protein, 12 aa, Homo sapiens
  CDR3 for alpha chain variable domain of TCR clone 204124 (TRAV12-3, TRAJ17)
CAMTLTSNKLTF

SEQ ID NO: 408248 - protein, 17 aa, Homo sapiens
  CDR3 for beta chain variable domain of TCR clone 204124 (TRBV20-1, TRBJ2-2)
CSASGSGQGGLTGELFF

SEQ ID NO: 408249 - protein, 13 aa, Homo sapiens
  CDR3 for alpha chain variable domain of TCR clone 204125 (TRAV36/DV7, TRAJ37)
CAVFSSNTGKLLF

SEQ ID NO: 408250 - protein, 16 aa, Homo sapiens
  CDR3 for beta chain variable domain of TCR clone 204125 (TRBV3-1, TRBJ2-5)
CASSPGQFNGFGTQYF

SEQ ID NO: 408251 - protein, 17 aa, Homo sapiens
  CDR3 for alpha chain variable domain of TCR clone 204126 (TRAV3, TRAJ42)
CAVRDRDYGGSQGNLIF

SEQ ID NO: 408252 - protein, 13 aa, Homo sapiens
  CDR3 for beta chain variable domain of TCR clone 204126 (TRBV7-9, TRBJ2-7)
CASSFAGAYEQYF

SEQ ID NO: 408253 - protein, 14 aa, Homo sapiens
  CDR3 for alpha chain variable domain of TCR clone 204127 (TRAV1-2, TRAJ16)
CAVNRFSDGKKLLF

SEQ ID NO: 408254 - protein, 10 aa, Homo sapiens
  CDR3 for beta chain variable domain of TCR clone 204127 (TRBV20-1, TRBJ1-4)
PQGANEKLFF

SEQ ID NO: 408255 - protein, 15 aa, Homo sapiens
  CDR3 for alpha chain variable domain of TCR clone 204128 (TRAV16, TRAJ12)
CSKWPLRDRSYQLIF

SEQ ID NO: 408256 - protein, 13 aa, Homo sapiens
  CDR3 for beta chain variable domain of TCR clone 204128 (TRBV4-2, TRBJ1-1)
CASSQAGNTEAFF

SEQ ID NO: 408257 - protein, 12 aa, Homo sapiens
  CDR3 for alpha chain variable domain of TCR clone 204129 (TRAV12-3, TRAJ17)
CAMTLTGNKLTF

SEQ ID NO: 408258 - protein, 15 aa, Homo sapiens
  CDR3 for beta chain variable domain of TCR clone 204129 (TRBV2, TRBJ2-1)
CASSETGGNYNEQFF

SEQ ID NO: 408259 - protein, 15 aa, Homo sapiens
  CDR3 for alpha chain variable domain of TCR clone 204130 (TRAV21, TRAJ57)
CAVIITQCGSEKLIF

SEQ ID NO: 408260 - protein, 14 aa, Homo sapiens
  CDR3 for beta chain variable domain of TCR clone 204130 (TRBV5-1, TRBJ2-2)
CASSLIWIPGELFF

SEQ ID NO: 408261 - protein, 11 aa, Homo sapiens
  CDR3 for alpha chain variable domain of TCR clone 204131 (TRAV13-1, TRAJ6)
CATLGSYIPTF

SEQ ID NO: 408262 - protein, 13 aa, Homo sapiens
  CDR3 for beta chain variable domain of TCR clone 204131 (TRBV20-1, TRBJ2-7)
CSATHTSEYEQYF

SEQ ID NO: 408263 - protein, 14 aa, Homo sapiens
  CDR3 for alpha chain variable domain of TCR clone 204132 (TRAV8-3, TRAJ27)
CAGGRNTNAGTSTF

SEQ ID NO: 408264 - protein, 15 aa, Homo sapiens
  CDR3 for beta chain variable domain of TCR clone 204132 (TRBV11-3, TRBJ2-5)
CASSLRGRVQETQYF

SEQ ID NO: 408265 - protein, 15 aa, Homo sapiens
  CDR3 for alpha chain variable domain of TCR clone 204133 (TRAV12-2, TRAJ53)
CAVSTGGGSNYKLTF

SEQ ID NO: 408266 - protein, 15 aa, Homo sapiens
  CDR3 for beta chain variable domain of TCR clone 204133 (TRBV5-1, TRBJ2-5)
CASSLGLGEIKTQYF

SEQ ID NO: 408267 - protein, 11 aa, Homo sapiens
  CDR3 for alpha chain variable domain of TCR clone 204134 (TRAV12-2, TRAJ29)
CAVTLRSPLVF

SEQ ID NO: 408268 - protein, 15 aa, Homo sapiens
  CDR3 for beta chain variable domain of TCR clone 204134 (TRBV20-1, TRBJ2-7)
CSAESGTSGAYEQYF

SEQ ID NO: 408269 - protein, 12 aa, Homo sapiens
  CDR3 for alpha chain variable domain of TCR clone 204135 (TRAV21, TRAJ27)
CAANTNAGKSTF

SEQ ID NO: 408270 - protein, 15 aa, Homo sapiens
  CDR3 for beta chain variable domain of TCR clone 204135 (TRBV29-1, TRBJ1-4)
CSVVVIGDINEKLFF

SEQ ID NO: 408271 - protein, 15 aa, Homo sapiens
  CDR3 for alpha chain variable domain of TCR clone 204136 (TRAV12-2, TRAJ43)
CAFDMRFGAGTRLTV

SEQ ID NO: 408272 - protein, 17 aa, Homo sapiens
  CDR3 for beta chain variable domain of TCR clone 204136 (TRBV13, TRBJ2-3)
CASSLSRVAVGRNTQYF

SEQ ID NO: 408273 - protein, 14 aa, Homo sapiens
  CDR3 for alpha chain variable domain of TCR clone 204137 (TRAV13-1, TRAJ26)
CAASPRDYGQNFVF

SEQ ID NO: 408274 - protein, 18 aa, Homo sapiens
  CDR3 for beta chain variable domain of TCR clone 204137 (TRBV7-8, TRBJ2-7)
CASSHATPGRLRAYEQYF

SEQ ID NO: 408275 - protein, 13 aa, Homo sapiens
  CDR3 for alpha chain variable domain of TCR clone 204138 (TRAV12-2, TRAJ9)
CAVKWAGGFKTIF

SEQ ID NO: 408276 - protein, 12 aa, Homo sapiens
  CDR3 for beta chain variable domain of TCR clone 204138 (TRBV7-8, TRBJ2-7)
CASSLGDMEQYF

SEQ ID NO: 408277 - protein, 14 aa, Homo sapiens
  CDR3 for alpha chain variable domain of TCR clone 204139 (TRAV12-2, TRAJ17)
CAVLFKAAGNKLTF

SEQ ID NO: 408278 - protein, 13 aa, Homo sapiens
  CDR3 for beta chain variable domain of TCR clone 204139 (TRBV18, TRBJ2-2)
CASSPTRGGELFF

SEQ ID NO: 408279 - protein, 14 aa, Homo sapiens
  CDR3 for alpha chain variable domain of TCR clone 204140 (TRAV6, TRAJ17)
CALDIEAAGNKLTF

SEQ ID NO: 408280 - protein, 17 aa, Homo sapiens
  CDR3 for beta chain variable domain of TCR clone 204140 (TRBV2, TRBJ1-5)
CASSVGTGMRGYQTQHF

SEQ ID NO: 408281 - protein, 15 aa, Homo sapiens
  CDR3 for alpha chain variable domain of TCR clone 204141 (TRAV8-6, TRAJ10)
CAVSDQAGGGNKLTF

SEQ ID NO: 408282 - protein, 13 aa, Homo sapiens
  CDR3 for beta chain variable domain of TCR clone 204141 (TRBV5-1, TRBJ2-7)
CASSATGGNEQYF

SEQ ID NO: 408283 - protein, 12 aa, Homo sapiens
  CDR3 for alpha chain variable domain of TCR clone 204142 (TRAV12-1, TRAJ34)
CVVAGATDKLIF

SEQ ID NO: 408284 - protein, 14 aa, Homo sapiens
  CDR3 for beta chain variable domain of TCR clone 204142 (TRBV7-2, TRBJ2-1)
CANSPGTFYNEQFF

SEQ ID NO: 408285 - protein, 16 aa, Homo sapiens
  CDR3 for alpha chain variable domain of TCR clone 204143 (TRAV3, TRAJ27)
CAVRDPQGTNAGKSAF

SEQ ID NO: 408286 - protein, 17 aa, Homo sapiens
  CDR3 for beta chain variable domain of TCR clone 204143 (TRBV4-1, TRBJ2-7)
CASSQGRGLQTSYEQYF

SEQ ID NO: 408287 - protein, 14 aa, Homo sapiens
  CDR3 for alpha chain variable domain of TCR clone 204144 (TRAV1-2, TRAJ16)
CAVNRFSDVQKLPF

SEQ ID NO: 408288 - protein, 14 aa, Homo sapiens
  CDR3 for beta chain variable domain of TCR clone 204144 (TRBV4-1, TRBJ2-2)
CASSQAVNTGELFF

SEQ ID NO: 408289 - protein, 12 aa, Homo sapiens
  CDR3 for alpha chain variable domain of TCR clone 204145 (TRAV23/DV6, TRAJ30)
CAASKGDDKIIF

SEQ ID NO: 408290 - protein, 14 aa, Homo sapiens
  CDR3 for beta chain variable domain of TCR clone 204145 (TRBV11-2, TRBJ2-7)
CASSLGAGAYEQYF

SEQ ID NO: 408291 - protein, 17 aa, Homo sapiens
  CDR3 for alpha chain variable domain of TCR clone 204146 (TRAV3, TRAJ6)
CAVIDGPRAGGSYIPTF

SEQ ID NO: 408292 - protein, 14 aa, Homo sapiens
  CDR3 for beta chain variable domain of TCR clone 204146 (TRBV7-2, TRBJ2-7)
RASSPKTSFYEQYF

SEQ ID NO: 408293 - protein, 11 aa, Homo sapiens
  CDR3 for alpha chain variable domain of TCR clone 204147 (TRAV35, TRAJ30)
CAPGGDDKIIF

SEQ ID NO: 408294 - protein, 16 aa, Homo sapiens
  CDR3 for beta chain variable domain of TCR clone 204147 (TRBV7-6, TRBJ2-1)
CIAVPAAWGGADEQFL

SEQ ID NO: 408295 - protein, 18 aa, Homo sapiens
  CDR3 for alpha chain variable domain of TCR clone 204148 (TRAV21, TRAJ52)
CAVRPSPAGGTSYGKLTF

SEQ ID NO: 408296 - protein, 15 aa, Homo sapiens
  CDR3 for beta chain variable domain of TCR clone 204148 (TRBV7-3, TRBJ2-1)
CASSPTGEGEVEQFF

SEQ ID NO: 408297 - protein, 11 aa, Homo sapiens
  CDR3 for alpha chain variable domain of TCR clone 204149 (TRAV26-1, TRAJ37)
CIVRVGRKLIF

SEQ ID NO: 408298 - protein, 15 aa, Homo sapiens
  CDR3 for beta chain variable domain of TCR clone 204149 (TRBV27, TRBJ2-5)
CASSLYPRGGETQYF

SEQ ID NO: 408299 - protein, 14 aa, Homo sapiens
  CDR3 for alpha chain variable domain of TCR clone 204150 (TRAV12-3, TRAJ57)
CAMSAWGGSEKLVF

SEQ ID NO: 408300 - protein, 13 aa, Homo sapiens
  CDR3 for beta chain variable domain of TCR clone 204150 (TRBV7-3, TRBJ1-1)
CASSQDWGAEAFF

SEQ ID NO: 408301 - protein, 22 aa, Homo sapiens
  CDR3 for alpha chain variable domain of TCR clone 204151 (TRAV1-1, TRAJ30)
CAVRDQTEMTRSSLERGHDFIF

SEQ ID NO: 408302 - protein, 16 aa, Homo sapiens
  CDR3 for beta chain variable domain of TCR clone 204151 (TRBV6-5, TRBJ1-6)
CASSYSGESYNSPLHF

SEQ ID NO: 408303 - protein, 16 aa, Homo sapiens
  CDR3 for alpha chain variable domain of TCR clone 204152 (TRAV30, TRAJ24)
CGTEIVDADSCGKLQC

SEQ ID NO: 408304 - protein, 13 aa, Homo sapiens
  CDR3 for beta chain variable domain of TCR clone 204152 (TRBV7-2, TRBJ1-4)
CASSLAGLEKLFF

SEQ ID NO: 408305 - protein, 17 aa, Homo sapiens
  CDR3 for alpha chain variable domain of TCR clone 204153 (TRAV23/DV6, TRAJ57)
CAASSTLSQGGSEKLVF

SEQ ID NO: 408306 - protein, 14 aa, Homo sapiens
  CDR3 for beta chain variable domain of TCR clone 204153 (TRBV11-2, TRBJ2-3)
CASSLGGGANTQYF

SEQ ID NO: 408307 - protein, 13 aa, Homo sapiens
  CDR3 for alpha chain variable domain of TCR clone 204154 (TRAV8-3, TRAJ48)
CAVLPFGNEKLTF

SEQ ID NO: 408308 - protein, 15 aa, Homo sapiens
  CDR3 for beta chain variable domain of TCR clone 204154 (TRBV11-2, TRBJ2-1)
CASSSPSTRHNEQFF

SEQ ID NO: 408309 - protein, 12 aa, Homo sapiens
  CDR3 for alpha chain variable domain of TCR clone 204155 (TRAV12-2, TRAJ9)
CAVHTGGFKTIF

SEQ ID NO: 408310 - protein, 13 aa, Homo sapiens
  CDR3 for beta chain variable domain of TCR clone 204155 (TRBV24-1, TRBJ2-3)
CATSFGGTDTQYF

SEQ ID NO: 408311 - protein, 15 aa, Homo sapiens
  CDR3 for alpha chain variable domain of TCR clone 204156 (TRAV25, TRAJ52)
CAGRPGGTSYGKLTF

SEQ ID NO: 408312 - protein, 13 aa, Homo sapiens
  CDR3 for beta chain variable domain of TCR clone 204156 (TRBV10-3, TRBJ2-3)
CASRDTGADTQYF

SEQ ID NO: 408313 - protein, 18 aa, Homo sapiens
  CDR3 for alpha chain variable domain of TCR clone 204157 (TRAV13-1, TRAJ52)
CAASKRSAGGTSYGKLTF

SEQ ID NO: 408314 - protein, 14 aa, Homo sapiens
  CDR3 for beta chain variable domain of TCR clone 204157 (TRBV7-2, TRBJ1-5)
CASSTQGAGQPQHF

SEQ ID NO: 408315 - protein, 15 aa, Homo sapiens
  CDR3 for alpha chain variable domain of TCR clone 204158 (TRAV3, TRAJ17)
CAVRDTGAAGNKLTF

SEQ ID NO: 408316 - protein, 15 aa, Homo sapiens
  CDR3 for beta chain variable domain of TCR clone 204158 (TRBV4-3, TRBJ2-7)
CASSQDLGSSYEQYF

SEQ ID NO: 408317 - protein, 17 aa, Homo sapiens
  CDR3 for alpha chain variable domain of TCR clone 204159 (TRAV3, TRAJ6)
CAVRDGPRAGGSYMPTF

SEQ ID NO: 408318 - protein, 18 aa, Homo sapiens
  CDR3 for beta chain variable domain of TCR clone 204159 (TRBV7-9, TRBJ2-7)
CASSLTTSGSRTWYEQYF

SEQ ID NO: 408319 - protein, 18 aa, Homo sapiens
  CDR3 for alpha chain variable domain of TCR clone 204160 (TRAV3, TRAJ17)
CAVRARRGGRSCRQQANL

SEQ ID NO: 408320 - protein, 14 aa, Homo sapiens
  CDR3 for beta chain variable domain of TCR clone 204160 (TRBV4-1, TRBJ2-2)
CASSQAVNTGELFF

SEQ ID NO: 408321 - protein, 14 aa, Homo sapiens
  CDR3 for alpha chain variable domain of TCR clone 204161 (TRAV35, TRAJ30)
CAGHQPNRDDKIIF

SEQ ID NO: 408322 - protein, 17 aa, Homo sapiens
  CDR3 for beta chain variable domain of TCR clone 204161 (TRBV13, TRBJ2-3)
CASSLSRVAGGRNTQYF

SEQ ID NO: 408323 - protein, 20 aa, Homo sapiens
  CDR3 for alpha chain variable domain of TCR clone 204162 (TRAV25, TRAJ21)
TATQTTDVGTYPLSFHKFYF

SEQ ID NO: 408324 - protein, 14 aa, Homo sapiens
  CDR3 for beta chain variable domain of TCR clone 204162 (TRBV6-1, TRBJ2-1)
CASAKDGFYNEQFF

SEQ ID NO: 408325 - protein, 12 aa, Homo sapiens
  CDR3 for alpha chain variable domain of TCR clone 204163 (TRAV13-1, TRAJ43)
CAAGRFNNDMRF

SEQ ID NO: 408326 - protein, 11 aa, Homo sapiens
  CDR3 for beta chain variable domain of TCR clone 204163 (TRBV29-1, TRBJ2-5)
GSEDRTGTQYF

SEQ ID NO: 408327 - protein, 19 aa, Homo sapiens
  CDR3 for alpha chain variable domain of TCR clone 204164 (TRAV26-1, TRAJ46)
CTIASSESEKKSSGDKLTF

SEQ ID NO: 408328 - protein, 16 aa, Homo sapiens
  CDR3 for beta chain variable domain of TCR clone 204164 (TRBV27, TRBJ2-2)
CASSFRGLVRTGELFF

SEQ ID NO: 408329 - protein, 16 aa, Homo sapiens
  CDR3 for alpha chain variable domain of TCR clone 204165 (TRAV35, TRAJ18)
CAGFADRGSTLGRLYF

SEQ ID NO: 408330 - protein, 15 aa, Homo sapiens
  CDR3 for beta chain variable domain of TCR clone 204165 (TRBV5-4, TRBJ2-3)
CASSLYRGRTDTQYF

SEQ ID NO: 408331 - protein, 13 aa, Homo sapiens
  CDR3 for alpha chain variable domain of TCR clone 204166 (TRAV27, TRAJ17)
CAGAATSGNKLTF

SEQ ID NO: 408332 - protein, 15 aa, Homo sapiens
  CDR3 for beta chain variable domain of TCR clone 204166 (TRBV5-1, TRBJ2-3)
CASRNQAGSTDTQYF

SEQ ID NO: 408333 - protein, 14 aa, Homo sapiens
  CDR3 for alpha chain variable domain of TCR clone 204167 (TRAV12-2, TRAJ3)
CAVSLYSSASKILF

SEQ ID NO: 408334 - protein, 14 aa, Homo sapiens
  CDR3 for beta chain variable domain of TCR clone 204167 (TRBV27, TRBJ2-1)
CAGSIAETYNEQFF

SEQ ID NO: 408335 - protein, 14 aa, Homo sapiens
  CDR3 for alpha chain variable domain of TCR clone 204168 (TRAV8-1, TRAJ6)
CAVNASGGSYIPTF

SEQ ID NO: 408336 - protein, 13 aa, Homo sapiens
  CDR3 for beta chain variable domain of TCR clone 204168 (TRBV19, TRBJ2-2)
CASKVSAAGELFF

SEQ ID NO: 408337 - protein, 14 aa, Homo sapiens
  CDR3 for alpha chain variable domain of TCR clone 204169 (TRAV13-2, TRAJ32)
CAENYGGATNKPIF

SEQ ID NO: 408338 - protein, 17 aa, Homo sapiens
  CDR3 for beta chain variable domain of TCR clone 204169 (TRBV7-8, TRBJ2-6)
CASSAGTGGAGANVLTF

SEQ ID NO: 408339 - protein, 15 aa, Homo sapiens
  CDR3 for alpha chain variable domain of TCR clone 204170 (TRAV3, TRAJ5)
CAVRDFDTGRGALTF

SEQ ID NO: 408340 - protein, 13 aa, Homo sapiens
  CDR3 for beta chain variable domain of TCR clone 204170 (TRBV12-4, TRBJ2-7)
CASSPTETYEQYF

SEQ ID NO: 408341 - protein, 16 aa, Homo sapiens
  CDR3 for alpha chain variable domain of TCR clone 204171 (TRAV13-1, TRAJ13)
CTAFFLGVTRELPLEL

SEQ ID NO: 408342 - protein, 15 aa, Homo sapiens
  CDR3 for beta chain variable domain of TCR clone 204171 (TRBV7-8, TRBJ2-1)
CASSLADSLYNEQFF

SEQ ID NO: 408343 - protein, 16 aa, Homo sapiens
  CDR3 for alpha chain variable domain of TCR clone 204172 (TRAV8-3, TRAJ13)
CAVGAYPSGGYQKVTF

SEQ ID NO: 408344 - protein, 14 aa, Homo sapiens
  CDR3 for beta chain variable domain of TCR clone 204172 (TRBV5-8, TRBJ2-1)
CASRLRGGANEQFF

SEQ ID NO: 408345 - protein, 15 aa, Homo sapiens
  CDR3 for alpha chain variable domain of TCR clone 204173 (TRAV12-3, TRAJ27)
CAMRAYNTNAGNQPL

SEQ ID NO: 408346 - protein, 13 aa, Homo sapiens
  CDR3 for beta chain variable domain of TCR clone 204173 (TRBV11-2, TRBJ2-5)
CASSRGPSETQYF

SEQ ID NO: 408347 - protein, 15 aa, Homo sapiens
  CDR3 for alpha chain variable domain of TCR clone 204174 (TRAV12-2, TRAJ43)
CACAMRFGAGTRLTV

SEQ ID NO: 408348 - protein, 13 aa, Homo sapiens
  CDR3 for beta chain variable domain of TCR clone 204174 (TRBV4-2, TRBJ1-1)
CASGQAGNTEAFF

SEQ ID NO: 408349 - protein, 13 aa, Homo sapiens
  CDR3 for alpha chain variable domain of TCR clone 204175 (TRAV27, TRAJ41)
CAGEGNSGNAINL

SEQ ID NO: 408350 - protein, 14 aa, Homo sapiens
  CDR3 for beta chain variable domain of TCR clone 204175 (TRBV7-2, TRBJ1-1)
CASSFLTGTTEASF

SEQ ID NO: 408351 - protein, 11 aa, Homo sapiens
  CDR3 for alpha chain variable domain of TCR clone 204176 (TRAV1-1, TRAJ23)
CAVRQGGKLIF

SEQ ID NO: 408352 - protein, 14 aa, Homo sapiens
  CDR3 for beta chain variable domain of TCR clone 204176 (TRBV19, TRBJ2-1)
CASSRLASINEQFF

SEQ ID NO: 408353 - protein, 13 aa, Homo sapiens
  CDR3 for alpha chain variable domain of TCR clone 204177 (TRAV12-3, TRAJ9)
CAMRNTGGFKTIF

SEQ ID NO: 408354 - protein, 13 aa, Homo sapiens
  CDR3 for beta chain variable domain of TCR clone 204177 (TRBV27, TRBJ2-1)
CASRTRGVGEQFF

SEQ ID NO: 408355 - protein, 18 aa, Homo sapiens
  CDR3 for alpha chain variable domain of TCR clone 204178 (TRAV21, TRAJ52)
CAVGPSPAGGTSYGKLTF

SEQ ID NO: 408356 - protein, 17 aa, Homo sapiens
  CDR3 for beta chain variable domain of TCR clone 204178 (TRBV13, TRBJ2-3)
CASSLSGVAGGRNTQYF

SEQ ID NO: 408357 - protein, 13 aa, Homo sapiens
  CDR3 for alpha chain variable domain of TCR clone 204179 (TRAV8-4, TRAJ10)
CAAFTGGGNKLTF

SEQ ID NO: 408358 - protein, 15 aa, Homo sapiens
  CDR3 for beta chain variable domain of TCR clone 204179 (TRBV2, TRBJ2-3)
CASSDFEKATGTQYF

SEQ ID NO: 408359 - protein, 15 aa, Homo sapiens
  CDR3 for alpha chain variable domain of TCR clone 204180 (TRAV3, TRAJ20)
CAVRDIKLSDYKLSF

SEQ ID NO: 408360 - protein, 14 aa, Homo sapiens
  CDR3 for beta chain variable domain of TCR clone 204180 (TRBV7-3, TRBJ2-1)
CASSLAGGTNEQFF

SEQ ID NO: 408361 - protein, 16 aa, Homo sapiens
  CDR3 for alpha chain variable domain of TCR clone 204181 (TRAV21, TRAJ17)
CAVRPAEEAAGNKLTF

SEQ ID NO: 408362 - protein, 16 aa, Homo sapiens
  CDR3 for beta chain variable domain of TCR clone 204181 (TRBV2, TRBJ2-7)
CASSEPWTGPSYEQYF

SEQ ID NO: 408363 - protein, 17 aa, Homo sapiens
  CDR3 for alpha chain variable domain of TCR clone 204182 (TRAV3, TRAJ6)
CAVRDGPRAGGSYIPTL

SEQ ID NO: 408364 - protein, 15 aa, Homo sapiens
  CDR3 for beta chain variable domain of TCR clone 204182 (TRBV7-6, TRBJ2-3)
CASSPIIYRTDTQYF

SEQ ID NO: 408365 - protein, 17 aa, Homo sapiens
  CDR3 for alpha chain variable domain of TCR clone 204183 (TRAV3, TRAJ6)
CAVRNGPREGGSYIPTF

SEQ ID NO: 408366 - protein, 14 aa, Homo sapiens
  CDR3 for beta chain variable domain of TCR clone 204183 (TRBV7-2, TRBJ2-7)
CASSPKTSFYEQYF

SEQ ID NO: 408367 - protein, 23 aa, Homo sapiens
  CDR3 for alpha chain variable domain of TCR clone 204184 (TRAV3, TRAJ32)
CAVSSYGVLQTSSSLELALCLLS

SEQ ID NO: 408368 - protein, 13 aa, Homo sapiens
  CDR3 for beta chain variable domain of TCR clone 204184 (TRBV20-1, TRBJ2-7)
CSARPSTNYEQYF

SEQ ID NO: 408369 - protein, 15 aa, Homo sapiens
  CDR3 for alpha chain variable domain of TCR clone 204185 (TRAV2, TRAJ15)
CAVEDRGQAGTALIF

SEQ ID NO: 408370 - protein, 15 aa, Homo sapiens
  CDR3 for beta chain variable domain of TCR clone 204185 (TRBV20-1, TRBJ2-7)
CSARDRVSGTDEQYF

SEQ ID NO: 408371 - protein, 15 aa, Homo sapiens
  CDR3 for alpha chain variable domain of TCR clone 204186 (TRAV8-4, TRAJ37)
CAVSTRSGKTGKLIF

SEQ ID NO: 408372 - protein, 20 aa, Homo sapiens
  CDR3 for beta chain variable domain of TCR clone 204186 (TRBV7-8, TRBJ2-2)
CASSHLFPGPTIHITGELFF

SEQ ID NO: 408373 - protein, 14 aa, Homo sapiens
  CDR3 for alpha chain variable domain of TCR clone 204187 (TRAV12-2, TRAJ24)
CAVTPADSWGKLQF

SEQ ID NO: 408374 - protein, 15 aa, Homo sapiens
  CDR3 for beta chain variable domain of TCR clone 204187 (TRBV24-1, TRBJ2-1)
CATRASGGQYNEQFF

SEQ ID NO: 408375 - protein, 13 aa, Homo sapiens
  CDR3 for alpha chain variable domain of TCR clone 204188 (TRAV17, TRAJ9)
CATDYTGGFKTIL

SEQ ID NO: 408376 - protein, 13 aa, Homo sapiens
  CDR3 for beta chain variable domain of TCR clone 204188 (TRBV3-1, TRBJ2-7)
CASSLRDGYEQYF

SEQ ID NO: 408377 - protein, 13 aa, Homo sapiens
  CDR3 for alpha chain variable domain of TCR clone 204189 (TRAV8-3, TRAJ48)
CAVVPFGNEKLTF

SEQ ID NO: 408378 - protein, 12 aa, Homo sapiens
  CDR3 for beta chain variable domain of TCR clone 204189 (TRBV11-2, TRBJ2-2)
CASSHGGGELFF

SEQ ID NO: 408379 - protein, 10 aa, Homo sapiens
  CDR3 for alpha chain variable domain of TCR clone 204190 (TRAV21, TRAJ15)
CAVSGNCSDL

SEQ ID NO: 408380 - protein, 11 aa, Homo sapiens
  CDR3 for beta chain variable domain of TCR clone 204190 (TRBV20-1, TRBJ2-5)
CSADRAETQYF

SEQ ID NO: 408381 - protein, 16 aa, Homo sapiens
  CDR3 for alpha chain variable domain of TCR clone 204191 (TRAV3, TRAJ21)
CAVRAIERGNFNKFYF

SEQ ID NO: 408382 - protein, 13 aa, Homo sapiens
  CDR3 for beta chain variable domain of TCR clone 204191 (TRBV27, TRBJ2-7)
CASSVTSGYEQYF

SEQ ID NO: 408383 - protein, 13 aa, Homo sapiens
  CDR3 for alpha chain variable domain of TCR clone 204192 (TRAV23/DV6, TRAJ45)
CAEDRRRCCRTHL

SEQ ID NO: 408384 - protein, 15 aa, Homo sapiens
  CDR3 for beta chain variable domain of TCR clone 204192 (TRBV27, TRBJ2-1)
CASSNGGGSSNEQFF

SEQ ID NO: 408385 - protein, 16 aa, Homo sapiens
  CDR3 for alpha chain variable domain of TCR clone 204193 (TRAV8-1, TRAJ39)
CAVNVPSYNAGNMLTS

SEQ ID NO: 408386 - protein, 15 aa, Homo sapiens
  CDR3 for beta chain variable domain of TCR clone 204193 (TRBV4-1, TRBJ2-3)
CASRSTRAGTDTQYF

SEQ ID NO: 408387 - protein, 13 aa, Homo sapiens
  CDR3 for alpha chain variable domain of TCR clone 204194 (TRAV17, TRAJ40)
CAGALGGTYKYIF

SEQ ID NO: 408388 - protein, 16 aa, Homo sapiens
  CDR3 for beta chain variable domain of TCR clone 204194 (TRBV11-2, TRBJ1-2)
CASSLDTGSADYGYTF

SEQ ID NO: 408389 - protein, 16 aa, Homo sapiens
  CDR3 for alpha chain variable domain of TCR clone 204195 (TRAV14/DV4, TRAJ30)
CAMREGLGNRDDKIIF

SEQ ID NO: 408390 - protein, 13 aa, Homo sapiens
  CDR3 for beta chain variable domain of TCR clone 204195 (TRBV7-7, TRBJ2-5)
CASSRSGQETQYF

SEQ ID NO: 408391 - protein, 12 aa, Homo sapiens
  CDR3 for alpha chain variable domain of TCR clone 204196 (TRAV3, TRAJ43)
CAVRDPNNDMRF

SEQ ID NO: 408392 - protein, 12 aa, Homo sapiens
  CDR3 for beta chain variable domain of TCR clone 204196 (TRBV7-9, TRBJ1-1)
CASSPSSTEAFF

SEQ ID NO: 408393 - protein, 15 aa, Homo sapiens
  CDR3 for alpha chain variable domain of TCR clone 204197 (TRAV14/DV4, TRAJ12)
CAMREERDSIYKLIF

SEQ ID NO: 408394 - protein, 16 aa, Homo sapiens
  CDR3 for beta chain variable domain of TCR clone 204197 (TRBV11-2, TRBJ1-2)
CASSLDRGGNNYGYTF

SEQ ID NO: 408395 - protein, 11 aa, Homo sapiens
  CDR3 for alpha chain variable domain of TCR clone 204198 (TRAV1-2, TRAJ31)
CAVNNNARLMF

SEQ ID NO: 408396 - protein, 16 aa, Homo sapiens
  CDR3 for beta chain variable domain of TCR clone 204198 (TRBV19, TRBJ2-1)
CASSKAGPSSYNEQFF

SEQ ID NO: 408397 - protein, 12 aa, Homo sapiens
  CDR3 for alpha chain variable domain of TCR clone 204199 (TRAV21, TRAJ29)
CAVTSGNTPLVF

SEQ ID NO: 408398 - protein, 16 aa, Homo sapiens
  CDR3 for beta chain variable domain of TCR clone 204199 (TRBV29-1, TRBJ2-6)
CSVEDITYSGANVLTF

SEQ ID NO: 408399 - protein, 20 aa, Homo sapiens
  CDR3 for alpha chain variable domain of TCR clone 204200 (TRAV25, TRAJ21)
TATQTTDVGTYPLSFNKFYF

SEQ ID NO: 408400 - protein, 15 aa, Homo sapiens
  CDR3 for beta chain variable domain of TCR clone 204200 (TRBV19, TRBJ1-2)
CASSVGQVLNYGYTF

SEQ ID NO: 408401 - protein, 16 aa, Homo sapiens
  CDR3 for alpha chain variable domain of TCR clone 204201 (TRAV12-2, TRAJ45)
CAVKRNPGGGADGLTF

SEQ ID NO: 408402 - protein, 12 aa, Homo sapiens
  CDR3 for beta chain variable domain of TCR clone 204201 (TRBV6-1, TRBJ2-5)
CANSEGRETQYF

SEQ ID NO: 408403 - protein, 13 aa, Homo sapiens
  CDR3 for alpha chain variable domain of TCR clone 204202 (TRAV8-1, TRAJ28)
CAVSGAGSYQLTF

SEQ ID NO: 408404 - protein, 16 aa, Homo sapiens
  CDR3 for beta chain variable domain of TCR clone 204202 (TRBV7-2, TRBJ2-3)
CASSLVALYSTDTQYF

SEQ ID NO: 408405 - protein, 15 aa, Homo sapiens
  CDR3 for alpha chain variable domain of TCR clone 204203 (TRAV8-3, TRAJ27)
FAVGPSKTNAGKSTF

SEQ ID NO: 408406 - protein, 13 aa, Homo sapiens
  CDR3 for beta chain variable domain of TCR clone 204203 (TRBV20-1, TRBJ1-1)
CSAPLGGGTEAFF

SEQ ID NO: 408407 - protein, 14 aa, Homo sapiens
  CDR3 for alpha chain variable domain of TCR clone 204204 (TRAV36/DV7, TRAJ57)
CAVGFPGVSEKLVF

SEQ ID NO: 408408 - protein, 12 aa, Homo sapiens
  CDR3 for beta chain variable domain of TCR clone 204204 (TRBV19, TRBJ2-7)
CASTSGTYEQYF

SEQ ID NO: 408409 - protein, 16 aa, Homo sapiens
  CDR3 for alpha chain variable domain of TCR clone 204205 (TRAV3, TRAJ10)
CAVRDMRAGGGNKLTF

SEQ ID NO: 408410 - protein, 17 aa, Homo sapiens
  CDR3 for beta chain variable domain of TCR clone 204205 (TRBV5-4, TRBJ2-1)
CASSSAGGRGPYKEQFF

SEQ ID NO: 408411 - protein, 14 aa, Homo sapiens
  CDR3 for alpha chain variable domain of TCR clone 204206 (TRAV12-2, TRAJ13)
CAVKKTGGYQKVTF

SEQ ID NO: 408412 - protein, 14 aa, Homo sapiens
  CDR3 for beta chain variable domain of TCR clone 204206 (TRBV2, TRBJ2-1)
CASRAYGIYNEQFF

SEQ ID NO: 408413 - protein, 11 aa, Homo sapiens
  CDR3 for alpha chain variable domain of TCR clone 204207 (TRAV17, TRAJ9)
CATTGGFKTIF

SEQ ID NO: 408414 - protein, 14 aa, Homo sapiens
  CDR3 for beta chain variable domain of TCR clone 204207 (TRBV7-9, TRBJ2-5)
CASSPAQDQETQYF

SEQ ID NO: 408415 - protein, 19 aa, Homo sapiens
  CDR3 for alpha chain variable domain of TCR clone 204208 (TRAV26-1, TRAJ52)
CIIRAHRNAGGTSYGKLTF

SEQ ID NO: 408416 - protein, 15 aa, Homo sapiens
  CDR3 for beta chain variable domain of TCR clone 204208 (TRBV29-1, TRBJ2-1)
CSGRDRKSSYNEQFF

SEQ ID NO: 408417 - protein, 16 aa, Homo sapiens
  CDR3 for alpha chain variable domain of TCR clone 204209 (TRAV1-2, TRAJ6)
CAVRDQGTGGSYIPTF

SEQ ID NO: 408418 - protein, 13 aa, Homo sapiens
  CDR3 for beta chain variable domain of TCR clone 204209 (TRBV12-4, TRBJ1-2)
CASSLRQGKGDTF

SEQ ID NO: 408419 - protein, 16 aa, Homo sapiens
  CDR3 for alpha chain variable domain of TCR clone 204210 (TRAV13-1, TRAJ13)
CTAFFLGFTRKLPLEL

SEQ ID NO: 408420 - protein, 15 aa, Homo sapiens
  CDR3 for beta chain variable domain of TCR clone 204210 (TRBV7-8, TRBJ2-1)
CASSLADSLYNEQFF

SEQ ID NO: 408421 - protein, 11 aa, Homo sapiens
  CDR3 for alpha chain variable domain of TCR clone 204211 (TRAV12-1, TRAJ21)
CVVNNFNKFYF

SEQ ID NO: 408422 - protein, 16 aa, Homo sapiens
  CDR3 for beta chain variable domain of TCR clone 204211 (TRBV10-3, TRBJ2-1)
CAISGVGDGGGGEQFF

SEQ ID NO: 408423 - protein, 14 aa, Homo sapiens
  CDR3 for alpha chain variable domain of TCR clone 204212 (TRAV12-2, TRAJ5)
CAVNRSTGRRALTF

SEQ ID NO: 408424 - protein, 13 aa, Homo sapiens
  CDR3 for beta chain variable domain of TCR clone 204212 (TRBV7-9, TRBJ2-2)
CASSLDPTGELFF

SEQ ID NO: 408425 - protein, 14 aa, Homo sapiens
  CDR3 for alpha chain variable domain of TCR clone 204213 (TRAV27, TRAJ36)
CAGPPKRGANNLFF

SEQ ID NO: 408426 - protein, 15 aa, Homo sapiens
  CDR3 for beta chain variable domain of TCR clone 204213 (TRBV18, TRBJ2-7)
CASSPASTPNYQQYF

SEQ ID NO: 408427 - protein, 19 aa, Homo sapiens
  CDR3 for alpha chain variable domain of TCR clone 204214 (TRAV1-2, TRAJ26)
CLLPLCCERPDNYGQNFVF

SEQ ID NO: 408428 - protein, 16 aa, Homo sapiens
  CDR3 for beta chain variable domain of TCR clone 204214 (TRBV5-8, TRBJ2-2)
CASSPRQGATTGELFF

SEQ ID NO: 408429 - protein, 11 aa, Homo sapiens
  CDR3 for alpha chain variable domain of TCR clone 204215 (TRAV29/DV5, TRAJ49)
CAAFTGNQFYF

SEQ ID NO: 408430 - protein, 12 aa, Homo sapiens
  CDR3 for beta chain variable domain of TCR clone 204215 (TRBV12-4, TRBJ2-1)
CASSPGRNEQFF

SEQ ID NO: 408431 - protein, 16 aa, Homo sapiens
  CDR3 for alpha chain variable domain of TCR clone 204216 (TRAV3, TRAJ10)
CAVRDMRAGGGNKLTF

SEQ ID NO: 408432 - protein, 18 aa, Homo sapiens
  CDR3 for beta chain variable domain of TCR clone 204216 (TRBV5-5, TRBJ1-5)
CASSLRQVKGSSNQPQHF

SEQ ID NO: 408433 - protein, 14 aa, Homo sapiens
  CDR3 for alpha chain variable domain of TCR clone 204217 (TRAV13-1, TRAJ40)
CAASMTSRTYKYIF

SEQ ID NO: 408434 - protein, 14 aa, Homo sapiens
  CDR3 for beta chain variable domain of TCR clone 204217 (TRBV18, TRBJ2-5)
CASSPGVSQETQYF

SEQ ID NO: 408435 - protein, 13 aa, Homo sapiens
  CDR3 for alpha chain variable domain of TCR clone 204218 (TRAV13-1, TRAJ6)
CAASSRGSYIPTF

SEQ ID NO: 408436 - protein, 14 aa, Homo sapiens
  CDR3 for beta chain variable domain of TCR clone 204218 (TRBV20-1, TRBJ2-4)
CSAVAGGPGNIQYF

SEQ ID NO: 408437 - protein, 17 aa, Homo sapiens
  CDR3 for alpha chain variable domain of TCR clone 204219 (TRAV12-3, TRAJ6)
CAMVARGGAGGSYIPRF

SEQ ID NO: 408438 - protein, 12 aa, Homo sapiens
  CDR3 for beta chain variable domain of TCR clone 204219 (TRBV12-4, TRBJ2-3)
CASSTLPDTQYF

SEQ ID NO: 408439 - protein, 11 aa, Homo sapiens
  CDR3 for alpha chain variable domain of TCR clone 204220 (TRAV12-3, TRAJ43)
CAMSVSNDMRF

SEQ ID NO: 408440 - protein, 14 aa, Homo sapiens
  CDR3 for beta chain variable domain of TCR clone 204220 (TRBV20-1, TRBJ1-1)
SAVLPLGGGTEAFF

SEQ ID NO: 408441 - protein, 13 aa, Homo sapiens
  CDR3 for alpha chain variable domain of TCR clone 204221 (TRAV3, TRAJ21)
RAVREPDFNKFYF

SEQ ID NO: 408442 - protein, 13 aa, Homo sapiens
  CDR3 for beta chain variable domain of TCR clone 204221 (TRBV9, TRBJ2-1)
CASSPSGGNEQFF

SEQ ID NO: 408443 - protein, 13 aa, Homo sapiens
  CDR3 for alpha chain variable domain of TCR clone 204222 (TRAV13-1, TRAJ6)
CARGSGGSYIPTF

SEQ ID NO: 408444 - protein, 17 aa, Homo sapiens
  CDR3 for beta chain variable domain of TCR clone 204222 (TRBV7-8, TRBJ2-1)
CASSPPTGTLAYSEQFF

SEQ ID NO: 408445 - protein, 15 aa, Homo sapiens
  CDR3 for alpha chain variable domain of TCR clone 204223 (TRAV20, TRAJ50)
CAVRQMKTSYDKVIF

SEQ ID NO: 408446 - protein, 15 aa, Homo sapiens
  CDR3 for beta chain variable domain of TCR clone 204223 (TRBV20-1, TRBJ2-7)
CSARDRVSGMDEQYF

SEQ ID NO: 408447 - protein, 14 aa, Homo sapiens
  CDR3 for alpha chain variable domain of TCR clone 204224 (TRAV14/DV4, TRAJ11)
CAMSSNSGYITLTF

SEQ ID NO: 408448 - protein, 11 aa, Homo sapiens
  CDR3 for beta chain variable domain of TCR clone 204224 (TRBV7-9, TRBJ2-3)
CASSGPDTQYF

SEQ ID NO: 408449 - protein, 16 aa, Homo sapiens
  CDR3 for alpha chain variable domain of TCR clone 204225 (TRAV30, TRAJ24)
CGTEIVGADSWGKFQF

SEQ ID NO: 408450 - protein, 16 aa, Homo sapiens
  CDR3 for beta chain variable domain of TCR clone 204225 (TRBV12-4, TRBJ2-2)
CTSVPAVLQGPGSCFF

SEQ ID NO: 408451 - protein, 12 aa, Homo sapiens
  CDR3 for alpha chain variable domain of TCR clone 204226 (TRAV1-2, TRAJ33)
CAALDSNYPLIW

SEQ ID NO: 408452 - protein, 14 aa, Homo sapiens
  CDR3 for beta chain variable domain of TCR clone 204226 (TRBV20-1, TRBJ2-1)
CSAQIGGSANEQFF

SEQ ID NO: 408453 - protein, 15 aa, Homo sapiens
  CDR3 for alpha chain variable domain of TCR clone 204227 (TRAV12-3, TRAJ10)
CASYILTGGGNKLTF

SEQ ID NO: 408454 - protein, 15 aa, Homo sapiens
  CDR3 for beta chain variable domain of TCR clone 204227 (TRBV7-2, TRBJ1-6)
CASSLGSDRGMPLHF

SEQ ID NO: 408455 - protein, 12 aa, Homo sapiens
  CDR3 for alpha chain variable domain of TCR clone 204228 (TRAV13-1, TRAJ21)
CAAKEGFNKFYF

SEQ ID NO: 408456 - protein, 16 aa, Homo sapiens
  CDR3 for beta chain variable domain of TCR clone 204228 (TRBV7-9, TRBJ2-6)
CASSLKGPLRANVLTF

SEQ ID NO: 408457 - protein, 11 aa, Homo sapiens
  CDR3 for alpha chain variable domain of TCR clone 204229 (TRAV21, TRAJ11)
CAVNGYSTLTF

SEQ ID NO: 408458 - protein, 18 aa, Homo sapiens
  CDR3 for beta chain variable domain of TCR clone 204229 (TRBV6-6, TRBJ1-3)
CASSYSKWDSISGNTIYF

SEQ ID NO: 408459 - protein, 12 aa, Homo sapiens
  CDR3 for alpha chain variable domain of TCR clone 204230 (TRAV3, TRAJ20)
CAVRDGDYKPSF

SEQ ID NO: 408460 - protein, 16 aa, Homo sapiens
  CDR3 for beta chain variable domain of TCR clone 204230 (TRBV12-5, TRBJ2-5)
CASGPRTSGNQETQYF

SEQ ID NO: 408461 - protein, 11 aa, Homo sapiens
  CDR3 for alpha chain variable domain of TCR clone 204231 (TRAV3, TRAJ21)
CAVGNCNKFYF

SEQ ID NO: 408462 - protein, 16 aa, Homo sapiens
  CDR3 for beta chain variable domain of TCR clone 204231 (TRBV19, TRBJ2-1)
CASSKAGPSSYNEQSF

SEQ ID NO: 408463 - protein, 12 aa, Homo sapiens
  CDR3 for alpha chain variable domain of TCR clone 204232 (TRAV21, TRAJ33)
CAKMDSNYQLIW

SEQ ID NO: 408464 - protein, 14 aa, Homo sapiens
  CDR3 for beta chain variable domain of TCR clone 204232 (TRBV2, TRBJ2-7)
CSSSLASGGYEQYF

SEQ ID NO: 408465 - protein, 16 aa, Homo sapiens
  CDR3 for alpha chain variable domain of TCR clone 204233 (TRAV30, TRAJ24)
CGTEIVDADSWGKFQF

SEQ ID NO: 408466 - protein, 15 aa, Homo sapiens
  CDR3 for beta chain variable domain of TCR clone 204233 (TRBV6-3, TRBJ2-7)
CASSSSGTVFYEQYF

SEQ ID NO: 408467 - protein, 11 aa, Homo sapiens
  CDR3 for alpha chain variable domain of TCR clone 204234 (TRAV2, TRAJ23)
CAVETRGKLIL

SEQ ID NO: 408468 - protein, 14 aa, Homo sapiens
  CDR3 for beta chain variable domain of TCR clone 204234 (TRBV2, TRBJ2-3)
YASSEGQNTDTQYF

SEQ ID NO: 408469 - protein, 12 aa, Homo sapiens
  CDR3 for alpha chain variable domain of TCR clone 204235 (TRAV2, TRAJ24)
CAAADSWGKFQF

SEQ ID NO: 408470 - protein, 12 aa, Homo sapiens
  CDR3 for beta chain variable domain of TCR clone 204235 (TRBV11-2, TRBJ2-2)
CASSLGGGELFF

SEQ ID NO: 408471 - protein, 11 aa, Homo sapiens
  CDR3 for alpha chain variable domain of TCR clone 204236 (TRAV12-2, TRAJ10)
PLTGGGNKLTF

SEQ ID NO: 408472 - protein, 16 aa, Homo sapiens
  CDR3 for beta chain variable domain of TCR clone 204236 (TRBV7-9, TRBJ1-2)
CASSLGFSSGEDGYTF

SEQ ID NO: 408473 - protein, 12 aa, Homo sapiens
  CDR3 for alpha chain variable domain of TCR clone 204237 (TRAV23/DV6, TRAJ31)
CAARRIVARLLF

SEQ ID NO: 408474 - protein, 13 aa, Homo sapiens
  CDR3 for beta chain variable domain of TCR clone 204237 (TRBV28, TRBJ2-7)
CASKAGGVYEQYF

SEQ ID NO: 408475 - protein, 15 aa, Homo sapiens
  CDR3 for alpha chain variable domain of TCR clone 204238 (TRAV8-3, TRAJ15)
CAVGAANQAGTALIF

SEQ ID NO: 408476 - protein, 14 aa, Homo sapiens
  CDR3 for beta chain variable domain of TCR clone 204238 (TRBV20-1, TRBJ2-1)
CSPNDEASYNEQFS

SEQ ID NO: 408477 - protein, 13 aa, Homo sapiens
  CDR3 for alpha chain variable domain of TCR clone 204239 (TRAV12-1, TRAJ33)
CGDAPDSNSQLIW

SEQ ID NO: 408478 - protein, 14 aa, Homo sapiens
  CDR3 for beta chain variable domain of TCR clone 204239 (TRBV13, TRBJ2-7)
CASSLKGASYEQYF

SEQ ID NO: 408479 - protein, 16 aa, Homo sapiens
  CDR3 for alpha chain variable domain of TCR clone 204240 (TRAV1-2, TRAJ10)
CAVRGVLTGGGNKLTF

SEQ ID NO: 408480 - protein, 15 aa, Homo sapiens
  CDR3 for beta chain variable domain of TCR clone 204240 (TRBV11-2, TRBJ2-1)
CASSSPSTRYNEQFF

SEQ ID NO: 408481 - protein, 15 aa, Homo sapiens
  CDR3 for alpha chain variable domain of TCR clone 204241 (TRAV3, TRAJ4)
CAVKDGTGGYNKLIF

SEQ ID NO: 408482 - protein, 16 aa, Homo sapiens
  CDR3 for beta chain variable domain of TCR clone 204241 (TRBV27, TRBJ2-2)
CASSSSGVSNTGELFF

SEQ ID NO: 408483 - protein, 16 aa, Homo sapiens
  CDR3 for alpha chain variable domain of TCR clone 204242 (TRAV3, TRAJ10)
CAVRAMRAGGGKKLTF

SEQ ID NO: 408484 - protein, 14 aa, Homo sapiens
  CDR3 for beta chain variable domain of TCR clone 204242 (TRBV7-2, TRBJ1-1)
CASSFLTGTTEAFF

SEQ ID NO: 408485 - protein, 17 aa, Homo sapiens
  CDR3 for alpha chain variable domain of TCR clone 204243 (TRAV3, TRAJ38)
CAVRDCLNAGNNRKLIW

SEQ ID NO: 408486 - protein, 14 aa, Homo sapiens
  CDR3 for beta chain variable domain of TCR clone 204243 (TRBV6-1, TRBJ1-3)
CASVQGGGGNNIYF

SEQ ID NO: 408487 - protein, 19 aa, Homo sapiens
  CDR3 for alpha chain variable domain of TCR clone 204244 (TRAV8-3, TRAJ8)
LSTSVLWDPMNKGFQKLVF

SEQ ID NO: 408488 - protein, 13 aa, Homo sapiens
  CDR3 for beta chain variable domain of TCR clone 204244 (TRBV10-2, TRBJ2-3)
CASSESGDHTQYF

SEQ ID NO: 408489 - protein, 13 aa, Homo sapiens
  CDR3 for alpha chain variable domain of TCR clone 204245 (TRAV1-2, TRAJ34)
CAVRGYNTDKLIF

SEQ ID NO: 408490 - protein, 15 aa, Homo sapiens
  CDR3 for beta chain variable domain of TCR clone 204245 (TRBV6-3, TRBJ2-7)
CASSSPGTVFYEQYF

SEQ ID NO: 408491 - protein, 14 aa, Homo sapiens
  CDR3 for alpha chain variable domain of TCR clone 204246 (TRAV2, TRAJ9)
CAVEDRSGGFKTIF

SEQ ID NO: 408492 - protein, 15 aa, Homo sapiens
  CDR3 for beta chain variable domain of TCR clone 204246 (TRBV7-3, TRBJ2-1)
CASSRAGAGADEQFF

SEQ ID NO: 408493 - protein, 14 aa, Homo sapiens
  CDR3 for alpha chain variable domain of TCR clone 204247 (TRAV16, TRAJ32)
CALKSGGATNKLIF

SEQ ID NO: 408494 - protein, 14 aa, Homo sapiens
  CDR3 for beta chain variable domain of TCR clone 204247 (TRBV11-2, TRBJ2-7)
CASSLGAGAYEQYF

SEQ ID NO: 408495 - protein, 14 aa, Homo sapiens
  CDR3 for alpha chain variable domain of TCR clone 204248 (TRAV1-2, TRAJ16)
CAVNRFSDGQKRLF

SEQ ID NO: 408496 - protein, 14 aa, Homo sapiens
  CDR3 for beta chain variable domain of TCR clone 204248 (TRBV12-4, TRBJ2-5)
CASSLWQKQETQYF

SEQ ID NO: 408497 - protein, 15 aa, Homo sapiens
  CDR3 for alpha chain variable domain of TCR clone 204249 (TRAV26-2, TRAJ39)
CSLRGNNNAGNMLTF

SEQ ID NO: 408498 - protein, 15 aa, Homo sapiens
  CDR3 for beta chain variable domain of TCR clone 204249 (TRBV5-4, TRBJ1-1)
CGSSSLGWANTEAFF

SEQ ID NO: 408499 - protein, 12 aa, Homo sapiens
  CDR3 for alpha chain variable domain of TCR clone 204250 (TRAV12-3, TRAJ17)
CAMTLTGNKLTF

SEQ ID NO: 408500 - protein, 16 aa, Homo sapiens
  CDR3 for beta chain variable domain of TCR clone 204250 (TRBV7-3, TRBJ2-2)
CGSSLKRGTLSGELFF

SEQ ID NO: 408501 - protein, 12 aa, Homo sapiens
  CDR3 for alpha chain variable domain of TCR clone 204251 (TRAV30, TRAJ20)
CGTESNDYKLSF

SEQ ID NO: 408502 - protein, 15 aa, Homo sapiens
  CDR3 for beta chain variable domain of TCR clone 204251 (TRBV20-1, TRBJ2-7)
CSDRDRVSGMDEQYF

SEQ ID NO: 408503 - protein, 14 aa, Homo sapiens
  CDR3 for alpha chain variable domain of TCR clone 204252 (TRAV12-1, TRAJ15)
CLPPANQAGTALIF

SEQ ID NO: 408504 - protein, 15 aa, Homo sapiens
  CDR3 for beta chain variable domain of TCR clone 204252 (TRBV18, TRBJ2-1)
CASSPPSASYNEQFF

SEQ ID NO: 408505 - protein, 19 aa, Homo sapiens
  CDR3 for alpha chain variable domain of TCR clone 204253 (TRAV17, TRAJ40)
TASRAADTASYFFASKYIF

SEQ ID NO: 408506 - protein, 17 aa, Homo sapiens
  CDR3 for beta chain variable domain of TCR clone 204253 (TRBV11-2, TRBJ2-4)
CASSFLALGGAGDIQYF

SEQ ID NO: 408507 - protein, 15 aa, Homo sapiens
  CDR3 for alpha chain variable domain of TCR clone 204254 (TRAV26-1, TRAJ22)
CIVRVSFWFCKATAI

SEQ ID NO: 408508 - protein, 14 aa, Homo sapiens
  CDR3 for beta chain variable domain of TCR clone 204254 (TRBV4-1, TRBJ2-2)
CASSQAVNTGELFF

SEQ ID NO: 408509 - protein, 13 aa, Homo sapiens
  CDR3 for alpha chain variable domain of TCR clone 204255 (TRAV13-1, TRAJ13)
CAASKGGYQKVTF

SEQ ID NO: 408510 - protein, 16 aa, Homo sapiens
  CDR3 for beta chain variable domain of TCR clone 204255 (TRBV18, TRBJ1-2)
CASSPPERVTIDGYTF

SEQ ID NO: 408511 - protein, 22 aa, Homo sapiens
  CDR3 for alpha chain variable domain of TCR clone 204256 (TRAV4, )
CLVGPHNYDIQNPDPAVYQLRD

SEQ ID NO: 408512 - protein, 17 aa, Homo sapiens
  CDR3 for beta chain variable domain of TCR clone 204256 (TRBV24-1, TRBJ2-1)
CAPSDVSTSGTYNEQFF

SEQ ID NO: 408513 - protein, 13 aa, Homo sapiens
  CDR3 for alpha chain variable domain of TCR clone 204257 (TRAV12-3, TRAJ13)
CAMTSGGYQKVTF

SEQ ID NO: 408514 - protein, 11 aa, Homo sapiens
  CDR3 for beta chain variable domain of TCR clone 204257 (TRBV19, TRBJ1-2)
CASSISSGYTF

SEQ ID NO: 408515 - protein, 14 aa, Homo sapiens
  CDR3 for alpha chain variable domain of TCR clone 204258 (TRAV4, TRAJ17)
CLVGDMAAGNKLTF

SEQ ID NO: 408516 - protein, 13 aa, Homo sapiens
  CDR3 for beta chain variable domain of TCR clone 204258 (TRBV12-4, TRBJ1-5)
CASSPDRAQPQHF

SEQ ID NO: 408517 - protein, 13 aa, Homo sapiens
  CDR3 for alpha chain variable domain of TCR clone 204259 (TRAV2, TRAJ15)
CAVASQAGTALIF

SEQ ID NO: 408518 - protein, 13 aa, Homo sapiens
  CDR3 for beta chain variable domain of TCR clone 204259 (TRBV3-1, TRBJ2-2)
FASLARGSGELFF

SEQ ID NO: 408519 - protein, 13 aa, Homo sapiens
  CDR3 for alpha chain variable domain of TCR clone 204260 (TRAV27, TRAJ45)
CRSSGGGADRLTF

SEQ ID NO: 408520 - protein, 14 aa, Homo sapiens
  CDR3 for beta chain variable domain of TCR clone 204260 (TRBV7-9, TRBJ2-1)
CASSSMVGFGEQFF

SEQ ID NO: 408521 - protein, 16 aa, Homo sapiens
  CDR3 for alpha chain variable domain of TCR clone 204261 (TRAV30, TRAJ24)
CGTEIVNADSWGKFQF

SEQ ID NO: 408522 - protein, 16 aa, Homo sapiens
  CDR3 for beta chain variable domain of TCR clone 204261 (TRBV24-1, TRBJ2-3)
CATSDPGTGATDTQYF

SEQ ID NO: 408523 - protein, 15 aa, Homo sapiens
  CDR3 for alpha chain variable domain of TCR clone 204262 (TRAV12-2, TRAJ53)
CAVNGGGGSNYKQPF

SEQ ID NO: 408524 - protein, 13 aa, Homo sapiens
  CDR3 for beta chain variable domain of TCR clone 204262 (TRBV3-1, TRBJ1-1)
CASSPGVITEAFF

SEQ ID NO: 408525 - protein, 14 aa, Homo sapiens
  CDR3 for alpha chain variable domain of TCR clone 204263 (TRAV12-2, TRAJ33)
CAVKRARSNYQLIW

SEQ ID NO: 408526 - protein, 17 aa, Homo sapiens
  CDR3 for beta chain variable domain of TCR clone 204263 (TRBV7-8, TRBJ2-6)
CASSAGTGGAGANVLTF

SEQ ID NO: 408527 - protein, 16 aa, Homo sapiens
  CDR3 for alpha chain variable domain of TCR clone 204264 (TRAV30, TRAJ24)
CGTEIVDADSWGKFQF

SEQ ID NO: 408528 - protein, 13 aa, Homo sapiens
  CDR3 for beta chain variable domain of TCR clone 204264 (TRBV12-4, TRBJ1-5)
CASSSRSYQPQHF

SEQ ID NO: 408529 - protein, 14 aa, Homo sapiens
  CDR3 for alpha chain variable domain of TCR clone 204265 (TRAV3, TRAJ9)
CAVRLNTGGFKTIF

SEQ ID NO: 408530 - protein, 15 aa, Homo sapiens
  CDR3 for beta chain variable domain of TCR clone 204265 (TRBV19, TRBJ1-5)
CASSIVWADNQPQHF

SEQ ID NO: 408531 - protein, 14 aa, Homo sapiens
  CDR3 for alpha chain variable domain of TCR clone 204266 (TRAV1-2, TRAJ16)
CAVNRFSGGQKLLF

SEQ ID NO: 408532 - protein, 19 aa, Homo sapiens
  CDR3 for beta chain variable domain of TCR clone 204266 (TRBV6-3, TRBJ1-2)
CASSYSKGRTGPPNYGYTF

SEQ ID NO: 408533 - protein, 15 aa, Homo sapiens
  CDR3 for alpha chain variable domain of TCR clone 204267 (TRAV1-2, TRAJ28)
FAVQYSGAGSYQLTF

SEQ ID NO: 408534 - protein, 13 aa, Homo sapiens
  CDR3 for beta chain variable domain of TCR clone 204267 (TRBV20-1, TRBJ2-7)
CSATHTSGYEQYF

SEQ ID NO: 408535 - protein, 14 aa, Homo sapiens
  CDR3 for alpha chain variable domain of TCR clone 204268 (TRAV16, TRAJ17)
CALSGRAAGNKLTF

SEQ ID NO: 408536 - protein, 14 aa, Homo sapiens
  CDR3 for beta chain variable domain of TCR clone 204268 (TRBV7-3, TRBJ1-1)
CASSLKGGNTEAFF

SEQ ID NO: 408537 - protein, 11 aa, Homo sapiens
  CDR3 for alpha chain variable domain of TCR clone 204269 (TRAV1-1, TRAJ23)
RAVRQGGKLIF

SEQ ID NO: 408538 - protein, 13 aa, Homo sapiens
  CDR3 for beta chain variable domain of TCR clone 204269 (TRBV7-3, TRBJ1-1)
CASSQDWGAEAFF

SEQ ID NO: 408539 - protein, 13 aa, Homo sapiens
  CDR3 for alpha chain variable domain of TCR clone 204270 (TRAV20, TRAJ31)
CAVQAIGGARLMF

SEQ ID NO: 408540 - protein, 13 aa, Homo sapiens
  CDR3 for beta chain variable domain of TCR clone 204270 (TRBV4-1, TRBJ1-1)
CASSRKMNTEAFF

SEQ ID NO: 408541 - protein, 11 aa, Homo sapiens
  CDR3 for alpha chain variable domain of TCR clone 204271 (TRAV21, TRAJ48)
CAVDGNEQLTF

SEQ ID NO: 408542 - protein, 16 aa, Homo sapiens
  CDR3 for beta chain variable domain of TCR clone 204271 (TRBV19, TRBJ2-1)
CASSSKGTRSYNEQFF

SEQ ID NO: 408543 - protein, 13 aa, Homo sapiens
  CDR3 for alpha chain variable domain of TCR clone 204272 (TRAV12-2, TRAJ4)
CSVFSGGYNKLIF

SEQ ID NO: 408544 - protein, 13 aa, Homo sapiens
  CDR3 for beta chain variable domain of TCR clone 204272 (TRBV19, TRBJ1-5)
CASSIDRDQPQHF

SEQ ID NO: 408545 - protein, 16 aa, Homo sapiens
  CDR3 for alpha chain variable domain of TCR clone 204273 (TRAV8-3, TRAJ10)
CAVAPGLREEETNSPL

SEQ ID NO: 408546 - protein, 13 aa, Homo sapiens
  CDR3 for beta chain variable domain of TCR clone 204273 (TRBV18, TRBJ1-1)
CASSPGPSGEAFF

SEQ ID NO: 408547 - protein, 12 aa, Homo sapiens
  CDR3 for alpha chain variable domain of TCR clone 204274 (TRAV3, TRAJ20)
CAVRDPDYKLSF

SEQ ID NO: 408548 - protein, 15 aa, Homo sapiens
  CDR3 for beta chain variable domain of TCR clone 204274 (TRBV2, TRBJ2-2)
CASSRETVGTGELFC

SEQ ID NO: 408549 - protein, 15 aa, Homo sapiens
  CDR3 for alpha chain variable domain of TCR clone 204275 (TRAV17, TRAJ10)
CATVLLTGGGNKLTF

SEQ ID NO: 408550 - protein, 16 aa, Homo sapiens
  CDR3 for beta chain variable domain of TCR clone 204275 (TRBV7-2, TRBJ1-6)
CASSLTGVVQGSPLHF

SEQ ID NO: 408551 - protein, 16 aa, Homo sapiens
  CDR3 for alpha chain variable domain of TCR clone 204276 (TRAV30, TRAJ24)
CGTEIVDADSWGKFQF

SEQ ID NO: 408552 - protein, 15 aa, Homo sapiens
  CDR3 for beta chain variable domain of TCR clone 204276 (TRBV6-3, TRBJ2-1)
CASSYASDSYNEQFF

SEQ ID NO: 408553 - protein, 14 aa, Homo sapiens
  CDR3 for alpha chain variable domain of TCR clone 204277 (TRAV9-2, TRAJ39)
CALYIYNAGNMLTF

SEQ ID NO: 408554 - protein, 13 aa, Homo sapiens
  CDR3 for beta chain variable domain of TCR clone 204277 (TRBV19, TRBJ1-5)
CASSIEPVQPQHF

SEQ ID NO: 408555 - protein, 15 aa, Homo sapiens
  CDR3 for alpha chain variable domain of TCR clone 204278 (TRAV34, TRAJ38)
CGADFTPGNNRKLIW

SEQ ID NO: 408556 - protein, 12 aa, Homo sapiens
  CDR3 for beta chain variable domain of TCR clone 204278 (TRBV27, TRBJ2-5)
CASSPTGETQYF

SEQ ID NO: 408557 - protein, 14 aa, Homo sapiens
  CDR3 for alpha chain variable domain of TCR clone 204279 (TRAV3, TRAJ37)
CAVKESGNTGKLIF

SEQ ID NO: 408558 - protein, 11 aa, Homo sapiens
  CDR3 for beta chain variable domain of TCR clone 204279 (TRBV11-2, TRBJ1-1)
CASSINTEAFF

SEQ ID NO: 408559 - protein, 18 aa, Homo sapiens
  CDR3 for alpha chain variable domain of TCR clone 204280 (TRAV12-3, TRAJ52)
CAMSVGGAGGTSYGKLTF

SEQ ID NO: 408560 - protein, 16 aa, Homo sapiens
  CDR3 for beta chain variable domain of TCR clone 204280 (TRBV13, TRBJ2-3)
CQQPLQGRGGRNTQYF

SEQ ID NO: 408561 - protein, 14 aa, Homo sapiens
  CDR3 for alpha chain variable domain of TCR clone 204281 (TRAV12-2, TRAJ13)
CAVKKTGGYQKVTF

SEQ ID NO: 408562 - protein, 15 aa, Homo sapiens
  CDR3 for beta chain variable domain of TCR clone 204281 (TRBV27, TRBJ2-1)
CASSNGGGSAKEQFF

SEQ ID NO: 408563 - protein, 15 aa, Homo sapiens
  CDR3 for alpha chain variable domain of TCR clone 204282 (TRAV8-4, TRAJ15)
CAVSDPVQAGTALIF

SEQ ID NO: 408564 - protein, 13 aa, Homo sapiens
  CDR3 for beta chain variable domain of TCR clone 204282 (TRBV19, TRBJ1-4)
CASPTQGNEKLFF

SEQ ID NO: 408565 - protein, 16 aa, Homo sapiens
  CDR3 for alpha chain variable domain of TCR clone 204283 (TRAV30, TRAJ24)
CGTEVVDADSCGKFQF

SEQ ID NO: 408566 - protein, 15 aa, Homo sapiens
  CDR3 for beta chain variable domain of TCR clone 204283 (TRBV7-9, TRBJ1-4)
CASSARTGGNEKLFF

SEQ ID NO: 408567 - protein, 11 aa, Homo sapiens
  CDR3 for alpha chain variable domain of TCR clone 204284 (TRAV12-1, TRAJ30)
CVVNGQDKIIF

SEQ ID NO: 408568 - protein, 15 aa, Homo sapiens
  CDR3 for beta chain variable domain of TCR clone 204284 (TRBV18, TRBJ2-7)
CASSPLQGRTYEQYF

SEQ ID NO: 408569 - protein, 14 aa, Homo sapiens
  CDR3 for alpha chain variable domain of TCR clone 204285 (TRAV2, TRAJ37)
CAVDFTSNTGKLIF

SEQ ID NO: 408570 - protein, 14 aa, Homo sapiens
  CDR3 for beta chain variable domain of TCR clone 204285 (TRBV7-9, TRBJ2-5)
CASSLDTAQETQYF

SEQ ID NO: 408571 - protein, 12 aa, Homo sapiens
  CDR3 for alpha chain variable domain of TCR clone 204286 (TRAV3, TRAJ26)
CAVRNYGQNFVF

SEQ ID NO: 408572 - protein, 16 aa, Homo sapiens
  CDR3 for beta chain variable domain of TCR clone 204286 (TRBV11-2, TRBJ1-2)
CASSPSGREANYGYTF

SEQ ID NO: 408573 - protein, 14 aa, Homo sapiens
  CDR3 for alpha chain variable domain of TCR clone 204287 (TRAV8-1, TRAJ5)
CSVRTDTGRRALTF

SEQ ID NO: 408574 - protein, 14 aa, Homo sapiens
  CDR3 for beta chain variable domain of TCR clone 204287 (TRBV7-8, TRBJ2-3)
CASSFPDGQDTQYF

SEQ ID NO: 408575 - protein, 13 aa, Homo sapiens
  CDR3 for alpha chain variable domain of TCR clone 204288 (TRAV8-1, TRAJ23)
CAVTGGQGGKLVF

SEQ ID NO: 408576 - protein, 14 aa, Homo sapiens
  CDR3 for beta chain variable domain of TCR clone 204288 (TRBV24-1, TRBJ1-1)
CATSIPRGDTEAFF

SEQ ID NO: 408577 - protein, 17 aa, Homo sapiens
  CDR3 for alpha chain variable domain of TCR clone 204289 (TRAV8-3, TRAJ34)
CTSVLWASGYNTDKLIF

SEQ ID NO: 408578 - protein, 13 aa, Homo sapiens
  CDR3 for beta chain variable domain of TCR clone 204289 (TRBV7-3, TRBJ1-1)
CASSQDWGAEAFF

SEQ ID NO: 408579 - protein, 13 aa, Homo sapiens
  CDR3 for alpha chain variable domain of TCR clone 204290 (TRAV12-1, TRAJ20)
CVVNVPNDYKLSF

SEQ ID NO: 408580 - protein, 15 aa, Homo sapiens
  CDR3 for beta chain variable domain of TCR clone 204290 (TRBV6-1, TRBJ2-3)
CASSERGGITDTQYF

SEQ ID NO: 408581 - protein, 15 aa, Homo sapiens
  CDR3 for alpha chain variable domain of TCR clone 204291 (TRAV29/DV5, TRAJ57)
CAASLLRGGSEKLVF

SEQ ID NO: 408582 - protein, 15 aa, Homo sapiens
  CDR3 for beta chain variable domain of TCR clone 204291 (TRBV7-9, TRBJ1-6)
CASSSPGRGNSPLHF

SEQ ID NO: 408583 - protein, 14 aa, Homo sapiens
  CDR3 for alpha chain variable domain of TCR clone 204292 (TRAV12-1, TRAJ26)
CVVKGSNYGQNFVF

SEQ ID NO: 408584 - protein, 14 aa, Homo sapiens
  CDR3 for beta chain variable domain of TCR clone 204292 (TRBV5-4, TRBJ1-1)
CASSLVSRRDEAFF

SEQ ID NO: 408585 - protein, 17 aa, Homo sapiens
  CDR3 for alpha chain variable domain of TCR clone 204293 (TRAV3, TRAJ28)
CAVREAYSGAGSYQITF

SEQ ID NO: 408586 - protein, 15 aa, Homo sapiens
  CDR3 for beta chain variable domain of TCR clone 204293 (TRBV5-1, TRBJ2-1)
CASSPPRAPYNEQFF

SEQ ID NO: 408587 - protein, 15 aa, Homo sapiens
  CDR3 for alpha chain variable domain of TCR clone 204294 (TRAV17, TRAJ18)
CATADRGSTLGRLYF

SEQ ID NO: 408588 - protein, 13 aa, Homo sapiens
  CDR3 for beta chain variable domain of TCR clone 204294 (TRBV19, TRBJ2-7)
CASRKAGGSEQYF

SEQ ID NO: 408589 - protein, 10 aa, Homo sapiens
  CDR3 for alpha chain variable domain of TCR clone 204295 (TRAV1-2, TRAJ20)
CVPNDYKLSF

SEQ ID NO: 408590 - protein, 14 aa, Homo sapiens
  CDR3 for beta chain variable domain of TCR clone 204295 (TRBV12-5, TRBJ2-5)
CASGSRTHQETQYF

SEQ ID NO: 408591 - protein, 15 aa, Homo sapiens
  CDR3 for alpha chain variable domain of TCR clone 204296 (TRAV13-2, TRAJ58)
CVTAQKETSGSRLTF

SEQ ID NO: 408592 - protein, 13 aa, Homo sapiens
  CDR3 for beta chain variable domain of TCR clone 204296 (TRBV28, TRBJ2-5)
CASSFAGGETQYF

SEQ ID NO: 408593 - protein, 15 aa, Homo sapiens
  CDR3 for alpha chain variable domain of TCR clone 204297 (TRAV14/DV4, TRAJ9)
CAMREGNTGGFTTIF

SEQ ID NO: 408594 - protein, 16 aa, Homo sapiens
  CDR3 for beta chain variable domain of TCR clone 204297 (TRBV13, TRBJ2-5)
CASSRGAGIRQETQYF

SEQ ID NO: 408595 - protein, 14 aa, Homo sapiens
  CDR3 for alpha chain variable domain of TCR clone 204298 (TRAV8-3, TRAJ12)
CAVGARDSSYKLIF

SEQ ID NO: 408596 - protein, 17 aa, Homo sapiens
  CDR3 for beta chain variable domain of TCR clone 204298 (TRBV20-1, TRBJ2-1)
CSASSSGLAGSYNEQFF

SEQ ID NO: 408597 - protein, 14 aa, Homo sapiens
  CDR3 for alpha chain variable domain of TCR clone 204299 (TRAV2, TRAJ37)
CAVDFTSNTGKVIF

SEQ ID NO: 408598 - protein, 15 aa, Homo sapiens
  CDR3 for beta chain variable domain of TCR clone 204299 (TRBV20-1, TRBJ1-1)
CSASRGVTGNTEAFF

SEQ ID NO: 408599 - protein, 14 aa, Homo sapiens
  CDR3 for alpha chain variable domain of TCR clone 204300 (TRAV26-1, TRAJ34)
CIVRVAGNTDKLIF

SEQ ID NO: 408600 - protein, 16 aa, Homo sapiens
  CDR3 for beta chain variable domain of TCR clone 204300 (TRBV12-5, TRBJ2-5)
CASGPRTSGKQETQHF

SEQ ID NO: 408601 - protein, 15 aa, Homo sapiens
  CDR3 for alpha chain variable domain of TCR clone 204301 (TRAV12-1, TRAJ10)
CVVNKLTGGGNKLTF

SEQ ID NO: 408602 - protein, 17 aa, Homo sapiens
  CDR3 for beta chain variable domain of TCR clone 204301 (TRBV5-1, TRBJ1-6)
CASSPSLQGYDNSPLHF

SEQ ID NO: 408603 - protein, 12 aa, Homo sapiens
  CDR3 for alpha chain variable domain of TCR clone 204302 (TRAV8-3, TRAJ26)
CAVVAGGQNFVF

SEQ ID NO: 408604 - protein, 14 aa, Homo sapiens
  CDR3 for beta chain variable domain of TCR clone 204302 (TRBV5-1, TRBJ1-5)
CASSLGQGAQPQHF

SEQ ID NO: 408605 - protein, 15 aa, Homo sapiens
  CDR3 for alpha chain variable domain of TCR clone 204303 (TRAV14/DV4, TRAJ10)
CAMRELTGGGNKLTF

SEQ ID NO: 408606 - protein, 18 aa, Homo sapiens
  CDR3 for beta chain variable domain of TCR clone 204303 (TRBV7-9, TRBJ2-7)
CASSLATSGSRTWYEQYF

SEQ ID NO: 408607 - protein, 14 aa, Homo sapiens
  CDR3 for alpha chain variable domain of TCR clone 204304 (TRAV12-2, TRAJ13)
CAVKKTGGYQKVTF

SEQ ID NO: 408608 - protein, 15 aa, Homo sapiens
  CDR3 for beta chain variable domain of TCR clone 204304 (TRBV7-2, TRBJ2-1)
CASSLVAGGHNEQFF

SEQ ID NO: 408609 - protein, 11 aa, Homo sapiens
  CDR3 for alpha chain variable domain of TCR clone 204305 (TRAV2, TRAJ33)
CTVDSNYQLIW

SEQ ID NO: 408610 - protein, 15 aa, Homo sapiens
  CDR3 for beta chain variable domain of TCR clone 204305 (TRBV19, TRBJ1-2)
CASSVGQVLNYGYTF

SEQ ID NO: 408611 - protein, 13 aa, Homo sapiens
  CDR3 for alpha chain variable domain of TCR clone 204306 (TRAV12-2, TRAJ50)
CAVIVTSYDKVIF

SEQ ID NO: 408612 - protein, 17 aa, Homo sapiens
  CDR3 for beta chain variable domain of TCR clone 204306 (TRBV11-2, TRBJ2-1)
CASSLYPPGVEYNEQFF

SEQ ID NO: 408613 - protein, 15 aa, Homo sapiens
  CDR3 for alpha chain variable domain of TCR clone 204307 (TRAV13-2, TRAJ45)
CAENNSGGGADGLTF

SEQ ID NO: 408614 - protein, 13 aa, Homo sapiens
  CDR3 for beta chain variable domain of TCR clone 204307 (TRBV25-1, TRBJ2-6)
CASRGPGANDLTF

SEQ ID NO: 408615 - protein, 13 aa, Homo sapiens
  CDR3 for alpha chain variable domain of TCR clone 204308 (TRAV8-3, TRAJ43)
CAVVPYNNNDMRS

SEQ ID NO: 408616 - protein, 16 aa, Homo sapiens
  CDR3 for beta chain variable domain of TCR clone 204308 (TRBV7-2, TRBJ2-5)
CASSPFPTGGEETQYF

SEQ ID NO: 408617 - protein, 14 aa, Homo sapiens
  CDR3 for alpha chain variable domain of TCR clone 204309 (TRAV13-2, TRAJ43)
CAEIPTYNNNEIRL

SEQ ID NO: 408618 - protein, 15 aa, Homo sapiens
  CDR3 for beta chain variable domain of TCR clone 204309 (TRBV7-9, TRBJ2-2)
CASGPLDTFPGELFF

SEQ ID NO: 408619 - protein, 12 aa, Homo sapiens
  CDR3 for alpha chain variable domain of TCR clone 204310 (TRAV13-2, TRAJ23)
CAERYRGGKLIF

SEQ ID NO: 408620 - protein, 16 aa, Homo sapiens
  CDR3 for beta chain variable domain of TCR clone 204310 (TRBV7-9, TRBJ1-2)
CASSLGFSSGEDGYTF

SEQ ID NO: 408621 - protein, 15 aa, Homo sapiens
  CDR3 for alpha chain variable domain of TCR clone 204311 (TRAV8-3, TRAJ41)
CAVGSNSNSGYSLNF

SEQ ID NO: 408622 - protein, 17 aa, Homo sapiens
  CDR3 for beta chain variable domain of TCR clone 204311 (TRBV25-1, TRBJ2-1)
CASSAYGQGRGVYEQFF

SEQ ID NO: 408623 - protein, 14 aa, Homo sapiens
  CDR3 for alpha chain variable domain of TCR clone 204312 (TRAV1-1, TRAJ28)
CAAPSGAGSYQLTF

SEQ ID NO: 408624 - protein, 15 aa, Homo sapiens
  CDR3 for beta chain variable domain of TCR clone 204312 (TRBV7-2, TRBJ1-2)
CACSLVSGGDYGYTF

SEQ ID NO: 408625 - protein, 19 aa, Homo sapiens
  CDR3 for alpha chain variable domain of TCR clone 204313 (TRAV3, TRAJ6)
CAARDGPRQEEATYLHLEE

SEQ ID NO: 408626 - protein, 20 aa, Homo sapiens
  CDR3 for beta chain variable domain of TCR clone 204313 (TRBV28, TRBJ2-1)
CASTPIGRSPGLAGGNEQFF

SEQ ID NO: 408627 - protein, 14 aa, Homo sapiens
  CDR3 for alpha chain variable domain of TCR clone 204314 (TRAV13-1, TRAJ20)
CAARPGSNYYKLSF

SEQ ID NO: 408628 - protein, 14 aa, Homo sapiens
  CDR3 for beta chain variable domain of TCR clone 204314 (TRBV12-4, TRBJ1-1)
CASSLGTGGTEAFF

SEQ ID NO: 408629 - protein, 14 aa, Homo sapiens
  CDR3 for alpha chain variable domain of TCR clone 204315 (TRAV21, TRAJ35)
CAVMPIGFGNVLHG

SEQ ID NO: 408630 - protein, 12 aa, Homo sapiens
  CDR3 for beta chain variable domain of TCR clone 204315 (TRBV7-9, TRBJ2-7)
CASSIKREEQYF

SEQ ID NO: 408631 - protein, 14 aa, Homo sapiens
  CDR3 for alpha chain variable domain of TCR clone 204316 (TRAV12-3, TRAJ6)
CAMSATGRSYIPTF

SEQ ID NO: 408632 - protein, 16 aa, Homo sapiens
  CDR3 for beta chain variable domain of TCR clone 204316 (TRBV4-2, TRBJ2-1)
CASSPRAGQGANEQFF

SEQ ID NO: 408633 - protein, 12 aa, Homo sapiens
  CDR3 for alpha chain variable domain of TCR clone 204317 (TRAV13-1, TRAJ21)
CAAKEGFNKFYF

SEQ ID NO: 408634 - protein, 12 aa, Homo sapiens
  CDR3 for beta chain variable domain of TCR clone 204317 (TRBV7-9, TRBJ2-7)
CASSIKREEQYF

SEQ ID NO: 408635 - protein, 14 aa, Homo sapiens
  CDR3 for alpha chain variable domain of TCR clone 204318 (TRAV13-1, TRAJ35)
CAASKGVFGNVLHC

SEQ ID NO: 408636 - protein, 13 aa, Homo sapiens
  CDR3 for beta chain variable domain of TCR clone 204318 (TRBV7-3, TRBJ1-1)
CASSQDWGAEAFF

SEQ ID NO: 408637 - protein, 11 aa, Homo sapiens
  CDR3 for alpha chain variable domain of TCR clone 204319 (TRAV12-3, TRAJ27)
CAMANAVKSTF

SEQ ID NO: 408638 - protein, 13 aa, Homo sapiens
  CDR3 for beta chain variable domain of TCR clone 204319 (TRBV20-1, TRBJ1-1)
CSARVGGNTEAFF

SEQ ID NO: 408639 - protein, 14 aa, Homo sapiens
  CDR3 for alpha chain variable domain of TCR clone 204320 (TRAV26-1, TRAJ34)
CIVRVEYNTDKLIF

SEQ ID NO: 408640 - protein, 15 aa, Homo sapiens
  CDR3 for beta chain variable domain of TCR clone 204320 (TRBV20-1, TRBJ2-7)
CSARVPAAYFYEQYF

SEQ ID NO: 408641 - protein, 13 aa, Homo sapiens
  CDR3 for alpha chain variable domain of TCR clone 204321 (TRAV3, TRAJ20)
CAVRSLNDYKLSF

SEQ ID NO: 408642 - protein, 17 aa, Homo sapiens
  CDR3 for beta chain variable domain of TCR clone 204321 (TRBV24-1, TRBJ2-1)
CATSDASTSGTYNEQFF

SEQ ID NO: 408643 - protein, 13 aa, Homo sapiens
  CDR3 for alpha chain variable domain of TCR clone 204322 (TRAV8-3, TRAJ28)
CAVGAVGSYQLTF

SEQ ID NO: 408644 - protein, 22 aa, Homo sapiens
  CDR3 for beta chain variable domain of TCR clone 204322 (TRBV29-1, TRBJ2-5)
TVSNMSPENSSIYLCSAGTQYF

SEQ ID NO: 408645 - protein, 15 aa, Homo sapiens
  CDR3 for alpha chain variable domain of TCR clone 204323 (TRAV26-1, TRAJ53)
CIVRVEGGSNYKLTF

SEQ ID NO: 408646 - protein, 14 aa, Homo sapiens
  CDR3 for beta chain variable domain of TCR clone 204323 (TRBV4-3, TRBJ2-1)
FASSQDRWRGEQFF

SEQ ID NO: 408647 - protein, 14 aa, Homo sapiens
  CDR3 for alpha chain variable domain of TCR clone 204324 (TRAV12-1, TRAJ30)
CVVNIGNRDDKIIF

SEQ ID NO: 408648 - protein, 14 aa, Homo sapiens
  CDR3 for beta chain variable domain of TCR clone 204324 (TRBV7-9, TRBJ2-5)
CASSPRPSGETQCF

SEQ ID NO: 408649 - protein, 17 aa, Homo sapiens
  CDR3 for alpha chain variable domain of TCR clone 204325 (TRAV2, TRAJ36)
CAVEDRGNWGKQPVLWD

SEQ ID NO: 408650 - protein, 14 aa, Homo sapiens
  CDR3 for beta chain variable domain of TCR clone 204325 (TRBV7-9, TRBJ2-5)
CASSLDTAQETQYF

SEQ ID NO: 408651 - protein, 14 aa, Homo sapiens
  CDR3 for alpha chain variable domain of TCR clone 204326 (TRAV9-2, TRAJ39)
CALYIYNAGNMLTF

SEQ ID NO: 408652 - protein, 12 aa, Homo sapiens
  CDR3 for beta chain variable domain of TCR clone 204326 (TRBV6-3, TRBJ2-1)
CASSGSYNEQFF

SEQ ID NO: 408653 - protein, 14 aa, Homo sapiens
  CDR3 for alpha chain variable domain of TCR clone 204327 (TRAV29/DV5, TRAJ36)
CAARRKTGANNLFF

SEQ ID NO: 408654 - protein, 17 aa, Homo sapiens
  CDR3 for beta chain variable domain of TCR clone 204327 (TRBV20-1, TRBJ2-3)
CSASLLGRGGSADTQYF

SEQ ID NO: 408655 - protein, 19 aa, Homo sapiens
  CDR3 for alpha chain variable domain of TCR clone 204328 (TRAV3, TRAJ6)
CAVRDRNPSRSGGSYIPTF

SEQ ID NO: 408656 - protein, 15 aa, Homo sapiens
  CDR3 for beta chain variable domain of TCR clone 204328 (TRBV18, TRBJ2-7)
CASSPTCMDSYEQYF

SEQ ID NO: 408657 - protein, 13 aa, Homo sapiens
  CDR3 for alpha chain variable domain of TCR clone 204329 (TRAV8-3, TRAJ6)
CAARRGGSYIATF

SEQ ID NO: 408658 - protein, 15 aa, Homo sapiens
  CDR3 for beta chain variable domain of TCR clone 204329 (TRBV4-1, TRBJ2-3)
CASSNLAGGRDTQYF

SEQ ID NO: 408659 - protein, 14 aa, Homo sapiens
  CDR3 for alpha chain variable domain of TCR clone 204330 (TRAV26-1, TRAJ38)
CIADNAGNNRKLIW

SEQ ID NO: 408660 - protein, 16 aa, Homo sapiens
  CDR3 for beta chain variable domain of TCR clone 204330 (TRBV7-2, TRBJ2-7)
CASSLVMGVGSYEQYF

SEQ ID NO: 408661 - protein, 15 aa, Homo sapiens
  CDR3 for alpha chain variable domain of TCR clone 204331 (TRAV8-6, TRAJ21)
CAVSDRGGNFNKFYF

SEQ ID NO: 408662 - protein, 18 aa, Homo sapiens
  CDR3 for beta chain variable domain of TCR clone 204331 (TRBV12-4, TRBJ2-2)
CASSLVAGTRGRTGELFF

SEQ ID NO: 408663 - protein, 11 aa, Homo sapiens
  CDR3 for alpha chain variable domain of TCR clone 204332 (TRAV17, TRAJ43)
CATPRSNDMRF

SEQ ID NO: 408664 - protein, 13 aa, Homo sapiens
  CDR3 for beta chain variable domain of TCR clone 204332 (TRBV4-1, TRBJ2-1)
CASSQAGGDEQFF

SEQ ID NO: 408665 - protein, 15 aa, Homo sapiens
  CDR3 for alpha chain variable domain of TCR clone 204333 (TRAV17, TRAJ57)
CATGPSQGGSEQLVF

SEQ ID NO: 408666 - protein, 17 aa, Homo sapiens
  CDR3 for beta chain variable domain of TCR clone 204333 (TRBV11-2, TRBJ2-1)
CASSLYPPGVEYNEQFF

SEQ ID NO: 408667 - protein, 11 aa, Homo sapiens
  CDR3 for alpha chain variable domain of TCR clone 204334 (TRAV17, TRAJ9)
CGFTGGFKTIF

SEQ ID NO: 408668 - protein, 14 aa, Homo sapiens
  CDR3 for beta chain variable domain of TCR clone 204334 (TRBV7-9, TRBJ2-2)
CVSSLVQDTGELFF

SEQ ID NO: 408669 - protein, 13 aa, Homo sapiens
  CDR3 for alpha chain variable domain of TCR clone 204335 (TRAV12-1, TRAJ6)
CVVFPGGSYIPTF

SEQ ID NO: 408670 - protein, 17 aa, Homo sapiens
  CDR3 for beta chain variable domain of TCR clone 204335 (TRBV25-1, TRBJ2-1)
CASSAYGQGRGVYEQFF

SEQ ID NO: 408671 - protein, 13 aa, Homo sapiens
  CDR3 for alpha chain variable domain of TCR clone 204336 (TRAV29/DV5, TRAJ31)
CAASRNNNARLMF

SEQ ID NO: 408672 - protein, 15 aa, Homo sapiens
  CDR3 for beta chain variable domain of TCR clone 204336 (TRBV7-9, TRBJ1-1)
CASSRTGSRAAEAFF

SEQ ID NO: 408673 - protein, 10 aa, Homo sapiens
  CDR3 for alpha chain variable domain of TCR clone 204337 (TRAV30, TRAJ48)
CGIGNEKLTF

SEQ ID NO: 408674 - protein, 14 aa, Homo sapiens
  CDR3 for beta chain variable domain of TCR clone 204337 (TRBV7-3, TRBJ2-1)
CASSLAGGTNEQFF

SEQ ID NO: 408675 - protein, 14 aa, Homo sapiens
  CDR3 for alpha chain variable domain of TCR clone 204338 (TRAV12-1, TRAJ15)
CLPPANQAGTALIF

SEQ ID NO: 408676 - protein, 13 aa, Homo sapiens
  CDR3 for beta chain variable domain of TCR clone 204338 (TRBV7-2, TRBJ1-1)
CASNLKGAKVAFF

SEQ ID NO: 408677 - protein, 15 aa, Homo sapiens
  CDR3 for alpha chain variable domain of TCR clone 204339 (TRAV25, TRAJ23)
CALAPNYNQGGKLIF

SEQ ID NO: 408678 - protein, 17 aa, Homo sapiens
  CDR3 for beta chain variable domain of TCR clone 204339 (TRBV7-8, TRBJ2-6)
CASSAGTGGAGANVLTF

SEQ ID NO: 408679 - protein, 11 aa, Homo sapiens
  CDR3 for alpha chain variable domain of TCR clone 204340 (TRAV2, TRAJ31)
CAAGPPARLMF

SEQ ID NO: 408680 - protein, 12 aa, Homo sapiens
  CDR3 for beta chain variable domain of TCR clone 204340 (TRBV7-8, TRBJ2-7)
CASSLGDREQCF

SEQ ID NO: 408681 - protein, 14 aa, Homo sapiens
  CDR3 for alpha chain variable domain of TCR clone 204341 (TRAV16, TRAJ39)
CALSKNNAGNMLTF

SEQ ID NO: 408682 - protein, 19 aa, Homo sapiens
  CDR3 for beta chain variable domain of TCR clone 204341 (TRBV6-6, TRBJ2-1)
AAPSQTSVYFCDSSYEQFF

SEQ ID NO: 408683 - protein, 14 aa, Homo sapiens
  CDR3 for alpha chain variable domain of TCR clone 204342 (TRAV12-3, TRAJ10)
SHLPLTGGGNKLTF

SEQ ID NO: 408684 - protein, 18 aa, Homo sapiens
  CDR3 for beta chain variable domain of TCR clone 204342 (TRBV4-1, TRBJ1-4)
CASSQDLRRGGENCFLAV

SEQ ID NO: 408685 - protein, 13 aa, Homo sapiens
  CDR3 for alpha chain variable domain of TCR clone 204343 (TRAV36/DV7, TRAJ54)
CAVCTQGAQKLVF

SEQ ID NO: 408686 - protein, 13 aa, Homo sapiens
  CDR3 for beta chain variable domain of TCR clone 204343 (TRBV7-6, TRBJ2-7)
CASSLGHTDEQYF

SEQ ID NO: 408687 - protein, 15 aa, Homo sapiens
  CDR3 for alpha chain variable domain of TCR clone 204344 (TRAV16, TRAJ12)
CSKWPLRDSSYKLIF

SEQ ID NO: 408688 - protein, 11 aa, Homo sapiens
  CDR3 for beta chain variable domain of TCR clone 204344 (TRBV29-1, TRBJ2-5)
CSEDRTGTQYF

SEQ ID NO: 408689 - protein, 16 aa, Homo sapiens
  CDR3 for alpha chain variable domain of TCR clone 204345 (TRAV8-3, TRAJ8)
CAVPRDGNTGFQKLVF

SEQ ID NO: 408690 - protein, 15 aa, Homo sapiens
  CDR3 for beta chain variable domain of TCR clone 204345 (TRBV6-1, TRBJ2-6)
CARSSRPSGANVLTF

SEQ ID NO: 408691 - protein, 13 aa, Homo sapiens
  CDR3 for alpha chain variable domain of TCR clone 204346 (TRAV13-1, TRAJ43)
CAVSLSNNNDIRF

SEQ ID NO: 408692 - protein, 15 aa, Homo sapiens
  CDR3 for beta chain variable domain of TCR clone 204346 (TRBV5-1, TRBJ2-1)
CASSQAGYWWNEQFF

SEQ ID NO: 408693 - protein, 13 aa, Homo sapiens
  CDR3 for alpha chain variable domain of TCR clone 204347 (TRAV27, TRAJ49)
CAPRPYTGNQFYF

SEQ ID NO: 408694 - protein, 16 aa, Homo sapiens
  CDR3 for beta chain variable domain of TCR clone 204347 (TRBV4-1, TRBJ1-2)
CASSQDAGQVLYSYTF

SEQ ID NO: 408695 - protein, 12 aa, Homo sapiens
  CDR3 for alpha chain variable domain of TCR clone 204348 (TRAV21, TRAJ31)
CAGSPARGRLMF

SEQ ID NO: 408696 - protein, 14 aa, Homo sapiens
  CDR3 for beta chain variable domain of TCR clone 204348 (TRBV28, TRBJ2-7)
CASSLLRISYEQYF

SEQ ID NO: 408697 - protein, 13 aa, Homo sapiens
  CDR3 for alpha chain variable domain of TCR clone 204349 (TRAV6, TRAJ20)
CALAVSNDYKLIF

SEQ ID NO: 408698 - protein, 16 aa, Homo sapiens
  CDR3 for beta chain variable domain of TCR clone 204349 (TRBV7-9, TRBJ2-1)
CASSDVAGGSYNEQFF

SEQ ID NO: 408699 - protein, 12 aa, Homo sapiens
  CDR3 for alpha chain variable domain of TCR clone 204350 (TRAV21, TRAJ13)
PGPSGGYQKVTF

SEQ ID NO: 408700 - protein, 15 aa, Homo sapiens
  CDR3 for beta chain variable domain of TCR clone 204350 (TRBV6-1, TRBJ1-1)
CASSEYPRMNTEAFV

SEQ ID NO: 408701 - protein, 14 aa, Homo sapiens
  CDR3 for alpha chain variable domain of TCR clone 204351 (TRAV1-2, TRAJ16)
CAFNRFSDGQKLLF

SEQ ID NO: 408702 - protein, 15 aa, Homo sapiens
  CDR3 for beta chain variable domain of TCR clone 204351 (TRBV27, TRBJ2-1)
CASSNGGGSSNEQFF

SEQ ID NO: 408703 - protein, 15 aa, Homo sapiens
  CDR3 for alpha chain variable domain of TCR clone 204352 (TRAV3, TRAJ17)
CAVSLKEAAGNKLTF

SEQ ID NO: 408704 - protein, 12 aa, Homo sapiens
  CDR3 for beta chain variable domain of TCR clone 204352 (TRBV7-9, TRBJ1-6)
CASSLMTSPLHF

SEQ ID NO: 408705 - protein, 17 aa, Homo sapiens
  CDR3 for alpha chain variable domain of TCR clone 204353 (TRAV26-1, TRAJ53)
CIVRVDDSGCSNYKLTF

SEQ ID NO: 408706 - protein, 13 aa, Homo sapiens
  CDR3 for beta chain variable domain of TCR clone 204353 (TRBV12-4, TRBJ1-1)
CASSPGTGFEAFF

SEQ ID NO: 408707 - protein, 16 aa, Homo sapiens
  CDR3 for alpha chain variable domain of TCR clone 204354 (TRAV12-3, TRAJ18)
CAMRGSRGSTLGRLYF

SEQ ID NO: 408708 - protein, 19 aa, Homo sapiens
  CDR3 for beta chain variable domain of TCR clone 204354 (TRBV6-3, TRBJ2-7)
CASSYRTGLAGGVSSEQYF

SEQ ID NO: 408709 - protein, 12 aa, Homo sapiens
  CDR3 for alpha chain variable domain of TCR clone 204355 (TRAV20, TRAJ56)
FAVTGSNSKLTF

SEQ ID NO: 408710 - protein, 14 aa, Homo sapiens
  CDR3 for beta chain variable domain of TCR clone 204355 (TRBV20-1, TRBJ2-5)
CSALVPGYQETQYF

SEQ ID NO: 408711 - protein, 16 aa, Homo sapiens
  CDR3 for alpha chain variable domain of TCR clone 204356 (TRAV26-1, TRAJ38)
CIVRVSGAGNNRKLIW

SEQ ID NO: 408712 - protein, 13 aa, Homo sapiens
  CDR3 for beta chain variable domain of TCR clone 204356 (TRBV14, TRBJ1-2)
CASSQDRRRGYAF

SEQ ID NO: 408713 - protein, 18 aa, Homo sapiens
  CDR3 for alpha chain variable domain of TCR clone 204357 (TRAV26-2, TRAJ54)
CILRDVEVGIQGAQKLEF

SEQ ID NO: 408714 - protein, 14 aa, Homo sapiens
  CDR3 for beta chain variable domain of TCR clone 204357 (TRBV7-2, TRBJ2-7)
CASSPKTSFYEQYF

SEQ ID NO: 408715 - protein, 14 aa, Homo sapiens
  CDR3 for alpha chain variable domain of TCR clone 204358 (TRAV9-2, TRAJ39)
CALYIYNAGNMLTF

SEQ ID NO: 408716 - protein, 16 aa, Homo sapiens
  CDR3 for beta chain variable domain of TCR clone 204358 (TRBV2, TRBJ2-1)
CASSVGGSLSYDEQFF

SEQ ID NO: 408717 - protein, 15 aa, Homo sapiens
  CDR3 for alpha chain variable domain of TCR clone 204359 (TRAV12-1, TRAJ44)
CVVFVNTGTASKLTF

SEQ ID NO: 408718 - protein, 17 aa, Homo sapiens
  CDR3 for beta chain variable domain of TCR clone 204359 (TRBV7-8, TRBJ2-6)
CDSSAGTGGAGANVLTF

SEQ ID NO: 408719 - protein, 16 aa, Homo sapiens
  CDR3 for alpha chain variable domain of TCR clone 204360 (TRAV21, TRAJ45)
CSVSWWSGGGADVLTF

SEQ ID NO: 408720 - protein, 14 aa, Homo sapiens
  CDR3 for beta chain variable domain of TCR clone 204360 (TRBV4-2, TRBJ1-2)
CASSPGGSNYGYTF

SEQ ID NO: 408721 - protein, 17 aa, Homo sapiens
  CDR3 for alpha chain variable domain of TCR clone 204361 (TRAV2, TRAJ22)
ILQVREADAAEQRQLTF

SEQ ID NO: 408722 - protein, 16 aa, Homo sapiens
  CDR3 for beta chain variable domain of TCR clone 204361 (TRBV2, TRBJ2-5)
CASSETQGDGEETQYF

SEQ ID NO: 408723 - protein, 15 aa, Homo sapiens
  CDR3 for alpha chain variable domain of TCR clone 204362 (TRAV12-2, TRAJ57)
CAVSRGQGGSEKLVF

SEQ ID NO: 408724 - protein, 14 aa, Homo sapiens
  CDR3 for beta chain variable domain of TCR clone 204362 (TRBV20-1, TRBJ2-1)
CSAHPGLPYNEQYF

SEQ ID NO: 408725 - protein, 13 aa, Homo sapiens
  CDR3 for alpha chain variable domain of TCR clone 204363 (TRAV27, TRAJ45)
CRSSGGGADGLTF

SEQ ID NO: 408726 - protein, 17 aa, Homo sapiens
  CDR3 for beta chain variable domain of TCR clone 204363 (TRBV11-2, TRBJ2-1)
CASSLYPPGVEYNKQFF

SEQ ID NO: 408727 - protein, 13 aa, Homo sapiens
  CDR3 for alpha chain variable domain of TCR clone 204364 (TRAV3, TRAJ20)
CAVRDTPRYKLSF

SEQ ID NO: 408728 - protein, 16 aa, Homo sapiens
  CDR3 for beta chain variable domain of TCR clone 204364 (TRBV20-1, TRBJ2-7)
CSARAPGLARSYEQYF

SEQ ID NO: 408729 - protein, 15 aa, Homo sapiens
  CDR3 for alpha chain variable domain of TCR clone 204365 (TRAV12-1, TRAJ41)
CVVNGASNSGYALNF

SEQ ID NO: 408730 - protein, 15 aa, Homo sapiens
  CDR3 for beta chain variable domain of TCR clone 204365 (TRBV7-2, TRBJ1-5)
CASSSTGVDKQPQHF

SEQ ID NO: 408731 - protein, 12 aa, Homo sapiens
  CDR3 for alpha chain variable domain of TCR clone 204366 (TRAV1-1, TRAJ39)
CAVPVVGNMLTF

SEQ ID NO: 408732 - protein, 11 aa, Homo sapiens
  CDR3 for beta chain variable domain of TCR clone 204366 (TRBV6-1, TRBJ2-1)
CASISSNEQFF

SEQ ID NO: 408733 - protein, 14 aa, Homo sapiens
  CDR3 for alpha chain variable domain of TCR clone 204367 (TRAV36/DV7, TRAJ13)
WGSGENGGYQKVPF

SEQ ID NO: 408734 - protein, 15 aa, Homo sapiens
  CDR3 for beta chain variable domain of TCR clone 204367 (TRBV19, TRBJ2-1)
CASSTGTSSYNEQFF

SEQ ID NO: 408735 - protein, 13 aa, Homo sapiens
  CDR3 for alpha chain variable domain of TCR clone 204368 (TRAV27, TRAJ8)
CAGGPTGSQKRVF

SEQ ID NO: 408736 - protein, 15 aa, Homo sapiens
  CDR3 for beta chain variable domain of TCR clone 204368 (TRBV6-1, TRBJ2-7)
CASSESMGDFYEQYF

SEQ ID NO: 408737 - protein, 11 aa, Homo sapiens
  CDR3 for alpha chain variable domain of TCR clone 204369 (TRAV12-3, TRAJ17)
CAMTLRQQANF

SEQ ID NO: 408738 - protein, 13 aa, Homo sapiens
  CDR3 for beta chain variable domain of TCR clone 204369 (TRBV7-3, TRBJ1-1)
CASSQDWGAEAFF

SEQ ID NO: 408739 - protein, 10 aa, Homo sapiens
  CDR3 for alpha chain variable domain of TCR clone 204370 (TRAV38-2/DV8, TRAJ40)
CASGTYKYIF

SEQ ID NO: 408740 - protein, 14 aa, Homo sapiens
  CDR3 for beta chain variable domain of TCR clone 204370 (TRBV7-9, TRBJ2-1)
CASSPRDSLYQQFF

SEQ ID NO: 408741 - protein, 14 aa, Homo sapiens
  CDR3 for alpha chain variable domain of TCR clone 204371 (TRAV38-1, TRAJ35)
CAFLTIGFGNMLHC

SEQ ID NO: 408742 - protein, 17 aa, Homo sapiens
  CDR3 for beta chain variable domain of TCR clone 204371 (TRBV28, TRBJ1-1)
CASSGDLRTESNTEAFF

SEQ ID NO: 408743 - protein, 11 aa, Homo sapiens
  CDR3 for alpha chain variable domain of TCR clone 204372 (TRAV3, TRAJ21)
CAVGNFNKFYF

SEQ ID NO: 408744 - protein, 14 aa, Homo sapiens
  CDR3 for beta chain variable domain of TCR clone 204372 (TRBV5-4, TRBJ2-5)
CASSPPRGQETQYF

SEQ ID NO: 408745 - protein, 15 aa, Homo sapiens
  CDR3 for alpha chain variable domain of TCR clone 204373 (TRAV12-3, TRAJ27)
CAMRAYNTNAGKSTF

SEQ ID NO: 408746 - protein, 14 aa, Homo sapiens
  CDR3 for beta chain variable domain of TCR clone 204373 (TRBV4-2, TRBJ2-3)
CASSQERGTDTQYF

SEQ ID NO: 408747 - protein, 14 aa, Homo sapiens
  CDR3 for alpha chain variable domain of TCR clone 204374 (TRAV13-1, TRAJ44)
CAAKATGTASKLTF

SEQ ID NO: 408748 - protein, 15 aa, Homo sapiens
  CDR3 for beta chain variable domain of TCR clone 204374 (TRBV5-1, TRBJ2-5)
CASSFKGGDQETQYF

SEQ ID NO: 408749 - protein, 23 aa, Homo sapiens
  CDR3 for alpha chain variable domain of TCR clone 204375 (TRAV26-1, TRAJ38)
CIADNAGNNHIQNPDPAVYQLRD

SEQ ID NO: 408750 - protein, 13 aa, Homo sapiens
  CDR3 for beta chain variable domain of TCR clone 204375 (TRBV10-3, TRBJ2-7)
CASKLAVSYEQYF

SEQ ID NO: 408751 - protein, 15 aa, Homo sapiens
  CDR3 for alpha chain variable domain of TCR clone 204376 (TRAV23/DV6, TRAJ18)
CAARYRGSTLGRLYF

SEQ ID NO: 408752 - protein, 16 aa, Homo sapiens
  CDR3 for beta chain variable domain of TCR clone 204376 (TRBV27, TRBJ2-2)
CASSFRGLVRTGELFF

SEQ ID NO: 408753 - protein, 12 aa, Homo sapiens
  CDR3 for alpha chain variable domain of TCR clone 204377 (TRAV23/DV6, TRAJ30)
CAASKGDDKIIF

SEQ ID NO: 408754 - protein, 11 aa, Homo sapiens
  CDR3 for beta chain variable domain of TCR clone 204377 (TRBV11-2, TRBJ2-2)
CASSLPGELFF

SEQ ID NO: 408755 - protein, 12 aa, Homo sapiens
  CDR3 for alpha chain variable domain of TCR clone 204378 (TRAV3, TRAJ27)
CAVRDGAGKSTF

SEQ ID NO: 408756 - protein, 14 aa, Homo sapiens
  CDR3 for beta chain variable domain of TCR clone 204378 (TRBV7-2, TRBJ2-7)
CASSPKTSFYEQYF

SEQ ID NO: 408757 - protein, 11 aa, Homo sapiens
  CDR3 for alpha chain variable domain of TCR clone 204379 (TRAV23/DV6, TRAJ4)
APTGGYNKLVF

SEQ ID NO: 408758 - protein, 13 aa, Homo sapiens
  CDR3 for beta chain variable domain of TCR clone 204379 (TRBV19, TRBJ1-2)
CASSVPGQDGYTF

SEQ ID NO: 408759 - protein, 12 aa, Homo sapiens
  CDR3 for alpha chain variable domain of TCR clone 204380 (TRAV12-3, TRAJ17)
CAVTPTGNKLTF

SEQ ID NO: 408760 - protein, 15 aa, Homo sapiens
  CDR3 for beta chain variable domain of TCR clone 204380 (TRBV20-1, TRBJ2-7)
CSAESGTSGAYEQYF

SEQ ID NO: 408761 - protein, 13 aa, Homo sapiens
  CDR3 for alpha chain variable domain of TCR clone 204381 (TRAV26-1, TRAJ30)
CIVRVESNAKIIF

SEQ ID NO: 408762 - protein, 17 aa, Homo sapiens
  CDR3 for beta chain variable domain of TCR clone 204381 (TRBV13, TRBJ2-3)
CASSLSRVAGGRNTQYF

SEQ ID NO: 408763 - protein, 17 aa, Homo sapiens
  CDR3 for alpha chain variable domain of TCR clone 204382 (TRAV3, TRAJ6)
FAVRDGPRAGGSYIPTF

SEQ ID NO: 408764 - protein, 13 aa, Homo sapiens
  CDR3 for beta chain variable domain of TCR clone 204382 (TRBV15, TRBJ2-7)
CATSTTGHYEQYF

SEQ ID NO: 408765 - protein, 12 aa, Homo sapiens
  CDR3 for alpha chain variable domain of TCR clone 204383 (TRAV12-2, TRAJ8)
CAVNTGFQKLVF

SEQ ID NO: 408766 - protein, 18 aa, Homo sapiens
  CDR3 for beta chain variable domain of TCR clone 204383 (TRBV7-2, TRBJ2-3)
CASSLKREGSGITDTQYF

SEQ ID NO: 408767 - protein, 11 aa, Homo sapiens
  CDR3 for alpha chain variable domain of TCR clone 204384 (TRAV3, TRAJ21)
CAVGNFNKFYF

SEQ ID NO: 408768 - protein, 14 aa, Homo sapiens
  CDR3 for beta chain variable domain of TCR clone 204384 (TRBV5-7, TRBJ2-1)
CASSSVANYNEQFF

SEQ ID NO: 408769 - protein, 17 aa, Homo sapiens
  CDR3 for alpha chain variable domain of TCR clone 204385 (TRAV3, TRAJ6)
CAVRDGPRAGGSYIPTF

SEQ ID NO: 408770 - protein, 17 aa, Homo sapiens
  CDR3 for beta chain variable domain of TCR clone 204385 (TRBV20-1, TRBJ1-5)
CSASLSPRQGGNQPQHF

SEQ ID NO: 408771 - protein, 14 aa, Homo sapiens
  CDR3 for alpha chain variable domain of TCR clone 204386 (TRAV17, TRAJ45)
CATGSGGGADGLTF

SEQ ID NO: 408772 - protein, 15 aa, Homo sapiens
  CDR3 for beta chain variable domain of TCR clone 204386 (TRBV11-2, TRBJ2-1)
CASSRNRGLMYEQFF

SEQ ID NO: 408773 - protein, 14 aa, Homo sapiens
  CDR3 for alpha chain variable domain of TCR clone 204387 (TRAV20, TRAJ42)
CAVQPGGSQGNLIF

SEQ ID NO: 408774 - protein, 14 aa, Homo sapiens
  CDR3 for beta chain variable domain of TCR clone 204387 (TRBV28, TRBJ1-2)
CASRIQGANYGYTF

SEQ ID NO: 408775 - protein, 15 aa, Homo sapiens
  CDR3 for alpha chain variable domain of TCR clone 204388 (TRAV14/DV4, TRAJ4)
CAMRDSSGGYNKLIF

SEQ ID NO: 408776 - protein, 14 aa, Homo sapiens
  CDR3 for beta chain variable domain of TCR clone 204388 (TRBV4-1, TRBJ2-2)
CASSQAVNTGELFC

SEQ ID NO: 408777 - protein, 14 aa, Homo sapiens
  CDR3 for alpha chain variable domain of TCR clone 204389 (TRAV13-1, TRAJ44)
CAAKATGTASKLTF

SEQ ID NO: 408778 - protein, 16 aa, Homo sapiens
  CDR3 for beta chain variable domain of TCR clone 204389 (TRBV7-9, TRBJ2-6)
CASSLKGPLSANVLTF

SEQ ID NO: 408779 - protein, 13 aa, Homo sapiens
  CDR3 for alpha chain variable domain of TCR clone 204390 (TRAV8-3, TRAJ36)
CAVGATGANNLFF

SEQ ID NO: 408780 - protein, 14 aa, Homo sapiens
  CDR3 for beta chain variable domain of TCR clone 204390 (TRBV4-2, TRBJ2-1)
CASGLDRAYNEQFF

SEQ ID NO: 408781 - protein, 12 aa, Homo sapiens
  CDR3 for alpha chain variable domain of TCR clone 204391 (TRAV23/DV6, TRAJ53)
CAASKLGSGSSN

SEQ ID NO: 408782 - protein, 18 aa, Homo sapiens
  CDR3 for beta chain variable domain of TCR clone 204391 (TRBV11-2, TRBJ2-3)
CASSLGGASRGAPNTQYF

SEQ ID NO: 408783 - protein, 13 aa, Homo sapiens
  CDR3 for alpha chain variable domain of TCR clone 204392 (TRAV2, TRAJ21)
CAVEDLNFNKFYF

SEQ ID NO: 408784 - protein, 13 aa, Homo sapiens
  CDR3 for beta chain variable domain of TCR clone 204392 (TRBV12-4, TRBJ2-7)
CASSPTETYEQYF

SEQ ID NO: 408785 - protein, 11 aa, Homo sapiens
  CDR3 for alpha chain variable domain of TCR clone 204393 (TRAV8-4, TRAJ26)
CAGGEGQNFFV

SEQ ID NO: 408786 - protein, 17 aa, Homo sapiens
  CDR3 for beta chain variable domain of TCR clone 204393 (TRBV7-9, TRBJ2-3)
CASSPTVAGDLTDTQYF

SEQ ID NO: 408787 - protein, 16 aa, Homo sapiens
  CDR3 for alpha chain variable domain of TCR clone 204394 (TRAV26-1, TRAJ38)
RIVRVSGAGNNRKLIW

SEQ ID NO: 408788 - protein, 20 aa, Homo sapiens
  CDR3 for beta chain variable domain of TCR clone 204394 (TRBV4-1, TRBJ2-5)
CASPPGGAETRDPVLRARHA

SEQ ID NO: 408789 - protein, 11 aa, Homo sapiens
  CDR3 for alpha chain variable domain of TCR clone 204395 (TRAV8-3, TRAJ49)
CAVNTGNQFYF

SEQ ID NO: 408790 - protein, 14 aa, Homo sapiens
  CDR3 for beta chain variable domain of TCR clone 204395 (TRBV19, TRBJ2-1)
CASPTFVLSGEQFF

SEQ ID NO: 408791 - protein, 10 aa, Homo sapiens
  CDR3 for alpha chain variable domain of TCR clone 204396 (TRAV36/DV7, TRAJ49)
CALTGNQFYF

SEQ ID NO: 408792 - protein, 14 aa, Homo sapiens
  CDR3 for beta chain variable domain of TCR clone 204396 (TRBV4-2, TRBJ2-5)
CASSQYRGRETQYF

SEQ ID NO: 408793 - protein, 17 aa, Homo sapiens
  CDR3 for alpha chain variable domain of TCR clone 204397 (TRAV3, TRAJ6)
CAVRDGPRAGGSYIPTF

SEQ ID NO: 408794 - protein, 14 aa, Homo sapiens
  CDR3 for beta chain variable domain of TCR clone 204397 (TRBV6-1, TRBJ1-3)
CASVQGGCGNTIYF

SEQ ID NO: 408795 - protein, 12 aa, Homo sapiens
  CDR3 for alpha chain variable domain of TCR clone 204398 (TRAV3, TRAJ26)
CAVRDYGKNFVF

SEQ ID NO: 408796 - protein, 16 aa, Homo sapiens
  CDR3 for beta chain variable domain of TCR clone 204398 (TRBV6-1, TRBJ2-1)
CASILRQGSSYNEQFF

SEQ ID NO: 408797 - protein, 13 aa, Homo sapiens
  CDR3 for alpha chain variable domain of TCR clone 204399 (TRAV8-3, TRAJ43)
CAVGPDNNNDMRV

SEQ ID NO: 408798 - protein, 12 aa, Homo sapiens
  CDR3 for beta chain variable domain of TCR clone 204399 (TRBV7-2, TRBJ1-6)
CASSLSSSPLHF

SEQ ID NO: 408799 - protein, 12 aa, Homo sapiens
  CDR3 for alpha chain variable domain of TCR clone 204400 (TRAV12-3, TRAJ17)
CAMTLTGKELTF

SEQ ID NO: 408800 - protein, 15 aa, Homo sapiens
  CDR3 for beta chain variable domain of TCR clone 204400 (TRBV20-1, TRBJ2-7)
CSARDRVSGMDEQYF

SEQ ID NO: 408801 - protein, 13 aa, Homo sapiens
  CDR3 for alpha chain variable domain of TCR clone 204401 (TRAV27, TRAJ45)
CRSSVGGADGLTF

SEQ ID NO: 408802 - protein, 11 aa, Homo sapiens
  CDR3 for beta chain variable domain of TCR clone 204401 (TRBV19, TRBJ1-1)
CASSIGSEAFF

SEQ ID NO: 408803 - protein, 17 aa, Homo sapiens
  CDR3 for alpha chain variable domain of TCR clone 204402 (TRAV1-2, TRAJ6)
CAVRDTTRTGGSYIPKF

SEQ ID NO: 408804 - protein, 12 aa, Homo sapiens
  CDR3 for beta chain variable domain of TCR clone 204402 (TRBV24-1, TRBJ2-3)
CATSSGGDTQYF

SEQ ID NO: 408805 - protein, 14 aa, Homo sapiens
  CDR3 for alpha chain variable domain of TCR clone 204403 (TRAV4, TRAJ20)
CLVGRRPNDYKLSF

SEQ ID NO: 408806 - protein, 18 aa, Homo sapiens
  CDR3 for beta chain variable domain of TCR clone 204403 (TRBV2, TRBJ2-5)
CASSGDPQGRGAQETQYF

SEQ ID NO: 408807 - protein, 16 aa, Homo sapiens
  CDR3 for alpha chain variable domain of TCR clone 204404 (TRAV17, TRAJ22)
CATGPISSGSARQLTF

SEQ ID NO: 408808 - protein, 12 aa, Homo sapiens
  CDR3 for beta chain variable domain of TCR clone 204404 (TRBV11-2, TRBJ2-2)
CASSLPTGELFF

SEQ ID NO: 408809 - protein, 13 aa, Homo sapiens
  CDR3 for alpha chain variable domain of TCR clone 204405 (TRAV35, TRAJ21)
CAGQLSNFNKFYF

SEQ ID NO: 408810 - protein, 16 aa, Homo sapiens
  CDR3 for beta chain variable domain of TCR clone 204405 (TRBV4-3, TRBJ2-2)
CASSHLQGSGTGELFF

SEQ ID NO: 408811 - protein, 13 aa, Homo sapiens
  CDR3 for alpha chain variable domain of TCR clone 204406 (TRAV21, TRAJ27)
CAALNTNAGKSTF

SEQ ID NO: 408812 - protein, 17 aa, Homo sapiens
  CDR3 for beta chain variable domain of TCR clone 204406 (TRBV6-4, TRBJ2-7)
CASNPPAGVSTSSTSGR

SEQ ID NO: 408813 - protein, 14 aa, Homo sapiens
  CDR3 for alpha chain variable domain of TCR clone 204407 (TRAV30, TRAJ39)
CGTEKVNAGNMLTF

SEQ ID NO: 408814 - protein, 17 aa, Homo sapiens
  CDR3 for beta chain variable domain of TCR clone 204407 (TRBV11-2, TRBJ2-1)
CASSLYPPGVEYNEQSF

SEQ ID NO: 408815 - protein, 13 aa, Homo sapiens
  CDR3 for alpha chain variable domain of TCR clone 204408 (TRAV17, TRAJ9)
CATDYTVGYKTIF

SEQ ID NO: 408816 - protein, 14 aa, Homo sapiens
  CDR3 for beta chain variable domain of TCR clone 204408 (TRBV19, TRBJ2-5)
CASSMTGQQETQYF

SEQ ID NO: 408817 - protein, 14 aa, Homo sapiens
  CDR3 for alpha chain variable domain of TCR clone 204409 (TRAV1-2, TRAJ16)
FAVNRFSDGQKLLF

SEQ ID NO: 408818 - protein, 16 aa, Homo sapiens
  CDR3 for beta chain variable domain of TCR clone 204409 (TRBV27, TRBJ2-2)
CASSFRGLVRTGELFF

SEQ ID NO: 408819 - protein, 17 aa, Homo sapiens
  CDR3 for alpha chain variable domain of TCR clone 204410 (TRAV13-1, TRAJ31)
CAPRDRLMFGDGTQLVV

SEQ ID NO: 408820 - protein, 14 aa, Homo sapiens
  CDR3 for beta chain variable domain of TCR clone 204410 (TRBV4-2, TRBJ1-5)
CASSQDSINQPQHF

SEQ ID NO: 408821 - protein, 12 aa, Homo sapiens
  CDR3 for alpha chain variable domain of TCR clone 204411 (TRAV20, TRAJ39)
CAVGNAGNMLTF

SEQ ID NO: 408822 - protein, 17 aa, Homo sapiens
  CDR3 for beta chain variable domain of TCR clone 204411 (TRBV4-1, TRBJ2-3)
CASSQGYGSGGTDTQYF

SEQ ID NO: 408823 - protein, 14 aa, Homo sapiens
  CDR3 for alpha chain variable domain of TCR clone 204412 (TRAV38-1, TRAJ40)
FALRPTSGTYKYIF

SEQ ID NO: 408824 - protein, 14 aa, Homo sapiens
  CDR3 for beta chain variable domain of TCR clone 204412 (TRBV5-4, TRBJ1-1)
CASSLDSRRDEAFF

SEQ ID NO: 408825 - protein, 14 aa, Homo sapiens
  CDR3 for alpha chain variable domain of TCR clone 204413 (TRAV26-1, TRAJ39)
CVVFTNNAGNMLTF

SEQ ID NO: 408826 - protein, 15 aa, Homo sapiens
  CDR3 for beta chain variable domain of TCR clone 204413 (TRBV19, TRBJ2-4)
CASSLTGLTKNMQYF

SEQ ID NO: 408827 - protein, 16 aa, Homo sapiens
  CDR3 for alpha chain variable domain of TCR clone 204414 (TRAV3, TRAJ37)
CAVRGKWSGNTGKLIF

SEQ ID NO: 408828 - protein, 15 aa, Homo sapiens
  CDR3 for beta chain variable domain of TCR clone 204414 (TRBV7-9, TRBJ1-5)
CASSQGHQPNQPQHF

SEQ ID NO: 408829 - protein, 13 aa, Homo sapiens
  CDR3 for alpha chain variable domain of TCR clone 204415 (TRAV27, TRAJ54)
CAVAGQGAQKLVF

SEQ ID NO: 408830 - protein, 15 aa, Homo sapiens
  CDR3 for beta chain variable domain of TCR clone 204415 (TRBV18, TRBJ2-6)
CASSPSYAGANVLPF

SEQ ID NO: 408831 - protein, 15 aa, Homo sapiens
  CDR3 for alpha chain variable domain of TCR clone 204416 (TRAV3, TRAJ22)
CAVRDRGGSARQLTF

SEQ ID NO: 408832 - protein, 14 aa, Homo sapiens
  CDR3 for beta chain variable domain of TCR clone 204416 (TRBV19, TRBJ1-5)
CASSLVLIGQPQHF

SEQ ID NO: 408833 - protein, 14 aa, Homo sapiens
  CDR3 for alpha chain variable domain of TCR clone 204417 (TRAV35, TRAJ47)
CAGQGEEYGNKLVF

SEQ ID NO: 408834 - protein, 15 aa, Homo sapiens
  CDR3 for beta chain variable domain of TCR clone 204417 (TRBV7-9, TRBJ1-6)
CASSSPGRGNSPLHF

SEQ ID NO: 408835 - protein, 14 aa, Homo sapiens
  CDR3 for alpha chain variable domain of TCR clone 204418 (TRAV12-3, TRAJ58)
CAMRTETSGSRLTF

SEQ ID NO: 408836 - protein, 12 aa, Homo sapiens
  CDR3 for beta chain variable domain of TCR clone 204418 (TRBV7-8, TRBJ2-7)
CASSLGDREQYF

SEQ ID NO: 408837 - protein, 13 aa, Homo sapiens
  CDR3 for alpha chain variable domain of TCR clone 204419 (TRAV2, TRAJ40)
CAVVTSGTYKYIF

SEQ ID NO: 408838 - protein, 13 aa, Homo sapiens
  CDR3 for beta chain variable domain of TCR clone 204419 (TRBV18, TRBJ1-1)
CASSGGRNTEAFF

SEQ ID NO: 408839 - protein, 13 aa, Homo sapiens
  CDR3 for alpha chain variable domain of TCR clone 204420 (TRAV26-2, TRAJ43)
CIVRAVNNNDMRF

SEQ ID NO: 408840 - protein, 15 aa, Homo sapiens
  CDR3 for beta chain variable domain of TCR clone 204420 (TRBV7-2, TRBJ2-1)
CASTHGTGIYNEQFF

SEQ ID NO: 408841 - protein, 15 aa, Homo sapiens
  CDR3 for alpha chain variable domain of TCR clone 204421 (TRAV2, TRAJ15)
CAVEDREQAGTALIF

SEQ ID NO: 408842 - protein, 12 aa, Homo sapiens
  CDR3 for beta chain variable domain of TCR clone 204421 (TRBV12-5, TRBJ2-5)
CASGQGVETQYF

SEQ ID NO: 408843 - protein, 12 aa, Homo sapiens
  CDR3 for alpha chain variable domain of TCR clone 204422 (TRAV23/DV6, TRAJ17)
CARGSCSQQANF

SEQ ID NO: 408844 - protein, 14 aa, Homo sapiens
  CDR3 for beta chain variable domain of TCR clone 204422 (TRBV7-2, TRBJ1-2)
CASSQTGSTYGYTF

SEQ ID NO: 408845 - protein, 14 aa, Homo sapiens
  CDR3 for alpha chain variable domain of TCR clone 204423 (TRAV29/DV5, TRAJ36)
CAARRKTGANNLFF

SEQ ID NO: 408846 - protein, 13 aa, Homo sapiens
  CDR3 for beta chain variable domain of TCR clone 204423 (TRBV20-1, TRBJ1-2)
CSARGTADYGYTF

SEQ ID NO: 408847 - protein, 14 aa, Homo sapiens
  CDR3 for alpha chain variable domain of TCR clone 204424 (TRAV2, TRAJ37)
CAVDFTSNTGKLIF

SEQ ID NO: 408848 - protein, 15 aa, Homo sapiens
  CDR3 for beta chain variable domain of TCR clone 204424 (TRBV20-1, TRBJ1-1)
CSASRGVTGNTQAFF

SEQ ID NO: 408849 - protein, 17 aa, Homo sapiens
  CDR3 for alpha chain variable domain of TCR clone 204425 (TRAV38-2/DV8, TRAJ38)
CAYRSARGAGNNRKLIW

SEQ ID NO: 408850 - protein, 15 aa, Homo sapiens
  CDR3 for beta chain variable domain of TCR clone 204425 (TRBV6-3, TRBJ2-2)
CASSFLATLTGELFF

SEQ ID NO: 408851 - protein, 16 aa, Homo sapiens
  CDR3 for alpha chain variable domain of TCR clone 204426 (TRAV12-3, TRAJ53)
CAMSPGSGGSNYKLTF

SEQ ID NO: 408852 - protein, 16 aa, Homo sapiens
  CDR3 for beta chain variable domain of TCR clone 204426 (TRBV4-2, TRBJ1-1)
CACSQAGFGMNTEAFF

SEQ ID NO: 408853 - protein, 16 aa, Homo sapiens
  CDR3 for alpha chain variable domain of TCR clone 204427 (TRAV12-3, TRAJ53)
CAMSPGRGGSNYKLTF

SEQ ID NO: 408854 - protein, 17 aa, Homo sapiens
  CDR3 for beta chain variable domain of TCR clone 204427 (TRBV7-8, TRBJ2-6)
CASSAGTGGAGANVLTF

SEQ ID NO: 408855 - protein, 14 aa, Homo sapiens
  CDR3 for alpha chain variable domain of TCR clone 204428 (TRAV12-3, TRAJ20)
CAMSARRGDYKLSF

SEQ ID NO: 408856 - protein, 14 aa, Homo sapiens
  CDR3 for beta chain variable domain of TCR clone 204428 (TRBV7-3, TRBJ2-3)
CASSPSARTDTQYV

SEQ ID NO: 408857 - protein, 13 aa, Homo sapiens
  CDR3 for alpha chain variable domain of TCR clone 204429 (TRAV12-3, TRAJ33)
CAMSLNSNYQLIW

SEQ ID NO: 408858 - protein, 17 aa, Homo sapiens
  CDR3 for beta chain variable domain of TCR clone 204429 (TRBV4-1, TRBJ2-5)
CASSQDQTGGPQETQYF

SEQ ID NO: 408859 - protein, 12 aa, Homo sapiens
  CDR3 for alpha chain variable domain of TCR clone 204430 (TRAV3, TRAJ20)
CAVRDPDYKPSF

SEQ ID NO: 408860 - protein, 15 aa, Homo sapiens
  CDR3 for beta chain variable domain of TCR clone 204430 (TRBV6-3, TRBJ2-1)
CASIGAGGSYNEQFF

SEQ ID NO: 408861 - protein, 12 aa, Homo sapiens
  CDR3 for alpha chain variable domain of TCR clone 204431 (TRAV12-3, TRAJ17)
CAMTLTGNKLTF

SEQ ID NO: 408862 - protein, 15 aa, Homo sapiens
  CDR3 for beta chain variable domain of TCR clone 204431 (TRBV6-4, TRBJ2-7)
CASSDQGPPTYEQYF

SEQ ID NO: 408863 - protein, 13 aa, Homo sapiens
  CDR3 for alpha chain variable domain of TCR clone 204432 (TRAV13-1, TRAJ39)
CSAIIWAGNMLTF

SEQ ID NO: 408864 - protein, 15 aa, Homo sapiens
  CDR3 for beta chain variable domain of TCR clone 204432 (TRBV7-9, TRBJ1-1)
CASSLLEQGGTEAFF

SEQ ID NO: 408865 - protein, 14 aa, Homo sapiens
  CDR3 for alpha chain variable domain of TCR clone 204433 (TRAV38-2/DV8, TRAJ29)
CAYRSRSGNTPLVF

SEQ ID NO: 408866 - protein, 14 aa, Homo sapiens
  CDR3 for beta chain variable domain of TCR clone 204433 (TRBV7-2, TRBJ2-7)
CASRSQGAAYEQYF

SEQ ID NO: 408867 - protein, 13 aa, Homo sapiens
  CDR3 for alpha chain variable domain of TCR clone 204434 (TRAV2, TRAJ40)
CAVVTSGTYKYIF

SEQ ID NO: 408868 - protein, 15 aa, Homo sapiens
  CDR3 for beta chain variable domain of TCR clone 204434 (TRBV11-1, TRBJ2-7)
CASSLNYGASYEQYF

SEQ ID NO: 408869 - protein, 14 aa, Homo sapiens
  CDR3 for alpha chain variable domain of TCR clone 204435 (TRAV23/DV6, TRAJ4)
CAANLSGGYNKLIF

SEQ ID NO: 408870 - protein, 11 aa, Homo sapiens
  CDR3 for beta chain variable domain of TCR clone 204435 (TRBV7-9, TRBJ2-3)
CACSPTDTQYF

SEQ ID NO: 408871 - protein, 14 aa, Homo sapiens
  CDR3 for alpha chain variable domain of TCR clone 204436 (TRAV21, TRAJ58)
CAVRRGRSGSRLTF

SEQ ID NO: 408872 - protein, 13 aa, Homo sapiens
  CDR3 for beta chain variable domain of TCR clone 204436 (TRBV7-2, TRBJ1-6)
GASSLKFGSPLHF

SEQ ID NO: 408873 - protein, 13 aa, Homo sapiens
  CDR3 for alpha chain variable domain of TCR clone 204437 (TRAV12-1, TRAJ40)
CVVPTSGTYKYIF

SEQ ID NO: 408874 - protein, 18 aa, Homo sapiens
  CDR3 for beta chain variable domain of TCR clone 204437 (TRBV7-6, TRBJ2-1)
CASSPRTSGMSSYNERFF

SEQ ID NO: 408875 - protein, 18 aa, Homo sapiens
  CDR3 for alpha chain variable domain of TCR clone 204438 (TRAV1-2, TRAJ18)
CAVRDMGDRGSTLGRLYF

SEQ ID NO: 408876 - protein, 15 aa, Homo sapiens
  CDR3 for beta chain variable domain of TCR clone 204438 (TRBV7-9, TRBJ1-4)
CASSATGGNNEKLFF

SEQ ID NO: 408877 - protein, 15 aa, Homo sapiens
  CDR3 for alpha chain variable domain of TCR clone 204439 (TRAV8-4, TRAJ53)
CAVSDGGGSNYKLTF

SEQ ID NO: 408878 - protein, 13 aa, Homo sapiens
  CDR3 for beta chain variable domain of TCR clone 204439 (TRBV12-5, TRBJ2-3)
CASGDRQSDTQYF

SEQ ID NO: 408879 - protein, 15 aa, Homo sapiens
  CDR3 for alpha chain variable domain of TCR clone 204440 (TRAV21, TRAJ40)
CAVRPQTSGTYKYIF

SEQ ID NO: 408880 - protein, 13 aa, Homo sapiens
  CDR3 for beta chain variable domain of TCR clone 204440 (TRBV4-2, TRBJ1-1)
CASSQAGNTEAFF

SEQ ID NO: 408881 - protein, 13 aa, Homo sapiens
  CDR3 for alpha chain variable domain of TCR clone 204441 (TRAV8-3, TRAJ43)
CAVVPYNNNDMRF

SEQ ID NO: 408882 - protein, 14 aa, Homo sapiens
  CDR3 for beta chain variable domain of TCR clone 204441 (TRBV4-2, TRBJ2-7)
CASSHRTGGYEQYF

SEQ ID NO: 408883 - protein, 13 aa, Homo sapiens
  CDR3 for alpha chain variable domain of TCR clone 204442 (TRAV1-2, TRAJ9)
CAALNTGGFKTIC

SEQ ID NO: 408884 - protein, 13 aa, Homo sapiens
  CDR3 for beta chain variable domain of TCR clone 204442 (TRBV19, TRBJ1-2)
CASSVPGQDGDTF

SEQ ID NO: 408885 - protein, 10 aa, Homo sapiens
  CDR3 for alpha chain variable domain of TCR clone 204443 (TRAV21, TRAJ31)
CAVDNARLMF

SEQ ID NO: 408886 - protein, 11 aa, Homo sapiens
  CDR3 for beta chain variable domain of TCR clone 204443 (TRBV12-4, TRBJ2-3)
CASSSVRGRYF

SEQ ID NO: 408887 - protein, 12 aa, Homo sapiens
  CDR3 for alpha chain variable domain of TCR clone 204444 (TRAV21, TRAJ31)
CAVWGKNVRLMF

SEQ ID NO: 408888 - protein, 16 aa, Homo sapiens
  CDR3 for beta chain variable domain of TCR clone 204444 (TRBV27, TRBJ2-5)
CASSYGPGGQKETQYF

SEQ ID NO: 408889 - protein, 13 aa, Homo sapiens
  CDR3 for alpha chain variable domain of TCR clone 204445 (TRAV8-4, TRAJ9)
CAVSETGGFKTIF

SEQ ID NO: 408890 - protein, 18 aa, Homo sapiens
  CDR3 for beta chain variable domain of TCR clone 204445 (TRBV11-2, TRBJ2-3)
CASSLGGASRGAPNTQYF

SEQ ID NO: 408891 - protein, 18 aa, Homo sapiens
  CDR3 for alpha chain variable domain of TCR clone 204446 (TRAV12-3, TRAJ52)
CAMSVGGAGGTSYGKLTF

SEQ ID NO: 408892 - protein, 13 aa, Homo sapiens
  CDR3 for beta chain variable domain of TCR clone 204446 (TRBV11-2, TRBJ1-6)
CASSLAGVSPLHF

SEQ ID NO: 408893 - protein, 16 aa, Homo sapiens
  CDR3 for alpha chain variable domain of TCR clone 204447 (TRAV12-3, TRAJ53)
CAMSPGSGGSNYKLIF

SEQ ID NO: 408894 - protein, 17 aa, Homo sapiens
  CDR3 for beta chain variable domain of TCR clone 204447 (TRBV11-2, TRBJ2-1)
CASSLYPPGVEYNEQFF

SEQ ID NO: 408895 - protein, 14 aa, Homo sapiens
  CDR3 for alpha chain variable domain of TCR clone 204448 (TRAV3, TRAJ9)
CAVRLNTGGVKTIF

SEQ ID NO: 408896 - protein, 16 aa, Homo sapiens
  CDR3 for beta chain variable domain of TCR clone 204448 (TRBV12-5, TRBJ2-5)
CASGPRTSGNQETQYF

SEQ ID NO: 408897 - protein, 16 aa, Homo sapiens
  CDR3 for alpha chain variable domain of TCR clone 204449 (TRAV12-2, TRAJ32)
FAVNLGQGGATNKPIF

SEQ ID NO: 408898 - protein, 15 aa, Homo sapiens
  CDR3 for beta chain variable domain of TCR clone 204449 (TRBV20-1, TRBJ2-7)
CSARGPLAGGREQYF

SEQ ID NO: 408899 - protein, 13 aa, Homo sapiens
  CDR3 for alpha chain variable domain of TCR clone 204450 (TRAV3, TRAJ21)
CAVREPDFDKFYF

SEQ ID NO: 408900 - protein, 15 aa, Homo sapiens
  CDR3 for beta chain variable domain of TCR clone 204450 (TRBV20-1, TRBJ1-1)
CSASRGVTGNTEAFF

SEQ ID NO: 408901 - protein, 10 aa, Homo sapiens
  CDR3 for alpha chain variable domain of TCR clone 204451 (TRAV26-1, TRAJ22)
CIVSLNFFWF

SEQ ID NO: 408902 - protein, 14 aa, Homo sapiens
  CDR3 for beta chain variable domain of TCR clone 204451 (TRBV10-2, TRBJ2-1)
CASSEGTSEDEQFF

SEQ ID NO: 408903 - protein, 14 aa, Homo sapiens
  CDR3 for alpha chain variable domain of TCR clone 204452 (TRAV13-1, TRAJ10)
CAASSTGGGNKLTF

SEQ ID NO: 408904 - protein, 15 aa, Homo sapiens
  CDR3 for beta chain variable domain of TCR clone 204452 (TRBV11-3, TRBJ1-3)
CASSLFGPSGNTTYF

SEQ ID NO: 408905 - protein, 13 aa, Homo sapiens
  CDR3 for alpha chain variable domain of TCR clone 204453 (TRAV1-2, TRAJ33)
CAVQGDSDYQLIW

SEQ ID NO: 408906 - protein, 16 aa, Homo sapiens
  CDR3 for beta chain variable domain of TCR clone 204453 (TRBV28, TRBJ2-1)
CASSSPGLAKGDEQFF

SEQ ID NO: 408907 - protein, 15 aa, Homo sapiens
  CDR3 for alpha chain variable domain of TCR clone 204454 (TRAV12-2, TRAJ56)
CAVNPFTGATSKLTF

SEQ ID NO: 408908 - protein, 13 aa, Homo sapiens
  CDR3 for beta chain variable domain of TCR clone 204454 (TRBV20-1, TRBJ1-2)
CSARDRVYGGYTF

SEQ ID NO: 408909 - protein, 14 aa, Homo sapiens
  CDR3 for alpha chain variable domain of TCR clone 204455 (TRAV16, TRAJ17)
CAPRIKAAGNKLTF

SEQ ID NO: 408910 - protein, 14 aa, Homo sapiens
  CDR3 for beta chain variable domain of TCR clone 204455 (TRBV25-1, TRBJ1-1)
CASTHLGGNTEAFF

SEQ ID NO: 408911 - protein, 12 aa, Homo sapiens
  CDR3 for alpha chain variable domain of TCR clone 204456 (TRAV12-3, TRAJ41)
CAMSYSGYALNF

SEQ ID NO: 408912 - protein, 18 aa, Homo sapiens
  CDR3 for beta chain variable domain of TCR clone 204456 (TRBV7-9, TRBJ2-7)
CASSLTTSGSRTWYEQYF

SEQ ID NO: 408913 - protein, 20 aa, Homo sapiens
  CDR3 for alpha chain variable domain of TCR clone 204457 (TRAV12-2, TRAJ52)
SPVIQPPARAGGTSYGKLTF

SEQ ID NO: 408914 - protein, 18 aa, Homo sapiens
  CDR3 for beta chain variable domain of TCR clone 204457 (TRBV12-4, TRBJ2-4)
CASSRTGAVDVAKNIQYF

SEQ ID NO: 408915 - protein, 11 aa, Homo sapiens
  CDR3 for alpha chain variable domain of TCR clone 204458 (TRAV3, TRAJ32)
CAVREGIMVVL

SEQ ID NO: 408916 - protein, 13 aa, Homo sapiens
  CDR3 for beta chain variable domain of TCR clone 204458 (TRBV2, TRBJ1-1)
CASSEGGNTEASF

SEQ ID NO: 408917 - protein, 17 aa, Homo sapiens
  CDR3 for alpha chain variable domain of TCR clone 204459 (TRAV3, TRAJ42)
CAVRDRDYGGSQGTLIF

SEQ ID NO: 408918 - protein, 14 aa, Homo sapiens
  CDR3 for beta chain variable domain of TCR clone 204459 (TRBV7-2, TRBJ2-5)
CASSPRGSSETQYF

SEQ ID NO: 408919 - protein, 17 aa, Homo sapiens
  CDR3 for alpha chain variable domain of TCR clone 204460 (TRAV13-2, TRAJ42)
CAEKCKNYGGSQGNLIF

SEQ ID NO: 408920 - protein, 16 aa, Homo sapiens
  CDR3 for beta chain variable domain of TCR clone 204460 (TRBV7-9, TRBJ2-1)
CASSLGTGWDYNEQFF

SEQ ID NO: 408921 - protein, 15 aa, Homo sapiens
  CDR3 for alpha chain variable domain of TCR clone 204461 (TRAV20, TRAJ6)
CAVRLQSGGSYIPTF

SEQ ID NO: 408922 - protein, 14 aa, Homo sapiens
  CDR3 for beta chain variable domain of TCR clone 204461 (TRBV12-4, TRBJ2-7)
CASSASGGWYEQYF

SEQ ID NO: 408923 - protein, 18 aa, Homo sapiens
  CDR3 for alpha chain variable domain of TCR clone 204462 (TRAV13-1, TRAJ52)
CAADFPNAVGTSYGKLTF

SEQ ID NO: 408924 - protein, 14 aa, Homo sapiens
  CDR3 for beta chain variable domain of TCR clone 204462 (TRBV11-2, TRBJ2-3)
CASSLYAGRDTQYF

SEQ ID NO: 408925 - protein, 13 aa, Homo sapiens
  CDR3 for alpha chain variable domain of TCR clone 204463 (TRAV13-2, TRAJ10)
CAEDTGGGNKLTF

SEQ ID NO: 408926 - protein, 15 aa, Homo sapiens
  CDR3 for beta chain variable domain of TCR clone 204463 (TRBV12-4, TRBJ2-2)
CASSRQGANPGELFF

SEQ ID NO: 408927 - protein, 12 aa, Homo sapiens
  CDR3 for alpha chain variable domain of TCR clone 204464 (TRAV25, TRAJ29)
CAGHSGNTALVF

SEQ ID NO: 408928 - protein, 14 aa, Homo sapiens
  CDR3 for beta chain variable domain of TCR clone 204464 (TRBV6-1, TRBJ2-7)
CASTRTGDYYEQYF

SEQ ID NO: 408929 - protein, 14 aa, Homo sapiens
  CDR3 for alpha chain variable domain of TCR clone 204465 (TRAV12-3, TRAJ33)
CAMSVPGSNYQLIW

SEQ ID NO: 408930 - protein, 14 aa, Homo sapiens
  CDR3 for beta chain variable domain of TCR clone 204465 (TRBV20-1, TRBJ1-1)
CSAQTRIGGTEAFF

SEQ ID NO: 408931 - protein, 16 aa, Homo sapiens
  CDR3 for alpha chain variable domain of TCR clone 204466 (TRAV13-1, TRAJ37)
CAASSLGSSNTDKLIF

SEQ ID NO: 408932 - protein, 12 aa, Homo sapiens
  CDR3 for beta chain variable domain of TCR clone 204466 (TRBV6-1, TRBJ2-5)
CASSEGRETQYF

SEQ ID NO: 408933 - protein, 16 aa, Homo sapiens
  CDR3 for alpha chain variable domain of TCR clone 204467 (TRAV21, TRAJ10)
CAVLVRVTGGGNKLTF

SEQ ID NO: 408934 - protein, 16 aa, Homo sapiens
  CDR3 for beta chain variable domain of TCR clone 204467 (TRBV19, TRBJ2-1)
CASSKAGPSSYNEQFF

SEQ ID NO: 408935 - protein, 14 aa, Homo sapiens
  CDR3 for alpha chain variable domain of TCR clone 204468 (TRAV12-2, TRAJ17)
CAVLFKPAGNKLTF

SEQ ID NO: 408936 - protein, 14 aa, Homo sapiens
  CDR3 for beta chain variable domain of TCR clone 204468 (TRBV19, TRBJ2-1)
CASPTFVLSGEQFF

SEQ ID NO: 408937 - protein, 14 aa, Homo sapiens
  CDR3 for alpha chain variable domain of TCR clone 204469 (TRAV8-1, TRAJ39)
CAVSNNNEGNMLTF

SEQ ID NO: 408938 - protein, 20 aa, Homo sapiens
  CDR3 for beta chain variable domain of TCR clone 204469 (TRBV7-8, TRBJ2-2)
CASSHLFPGPTIHITGELFF

SEQ ID NO: 408939 - protein, 13 aa, Homo sapiens
  CDR3 for alpha chain variable domain of TCR clone 204470 (TRAV20, TRAJ34)
CAVSSYNSDKLIF

SEQ ID NO: 408940 - protein, 15 aa, Homo sapiens
  CDR3 for beta chain variable domain of TCR clone 204470 (TRBV20-1, TRBJ1-2)
CSAAGEGARIYGYTF

SEQ ID NO: 408941 - protein, 15 aa, Homo sapiens
  CDR3 for alpha chain variable domain of TCR clone 204471 (TRAV27, TRAJ53)
CRAINSGGSNYKLTF

SEQ ID NO: 408942 - protein, 14 aa, Homo sapiens
  CDR3 for beta chain variable domain of TCR clone 204471 (TRBV7-6, TRBJ2-7)
CASSFRQGADEQYF

SEQ ID NO: 408943 - protein, 13 aa, Homo sapiens
  CDR3 for alpha chain variable domain of TCR clone 204472 (TRAV8-3, TRAJ43)
CAVVPYNNNDMRF

SEQ ID NO: 408944 - protein, 14 aa, Homo sapiens
  CDR3 for beta chain variable domain of TCR clone 204472 (TRBV7-2, TRBJ2-5)
CASSPRGSSETQYF

SEQ ID NO: 408945 - protein, 11 aa, Homo sapiens
  CDR3 for alpha chain variable domain of TCR clone 204473 (TRAV21, TRAJ4)
HVSGGYNKLIF

SEQ ID NO: 408946 - protein, 13 aa, Homo sapiens
  CDR3 for beta chain variable domain of TCR clone 204473 (TRBV7-3, TRBJ2-5)
CASSLTAGGTQYF

SEQ ID NO: 408947 - protein, 13 aa, Homo sapiens
  CDR3 for alpha chain variable domain of TCR clone 204474 (TRAV3, TRAJ21)
CAVREPDFNKFYF

SEQ ID NO: 408948 - protein, 19 aa, Homo sapiens
  CDR3 for beta chain variable domain of TCR clone 204474 (TRBV4-1, TRBJ1-6)
CASSQSRDLQFSYNSPLHF

SEQ ID NO: 408949 - protein, 11 aa, Homo sapiens
  CDR3 for alpha chain variable domain of TCR clone 204475 (TRAV12-3, TRAJ20)
CAMSYDYKLSF

SEQ ID NO: 408950 - protein, 14 aa, Homo sapiens
  CDR3 for beta chain variable domain of TCR clone 204475 (TRBV7-2, TRBJ2-7)
CACSPKTSFYEQYF

SEQ ID NO: 408951 - protein, 12 aa, Homo sapiens
  CDR3 for alpha chain variable domain of TCR clone 204476 (TRAV2, TRAJ9)
CAVGAGGFKTIF

SEQ ID NO: 408952 - protein, 20 aa, Homo sapiens
  CDR3 for beta chain variable domain of TCR clone 204476 (TRBV6-4, TRBJ2-7)
CASSDSSVSGQVPTSYEQYF

SEQ ID NO: 408953 - protein, 14 aa, Homo sapiens
  CDR3 for alpha chain variable domain of TCR clone 204477 (TRAV13-1, TRAJ35)
CAASKGGFGNVLHC

SEQ ID NO: 408954 - protein, 12 aa, Homo sapiens
  CDR3 for beta chain variable domain of TCR clone 204477 (TRBV7-3, TRBJ1-1)
CASSQDWGAEAF

SEQ ID NO: 408955 - protein, 16 aa, Homo sapiens
  CDR3 for alpha chain variable domain of TCR clone 204478 (TRAV21, TRAJ37)
CAVRTAGSSNTGKLIF

SEQ ID NO: 408956 - protein, 13 aa, Homo sapiens
  CDR3 for beta chain variable domain of TCR clone 204478 (TRBV7-9, TRBJ2-5)
CASLPSGRETMYF

SEQ ID NO: 408957 - protein, 13 aa, Homo sapiens
  CDR3 for alpha chain variable domain of TCR clone 204479 (TRAV13-2, TRAJ48)
CAEMDFGHEKLTF

SEQ ID NO: 408958 - protein, 15 aa, Homo sapiens
  CDR3 for beta chain variable domain of TCR clone 204479 (TRBV7-9, TRBJ1-6)
CASSSPGRGNSTLHF

SEQ ID NO: 408959 - protein, 16 aa, Homo sapiens
  CDR3 for alpha chain variable domain of TCR clone 204480 (TRAV3, TRAJ42)
CAVRRNYGGSQGNLIF

SEQ ID NO: 408960 - protein, 16 aa, Homo sapiens
  CDR3 for beta chain variable domain of TCR clone 204480 (TRBV24-1, TRBJ2-3)
CATSDPGTGATDTQYF

SEQ ID NO: 408961 - protein, 12 aa, Homo sapiens
  CDR3 for alpha chain variable domain of TCR clone 204481 (TRAV21, TRAJ13)
PGPSGGYQKVTF

SEQ ID NO: 408962 - protein, 13 aa, Homo sapiens
  CDR3 for beta chain variable domain of TCR clone 204481 (TRBV12-4, TRBJ2-2)
CASSITGSGQLFF

SEQ ID NO: 408963 - protein, 13 aa, Homo sapiens
  CDR3 for alpha chain variable domain of TCR clone 204482 (TRAV30, TRAJ16)
CGTFGGDGQRLLF

SEQ ID NO: 408964 - protein, 13 aa, Homo sapiens
  CDR3 for beta chain variable domain of TCR clone 204482 (TRBV7-3, TRBJ2-1)
CASSLDSYNEQFF

SEQ ID NO: 408965 - protein, 12 aa, Homo sapiens
  CDR3 for alpha chain variable domain of TCR clone 204483 (TRAV12-3, TRAJ17)
CAMTLTGNKLSF

SEQ ID NO: 408966 - protein, 15 aa, Homo sapiens
  CDR3 for beta chain variable domain of TCR clone 204483 (TRBV20-1, TRBJ2-7)
CSARDRVSGMDEQHF

SEQ ID NO: 408967 - protein, 15 aa, Homo sapiens
  CDR3 for alpha chain variable domain of TCR clone 204484 (TRAV26-1, TRAJ29)
CIVRVEGSGNTPLVF

SEQ ID NO: 408968 - protein, 12 aa, Homo sapiens
  CDR3 for beta chain variable domain of TCR clone 204484 (TRBV7-9, TRBJ1-4)
CASSTDREKLFF

SEQ ID NO: 408969 - protein, 13 aa, Homo sapiens
  CDR3 for alpha chain variable domain of TCR clone 204485 (TRAV13-1, TRAJ29)
CAASIGLNTPLVF

SEQ ID NO: 408970 - protein, 14 aa, Homo sapiens
  CDR3 for beta chain variable domain of TCR clone 204485 (TRBV20-1, TRBJ2-5)
CSASDSGSGETQYI

SEQ ID NO: 408971 - protein, 16 aa, Homo sapiens
  CDR3 for alpha chain variable domain of TCR clone 204486 (TRAV30, TRAJ24)
CGTEIVGADSWGKFQF

SEQ ID NO: 408972 - protein, 15 aa, Homo sapiens
  CDR3 for beta chain variable domain of TCR clone 204486 (TRBV7-9, TRBJ1-4)
CASSAWTGGNEKLFF

SEQ ID NO: 408973 - protein, 11 aa, Homo sapiens
  CDR3 for alpha chain variable domain of TCR clone 204487 (TRAV12-1, TRAJ34)
CVWNKGRELIF

SEQ ID NO: 408974 - protein, 12 aa, Homo sapiens
  CDR3 for beta chain variable domain of TCR clone 204487 (TRBV11-2, TRBJ2-2)
CASSLGGGELFF

SEQ ID NO: 408975 - protein, 19 aa, Homo sapiens
  CDR3 for alpha chain variable domain of TCR clone 204488 (TRAV26-1, TRAJ52)
CIVRAHRNSGGTSYGKLTF

SEQ ID NO: 408976 - protein, 15 aa, Homo sapiens
  CDR3 for beta chain variable domain of TCR clone 204488 (TRBV29-1, TRBJ2-1)
CSGRDRKSAYNEQFF

SEQ ID NO: 408977 - protein, 17 aa, Homo sapiens
  CDR3 for alpha chain variable domain of TCR clone 204489 (TRAV3, TRAJ6)
CAVRDGPRAGGSYIPTF

SEQ ID NO: 408978 - protein, 14 aa, Homo sapiens
  CDR3 for beta chain variable domain of TCR clone 204489 (TRBV2, TRBJ2-3)
CASTAQTSTDTQYF

SEQ ID NO: 408979 - protein, 14 aa, Homo sapiens
  CDR3 for alpha chain variable domain of TCR clone 204490 (TRAV13-1, TRAJ35)
CAASKGGFGNVLHF

SEQ ID NO: 408980 - protein, 13 aa, Homo sapiens
  CDR3 for beta chain variable domain of TCR clone 204490 (TRBV7-3, TRBJ1-1)
CASSQDWGAEAFL

SEQ ID NO: 408981 - protein, 20 aa, Homo sapiens
  CDR3 for alpha chain variable domain of TCR clone 204491 (TRAV26-1, TRAJ38)
CIADNAGNNHIQNPDPAVYQ

SEQ ID NO: 408982 - protein, 17 aa, Homo sapiens
  CDR3 for beta chain variable domain of TCR clone 204491 (TRBV4-1, TRBJ2-7)
CASSRDPLGVRGGEQYF

SEQ ID NO: 408983 - protein, 13 aa, Homo sapiens
  CDR3 for alpha chain variable domain of TCR clone 204492 (TRAV27, TRAJ8)
CAGGPTGFQKLVF

SEQ ID NO: 408984 - protein, 17 aa, Homo sapiens
  CDR3 for beta chain variable domain of TCR clone 204492 (TRBV6-1, TRBJ2-7)
CASSEVWGISTSSTSGR

SEQ ID NO: 408985 - protein, 13 aa, Homo sapiens
  CDR3 for alpha chain variable domain of TCR clone 204493 (TRAV8-3, TRAJ36)
CAVGATGANNLFF

SEQ ID NO: 408986 - protein, 13 aa, Homo sapiens
  CDR3 for beta chain variable domain of TCR clone 204493 (TRBV4-2, TRBJ2-7)
CASSRDPHDEQYF

SEQ ID NO: 408987 - protein, 13 aa, Homo sapiens
  CDR3 for alpha chain variable domain of TCR clone 204494 (TRAV8-3, TRAJ15)
CAVGIQTGTALIF

SEQ ID NO: 408988 - protein, 17 aa, Homo sapiens
  CDR3 for beta chain variable domain of TCR clone 204494 (TRBV20-1, TRBJ2-1)
CSARDPLAGVSYNEQFF

SEQ ID NO: 408989 - protein, 14 aa, Homo sapiens
  CDR3 for alpha chain variable domain of TCR clone 204495 (TRAV12-2, TRAJ45)
CAVNIWVQEEVLTD

SEQ ID NO: 408990 - protein, 18 aa, Homo sapiens
  CDR3 for beta chain variable domain of TCR clone 204495 (TRBV20-1, TRBJ2-6)
CSAETTPTHGSGANVLTF

SEQ ID NO: 408991 - protein, 13 aa, Homo sapiens
  CDR3 for alpha chain variable domain of TCR clone 204496 (TRAV12-1, TRAJ43)
CVVSHHNNNDMRF

SEQ ID NO: 408992 - protein, 14 aa, Homo sapiens
  CDR3 for beta chain variable domain of TCR clone 204496 (TRBV5-5, TRBJ2-2)
CASSLLGDTGELFL

SEQ ID NO: 408993 - protein, 14 aa, Homo sapiens
  CDR3 for alpha chain variable domain of TCR clone 204497 (TRAV2, TRAJ9)
CAVEYRSGGFKTIF

SEQ ID NO: 408994 - protein, 16 aa, Homo sapiens
  CDR3 for beta chain variable domain of TCR clone 204497 (TRBV7-3, TRBJ2-2)
CASSLKRGTLSGELFF

SEQ ID NO: 408995 - protein, 14 aa, Homo sapiens
  CDR3 for alpha chain variable domain of TCR clone 204498 (TRAV12-2, TRAJ40)
CAVKIPSGTYKYIF

SEQ ID NO: 408996 - protein, 14 aa, Homo sapiens
  CDR3 for beta chain variable domain of TCR clone 204498 (TRBV11-2, TRBJ2-5)
CASRPLAGRETQYF

SEQ ID NO: 408997 - protein, 12 aa, Homo sapiens
  CDR3 for alpha chain variable domain of TCR clone 204499 (TRAV2, TRAJ10)
CDSTGGGNNLTF

SEQ ID NO: 408998 - protein, 14 aa, Homo sapiens
  CDR3 for beta chain variable domain of TCR clone 204499 (TRBV7-2, TRBJ2-2)
CASRGQGAAGELFF

SEQ ID NO: 408999 - protein, 11 aa, Homo sapiens
  CDR3 for alpha chain variable domain of TCR clone 204500 (TRAV13-2, TRAJ20)
CAENMSYKLSF

SEQ ID NO: 409000 - protein, 14 aa, Homo sapiens
  CDR3 for beta chain variable domain of TCR clone 204500 (TRBV5-1, TRBJ2-7)
CASRWDWQFHEQYF

SEQ ID NO: 409001 - protein, 11 aa, Homo sapiens
  CDR3 for alpha chain variable domain of TCR clone 204501 (TRAV17, TRAJ9)
CGFTGGFQTIF

SEQ ID NO: 409002 - protein, 12 aa, Homo sapiens
  CDR3 for beta chain variable domain of TCR clone 204501 (TRBV29-1, TRBJ2-3)
CSVTGGADTQYF

SEQ ID NO: 409003 - protein, 14 aa, Homo sapiens
  CDR3 for alpha chain variable domain of TCR clone 204502 (TRAV8-4, TRAJ15)
CAVTIREAGTALLF

SEQ ID NO: 409004 - protein, 16 aa, Homo sapiens
  CDR3 for beta chain variable domain of TCR clone 204502 (TRBV29-1, TRBJ2-6)
CSVEDITYSGANVLTF

SEQ ID NO: 409005 - protein, 12 aa, Homo sapiens
  CDR3 for alpha chain variable domain of TCR clone 204503 (TRAV1-1, TRAJ43)
CAPRVSSNDMRF

SEQ ID NO: 409006 - protein, 15 aa, Homo sapiens
  CDR3 for beta chain variable domain of TCR clone 204503 (TRBV5-1, TRBJ2-7)
CARSLGDFTTYEQYF

SEQ ID NO: 409007 - protein, 11 aa, Homo sapiens
  CDR3 for alpha chain variable domain of TCR clone 204504 (TRAV12-2, TRAJ49)
CAVNTGNQFYI

SEQ ID NO: 409008 - protein, 12 aa, Homo sapiens
  CDR3 for beta chain variable domain of TCR clone 204504 (TRBV2, TRBJ2-3)
CASSGRFDTQYF

SEQ ID NO: 409009 - protein, 13 aa, Homo sapiens
  CDR3 for alpha chain variable domain of TCR clone 204505 (TRAV13-1, TRAJ39)
CAASIWAGNMLTF

SEQ ID NO: 409010 - protein, 14 aa, Homo sapiens
  CDR3 for beta chain variable domain of TCR clone 204505 (TRBV7-7, TRBJ2-2)
CATRQDSDTGELFF

SEQ ID NO: 409011 - protein, 16 aa, Homo sapiens
  CDR3 for alpha chain variable domain of TCR clone 204506 (TRAV3, TRAJ37)
CAVRGKGSGNTGKLIF

SEQ ID NO: 409012 - protein, 13 aa, Homo sapiens
  CDR3 for beta chain variable domain of TCR clone 204506 (TRBV7-3, TRBJ1-1)
CASRQDWGAEAFF

SEQ ID NO: 409013 - protein, 13 aa, Homo sapiens
  CDR3 for alpha chain variable domain of TCR clone 204507 (TRAV8-6, TRAJ49)
CAVITNTGNQFYF

SEQ ID NO: 409014 - protein, 18 aa, Homo sapiens
  CDR3 for beta chain variable domain of TCR clone 204507 (TRBV28, TRBJ2-1)
CASSSTSGRANSYNEQFF

SEQ ID NO: 409015 - protein, 16 aa, Homo sapiens
  CDR3 for alpha chain variable domain of TCR clone 204508 (TRAV21, TRAJ52)
CAVTNAGGTSYGKLTF

SEQ ID NO: 409016 - protein, 12 aa, Homo sapiens
  CDR3 for beta chain variable domain of TCR clone 204508 (TRBV29-1, TRBJ2-3)
CSVTGGADTQYF

SEQ ID NO: 409017 - protein, 13 aa, Homo sapiens
  CDR3 for alpha chain variable domain of TCR clone 204509 (TRAV35, TRAJ57)
CAGSQGGSEKLVF

SEQ ID NO: 409018 - protein, 14 aa, Homo sapiens
  CDR3 for beta chain variable domain of TCR clone 204509 (TRBV25-1, TRBJ1-1)
CASTHLAGNTEAFF

SEQ ID NO: 409019 - protein, 14 aa, Homo sapiens
  CDR3 for alpha chain variable domain of TCR clone 204510 (TRAV12-2, TRAJ40)
CVVKIPSGTHKYIF

SEQ ID NO: 409020 - protein, 17 aa, Homo sapiens
  CDR3 for beta chain variable domain of TCR clone 204510 (TRBV13, TRBJ2-3)
CASSLSRVAGGRNTQYF

SEQ ID NO: 409021 - protein, 14 aa, Homo sapiens
  CDR3 for alpha chain variable domain of TCR clone 204511 (TRAV9-2, TRAJ39)
CALYIYNAVNMLTF

SEQ ID NO: 409022 - protein, 16 aa, Homo sapiens
  CDR3 for beta chain variable domain of TCR clone 204511 (TRBV5-1, TRBJ2-2)
CASSSRTGGRTEELFF

SEQ ID NO: 409023 - protein, 14 aa, Homo sapiens
  CDR3 for alpha chain variable domain of TCR clone 204512 (TRAV13-2, TRAJ10)
CAENITGGGNKLTF

SEQ ID NO: 409024 - protein, 15 aa, Homo sapiens
  CDR3 for beta chain variable domain of TCR clone 204512 (TRBV7-2, TRBJ2-7)
CASSLGGAKSGEQYV

SEQ ID NO: 409025 - protein, 14 aa, Homo sapiens
  CDR3 for alpha chain variable domain of TCR clone 204513 (TRAV1-2, TRAJ8)
CAVREDTGFQKLVF

SEQ ID NO: 409026 - protein, 19 aa, Homo sapiens
  CDR3 for beta chain variable domain of TCR clone 204513 (TRBV7-9, TRBJ2-1)
CASSLWGSTRKSSYNEQFF

SEQ ID NO: 409027 - protein, 11 aa, Homo sapiens
  CDR3 for alpha chain variable domain of TCR clone 204514 (TRAV25, TRAJ47)
CAGLYGNKMVF

SEQ ID NO: 409028 - protein, 14 aa, Homo sapiens
  CDR3 for beta chain variable domain of TCR clone 204514 (TRBV19, TRBJ2-1)
CASKEGVQVNEQFF

SEQ ID NO: 409029 - protein, 11 aa, Homo sapiens
  CDR3 for alpha chain variable domain of TCR clone 204515 (TRAV2, TRAJ33)
CAVDSNYQLIW

SEQ ID NO: 409030 - protein, 14 aa, Homo sapiens
  CDR3 for beta chain variable domain of TCR clone 204515 (TRBV11-3, TRBJ2-5)
CASSLGGHAETQYF

SEQ ID NO: 409031 - protein, 12 aa, Homo sapiens
  CDR3 for alpha chain variable domain of TCR clone 204516 (TRAV25, TRAJ38)
CAGTGNNRKLIW

SEQ ID NO: 409032 - protein, 14 aa, Homo sapiens
  CDR3 for beta chain variable domain of TCR clone 204516 (TRBV5-4, TRBJ1-1)
CVSSLDSGRDEAFF

SEQ ID NO: 409033 - protein, 15 aa, Homo sapiens
  CDR3 for alpha chain variable domain of TCR clone 204517 (TRAV12-3, TRAJ6)
CAMSATTGGSYIPTF

SEQ ID NO: 409034 - protein, 15 aa, Homo sapiens
  CDR3 for beta chain variable domain of TCR clone 204517 (TRBV19, TRBJ2-1)
CASSIQATSYNEQFF

SEQ ID NO: 409035 - protein, 12 aa, Homo sapiens
  CDR3 for alpha chain variable domain of TCR clone 204518 (TRAV23/DV6, TRAJ30)
CAASKGDDKIIF

SEQ ID NO: 409036 - protein, 13 aa, Homo sapiens
  CDR3 for beta chain variable domain of TCR clone 204518 (TRBV19, TRBJ1-2)
CASSVPGRDGYTF

SEQ ID NO: 409037 - protein, 14 aa, Homo sapiens
  CDR3 for alpha chain variable domain of TCR clone 204519 (TRAV17, TRAJ57)
CATDPQGGSEKLVF

SEQ ID NO: 409038 - protein, 13 aa, Homo sapiens
  CDR3 for beta chain variable domain of TCR clone 204519 (TRBV7-2, TRBJ2-4)
CASSREHANIQYF

SEQ ID NO: 409039 - protein, 13 aa, Homo sapiens
  CDR3 for alpha chain variable domain of TCR clone 204520 (TRAV12-2, TRAJ9)
CAVLETGGIKTIF

SEQ ID NO: 409040 - protein, 15 aa, Homo sapiens
  CDR3 for beta chain variable domain of TCR clone 204520 (TRBV6-3, TRBJ2-7)
CASSRTGVNLYEQYF

SEQ ID NO: 409041 - protein, 15 aa, Homo sapiens
  CDR3 for alpha chain variable domain of TCR clone 204521 (TRAV3, TRAJ47)
CAVGDIGEYGNTLVF

SEQ ID NO: 409042 - protein, 14 aa, Homo sapiens
  CDR3 for beta chain variable domain of TCR clone 204521 (TRBV13, TRBJ2-5)
CASSLERVGETQYF

SEQ ID NO: 409043 - protein, 16 aa, Homo sapiens
  CDR3 for alpha chain variable domain of TCR clone 204522 (TRAV27, TRAJ13)
CAGAKSDSGGYQKVTF

SEQ ID NO: 409044 - protein, 12 aa, Homo sapiens
  CDR3 for beta chain variable domain of TCR clone 204522 (TRBV7-6, TRBJ2-5)
CASSLSQETQYF

SEQ ID NO: 409045 - protein, 11 aa, Homo sapiens
  CDR3 for alpha chain variable domain of TCR clone 204523 (TRAV2, TRAJ13)
CASGVYQKVTF

SEQ ID NO: 409046 - protein, 17 aa, Homo sapiens
  CDR3 for beta chain variable domain of TCR clone 204523 (TRBV7-3, TRBJ2-3)
CARSLMKRMRGADTQYF

SEQ ID NO: 409047 - protein, 17 aa, Homo sapiens
  CDR3 for alpha chain variable domain of TCR clone 204524 (TRAV3, TRAJ6)
CAVRYGPRAGGSYIPTF

SEQ ID NO: 409048 - protein, 17 aa, Homo sapiens
  CDR3 for beta chain variable domain of TCR clone 204524 (TRBV20-1, TRBJ2-1)
CSAPPRLAGTRYNEQFF

SEQ ID NO: 409049 - protein, 12 aa, Homo sapiens
  CDR3 for alpha chain variable domain of TCR clone 204525 (TRAV2, TRAJ26)
CAGSPGRLCSEF

SEQ ID NO: 409050 - protein, 16 aa, Homo sapiens
  CDR3 for beta chain variable domain of TCR clone 204525 (TRBV13, TRBJ2-2)
CASSPRTGEHTGELFF

SEQ ID NO: 409051 - protein, 14 aa, Homo sapiens
  CDR3 for alpha chain variable domain of TCR clone 204526 (TRAV1-2, TRAJ16)
CAVNRVSDGQKLLF

SEQ ID NO: 409052 - protein, 13 aa, Homo sapiens
  CDR3 for beta chain variable domain of TCR clone 204526 (TRBV6-5, TRBJ1-1)
QTSVYFCALRAFF

SEQ ID NO: 409053 - protein, 19 aa, Homo sapiens
  CDR3 for alpha chain variable domain of TCR clone 204527 (TRAV13-1, TRAJ52)
CAASPYQNAGGTSYGKLTF

SEQ ID NO: 409054 - protein, 16 aa, Homo sapiens
  CDR3 for beta chain variable domain of TCR clone 204527 (TRBV20-1, TRBJ1-4)
CSAPGQGLLTNEKLFF

SEQ ID NO: 409055 - protein, 13 aa, Homo sapiens
  CDR3 for alpha chain variable domain of TCR clone 204528 (TRAV8-1, TRAJ28)
CAVSGAGSYQLTF

SEQ ID NO: 409056 - protein, 11 aa, Homo sapiens
  CDR3 for beta chain variable domain of TCR clone 204528 (TRBV7-2, TRBJ2-2)
CGQGAAGELFF

SEQ ID NO: 409057 - protein, 13 aa, Homo sapiens
  CDR3 for alpha chain variable domain of TCR clone 204529 (TRAV3, TRAJ43)
CAVRDTRGGDMRL

SEQ ID NO: 409058 - protein, 15 aa, Homo sapiens
  CDR3 for beta chain variable domain of TCR clone 204529 (TRBV6-5, TRBJ1-5)
CASSYSRRSNQPQHF

SEQ ID NO: 409059 - protein, 14 aa, Homo sapiens
  CDR3 for alpha chain variable domain of TCR clone 204530 (TRAV8-3, TRAJ4)
CAVGASCGYNKLIF

SEQ ID NO: 409060 - protein, 16 aa, Homo sapiens
  CDR3 for beta chain variable domain of TCR clone 204530 (TRBV4-3, TRBJ2-2)
CASSHLQGSGTGELFF

SEQ ID NO: 409061 - protein, 17 aa, Homo sapiens
  CDR3 for alpha chain variable domain of TCR clone 204531 (TRAV3, TRAJ28)
CAVREAYSGAGSYQLTF

SEQ ID NO: 409062 - protein, 18 aa, Homo sapiens
  CDR3 for beta chain variable domain of TCR clone 204531 (TRBV27, TRBJ2-1)
CASGNRAVEVGSKNEQFV

SEQ ID NO: 409063 - protein, 16 aa, Homo sapiens
  CDR3 for alpha chain variable domain of TCR clone 204532 (TRAV1-1, TRAJ29)
CAVRSTRNSGNTPLVF

SEQ ID NO: 409064 - protein, 15 aa, Homo sapiens
  CDR3 for beta chain variable domain of TCR clone 204532 (TRBV7-3, TRBJ2-2)
CASSETGQGTGELFF

SEQ ID NO: 409065 - protein, 17 aa, Homo sapiens
  CDR3 for alpha chain variable domain of TCR clone 204533 (TRAV3, TRAJ6)
CAVRDGPRAGGSYIPTF

SEQ ID NO: 409066 - protein, 16 aa, Homo sapiens
  CDR3 for beta chain variable domain of TCR clone 204533 (TRBV12-4, TRBJ1-4)
CASSLKGIGHGEKLFF

SEQ ID NO: 409067 - protein, 17 aa, Homo sapiens
  CDR3 for alpha chain variable domain of TCR clone 204534 (TRAV3, TRAJ42)
CAVRDRDYGGSQGNIIF

SEQ ID NO: 409068 - protein, 14 aa, Homo sapiens
  CDR3 for beta chain variable domain of TCR clone 204534 (TRBV5-4, TRBJ1-1)
CASSLDSRRDEAFF

SEQ ID NO: 409069 - protein, 16 aa, Homo sapiens
  CDR3 for alpha chain variable domain of TCR clone 204535 (TRAV30, TRAJ24)
CGSEIVDADSWGKFQF

SEQ ID NO: 409070 - protein, 19 aa, Homo sapiens
  CDR3 for beta chain variable domain of TCR clone 204535 (TRBV25-1, TRBJ2-2)
CAILVYRVDRGRKTGELFF

SEQ ID NO: 409071 - protein, 14 aa, Homo sapiens
  CDR3 for alpha chain variable domain of TCR clone 204536 (TRAV13-1, TRAJ48)
CAASTDFGNEKLTF

SEQ ID NO: 409072 - protein, 14 aa, Homo sapiens
  CDR3 for beta chain variable domain of TCR clone 204536 (TRBV10-3, TRBJ2-5)
CAPKGGNNQETQYF

SEQ ID NO: 409073 - protein, 13 aa, Homo sapiens
  CDR3 for alpha chain variable domain of TCR clone 204537 (TRAV12-3, TRAJ33)
CAMSVNSNYQLIW

SEQ ID NO: 409074 - protein, 12 aa, Homo sapiens
  CDR3 for beta chain variable domain of TCR clone 204537 (TRBV19, TRBJ2-1)
CASGTSLNEQFF

SEQ ID NO: 409075 - protein, 17 aa, Homo sapiens
  CDR3 for alpha chain variable domain of TCR clone 204538 (TRAV3, TRAJ6)
CAVRDGPRAGGSYILTF

SEQ ID NO: 409076 - protein, 13 aa, Homo sapiens
  CDR3 for beta chain variable domain of TCR clone 204538 (TRBV7-3, TRBJ1-1)
CASSQDWGAEAFF

SEQ ID NO: 409077 - protein, 13 aa, Homo sapiens
  CDR3 for alpha chain variable domain of TCR clone 204539 (TRAV17, TRAJ4)
CATKSGGYNKLIF

SEQ ID NO: 409078 - protein, 18 aa, Homo sapiens
  CDR3 for beta chain variable domain of TCR clone 204539 (TRBV11-2, TRBJ2-3)
CASSLGGASRGAPNTQYF

SEQ ID NO: 409079 - protein, 14 aa, Homo sapiens
  CDR3 for alpha chain variable domain of TCR clone 204540 (TRAV1-2, TRAJ8)
CAVREATGFQKLVF

SEQ ID NO: 409080 - protein, 13 aa, Homo sapiens
  CDR3 for beta chain variable domain of TCR clone 204540 (TRBV2, TRBJ2-1)
CASSGTSGGEQFF

SEQ ID NO: 409081 - protein, 13 aa, Homo sapiens
  CDR3 for alpha chain variable domain of TCR clone 204541 (TRAV27, TRAJ11)
CAGGGLGYSTLTF

SEQ ID NO: 409082 - protein, 15 aa, Homo sapiens
  CDR3 for beta chain variable domain of TCR clone 204541 (TRBV5-1, TRBJ1-1)
CASSLGQGRFAEAFF

SEQ ID NO: 409083 - protein, 20 aa, Homo sapiens
  CDR3 for alpha chain variable domain of TCR clone 204542 (TRAV26-2, TRAJ29)
CILRDRSSTHRNSGNTPLVF

SEQ ID NO: 409084 - protein, 13 aa, Homo sapiens
  CDR3 for beta chain variable domain of TCR clone 204542 (TRBV7-9, TRBJ2-7)
CASSLKAGQEQYF

SEQ ID NO: 409085 - protein, 15 aa, Homo sapiens
  CDR3 for alpha chain variable domain of TCR clone 204543 (TRAV20, TRAJ53)
CAVQASGGSNYILTF

SEQ ID NO: 409086 - protein, 12 aa, Homo sapiens
  CDR3 for beta chain variable domain of TCR clone 204543 (TRBV7-6, TRBJ2-5)
CASSLSQETQYF

SEQ ID NO: 409087 - protein, 14 aa, Homo sapiens
  CDR3 for alpha chain variable domain of TCR clone 204544 (TRAV26-2, TRAJ32)
CCVGYGGATNKLIF

SEQ ID NO: 409088 - protein, 13 aa, Homo sapiens
  CDR3 for beta chain variable domain of TCR clone 204544 (TRBV20-1, TRBJ1-1)
CSAPLGGGTEAFF

SEQ ID NO: 409089 - protein, 14 aa, Homo sapiens
  CDR3 for alpha chain variable domain of TCR clone 204545 (TRAV1-2, TRAJ16)
CAVNRFSDGQKLLF

SEQ ID NO: 409090 - protein, 13 aa, Homo sapiens
  CDR3 for beta chain variable domain of TCR clone 204545 (TRBV7-9, TRBJ1-2)
CARSVKQNYGYTF

SEQ ID NO: 409091 - protein, 15 aa, Homo sapiens
  CDR3 for alpha chain variable domain of TCR clone 204546 (TRAV25, TRAJ52)
CAGTSGGTSYGKLAL

SEQ ID NO: 409092 - protein, 12 aa, Homo sapiens
  CDR3 for beta chain variable domain of TCR clone 204546 (TRBV7-2, TRBJ2-1)
CASSLRQNEQFF

SEQ ID NO: 409093 - protein, 15 aa, Homo sapiens
  CDR3 for alpha chain variable domain of TCR clone 204547 (TRAV29/DV5, TRAJ40)
CAASAQGSGTYKYIF

SEQ ID NO: 409094 - protein, 14 aa, Homo sapiens
  CDR3 for beta chain variable domain of TCR clone 204547 (TRBV7-2, TRBJ1-1)
CASSFLTGTTEAFF

SEQ ID NO: 409095 - protein, 10 aa, Homo sapiens
  CDR3 for alpha chain variable domain of TCR clone 204548 (TRAV12-2, TRAJ52)
RSTSYGKLTF

SEQ ID NO: 409096 - protein, 15 aa, Homo sapiens
  CDR3 for beta chain variable domain of TCR clone 204548 (TRBV9, TRBJ1-6)
CASSVAGTGDSPLHF

SEQ ID NO: 409097 - protein, 11 aa, Homo sapiens
  CDR3 for alpha chain variable domain of TCR clone 204549 (TRAV17, TRAJ43)
CAIDNNNDMRF

SEQ ID NO: 409098 - protein, 17 aa, Homo sapiens
  CDR3 for beta chain variable domain of TCR clone 204549 (TRBV15, TRBJ1-5)
CATSRAPPGTRNQPQHF

SEQ ID NO: 409099 - protein, 16 aa, Homo sapiens
  CDR3 for alpha chain variable domain of TCR clone 204550 (TRAV30, TRAJ24)
CGTEIGDADSWGKFQL

SEQ ID NO: 409100 - protein, 14 aa, Homo sapiens
  CDR3 for beta chain variable domain of TCR clone 204550 (TRBV12-5, TRBJ2-5)
CASGSRTHQETQYF

SEQ ID NO: 409101 - protein, 10 aa, Homo sapiens
  CDR3 for alpha chain variable domain of TCR clone 204551 (TRAV12-3, TRAJ49)
CAMNEHQFYF

SEQ ID NO: 409102 - protein, 13 aa, Homo sapiens
  CDR3 for beta chain variable domain of TCR clone 204551 (TRBV12-4, TRBJ1-1)
CASSPGTGCEAFF

SEQ ID NO: 409103 - protein, 12 aa, Homo sapiens
  CDR3 for alpha chain variable domain of TCR clone 204552 (TRAV12-1, TRAJ40)
CVVYSGTYKYIF

SEQ ID NO: 409104 - protein, 18 aa, Homo sapiens
  CDR3 for beta chain variable domain of TCR clone 204552 (TRBV11-2, TRBJ2-3)
CASSLGMASRGAPNTQYF

SEQ ID NO: 409105 - protein, 14 aa, Homo sapiens
  CDR3 for alpha chain variable domain of TCR clone 204553 (TRAV12-2, TRAJ40)
CAVKIPSGTYKYIF

SEQ ID NO: 409106 - protein, 17 aa, Homo sapiens
  CDR3 for beta chain variable domain of TCR clone 204553 (TRBV11-2, TRBJ2-1)
CASSLYPQGVEYNEQFF

SEQ ID NO: 409107 - protein, 17 aa, Homo sapiens
  CDR3 for alpha chain variable domain of TCR clone 204554 (TRAV21, TRAJ52)
CAVGTNAGGTSYEKLTF

SEQ ID NO: 409108 - protein, 13 aa, Homo sapiens
  CDR3 for beta chain variable domain of TCR clone 204554 (TRBV5-1, TRBJ1-2)
CASSFSGNLGYTF

SEQ ID NO: 409109 - protein, 14 aa, Homo sapiens
  CDR3 for alpha chain variable domain of TCR clone 204555 (TRAV35, TRAJ33)
CAGSSRDSNYQLIW

SEQ ID NO: 409110 - protein, 15 aa, Homo sapiens
  CDR3 for beta chain variable domain of TCR clone 204555 (TRBV20-1, TRBJ2-7)
CSAEAGTSGAYEQYF

SEQ ID NO: 409111 - protein, 18 aa, Homo sapiens
  CDR3 for alpha chain variable domain of TCR clone 204556 (TRAV26-2, TRAJ45)
CILRVDKYSGGCADGLTF

SEQ ID NO: 409112 - protein, 14 aa, Homo sapiens
  CDR3 for beta chain variable domain of TCR clone 204556 (TRBV7-2, TRBJ2-7)
CASRSQGAAYEQYF

SEQ ID NO: 409113 - protein, 22 aa, Homo sapiens
  CDR3 for alpha chain variable domain of TCR clone 204557 (TRAV36/DV7, TRAJ38)
CVANAGNNHIQNPDPPVYQLRD

SEQ ID NO: 409114 - protein, 14 aa, Homo sapiens
  CDR3 for beta chain variable domain of TCR clone 204557 (TRBV7-2, TRBJ2-7)
CASSLRWEVNEQYF

SEQ ID NO: 409115 - protein, 12 aa, Homo sapiens
  CDR3 for alpha chain variable domain of TCR clone 204558 (TRAV25, TRAJ11)
CAGYSGYSILTF

SEQ ID NO: 409116 - protein, 13 aa, Homo sapiens
  CDR3 for beta chain variable domain of TCR clone 204558 (TRBV10-3, TRBJ2-7)
CASKLAVNYEQYF

SEQ ID NO: 409117 - protein, 15 aa, Homo sapiens
  CDR3 for alpha chain variable domain of TCR clone 204559 (TRAV23/DV6, TRAJ18)
CAASFRGSTLGRLYF

SEQ ID NO: 409118 - protein, 13 aa, Homo sapiens
  CDR3 for beta chain variable domain of TCR clone 204559 (TRBV28, TRBJ2-7)
CAIMDRAGGEQYF

SEQ ID NO: 409119 - protein, 16 aa, Homo sapiens
  CDR3 for alpha chain variable domain of TCR clone 204560 (TRAV21, TRAJ37)
CAVRTAGSSNTGKLIF

SEQ ID NO: 409120 - protein, 16 aa, Homo sapiens
  CDR3 for beta chain variable domain of TCR clone 204560 (TRBV7-3, TRBJ2-2)
CASSLKRGTLSGELFF

SEQ ID NO: 409121 - protein, 16 aa, Homo sapiens
  CDR3 for alpha chain variable domain of TCR clone 204561 (TRAV17, TRAJ52)
CATSNAGGTSYGKLTF

SEQ ID NO: 409122 - protein, 14 aa, Homo sapiens
  CDR3 for beta chain variable domain of TCR clone 204561 (TRBV4-1, TRBJ2-5)
CASSRSGSGETQYF

SEQ ID NO: 409123 - protein, 16 aa, Homo sapiens
  CDR3 for alpha chain variable domain of TCR clone 204562 (TRAV8-4, TRAJ28)
CAVESNSGAGSYQLTF

SEQ ID NO: 409124 - protein, 13 aa, Homo sapiens
  CDR3 for beta chain variable domain of TCR clone 204562 (TRBV10-3, TRBJ1-2)
CAISERDSYGYTF

SEQ ID NO: 409125 - protein, 16 aa, Homo sapiens
  CDR3 for alpha chain variable domain of TCR clone 204563 (TRAV13-1, TRAJ48)
CATSIFGNFGNEKLTF

SEQ ID NO: 409126 - protein, 16 aa, Homo sapiens
  CDR3 for beta chain variable domain of TCR clone 204563 (TRBV18, TRBJ1-5)
CASSPYRVEGNQPQHF

SEQ ID NO: 409127 - protein, 12 aa, Homo sapiens
  CDR3 for alpha chain variable domain of TCR clone 204564 (TRAV20, TRAJ20)
CAVRFNDYKPSF

SEQ ID NO: 409128 - protein, 14 aa, Homo sapiens
  CDR3 for beta chain variable domain of TCR clone 204564 (TRBV20-1, TRBJ2-1)
CSAQIGGAANEQFF

SEQ ID NO: 409129 - protein, 16 aa, Homo sapiens
  CDR3 for alpha chain variable domain of TCR clone 204565 (TRAV26-2, TRAJ47)
CCVLLHHKSRRNKLVF

SEQ ID NO: 409130 - protein, 14 aa, Homo sapiens
  CDR3 for beta chain variable domain of TCR clone 204565 (TRBV25-1, TRBJ1-1)
CASTHLGGNTEAFF

SEQ ID NO: 409131 - protein, 13 aa, Homo sapiens
  CDR3 for alpha chain variable domain of TCR clone 204566 (TRAV36/DV7, TRAJ53)
CALSEGSNYKLTF

SEQ ID NO: 409132 - protein, 13 aa, Homo sapiens
  CDR3 for beta chain variable domain of TCR clone 204566 (TRBV28, TRBJ2-7)
CASSLPSRYEQYF

SEQ ID NO: 409133 - protein, 14 aa, Homo sapiens
  CDR3 for alpha chain variable domain of TCR clone 204567 (TRAV16, TRAJ52)
CALAGGTSYGKLTF

SEQ ID NO: 409134 - protein, 13 aa, Homo sapiens
  CDR3 for beta chain variable domain of TCR clone 204567 (TRBV28, TRBJ1-2)
CASSFREQYGYTF

SEQ ID NO: 409135 - protein, 16 aa, Homo sapiens
  CDR3 for alpha chain variable domain of TCR clone 204568 (TRAV30, TRAJ24)
CGTEIVDADSWGKFKF

SEQ ID NO: 409136 - protein, 14 aa, Homo sapiens
  CDR3 for beta chain variable domain of TCR clone 204568 (TRBV12-5, TRBJ2-5)
CASGSRAHQETQYF

SEQ ID NO: 409137 - protein, 14 aa, Homo sapiens
  CDR3 for alpha chain variable domain of TCR clone 204569 (TRAV29/DV5, TRAJ36)
CSARRKTGANNLLF

SEQ ID NO: 409138 - protein, 14 aa, Homo sapiens
  CDR3 for beta chain variable domain of TCR clone 204569 (TRBV12-5, TRBJ2-5)
CASGSRTHQETQYF

SEQ ID NO: 409139 - protein, 12 aa, Homo sapiens
  CDR3 for alpha chain variable domain of TCR clone 204570 (TRAV12-3, TRAJ17)
CAMTLTGNKLTF

SEQ ID NO: 409140 - protein, 17 aa, Homo sapiens
  CDR3 for beta chain variable domain of TCR clone 204570 (TRBV11-2, TRBJ2-1)
CASSLYPPGVEYNEQVF

SEQ ID NO: 409141 - protein, 13 aa, Homo sapiens
  CDR3 for alpha chain variable domain of TCR clone 204571 (TRAV21, TRAJ34)
CAVSEGDTEKLIF

SEQ ID NO: 409142 - protein, 17 aa, Homo sapiens
  CDR3 for beta chain variable domain of TCR clone 204571 (TRBV20-1, TRBJ1-5)
CSARDPSAQGFNQPQHF

SEQ ID NO: 409143 - protein, 13 aa, Homo sapiens
  CDR3 for alpha chain variable domain of TCR clone 204572 (TRAV12-1, TRAJ9)
CVVLNTGGFKTIV

SEQ ID NO: 409144 - protein, 13 aa, Homo sapiens
  CDR3 for beta chain variable domain of TCR clone 204572 (TRBV20-1, TRBJ1-1)
CSARGGGNTEAFF

SEQ ID NO: 409145 - protein, 16 aa, Homo sapiens
  CDR3 for alpha chain variable domain of TCR clone 204573 (TRAV30, TRAJ24)
CGPEIVDADSWGKFQF

SEQ ID NO: 409146 - protein, 13 aa, Homo sapiens
  CDR3 for beta chain variable domain of TCR clone 204573 (TRBV18, TRBJ1-2)
CASSASATEGYTF

SEQ ID NO: 409147 - protein, 12 aa, Homo sapiens
  CDR3 for alpha chain variable domain of TCR clone 204574 (TRAV3, TRAJ43)
CAVRDPNNDMRF

SEQ ID NO: 409148 - protein, 16 aa, Homo sapiens
  CDR3 for beta chain variable domain of TCR clone 204574 (TRBV15, TRBJ1-2)
CATSRGPRTGGGGYTF

SEQ ID NO: 409149 - protein, 11 aa, Homo sapiens
  CDR3 for alpha chain variable domain of TCR clone 204575 (TRAV12-2, TRAJ31)
CAVTRWARLMF

SEQ ID NO: 409150 - protein, 15 aa, Homo sapiens
  CDR3 for beta chain variable domain of TCR clone 204575 (TRBV19, TRBJ2-7)
CASSIGGGLVIEQYF

SEQ ID NO: 409151 - protein, 10 aa, Homo sapiens
  CDR3 for alpha chain variable domain of TCR clone 204576 (TRAV36/DV7, TRAJ38)
CAANNRKLIW

SEQ ID NO: 409152 - protein, 17 aa, Homo sapiens
  CDR3 for beta chain variable domain of TCR clone 204576 (TRBV7-3, TRBJ2-3)
CASSLMKRMRGADTQYF

SEQ ID NO: 409153 - protein, 16 aa, Homo sapiens
  CDR3 for alpha chain variable domain of TCR clone 204577 (TRAV29/DV5, TRAJ36)
CAASAHYQSGANNLFF

SEQ ID NO: 409154 - protein, 17 aa, Homo sapiens
  CDR3 for beta chain variable domain of TCR clone 204577 (TRBV20-1, TRBJ2-2)
CSASGSGQGGLTGELSF

SEQ ID NO: 409155 - protein, 13 aa, Homo sapiens
  CDR3 for alpha chain variable domain of TCR clone 204578 (TRAV21, TRAJ10)
CAVRPGGGNKLTF

SEQ ID NO: 409156 - protein, 12 aa, Homo sapiens
  CDR3 for beta chain variable domain of TCR clone 204578 (TRBV14, TRBJ1-1)
CASSQLKGLAFF

SEQ ID NO: 409157 - protein, 12 aa, Homo sapiens
  CDR3 for alpha chain variable domain of TCR clone 204579 (TRAV8-3, TRAJ34)
WASGYNTDKLLF

SEQ ID NO: 409158 - protein, 13 aa, Homo sapiens
  CDR3 for beta chain variable domain of TCR clone 204579 (TRBV6-4, TRBJ2-3)
CASSVSWADTQYF

SEQ ID NO: 409159 - protein, 15 aa, Homo sapiens
  CDR3 for alpha chain variable domain of TCR clone 204580 (TRAV13-2, TRAJ6)
CAEKVLAGGSYIPTF

SEQ ID NO: 409160 - protein, 16 aa, Homo sapiens
  CDR3 for beta chain variable domain of TCR clone 204580 (TRBV10-3, TRBJ2-1)
CAIRGGGRGDYNEQFF

SEQ ID NO: 409161 - protein, 15 aa, Homo sapiens
  CDR3 for alpha chain variable domain of TCR clone 204581 (TRAV26-1, TRAJ22)
CIVRVSFWFCKATDF

SEQ ID NO: 409162 - protein, 12 aa, Homo sapiens
  CDR3 for beta chain variable domain of TCR clone 204581 (TRBV11-2, TRBJ2-2)
CASSLGGGELFF

SEQ ID NO: 409163 - protein, 16 aa, Homo sapiens
  CDR3 for alpha chain variable domain of TCR clone 204582 (TRAV3, TRAJ37)
CAVRPHGSGNTGKLIF

SEQ ID NO: 409164 - protein, 14 aa, Homo sapiens
  CDR3 for beta chain variable domain of TCR clone 204582 (TRBV25-1, TRBJ1-1)
CASTDLGGNTEAFF

SEQ ID NO: 409165 - protein, 12 aa, Homo sapiens
  CDR3 for alpha chain variable domain of TCR clone 204583 (TRAV1-1, TRAJ23)
CAVTNQGGKLIF

SEQ ID NO: 409166 - protein, 15 aa, Homo sapiens
  CDR3 for beta chain variable domain of TCR clone 204583 (TRBV4-1, TRBJ1-4)
CASSDTGGTNEKLFF

SEQ ID NO: 409167 - protein, 13 aa, Homo sapiens
  CDR3 for alpha chain variable domain of TCR clone 204584 (TRAV13-1, TRAJ28)
CAANEAGSYQLTL

SEQ ID NO: 409168 - protein, 15 aa, Homo sapiens
  CDR3 for beta chain variable domain of TCR clone 204584 (TRBV7-9, TRBJ1-6)
CASSSPGRGNSPLHF

SEQ ID NO: 409169 - protein, 12 aa, Homo sapiens
  CDR3 for alpha chain variable domain of TCR clone 204585 (TRAV26-1, TRAJ35)
CIGLSFGHVLHC

SEQ ID NO: 409170 - protein, 17 aa, Homo sapiens
  CDR3 for beta chain variable domain of TCR clone 204585 (TRBV11-3, TRBJ1-5)
CASSPLTGLRGNQPQHF

SEQ ID NO: 409171 - protein, 14 aa, Homo sapiens
  CDR3 for alpha chain variable domain of TCR clone 204586 (TRAV1-2, TRAJ16)
CAVNRFSDGQKLLF

SEQ ID NO: 409172 - protein, 15 aa, Homo sapiens
  CDR3 for beta chain variable domain of TCR clone 204586 (TRBV5-4, TRBJ2-3)
CASSLYRGRTDTQYF

SEQ ID NO: 409173 - protein, 15 aa, Homo sapiens
  CDR3 for alpha chain variable domain of TCR clone 204587 (TRAV26-1, TRAJ44)
CIVRIGTGTASKLTF

SEQ ID NO: 409174 - protein, 15 aa, Homo sapiens
  CDR3 for beta chain variable domain of TCR clone 204587 (TRBV18, TRBJ2-1)
CASLPDRGRDNEQFF

SEQ ID NO: 409175 - protein, 13 aa, Homo sapiens
  CDR3 for alpha chain variable domain of TCR clone 204588 (TRAV4, TRAJ9)
LVGSFTLFFKTIF

SEQ ID NO: 409176 - protein, 15 aa, Homo sapiens
  CDR3 for beta chain variable domain of TCR clone 204588 (TRBV7-2, TRBJ2-1)
CASSLASGRVNEQFF

SEQ ID NO: 409177 - protein, 14 aa, Homo sapiens
  CDR3 for alpha chain variable domain of TCR clone 204589 (TRAV3, TRAJ36)
CAVRDGTVANNLFF

SEQ ID NO: 409178 - protein, 16 aa, Homo sapiens
  CDR3 for beta chain variable domain of TCR clone 204589 (TRBV20-1, TRBJ2-6)
CSAREGPGVGANVLTF

SEQ ID NO: 409179 - protein, 13 aa, Homo sapiens
  CDR3 for alpha chain variable domain of TCR clone 204590 (TRAV21, TRAJ56)
CAVRTGANSTLTF

SEQ ID NO: 409180 - protein, 15 aa, Homo sapiens
  CDR3 for beta chain variable domain of TCR clone 204590 (TRBV7-9, TRBJ1-1)
CASSHRGTVNTEAFF

SEQ ID NO: 409181 - protein, 15 aa, Homo sapiens
  CDR3 for alpha chain variable domain of TCR clone 204591 (TRAV3, TRAJ32)
CAVSSYGGATNKLIF

SEQ ID NO: 409182 - protein, 15 aa, Homo sapiens
  CDR3 for beta chain variable domain of TCR clone 204591 (TRBV27, TRBJ2-1)
CASSNGGGSSNEQFF

SEQ ID NO: 409183 - protein, 13 aa, Homo sapiens
  CDR3 for alpha chain variable domain of TCR clone 204592 (TRAV16, TRAJ5)
FALTNTGRRALTF

SEQ ID NO: 409184 - protein, 15 aa, Homo sapiens
  CDR3 for beta chain variable domain of TCR clone 204592 (TRBV11-2, TRBJ2-4)
CASSRPGTGINIQYF

SEQ ID NO: 409185 - protein, 20 aa, Homo sapiens
  CDR3 for alpha chain variable domain of TCR clone 204593 (TRAV26-1, TRAJ42)
CRVLLRRQTYYGGSQGNLIF

SEQ ID NO: 409186 - protein, 16 aa, Homo sapiens
  CDR3 for beta chain variable domain of TCR clone 204593 (TRBV7-3, TRBJ2-2)
CASSLKRGTLSGELFC

SEQ ID NO: 409187 - protein, 12 aa, Homo sapiens
  CDR3 for alpha chain variable domain of TCR clone 204594 (TRAV21, TRAJ17)
CAVIAAGNKLTF

SEQ ID NO: 409188 - protein, 13 aa, Homo sapiens
  CDR3 for beta chain variable domain of TCR clone 204594 (TRBV12-4, TRBJ1-2)
CASSLRQGKGYTF

SEQ ID NO: 409189 - protein, 15 aa, Homo sapiens
  CDR3 for alpha chain variable domain of TCR clone 204595 (TRAV12-2, TRAJ32)
CAVNHYGGATNKLIF

SEQ ID NO: 409190 - protein, 14 aa, Homo sapiens
  CDR3 for beta chain variable domain of TCR clone 204595 (TRBV27, TRBJ2-1)
CTSSFGREANEQFF

SEQ ID NO: 409191 - protein, 13 aa, Homo sapiens
  CDR3 for alpha chain variable domain of TCR clone 204596 (TRAV1-2, TRAJ9)
CAALNTGGFTTIF

SEQ ID NO: 409192 - protein, 14 aa, Homo sapiens
  CDR3 for beta chain variable domain of TCR clone 204596 (TRBV7-2, TRBJ1-2)
CASSQTGSTYGYTF

SEQ ID NO: 409193 - protein, 13 aa, Homo sapiens
  CDR3 for alpha chain variable domain of TCR clone 204597 (TRAV27, TRAJ41)
CAGEGNSGYALNF

SEQ ID NO: 409194 - protein, 14 aa, Homo sapiens
  CDR3 for beta chain variable domain of TCR clone 204597 (TRBV25-1, TRBJ1-1)
CASTHLGGNSEAFF

SEQ ID NO: 409195 - protein, 15 aa, Homo sapiens
  CDR3 for alpha chain variable domain of TCR clone 204598 (TRAV2, TRAJ9)
CAVEDRGTGGFKTIF

SEQ ID NO: 409196 - protein, 16 aa, Homo sapiens
  CDR3 for beta chain variable domain of TCR clone 204598 (TRBV7-2, TRBJ2-3)
CASSLVALYSTDTQYF

SEQ ID NO: 409197 - protein, 14 aa, Homo sapiens
  CDR3 for alpha chain variable domain of TCR clone 204599 (TRAV3, TRAJ40)
CAVRDMTGTYKYIF

SEQ ID NO: 409198 - protein, 16 aa, Homo sapiens
  CDR3 for beta chain variable domain of TCR clone 204599 (TRBV18, TRBJ2-7)
CASSPGRAGGSYEQYF

SEQ ID NO: 409199 - protein, 14 aa, Homo sapiens
  CDR3 for alpha chain variable domain of TCR clone 204600 (TRAV17, TRAJ57)
CATDPQGGSEKLVF

SEQ ID NO: 409200 - protein, 18 aa, Homo sapiens
  CDR3 for beta chain variable domain of TCR clone 204600 (TRBV4-1, TRBJ2-3)
CASSQGGASGGATDTQYF

SEQ ID NO: 409201 - protein, 17 aa, Homo sapiens
  CDR3 for alpha chain variable domain of TCR clone 204601 (TRAV38-2/DV8, TRAJ38)
CAYRSARGAGNNRKLIW

SEQ ID NO: 409202 - protein, 16 aa, Homo sapiens
  CDR3 for beta chain variable domain of TCR clone 204601 (TRBV20-1, TRBJ1-2)
CSASMGQGVANYGYTF

SEQ ID NO: 409203 - protein, 16 aa, Homo sapiens
  CDR3 for alpha chain variable domain of TCR clone 204602 (TRAV3, TRAJ18)
CAVRDGRGSTLGRLCF

SEQ ID NO: 409204 - protein, 15 aa, Homo sapiens
  CDR3 for beta chain variable domain of TCR clone 204602 (TRBV7-9, TRBJ1-6)
CASSSPGRGNSPLHF

SEQ ID NO: 409205 - protein, 14 aa, Homo sapiens
  CDR3 for alpha chain variable domain of TCR clone 204603 (TRAV12-2, TRAJ40)
CAVKIPSGTYKYIF

SEQ ID NO: 409206 - protein, 17 aa, Homo sapiens
  CDR3 for beta chain variable domain of TCR clone 204603 (TRBV7-2, TRBJ2-3)
CASSLAGGLAGTAGQYF

SEQ ID NO: 409207 - protein, 16 aa, Homo sapiens
  CDR3 for alpha chain variable domain of TCR clone 204604 (TRAV3, TRAJ37)
CAVRGKGFGNTGKLIV

SEQ ID NO: 409208 - protein, 13 aa, Homo sapiens
  CDR3 for beta chain variable domain of TCR clone 204604 (TRBV14, TRBJ2-7)
CASSQDRRYEQYF

SEQ ID NO: 409209 - protein, 12 aa, Homo sapiens
  CDR3 for alpha chain variable domain of TCR clone 204605 (TRAV1-2, TRAJ24)
CAVGGSWGKFQF

SEQ ID NO: 409210 - protein, 13 aa, Homo sapiens
  CDR3 for beta chain variable domain of TCR clone 204605 (TRBV7-2, TRBJ1-5)
CASSFARNQPQHF

SEQ ID NO: 409211 - protein, 14 aa, Homo sapiens
  CDR3 for alpha chain variable domain of TCR clone 204606 (TRAV3, TRAJ9)
CAVRLNTGGLKTIF

SEQ ID NO: 409212 - protein, 16 aa, Homo sapiens
  CDR3 for beta chain variable domain of TCR clone 204606 (TRBV12-5, TRBJ2-5)
CASGPRTSGNQETQYF

SEQ ID NO: 409213 - protein, 15 aa, Homo sapiens
  CDR3 for alpha chain variable domain of TCR clone 204607 (TRAV12-3, TRAJ27)
CAMRAYNTNAGKSTF

SEQ ID NO: 409214 - protein, 15 aa, Homo sapiens
  CDR3 for beta chain variable domain of TCR clone 204607 (TRBV19, TRBJ1-2)
CASSVGQVLNYGYTF

SEQ ID NO: 409215 - protein, 14 aa, Homo sapiens
  CDR3 for alpha chain variable domain of TCR clone 204608 (TRAV12-2, TRAJ17)
CAVLFKAAVNKLTF

SEQ ID NO: 409216 - protein, 17 aa, Homo sapiens
  CDR3 for beta chain variable domain of TCR clone 204608 (TRBV20-1, TRBJ2-2)
CSASGSGQGGLTGELFL

SEQ ID NO: 409217 - protein, 16 aa, Homo sapiens
  CDR3 for alpha chain variable domain of TCR clone 204609 (TRAV30, TRAJ24)
CGAEIVDADSWGKFQF

SEQ ID NO: 409218 - protein, 14 aa, Homo sapiens
  CDR3 for beta chain variable domain of TCR clone 204609 (TRBV7-9, TRBJ2-1)
CASSLGVADNEQFF

SEQ ID NO: 409219 - protein, 14 aa, Homo sapiens
  CDR3 for alpha chain variable domain of TCR clone 204610 (TRAV17, TRAJ57)
CATDPQGGSEKLVF

SEQ ID NO: 409220 - protein, 14 aa, Homo sapiens
  CDR3 for beta chain variable domain of TCR clone 204610 (TRBV27, TRBJ2-5)
CASSSLKGWDTQYF

SEQ ID NO: 409221 - protein, 13 aa, Homo sapiens
  CDR3 for alpha chain variable domain of TCR clone 204611 (TRAV21, TRAJ26)
CAVLDNYGQNFVF

SEQ ID NO: 409222 - protein, 16 aa, Homo sapiens
  CDR3 for beta chain variable domain of TCR clone 204611 (TRBV29-1, TRBJ2-2)
CSVGTRASGNTGELFF

SEQ ID NO: 409223 - protein, 16 aa, Homo sapiens
  CDR3 for alpha chain variable domain of TCR clone 204612 (TRAV30, TRAJ24)
CGTEIVDADSWGKFQV

SEQ ID NO: 409224 - protein, 14 aa, Homo sapiens
  CDR3 for beta chain variable domain of TCR clone 204612 (TRBV20-1, TRBJ1-1)
CSAQTRIGGTEAFF

SEQ ID NO: 409225 - protein, 14 aa, Homo sapiens
  CDR3 for alpha chain variable domain of TCR clone 204613 (TRAV23/DV6, TRAJ9)
CAASKDTVGFKTIF

SEQ ID NO: 409226 - protein, 12 aa, Homo sapiens
  CDR3 for beta chain variable domain of TCR clone 204613 (TRBV20-1, TRBJ2-1)
CSASGGANEQFF

SEQ ID NO: 409227 - protein, 14 aa, Homo sapiens
  CDR3 for alpha chain variable domain of TCR clone 204614 (TRAV26-1, TRAJ22)
CIVRVYGSARQLTF

SEQ ID NO: 409228 - protein, 17 aa, Homo sapiens
  CDR3 for beta chain variable domain of TCR clone 204614 (TRBV7-3, TRBJ2-3)
CASSPGGLAGFGDKQYF

SEQ ID NO: 409229 - protein, 12 aa, Homo sapiens
  CDR3 for alpha chain variable domain of TCR clone 204615 (TRAV21, TRAJ23)
CAVGPREESLSS

SEQ ID NO: 409230 - protein, 13 aa, Homo sapiens
  CDR3 for beta chain variable domain of TCR clone 204615 (TRBV20-1, TRBJ2-7)
CSARTGAGYEQYF

SEQ ID NO: 409231 - protein, 12 aa, Homo sapiens
  CDR3 for alpha chain variable domain of TCR clone 204616 (TRAV8-4, TRAJ43)
CAVSVNNNEMRF

SEQ ID NO: 409232 - protein, 13 aa, Homo sapiens
  CDR3 for beta chain variable domain of TCR clone 204616 (TRBV7-9, TRBJ1-2)
CASSLKQNYGYTF

SEQ ID NO: 409233 - protein, 14 aa, Homo sapiens
  CDR3 for alpha chain variable domain of TCR clone 204617 (TRAV1-2, TRAJ16)
CAVNRFSDGQKLLF

SEQ ID NO: 409234 - protein, 14 aa, Homo sapiens
  CDR3 for beta chain variable domain of TCR clone 204617 (TRBV7-3, TRBJ1-1)
CASSLKGGNTGAFF

SEQ ID NO: 409235 - protein, 13 aa, Homo sapiens
  CDR3 for alpha chain variable domain of TCR clone 204618 (TRAV12-2, TRAJ10)
CAVPTGGGNKLTF

SEQ ID NO: 409236 - protein, 12 aa, Homo sapiens
  CDR3 for beta chain variable domain of TCR clone 204618 (TRBV2, TRBJ2-1)
CAYGPPGNEQFF

SEQ ID NO: 409237 - protein, 12 aa, Homo sapiens
  CDR3 for alpha chain variable domain of TCR clone 204619 (TRAV13-2, TRAJ23)
CAERHRGGKLIF

SEQ ID NO: 409238 - protein, 16 aa, Homo sapiens
  CDR3 for beta chain variable domain of TCR clone 204619 (TRBV7-2, TRBJ2-6)
CAIVSGVSSGANVLTF

SEQ ID NO: 409239 - protein, 10 aa, Homo sapiens
  CDR3 for alpha chain variable domain of TCR clone 204620 (TRAV1-2, TRAJ31)
CAFFDARLMF

SEQ ID NO: 409240 - protein, 14 aa, Homo sapiens
  CDR3 for beta chain variable domain of TCR clone 204620 (TRBV25-1, TRBJ1-1)
CASTHLGGNTEAFF

SEQ ID NO: 409241 - protein, 11 aa, Homo sapiens
  CDR3 for alpha chain variable domain of TCR clone 204621 (TRAV12-3, TRAJ43)
CAMSVSNDMRF

SEQ ID NO: 409242 - protein, 13 aa, Homo sapiens
  CDR3 for beta chain variable domain of TCR clone 204621 (TRBV20-1, TRBJ1-1)
CSAPLGGGTQAFF

SEQ ID NO: 409243 - protein, 16 aa, Homo sapiens
  CDR3 for alpha chain variable domain of TCR clone 204622 (TRAV21, TRAJ45)
CSVSWGSGGGADGLTF

SEQ ID NO: 409244 - protein, 14 aa, Homo sapiens
  CDR3 for beta chain variable domain of TCR clone 204622 (TRBV4-2, TRBJ1-2)
CASSPGGSNYGCTF

SEQ ID NO: 409245 - protein, 14 aa, Homo sapiens
  CDR3 for alpha chain variable domain of TCR clone 204623 (TRAV13-2, TRAJ6)
CSERGSGGSYIPTF

SEQ ID NO: 409246 - protein, 16 aa, Homo sapiens
  CDR3 for beta chain variable domain of TCR clone 204623 (TRBV19, TRBJ1-1)
CASRVDVTGAAWGAFF

SEQ ID NO: 409247 - protein, 13 aa, Homo sapiens
  CDR3 for alpha chain variable domain of TCR clone 204624 (TRAV17, TRAJ20)
CAPLGVDDYKHSF

SEQ ID NO: 409248 - protein, 12 aa, Homo sapiens
  CDR3 for beta chain variable domain of TCR clone 204624 (TRBV29-1, TRBJ2-3)
CSVTGGADTQYF

SEQ ID NO: 409249 - protein, 15 aa, Homo sapiens
  CDR3 for alpha chain variable domain of TCR clone 204625 (TRAV17, TRAJ57)
CATGPSQGGSEKLVF

SEQ ID NO: 409250 - protein, 15 aa, Homo sapiens
  CDR3 for beta chain variable domain of TCR clone 204625 (TRBV4-2, TRBJ1-4)
CASSLVQREVEKLFF

SEQ ID NO: 409251 - protein, 15 aa, Homo sapiens
  CDR3 for alpha chain variable domain of TCR clone 204626 (TRAV3, TRAJ5)
CAVRDLDTGSRALTF

SEQ ID NO: 409252 - protein, 16 aa, Homo sapiens
  CDR3 for beta chain variable domain of TCR clone 204626 (TRBV20-1, TRBJ1-2)
CSASMGQGVANYGYTF

SEQ ID NO: 409253 - protein, 14 aa, Homo sapiens
  CDR3 for alpha chain variable domain of TCR clone 204627 (TRAV35, TRAJ22)
CAGLRPGSARQLTF

SEQ ID NO: 409254 - protein, 12 aa, Homo sapiens
  CDR3 for beta chain variable domain of TCR clone 204627 (TRBV7-8, TRBJ2-7)
CASSLGDRELYF

SEQ ID NO: 409255 - protein, 11 aa, Homo sapiens
  CDR3 for alpha chain variable domain of TCR clone 204628 (TRAV1-1, TRAJ5)
CAVRVRRALTF

SEQ ID NO: 409256 - protein, 17 aa, Homo sapiens
  CDR3 for beta chain variable domain of TCR clone 204628 (TRBV11-2, TRBJ2-1)
CASSLYPPGVEYNEQFF

SEQ ID NO: 409257 - protein, 13 aa, Homo sapiens
  CDR3 for alpha chain variable domain of TCR clone 204629 (TRAV12-1, TRAJ44)
CVVNAGTASKLTF

SEQ ID NO: 409258 - protein, 14 aa, Homo sapiens
  CDR3 for beta chain variable domain of TCR clone 204629 (TRBV6-1, TRBJ2-5)
CASGGAGIQETQYF

SEQ ID NO: 409259 - protein, 14 aa, Homo sapiens
  CDR3 for alpha chain variable domain of TCR clone 204630 (TRAV1-2, TRAJ8)
CAVREDTGFQKLVF

SEQ ID NO: 409260 - protein, 15 aa, Homo sapiens
  CDR3 for beta chain variable domain of TCR clone 204630 (TRBV28, TRBJ2-6)
CTSSLAGSGANVLTF

SEQ ID NO: 409261 - protein, 15 aa, Homo sapiens
  CDR3 for alpha chain variable domain of TCR clone 204631 (TRAV25, TRAJ52)
CAGRPGGTSYGKLTF

SEQ ID NO: 409262 - protein, 12 aa, Homo sapiens
  CDR3 for beta chain variable domain of TCR clone 204631 (TRBV7-8, TRBJ2-3)
CASSLWDEAQYF

SEQ ID NO: 409263 - protein, 17 aa, Homo sapiens
  CDR3 for alpha chain variable domain of TCR clone 204632 (TRAV17, TRAJ28)
CATDPRRGGAGSYQLTF

SEQ ID NO: 409264 - protein, 14 aa, Homo sapiens
  CDR3 for beta chain variable domain of TCR clone 204632 (TRBV19, TRBJ2-7)
CASSIRLGDHEQYF

SEQ ID NO: 409265 - protein, 15 aa, Homo sapiens
  CDR3 for alpha chain variable domain of TCR clone 204633 (TRAV27, TRAJ38)
CAARRNAGNNRKLIW

SEQ ID NO: 409266 - protein, 15 aa, Homo sapiens
  CDR3 for beta chain variable domain of TCR clone 204633 (TRBV9, TRBJ1-6)
CASSVAGTGESPLHF

SEQ ID NO: 409267 - protein, 12 aa, Homo sapiens
  CDR3 for alpha chain variable domain of TCR clone 204634 (TRAV13-1, TRAJ49)
CAASPMGNQFYF

SEQ ID NO: 409268 - protein, 15 aa, Homo sapiens
  CDR3 for beta chain variable domain of TCR clone 204634 (TRBV7-6, TRBJ1-5)
CASSQSSGINQPQHF

SEQ ID NO: 409269 - protein, 14 aa, Homo sapiens
  CDR3 for alpha chain variable domain of TCR clone 204635 (TRAV26-1, TRAJ26)
CIVRATFLGQNFVF

SEQ ID NO: 409270 - protein, 16 aa, Homo sapiens
  CDR3 for beta chain variable domain of TCR clone 204635 (TRBV12-4, TRBJ2-7)
CASRSAGTGPSYEKYF

SEQ ID NO: 409271 - protein, 15 aa, Homo sapiens
  CDR3 for alpha chain variable domain of TCR clone 204636 (TRAV8-3, TRAJ45)
CASSYSRGGADGLTF

SEQ ID NO: 409272 - protein, 13 aa, Homo sapiens
  CDR3 for beta chain variable domain of TCR clone 204636 (TRBV10-3, TRBJ2-7)
CASKLTVNYEQYF

SEQ ID NO: 409273 - protein, 14 aa, Homo sapiens
  CDR3 for alpha chain variable domain of TCR clone 204637 (TRAV17, TRAJ31)
CATVFRNNNARLMF

SEQ ID NO: 409274 - protein, 14 aa, Homo sapiens
  CDR3 for beta chain variable domain of TCR clone 204637 (TRBV12-4, TRBJ2-5)
CASSLWRKQETQYF

SEQ ID NO: 409275 - protein, 14 aa, Homo sapiens
  CDR3 for alpha chain variable domain of TCR clone 204638 (TRAV12-2, TRAJ22)
CAVRFSGSARQLTF

SEQ ID NO: 409276 - protein, 14 aa, Homo sapiens
  CDR3 for beta chain variable domain of TCR clone 204638 (TRBV18, TRBJ2-5)
CASSPWVSQETQYF

SEQ ID NO: 409277 - protein, 14 aa, Homo sapiens
  CDR3 for alpha chain variable domain of TCR clone 204639 (TRAV13-1, TRAJ20)
CAARPGSNDSKLSF

SEQ ID NO: 409278 - protein, 15 aa, Homo sapiens
  CDR3 for beta chain variable domain of TCR clone 204639 (TRBV4-1, TRBJ2-7)
CASSQQGQGFDEQYF

SEQ ID NO: 409279 - protein, 16 aa, Homo sapiens
  CDR3 for alpha chain variable domain of TCR clone 204640 (TRAV30, TRAJ24)
RGTEIVDADSWGKFQF

SEQ ID NO: 409280 - protein, 17 aa, Homo sapiens
  CDR3 for beta chain variable domain of TCR clone 204640 (TRBV20-1, TRBJ2-1)
CSARDPLAGVWDNEQFF

SEQ ID NO: 409281 - protein, 11 aa, Homo sapiens
  CDR3 for alpha chain variable domain of TCR clone 204641 (TRAV13-2, TRAJ54)
RAVHGAQKLVF

SEQ ID NO: 409282 - protein, 13 aa, Homo sapiens
  CDR3 for beta chain variable domain of TCR clone 204641 (TRBV9, TRBJ2-1)
CASSPSGGSEQFF

SEQ ID NO: 409283 - protein, 14 aa, Homo sapiens
  CDR3 for alpha chain variable domain of TCR clone 204642 (TRAV17, TRAJ57)
CATDSQGGSEKLVF

SEQ ID NO: 409284 - protein, 12 aa, Homo sapiens
  CDR3 for beta chain variable domain of TCR clone 204642 (TRBV29-1, TRBJ2-3)
CSVTGGADTQYF

SEQ ID NO: 409285 - protein, 14 aa, Homo sapiens
  CDR3 for alpha chain variable domain of TCR clone 204643 (TRAV12-3, TRAJ9)
CAMSPNTGGFKTIF

SEQ ID NO: 409286 - protein, 12 aa, Homo sapiens
  CDR3 for beta chain variable domain of TCR clone 204643 (TRBV11-2, TRBJ2-2)
CASSLGSGELFF

SEQ ID NO: 409287 - protein, 14 aa, Homo sapiens
  CDR3 for alpha chain variable domain of TCR clone 204644 (TRAV26-1, TRAJ38)
CIADNAGNNRKLIW

SEQ ID NO: 409288 - protein, 15 aa, Homo sapiens
  CDR3 for beta chain variable domain of TCR clone 204644 (TRBV7-3, TRBJ2-7)
CASSPPVALNYEQYF

SEQ ID NO: 409289 - protein, 14 aa, Homo sapiens
  CDR3 for alpha chain variable domain of TCR clone 204645 (TRAV8-3, TRAJ22)
CSVVVSGSARQLTF

SEQ ID NO: 409290 - protein, 16 aa, Homo sapiens
  CDR3 for beta chain variable domain of TCR clone 204645 (TRBV25-1, TRBJ1-1)
CASSGDRDRGRIEAFF

SEQ ID NO: 409291 - protein, 13 aa, Homo sapiens
  CDR3 for alpha chain variable domain of TCR clone 204646 (TRAV12-2, TRAJ13)
CREEDCGYQKVTF

SEQ ID NO: 409292 - protein, 15 aa, Homo sapiens
  CDR3 for beta chain variable domain of TCR clone 204646 (TRBV27, TRBJ2-1)
CASSNGGGSSNEQFF

SEQ ID NO: 409293 - protein, 13 aa, Homo sapiens
  CDR3 for alpha chain variable domain of TCR clone 204647 (TRAV2, TRAJ24)
CAVTTDSWGQLQF

SEQ ID NO: 409294 - protein, 14 aa, Homo sapiens
  CDR3 for beta chain variable domain of TCR clone 204647 (TRBV13, TRBJ2-5)
CASSLGRGQETQYF

SEQ ID NO: 409295 - protein, 15 aa, Homo sapiens
  CDR3 for alpha chain variable domain of TCR clone 204648 (TRAV26-2, TRAJ39)
CSLRGNNNAGNMLTF

SEQ ID NO: 409296 - protein, 15 aa, Homo sapiens
  CDR3 for beta chain variable domain of TCR clone 204648 (TRBV5-4, TRBJ1-1)
CASSSLVWANTEAFF

SEQ ID NO: 409297 - protein, 13 aa, Homo sapiens
  CDR3 for alpha chain variable domain of TCR clone 204649 (TRAV2, TRAJ29)
CAAQNSGNTPLVF

SEQ ID NO: 409298 - protein, 12 aa, Homo sapiens
  CDR3 for beta chain variable domain of TCR clone 204649 (TRBV11-2, TRBJ2-2)
CASSLGGGELFF

SEQ ID NO: 409299 - protein, 14 aa, Homo sapiens
  CDR3 for alpha chain variable domain of TCR clone 204650 (TRAV9-2, TRAJ39)
CALYIYNAGNMLTF

SEQ ID NO: 409300 - protein, 13 aa, Homo sapiens
  CDR3 for beta chain variable domain of TCR clone 204650 (TRBV7-2, TRBJ1-2)
CASSSRGAYGYTF

SEQ ID NO: 409301 - protein, 14 aa, Homo sapiens
  CDR3 for alpha chain variable domain of TCR clone 204651 (TRAV12-3, TRAJ33)
CAVSEEDSNYQLIW

SEQ ID NO: 409302 - protein, 14 aa, Homo sapiens
  CDR3 for beta chain variable domain of TCR clone 204651 (TRBV3-1, TRBJ2-1)
CASSQAVYLGEQFF

SEQ ID NO: 409303 - protein, 13 aa, Homo sapiens
  CDR3 for alpha chain variable domain of TCR clone 204652 (TRAV21, TRAJ56)
CAVRTGANSKLTF

SEQ ID NO: 409304 - protein, 15 aa, Homo sapiens
  CDR3 for beta chain variable domain of TCR clone 204652 (TRBV7-9, TRBJ1-1)
CASSHRGTENTEAFF

SEQ ID NO: 409305 - protein, 12 aa, Homo sapiens
  CDR3 for alpha chain variable domain of TCR clone 204653 (TRAV21, TRAJ11)
CAAASGYSTLTF

SEQ ID NO: 409306 - protein, 16 aa, Homo sapiens
  CDR3 for beta chain variable domain of TCR clone 204653 (TRBV4-2, TRBJ2-5)
CASSQGLVGSQETQYF

SEQ ID NO: 409307 - protein, 13 aa, Homo sapiens
  CDR3 for alpha chain variable domain of TCR clone 204654 (TRAV8-3, TRAJ43)
CAVGPDNNNDMRF

SEQ ID NO: 409308 - protein, 12 aa, Homo sapiens
  CDR3 for beta chain variable domain of TCR clone 204654 (TRBV7-2, TRBJ1-6)
CASSLSSSPLNC

SEQ ID NO: 409309 - protein, 12 aa, Homo sapiens
  CDR3 for alpha chain variable domain of TCR clone 204655 (TRAV21, TRAJ33)
CAKMDSNYQLIW

SEQ ID NO: 409310 - protein, 15 aa, Homo sapiens
  CDR3 for beta chain variable domain of TCR clone 204655 (TRBV9, TRBJ1-6)
CARSVAGTGDSPLHF

SEQ ID NO: 409311 - protein, 14 aa, Homo sapiens
  CDR3 for alpha chain variable domain of TCR clone 204656 (TRAV12-1, TRAJ4)
CVVNTAGGYNKLIF

SEQ ID NO: 409312 - protein, 16 aa, Homo sapiens
  CDR3 for beta chain variable domain of TCR clone 204656 (TRBV18, TRBJ1-5)
CASSPSTGNSNQPQHF

SEQ ID NO: 409313 - protein, 14 aa, Homo sapiens
  CDR3 for alpha chain variable domain of TCR clone 204657 (TRAV12-2, TRAJ9)
CAVNMEGGGFKTIF

SEQ ID NO: 409314 - protein, 14 aa, Homo sapiens
  CDR3 for beta chain variable domain of TCR clone 204657 (TRBV7-9, TRBJ2-1)
CASSIRQGWDEQFF

SEQ ID NO: 409315 - protein, 16 aa, Homo sapiens
  CDR3 for alpha chain variable domain of TCR clone 204658 (TRAV8-3, TRAJ13)
CAVGAYPSGGYQKVTF

SEQ ID NO: 409316 - protein, 15 aa, Homo sapiens
  CDR3 for beta chain variable domain of TCR clone 204658 (TRBV19, TRBJ1-5)
CASSIVWAANPPQHF

SEQ ID NO: 409317 - protein, 14 aa, Homo sapiens
  CDR3 for alpha chain variable domain of TCR clone 204659 (TRAV12-3, TRAJ10)
SHLPLTGGGNKLTF

SEQ ID NO: 409318 - protein, 14 aa, Homo sapiens
  CDR3 for beta chain variable domain of TCR clone 204659 (TRBV19, TRBJ2-7)
CAITVQGRPYEQYF

SEQ ID NO: 409319 - protein, 14 aa, Homo sapiens
  CDR3 for alpha chain variable domain of TCR clone 204660 (TRAV26-1, TRAJ26)
CIVRVASYGQNFVF

SEQ ID NO: 409320 - protein, 14 aa, Homo sapiens
  CDR3 for beta chain variable domain of TCR clone 204660 (TRBV19, TRBJ2-1)
CASPTFVLSGEQFF

SEQ ID NO: 409321 - protein, 17 aa, Homo sapiens
  CDR3 for alpha chain variable domain of TCR clone 204661 (TRAV26-1, TRAJ37)
CIVRVITVSSNTGKLIF

SEQ ID NO: 409322 - protein, 14 aa, Homo sapiens
  CDR3 for beta chain variable domain of TCR clone 204661 (TRBV11-2, TRBJ2-1)
CASSLSGPYNEQFF

SEQ ID NO: 409323 - protein, 14 aa, Homo sapiens
  CDR3 for alpha chain variable domain of TCR clone 204662 (TRAV26-1, TRAJ39)
CIVRGSRAGNMLTF

SEQ ID NO: 409324 - protein, 13 aa, Homo sapiens
  CDR3 for beta chain variable domain of TCR clone 204662 (TRBV7-9, TRBJ1-2)
CASSLKQNYGYSF

SEQ ID NO: 409325 - protein, 14 aa, Homo sapiens
  CDR3 for alpha chain variable domain of TCR clone 204663 (TRAV2, TRAJ9)
CAVEDRSGGLKTIF

SEQ ID NO: 409326 - protein, 13 aa, Homo sapiens
  CDR3 for beta chain variable domain of TCR clone 204663 (TRBV7-3, TRBJ2-5)
CASSFRGGETQYF

SEQ ID NO: 409327 - protein, 23 aa, Homo sapiens
  CDR3 for alpha chain variable domain of TCR clone 204664 (TRAV8-6, )
CAGRKAGNNHIQNPDPAVYQLRD

SEQ ID NO: 409328 - protein, 15 aa, Homo sapiens
  CDR3 for beta chain variable domain of TCR clone 204664 (TRBV4-1, TRBJ2-2)
CASSEGQGITGELFF

SEQ ID NO: 409329 - protein, 14 aa, Homo sapiens
  CDR3 for alpha chain variable domain of TCR clone 204665 (TRAV1-2, TRAJ16)
CAVNRFSDGQKLLF

SEQ ID NO: 409330 - protein, 17 aa, Homo sapiens
  CDR3 for beta chain variable domain of TCR clone 204665 (TRBV13, TRBJ2-3)
CASGLSRVAGGRNTQYF

SEQ ID NO: 409331 - protein, 12 aa, Homo sapiens
  CDR3 for alpha chain variable domain of TCR clone 204666 (TRAV25, TRAJ38)
CAGTGNNRKLIW

SEQ ID NO: 409332 - protein, 15 aa, Homo sapiens
  CDR3 for beta chain variable domain of TCR clone 204666 (TRBV19, TRBJ2-7)
CASRPTQGLSIEQYF

SEQ ID NO: 409333 - protein, 14 aa, Homo sapiens
  CDR3 for alpha chain variable domain of TCR clone 204667 (TRAV13-1, TRAJ44)
CAAKATGTASKITF

SEQ ID NO: 409334 - protein, 16 aa, Homo sapiens
  CDR3 for beta chain variable domain of TCR clone 204667 (TRBV19, TRBJ2-1)
CASSKAGPSSYNEQFF

SEQ ID NO: 409335 - protein, 15 aa, Homo sapiens
  CDR3 for alpha chain variable domain of TCR clone 204668 (TRAV17, TRAJ57)
CATGPSQGGSEKLVF

SEQ ID NO: 409336 - protein, 13 aa, Homo sapiens
  CDR3 for beta chain variable domain of TCR clone 204668 (TRBV28, TRBJ2-5)
CASSFAGGETQYF

SEQ ID NO: 409337 - protein, 14 aa, Homo sapiens
  CDR3 for alpha chain variable domain of TCR clone 204669 (TRAV36/DV7, TRAJ44)
CCGANTGTASKLTF

SEQ ID NO: 409338 - protein, 15 aa, Homo sapiens
  CDR3 for beta chain variable domain of TCR clone 204669 (TRBV12-4, TRBJ1-2)
CASRLGVAGNYGYTF

SEQ ID NO: 409339 - protein, 11 aa, Homo sapiens
  CDR3 for alpha chain variable domain of TCR clone 204670 (TRAV8-4, TRAJ20)
CAVTNVLTTTS

SEQ ID NO: 409340 - protein, 15 aa, Homo sapiens
  CDR3 for beta chain variable domain of TCR clone 204670 (TRBV6-3, TRBJ2-7)
CASSSPGTVFYEQYF

SEQ ID NO: 409341 - protein, 20 aa, Homo sapiens
  CDR3 for alpha chain variable domain of TCR clone 204671 (TRAV26-1, TRAJ42)
CCVLLHRQTYYGGSQGNLIF

SEQ ID NO: 409342 - protein, 16 aa, Homo sapiens
  CDR3 for beta chain variable domain of TCR clone 204671 (TRBV7-3, TRBJ2-2)
CASSLKRGTFSGELFF

SEQ ID NO: 409343 - protein, 22 aa, Homo sapiens
  CDR3 for alpha chain variable domain of TCR clone 204672 (TRAV27, TRAJ45)
CAGAQEEVLTDSPLAKGLILSS

SEQ ID NO: 409344 - protein, 15 aa, Homo sapiens
  CDR3 for beta chain variable domain of TCR clone 204672 (TRBV20-1, TRBJ2-7)
CSARDRVSGMDEQYF

SEQ ID NO: 409345 - protein, 13 aa, Homo sapiens
  CDR3 for alpha chain variable domain of TCR clone 204673 (TRAV13-1, TRAJ21)
CAASIYNLKKFYF

SEQ ID NO: 409346 - protein, 20 aa, Homo sapiens
  CDR3 for beta chain variable domain of TCR clone 204673 (TRBV7-8, TRBJ2-2)
CASSHLFPGPTIHITGELFF

SEQ ID NO: 409347 - protein, 18 aa, Homo sapiens
  CDR3 for alpha chain variable domain of TCR clone 204674 (TRAV12-3, TRAJ10)
SPVIQPLPLTGGGNKLTF

SEQ ID NO: 409348 - protein, 13 aa, Homo sapiens
  CDR3 for beta chain variable domain of TCR clone 204674 (TRBV12-4, TRBJ1-1)
CASSPGTGFEAFF

SEQ ID NO: 409349 - protein, 14 aa, Homo sapiens
  CDR3 for alpha chain variable domain of TCR clone 204675 (TRAV2, TRAJ9)
CAVEDRSGGFKTIF

SEQ ID NO: 409350 - protein, 17 aa, Homo sapiens
  CDR3 for beta chain variable domain of TCR clone 204675 (TRBV7-3, TRBJ2-2)
CASSLSGTSGGTGELFF

SEQ ID NO: 409351 - protein, 14 aa, Homo sapiens
  CDR3 for alpha chain variable domain of TCR clone 204676 (TRAV26-1, TRAJ49)
CIVRPSNTGNQFYF

SEQ ID NO: 409352 - protein, 14 aa, Homo sapiens
  CDR3 for beta chain variable domain of TCR clone 204676 (TRBV19, TRBJ1-1)
CSMGFRDVNTEAFF

SEQ ID NO: 409353 - protein, 13 aa, Homo sapiens
  CDR3 for alpha chain variable domain of TCR clone 204677 (TRAV8-4, TRAJ30)
CAVSVNRDDKIIF

SEQ ID NO: 409354 - protein, 15 aa, Homo sapiens
  CDR3 for beta chain variable domain of TCR clone 204677 (TRBV7-2, TRBJ2-3)
CASSQLAGVGDTQYF

SEQ ID NO: 409355 - protein, 14 aa, Homo sapiens
  CDR3 for alpha chain variable domain of TCR clone 204678 (TRAV9-2, TRAJ39)
CALYIYNAGTMLTF

SEQ ID NO: 409356 - protein, 15 aa, Homo sapiens
  CDR3 for beta chain variable domain of TCR clone 204678 (TRBV27, TRBJ1-6)
CASSFDRGLGSPLHF

SEQ ID NO: 409357 - protein, 14 aa, Homo sapiens
  CDR3 for alpha chain variable domain of TCR clone 204679 (TRAV38-2/DV8, TRAJ23)
CAYRSQNQGGKLIF

SEQ ID NO: 409358 - protein, 15 aa, Homo sapiens
  CDR3 for beta chain variable domain of TCR clone 204679 (TRBV9, TRBJ1-6)
CASSVAGTGDSPLHF

SEQ ID NO: 409359 - protein, 13 aa, Homo sapiens
  CDR3 for alpha chain variable domain of TCR clone 204680 (TRAV8-3, TRAJ36)
CAVGATWANNLFF

SEQ ID NO: 409360 - protein, 15 aa, Homo sapiens
  CDR3 for beta chain variable domain of TCR clone 204680 (TRBV5-1, TRBJ2-3)
CASSVTSGSTDTQYF

SEQ ID NO: 409361 - protein, 16 aa, Homo sapiens
  CDR3 for alpha chain variable domain of TCR clone 204681 (TRAV12-3, TRAJ53)
CAMSPGSGGSNYKLTF

SEQ ID NO: 409362 - protein, 16 aa, Homo sapiens
  CDR3 for beta chain variable domain of TCR clone 204681 (TRBV19, TRBJ2-1)
GASSKAGPTSYNEQFF

SEQ ID NO: 409363 - protein, 12 aa, Homo sapiens
  CDR3 for alpha chain variable domain of TCR clone 204682 (TRAV17, TRAJ53)
CAFGGSNYKLTF

SEQ ID NO: 409364 - protein, 16 aa, Homo sapiens
  CDR3 for beta chain variable domain of TCR clone 204682 (TRBV11-2, TRBJ2-4)
CASSHEGRGGLDIQYF

SEQ ID NO: 409365 - protein, 13 aa, Homo sapiens
  CDR3 for alpha chain variable domain of TCR clone 204683 (TRAV35, TRAJ13)
CWFPFWGYQKVTF

SEQ ID NO: 409366 - protein, 17 aa, Homo sapiens
  CDR3 for beta chain variable domain of TCR clone 204683 (TRBV7-6, TRBJ2-5)
CASSPGLADPWGETQYF

SEQ ID NO: 409367 - protein, 14 aa, Homo sapiens
  CDR3 for alpha chain variable domain of TCR clone 204684 (TRAV12-2, TRAJ33)
CAVKRARSNYQLIW

SEQ ID NO: 409368 - protein, 12 aa, Homo sapiens
  CDR3 for beta chain variable domain of TCR clone 204684 (TRBV24-1, TRBJ2-3)
CATNDSTDTQYF

SEQ ID NO: 409369 - protein, 14 aa, Homo sapiens
  CDR3 for alpha chain variable domain of TCR clone 204685 (TRAV1-2, TRAJ16)
CAVNRFSDGQKLLF

SEQ ID NO: 409370 - protein, 13 aa, Homo sapiens
  CDR3 for beta chain variable domain of TCR clone 204685 (TRBV11-2, TRBJ2-5)
CASSSTTQETQYF

SEQ ID NO: 409371 - protein, 13 aa, Homo sapiens
  CDR3 for alpha chain variable domain of TCR clone 204686 (TRAV2, TRAJ40)
CAVVTSGTYKYIF

SEQ ID NO: 409372 - protein, 14 aa, Homo sapiens
  CDR3 for beta chain variable domain of TCR clone 204686 (TRBV19, TRBJ2-1)
CASPAFVVSGEQFF

SEQ ID NO: 409373 - protein, 13 aa, Homo sapiens
  CDR3 for alpha chain variable domain of TCR clone 204687 (TRAV1-2, TRAJ9)
CAALNTGGFKTIF

SEQ ID NO: 409374 - protein, 16 aa, Homo sapiens
  CDR3 for beta chain variable domain of TCR clone 204687 (TRBV11-2, TRBJ2-1)
CAGSPRLAGVYNEQFF

SEQ ID NO: 409375 - protein, 12 aa, Homo sapiens
  CDR3 for alpha chain variable domain of TCR clone 204688 (TRAV2, TRAJ9)
CAVGAGGFNTIF

SEQ ID NO: 409376 - protein, 18 aa, Homo sapiens
  CDR3 for beta chain variable domain of TCR clone 204688 (TRBV6-4, TRBJ2-1)
CASSPDRMGSGSINEQFF

SEQ ID NO: 409377 - protein, 14 aa, Homo sapiens
  CDR3 for alpha chain variable domain of TCR clone 204689 (TRAV27, TRAJ38)
CAGDRAGNNRKLIL

SEQ ID NO: 409378 - protein, 13 aa, Homo sapiens
  CDR3 for beta chain variable domain of TCR clone 204689 (TRBV12-4, TRBJ1-1)
CASSPGTGFEAFF

SEQ ID NO: 409379 - protein, 13 aa, Homo sapiens
  CDR3 for alpha chain variable domain of TCR clone 204690 (TRAV3, TRAJ21)
CAVREPDFNKFYF

SEQ ID NO: 409380 - protein, 13 aa, Homo sapiens
  CDR3 for beta chain variable domain of TCR clone 204690 (TRBV7-9, TRBJ1-1)
CASTQGMNTEAFF

SEQ ID NO: 409381 - protein, 16 aa, Homo sapiens
  CDR3 for alpha chain variable domain of TCR clone 204691 (TRAV38-1, TRAJ37)
CAFKGDGSRNTGKLIF

SEQ ID NO: 409382 - protein, 13 aa, Homo sapiens
  CDR3 for beta chain variable domain of TCR clone 204691 (TRBV12-4, TRBJ2-5)
CASSLFRRETQYF

SEQ ID NO: 409383 - protein, 16 aa, Homo sapiens
  CDR3 for alpha chain variable domain of TCR clone 204692 (TRAV16, TRAJ52)
CALSAAGGTSYGKLTF

SEQ ID NO: 409384 - protein, 15 aa, Homo sapiens
  CDR3 for beta chain variable domain of TCR clone 204692 (TRBV5-5, TRBJ1-5)
CASSSTPGSNQPQHF

SEQ ID NO: 409385 - protein, 13 aa, Homo sapiens
  CDR3 for alpha chain variable domain of TCR clone 204693 (TRAV27, TRAJ41)
CAGEGNSGYALNF

SEQ ID NO: 409386 - protein, 15 aa, Homo sapiens
  CDR3 for beta chain variable domain of TCR clone 204693 (TRBV24-1, TRBJ1-4)
CATSDPQGADEKLFF

SEQ ID NO: 409387 - protein, 16 aa, Homo sapiens
  CDR3 for alpha chain variable domain of TCR clone 204694 (TRAV30, TRAJ24)
CGTEIVDADSWGKFQF

SEQ ID NO: 409388 - protein, 14 aa, Homo sapiens
  CDR3 for beta chain variable domain of TCR clone 204694 (TRBV12-4, TRBJ2-1)
CASSLGSSPLEQFF

SEQ ID NO: 409389 - protein, 13 aa, Homo sapiens
  CDR3 for alpha chain variable domain of TCR clone 204695 (TRAV13-1, TRAJ12)
CAASPDSSYKLIF

SEQ ID NO: 409390 - protein, 15 aa, Homo sapiens
  CDR3 for beta chain variable domain of TCR clone 204695 (TRBV6-3, TRBJ2-7)
CASSSPGTVFYEQYF

SEQ ID NO: 409391 - protein, 14 aa, Homo sapiens
  CDR3 for alpha chain variable domain of TCR clone 204696 (TRAV12-2, TRAJ13)
CAVKKTGGYQKVTF

SEQ ID NO: 409392 - protein, 14 aa, Homo sapiens
  CDR3 for beta chain variable domain of TCR clone 204696 (TRBV27, TRBJ2-7)
CASSLARGHYEQYF

SEQ ID NO: 409393 - protein, 14 aa, Homo sapiens
  CDR3 for alpha chain variable domain of TCR clone 204697 (TRAV4, TRAJ17)
CLVGDMAAGNKLTF

SEQ ID NO: 409394 - protein, 14 aa, Homo sapiens
  CDR3 for beta chain variable domain of TCR clone 204697 (TRBV4-1, TRBJ2-7)
CASSPVAGGDEKYF

SEQ ID NO: 409395 - protein, 13 aa, Homo sapiens
  CDR3 for alpha chain variable domain of TCR clone 204698 (TRAV17, TRAJ40)
CAGSLGGTYKYIF

SEQ ID NO: 409396 - protein, 18 aa, Homo sapiens
  CDR3 for beta chain variable domain of TCR clone 204698 (TRBV7-2, TRBJ1-4)
CASSLAPGRRDEKLFLAV

SEQ ID NO: 409397 - protein, 14 aa, Homo sapiens
  CDR3 for alpha chain variable domain of TCR clone 204699 (TRAV12-1, TRAJ17)
CVVNYKAAGNKLTF

SEQ ID NO: 409398 - protein, 14 aa, Homo sapiens
  CDR3 for beta chain variable domain of TCR clone 204699 (TRBV12-4, TRBJ2-7)
CASSLTGRAYEQYF

SEQ ID NO: 409399 - protein, 23 aa, Homo sapiens
  CDR3 for alpha chain variable domain of TCR clone 204700 (TRAV3, )
CAVRDHTGNNHIQNPDPAVYQLR

SEQ ID NO: 409400 - protein, 14 aa, Homo sapiens
  CDR3 for beta chain variable domain of TCR clone 204700 (TRBV7-2, TRBJ2-7)
CASSSTVGGYEQYF

SEQ ID NO: 409401 - protein, 14 aa, Homo sapiens
  CDR3 for alpha chain variable domain of TCR clone 204701 (TRAV29/DV5, TRAJ48)
CAAMALFGNEKLTF

SEQ ID NO: 409402 - protein, 13 aa, Homo sapiens
  CDR3 for beta chain variable domain of TCR clone 204701 (TRBV19, TRBJ1-2)
CASSVPGQDGYTF

SEQ ID NO: 409403 - protein, 14 aa, Homo sapiens
  CDR3 for alpha chain variable domain of TCR clone 204702 (TRAV35, TRAJ28)
CAGRRGGWELPTHF

SEQ ID NO: 409404 - protein, 14 aa, Homo sapiens
  CDR3 for beta chain variable domain of TCR clone 204702 (TRBV7-2, TRBJ1-2)
CASSRGGTNYGYTF

SEQ ID NO: 409405 - protein, 14 aa, Homo sapiens
  CDR3 for alpha chain variable domain of TCR clone 204703 (TRAV1-2, TRAJ16)
CAVNRFSYGQKLLF

SEQ ID NO: 409406 - protein, 13 aa, Homo sapiens
  CDR3 for beta chain variable domain of TCR clone 204703 (TRBV20-1, TRBJ1-1)
CSARLGQGTEAFF

SEQ ID NO: 409407 - protein, 13 aa, Homo sapiens
  CDR3 for alpha chain variable domain of TCR clone 204704 (TRAV4, TRAJ34)
CLVGDYNTDKLTF

SEQ ID NO: 409408 - protein, 23 aa, Homo sapiens
  CDR3 for beta chain variable domain of TCR clone 204704 (TRBV4-2, TRBJ2-3)
CASSQDPPRASSISGGRGDTQYF

SEQ ID NO: 409409 - protein, 14 aa, Homo sapiens
  CDR3 for alpha chain variable domain of TCR clone 204705 (TRAV1-1, TRAJ27)
CAVIYNTNAGISTF

SEQ ID NO: 409410 - protein, 14 aa, Homo sapiens
  CDR3 for beta chain variable domain of TCR clone 204705 (TRBV25-1, TRBJ1-1)
CASTHLGGNTEAFF

SEQ ID NO: 409411 - protein, 15 aa, Homo sapiens
  CDR3 for alpha chain variable domain of TCR clone 204706 (TRAV25, TRAJ52)
CAGRPGGTSYGKLTF

SEQ ID NO: 409412 - protein, 16 aa, Homo sapiens
  CDR3 for beta chain variable domain of TCR clone 204706 (TRBV19, TRBJ2-2)
CASSFPGQGLAGELFF

SEQ ID NO: 409413 - protein, 14 aa, Homo sapiens
  CDR3 for alpha chain variable domain of TCR clone 204707 (TRAV12-3, TRAJ57)
CAMSAWGGSEKLVF

SEQ ID NO: 409414 - protein, 17 aa, Homo sapiens
  CDR3 for beta chain variable domain of TCR clone 204707 (TRBV7-8, TRBJ2-6)
CASSAGTGGAGANVLTF

SEQ ID NO: 409415 - protein, 11 aa, Homo sapiens
  CDR3 for alpha chain variable domain of TCR clone 204708 (TRAV2, TRAJ21)
CAVFNFNKFYF

SEQ ID NO: 409416 - protein, 14 aa, Homo sapiens
  CDR3 for beta chain variable domain of TCR clone 204708 (TRBV15, TRBJ2-3)
CVPRSGTSTDTQYF

SEQ ID NO: 409417 - protein, 13 aa, Homo sapiens
  CDR3 for alpha chain variable domain of TCR clone 204709 (TRAV1-2, TRAJ12)
CAVSMDSSYKLIF

SEQ ID NO: 409418 - protein, 14 aa, Homo sapiens
  CDR3 for beta chain variable domain of TCR clone 204709 (TRBV7-6, TRBJ2-3)
CASSVAGGTDTQYF

SEQ ID NO: 409419 - protein, 14 aa, Homo sapiens
  CDR3 for alpha chain variable domain of TCR clone 204710 (TRAV23/DV6, TRAJ4)
CAAPSSGCYNKLIF

SEQ ID NO: 409420 - protein, 16 aa, Homo sapiens
  CDR3 for beta chain variable domain of TCR clone 204710 (TRBV19, TRBJ1-1)
CASRCGGPVTGTEAFF

SEQ ID NO: 409421 - protein, 22 aa, Homo sapiens
  CDR3 for alpha chain variable domain of TCR clone 204711 (TRAV8-3, TRAJ32)
CAVEWVLQTSSSLELALCLLSS

SEQ ID NO: 409422 - protein, 15 aa, Homo sapiens
  CDR3 for beta chain variable domain of TCR clone 204711 (TRBV6-3, TRBJ2-7)
CASSSPGTVFYEQYF

SEQ ID NO: 409423 - protein, 15 aa, Homo sapiens
  CDR3 for alpha chain variable domain of TCR clone 204712 (TRAV23/DV6, TRAJ37)
CAAGEGSSNTGKLIF

SEQ ID NO: 409424 - protein, 15 aa, Homo sapiens
  CDR3 for beta chain variable domain of TCR clone 204712 (TRBV20-1, TRBJ2-7)
CSARDRVSGMDEQYF

SEQ ID NO: 409425 - protein, 13 aa, Homo sapiens
  CDR3 for alpha chain variable domain of TCR clone 204713 (TRAV27, TRAJ29)
CAGAHSGNTPLVF

SEQ ID NO: 409426 - protein, 14 aa, Homo sapiens
  CDR3 for beta chain variable domain of TCR clone 204713 (TRBV7-9, TRBJ2-7)
CASSIGQGTGEQYF

SEQ ID NO: 409427 - protein, 17 aa, Homo sapiens
  CDR3 for alpha chain variable domain of TCR clone 204714 (TRAV3, TRAJ42)
CAVRDRDYGGSQGNLIF

SEQ ID NO: 409428 - protein, 16 aa, Homo sapiens
  CDR3 for beta chain variable domain of TCR clone 204714 (TRBV4-1, TRBJ2-7)
CASSQEWTSGPLEQYF

SEQ ID NO: 409429 - protein, 17 aa, Homo sapiens
  CDR3 for alpha chain variable domain of TCR clone 204715 (TRAV36/DV7, TRAJ52)
CAVAQRAGGTSYGKLTF

SEQ ID NO: 409430 - protein, 15 aa, Homo sapiens
  CDR3 for beta chain variable domain of TCR clone 204715 (TRBV2, TRBJ2-5)
CASTRDGGPQETQYF

SEQ ID NO: 409431 - protein, 14 aa, Homo sapiens
  CDR3 for alpha chain variable domain of TCR clone 204716 (TRAV8-3, TRAJ4)
CAVGAAGGYNKLNF

SEQ ID NO: 409432 - protein, 13 aa, Homo sapiens
  CDR3 for beta chain variable domain of TCR clone 204716 (TRBV3-1, TRBJ1-1)
CASSPGVITEAFF

SEQ ID NO: 409433 - protein, 17 aa, Homo sapiens
  CDR3 for alpha chain variable domain of TCR clone 204717 (TRAV3, TRAJ42)
CAVRDRDYGGSQGNLIF

SEQ ID NO: 409434 - protein, 15 aa, Homo sapiens
  CDR3 for beta chain variable domain of TCR clone 204717 (TRBV2, TRBJ2-1)
CASSELAGSYNEQFF

SEQ ID NO: 409435 - protein, 16 aa, Homo sapiens
  CDR3 for alpha chain variable domain of TCR clone 204718 (TRAV30, TRAJ24)
CGTEIVDAESWGKFQF

SEQ ID NO: 409436 - protein, 12 aa, Homo sapiens
  CDR3 for beta chain variable domain of TCR clone 204718 (TRBV11-2, TRBJ2-2)
CASSLGGGELFF

SEQ ID NO: 409437 - protein, 15 aa, Homo sapiens
  CDR3 for alpha chain variable domain of TCR clone 204719 (TRAV26-1, TRAJ44)
CIVRANTGTASKLTF

SEQ ID NO: 409438 - protein, 15 aa, Homo sapiens
  CDR3 for beta chain variable domain of TCR clone 204719 (TRBV7-7, TRBJ2-1)
CASSLGWGRANEQFF

SEQ ID NO: 409439 - protein, 13 aa, Homo sapiens
  CDR3 for alpha chain variable domain of TCR clone 204720 (TRAV2, TRAJ29)
CAAGNSGNTPLVF

SEQ ID NO: 409440 - protein, 15 aa, Homo sapiens
  CDR3 for beta chain variable domain of TCR clone 204720 (TRBV20-1, TRBJ1-1)
CSASRGVTGNTEAFF

SEQ ID NO: 409441 - protein, 22 aa, Homo sapiens
  CDR3 for alpha chain variable domain of TCR clone 204721 (TRAV12-1, )
CVVLRGIPDIQHPDPAVYQLRD

SEQ ID NO: 409442 - protein, 15 aa, Homo sapiens
  CDR3 for beta chain variable domain of TCR clone 204721 (TRBV2, TRBJ2-1)
CASSEARSAYNEQFF

SEQ ID NO: 409443 - protein, 14 aa, Homo sapiens
  CDR3 for alpha chain variable domain of TCR clone 204722 (TRAV23/DV6, TRAJ36)
CAASRRTGASNLFF

SEQ ID NO: 409444 - protein, 13 aa, Homo sapiens
  CDR3 for beta chain variable domain of TCR clone 204722 (TRBV4-1, TRBJ2-2)
CASSQENTGELFF

SEQ ID NO: 409445 - protein, 17 aa, Homo sapiens
  CDR3 for alpha chain variable domain of TCR clone 204723 (TRAV3, TRAJ6)
CAVRDGPRAGGSYIPTF

SEQ ID NO: 409446 - protein, 20 aa, Homo sapiens
  CDR3 for beta chain variable domain of TCR clone 204723 (TRBV7-8, TRBJ2-2)
CASSHLFPGPTIHTTGELFF

SEQ ID NO: 409447 - protein, 13 aa, Homo sapiens
  CDR3 for alpha chain variable domain of TCR clone 204724 (TRAV12-1, TRAJ39)
CVVPQRAGNMLTF

SEQ ID NO: 409448 - protein, 16 aa, Homo sapiens
  CDR3 for beta chain variable domain of TCR clone 204724 (TRBV4-3, TRBJ2-2)
CASSHLQGSGTGELFF

SEQ ID NO: 409449 - protein, 13 aa, Homo sapiens
  CDR3 for alpha chain variable domain of TCR clone 204725 (TRAV13-1, TRAJ21)
CAASIYNFNKFYF

SEQ ID NO: 409450 - protein, 14 aa, Homo sapiens
  CDR3 for beta chain variable domain of TCR clone 204725 (TRBV7-3, TRBJ1-1)
CASSLKGGNTEAFF

SEQ ID NO: 409451 - protein, 13 aa, Homo sapiens
  CDR3 for alpha chain variable domain of TCR clone 204726 (TRAV13-2, TRAJ8)
CAFMNTGFQKLVF

SEQ ID NO: 409452 - protein, 17 aa, Homo sapiens
  CDR3 for beta chain variable domain of TCR clone 204726 (TRBV28, TRBJ2-1)
CASSSARQALTYNEQFF

SEQ ID NO: 409453 - protein, 14 aa, Homo sapiens
  CDR3 for alpha chain variable domain of TCR clone 204727 (TRAV1-2, TRAJ8)
CAVREDTGFLKLVF

SEQ ID NO: 409454 - protein, 16 aa, Homo sapiens
  CDR3 for beta chain variable domain of TCR clone 204727 (TRBV4-1, TRBJ2-3)
CASSQSTSGAEDTQYF

SEQ ID NO: 409455 - protein, 11 aa, Homo sapiens
  CDR3 for alpha chain variable domain of TCR clone 204728 (TRAV13-1, TRAJ15)
CAATPGNALIF

SEQ ID NO: 409456 - protein, 13 aa, Homo sapiens
  CDR3 for beta chain variable domain of TCR clone 204728 (TRBV7-2, TRBJ2-1)
CASSLGVYNEQFF

SEQ ID NO: 409457 - protein, 10 aa, Homo sapiens
  CDR3 for alpha chain variable domain of TCR clone 204729 (TRAV26-1, TRAJ40)
CIEGTYKYIF

SEQ ID NO: 409458 - protein, 15 aa, Homo sapiens
  CDR3 for beta chain variable domain of TCR clone 204729 (TRBV19, TRBJ2-1)
CASSSPGVPLDEQFF

SEQ ID NO: 409459 - protein, 10 aa, Homo sapiens
  CDR3 for alpha chain variable domain of TCR clone 204730 (TRAV12-3, TRAJ49)
CAMNDDQFYI

SEQ ID NO: 409460 - protein, 13 aa, Homo sapiens
  CDR3 for beta chain variable domain of TCR clone 204730 (TRBV12-4, TRBJ1-1)
CASSPGTGFEAFF

SEQ ID NO: 409461 - protein, 14 aa, Homo sapiens
  CDR3 for alpha chain variable domain of TCR clone 204731 (TRAV23/DV6, TRAJ29)
CAASTFSGNTPLVF

SEQ ID NO: 409462 - protein, 16 aa, Homo sapiens
  CDR3 for beta chain variable domain of TCR clone 204731 (TRBV5-1, TRBJ2-2)
CASSSRTGGRTGELFF

SEQ ID NO: 409463 - protein, 12 aa, Homo sapiens
  CDR3 for alpha chain variable domain of TCR clone 204732 (TRAV2, TRAJ31)
CAVEDNNARRVF

SEQ ID NO: 409464 - protein, 16 aa, Homo sapiens
  CDR3 for beta chain variable domain of TCR clone 204732 (TRBV7-8, TRBJ2-4)
CASSAERTLAKNIQYF

SEQ ID NO: 409465 - protein, 13 aa, Homo sapiens
  CDR3 for alpha chain variable domain of TCR clone 204733 (TRAV3, TRAJ5)
CAVRDTGRRALTF

SEQ ID NO: 409466 - protein, 17 aa, Homo sapiens
  CDR3 for beta chain variable domain of TCR clone 204733 (TRBV20-1, TRBJ2-1)
CSASSSGLAGSYNEQFF

SEQ ID NO: 409467 - protein, 15 aa, Homo sapiens
  CDR3 for alpha chain variable domain of TCR clone 204734 (TRAV16, TRAJ48)
CALFISNFGNEKLTF

SEQ ID NO: 409468 - protein, 14 aa, Homo sapiens
  CDR3 for beta chain variable domain of TCR clone 204734 (TRBV3-1, TRBJ2-5)
CASSQGPDQETQYF

SEQ ID NO: 409469 - protein, 14 aa, Homo sapiens
  CDR3 for alpha chain variable domain of TCR clone 204735 (TRAV1-2, TRAJ8)
CAVREDTGFQTLVF

SEQ ID NO: 409470 - protein, 16 aa, Homo sapiens
  CDR3 for beta chain variable domain of TCR clone 204735 (TRBV29-1, TRBJ2-6)
CSVEDITYSGANVLTF

SEQ ID NO: 409471 - protein, 14 aa, Homo sapiens
  CDR3 for alpha chain variable domain of TCR clone 204736 (TRAV14/DV4, TRAJ13)
CAMIHSGGYQKVTF

SEQ ID NO: 409472 - protein, 16 aa, Homo sapiens
  CDR3 for beta chain variable domain of TCR clone 204736 (TRBV28, TRBJ1-5)
CASSLTGQGWNQPQHF

SEQ ID NO: 409473 - protein, 12 aa, Homo sapiens
  CDR3 for alpha chain variable domain of TCR clone 204737 (TRAV38-2/DV8, TRAJ43)
CAYTINNNDIRF

SEQ ID NO: 409474 - protein, 15 aa, Homo sapiens
  CDR3 for beta chain variable domain of TCR clone 204737 (TRBV7-2, TRBJ2-3)
CASSLVVRGPDTQYF

SEQ ID NO: 409475 - protein, 17 aa, Homo sapiens
  CDR3 for alpha chain variable domain of TCR clone 204738 (TRAV3, TRAJ12)
CAVRDGGWMDSSYKLIF

SEQ ID NO: 409476 - protein, 14 aa, Homo sapiens
  CDR3 for beta chain variable domain of TCR clone 204738 (TRBV7-9, TRBJ1-2)
CASSRQGANYGYTF

SEQ ID NO: 409477 - protein, 13 aa, Homo sapiens
  CDR3 for alpha chain variable domain of TCR clone 204739 (TRAV27, TRAJ40)
CAGPPSGTYKYIF

SEQ ID NO: 409478 - protein, 20 aa, Homo sapiens
  CDR3 for beta chain variable domain of TCR clone 204739 (TRBV7-8, TRBJ2-2)
CASSHLFPGPTIHITGELFF

SEQ ID NO: 409479 - protein, 14 aa, Homo sapiens
  CDR3 for alpha chain variable domain of TCR clone 204740 (TRAV12-2, TRAJ13)
CAVKKTGGYQKVTF

SEQ ID NO: 409480 - protein, 14 aa, Homo sapiens
  CDR3 for beta chain variable domain of TCR clone 204740 (TRBV19, TRBJ2-1)
CASPTFVVSGEQFF

SEQ ID NO: 409481 - protein, 14 aa, Homo sapiens
  CDR3 for alpha chain variable domain of TCR clone 204741 (TRAV1-2, TRAJ8)
CAVREDTGFQKLVF

SEQ ID NO: 409482 - protein, 14 aa, Homo sapiens
  CDR3 for beta chain variable domain of TCR clone 204741 (TRBV6-1, TRBJ1-3)
CASVQGGGENTIYF

SEQ ID NO: 409483 - protein, 16 aa, Homo sapiens
  CDR3 for alpha chain variable domain of TCR clone 204742 (TRAV30, TRAJ24)
CGTEIVDADSWGNSSL

SEQ ID NO: 409484 - protein, 16 aa, Homo sapiens
  CDR3 for beta chain variable domain of TCR clone 204742 (TRBV20-1, TRBJ2-3)
CSAVRDRGPIADTQYF

SEQ ID NO: 409485 - protein, 14 aa, Homo sapiens
  CDR3 for alpha chain variable domain of TCR clone 204743 (TRAV12-2, TRAJ9)
CAVNALEGGFKTIF

SEQ ID NO: 409486 - protein, 15 aa, Homo sapiens
  CDR3 for beta chain variable domain of TCR clone 204743 (TRBV7-2, TRBJ2-7)
CASSWGQGAIYEQYF

SEQ ID NO: 409487 - protein, 21 aa, Homo sapiens
  CDR3 for alpha chain variable domain of TCR clone 204744 (TRAV23/DV6, TRAJ30)
PSLETQPPTSVQQARDDKIIF

SEQ ID NO: 409488 - protein, 12 aa, Homo sapiens
  CDR3 for beta chain variable domain of TCR clone 204744 (TRBV9, TRBJ2-2)
CASSLVTGELFF

SEQ ID NO: 409489 - protein, 12 aa, Homo sapiens
  CDR3 for alpha chain variable domain of TCR clone 204745 (TRAV12-3, TRAJ17)
CAMTLTGNKLTF

SEQ ID NO: 409490 - protein, 15 aa, Homo sapiens
  CDR3 for beta chain variable domain of TCR clone 204745 (TRBV20-1, TRBJ2-7)
CSDRDGVSGMDEQYF

SEQ ID NO: 409491 - protein, 13 aa, Homo sapiens
  CDR3 for alpha chain variable domain of TCR clone 204746 (TRAV30, TRAJ34)
CGTVGYNTDKLNF

SEQ ID NO: 409492 - protein, 16 aa, Homo sapiens
  CDR3 for beta chain variable domain of TCR clone 204746 (TRBV7-9, TRBJ1-2)
CASSLGFSSGEDGYTF

SEQ ID NO: 409493 - protein, 13 aa, Homo sapiens
  CDR3 for alpha chain variable domain of TCR clone 204747 (TRAV8-3, TRAJ36)
CAVGATGANNLFF

SEQ ID NO: 409494 - protein, 15 aa, Homo sapiens
  CDR3 for beta chain variable domain of TCR clone 204747 (TRBV7-2, TRBJ1-2)
CASSPRAGWNYDYTF

SEQ ID NO: 409495 - protein, 19 aa, Homo sapiens
  CDR3 for alpha chain variable domain of TCR clone 204748 (TRAV27, TRAJ52)
CAGGYGMIGCGTSYGKLTF

SEQ ID NO: 409496 - protein, 12 aa, Homo sapiens
  CDR3 for beta chain variable domain of TCR clone 204748 (TRBV12-4, TRBJ2-7)
CASSLGGYEQYF

SEQ ID NO: 409497 - protein, 14 aa, Homo sapiens
  CDR3 for alpha chain variable domain of TCR clone 204749 (TRAV1-2, TRAJ16)
CAVNRFSDGQKLLF

SEQ ID NO: 409498 - protein, 13 aa, Homo sapiens
  CDR3 for beta chain variable domain of TCR clone 204749 (TRBV10-3, TRBJ2-7)
CASKLVVNYEQYF

SEQ ID NO: 409499 - protein, 14 aa, Homo sapiens
  CDR3 for alpha chain variable domain of TCR clone 204750 (TRAV20, TRAJ42)
CAVQAGVSQGNLIF

SEQ ID NO: 409500 - protein, 14 aa, Homo sapiens
  CDR3 for beta chain variable domain of TCR clone 204750 (TRBV28, TRBJ1-2)
CASRIQGANYGYTF

SEQ ID NO: 409501 - protein, 11 aa, Homo sapiens
  CDR3 for alpha chain variable domain of TCR clone 204751 (TRAV17, TRAJ9)
CATTGGFKTIF

SEQ ID NO: 409502 - protein, 14 aa, Homo sapiens
  CDR3 for beta chain variable domain of TCR clone 204751 (TRBV7-2, TRBJ2-7)
CASSLYPGRYEQYF

SEQ ID NO: 409503 - protein, 14 aa, Homo sapiens
  CDR3 for alpha chain variable domain of TCR clone 204752 (TRAV22, TRAJ29)
CAVTRNSGTTPLVF

SEQ ID NO: 409504 - protein, 13 aa, Homo sapiens
  CDR3 for beta chain variable domain of TCR clone 204752 (TRBV18, TRBJ1-1)
CASSPETKPEAFF

SEQ ID NO: 409505 - protein, 13 aa, Homo sapiens
  CDR3 for alpha chain variable domain of TCR clone 204753 (TRAV36/DV7, TRAJ50)
CAVSKTSYDKVIF

SEQ ID NO: 409506 - protein, 13 aa, Homo sapiens
  CDR3 for beta chain variable domain of TCR clone 204753 (TRBV18, TRBJ2-7)
CASSPGRNYEQYC

SEQ ID NO: 409507 - protein, 11 aa, Homo sapiens
  CDR3 for alpha chain variable domain of TCR clone 204754 (TRAV21, TRAJ34)
CAVTNTDKLIF

SEQ ID NO: 409508 - protein, 13 aa, Homo sapiens
  CDR3 for beta chain variable domain of TCR clone 204754 (TRBV7-9, TRBJ2-1)
CASSWESYNEQFF

SEQ ID NO: 409509 - protein, 15 aa, Homo sapiens
  CDR3 for alpha chain variable domain of TCR clone 204755 (TRAV17, TRAJ54)
CATTRSEQGAQKLVF

SEQ ID NO: 409510 - protein, 16 aa, Homo sapiens
  CDR3 for beta chain variable domain of TCR clone 204755 (TRBV12-5, TRBJ2-5)
CASGPRTSGNQETQYF

SEQ ID NO: 409511 - protein, 20 aa, Homo sapiens
  CDR3 for alpha chain variable domain of TCR clone 204756 (TRAV25, TRAJ21)
TATQTTDVGTYPLSFNEFYF

SEQ ID NO: 409512 - protein, 14 aa, Homo sapiens
  CDR3 for beta chain variable domain of TCR clone 204756 (TRBV6-1, TRBJ2-1)
CASAKDGFYNEQFF

SEQ ID NO: 409513 - protein, 10 aa, Homo sapiens
  CDR3 for alpha chain variable domain of TCR clone 204757 (TRAV39, TRAJ49)
CAVAGNQFYF

SEQ ID NO: 409514 - protein, 12 aa, Homo sapiens
  CDR3 for beta chain variable domain of TCR clone 204757 (TRBV28, TRBJ2-3)
CASSLYRDTQYF

SEQ ID NO: 409515 - protein, 14 aa, Homo sapiens
  CDR3 for alpha chain variable domain of TCR clone 204758 (TRAV12-3, TRAJ41)
CAMSAGNPGYALNF

SEQ ID NO: 409516 - protein, 11 aa, Homo sapiens
  CDR3 for beta chain variable domain of TCR clone 204758 (TRBV7-2, TRBJ2-3)
CASSSSDTQYF

SEQ ID NO: 409517 - protein, 13 aa, Homo sapiens
  CDR3 for alpha chain variable domain of TCR clone 204759 (TRAV2, TRAJ15)
CAVASQAGTALIF

SEQ ID NO: 409518 - protein, 13 aa, Homo sapiens
  CDR3 for beta chain variable domain of TCR clone 204759 (TRBV12-4, TRBJ2-7)
CASSSGGMYEQYF

SEQ ID NO: 409519 - protein, 11 aa, Homo sapiens
  CDR3 for alpha chain variable domain of TCR clone 204760 (TRAV23/DV6, TRAJ43)
CAASWNNDMRF

SEQ ID NO: 409520 - protein, 15 aa, Homo sapiens
  CDR3 for beta chain variable domain of TCR clone 204760 (TRBV20-1, TRBJ2-7)
CSARDRAPGMDEQYF

SEQ ID NO: 409521 - protein, 13 aa, Homo sapiens
  CDR3 for alpha chain variable domain of TCR clone 204761 (TRAV9-2, TRAJ53)
CALSGGSKYKLTF

SEQ ID NO: 409522 - protein, 10 aa, Homo sapiens
  CDR3 for beta chain variable domain of TCR clone 204761 (TRBV7-9, TRBJ1-1)
CASSFTEAFF

SEQ ID NO: 409523 - protein, 12 aa, Homo sapiens
  CDR3 for alpha chain variable domain of TCR clone 204762 (TRAV12-3, TRAJ17)
CAKTLTGNKLTV

SEQ ID NO: 409524 - protein, 13 aa, Homo sapiens
  CDR3 for beta chain variable domain of TCR clone 204762 (TRBV20-1, TRBJ1-1)
CSARGGGNTEAFF

SEQ ID NO: 409525 - protein, 21 aa, Homo sapiens
  CDR3 for alpha chain variable domain of TCR clone 204763 (TRAV8-3, TRAJ6)
CAVGGEEATYLPLDEEPALLF

SEQ ID NO: 409526 - protein, 14 aa, Homo sapiens
  CDR3 for beta chain variable domain of TCR clone 204763 (TRBV5-1, TRBJ2-7)
CASSRGESLYEQYF

SEQ ID NO: 409527 - protein, 12 aa, Homo sapiens
  CDR3 for alpha chain variable domain of TCR clone 204764 (TRAV13-2, TRAJ23)
CAERHRGGKLIF

SEQ ID NO: 409528 - protein, 15 aa, Homo sapiens
  CDR3 for beta chain variable domain of TCR clone 204764 (TRBV12-4, TRBJ2-5)
CASSPPAGRQETQYF

SEQ ID NO: 409529 - protein, 12 aa, Homo sapiens
  CDR3 for alpha chain variable domain of TCR clone 204765 (TRAV29/DV5, TRAJ34)
CAASGNTDKPIF

SEQ ID NO: 409530 - protein, 20 aa, Homo sapiens
  CDR3 for beta chain variable domain of TCR clone 204765 (TRBV19, TRBJ2-7)
CASTQVAPESLRAVLRAGHQ

SEQ ID NO: 409531 - protein, 13 aa, Homo sapiens
  CDR3 for alpha chain variable domain of TCR clone 204766 (TRAV26-1, TRAJ40)
CIVRVEGTYKYIF

SEQ ID NO: 409532 - protein, 15 aa, Homo sapiens
  CDR3 for beta chain variable domain of TCR clone 204766 (TRBV12-4, TRBJ1-2)
CASSLAQRDGQAYTF

SEQ ID NO: 409533 - protein, 18 aa, Homo sapiens
  CDR3 for alpha chain variable domain of TCR clone 204767 (TRAV21, TRAJ52)
CAVRPSPAVGTSYGKLTF

SEQ ID NO: 409534 - protein, 17 aa, Homo sapiens
  CDR3 for beta chain variable domain of TCR clone 204767 (TRBV13, TRBJ2-3)
CASSLSRVAGGRNTRYF

SEQ ID NO: 409535 - protein, 13 aa, Homo sapiens
  CDR3 for alpha chain variable domain of TCR clone 204768 (TRAV27, TRAJ39)
CAGGNNAGNMLTF

SEQ ID NO: 409536 - protein, 16 aa, Homo sapiens
  CDR3 for beta chain variable domain of TCR clone 204768 (TRBV11-2, TRBJ2-1)
CQQLIPPGVEYNEQFF

SEQ ID NO: 409537 - protein, 14 aa, Homo sapiens
  CDR3 for alpha chain variable domain of TCR clone 204769 (TRAV20, TRAJ10)
CAVRVEGGGNKLTF

SEQ ID NO: 409538 - protein, 16 aa, Homo sapiens
  CDR3 for beta chain variable domain of TCR clone 204769 (TRBV19, TRBJ2-1)
CASSKAGPSSYNEQFF

SEQ ID NO: 409539 - protein, 20 aa, Homo sapiens
  CDR3 for alpha chain variable domain of TCR clone 204770 (TRAV12-1, TRAJ42)
SSVIQPPTSVKGGSQGNLII

SEQ ID NO: 409540 - protein, 18 aa, Homo sapiens
  CDR3 for beta chain variable domain of TCR clone 204770 (TRBV11-2, TRBJ2-3)
CASSLGGASRGAPNTQYF

SEQ ID NO: 409541 - protein, 15 aa, Homo sapiens
  CDR3 for alpha chain variable domain of TCR clone 204771 (TRAV13-1, TRAJ36)
CAASIRQTGANNLFF

SEQ ID NO: 409542 - protein, 17 aa, Homo sapiens
  CDR3 for beta chain variable domain of TCR clone 204771 (TRBV11-2, TRBJ2-1)
CASSLYPPGVEYNEQFF

SEQ ID NO: 409543 - protein, 17 aa, Homo sapiens
  CDR3 for alpha chain variable domain of TCR clone 204772 (TRAV3, TRAJ38)
CAVRDCLNAGNNRKLIW

SEQ ID NO: 409544 - protein, 13 aa, Homo sapiens
  CDR3 for beta chain variable domain of TCR clone 204772 (TRBV20-1, TRBJ2-5)
CSAREGGKETQYF

SEQ ID NO: 409545 - protein, 14 aa, Homo sapiens
  CDR3 for alpha chain variable domain of TCR clone 204773 (TRAV4, TRAJ3)
CLVPPGSSASKIIF

SEQ ID NO: 409546 - protein, 17 aa, Homo sapiens
  CDR3 for beta chain variable domain of TCR clone 204773 (TRBV11-2, TRBJ2-1)
CASSLYPPGVEYNEQFF

SEQ ID NO: 409547 - protein, 15 aa, Homo sapiens
  CDR3 for alpha chain variable domain of TCR clone 204774 (TRAV12-2, TRAJ43)
CAFDMRFGTGTRLTV

SEQ ID NO: 409548 - protein, 17 aa, Homo sapiens
  CDR3 for beta chain variable domain of TCR clone 204774 (TRBV13, TRBJ2-3)
CASSLSRVAGGRNTQYF

SEQ ID NO: 409549 - protein, 16 aa, Homo sapiens
  CDR3 for alpha chain variable domain of TCR clone 204775 (TRAV2, TRAJ29)
CAVEAGGDSGNTPLVF

SEQ ID NO: 409550 - protein, 13 aa, Homo sapiens
  CDR3 for beta chain variable domain of TCR clone 204775 (TRBV25-1, TRBJ1-1)
CQHHLGGNTEAFF

SEQ ID NO: 409551 - protein, 14 aa, Homo sapiens
  CDR3 for alpha chain variable domain of TCR clone 204776 (TRAV38-2/DV8, TRAJ47)
CAYRTLEYGNKLVF

SEQ ID NO: 409552 - protein, 16 aa, Homo sapiens
  CDR3 for beta chain variable domain of TCR clone 204776 (TRBV15, TRBJ2-7)
CATSRDGEIPSYEQYF

SEQ ID NO: 409553 - protein, 15 aa, Homo sapiens
  CDR3 for alpha chain variable domain of TCR clone 204777 (TRAV13-1, TRAJ45)
CAASGSGGGADGPTF

SEQ ID NO: 409554 - protein, 12 aa, Homo sapiens
  CDR3 for beta chain variable domain of TCR clone 204777 (TRBV11-2, TRBJ2-2)
CASSLGGGGLFF

SEQ ID NO: 409555 - protein, 15 aa, Homo sapiens
  CDR3 for alpha chain variable domain of TCR clone 204778 (TRAV12-3, TRAJ53)
CNERPIEGSYYKLTF

SEQ ID NO: 409556 - protein, 13 aa, Homo sapiens
  CDR3 for beta chain variable domain of TCR clone 204778 (TRBV15, TRBJ1-1)
CATSRGIQARAFF

SEQ ID NO: 409557 - protein, 12 aa, Homo sapiens
  CDR3 for alpha chain variable domain of TCR clone 204779 (TRAV13-1, TRAJ21)
CAAFFNFNKFYF

SEQ ID NO: 409558 - protein, 14 aa, Homo sapiens
  CDR3 for beta chain variable domain of TCR clone 204779 (TRBV4-1, TRBJ2-7)
CASRLTSGSYEQYL

SEQ ID NO: 409559 - protein, 14 aa, Homo sapiens
  CDR3 for alpha chain variable domain of TCR clone 204780 (TRAV12-3, TRAJ10)
SHLPLTGGGNKITF

SEQ ID NO: 409560 - protein, 12 aa, Homo sapiens
  CDR3 for beta chain variable domain of TCR clone 204780 (TRBV11-2, TRBJ2-2)
CASSLGGGELFF

SEQ ID NO: 409561 - protein, 16 aa, Homo sapiens
  CDR3 for alpha chain variable domain of TCR clone 204781 (TRAV14/DV4, TRAJ20)
CAMREGRSRDDYKLSF

SEQ ID NO: 409562 - protein, 12 aa, Homo sapiens
  CDR3 for beta chain variable domain of TCR clone 204781 (TRBV19, TRBJ1-5)
CASSIAQQPQHF

SEQ ID NO: 409563 - protein, 13 aa, Homo sapiens
  CDR3 for alpha chain variable domain of TCR clone 204782 (TRAV13-1, TRAJ33)
CAASRAGNYQLIW

SEQ ID NO: 409564 - protein, 14 aa, Homo sapiens
  CDR3 for beta chain variable domain of TCR clone 204782 (TRBV4-2, TRBJ1-5)
CASSQDSINQPQHF

SEQ ID NO: 409565 - protein, 13 aa, Homo sapiens
  CDR3 for alpha chain variable domain of TCR clone 204783 (TRAV1-2, TRAJ12)
CAVSMDSSSKLLF

SEQ ID NO: 409566 - protein, 14 aa, Homo sapiens
  CDR3 for beta chain variable domain of TCR clone 204783 (TRBV19, TRBJ2-1)
CASSSGRDYNEQFF

SEQ ID NO: 409567 - protein, 17 aa, Homo sapiens
  CDR3 for alpha chain variable domain of TCR clone 204784 (TRAV26-2, TRAJ42)
CILRDVGYGGSQGNLIF

SEQ ID NO: 409568 - protein, 17 aa, Homo sapiens
  CDR3 for beta chain variable domain of TCR clone 204784 (TRBV4-1, TRBJ2-7)
CASSQGRGLQTSYEQYF

SEQ ID NO: 409569 - protein, 16 aa, Homo sapiens
  CDR3 for alpha chain variable domain of TCR clone 204785 (TRAV30, TRAJ24)
CGTEIVDADSWGKFQF

SEQ ID NO: 409570 - protein, 13 aa, Homo sapiens
  CDR3 for beta chain variable domain of TCR clone 204785 (TRBV19, TRBJ1-2)
CASRLGADYGYTF

SEQ ID NO: 409571 - protein, 13 aa, Homo sapiens
  CDR3 for alpha chain variable domain of TCR clone 204786 (TRAV4, TRAJ33)
CLVGDMNNYQLIW

SEQ ID NO: 409572 - protein, 14 aa, Homo sapiens
  CDR3 for beta chain variable domain of TCR clone 204786 (TRBV7-9, TRBJ1-1)
CASSLGGANPEAFF

SEQ ID NO: 409573 - protein, 11 aa, Homo sapiens
  CDR3 for alpha chain variable domain of TCR clone 204787 (TRAV21, TRAJ20)
CAVRDDYKLSF

SEQ ID NO: 409574 - protein, 14 aa, Homo sapiens
  CDR3 for beta chain variable domain of TCR clone 204787 (TRBV7-2, TRBJ2-7)
FASSPKTSFYEQYF

SEQ ID NO: 409575 - protein, 14 aa, Homo sapiens
  CDR3 for alpha chain variable domain of TCR clone 204788 (TRAV38-1, TRAJ40)
CALRPTSGTYKYIF

SEQ ID NO: 409576 - protein, 12 aa, Homo sapiens
  CDR3 for beta chain variable domain of TCR clone 204788 (TRBV19, TRBJ1-2)
CASSRTESGYTF

SEQ ID NO: 409577 - protein, 14 aa, Homo sapiens
  CDR3 for alpha chain variable domain of TCR clone 204789 (TRAV8-2, TRAJ4)
CVLSPSGGYIKMIF

SEQ ID NO: 409578 - protein, 15 aa, Homo sapiens
  CDR3 for beta chain variable domain of TCR clone 204789 (TRBV4-1, TRBJ1-4)
CASSDTGGTNEKLFF

SEQ ID NO: 409579 - protein, 20 aa, Homo sapiens
  CDR3 for alpha chain variable domain of TCR clone 204790 (TRAV26-2, TRAJ39)
CRVLLHPESAFYNAGNMLTF

SEQ ID NO: 409580 - protein, 14 aa, Homo sapiens
  CDR3 for beta chain variable domain of TCR clone 204790 (TRBV12-4, TRBJ1-4)
CASRMTGRSEKLFF

SEQ ID NO: 409581 - protein, 13 aa, Homo sapiens
  CDR3 for alpha chain variable domain of TCR clone 204791 (TRAV2, TRAJ23)
CAVMGNQGGKLSS

SEQ ID NO: 409582 - protein, 15 aa, Homo sapiens
  CDR3 for beta chain variable domain of TCR clone 204791 (TRBV11-2, TRBJ2-1)
CASSSSTISYNEQFF

SEQ ID NO: 409583 - protein, 11 aa, Homo sapiens
  CDR3 for alpha chain variable domain of TCR clone 204792 (TRAV12-2, TRAJ29)
CAVTLRSPLVF

SEQ ID NO: 409584 - protein, 13 aa, Homo sapiens
  CDR3 for beta chain variable domain of TCR clone 204792 (TRBV19, TRBJ1-2)
CASSVPGQDGYTF

SEQ ID NO: 409585 - protein, 14 aa, Homo sapiens
  CDR3 for alpha chain variable domain of TCR clone 204793 (TRAV12-2, TRAJ6)
CASKWGGGSYIHTF

SEQ ID NO: 409586 - protein, 13 aa, Homo sapiens
  CDR3 for beta chain variable domain of TCR clone 204793 (TRBV2, TRBJ1-1)
CASSEGGNTEALF

SEQ ID NO: 409587 - protein, 14 aa, Homo sapiens
  CDR3 for alpha chain variable domain of TCR clone 204794 (TRAV29/DV5, TRAJ36)
CAARRKTGANNLFF

SEQ ID NO: 409588 - protein, 14 aa, Homo sapiens
  CDR3 for beta chain variable domain of TCR clone 204794 (TRBV7-9, TRBJ2-1)
CASSIRQGWDEQFF

SEQ ID NO: 409589 - protein, 15 aa, Homo sapiens
  CDR3 for alpha chain variable domain of TCR clone 204795 (TRAV2, TRAJ28)
CAVPYSGAGSYQLTF

SEQ ID NO: 409590 - protein, 15 aa, Homo sapiens
  CDR3 for beta chain variable domain of TCR clone 204795 (TRBV23-1, TRBJ2-1)
PAPAVKWSSYNEQFF

SEQ ID NO: 409591 - protein, 11 aa, Homo sapiens
  CDR3 for alpha chain variable domain of TCR clone 204796 (TRAV13-1, TRAJ39)
CASHAGNMLTF

SEQ ID NO: 409592 - protein, 13 aa, Homo sapiens
  CDR3 for beta chain variable domain of TCR clone 204796 (TRBV7-2, TRBJ2-5)
CASSQTSVETQYF

SEQ ID NO: 409593 - protein, 13 aa, Homo sapiens
  CDR3 for alpha chain variable domain of TCR clone 204797 (TRAV16, TRAJ5)
CALTDTGRRALTF

SEQ ID NO: 409594 - protein, 15 aa, Homo sapiens
  CDR3 for beta chain variable domain of TCR clone 204797 (TRBV11-2, TRBJ2-4)
CASSRPGTGINSQYF

SEQ ID NO: 409595 - protein, 14 aa, Homo sapiens
  CDR3 for alpha chain variable domain of TCR clone 204798 (TRAV12-2, TRAJ13)
CAVNPSWGYQKVTF

SEQ ID NO: 409596 - protein, 13 aa, Homo sapiens
  CDR3 for beta chain variable domain of TCR clone 204798 (TRBV20-1, TRBJ1-6)
CSAKLGGTSPLHF

SEQ ID NO: 409597 - protein, 13 aa, Homo sapiens
  CDR3 for alpha chain variable domain of TCR clone 204799 (TRAV21, TRAJ27)
CAARPGNAGKLTF

SEQ ID NO: 409598 - protein, 13 aa, Homo sapiens
  CDR3 for beta chain variable domain of TCR clone 204799 (TRBV20-1, TRBJ1-1)
CSARGGGNTEAFF

SEQ ID NO: 409599 - protein, 14 aa, Homo sapiens
  CDR3 for alpha chain variable domain of TCR clone 204800 (TRAV3, TRAJ36)
CAVRDGTGANNLFF

SEQ ID NO: 409600 - protein, 16 aa, Homo sapiens
  CDR3 for beta chain variable domain of TCR clone 204800 (TRBV7-3, TRBJ2-5)
CASIQPGGSVQETQDF

SEQ ID NO: 409601 - protein, 15 aa, Homo sapiens
  CDR3 for alpha chain variable domain of TCR clone 204801 (TRAV38-2/DV8, TRAJ45)
CAYWDSGGGAAGLTF

SEQ ID NO: 409602 - protein, 16 aa, Homo sapiens
  CDR3 for beta chain variable domain of TCR clone 204801 (TRBV19, TRBJ1-1)
CASSPTRFWPGTEAFF

SEQ ID NO: 409603 - protein, 15 aa, Homo sapiens
  CDR3 for alpha chain variable domain of TCR clone 204802 (TRAV27, TRAJ38)
CAARRNAGNNRQLIW

SEQ ID NO: 409604 - protein, 13 aa, Homo sapiens
  CDR3 for beta chain variable domain of TCR clone 204802 (TRBV12-5, TRBJ2-3)
CASGDRQSDTQYF

SEQ ID NO: 409605 - protein, 14 aa, Homo sapiens
  CDR3 for alpha chain variable domain of TCR clone 204803 (TRAV12-2, TRAJ9)
CAVNMEGGGFKTFF

SEQ ID NO: 409606 - protein, 14 aa, Homo sapiens
  CDR3 for beta chain variable domain of TCR clone 204803 (TRBV2, TRBJ2-5)
CASSEVLAQETQYF

SEQ ID NO: 409607 - protein, 12 aa, Homo sapiens
  CDR3 for alpha chain variable domain of TCR clone 204804 (TRAV25, TRAJ20)
CGGRSNDYKLSF

SEQ ID NO: 409608 - protein, 15 aa, Homo sapiens
  CDR3 for beta chain variable domain of TCR clone 204804 (TRBV7-6, TRBJ2-7)
CASSGRRDTFGEQYF

SEQ ID NO: 409609 - protein, 18 aa, Homo sapiens
  CDR3 for alpha chain variable domain of TCR clone 204805 (TRAV21, TRAJ52)
CAVRPSPAGVTSYGKLTF

SEQ ID NO: 409610 - protein, 15 aa, Homo sapiens
  CDR3 for beta chain variable domain of TCR clone 204805 (TRBV19, TRBJ1-1)
CASTSGQIQNTEAFF

SEQ ID NO: 409611 - protein, 16 aa, Homo sapiens
  CDR3 for alpha chain variable domain of TCR clone 204806 (TRAV26-1, TRAJ36)
CIVRVPDQTGANNLFF

SEQ ID NO: 409612 - protein, 16 aa, Homo sapiens
  CDR3 for beta chain variable domain of TCR clone 204806 (TRBV7-2, TRBJ2-7)
CASSLYPGATSSTSGR

SEQ ID NO: 409613 - protein, 14 aa, Homo sapiens
  CDR3 for alpha chain variable domain of TCR clone 204807 (TRAV20, TRAJ56)
CAVQFVGANSKLTF

SEQ ID NO: 409614 - protein, 14 aa, Homo sapiens
  CDR3 for beta chain variable domain of TCR clone 204807 (TRBV20-1, TRBJ2-7)
CSAKRGRSSYERYF

SEQ ID NO: 409615 - protein, 14 aa, Homo sapiens
  CDR3 for alpha chain variable domain of TCR clone 204808 (TRAV8-3, TRAJ11)
CAVGSNSGYSALTF

SEQ ID NO: 409616 - protein, 15 aa, Homo sapiens
  CDR3 for beta chain variable domain of TCR clone 204808 (TRBV7-2, TRBJ2-3)
CASSSTGLETDTQYF

SEQ ID NO: 409617 - protein, 12 aa, Homo sapiens
  CDR3 for alpha chain variable domain of TCR clone 204809 (TRAV9-2, TRAJ36)
CALNKGANNLFF

SEQ ID NO: 409618 - protein, 17 aa, Homo sapiens
  CDR3 for beta chain variable domain of TCR clone 204809 (TRBV20-1, TRBJ1-5)
CSAREIPQGVGNQPQHF

SEQ ID NO: 409619 - protein, 14 aa, Homo sapiens
  CDR3 for alpha chain variable domain of TCR clone 204810 (TRAV14/DV4, TRAJ42)
CPRGSLRSQGNLIF

SEQ ID NO: 409620 - protein, 18 aa, Homo sapiens
  CDR3 for beta chain variable domain of TCR clone 204810 (TRBV20-1, TRBJ2-3)
CSASGLAGGAGTTDTQYF

SEQ ID NO: 409621 - protein, 14 aa, Homo sapiens
  CDR3 for alpha chain variable domain of TCR clone 204811 (TRAV12-2, TRAJ24)
CAVTPADSWGKLQF

SEQ ID NO: 409622 - protein, 14 aa, Homo sapiens
  CDR3 for beta chain variable domain of TCR clone 204811 (TRBV28, TRBJ2-3)
CASSWRGRADTQYF

SEQ ID NO: 409623 - protein, 16 aa, Homo sapiens
  CDR3 for alpha chain variable domain of TCR clone 204812 (TRAV17, TRAJ28)
CACGSYSGAGSYQLTF

SEQ ID NO: 409624 - protein, 12 aa, Homo sapiens
  CDR3 for beta chain variable domain of TCR clone 204812 (TRBV11-2, TRBJ2-1)
CASSPGNNEQFF

SEQ ID NO: 409625 - protein, 15 aa, Homo sapiens
  CDR3 for alpha chain variable domain of TCR clone 204813 (TRAV21, TRAJ40)
CAVRPQTLGTYKYIF

SEQ ID NO: 409626 - protein, 16 aa, Homo sapiens
  CDR3 for beta chain variable domain of TCR clone 204813 (TRBV7-2, TRBJ1-4)
CASSLAPGRRDEKLFF

SEQ ID NO: 409627 - protein, 15 aa, Homo sapiens
  CDR3 for alpha chain variable domain of TCR clone 204814 (TRAV17, TRAJ57)
CATGPSQGGSEKLVF

SEQ ID NO: 409628 - protein, 15 aa, Homo sapiens
  CDR3 for beta chain variable domain of TCR clone 204814 (TRBV7-6, TRBJ2-1)
CASSSLAGEGNEQFF

SEQ ID NO: 409629 - protein, 14 aa, Homo sapiens
  CDR3 for alpha chain variable domain of TCR clone 204815 (TRAV13-1, TRAJ44)
CAAKSTGTASKLTF

SEQ ID NO: 409630 - protein, 16 aa, Homo sapiens
  CDR3 for beta chain variable domain of TCR clone 204815 (TRBV15, TRBJ1-2)
CATSRGPRTGGGGYTF

SEQ ID NO: 409631 - protein, 14 aa, Homo sapiens
  CDR3 for alpha chain variable domain of TCR clone 204816 (TRAV8-2, TRAJ4)
CVVSPSGGYNKLLF

SEQ ID NO: 409632 - protein, 16 aa, Homo sapiens
  CDR3 for beta chain variable domain of TCR clone 204816 (TRBV7-3, TRBJ2-1)
CASSLEGYRSYNEQFF

SEQ ID NO: 409633 - protein, 15 aa, Homo sapiens
  CDR3 for alpha chain variable domain of TCR clone 204817 (TRAV12-3, TRAJ27)
CAMRAYNTNVGKSTF

SEQ ID NO: 409634 - protein, 13 aa, Homo sapiens
  CDR3 for beta chain variable domain of TCR clone 204817 (TRBV11-2, TRBJ2-5)
CASSRGPSETQYF

SEQ ID NO: 409635 - protein, 13 aa, Homo sapiens
  CDR3 for alpha chain variable domain of TCR clone 204818 (TRAV1-2, TRAJ9)
CAPLNTGGFKTIF

SEQ ID NO: 409636 - protein, 16 aa, Homo sapiens
  CDR3 for beta chain variable domain of TCR clone 204818 (TRBV28, TRBJ2-2)
CASSLEGGSNTGELFF

SEQ ID NO: 409637 - protein, 15 aa, Homo sapiens
  CDR3 for alpha chain variable domain of TCR clone 204819 (TRAV12-2, TRAJ43)
CAFDMRFGAGTRLTV

SEQ ID NO: 409638 - protein, 17 aa, Homo sapiens
  CDR3 for beta chain variable domain of TCR clone 204819 (TRBV13, TRBJ2-3)
CASSLSRVAGGRTTQYF

SEQ ID NO: 409639 - protein, 14 aa, Homo sapiens
  CDR3 for alpha chain variable domain of TCR clone 204820 (TRAV14/DV4, TRAJ32)
SNVLPLTPTNKLIF

SEQ ID NO: 409640 - protein, 12 aa, Homo sapiens
  CDR3 for beta chain variable domain of TCR clone 204820 (TRBV12-4, TRBJ2-3)
CASSSTTDTQYF

SEQ ID NO: 409641 - protein, 14 aa, Homo sapiens
  CDR3 for alpha chain variable domain of TCR clone 204821 (TRAV1-2, TRAJ16)
SAVNRVSDGQKLLF

SEQ ID NO: 409642 - protein, 13 aa, Homo sapiens
  CDR3 for beta chain variable domain of TCR clone 204821 (TRBV7-2, TRBJ2-2)
CASSLAVTGELFF

SEQ ID NO: 409643 - protein, 15 aa, Homo sapiens
  CDR3 for alpha chain variable domain of TCR clone 204822 (TRAV26-1, TRAJ29)
CIVRVEGSGNTPLVL

SEQ ID NO: 409644 - protein, 13 aa, Homo sapiens
  CDR3 for beta chain variable domain of TCR clone 204822 (TRBV18, TRBJ2-5)
CQLTWVSQETQYF

SEQ ID NO: 409645 - protein, 13 aa, Homo sapiens
  CDR3 for alpha chain variable domain of TCR clone 204823 (TRAV16, TRAJ34)
CALSPYNTDKLIF

SEQ ID NO: 409646 - protein, 16 aa, Homo sapiens
  CDR3 for beta chain variable domain of TCR clone 204823 (TRBV20-1, TRBJ1-4)
CSAPGQGLLTNEKLFF

SEQ ID NO: 409647 - protein, 12 aa, Homo sapiens
  CDR3 for alpha chain variable domain of TCR clone 204824 (TRAV1-1, TRAJ39)
CAVPVVGNMLTF

SEQ ID NO: 409648 - protein, 17 aa, Homo sapiens
  CDR3 for beta chain variable domain of TCR clone 204824 (TRBV11-1, TRBJ2-7)
CASSLLDGGDSAYEQYF

SEQ ID NO: 409649 - protein, 12 aa, Homo sapiens
  CDR3 for alpha chain variable domain of TCR clone 204825 (TRAV12-1, TRAJ40)
CVVYSGTYKYIF

SEQ ID NO: 409650 - protein, 12 aa, Homo sapiens
  CDR3 for beta chain variable domain of TCR clone 204825 (TRBV7-9, TRBJ1-4)
CASSLADSKLFF

SEQ ID NO: 409651 - protein, 22 aa, Homo sapiens
  CDR3 for alpha chain variable domain of TCR clone 204826 (TRAV13-1, TRAJ37)
CAARIGGLWQHRQTNLWARDNF

SEQ ID NO: 409652 - protein, 14 aa, Homo sapiens
  CDR3 for beta chain variable domain of TCR clone 204826 (TRBV27, TRBJ2-2)
CASSLGATTGELFF

SEQ ID NO: 409653 - protein, 16 aa, Homo sapiens
  CDR3 for alpha chain variable domain of TCR clone 204827 (TRAV38-2/DV8, TRAJ45)
CAYRGNSGGGADGLTF

SEQ ID NO: 409654 - protein, 14 aa, Homo sapiens
  CDR3 for beta chain variable domain of TCR clone 204827 (TRBV6-3, TRBJ2-5)
CASSYSLREKTQYF

SEQ ID NO: 409655 - protein, 15 aa, Homo sapiens
  CDR3 for alpha chain variable domain of TCR clone 204828 (TRAV2, TRAJ15)
CAVEDRGQAGTALTF

SEQ ID NO: 409656 - protein, 13 aa, Homo sapiens
  CDR3 for beta chain variable domain of TCR clone 204828 (TRBV10-2, TRBJ2-7)
CASGASGVYEQYF

SEQ ID NO: 409657 - protein, 13 aa, Homo sapiens
  CDR3 for alpha chain variable domain of TCR clone 204829 (TRAV2, TRAJ40)
CAVVTSGTYKYIF

SEQ ID NO: 409658 - protein, 15 aa, Homo sapiens
  CDR3 for beta chain variable domain of TCR clone 204829 (TRBV5-1, TRBJ2-1)
CASKGLAGVYNEQFF

SEQ ID NO: 409659 - protein, 11 aa, Homo sapiens
  CDR3 for alpha chain variable domain of TCR clone 204830 (TRAV23/DV6, TRAJ49)
CAAETGNQFYF

SEQ ID NO: 409660 - protein, 18 aa, Homo sapiens
  CDR3 for beta chain variable domain of TCR clone 204830 (TRBV7-9, TRBJ2-7)
CASSLTTSGSRTWYEQYF

SEQ ID NO: 409661 - protein, 14 aa, Homo sapiens
  CDR3 for alpha chain variable domain of TCR clone 204831 (TRAV35, TRAJ22)
CAVLRPGSAMQLTF

SEQ ID NO: 409662 - protein, 14 aa, Homo sapiens
  CDR3 for beta chain variable domain of TCR clone 204831 (TRBV4-1, TRBJ2-7)
CASSPVAGGDEQYF

SEQ ID NO: 409663 - protein, 12 aa, Homo sapiens
  CDR3 for alpha chain variable domain of TCR clone 204832 (TRAV35, TRAJ39)
LAPNNAGNMLTF

SEQ ID NO: 409664 - protein, 16 aa, Homo sapiens
  CDR3 for beta chain variable domain of TCR clone 204832 (TRBV2, TRBJ2-3)
CASSTSVEGITDTQYF

SEQ ID NO: 409665 - protein, 14 aa, Homo sapiens
  CDR3 for alpha chain variable domain of TCR clone 204833 (TRAV22, TRAJ28)
CAVYSGAGGYQLTF

SEQ ID NO: 409666 - protein, 16 aa, Homo sapiens
  CDR3 for beta chain variable domain of TCR clone 204833 (TRBV24-1, TRBJ2-3)
CATSDPGTGATDTQYF

SEQ ID NO: 409667 - protein, 14 aa, Homo sapiens
  CDR3 for alpha chain variable domain of TCR clone 204834 (TRAV13-2, TRAJ9)
CAENSVTGGFKTIF

SEQ ID NO: 409668 - protein, 13 aa, Homo sapiens
  CDR3 for beta chain variable domain of TCR clone 204834 (TRBV19, TRBJ2-7)
CASSIDRTYEQYF

SEQ ID NO: 409669 - protein, 14 aa, Homo sapiens
  CDR3 for alpha chain variable domain of TCR clone 204835 (TRAV1-2, TRAJ8)
CAVREDTGFQELVF

SEQ ID NO: 409670 - protein, 15 aa, Homo sapiens
  CDR3 for beta chain variable domain of TCR clone 204835 (TRBV19, TRBJ2-1)
CASSTGTSSYNEQFF

SEQ ID NO: 409671 - protein, 16 aa, Homo sapiens
  CDR3 for alpha chain variable domain of TCR clone 204836 (TRAV3, TRAJ37)
CAVRGKGSGNTGKLIF

SEQ ID NO: 409672 - protein, 20 aa, Homo sapiens
  CDR3 for beta chain variable domain of TCR clone 204836 (TRBV7-8, TRBJ2-2)
CASSQLFPGPTIHITGELFF

SEQ ID NO: 409673 - protein, 17 aa, Homo sapiens
  CDR3 for alpha chain variable domain of TCR clone 204837 (TRAV4, )
CLVDIQNPDPAVYQLRD

SEQ ID NO: 409674 - protein, 11 aa, Homo sapiens
  CDR3 for beta chain variable domain of TCR clone 204837 (TRBV6-3, TRBJ2-3)
RATGQADTQYF

SEQ ID NO: 409675 - protein, 13 aa, Homo sapiens
  CDR3 for alpha chain variable domain of TCR clone 204838 (TRAV29/DV5, TRAJ49)
CAASPNTGNKFYF

SEQ ID NO: 409676 - protein, 13 aa, Homo sapiens
  CDR3 for beta chain variable domain of TCR clone 204838 (TRBV7-2, TRBJ1-4)
CASSLAGLEKLFF

SEQ ID NO: 409677 - protein, 14 aa, Homo sapiens
  CDR3 for alpha chain variable domain of TCR clone 204839 (TRAV9-2, TRAJ39)
CALYIYNAGNMLTF

SEQ ID NO: 409678 - protein, 15 aa, Homo sapiens
  CDR3 for beta chain variable domain of TCR clone 204839 (TRBV28, TRBJ1-3)
CASSMGWASGNTINF

SEQ ID NO: 409679 - protein, 15 aa, Homo sapiens
  CDR3 for alpha chain variable domain of TCR clone 204840 (TRAV14/DV4, TRAJ10)
CAMRALTGGGNKLTF

SEQ ID NO: 409680 - protein, 18 aa, Homo sapiens
  CDR3 for beta chain variable domain of TCR clone 204840 (TRBV7-9, TRBJ2-7)
CASSLTTSGSRTWYEQYF

SEQ ID NO: 409681 - protein, 14 aa, Homo sapiens
  CDR3 for alpha chain variable domain of TCR clone 204841 (TRAV29/DV5, TRAJ36)
CAARRKTGANNLFF

SEQ ID NO: 409682 - protein, 15 aa, Homo sapiens
  CDR3 for beta chain variable domain of TCR clone 204841 (TRBV6-1, TRBJ2-3)
CASSERTGRTDTQYF

SEQ ID NO: 409683 - protein, 15 aa, Homo sapiens
  CDR3 for alpha chain variable domain of TCR clone 204842 (TRAV26-1, TRAJ29)
CIVRVEGSGNTPLIF

SEQ ID NO: 409684 - protein, 15 aa, Homo sapiens
  CDR3 for beta chain variable domain of TCR clone 204842 (TRBV7-9, TRBJ1-5)
CASSQGHQPNQPQLF

SEQ ID NO: 409685 - protein, 13 aa, Homo sapiens
  CDR3 for alpha chain variable domain of TCR clone 204843 (TRAV17, TRAJ54)
CATVIQGAQKLVF

SEQ ID NO: 409686 - protein, 15 aa, Homo sapiens
  CDR3 for beta chain variable domain of TCR clone 204843 (TRBV28, TRBJ2-5)
CASSPPWSYQETQYF

SEQ ID NO: 409687 - protein, 16 aa, Homo sapiens
  CDR3 for alpha chain variable domain of TCR clone 204844 (TRAV3, TRAJ37)
CAVRGKGSGNTGKLIF

SEQ ID NO: 409688 - protein, 15 aa, Homo sapiens
  CDR3 for beta chain variable domain of TCR clone 204844 (TRBV7-3, TRBJ2-2)
CASSETGQGTGKLFF

SEQ ID NO: 409689 - protein, 14 aa, Homo sapiens
  CDR3 for alpha chain variable domain of TCR clone 204845 (TRAV3, TRAJ21)
CAVRDAYNFNKFYF

SEQ ID NO: 409690 - protein, 17 aa, Homo sapiens
  CDR3 for beta chain variable domain of TCR clone 204845 (TRBV20-1, TRBJ1-6)
SSARGGYTFSYNSPLHF

SEQ ID NO: 409691 - protein, 13 aa, Homo sapiens
  CDR3 for alpha chain variable domain of TCR clone 204846 (TRAV12-2, TRAJ30)
CAVNLNRDDKIIF

SEQ ID NO: 409692 - protein, 14 aa, Homo sapiens
  CDR3 for beta chain variable domain of TCR clone 204846 (TRBV20-1, TRBJ2-3)
CSASSGGNTDTQYF

SEQ ID NO: 409693 - protein, 16 aa, Homo sapiens
  CDR3 for alpha chain variable domain of TCR clone 204847 (TRAV3, TRAJ6)
CCERRPQGRRKLHTTF

SEQ ID NO: 409694 - protein, 15 aa, Homo sapiens
  CDR3 for beta chain variable domain of TCR clone 204847 (TRBV7-2, TRBJ2-1)
CASRKTGSSYNEQFF

SEQ ID NO: 409695 - protein, 16 aa, Homo sapiens
  CDR3 for alpha chain variable domain of TCR clone 204848 (TRAV12-2, TRAJ32)
CAVNMNYGGATNKIIF

SEQ ID NO: 409696 - protein, 16 aa, Homo sapiens
  CDR3 for beta chain variable domain of TCR clone 204848 (TRBV7-8, TRBJ2-3)
CASSTEGQRETDTQYF

SEQ ID NO: 409697 - protein, 14 aa, Homo sapiens
  CDR3 for alpha chain variable domain of TCR clone 204849 (TRAV29/DV5, TRAJ43)
FAAIHSYNNNDMRF

SEQ ID NO: 409698 - protein, 14 aa, Homo sapiens
  CDR3 for beta chain variable domain of TCR clone 204849 (TRBV12-4, TRBJ2-5)
CASSSTEGTKTQYF

SEQ ID NO: 409699 - protein, 11 aa, Homo sapiens
  CDR3 for alpha chain variable domain of TCR clone 204850 (TRAV17, TRAJ31)
CATSNNARLMF

SEQ ID NO: 409700 - protein, 14 aa, Homo sapiens
  CDR3 for beta chain variable domain of TCR clone 204850 (TRBV20-1, TRBJ2-1)
CSAHPGLPYNEQFF

SEQ ID NO: 409701 - protein, 14 aa, Homo sapiens
  CDR3 for alpha chain variable domain of TCR clone 204851 (TRAV14/DV4, TRAJ20)
CSMRESLNDYKLSF

SEQ ID NO: 409702 - protein, 15 aa, Homo sapiens
  CDR3 for beta chain variable domain of TCR clone 204851 (TRBV5-7, TRBJ1-5)
CASSYGKLWDQPQHF

SEQ ID NO: 409703 - protein, 13 aa, Homo sapiens
  CDR3 for alpha chain variable domain of TCR clone 204852 (TRAV3, TRAJ21)
CAVATSTNFTLDL

SEQ ID NO: 409704 - protein, 16 aa, Homo sapiens
  CDR3 for beta chain variable domain of TCR clone 204852 (TRBV19, TRBJ2-1)
CASSKAGPSSYNEKFF

SEQ ID NO: 409705 - protein, 12 aa, Homo sapiens
  CDR3 for alpha chain variable domain of TCR clone 204853 (TRAV21, TRAJ33)
CAKMDSNYQLIW

SEQ ID NO: 409706 - protein, 14 aa, Homo sapiens
  CDR3 for beta chain variable domain of TCR clone 204853 (TRBV2, TRBJ2-7)
CASSPISGGYEQYF

SEQ ID NO: 409707 - protein, 10 aa, Homo sapiens
  CDR3 for alpha chain variable domain of TCR clone 204854 (TRAV12-1, TRAJ37)
ARGNTGELIF

SEQ ID NO: 409708 - protein, 15 aa, Homo sapiens
  CDR3 for beta chain variable domain of TCR clone 204854 (TRBV7-2, TRBJ2-3)
CASSLERGGTDTQYF

SEQ ID NO: 409709 - protein, 15 aa, Homo sapiens
  CDR3 for alpha chain variable domain of TCR clone 204855 (TRAV12-3, TRAJ23)
CAMSAIGNQGGKLIF

SEQ ID NO: 409710 - protein, 14 aa, Homo sapiens
  CDR3 for beta chain variable domain of TCR clone 204855 (TRBV7-8, TRBJ2-7)
CASSVGQGAYEQYF

SEQ ID NO: 409711 - protein, 11 aa, Homo sapiens
  CDR3 for alpha chain variable domain of TCR clone 204856 (TRAV4, TRAJ34)
CLHYNTDKLIF

SEQ ID NO: 409712 - protein, 16 aa, Homo sapiens
  CDR3 for beta chain variable domain of TCR clone 204856 (TRBV7-3, TRBJ2-3)
CASSSLGGGSRDTQYF

SEQ ID NO: 409713 - protein, 12 aa, Homo sapiens
  CDR3 for alpha chain variable domain of TCR clone 204857 (TRAV1-1, TRAJ8)
CVGGTGFQKLVF

SEQ ID NO: 409714 - protein, 17 aa, Homo sapiens
  CDR3 for beta chain variable domain of TCR clone 204857 (TRBV4-3, TRBJ2-1)
CASGQELAIVSSNEQFF

SEQ ID NO: 409715 - protein, 11 aa, Homo sapiens
  CDR3 for alpha chain variable domain of TCR clone 204858 (TRAV2, TRAJ13)
CASGGYQKVTF

SEQ ID NO: 409716 - protein, 14 aa, Homo sapiens
  CDR3 for beta chain variable domain of TCR clone 204858 (TRBV12-4, TRBJ1-1)
CASSPIRRTGEAFF

SEQ ID NO: 409717 - protein, 14 aa, Homo sapiens
  CDR3 for alpha chain variable domain of TCR clone 204859 (TRAV8-4, TRAJ16)
CAVRPVGRWPEAAL

SEQ ID NO: 409718 - protein, 14 aa, Homo sapiens
  CDR3 for beta chain variable domain of TCR clone 204859 (TRBV23-1, TRBJ2-5)
CASSFLRSQETQYF

SEQ ID NO: 409719 - protein, 13 aa, Homo sapiens
  CDR3 for alpha chain variable domain of TCR clone 204860 (TRAV30, TRAJ24)
CGTVTDSWGQLQF

SEQ ID NO: 409720 - protein, 14 aa, Homo sapiens
  CDR3 for beta chain variable domain of TCR clone 204860 (TRBV6-3, TRBJ2-2)
CASTYTPDTGELFF

SEQ ID NO: 409721 - protein, 14 aa, Homo sapiens
  CDR3 for alpha chain variable domain of TCR clone 204861 (TRAV17, TRAJ57)
CATDPQGGSEKLVF

SEQ ID NO: 409722 - protein, 13 aa, Homo sapiens
  CDR3 for beta chain variable domain of TCR clone 204861 (TRBV5-5, TRBJ1-2)
CANSFWRGEDYTF

SEQ ID NO: 409723 - protein, 16 aa, Homo sapiens
  CDR3 for alpha chain variable domain of TCR clone 204862 (TRAV26-1, TRAJ32)
CIVRTNYGGATNKPIF

SEQ ID NO: 409724 - protein, 17 aa, Homo sapiens
  CDR3 for beta chain variable domain of TCR clone 204862 (TRBV28, TRBJ2-5)
CASSRQGGLAGAETQYF

SEQ ID NO: 409725 - protein, 22 aa, Homo sapiens
  CDR3 for alpha chain variable domain of TCR clone 204863 (TRAV1-1, TRAJ30)
CAVRDQTEMTRSSLEKGHDFIF

SEQ ID NO: 409726 - protein, 14 aa, Homo sapiens
  CDR3 for beta chain variable domain of TCR clone 204863 (TRBV28, TRBJ2-1)
CASKMTGQGNEQFF

SEQ ID NO: 409727 - protein, 16 aa, Homo sapiens
  CDR3 for alpha chain variable domain of TCR clone 204864 (TRAV17, TRAJ35)
CATAEGGIGFGDVLHS

SEQ ID NO: 409728 - protein, 12 aa, Homo sapiens
  CDR3 for beta chain variable domain of TCR clone 204864 (TRBV11-2, TRBJ2-2)
CASSLGGGELFF

SEQ ID NO: 409729 - protein, 13 aa, Homo sapiens
  CDR3 for alpha chain variable domain of TCR clone 204865 (TRAV21, TRAJ27)
CAARPGNAGKSTF

SEQ ID NO: 409730 - protein, 18 aa, Homo sapiens
  CDR3 for beta chain variable domain of TCR clone 204865 (TRBV7-2, TRBJ2-3)
CASSLKREGSGITDTQYF

SEQ ID NO: 409731 - protein, 15 aa, Homo sapiens
  CDR3 for alpha chain variable domain of TCR clone 204866 (TRAV12-1, TRAJ15)
CVVTRANQAGTALIF

SEQ ID NO: 409732 - protein, 14 aa, Homo sapiens
  CDR3 for beta chain variable domain of TCR clone 204866 (TRBV5-1, TRBJ1-1)
CARSLVSINTEAFF

SEQ ID NO: 409733 - protein, 20 aa, Homo sapiens
  CDR3 for alpha chain variable domain of TCR clone 204867 (TRAV26-2, TRAJ29)
CILRDRSSTQRNSGNTPLVF

SEQ ID NO: 409734 - protein, 15 aa, Homo sapiens
  CDR3 for beta chain variable domain of TCR clone 204867 (TRBV11-3, TRBJ2-3)
CASLKDGREGDTQYF

SEQ ID NO: 409735 - protein, 14 aa, Homo sapiens
  CDR3 for alpha chain variable domain of TCR clone 204868 (TRAV26-1, TRAJ39)
CIVRGSRAGNMLTF

SEQ ID NO: 409736 - protein, 15 aa, Homo sapiens
  CDR3 for beta chain variable domain of TCR clone 204868 (TRBV7-9, TRBJ1-5)
CATSQGNQPNQPQHF

SEQ ID NO: 409737 - protein, 18 aa, Homo sapiens
  CDR3 for alpha chain variable domain of TCR clone 204869 (TRAV26-1, TRAJ22)
CIVRVALISSGSARQLTF

SEQ ID NO: 409738 - protein, 14 aa, Homo sapiens
  CDR3 for beta chain variable domain of TCR clone 204869 (TRBV7-9, TRBJ2-7)
CASSLSQGSYEQYF

SEQ ID NO: 409739 - protein, 14 aa, Homo sapiens
  CDR3 for alpha chain variable domain of TCR clone 204870 (TRAV8-4, TRAJ8)
CAVSEDTGFQKLVF

SEQ ID NO: 409740 - protein, 13 aa, Homo sapiens
  CDR3 for beta chain variable domain of TCR clone 204870 (TRBV7-9, TRBJ1-2)
CASSVKQNYGYTF

SEQ ID NO: 409741 - protein, 13 aa, Homo sapiens
  CDR3 for alpha chain variable domain of TCR clone 204871 (TRAV27, TRAJ42)
CAGARGSQGNLIF

SEQ ID NO: 409742 - protein, 17 aa, Homo sapiens
  CDR3 for beta chain variable domain of TCR clone 204871 (TRBV13, TRBJ2-3)
CASSLSRGAGGRNTQYF

SEQ ID NO: 409743 - protein, 13 aa, Homo sapiens
  CDR3 for alpha chain variable domain of TCR clone 204872 (TRAV26-1, TRAJ31)
FIVRVDGNARLMF

SEQ ID NO: 409744 - protein, 17 aa, Homo sapiens
  CDR3 for beta chain variable domain of TCR clone 204872 (TRBV11-2, TRBJ2-1)
CASSLYPPGVEYNEQFF

SEQ ID NO: 409745 - protein, 13 aa, Homo sapiens
  CDR3 for alpha chain variable domain of TCR clone 204873 (TRAV2, TRAJ40)
CAVVTSGTYKYLF

SEQ ID NO: 409746 - protein, 15 aa, Homo sapiens
  CDR3 for beta chain variable domain of TCR clone 204873 (TRBV18, TRBJ2-1)
CASSPPSASYNEQFF

SEQ ID NO: 409747 - protein, 13 aa, Homo sapiens
  CDR3 for alpha chain variable domain of TCR clone 204874 (TRAV21, TRAJ27)
CAARPGNAGKSTF

SEQ ID NO: 409748 - protein, 17 aa, Homo sapiens
  CDR3 for beta chain variable domain of TCR clone 204874 (TRBV25-1, TRBJ2-7)
CASSDARVVFSSYEQYF

SEQ ID NO: 409749 - protein, 14 aa, Homo sapiens
  CDR3 for alpha chain variable domain of TCR clone 204875 (TRAV1-2, TRAJ16)
CAVNRFSDGQKLLF

SEQ ID NO: 409750 - protein, 14 aa, Homo sapiens
  CDR3 for beta chain variable domain of TCR clone 204875 (TRBV12-4, TRBJ1-1)
CVSSLGTGGTEAFF

SEQ ID NO: 409751 - protein, 10 aa, Homo sapiens
  CDR3 for alpha chain variable domain of TCR clone 204876 (TRAV16, TRAJ39)
CSSAGNMLTF

SEQ ID NO: 409752 - protein, 14 aa, Homo sapiens
  CDR3 for beta chain variable domain of TCR clone 204876 (TRBV27, TRBJ1-4)
CASSLEGGWEKLFF

SEQ ID NO: 409753 - protein, 16 aa, Homo sapiens
  CDR3 for alpha chain variable domain of TCR clone 204877 (TRAV23/DV6, TRAJ52)
CAASMTGGTSYGKLTF

SEQ ID NO: 409754 - protein, 16 aa, Homo sapiens
  CDR3 for beta chain variable domain of TCR clone 204877 (TRBV27, TRBJ2-2)
CASSFRGLVRTGELFF

SEQ ID NO: 409755 - protein, 13 aa, Homo sapiens
  CDR3 for alpha chain variable domain of TCR clone 204878 (TRAV3, TRAJ21)
CAVREPDFNKFYF

SEQ ID NO: 409756 - protein, 14 aa, Homo sapiens
  CDR3 for beta chain variable domain of TCR clone 204878 (TRBV7-9, TRBJ2-5)
CASSLVGGEETQYF

SEQ ID NO: 409757 - protein, 14 aa, Homo sapiens
  CDR3 for alpha chain variable domain of TCR clone 204879 (TRAV26-1, TRAJ26)
CIVRANFLGQNFVF

SEQ ID NO: 409758 - protein, 16 aa, Homo sapiens
  CDR3 for beta chain variable domain of TCR clone 204879 (TRBV12-4, TRBJ2-7)
CASRSTGTGPSYEQYF

SEQ ID NO: 409759 - protein, 17 aa, Homo sapiens
  CDR3 for alpha chain variable domain of TCR clone 204880 (TRAV8-4, TRAJ11)
CAVSDRGENSGCSTLTF

SEQ ID NO: 409760 - protein, 14 aa, Homo sapiens
  CDR3 for beta chain variable domain of TCR clone 204880 (TRBV20-1, TRBJ2-1)
CSPNDEASYNEQFF

SEQ ID NO: 409761 - protein, 16 aa, Homo sapiens
  CDR3 for alpha chain variable domain of TCR clone 204881 (TRAV1-2, TRAJ10)
CAVRGQGGGGGNKLTF

SEQ ID NO: 409762 - protein, 13 aa, Homo sapiens
  CDR3 for beta chain variable domain of TCR clone 204881 (TRBV29-1, TRBJ1-1)
CSVGDSRNTEAFF

SEQ ID NO: 409763 - protein, 15 aa, Homo sapiens
  CDR3 for alpha chain variable domain of TCR clone 204882 (TRAV20, TRAJ58)
CAAQDLETSGSRLTF

SEQ ID NO: 409764 - protein, 12 aa, Homo sapiens
  CDR3 for beta chain variable domain of TCR clone 204882 (TRBV9, TRBJ2-2)
CASSARTRELFF

SEQ ID NO: 409765 - protein, 15 aa, Homo sapiens
  CDR3 for alpha chain variable domain of TCR clone 204883 (TRAV8-2, TRAJ40)
CVVLGTTSGTYKYIF

SEQ ID NO: 409766 - protein, 13 aa, Homo sapiens
  CDR3 for beta chain variable domain of TCR clone 204883 (TRBV7-3, TRBJ2-5)
CASSFRGGETQYF

SEQ ID NO: 409767 - protein, 15 aa, Homo sapiens
  CDR3 for alpha chain variable domain of TCR clone 204884 (TRAV25, TRAJ52)
CAGRPGGTSYGKLTF

SEQ ID NO: 409768 - protein, 16 aa, Homo sapiens
  CDR3 for beta chain variable domain of TCR clone 204884 (TRBV7-8, TRBJ2-6)
CASSGTGGAGANVLTF

SEQ ID NO: 409769 - protein, 16 aa, Homo sapiens
  CDR3 for alpha chain variable domain of TCR clone 204885 (TRAV3, TRAJ10)
CAVRDMRAGGGNKLTL

SEQ ID NO: 409770 - protein, 12 aa, Homo sapiens
  CDR3 for beta chain variable domain of TCR clone 204885 (TRBV11-2, TRBJ2-2)
CASSLPTGELFF

SEQ ID NO: 409771 - protein, 12 aa, Homo sapiens
  CDR3 for alpha chain variable domain of TCR clone 204886 (TRAV23/DV6, TRAJ24)
CAANDSWGKLQF

SEQ ID NO: 409772 - protein, 15 aa, Homo sapiens
  CDR3 for beta chain variable domain of TCR clone 204886 (TRBV7-9, TRBJ1-5)
CASSFGTGNNQPQHF

SEQ ID NO: 409773 - protein, 14 aa, Homo sapiens
  CDR3 for alpha chain variable domain of TCR clone 204887 (TRAV3, TRAJ7)
CAVREEEREQQTRF

SEQ ID NO: 409774 - protein, 14 aa, Homo sapiens
  CDR3 for beta chain variable domain of TCR clone 204887 (TRBV4-1, TRBJ2-2)
CASSQAVNTGELFF

SEQ ID NO: 409775 - protein, 15 aa, Homo sapiens
  CDR3 for alpha chain variable domain of TCR clone 204888 (TRAV8-4, TRAJ3)
CAVTGENPVQQCFQD

SEQ ID NO: 409776 - protein, 15 aa, Homo sapiens
  CDR3 for beta chain variable domain of TCR clone 204888 (TRBV6-3, TRBJ2-7)
CASSSPGTVFYEQYF

SEQ ID NO: 409777 - protein, 20 aa, Homo sapiens
  CDR3 for alpha chain variable domain of TCR clone 204889 (TRAV12-1, TRAJ42)
SSVIQPPTSVKGGSQGNLIF

SEQ ID NO: 409778 - protein, 18 aa, Homo sapiens
  CDR3 for beta chain variable domain of TCR clone 204889 (TRBV11-2, TRBJ2-3)
CASSLGGASRGAPTTQYF

SEQ ID NO: 409779 - protein, 14 aa, Homo sapiens
  CDR3 for alpha chain variable domain of TCR clone 204890 (TRAV8-3, TRAJ4)
CAVGASGGYNKLIF

SEQ ID NO: 409780 - protein, 13 aa, Homo sapiens
  CDR3 for beta chain variable domain of TCR clone 204890 (TRBV18, TRBJ2-5)
CASSLQGQEAQYF

SEQ ID NO: 409781 - protein, 12 aa, Homo sapiens
  CDR3 for alpha chain variable domain of TCR clone 204891 (TRAV27, TRAJ35)
CAGADFGNVLHC

SEQ ID NO: 409782 - protein, 13 aa, Homo sapiens
  CDR3 for beta chain variable domain of TCR clone 204891 (TRBV5-5, TRBJ2-7)
CASSSQTSQRQYF

SEQ ID NO: 409783 - protein, 15 aa, Homo sapiens
  CDR3 for alpha chain variable domain of TCR clone 204892 (TRAV17, TRAJ57)
CTTGPSQGGSEKLVF

SEQ ID NO: 409784 - protein, 15 aa, Homo sapiens
  CDR3 for beta chain variable domain of TCR clone 204892 (TRBV6-3, TRBJ2-7)
CPSSSPGTVFYEQYF

SEQ ID NO: 409785 - protein, 13 aa, Homo sapiens
  CDR3 for alpha chain variable domain of TCR clone 204893 (TRAV2, TRAJ15)
CAVASQAGTALIF

SEQ ID NO: 409786 - protein, 13 aa, Homo sapiens
  CDR3 for beta chain variable domain of TCR clone 204893 (TRBV12-4, TRBJ1-2)
CASSLRQGKGYTF

SEQ ID NO: 409787 - protein, 17 aa, Homo sapiens
  CDR3 for alpha chain variable domain of TCR clone 204894 (TRAV3, TRAJ42)
FAVRDRDYGGSQGNLIF

SEQ ID NO: 409788 - protein, 16 aa, Homo sapiens
  CDR3 for beta chain variable domain of TCR clone 204894 (TRBV7-3, TRBJ2-2)
CASSLKRGTLSGELFF

SEQ ID NO: 409789 - protein, 13 aa, Homo sapiens
  CDR3 for alpha chain variable domain of TCR clone 204895 (TRAV4, TRAJ31)
CLVYRNNNARLMF

SEQ ID NO: 409790 - protein, 17 aa, Homo sapiens
  CDR3 for beta chain variable domain of TCR clone 204895 (TRBV13, TRBJ2-3)
CASSLSRVAGGRNTQYF

SEQ ID NO: 409791 - protein, 13 aa, Homo sapiens
  CDR3 for alpha chain variable domain of TCR clone 204896 (TRAV12-1, TRAJ31)
CVVNMNNNARLMF

SEQ ID NO: 409792 - protein, 15 aa, Homo sapiens
  CDR3 for beta chain variable domain of TCR clone 204896 (TRBV4-1, TRBJ1-2)
CASSQGQGVAYGYTF

SEQ ID NO: 409793 - protein, 13 aa, Homo sapiens
  CDR3 for alpha chain variable domain of TCR clone 204897 (TRAV2, TRAJ40)
CAVVTSGTYKYIF

SEQ ID NO: 409794 - protein, 10 aa, Homo sapiens
  CDR3 for beta chain variable domain of TCR clone 204897 (TRBV2, TRBJ2-5)
CASSAATQYF

SEQ ID NO: 409795 - protein, 15 aa, Homo sapiens
  CDR3 for alpha chain variable domain of TCR clone 204898 (TRAV12-3, TRAJ6)
CAMSATTGGSYIPTF

SEQ ID NO: 409796 - protein, 15 aa, Homo sapiens
  CDR3 for beta chain variable domain of TCR clone 204898 (TRBV11-2, TRBJ2-1)
CASSLGTSGLNEQFF

SEQ ID NO: 409797 - protein, 14 aa, Homo sapiens
  CDR3 for alpha chain variable domain of TCR clone 204899 (TRAV12-1, TRAJ17)
CLVNYKAAGNKLTF

SEQ ID NO: 409798 - protein, 12 aa, Homo sapiens
  CDR3 for beta chain variable domain of TCR clone 204899 (TRBV24-1, TRBJ1-1)
CATLYPDTEAFF

SEQ ID NO: 409799 - protein, 14 aa, Homo sapiens
  CDR3 for alpha chain variable domain of TCR clone 204900 (TRAV17, TRAJ15)
CATTTNQAGTALIF

SEQ ID NO: 409800 - protein, 20 aa, Homo sapiens
  CDR3 for beta chain variable domain of TCR clone 204900 (TRBV7-8, TRBJ2-2)
CASSHLFPGPTIHITGELFF

SEQ ID NO: 409801 - protein, 13 aa, Homo sapiens
  CDR3 for alpha chain variable domain of TCR clone 204901 (TRAV21, TRAJ27)
CAALNTNAGKSTF

SEQ ID NO: 409802 - protein, 15 aa, Homo sapiens
  CDR3 for beta chain variable domain of TCR clone 204901 (TRBV19, TRBJ1-1)
CASTSGQIQNTESFS

SEQ ID NO: 409803 - protein, 15 aa, Homo sapiens
  CDR3 for alpha chain variable domain of TCR clone 204902 (TRAV26-1, TRAJ56)
CIVRVATGATSKLTF

SEQ ID NO: 409804 - protein, 15 aa, Homo sapiens
  CDR3 for beta chain variable domain of TCR clone 204902 (TRBV27, TRBJ2-7)
CASSPQRGGQREQYF

SEQ ID NO: 409805 - protein, 15 aa, Homo sapiens
  CDR3 for alpha chain variable domain of TCR clone 204903 (TRAV21, TRAJ24)
CAARSSTDSCGKLQF

SEQ ID NO: 409806 - protein, 11 aa, Homo sapiens
  CDR3 for beta chain variable domain of TCR clone 204903 (TRBV11-2, TRBJ2-2)
CASSLPGELFF

SEQ ID NO: 409807 - protein, 12 aa, Homo sapiens
  CDR3 for alpha chain variable domain of TCR clone 204904 (TRAV30, TRAJ15)
CGTNQAGTALIF

SEQ ID NO: 409808 - protein, 13 aa, Homo sapiens
  CDR3 for beta chain variable domain of TCR clone 204904 (TRBV5-7, TRBJ1-2)
CASSLIRAPGYTF

SEQ ID NO: 409809 - protein, 16 aa, Homo sapiens
  CDR3 for alpha chain variable domain of TCR clone 204905 (TRAV17, TRAJ53)
CATDALSGGSNYKLTF

SEQ ID NO: 409810 - protein, 16 aa, Homo sapiens
  CDR3 for beta chain variable domain of TCR clone 204905 (TRBV7-2, TRBJ2-5)
CASSSKWLSGQETQYF

SEQ ID NO: 409811 - protein, 15 aa, Homo sapiens
  CDR3 for alpha chain variable domain of TCR clone 204906 (TRAV8-3, TRAJ32)
CAVGPYGGATNKLIF

SEQ ID NO: 409812 - protein, 15 aa, Homo sapiens
  CDR3 for beta chain variable domain of TCR clone 204906 (TRBV4-3, TRBJ2-1)
CASSQESAIYNEQFF

SEQ ID NO: 409813 - protein, 15 aa, Homo sapiens
  CDR3 for alpha chain variable domain of TCR clone 204907 (TRAV38-1, TRAJ37)
CAFIFGSGNTGKLIF

SEQ ID NO: 409814 - protein, 11 aa, Homo sapiens
  CDR3 for beta chain variable domain of TCR clone 204907 (TRBV12-4, TRBJ2-3)
CASTATDTQYC

SEQ ID NO: 409815 - protein, 17 aa, Homo sapiens
  CDR3 for alpha chain variable domain of TCR clone 204908 (TRAV3, TRAJ28)
CAVREAYSGVGSYQLTF

SEQ ID NO: 409816 - protein, 18 aa, Homo sapiens
  CDR3 for beta chain variable domain of TCR clone 204908 (TRBV27, TRBJ2-1)
CASGNRAVGVGSKNEQFF

SEQ ID NO: 409817 - protein, 12 aa, Homo sapiens
  CDR3 for alpha chain variable domain of TCR clone 204909 (TRAV8-3, TRAJ20)
CAVGANDYKLNF

SEQ ID NO: 409818 - protein, 16 aa, Homo sapiens
  CDR3 for beta chain variable domain of TCR clone 204909 (TRBV19, TRBJ2-2)
CASRSPGTGATGGLFF

SEQ ID NO: 409819 - protein, 17 aa, Homo sapiens
  CDR3 for alpha chain variable domain of TCR clone 204910 (TRAV3, TRAJ6)
CAVRDGPRAGGSYIPTF

SEQ ID NO: 409820 - protein, 13 aa, Homo sapiens
  CDR3 for beta chain variable domain of TCR clone 204910 (TRBV11-2, TRBJ2-1)
CASSLDLVNEQFF

SEQ ID NO: 409821 - protein, 15 aa, Homo sapiens
  CDR3 for alpha chain variable domain of TCR clone 204911 (TRAV3, TRAJ22)
CAVRDRGGSARQLTF

SEQ ID NO: 409822 - protein, 17 aa, Homo sapiens
  CDR3 for beta chain variable domain of TCR clone 204911 (TRBV13, TRBJ2-3)
CASSLSRVAGGRYTQYF

SEQ ID NO: 409823 - protein, 15 aa, Homo sapiens
  CDR3 for alpha chain variable domain of TCR clone 204912 (TRAV26-1, TRAJ40)
CIVRVTTSGTYKYIF

SEQ ID NO: 409824 - protein, 12 aa, Homo sapiens
  CDR3 for beta chain variable domain of TCR clone 204912 (TRBV7-9, TRBJ1-4)
CVSSTDREKLFF

SEQ ID NO: 409825 - protein, 14 aa, Homo sapiens
  CDR3 for alpha chain variable domain of TCR clone 204913 (TRAV12-1, TRAJ17)
CVVNYKAAGNKLTL

SEQ ID NO: 409826 - protein, 17 aa, Homo sapiens
  CDR3 for beta chain variable domain of TCR clone 204913 (TRBV20-1, TRBJ2-1)
CSARSSGLAGSYNEQFF

SEQ ID NO: 409827 - protein, 14 aa, Homo sapiens
  CDR3 for alpha chain variable domain of TCR clone 204914 (TRAV3, TRAJ5)
CAVRSDTGRRALTF

SEQ ID NO: 409828 - protein, 14 aa, Homo sapiens
  CDR3 for beta chain variable domain of TCR clone 204914 (TRBV7-2, TRBJ2-3)
CASSVVMPTDTQYF

SEQ ID NO: 409829 - protein, 11 aa, Homo sapiens
  CDR3 for alpha chain variable domain of TCR clone 204915 (TRAV21, TRAJ34)
CAVTNTDKLIF

SEQ ID NO: 409830 - protein, 14 aa, Homo sapiens
  CDR3 for beta chain variable domain of TCR clone 204915 (TRBV12-4, TRBJ2-1)
CARSLGQGACEQFF

SEQ ID NO: 409831 - protein, 13 aa, Homo sapiens
  CDR3 for alpha chain variable domain of TCR clone 204916 (TRAV38-1, TRAJ42)
CARWGGSQGNLTF

SEQ ID NO: 409832 - protein, 14 aa, Homo sapiens
  CDR3 for beta chain variable domain of TCR clone 204916 (TRBV6-1, TRBJ1-3)
CASVQGGGGNTIYF

SEQ ID NO: 409833 - protein, 12 aa, Homo sapiens
  CDR3 for alpha chain variable domain of TCR clone 204917 (TRAV17, TRAJ53)
CAFGGSNYKLTF

SEQ ID NO: 409834 - protein, 16 aa, Homo sapiens
  CDR3 for beta chain variable domain of TCR clone 204917 (TRBV11-2, TRBJ2-4)
CASSQGGRGGLDIQYF

SEQ ID NO: 409835 - protein, 15 aa, Homo sapiens
  CDR3 for alpha chain variable domain of TCR clone 204918 (TRAV2, TRAJ9)
CTVEDRGTGGFKTIF

SEQ ID NO: 409836 - protein, 16 aa, Homo sapiens
  CDR3 for beta chain variable domain of TCR clone 204918 (TRBV12-4, TRBJ1-2)
CASSPTATGKTRGYTF

SEQ ID NO: 409837 - protein, 13 aa, Homo sapiens
  CDR3 for alpha chain variable domain of TCR clone 204919 (TRAV12-2, TRAJ13)
CREEDWGYQKVTF

SEQ ID NO: 409838 - protein, 13 aa, Homo sapiens
  CDR3 for beta chain variable domain of TCR clone 204919 (TRBV2, TRBJ2-7)
CASSVGGSGEQYF

SEQ ID NO: 409839 - protein, 13 aa, Homo sapiens
  CDR3 for alpha chain variable domain of TCR clone 204920 (TRAV8-4, TRAJ49)
CAVITNTGNQFYF

SEQ ID NO: 409840 - protein, 14 aa, Homo sapiens
  CDR3 for beta chain variable domain of TCR clone 204920 (TRBV19, TRBJ2-1)
CASKDPGLANRQFF

SEQ ID NO: 409841 - protein, 13 aa, Homo sapiens
  CDR3 for alpha chain variable domain of TCR clone 204921 (TRAV23/DV6, TRAJ12)
CAPRVDSSYKLIF

SEQ ID NO: 409842 - protein, 15 aa, Homo sapiens
  CDR3 for beta chain variable domain of TCR clone 204921 (TRBV11-1, TRBJ2-7)
CASSLNYGASYEQYF

SEQ ID NO: 409843 - protein, 16 aa, Homo sapiens
  CDR3 for alpha chain variable domain of TCR clone 204922 (TRAV12-2, TRAJ45)
CAVNRYSGGGADGLTF

SEQ ID NO: 409844 - protein, 17 aa, Homo sapiens
  CDR3 for beta chain variable domain of TCR clone 204922 (TRBV6-3, TRBJ2-2)
CASSYRGRDFYTGELFF

SEQ ID NO: 409845 - protein, 12 aa, Homo sapiens
  CDR3 for alpha chain variable domain of TCR clone 204923 (TRAV16, TRAJ27)
CALNHQCRQINL

SEQ ID NO: 409846 - protein, 14 aa, Homo sapiens
  CDR3 for beta chain variable domain of TCR clone 204923 (TRBV11-2, TRBJ1-5)
CASSLDRGRQPQLF

SEQ ID NO: 409847 - protein, 18 aa, Homo sapiens
  CDR3 for alpha chain variable domain of TCR clone 204924 (TRAV29/DV5, TRAJ52)
CAAGFRGAGGTSDGKLTF

SEQ ID NO: 409848 - protein, 16 aa, Homo sapiens
  CDR3 for beta chain variable domain of TCR clone 204924 (TRBV7-3, TRBJ2-2)
CAGSLKRGTLSGELFF

SEQ ID NO: 409849 - protein, 11 aa, Homo sapiens
  CDR3 for alpha chain variable domain of TCR clone 204925 (TRAV21, TRAJ34)
CAHYNTDKLIF

SEQ ID NO: 409850 - protein, 13 aa, Homo sapiens
  CDR3 for beta chain variable domain of TCR clone 204925 (TRBV15, TRBJ1-6)
CATSGGLNSPLHF

SEQ ID NO: 409851 - protein, 21 aa, Homo sapiens
  CDR3 for alpha chain variable domain of TCR clone 204926 (TRAV29/DV5, TRAJ52)
CSVLLCSTREAGGTSYGKLTF

SEQ ID NO: 409852 - protein, 15 aa, Homo sapiens
  CDR3 for beta chain variable domain of TCR clone 204926 (TRBV6-1, TRBJ2-1)
CASSELRGQYNEQFF

SEQ ID NO: 409853 - protein, 15 aa, Homo sapiens
  CDR3 for alpha chain variable domain of TCR clone 204927 (TRAV27, TRAJ38)
CAGRCNAGNNRKLIW

SEQ ID NO: 409854 - protein, 13 aa, Homo sapiens
  CDR3 for beta chain variable domain of TCR clone 204927 (TRBV12-5, TRBJ2-3)
CASQNRGTDTQYF

SEQ ID NO: 409855 - protein, 15 aa, Homo sapiens
  CDR3 for alpha chain variable domain of TCR clone 204928 (TRAV3, TRAJ5)
CAVRDLDTGRRALTF

SEQ ID NO: 409856 - protein, 16 aa, Homo sapiens
  CDR3 for beta chain variable domain of TCR clone 204928 (TRBV20-1, TRBJ2-1)
CSALTWTSGSYNEQFF

SEQ ID NO: 409857 - protein, 15 aa, Homo sapiens
  CDR3 for alpha chain variable domain of TCR clone 204929 (TRAV17, TRAJ57)
CATGPSQGGSEKLVF

SEQ ID NO: 409858 - protein, 15 aa, Homo sapiens
  CDR3 for beta chain variable domain of TCR clone 204929 (TRBV7-2, TRBJ1-2)
CASSPRAGWNYGYAF

SEQ ID NO: 409859 - protein, 13 aa, Homo sapiens
  CDR3 for alpha chain variable domain of TCR clone 204930 (TRAV20, TRAJ35)
CAVQEGFGNVLHC

SEQ ID NO: 409860 - protein, 11 aa, Homo sapiens
  CDR3 for beta chain variable domain of TCR clone 204930 (TRBV5-6, TRBJ1-2)
CASSRGGGYTF

SEQ ID NO: 409861 - protein, 14 aa, Homo sapiens
  CDR3 for alpha chain variable domain of TCR clone 204931 (TRAV12-1, TRAJ30)
CVVNIGGRDDKINF

SEQ ID NO: 409862 - protein, 13 aa, Homo sapiens
  CDR3 for beta chain variable domain of TCR clone 204931 (TRBV12-5, TRBJ2-1)
CASGLGRGNEQFF

SEQ ID NO: 409863 - protein, 12 aa, Homo sapiens
  CDR3 for alpha chain variable domain of TCR clone 204932 (TRAV12-3, TRAJ20)
CAMVRGDYKLSF

SEQ ID NO: 409864 - protein, 14 aa, Homo sapiens
  CDR3 for beta chain variable domain of TCR clone 204932 (TRBV12-4, TRBJ2-3)
CASTIAGWGDTQYF

SEQ ID NO: 409865 - protein, 18 aa, Homo sapiens
  CDR3 for alpha chain variable domain of TCR clone 204933 (TRAV21, TRAJ52)
CAVRPSPAGGTSYGKLTF

SEQ ID NO: 409866 - protein, 17 aa, Homo sapiens
  CDR3 for beta chain variable domain of TCR clone 204933 (TRBV13, TRBJ2-3)
CASGLSRVAGERNTQYF

SEQ ID NO: 409867 - protein, 14 aa, Homo sapiens
  CDR3 for alpha chain variable domain of TCR clone 204934 (TRAV12-2, TRAJ13)
CAVKKTGGYQKVTF

SEQ ID NO: 409868 - protein, 13 aa, Homo sapiens
  CDR3 for beta chain variable domain of TCR clone 204934 (TRBV12-4, TRBJ1-1)
CASSSRAGAEAFF

SEQ ID NO: 409869 - protein, 14 aa, Homo sapiens
  CDR3 for alpha chain variable domain of TCR clone 204935 (TRAV2, TRAJ41)
CAVGTSNSGYALNF

SEQ ID NO: 409870 - protein, 18 aa, Homo sapiens
  CDR3 for beta chain variable domain of TCR clone 204935 (TRBV7-9, TRBJ2-7)
CASSLTTSGSRTWYEQYF

SEQ ID NO: 409871 - protein, 13 aa, Homo sapiens
  CDR3 for alpha chain variable domain of TCR clone 204936 (TRAV4, TRAJ20)
CLVGPKNDYKLSF

SEQ ID NO: 409872 - protein, 13 aa, Homo sapiens
  CDR3 for beta chain variable domain of TCR clone 204936 (TRBV5-7, TRBJ2-1)
CASSEHQDNEQFF

SEQ ID NO: 409873 - protein, 18 aa, Homo sapiens
  CDR3 for alpha chain variable domain of TCR clone 204937 (TRAV29/DV5, TRAJ26)
CSELLCSKRKPEGQNFVF

SEQ ID NO: 409874 - protein, 17 aa, Homo sapiens
  CDR3 for beta chain variable domain of TCR clone 204937 (TRBV20-1, TRBJ2-2)
CSASGSGQGGLTGELFF

SEQ ID NO: 409875 - protein, 16 aa, Homo sapiens
  CDR3 for alpha chain variable domain of TCR clone 204938 (TRAV14/DV4, TRAJ44)
CAMREGRSGTASKLTF

SEQ ID NO: 409876 - protein, 14 aa, Homo sapiens
  CDR3 for beta chain variable domain of TCR clone 204938 (TRBV4-1, TRBJ2-2)
CASSQAVNTGELFF

SEQ ID NO: 409877 - protein, 13 aa, Homo sapiens
  CDR3 for alpha chain variable domain of TCR clone 204939 (TRAV3, TRAJ41)
CAASSNPGYALNF

SEQ ID NO: 409878 - protein, 14 aa, Homo sapiens
  CDR3 for beta chain variable domain of TCR clone 204939 (TRBV7-2, TRBJ2-7)
CASSPKTSFYEQYF

SEQ ID NO: 409879 - protein, 15 aa, Homo sapiens
  CDR3 for alpha chain variable domain of TCR clone 204940 (TRAV2, TRAJ24)
CAVEVLTDSWGKFQF

SEQ ID NO: 409880 - protein, 14 aa, Homo sapiens
  CDR3 for beta chain variable domain of TCR clone 204940 (TRBV19, TRBJ2-1)
CASSMGSGRRCSSS

SEQ ID NO: 409881 - protein, 15 aa, Homo sapiens
  CDR3 for alpha chain variable domain of TCR clone 204941 (TRAV3, TRAJ22)
CSVRDRGGSARQLTF

SEQ ID NO: 409882 - protein, 15 aa, Homo sapiens
  CDR3 for beta chain variable domain of TCR clone 204941 (TRBV10-3, TRBJ2-3)
CAISLTSGGTDTQYF

SEQ ID NO: 409883 - protein, 14 aa, Homo sapiens
  CDR3 for alpha chain variable domain of TCR clone 204942 (TRAV17, TRAJ32)
CATDPGGATNKLIF

SEQ ID NO: 409884 - protein, 14 aa, Homo sapiens
  CDR3 for beta chain variable domain of TCR clone 204942 (TRBV2, TRBJ1-5)
CASSENRGGQPQHF

SEQ ID NO: 409885 - protein, 15 aa, Homo sapiens
  CDR3 for alpha chain variable domain of TCR clone 204943 (TRAV12-1, TRAJ44)
CVVDEYTGTASKLTF

SEQ ID NO: 409886 - protein, 15 aa, Homo sapiens
  CDR3 for beta chain variable domain of TCR clone 204943 (TRBV27, TRBJ2-3)
CASSLGLAATDTQYF

SEQ ID NO: 409887 - protein, 17 aa, Homo sapiens
  CDR3 for alpha chain variable domain of TCR clone 204944 (TRAV3, TRAJ42)
CAVRDRDYGGSQGNLIF

SEQ ID NO: 409888 - protein, 14 aa, Homo sapiens
  CDR3 for beta chain variable domain of TCR clone 204944 (TRBV7-2, TRBJ2-2)
CASSLNSKTGELFF

SEQ ID NO: 409889 - protein, 13 aa, Homo sapiens
  CDR3 for alpha chain variable domain of TCR clone 204945 (TRAV8-1, TRAJ13)
CAVSKGGYQKVTF

SEQ ID NO: 409890 - protein, 15 aa, Homo sapiens
  CDR3 for beta chain variable domain of TCR clone 204945 (TRBV20-1, TRBJ2-7)
CSARDRVSGMDEQYF

SEQ ID NO: 409891 - protein, 18 aa, Homo sapiens
  CDR3 for alpha chain variable domain of TCR clone 204946 (TRAV21, TRAJ52)
CAVRPSPAGGTSYGKLTF

SEQ ID NO: 409892 - protein, 15 aa, Homo sapiens
  CDR3 for beta chain variable domain of TCR clone 204946 (TRBV20-1, TRBJ2-7)
CSARGPLAGGREQYF

SEQ ID NO: 409893 - protein, 15 aa, Homo sapiens
  CDR3 for alpha chain variable domain of TCR clone 204947 (TRAV14/DV4, TRAJ33)
CAMREGRDSNYQLIW

SEQ ID NO: 409894 - protein, 16 aa, Homo sapiens
  CDR3 for beta chain variable domain of TCR clone 204947 (TRBV12-5, TRBJ2-5)
CGSGPRTSGNQETQYF

SEQ ID NO: 409895 - protein, 14 aa, Homo sapiens
  CDR3 for alpha chain variable domain of TCR clone 204948 (TRAV3, TRAJ9)
CAVRLNTGGFKTIF

SEQ ID NO: 409896 - protein, 16 aa, Homo sapiens
  CDR3 for beta chain variable domain of TCR clone 204948 (TRBV4-2, TRBJ2-3)
CASSQELAGDTDTQYF

SEQ ID NO: 409897 - protein, 15 aa, Homo sapiens
  CDR3 for alpha chain variable domain of TCR clone 204949 (TRAV3, TRAJ22)
CAVRDRGGSARQLTF

SEQ ID NO: 409898 - protein, 15 aa, Homo sapiens
  CDR3 for beta chain variable domain of TCR clone 204949 (TRBV13, TRBJ1-2)
CASSLGRQPGYGYTF

SEQ ID NO: 409899 - protein, 11 aa, Homo sapiens
  CDR3 for alpha chain variable domain of TCR clone 204950 (TRAV3, TRAJ21)
CAVGNFNKFYF

SEQ ID NO: 409900 - protein, 13 aa, Homo sapiens
  CDR3 for beta chain variable domain of TCR clone 204950 (TRBV18, TRBJ1-1)
CASSGGRDTEAFF

SEQ ID NO: 409901 - protein, 12 aa, Homo sapiens
  CDR3 for alpha chain variable domain of TCR clone 204951 (TRAV12-1, TRAJ40)
CVVNGETYKYIF

SEQ ID NO: 409902 - protein, 14 aa, Homo sapiens
  CDR3 for beta chain variable domain of TCR clone 204951 (TRBV7-9, TRBJ1-1)
CASSTTKGNTEAFF

SEQ ID NO: 409903 - protein, 13 aa, Homo sapiens
  CDR3 for alpha chain variable domain of TCR clone 204952 (TRAV26-1, TRAJ20)
CIVTPSNDYKLSF

SEQ ID NO: 409904 - protein, 16 aa, Homo sapiens
  CDR3 for beta chain variable domain of TCR clone 204952 (TRBV4-3, TRBJ2-2)
CASSQDLSGGYGELFF

SEQ ID NO: 409905 - protein, 23 aa, Homo sapiens
  CDR3 for alpha chain variable domain of TCR clone 204953 (TRAV26-1, TRAJ38)
CIADNAGNNHIQNPDPAVYHLRD

SEQ ID NO: 409906 - protein, 13 aa, Homo sapiens
  CDR3 for beta chain variable domain of TCR clone 204953 (TRBV20-1, TRBJ1-1)
CSARGGGNTEAFY

SEQ ID NO: 409907 - protein, 11 aa, Homo sapiens
  CDR3 for alpha chain variable domain of TCR clone 204954 (TRAV3, TRAJ49)
CAPITVNQVYF

SEQ ID NO: 409908 - protein, 16 aa, Homo sapiens
  CDR3 for beta chain variable domain of TCR clone 204954 (TRBV5-1, TRBJ2-3)
CASSVFPMSSTDTQYF

SEQ ID NO: 409909 - protein, 15 aa, Homo sapiens
  CDR3 for alpha chain variable domain of TCR clone 204955 (TRAV8-3, TRAJ45)
CASSYSGGGADGLTF

SEQ ID NO: 409910 - protein, 13 aa, Homo sapiens
  CDR3 for beta chain variable domain of TCR clone 204955 (TRBV19, TRBJ1-2)
CASSQGQVYGYAF

SEQ ID NO: 409911 - protein, 14 aa, Homo sapiens
  CDR3 for alpha chain variable domain of TCR clone 204956 (TRAV12-1, TRAJ10)
CVAILTGGGNKPTF

SEQ ID NO: 409912 - protein, 15 aa, Homo sapiens
  CDR3 for beta chain variable domain of TCR clone 204956 (TRBV20-1, TRBJ2-7)
CSARGFRPQTYEQYF

SEQ ID NO: 409913 - protein, 16 aa, Homo sapiens
  CDR3 for alpha chain variable domain of TCR clone 204957 (TRAV17, TRAJ54)
CATDSDIIQGAQKLVF

SEQ ID NO: 409914 - protein, 15 aa, Homo sapiens
  CDR3 for beta chain variable domain of TCR clone 204957 (TRBV6-3, TRBJ2-7)
CASSSPGTVFYEQYF

SEQ ID NO: 409915 - protein, 13 aa, Homo sapiens
  CDR3 for alpha chain variable domain of TCR clone 204958 (TRAV16, TRAJ28)
CALTGAGSYQLTF

SEQ ID NO: 409916 - protein, 14 aa, Homo sapiens
  CDR3 for beta chain variable domain of TCR clone 204958 (TRBV13, TRBJ2-5)
CASYRRLAEETQYF

SEQ ID NO: 409917 - protein, 14 aa, Homo sapiens
  CDR3 for alpha chain variable domain of TCR clone 204959 (TRAV8-4, TRAJ16)
CAVSPVGRWPEEAL

SEQ ID NO: 409918 - protein, 15 aa, Homo sapiens
  CDR3 for beta chain variable domain of TCR clone 204959 (TRBV11-3, TRBJ2-7)
CASSPGPASSYEQYF

SEQ ID NO: 409919 - protein, 14 aa, Homo sapiens
  CDR3 for alpha chain variable domain of TCR clone 204960 (TRAV12-3, TRAJ13)
CAMKNSGGYQIVTF

SEQ ID NO: 409920 - protein, 13 aa, Homo sapiens
  CDR3 for beta chain variable domain of TCR clone 204960 (TRBV29-1, TRBJ2-5)
CSARDRVEETQYF

SEQ ID NO: 409921 - protein, 15 aa, Homo sapiens
  CDR3 for alpha chain variable domain of TCR clone 204961 (TRAV36/DV7, TRAJ53)
CAVEGSGGSNYKLRF

SEQ ID NO: 409922 - protein, 16 aa, Homo sapiens
  CDR3 for beta chain variable domain of TCR clone 204961 (TRBV27, TRBJ2-2)
CASSLSGFWVTGELFF

SEQ ID NO: 409923 - protein, 17 aa, Homo sapiens
  CDR3 for alpha chain variable domain of TCR clone 204962 (TRAV12-2, TRAJ52)
CAVNPYAGGTSYGKLTF

SEQ ID NO: 409924 - protein, 16 aa, Homo sapiens
  CDR3 for beta chain variable domain of TCR clone 204962 (TRBV5-5, TRBJ2-2)
CASSGRREGATGELFL

SEQ ID NO: 409925 - protein, 18 aa, Homo sapiens
  CDR3 for alpha chain variable domain of TCR clone 204963 (TRAV38-1, TRAJ29)
CDVFLCFHHPFRKHTLVF

SEQ ID NO: 409926 - protein, 14 aa, Homo sapiens
  CDR3 for beta chain variable domain of TCR clone 204963 (TRBV18, TRBJ2-7)
CASSPRGGAYEQYF

SEQ ID NO: 409927 - protein, 12 aa, Homo sapiens
  CDR3 for alpha chain variable domain of TCR clone 204964 (TRAV3, TRAJ43)
RVVRDPNNDMPF

SEQ ID NO: 409928 - protein, 15 aa, Homo sapiens
  CDR3 for beta chain variable domain of TCR clone 204964 (TRBV27, TRBJ1-5)
CASSLGTWFDQPQHF

SEQ ID NO: 409929 - protein, 16 aa, Homo sapiens
  CDR3 for alpha chain variable domain of TCR clone 204965 (TRAV38-1, TRAJ32)
CAFMKRGGGATNTLIF

SEQ ID NO: 409930 - protein, 13 aa, Homo sapiens
  CDR3 for beta chain variable domain of TCR clone 204965 (TRBV20-1, TRBJ2-5)
CSAREAFQETQYF

SEQ ID NO: 409931 - protein, 13 aa, Homo sapiens
  CDR3 for alpha chain variable domain of TCR clone 204966 (TRAV2, TRAJ40)
CAVVTSGTYKYVF

SEQ ID NO: 409932 - protein, 17 aa, Homo sapiens
  CDR3 for beta chain variable domain of TCR clone 204966 (TRBV7-3, TRBJ2-3)
CASSLMKRMRGADTQYF

SEQ ID NO: 409933 - protein, 17 aa, Homo sapiens
  CDR3 for alpha chain variable domain of TCR clone 204967 (TRAV17, TRAJ23)
CATASPMIYNQGGKLIF

SEQ ID NO: 409934 - protein, 18 aa, Homo sapiens
  CDR3 for beta chain variable domain of TCR clone 204967 (TRBV4-2, TRBJ1-2)
CASSQDKVGHTVNYGYTF

SEQ ID NO: 409935 - protein, 14 aa, Homo sapiens
  CDR3 for alpha chain variable domain of TCR clone 204968 (TRAV12-2, TRAJ32)
CAHPESGATNTLIF

SEQ ID NO: 409936 - protein, 14 aa, Homo sapiens
  CDR3 for beta chain variable domain of TCR clone 204968 (TRBV4-2, TRBJ2-3)
CASRETRAPGMQYF

SEQ ID NO: 409937 - protein, 18 aa, Homo sapiens
  CDR3 for alpha chain variable domain of TCR clone 204969 (TRAV13-1, TRAJ52)
CAAKNPNAGGTSYGKLTF

SEQ ID NO: 409938 - protein, 15 aa, Homo sapiens
  CDR3 for beta chain variable domain of TCR clone 204969 (TRBV28, TRBJ2-3)
CASSPDRQGSNTQYF

SEQ ID NO: 409939 - protein, 16 aa, Homo sapiens
  CDR3 for alpha chain variable domain of TCR clone 204970 (TRAV8-3, TRAJ13)
CAVGVYPSGGYQKVTF

SEQ ID NO: 409940 - protein, 14 aa, Homo sapiens
  CDR3 for beta chain variable domain of TCR clone 204970 (TRBV18, TRBJ2-5)
CASSPGVSQETQYF

SEQ ID NO: 409941 - protein, 13 aa, Homo sapiens
  CDR3 for alpha chain variable domain of TCR clone 204971 (TRAV17, TRAJ33)
CATDADSNYELIW

SEQ ID NO: 409942 - protein, 17 aa, Homo sapiens
  CDR3 for beta chain variable domain of TCR clone 204971 (TRBV20-1, TRBJ2-3)
CSAVSPGLAGGQDTQYF

SEQ ID NO: 409943 - protein, 11 aa, Homo sapiens
  CDR3 for alpha chain variable domain of TCR clone 204972 (TRAV21, TRAJ34)
CAVTNTDKLIL

SEQ ID NO: 409944 - protein, 15 aa, Homo sapiens
  CDR3 for beta chain variable domain of TCR clone 204972 (TRBV9, TRBJ1-6)
CASSVAGTGDSPLHF

SEQ ID NO: 409945 - protein, 15 aa, Homo sapiens
  CDR3 for alpha chain variable domain of TCR clone 204973 (TRAV20, TRAJ43)
CAVQAGKSSNNDMRF

SEQ ID NO: 409946 - protein, 12 aa, Homo sapiens
  CDR3 for beta chain variable domain of TCR clone 204973 (TRBV2, TRBJ2-1)
CAKREGYNEQFF

SEQ ID NO: 409947 - protein, 11 aa, Homo sapiens
  CDR3 for alpha chain variable domain of TCR clone 204974 (TRAV13-1, TRAJ30)
CAASRDDQIIF

SEQ ID NO: 409948 - protein, 15 aa, Homo sapiens
  CDR3 for beta chain variable domain of TCR clone 204974 (TRBV18, TRBJ1-1)
CASSPSSWVNTEAFF

SEQ ID NO: 409949 - protein, 13 aa, Homo sapiens
  CDR3 for alpha chain variable domain of TCR clone 204975 (TRAV12-1, TRAJ22)
CVVPSGSARQLTF

SEQ ID NO: 409950 - protein, 14 aa, Homo sapiens
  CDR3 for beta chain variable domain of TCR clone 204975 (TRBV7-2, TRBJ2-7)
CASSPKTSFYEQYF

SEQ ID NO: 409951 - protein, 16 aa, Homo sapiens
  CDR3 for alpha chain variable domain of TCR clone 204976 (TRAV3, TRAJ37)
CAVRPHGSGNTGKLIF

SEQ ID NO: 409952 - protein, 16 aa, Homo sapiens
  CDR3 for beta chain variable domain of TCR clone 204976 (TRBV9, TRBJ1-2)
CASSVEENVSPYGYTF

SEQ ID NO: 409953 - protein, 13 aa, Homo sapiens
  CDR3 for alpha chain variable domain of TCR clone 204977 (TRAV3, TRAJ21)
CAVREPDFNKFYF

SEQ ID NO: 409954 - protein, 13 aa, Homo sapiens
  CDR3 for beta chain variable domain of TCR clone 204977 (TRBV9, TRBJ2-1)
CAGSPSGGNEQFF

SEQ ID NO: 409955 - protein, 13 aa, Homo sapiens
  CDR3 for alpha chain variable domain of TCR clone 204978 (TRAV8-3, TRAJ17)
CAGIKAAGNKLTF

SEQ ID NO: 409956 - protein, 15 aa, Homo sapiens
  CDR3 for beta chain variable domain of TCR clone 204978 (TRBV4-2, TRBJ2-5)
CDSSTQTGLQETQYF

SEQ ID NO: 409957 - protein, 15 aa, Homo sapiens
  CDR3 for alpha chain variable domain of TCR clone 204979 (TRAV12-1, TRAJ43)
CVVNRGRYNNNDMRF

SEQ ID NO: 409958 - protein, 16 aa, Homo sapiens
  CDR3 for beta chain variable domain of TCR clone 204979 (TRBV19, TRBJ2-3)
CASSFYTTGIGDTQFF

SEQ ID NO: 409959 - protein, 15 aa, Homo sapiens
  CDR3 for alpha chain variable domain of TCR clone 204980 (TRAV8-1, TRAJ4)
RAVIDVSGGYNNLIF

SEQ ID NO: 409960 - protein, 14 aa, Homo sapiens
  CDR3 for beta chain variable domain of TCR clone 204980 (TRBV5-1, TRBJ1-1)
CASSFTGRNTEAFF

SEQ ID NO: 409961 - protein, 17 aa, Homo sapiens
  CDR3 for alpha chain variable domain of TCR clone 204981 (TRAV2, TRAJ22)
ILQVREADAAEQRQLTF

SEQ ID NO: 409962 - protein, 15 aa, Homo sapiens
  CDR3 for beta chain variable domain of TCR clone 204981 (TRBV6-3, TRBJ2-7)
CASSSPGTVFYEQYF

SEQ ID NO: 409963 - protein, 16 aa, Homo sapiens
  CDR3 for alpha chain variable domain of TCR clone 204982 (TRAV20, TRAJ22)
CAVQASSSGSARQLTF

SEQ ID NO: 409964 - protein, 19 aa, Homo sapiens
  CDR3 for beta chain variable domain of TCR clone 204982 (TRBV7-9, TRBJ2-6)
CASSLESATVLPGANVLTF

SEQ ID NO: 409965 - protein, 14 aa, Homo sapiens
  CDR3 for alpha chain variable domain of TCR clone 204983 (TRAV20, TRAJ56)
CAVQFGGANSKLTF

SEQ ID NO: 409966 - protein, 14 aa, Homo sapiens
  CDR3 for beta chain variable domain of TCR clone 204983 (TRBV20-1, TRBJ2-7)
CRAKRGRSSYEQYF

SEQ ID NO: 409967 - protein, 16 aa, Homo sapiens
  CDR3 for alpha chain variable domain of TCR clone 204984 (TRAV3, TRAJ37)
CAVRGKGAGNTGKLIF

SEQ ID NO: 409968 - protein, 21 aa, Homo sapiens
  CDR3 for beta chain variable domain of TCR clone 204984 (TRBV15, TRBJ2-1)
AWGTQPCTCVPPAEVDTARFF

SEQ ID NO: 409969 - protein, 11 aa, Homo sapiens
  CDR3 for alpha chain variable domain of TCR clone 204985 (TRAV12-1, TRAJ31)
CVGRVQCQTHV

SEQ ID NO: 409970 - protein, 16 aa, Homo sapiens
  CDR3 for beta chain variable domain of TCR clone 204985 (TRBV5-1, TRBJ1-1)
CASSSGGNSLNTEAFF

SEQ ID NO: 409971 - protein, 15 aa, Homo sapiens
  CDR3 for alpha chain variable domain of TCR clone 204986 (TRAV12-3, TRAJ27)
CAMRAYNTDAGKSTF

SEQ ID NO: 409972 - protein, 13 aa, Homo sapiens
  CDR3 for beta chain variable domain of TCR clone 204986 (TRBV11-2, TRBJ2-5)
CASSRGPSETQDF

SEQ ID NO: 409973 - protein, 15 aa, Homo sapiens
  CDR3 for alpha chain variable domain of TCR clone 204987 (TRAV1-2, TRAJ17)
CAVRGYGAAGNELTF

SEQ ID NO: 409974 - protein, 23 aa, Homo sapiens
  CDR3 for beta chain variable domain of TCR clone 204987 (TRBV11-2, TRBJ2-5)
CASSSPGGEGAASRDPVLRARHA

SEQ ID NO: 409975 - protein, 15 aa, Homo sapiens
  CDR3 for alpha chain variable domain of TCR clone 204988 (TRAV12-3, TRAJ6)
CAMSATSGGSYIPTF

SEQ ID NO: 409976 - protein, 11 aa, Homo sapiens
  CDR3 for beta chain variable domain of TCR clone 204988 (TRBV20-1, TRBJ1-5)
CSAQEDQPQHF

SEQ ID NO: 409977 - protein, 13 aa, Homo sapiens
  CDR3 for alpha chain variable domain of TCR clone 204989 (TRAV13-2, TRAJ40)
CAENGSGTDKYIF

SEQ ID NO: 409978 - protein, 15 aa, Homo sapiens
  CDR3 for beta chain variable domain of TCR clone 204989 (TRBV10-3, TRBJ1-1)
CAISDRGGMNTEAFF

SEQ ID NO: 409979 - protein, 15 aa, Homo sapiens
  CDR3 for alpha chain variable domain of TCR clone 204990 (TRAV23/DV6, TRAJ27)
CAASKPMQANQPLVM

SEQ ID NO: 409980 - protein, 12 aa, Homo sapiens
  CDR3 for beta chain variable domain of TCR clone 204990 (TRBV12-4, TRBJ2-7)
CASSVGGYEQYF

SEQ ID NO: 409981 - protein, 12 aa, Homo sapiens
  CDR3 for alpha chain variable domain of TCR clone 204991 (TRAV27, TRAJ9)
CAGESGGFKTIF

SEQ ID NO: 409982 - protein, 16 aa, Homo sapiens
  CDR3 for beta chain variable domain of TCR clone 204991 (TRBV5-1, TRBJ2-5)
CASSSSGLGGAETQYF

SEQ ID NO: 409983 - protein, 13 aa, Homo sapiens
  CDR3 for alpha chain variable domain of TCR clone 204992 (TRAV12-2, TRAJ36)
CAVIATGANNLFF

SEQ ID NO: 409984 - protein, 14 aa, Homo sapiens
  CDR3 for beta chain variable domain of TCR clone 204992 (TRBV7-6, TRBJ2-3)
CASSLGTVTDTQYF

SEQ ID NO: 409985 - protein, 14 aa, Homo sapiens
  CDR3 for alpha chain variable domain of TCR clone 204993 (TRAV12-1, TRAJ30)
CVPTGTNRDDKIIF

SEQ ID NO: 409986 - protein, 15 aa, Homo sapiens
  CDR3 for beta chain variable domain of TCR clone 204993 (TRBV11-2, TRBJ2-2)
CASSSDRVNAGELFF

SEQ ID NO: 409987 - protein, 13 aa, Homo sapiens
  CDR3 for alpha chain variable domain of TCR clone 204994 (TRAV38-1, TRAJ20)
CAFMKPNDYKLSS

SEQ ID NO: 409988 - protein, 16 aa, Homo sapiens
  CDR3 for beta chain variable domain of TCR clone 204994 (TRBV19, TRBJ2-1)
CASSKAGPSSYNERFF

SEQ ID NO: 409989 - protein, 11 aa, Homo sapiens
  CDR3 for alpha chain variable domain of TCR clone 204995 (TRAV21, TRAJ48)
CAVDGNEKLTF

SEQ ID NO: 409990 - protein, 18 aa, Homo sapiens
  CDR3 for beta chain variable domain of TCR clone 204995 (TRBV11-3, TRBJ2-3)
CASSLGGASRGAPNTHYF

SEQ ID NO: 409991 - protein, 14 aa, Homo sapiens
  CDR3 for alpha chain variable domain of TCR clone 204996 (TRAV13-2, TRAJ10)
CAENITGGGNKLTF

SEQ ID NO: 409992 - protein, 15 aa, Homo sapiens
  CDR3 for beta chain variable domain of TCR clone 204996 (TRBV20-1, TRBJ2-7)
CSARDRVSGMDEQYF

SEQ ID NO: 409993 - protein, 15 aa, Homo sapiens
  CDR3 for alpha chain variable domain of TCR clone 204997 (TRAV8-1, TRAJ6)
CAVNTPSGGSYIPTF

SEQ ID NO: 409994 - protein, 14 aa, Homo sapiens
  CDR3 for beta chain variable domain of TCR clone 204997 (TRBV12-4, TRBJ2-1)
CASSLGQGASERFF

SEQ ID NO: 409995 - protein, 15 aa, Homo sapiens
  CDR3 for alpha chain variable domain of TCR clone 204998 (TRAV17, TRAJ35)
CATAFVIGFGNVLHC

SEQ ID NO: 409996 - protein, 14 aa, Homo sapiens
  CDR3 for beta chain variable domain of TCR clone 204998 (TRBV7-6, TRBJ2-3)
CASSLGTVTDTQYF

SEQ ID NO: 409997 - protein, 14 aa, Homo sapiens
  CDR3 for alpha chain variable domain of TCR clone 204999 (TRAV8-3, TRAJ36)
CAVVPITGANNLFF

SEQ ID NO: 409998 - protein, 15 aa, Homo sapiens
  CDR3 for beta chain variable domain of TCR clone 204999 (TRBV4-1, TRBJ2-1)
CASSQDPGNYNEQFF

SEQ ID NO: 409999 - protein, 13 aa, Homo sapiens
  CDR3 for alpha chain variable domain of TCR clone 205000 (TRAV3, TRAJ27)
CAVRPLCAGKSTF

SEQ ID NO: 410000 - protein, 13 aa, Homo sapiens
  CDR3 for beta chain variable domain of TCR clone 205000 (TRBV7-9, TRBJ2-3)
CTSSPGSTDTQYF

SEQ ID NO: 410001 - protein, 16 aa, Homo sapiens
  CDR3 for alpha chain variable domain of TCR clone 205001 (TRAV4, TRAJ22)
CLVGDLYSGSARQLTF

SEQ ID NO: 410002 - protein, 16 aa, Homo sapiens
  CDR3 for beta chain variable domain of TCR clone 205001 (TRBV7-9, TRBJ2-1)
CASSDVARGSYNEQFF

SEQ ID NO: 410003 - protein, 12 aa, Homo sapiens
  CDR3 for alpha chain variable domain of TCR clone 205002 (TRAV14/DV4, TRAJ9)
CAMNPGGFKTIF

SEQ ID NO: 410004 - protein, 16 aa, Homo sapiens
  CDR3 for beta chain variable domain of TCR clone 205002 (TRBV28, TRBJ2-5)
CASSFSPAGGWETQYF

SEQ ID NO: 410005 - protein, 14 aa, Homo sapiens
  CDR3 for alpha chain variable domain of TCR clone 205003 (TRAV9-2, TRAJ39)
CALYNYNAGNMLTF

SEQ ID NO: 410006 - protein, 14 aa, Homo sapiens
  CDR3 for beta chain variable domain of TCR clone 205003 (TRBV12-5, TRBJ2-5)
CASGSRTHQETQYF

SEQ ID NO: 410007 - protein, 13 aa, Homo sapiens
  CDR3 for alpha chain variable domain of TCR clone 205004 (TRAV21, TRAJ27)
CAARPGNAGKSTI

SEQ ID NO: 410008 - protein, 13 aa, Homo sapiens
  CDR3 for beta chain variable domain of TCR clone 205004 (TRBV13, TRBJ2-1)
CASILGGRGEQFF

SEQ ID NO: 410009 - protein, 16 aa, Homo sapiens
  CDR3 for alpha chain variable domain of TCR clone 205005 (TRAV14/DV4, TRAJ53)
CAMREGGGGSNYKLTF

SEQ ID NO: 410010 - protein, 13 aa, Homo sapiens
  CDR3 for beta chain variable domain of TCR clone 205005 (TRBV2, TRBJ1-5)
CATAGPGNQPQHF

SEQ ID NO: 410011 - protein, 18 aa, Homo sapiens
  CDR3 for alpha chain variable domain of TCR clone 205006 (TRAV12-3, TRAJ52)
CAMSVGGAGGTSYGKLTF

SEQ ID NO: 410012 - protein, 15 aa, Homo sapiens
  CDR3 for beta chain variable domain of TCR clone 205006 (TRBV5-1, TRBJ1-1)
CASSSTTGTNTEAFF

SEQ ID NO: 410013 - protein, 14 aa, Homo sapiens
  CDR3 for alpha chain variable domain of TCR clone 205007 (TRAV12-3, TRAJ18)
CNERRGSTLGRLSF

SEQ ID NO: 410014 - protein, 12 aa, Homo sapiens
  CDR3 for beta chain variable domain of TCR clone 205007 (TRBV11-2, TRBJ2-2)
CASSLPTGELFF

SEQ ID NO: 410015 - protein, 11 aa, Homo sapiens
  CDR3 for alpha chain variable domain of TCR clone 205008 (TRAV12-3, TRAJ43)
CAISVSNDMRF

SEQ ID NO: 410016 - protein, 13 aa, Homo sapiens
  CDR3 for beta chain variable domain of TCR clone 205008 (TRBV20-1, TRBJ1-1)
CSAPLGWGTEAFF

SEQ ID NO: 410017 - protein, 13 aa, Homo sapiens
  CDR3 for alpha chain variable domain of TCR clone 205009 (TRAV12-2, TRAJ13)
CREKTGGYQKVTF

SEQ ID NO: 410018 - protein, 17 aa, Homo sapiens
  CDR3 for beta chain variable domain of TCR clone 205009 (TRBV15, TRBJ2-4)
CATSRDNPQTGLDIQYF

SEQ ID NO: 410019 - protein, 16 aa, Homo sapiens
  CDR3 for alpha chain variable domain of TCR clone 205010 (TRAV3, TRAJ37)
CAVRPHGSGNTGKLNF

SEQ ID NO: 410020 - protein, 17 aa, Homo sapiens
  CDR3 for beta chain variable domain of TCR clone 205010 (TRBV5-1, TRBJ2-5)
CASSPVALGQNQETQYF

SEQ ID NO: 410021 - protein, 14 aa, Homo sapiens
  CDR3 for alpha chain variable domain of TCR clone 205011 (TRAV3, TRAJ32)
CCERRAGATNKLIF

SEQ ID NO: 410022 - protein, 14 aa, Homo sapiens
  CDR3 for beta chain variable domain of TCR clone 205011 (TRBV19, TRBJ2-1)
CASPTFVLSGEQFF

SEQ ID NO: 410023 - protein, 11 aa, Homo sapiens
  CDR3 for alpha chain variable domain of TCR clone 205012 (TRAV12-2, TRAJ39)
CAVNNMLTFGG

SEQ ID NO: 410024 - protein, 16 aa, Homo sapiens
  CDR3 for beta chain variable domain of TCR clone 205012 (TRBV9, TRBJ2-7)
CASSAGPNRSPYEQYF

SEQ ID NO: 410025 - protein, 14 aa, Homo sapiens
  CDR3 for alpha chain variable domain of TCR clone 205013 (TRAV8-6, TRAJ29)
CAVSRASGNTPLVL

SEQ ID NO: 410026 - protein, 13 aa, Homo sapiens
  CDR3 for beta chain variable domain of TCR clone 205013 (TRBV19, TRBJ1-5)
CASSEGSNQPQHF

SEQ ID NO: 410027 - protein, 15 aa, Homo sapiens
  CDR3 for alpha chain variable domain of TCR clone 205014 (TRAV12-3, TRAJ5)
CAMSGVGTGRRALTF

SEQ ID NO: 410028 - protein, 16 aa, Homo sapiens
  CDR3 for beta chain variable domain of TCR clone 205014 (TRBV20-1, TRBJ2-3)
CSARLHSAGAIDTQYF

SEQ ID NO: 410029 - protein, 13 aa, Homo sapiens
  CDR3 for alpha chain variable domain of TCR clone 205015 (TRAV3, TRAJ15)
CAVRDQAGTALIF

SEQ ID NO: 410030 - protein, 15 aa, Homo sapiens
  CDR3 for beta chain variable domain of TCR clone 205015 (TRBV11-1, TRBJ2-7)
CASSLNYAASYEQYF

SEQ ID NO: 410031 - protein, 13 aa, Homo sapiens
  CDR3 for alpha chain variable domain of TCR clone 205016 (TRAV8-6, TRAJ16)
CAVSSPDGQKLLF

SEQ ID NO: 410032 - protein, 16 aa, Homo sapiens
  CDR3 for beta chain variable domain of TCR clone 205016 (TRBV5-6, TRBJ2-3)
CASGSLGGAITDTQYF

SEQ ID NO: 410033 - protein, 15 aa, Homo sapiens
  CDR3 for alpha chain variable domain of TCR clone 205017 (TRAV34, TRAJ38)
CGADFTPGNNRKLIW

SEQ ID NO: 410034 - protein, 13 aa, Homo sapiens
  CDR3 for beta chain variable domain of TCR clone 205017 (TRBV5-4, TRBJ2-5)
CASSPVSQETQHF

SEQ ID NO: 410035 - protein, 18 aa, Homo sapiens
  CDR3 for alpha chain variable domain of TCR clone 205018 (TRAV13-1, TRAJ52)
CAASKRSAGGTSYGKLTF

SEQ ID NO: 410036 - protein, 15 aa, Homo sapiens
  CDR3 for beta chain variable domain of TCR clone 205018 (TRBV7-2, TRBJ2-2)
CASRRPGQNTGELFF

SEQ ID NO: 410037 - protein, 12 aa, Homo sapiens
  CDR3 for alpha chain variable domain of TCR clone 205019 (TRAV24, TRAJ6)
CAPAGGSYIPTF

SEQ ID NO: 410038 - protein, 14 aa, Homo sapiens
  CDR3 for beta chain variable domain of TCR clone 205019 (TRBV7-9, TRBJ1-2)
CASSRQGANYGYTF

SEQ ID NO: 410039 - protein, 15 aa, Homo sapiens
  CDR3 for alpha chain variable domain of TCR clone 205020 (TRAV8-3, TRAJ27)
CAVGPSKTNAGKSTF

SEQ ID NO: 410040 - protein, 14 aa, Homo sapiens
  CDR3 for beta chain variable domain of TCR clone 205020 (TRBV7-2, TRBJ2-1)
CQQLRTSGRHEQFF

SEQ ID NO: 410041 - protein, 15 aa, Homo sapiens
  CDR3 for alpha chain variable domain of TCR clone 205021 (TRAV8-3, TRAJ48)
CAVGASNFGNEKLTF

SEQ ID NO: 410042 - protein, 14 aa, Homo sapiens
  CDR3 for beta chain variable domain of TCR clone 205021 (TRBV19, TRBJ2-1)
CASPTFVLSGEQFF

SEQ ID NO: 410043 - protein, 14 aa, Homo sapiens
  CDR3 for alpha chain variable domain of TCR clone 205022 (TRAV2, TRAJ29)
CAGPFQYGNAPLVF

SEQ ID NO: 410044 - protein, 18 aa, Homo sapiens
  CDR3 for beta chain variable domain of TCR clone 205022 (TRBV6-1, TRBJ1-6)
CASSGSDGRRINNSPLHF

SEQ ID NO: 410045 - protein, 12 aa, Homo sapiens
  CDR3 for alpha chain variable domain of TCR clone 205023 (TRAV29/DV5, TRAJ49)
CAATDTGNQFYF

SEQ ID NO: 410046 - protein, 18 aa, Homo sapiens
  CDR3 for beta chain variable domain of TCR clone 205023 (TRBV11-2, TRBJ2-3)
CASSLGGASRGAPNTQYF

SEQ ID NO: 410047 - protein, 13 aa, Homo sapiens
  CDR3 for alpha chain variable domain of TCR clone 205024 (TRAV8-3, TRAJ48)
CAVVPFGNEKLTF

SEQ ID NO: 410048 - protein, 15 aa, Homo sapiens
  CDR3 for beta chain variable domain of TCR clone 205024 (TRBV11-3, TRBJ2-1)
CASSSPSTCYNEQFF

SEQ ID NO: 410049 - protein, 13 aa, Homo sapiens
  CDR3 for alpha chain variable domain of TCR clone 205025 (TRAV26-1, TRAJ33)
CIVRVEGNYQLIW

SEQ ID NO: 410050 - protein, 16 aa, Homo sapiens
  CDR3 for beta chain variable domain of TCR clone 205025 (TRBV15, TRBJ2-7)
CATSRDQGRRRGEQYF

SEQ ID NO: 410051 - protein, 12 aa, Homo sapiens
  CDR3 for alpha chain variable domain of TCR clone 205026 (TRAV27, TRAJ35)
CAGADFGNVLHC

SEQ ID NO: 410052 - protein, 15 aa, Homo sapiens
  CDR3 for beta chain variable domain of TCR clone 205026 (TRBV28, TRBJ2-1)
CASSIIAGGRSEQFF

SEQ ID NO: 410053 - protein, 18 aa, Homo sapiens
  CDR3 for alpha chain variable domain of TCR clone 205027 (TRAV21, TRAJ52)
CAVRPSPAGGTSYGKLTF

SEQ ID NO: 410054 - protein, 16 aa, Homo sapiens
  CDR3 for beta chain variable domain of TCR clone 205027 (TRBV7-3, TRBJ2-1)
CANSLEGYRSYNEQFF

SEQ ID NO: 410055 - protein, 12 aa, Homo sapiens
  CDR3 for alpha chain variable domain of TCR clone 205028 (TRAV3, TRAJ43)
CAVRDPNNDMRF

SEQ ID NO: 410056 - protein, 15 aa, Homo sapiens
  CDR3 for beta chain variable domain of TCR clone 205028 (TRBV18, TRBJ2-1)
CASSPPSASYNEQFF

SEQ ID NO: 410057 - protein, 14 aa, Homo sapiens
  CDR3 for alpha chain variable domain of TCR clone 205029 (TRAV8-4, TRAJ27)
CAVSNGTNAGKSTF

SEQ ID NO: 410058 - protein, 16 aa, Homo sapiens
  CDR3 for beta chain variable domain of TCR clone 205029 (TRBV2, TRBJ2-7)
CASSSTRRGSSYEQYF

SEQ ID NO: 410059 - protein, 12 aa, Homo sapiens
  CDR3 for alpha chain variable domain of TCR clone 205030 (TRAV13-1, TRAJ21)
CEAKEGFNKFYF

SEQ ID NO: 410060 - protein, 13 aa, Homo sapiens
  CDR3 for beta chain variable domain of TCR clone 205030 (TRBV7-9, TRBJ2-1)
CASSLGTVNEQFF

SEQ ID NO: 410061 - protein, 12 aa, Homo sapiens
  CDR3 for alpha chain variable domain of TCR clone 205031 (TRAV2, TRAJ10)
CASTGGGNKLTF

SEQ ID NO: 410062 - protein, 14 aa, Homo sapiens
  CDR3 for beta chain variable domain of TCR clone 205031 (TRBV7-2, TRBJ2-2)
CASRGQGAAVELFF

SEQ ID NO: 410063 - protein, 10 aa, Homo sapiens
  CDR3 for alpha chain variable domain of TCR clone 205032 (TRAV1-1, TRAJ5)
CAVIWESTYF

SEQ ID NO: 410064 - protein, 15 aa, Homo sapiens
  CDR3 for beta chain variable domain of TCR clone 205032 (TRBV4-1, TRBJ2-1)
CASSQGGELYNEQFF

SEQ ID NO: 410065 - protein, 14 aa, Homo sapiens
  CDR3 for alpha chain variable domain of TCR clone 205033 (TRAV13-2, TRAJ17)
CAENSKAAGNKLTF

SEQ ID NO: 410066 - protein, 13 aa, Homo sapiens
  CDR3 for beta chain variable domain of TCR clone 205033 (TRBV20-1, TRBJ1-1)
CSARGGGNTEAFF

SEQ ID NO: 410067 - protein, 10 aa, Homo sapiens
  CDR3 for alpha chain variable domain of TCR clone 205034 (TRAV21, TRAJ43)
CAVSANDVRF

SEQ ID NO: 410068 - protein, 13 aa, Homo sapiens
  CDR3 for beta chain variable domain of TCR clone 205034 (TRBV7-2, TRBJ1-2)
CASSLDGIYGYTF

SEQ ID NO: 410069 - protein, 14 aa, Homo sapiens
  CDR3 for alpha chain variable domain of TCR clone 205035 (TRAV29/DV5, TRAJ36)
CAARRKTGANNLFY

SEQ ID NO: 410070 - protein, 14 aa, Homo sapiens
  CDR3 for beta chain variable domain of TCR clone 205035 (TRBV12-5, TRBJ2-5)
CASGSRTHQETQYF

SEQ ID NO: 410071 - protein, 13 aa, Homo sapiens
  CDR3 for alpha chain variable domain of TCR clone 205036 (TRAV35, TRAJ36)
CAGPRIGANNFFF

SEQ ID NO: 410072 - protein, 15 aa, Homo sapiens
  CDR3 for beta chain variable domain of TCR clone 205036 (TRBV28, TRBJ2-5)
CASSPPWSYHATQYF

SEQ ID NO: 410073 - protein, 11 aa, Homo sapiens
  CDR3 for alpha chain variable domain of TCR clone 205037 (TRAV21, TRAJ23)
CAPQRRGKLIF

SEQ ID NO: 410074 - protein, 14 aa, Homo sapiens
  CDR3 for beta chain variable domain of TCR clone 205037 (TRBV12-4, TRBJ1-1)
CASTWTWHDTEAFF

SEQ ID NO: 410075 - protein, 11 aa, Homo sapiens
  CDR3 for alpha chain variable domain of TCR clone 205038 (TRAV21, TRAJ31)
CAVRHNARLMF

SEQ ID NO: 410076 - protein, 15 aa, Homo sapiens
  CDR3 for beta chain variable domain of TCR clone 205038 (TRBV20-1, TRBJ2-7)
CSARDRVSGMDEQYF

SEQ ID NO: 410077 - protein, 15 aa, Homo sapiens
  CDR3 for alpha chain variable domain of TCR clone 205039 (TRAV12-2, TRAJ53)
FAVNGGGGSNYKLTF

SEQ ID NO: 410078 - protein, 15 aa, Homo sapiens
  CDR3 for beta chain variable domain of TCR clone 205039 (TRBV4-1, TRBJ1-4)
CASSDTGGTNEKLFF

SEQ ID NO: 410079 - protein, 12 aa, Homo sapiens
  CDR3 for alpha chain variable domain of TCR clone 205040 (TRAV22, TRAJ29)
CAPPSANTPLVF

SEQ ID NO: 410080 - protein, 14 aa, Homo sapiens
  CDR3 for beta chain variable domain of TCR clone 205040 (TRBV11-2, TRBJ2-7)
CASSLGAGAYEQYF

SEQ ID NO: 410081 - protein, 11 aa, Homo sapiens
  CDR3 for alpha chain variable domain of TCR clone 205041 (TRAV12-2, TRAJ31)
CDILNNARLMF

SEQ ID NO: 410082 - protein, 13 aa, Homo sapiens
  CDR3 for beta chain variable domain of TCR clone 205041 (TRBV20-1, TRBJ1-1)
CSARLGQGTEAFF

SEQ ID NO: 410083 - protein, 12 aa, Homo sapiens
  CDR3 for alpha chain variable domain of TCR clone 205042 (TRAV1-1, TRAJ23)
CAVTNQGGKLIF

SEQ ID NO: 410084 - protein, 17 aa, Homo sapiens
  CDR3 for beta chain variable domain of TCR clone 205042 (TRBV11-2, TRBJ2-1)
CASSLYPPGVEYNEQFF

SEQ ID NO: 410085 - protein, 16 aa, Homo sapiens
  CDR3 for alpha chain variable domain of TCR clone 205043 (TRAV12-2, TRAJ45)
CAVNRGSGGGADGLTL

SEQ ID NO: 410086 - protein, 16 aa, Homo sapiens
  CDR3 for beta chain variable domain of TCR clone 205043 (TRBV12-4, TRBJ2-7)
CASSLIGGTGTYEQYF

SEQ ID NO: 410087 - protein, 12 aa, Homo sapiens
  CDR3 for alpha chain variable domain of TCR clone 205044 (TRAV1-1, TRAJ24)
CAVRGSWGKFQF

SEQ ID NO: 410088 - protein, 15 aa, Homo sapiens
  CDR3 for beta chain variable domain of TCR clone 205044 (TRBV5-1, TRBJ2-7)
CASSLGDFTTYEQYF

SEQ ID NO: 410089 - protein, 13 aa, Homo sapiens
  CDR3 for alpha chain variable domain of TCR clone 205045 (TRAV35, TRAJ21)
CAAQLSNFNKFYF

SEQ ID NO: 410090 - protein, 11 aa, Homo sapiens
  CDR3 for beta chain variable domain of TCR clone 205045 (TRBV7-6, TRBJ2-5)
CASSSQETQYF

SEQ ID NO: 410091 - protein, 19 aa, Homo sapiens
  CDR3 for alpha chain variable domain of TCR clone 205046 (TRAV2, TRAJ20)
ILQVREADAAVYRDCKLSF

SEQ ID NO: 410092 - protein, 13 aa, Homo sapiens
  CDR3 for beta chain variable domain of TCR clone 205046 (TRBV15, TRBJ1-6)
GATSGGLNSPLHF

SEQ ID NO: 410093 - protein, 13 aa, Homo sapiens
  CDR3 for alpha chain variable domain of TCR clone 205047 (TRAV12-3, TRAJ47)
CAMTKEYGNKLVF

SEQ ID NO: 410094 - protein, 15 aa, Homo sapiens
  CDR3 for beta chain variable domain of TCR clone 205047 (TRBV20-1, TRBJ2-7)
CSASDRVSGMDEQYF

SEQ ID NO: 410095 - protein, 18 aa, Homo sapiens
  CDR3 for alpha chain variable domain of TCR clone 205048 (TRAV21, TRAJ52)
CAVRPSPAGGTSYGKLTF

SEQ ID NO: 410096 - protein, 12 aa, Homo sapiens
  CDR3 for beta chain variable domain of TCR clone 205048 (TRBV11-2, TRBJ2-2)
CSISLGGGELFF

SEQ ID NO: 410097 - protein, 13 aa, Homo sapiens
  CDR3 for alpha chain variable domain of TCR clone 205049 (TRAV12-2, TRAJ39)
CAVNNNAGNMLNF

SEQ ID NO: 410098 - protein, 12 aa, Homo sapiens
  CDR3 for beta chain variable domain of TCR clone 205049 (TRBV5-1, TRBJ2-7)
CASSFRGYEQYF

SEQ ID NO: 410099 - protein, 14 aa, Homo sapiens
  CDR3 for alpha chain variable domain of TCR clone 205050 (TRAV1-2, TRAJ15)
CAVRDRQAGTALIF

SEQ ID NO: 410100 - protein, 13 aa, Homo sapiens
  CDR3 for beta chain variable domain of TCR clone 205050 (TRBV15, TRBJ2-7)
CATSTTGHYEQYF

SEQ ID NO: 410101 - protein, 13 aa, Homo sapiens
  CDR3 for alpha chain variable domain of TCR clone 205051 (TRAV17, TRAJ9)
CATDYTGGFKTIF

SEQ ID NO: 410102 - protein, 14 aa, Homo sapiens
  CDR3 for beta chain variable domain of TCR clone 205051 (TRBV19, TRBJ1-5)
CASSYTGSNQPQHF

SEQ ID NO: 410103 - protein, 13 aa, Homo sapiens
  CDR3 for alpha chain variable domain of TCR clone 205052 (TRAV12-3, TRAJ7)
CAMSASGNNRLAF

SEQ ID NO: 410104 - protein, 17 aa, Homo sapiens
  CDR3 for beta chain variable domain of TCR clone 205052 (TRBV4-1, TRBJ2-7)
CASSRDPLGVRGGEQYF

SEQ ID NO: 410105 - protein, 11 aa, Homo sapiens
  CDR3 for alpha chain variable domain of TCR clone 205053 (TRAV1-2, TRAJ40)
CAVPGTYKYIF

SEQ ID NO: 410106 - protein, 13 aa, Homo sapiens
  CDR3 for beta chain variable domain of TCR clone 205053 (TRBV15, TRBJ1-1)
CATSRGIQARAFF

SEQ ID NO: 410107 - protein, 10 aa, Homo sapiens
  CDR3 for alpha chain variable domain of TCR clone 205054 (TRAV17, TRAJ36)
CATVSGNLFF

SEQ ID NO: 410108 - protein, 12 aa, Homo sapiens
  CDR3 for beta chain variable domain of TCR clone 205054 (TRBV11-2, TRBJ2-4)
CASSSASGSEYF

SEQ ID NO: 410109 - protein, 11 aa, Homo sapiens
  CDR3 for alpha chain variable domain of TCR clone 205055 (TRAV21, TRAJ34)
CAVTNTDKLIF

SEQ ID NO: 410110 - protein, 15 aa, Homo sapiens
  CDR3 for beta chain variable domain of TCR clone 205055 (TRBV20-1, TRBJ1-1)
CSASRGVTGNTEAFF

SEQ ID NO: 410111 - protein, 11 aa, Homo sapiens
  CDR3 for alpha chain variable domain of TCR clone 205056 (TRAV2, TRAJ13)
CATGGYQKVTS

SEQ ID NO: 410112 - protein, 16 aa, Homo sapiens
  CDR3 for beta chain variable domain of TCR clone 205056 (TRBV19, TRBJ2-1)
CASSKAGPSSYNEQFF

SEQ ID NO: 410113 - protein, 13 aa, Homo sapiens
  CDR3 for alpha chain variable domain of TCR clone 205057 (TRAV12-3, TRAJ7)
CAMTPYGNNRLAF

SEQ ID NO: 410114 - protein, 16 aa, Homo sapiens
  CDR3 for beta chain variable domain of TCR clone 205057 (TRBV20-1, TRBJ1-4)
WSARPYGGELNEKLFF

SEQ ID NO: 410115 - protein, 14 aa, Homo sapiens
  CDR3 for alpha chain variable domain of TCR clone 205058 (TRAV8-3, TRAJ10)
CAVGNAGGGNKLTF

SEQ ID NO: 410116 - protein, 17 aa, Homo sapiens
  CDR3 for beta chain variable domain of TCR clone 205058 (TRBV27, TRBJ2-7)
CASSATRPGTGPYEQYF

SEQ ID NO: 410117 - protein, 16 aa, Homo sapiens
  CDR3 for alpha chain variable domain of TCR clone 205059 (TRAV30, TRAJ24)
CGTEIVDADSWGKFQF

SEQ ID NO: 410118 - protein, 13 aa, Homo sapiens
  CDR3 for beta chain variable domain of TCR clone 205059 (TRBV12-4, TRBJ1-2)
CASSSRQGKGYTF

SEQ ID NO: 410119 - protein, 15 aa, Homo sapiens
  CDR3 for alpha chain variable domain of TCR clone 205060 (TRAV12-2, TRAJ53)
CAVNTGGVSNYKLTF

SEQ ID NO: 410120 - protein, 15 aa, Homo sapiens
  CDR3 for beta chain variable domain of TCR clone 205060 (TRBV5-1, TRBJ2-5)
CASSLGLGEIKTQYF

SEQ ID NO: 410121 - protein, 13 aa, Homo sapiens
  CDR3 for alpha chain variable domain of TCR clone 205061 (TRAV35, TRAJ48)
CAGHEFGNEKLTF

SEQ ID NO: 410122 - protein, 15 aa, Homo sapiens
  CDR3 for beta chain variable domain of TCR clone 205061 (TRBV27, TRBJ2-7)
CASSPQREGRREQYF

SEQ ID NO: 410123 - protein, 12 aa, Homo sapiens
  CDR3 for alpha chain variable domain of TCR clone 205062 (TRAV12-3, TRAJ17)
CAMTLTGNKLTF

SEQ ID NO: 410124 - protein, 15 aa, Homo sapiens
  CDR3 for beta chain variable domain of TCR clone 205062 (TRBV20-1, TRBJ2-7)
CSSIYRVSRIDEQYF

SEQ ID NO: 410125 - protein, 10 aa, Homo sapiens
  CDR3 for alpha chain variable domain of TCR clone 205063 (TRAV26-1, TRAJ22)
RSGSERQLTF

SEQ ID NO: 410126 - protein, 12 aa, Homo sapiens
  CDR3 for beta chain variable domain of TCR clone 205063 (TRBV11-2, TRBJ2-2)
CASSLGGGELFF

SEQ ID NO: 410127 - protein, 15 aa, Homo sapiens
  CDR3 for alpha chain variable domain of TCR clone 205064 (TRAV12-1, TRAJ42)
CVVTRDGGSQGNLIF

SEQ ID NO: 410128 - protein, 14 aa, Homo sapiens
  CDR3 for beta chain variable domain of TCR clone 205064 (TRBV12-4, TRBJ2-3)
CASSGQGSTDTQYF

SEQ ID NO: 410129 - protein, 14 aa, Homo sapiens
  CDR3 for alpha chain variable domain of TCR clone 205065 (TRAV16, TRAJ17)
CALSGRAAGNKLTF

SEQ ID NO: 410130 - protein, 17 aa, Homo sapiens
  CDR3 for beta chain variable domain of TCR clone 205065 (TRBV18, TRBJ2-6)
CASSPRQGAVGANVLTC

SEQ ID NO: 410131 - protein, 11 aa, Homo sapiens
  CDR3 for alpha chain variable domain of TCR clone 205066 (TRAV21, TRAJ34)
CAVTNTDKLIF

SEQ ID NO: 410132 - protein, 17 aa, Homo sapiens
  CDR3 for beta chain variable domain of TCR clone 205066 (TRBV7-9, TRBJ1-1)
CASSLGIAGAENTEAFF

SEQ ID NO: 410133 - protein, 15 aa, Homo sapiens
  CDR3 for alpha chain variable domain of TCR clone 205067 (TRAV1-2, TRAJ24)
CAVRGSTDSWGKFRF

SEQ ID NO: 410134 - protein, 16 aa, Homo sapiens
  CDR3 for beta chain variable domain of TCR clone 205067 (TRBV20-1, TRBJ2-1)
CSAATQGPVSYNEQFF

SEQ ID NO: 410135 - protein, 16 aa, Homo sapiens
  CDR3 for alpha chain variable domain of TCR clone 205068 (TRAV12-3, TRAJ53)
CAMSPGSGGSNYKLTF

SEQ ID NO: 410136 - protein, 13 aa, Homo sapiens
  CDR3 for beta chain variable domain of TCR clone 205068 (TRBV7-3, TRBJ1-1)
YASSQDWGAEAFF

SEQ ID NO: 410137 - protein, 14 aa, Homo sapiens
  CDR3 for alpha chain variable domain of TCR clone 205069 (TRAV22, TRAJ29)
CVVTRNSGNTPLVF

SEQ ID NO: 410138 - protein, 13 aa, Homo sapiens
  CDR3 for beta chain variable domain of TCR clone 205069 (TRBV18, TRBJ1-1)
CASSPETKPEAFF

SEQ ID NO: 410139 - protein, 13 aa, Homo sapiens
  CDR3 for alpha chain variable domain of TCR clone 205070 (TRAV2, TRAJ40)
CAVVTSGTYKYIF

SEQ ID NO: 410140 - protein, 17 aa, Homo sapiens
  CDR3 for beta chain variable domain of TCR clone 205070 (TRBV28, TRBJ2-3)
CASSPTPAGGGVDTQYF

SEQ ID NO: 410141 - protein, 15 aa, Homo sapiens
  CDR3 for alpha chain variable domain of TCR clone 205071 (TRAV35, TRAJ23)
CAGPLGNNQGGKLIF

SEQ ID NO: 410142 - protein, 14 aa, Homo sapiens
  CDR3 for beta chain variable domain of TCR clone 205071 (TRBV7-9, TRBJ1-1)
CASTPLQSYTEPFF

SEQ ID NO: 410143 - protein, 12 aa, Homo sapiens
  CDR3 for alpha chain variable domain of TCR clone 205072 (TRAV13-1, TRAJ21)
CAAKEGFNKFYF

SEQ ID NO: 410144 - protein, 16 aa, Homo sapiens
  CDR3 for beta chain variable domain of TCR clone 205072 (TRBV13, TRBJ2-2)
CAGSPRTGEHTGELFF

SEQ ID NO: 410145 - protein, 14 aa, Homo sapiens
  CDR3 for alpha chain variable domain of TCR clone 205073 (TRAV13-2, TRAJ29)
CAENIEPGNTPLVF

SEQ ID NO: 410146 - protein, 14 aa, Homo sapiens
  CDR3 for beta chain variable domain of TCR clone 205073 (TRBV19, TRBJ2-2)
CATTGHANTGALFF

SEQ ID NO: 410147 - protein, 16 aa, Homo sapiens
  CDR3 for alpha chain variable domain of TCR clone 205074 (TRAV12-3, TRAJ53)
CAMSPGSGGRNYKLTF

SEQ ID NO: 410148 - protein, 16 aa, Homo sapiens
  CDR3 for beta chain variable domain of TCR clone 205074 (TRBV4-2, TRBJ1-1)
CASSQAGFGMNTDAFF

SEQ ID NO: 410149 - protein, 14 aa, Homo sapiens
  CDR3 for alpha chain variable domain of TCR clone 205075 (TRAV12-2, TRAJ17)
CAVLFKAAGNKLTF

SEQ ID NO: 410150 - protein, 15 aa, Homo sapiens
  CDR3 for beta chain variable domain of TCR clone 205075 (TRBV15, TRBJ1-4)
CATSRDMGSYEKLFF

SEQ ID NO: 410151 - protein, 11 aa, Homo sapiens
  CDR3 for alpha chain variable domain of TCR clone 205076 (TRAV2, TRAJ13)
CASGGYQKVTF

SEQ ID NO: 410152 - protein, 12 aa, Homo sapiens
  CDR3 for beta chain variable domain of TCR clone 205076 (TRBV4-1, TRBJ2-5)
CASSQPLGTQYF

SEQ ID NO: 410153 - protein, 14 aa, Homo sapiens
  CDR3 for alpha chain variable domain of TCR clone 205077 (TRAV26-1, TRAJ38)
CIADNAGNKRKLIW

SEQ ID NO: 410154 - protein, 15 aa, Homo sapiens
  CDR3 for beta chain variable domain of TCR clone 205077 (TRBV20-1, TRBJ2-7)
CSARDRVSGMDEHYF

SEQ ID NO: 410155 - protein, 17 aa, Homo sapiens
  CDR3 for alpha chain variable domain of TCR clone 205078 (TRAV3, TRAJ6)
CAVRDGHRAGGSYIPTF

SEQ ID NO: 410156 - protein, 18 aa, Homo sapiens
  CDR3 for beta chain variable domain of TCR clone 205078 (TRBV7-9, TRBJ2-7)
CASSLTTSGSRTWYEQYF

SEQ ID NO: 410157 - protein, 21 aa, Homo sapiens
  CDR3 for alpha chain variable domain of TCR clone 205079 (TRAV8-3, TRAJ32)
CAVEVVLQTSSSLELALCLLL

SEQ ID NO: 410158 - protein, 12 aa, Homo sapiens
  CDR3 for beta chain variable domain of TCR clone 205079 (TRBV7-8, TRBJ2-7)
CASSLGDREQYF

SEQ ID NO: 410159 - protein, 14 aa, Homo sapiens
  CDR3 for alpha chain variable domain of TCR clone 205080 (TRAV12-3, TRAJ10)
SHLPLTGGGNKLTF

SEQ ID NO: 410160 - protein, 16 aa, Homo sapiens
  CDR3 for beta chain variable domain of TCR clone 205080 (TRBV5-1, TRBJ2-2)
CASSSRTGGRTGELFF

SEQ ID NO: 410161 - protein, 16 aa, Homo sapiens
  CDR3 for alpha chain variable domain of TCR clone 205081 (TRAV3, TRAJ37)
CAVRPHGSGNTGKLIS

SEQ ID NO: 410162 - protein, 15 aa, Homo sapiens
  CDR3 for beta chain variable domain of TCR clone 205081 (TRBV20-1, TRBJ2-7)
CSARDRVSGMDEQYF

SEQ ID NO: 410163 - protein, 11 aa, Homo sapiens
  CDR3 for alpha chain variable domain of TCR clone 205082 (TRAV12-3, TRAJ27)
CALAIAGKSTF

SEQ ID NO: 410164 - protein, 13 aa, Homo sapiens
  CDR3 for beta chain variable domain of TCR clone 205082 (TRBV20-1, TRBJ1-1)
CSARVGGNTEAFF

SEQ ID NO: 410165 - protein, 17 aa, Homo sapiens
  CDR3 for alpha chain variable domain of TCR clone 205083 (TRAV3, TRAJ38)
CAVRDCLIAGNNRKLIW

SEQ ID NO: 410166 - protein, 14 aa, Homo sapiens
  CDR3 for beta chain variable domain of TCR clone 205083 (TRBV5-5, TRBJ1-5)
CASSGQGVDQPQHF

SEQ ID NO: 410167 - protein, 15 aa, Homo sapiens
  CDR3 for alpha chain variable domain of TCR clone 205084 (TRAV16, TRAJ18)
CSLGAQRLTLGRLYF

SEQ ID NO: 410168 - protein, 15 aa, Homo sapiens
  CDR3 for beta chain variable domain of TCR clone 205084 (TRBV27, TRBJ2-1)
CASSNGGGSSNEQFF

SEQ ID NO: 410169 - protein, 23 aa, Homo sapiens
  CDR3 for alpha chain variable domain of TCR clone 205085 (TRAV30, TRAJ43)
CTLRPPSSVTQEPTSAALSDMRF

SEQ ID NO: 410170 - protein, 15 aa, Homo sapiens
  CDR3 for beta chain variable domain of TCR clone 205085 (TRBV5-1, TRBJ2-3)
CASSVTSGSTDTQYF

SEQ ID NO: 410171 - protein, 16 aa, Homo sapiens
  CDR3 for alpha chain variable domain of TCR clone 205086 (TRAV1-2, TRAJ10)
CAVRAVLTGGGNKLTF

SEQ ID NO: 410172 - protein, 16 aa, Homo sapiens
  CDR3 for beta chain variable domain of TCR clone 205086 (TRBV24-1, TRBJ2-3)
CATSDAISGITDTQYF

SEQ ID NO: 410173 - protein, 17 aa, Homo sapiens
  CDR3 for alpha chain variable domain of TCR clone 205087 (TRAV26-1, TRAJ37)
CIVRVITVSSSTGKLIF

SEQ ID NO: 410174 - protein, 14 aa, Homo sapiens
  CDR3 for beta chain variable domain of TCR clone 205087 (TRBV7-7, TRBJ2-2)
CATRQDSDTGELFF

SEQ ID NO: 410175 - protein, 14 aa, Homo sapiens
  CDR3 for alpha chain variable domain of TCR clone 205088 (TRAV9-2, TRAJ39)
CALYIYNAGNMLTF

SEQ ID NO: 410176 - protein, 17 aa, Homo sapiens
  CDR3 for beta chain variable domain of TCR clone 205088 (TRBV20-1, TRBJ2-7)
CSAAPGLARGISYEQYF

SEQ ID NO: 410177 - protein, 14 aa, Homo sapiens
  CDR3 for alpha chain variable domain of TCR clone 205089 (TRAV20, TRAJ44)
CAVQDTGPASKLTF

SEQ ID NO: 410178 - protein, 13 aa, Homo sapiens
  CDR3 for beta chain variable domain of TCR clone 205089 (TRBV29-1, TRBJ1-3)
CSAGTGRGNTMYF

SEQ ID NO: 410179 - protein, 13 aa, Homo sapiens
  CDR3 for alpha chain variable domain of TCR clone 205090 (TRAV38-1, TRAJ20)
CAFMRDNDYKLSF

SEQ ID NO: 410180 - protein, 12 aa, Homo sapiens
  CDR3 for beta chain variable domain of TCR clone 205090 (TRBV18, TRBJ2-5)
CDSSPSKETQYF

SEQ ID NO: 410181 - protein, 14 aa, Homo sapiens
  CDR3 for alpha chain variable domain of TCR clone 205091 (TRAV8-6, TRAJ52)
CAVIGGTSYGKLTF

SEQ ID NO: 410182 - protein, 16 aa, Homo sapiens
  CDR3 for beta chain variable domain of TCR clone 205091 (TRBV5-4, TRBJ2-3)
CASQQPGAGGADTQYF

SEQ ID NO: 410183 - protein, 12 aa, Homo sapiens
  CDR3 for alpha chain variable domain of TCR clone 205092 (TRAV25, TRAJ31)
CAGHLNNARLMF

SEQ ID NO: 410184 - protein, 16 aa, Homo sapiens
  CDR3 for beta chain variable domain of TCR clone 205092 (TRBV10-3, TRBJ2-1)
CAIRGGGRGDYNEKFF

SEQ ID NO: 410185 - protein, 14 aa, Homo sapiens
  CDR3 for alpha chain variable domain of TCR clone 205093 (TRAV12-2, TRAJ17)
CAALFKAAGNKLTF

SEQ ID NO: 410186 - protein, 14 aa, Homo sapiens
  CDR3 for beta chain variable domain of TCR clone 205093 (TRBV7-3, TRBJ1-1)
CASSLKGGNTEAFF

SEQ ID NO: 410187 - protein, 12 aa, Homo sapiens
  CDR3 for alpha chain variable domain of TCR clone 205094 (TRAV25, TRAJ11)
CAGYSGYSTLTL

SEQ ID NO: 410188 - protein, 18 aa, Homo sapiens
  CDR3 for beta chain variable domain of TCR clone 205094 (TRBV5-4, TRBJ2-3)
CASSPTAGFLPSTDTQYF

SEQ ID NO: 410189 - protein, 15 aa, Homo sapiens
  CDR3 for alpha chain variable domain of TCR clone 205095 (TRAV8-1, TRAJ6)
CAVNTPPGGSYIPTF

SEQ ID NO: 410190 - protein, 12 aa, Homo sapiens
  CDR3 for beta chain variable domain of TCR clone 205095 (TRBV7-3, TRBJ2-5)
CASSSPGGTQYF

SEQ ID NO: 410191 - protein, 16 aa, Homo sapiens
  CDR3 for alpha chain variable domain of TCR clone 205096 (TRAV12-2, TRAJ28)
CAVITDSGAWSYQLTF

SEQ ID NO: 410192 - protein, 14 aa, Homo sapiens
  CDR3 for beta chain variable domain of TCR clone 205096 (TRBV7-2, TRBJ2-7)
CASRSQGAAYEQYF

SEQ ID NO: 410193 - protein, 13 aa, Homo sapiens
  CDR3 for alpha chain variable domain of TCR clone 205097 (TRAV12-3, TRAJ33)
CAMSVNSNSQFFW

SEQ ID NO: 410194 - protein, 13 aa, Homo sapiens
  CDR3 for beta chain variable domain of TCR clone 205097 (TRBV7-2, TRBJ2-2)
CASSLAVTGELFF

SEQ ID NO: 410195 - protein, 16 aa, Homo sapiens
  CDR3 for alpha chain variable domain of TCR clone 205098 (TRAV17, TRAJ28)
CATASVSGAGSYQLTF

SEQ ID NO: 410196 - protein, 11 aa, Homo sapiens
  CDR3 for beta chain variable domain of TCR clone 205098 (TRBV7-9, TRBJ2-5)
CASSLGETKYF

SEQ ID NO: 410197 - protein, 15 aa, Homo sapiens
  CDR3 for alpha chain variable domain of TCR clone 205099 (TRAV3, TRAJ20)
CAVRDSRSNDYKLSF

SEQ ID NO: 410198 - protein, 12 aa, Homo sapiens
  CDR3 for beta chain variable domain of TCR clone 205099 (TRBV7-8, TRBJ2-7)
CASSLGDREQYF

SEQ ID NO: 410199 - protein, 20 aa, Homo sapiens
  CDR3 for alpha chain variable domain of TCR clone 205100 (TRAV8-3, TRAJ45)
LSTSVLWGSYSGGGADGLTF

SEQ ID NO: 410200 - protein, 14 aa, Homo sapiens
  CDR3 for beta chain variable domain of TCR clone 205100 (TRBV7-9, TRBJ1-2)
CASSRQGANYGYTF

SEQ ID NO: 410201 - protein, 13 aa, Homo sapiens
  CDR3 for alpha chain variable domain of TCR clone 205101 (TRAV8-3, TRAJ28)
CAVGAVGSYQLTF

SEQ ID NO: 410202 - protein, 16 aa, Homo sapiens
  CDR3 for beta chain variable domain of TCR clone 205101 (TRBV7-2, TRBJ1-4)
CASSPVGRFDREKLFF

SEQ ID NO: 410203 - protein, 17 aa, Homo sapiens
  CDR3 for alpha chain variable domain of TCR clone 205102 (TRAV3, TRAJ38)
CAVRDCLNAGNNHKLIW

SEQ ID NO: 410204 - protein, 14 aa, Homo sapiens
  CDR3 for beta chain variable domain of TCR clone 205102 (TRBV5-5, TRBJ1-5)
CASSGQGVDQPQHF

SEQ ID NO: 410205 - protein, 17 aa, Homo sapiens
  CDR3 for alpha chain variable domain of TCR clone 205103 (TRAV13-1, TRAJ10)
CAASIWRGTGGGNKLTF

SEQ ID NO: 410206 - protein, 13 aa, Homo sapiens
  CDR3 for beta chain variable domain of TCR clone 205103 (TRBV20-1, TRBJ1-1)
CSARRVGNTEAFF

SEQ ID NO: 410207 - protein, 19 aa, Homo sapiens
  CDR3 for alpha chain variable domain of TCR clone 205104 (TRAV3, TRAJ6)
CAVRDRNPSRSGGSYIPTF

SEQ ID NO: 410208 - protein, 14 aa, Homo sapiens
  CDR3 for beta chain variable domain of TCR clone 205104 (TRBV19, TRBJ1-5)
CASGTEVYNQPQHF

SEQ ID NO: 410209 - protein, 17 aa, Homo sapiens
  CDR3 for alpha chain variable domain of TCR clone 205105 (TRAV14/DV4, TRAJ3)
CAMRVGPEYSSASMIIF

SEQ ID NO: 410210 - protein, 17 aa, Homo sapiens
  CDR3 for beta chain variable domain of TCR clone 205105 (TRBV20-1, TRBJ1-5)
CSARVGGERQGNQPQHF

SEQ ID NO: 410211 - protein, 12 aa, Homo sapiens
  CDR3 for alpha chain variable domain of TCR clone 205106 (TRAV12-3, TRAJ32)
CAMGGATNKLIF

SEQ ID NO: 410212 - protein, 18 aa, Homo sapiens
  CDR3 for beta chain variable domain of TCR clone 205106 (TRBV11-2, TRBJ2-3)
CASSLGGASRGAPNTQYF

SEQ ID NO: 410213 - protein, 11 aa, Homo sapiens
  CDR3 for alpha chain variable domain of TCR clone 205107 (TRAV1-1, TRAJ23)
CAVRQGGKLIF

SEQ ID NO: 410214 - protein, 20 aa, Homo sapiens
  CDR3 for beta chain variable domain of TCR clone 205107 (TRBV7-8, TRBJ2-2)
RASNHLFPGPTIHITGELFF

SEQ ID NO: 410215 - protein, 13 aa, Homo sapiens
  CDR3 for alpha chain variable domain of TCR clone 205108 (TRAV2, TRAJ40)
CAVVTSGTYKYIF

SEQ ID NO: 410216 - protein, 16 aa, Homo sapiens
  CDR3 for beta chain variable domain of TCR clone 205108 (TRBV7-2, TRBJ1-2)
CASSSNQDRRGHGYTL

SEQ ID NO: 410217 - protein, 14 aa, Homo sapiens
  CDR3 for alpha chain variable domain of TCR clone 205109 (TRAV2, TRAJ42)
CAVVGGGSQGNLIF

SEQ ID NO: 410218 - protein, 14 aa, Homo sapiens
  CDR3 for beta chain variable domain of TCR clone 205109 (TRBV20-1, TRBJ2-1)
CSAQIGGSANEQFF

SEQ ID NO: 410219 - protein, 13 aa, Homo sapiens
  CDR3 for alpha chain variable domain of TCR clone 205110 (TRAV20, TRAJ35)
GAVQEGFGNVLHC

SEQ ID NO: 410220 - protein, 14 aa, Homo sapiens
  CDR3 for beta chain variable domain of TCR clone 205110 (TRBV5-1, TRBJ1-1)
CASSSATGGTEAFF

SEQ ID NO: 410221 - protein, 15 aa, Homo sapiens
  CDR3 for alpha chain variable domain of TCR clone 205111 (TRAV3, TRAJ29)
CAVRDINSGNTSLVF

SEQ ID NO: 410222 - protein, 16 aa, Homo sapiens
  CDR3 for beta chain variable domain of TCR clone 205111 (TRBV4-1, TRBJ2-5)
CASSQTFYGDQETQYF

SEQ ID NO: 410223 - protein, 16 aa, Homo sapiens
  CDR3 for alpha chain variable domain of TCR clone 205112 (TRAV21, TRAJ37)
CAVRPRGSRNTGKLIF

SEQ ID NO: 410224 - protein, 15 aa, Homo sapiens
  CDR3 for beta chain variable domain of TCR clone 205112 (TRBV2, TRBJ2-7)
CASSEGLARSYEQYF

SEQ ID NO: 410225 - protein, 12 aa, Homo sapiens
  CDR3 for alpha chain variable domain of TCR clone 205113 (TRAV13-1, TRAJ34)
CAASKGTDKLIF

SEQ ID NO: 410226 - protein, 15 aa, Homo sapiens
  CDR3 for beta chain variable domain of TCR clone 205113 (TRBV7-9, TRBJ1-4)
CASSARTGGNEKLFF

SEQ ID NO: 410227 - protein, 10 aa, Homo sapiens
  CDR3 for alpha chain variable domain of TCR clone 205114 (TRAV12-3, TRAJ30)
CALPEDKIIF

SEQ ID NO: 410228 - protein, 16 aa, Homo sapiens
  CDR3 for beta chain variable domain of TCR clone 205114 (TRBV7-2, TRBJ2-7)
CASSLAGLAGTYEQYF

SEQ ID NO: 410229 - protein, 13 aa, Homo sapiens
  CDR3 for alpha chain variable domain of TCR clone 205115 (TRAV8-4, TRAJ44)
CAVCTGTASKLTF

SEQ ID NO: 410230 - protein, 14 aa, Homo sapiens
  CDR3 for beta chain variable domain of TCR clone 205115 (TRBV7-2, TRBJ2-2)
CASRGQGAAGELFF

SEQ ID NO: 410231 - protein, 14 aa, Homo sapiens
  CDR3 for alpha chain variable domain of TCR clone 205116 (TRAV1-1, TRAJ8)
CAVVTNTGFQKLVF

SEQ ID NO: 410232 - protein, 14 aa, Homo sapiens
  CDR3 for beta chain variable domain of TCR clone 205116 (TRBV7-2, TRBJ2-7)
CASRSQGAAYEQYF

SEQ ID NO: 410233 - protein, 14 aa, Homo sapiens
  CDR3 for alpha chain variable domain of TCR clone 205117 (TRAV1-2, TRAJ8)
CAVREVTGFQKLVF

SEQ ID NO: 410234 - protein, 13 aa, Homo sapiens
  CDR3 for beta chain variable domain of TCR clone 205117 (TRBV12-5, TRBJ2-3)
CASGDRQSDTQYF

SEQ ID NO: 410235 - protein, 12 aa, Homo sapiens
  CDR3 for alpha chain variable domain of TCR clone 205118 (TRAV13-1, TRAJ21)
CAAKEGLNKFYF

SEQ ID NO: 410236 - protein, 15 aa, Homo sapiens
  CDR3 for beta chain variable domain of TCR clone 205118 (TRBV7-9, TRBJ1-5)
CASSQGHQPNQPQHF

SEQ ID NO: 410237 - protein, 11 aa, Homo sapiens
  CDR3 for alpha chain variable domain of TCR clone 205119 (TRAV8-6, TRAJ33)
CAVDSKYQLIW

SEQ ID NO: 410238 - protein, 14 aa, Homo sapiens
  CDR3 for beta chain variable domain of TCR clone 205119 (TRBV11-2, TRBJ2-3)
CASSRLARTDTQYF

SEQ ID NO: 410239 - protein, 15 aa, Homo sapiens
  CDR3 for alpha chain variable domain of TCR clone 205120 (TRAV2, TRAJ44)
CAVEAYTGTASKLTF

SEQ ID NO: 410240 - protein, 12 aa, Homo sapiens
  CDR3 for beta chain variable domain of TCR clone 205120 (TRBV12-5, TRBJ2-5)
CASGQGVETQYF

SEQ ID NO: 410241 - protein, 16 aa, Homo sapiens
  CDR3 for alpha chain variable domain of TCR clone 205121 (TRAV2, TRAJ4)
CAVEDRFSGGYNKLIF

SEQ ID NO: 410242 - protein, 16 aa, Homo sapiens
  CDR3 for beta chain variable domain of TCR clone 205121 (TRBV12-5, TRBJ2-5)
CASGPRTSGNQETQYF

SEQ ID NO: 410243 - protein, 16 aa, Homo sapiens
  CDR3 for alpha chain variable domain of TCR clone 205122 (TRAV12-1, TRAJ13)
CVVNLEVSGGYQTVTF

SEQ ID NO: 410244 - protein, 16 aa, Homo sapiens
  CDR3 for beta chain variable domain of TCR clone 205122 (TRBV24-1, TRBJ2-6)
CATSDRRAPGANVLTF

SEQ ID NO: 410245 - protein, 13 aa, Homo sapiens
  CDR3 for alpha chain variable domain of TCR clone 205123 (TRAV21, TRAJ45)
CAVMGGGADGLTF

SEQ ID NO: 410246 - protein, 15 aa, Homo sapiens
  CDR3 for beta chain variable domain of TCR clone 205123 (TRBV20-1, TRBJ2-1)
SARDHLAGGRGEQFF

SEQ ID NO: 410247 - protein, 12 aa, Homo sapiens
  CDR3 for alpha chain variable domain of TCR clone 205124 (TRAV21, TRAJ33)
CAKMDSNYQLIW

SEQ ID NO: 410248 - protein, 15 aa, Homo sapiens
  CDR3 for beta chain variable domain of TCR clone 205124 (TRBV9, TRBJ1-6)
CASSVAGTGDSTLHF

SEQ ID NO: 410249 - protein, 14 aa, Homo sapiens
  CDR3 for alpha chain variable domain of TCR clone 205125 (TRAV12-3, TRAJ10)
SHLPLPGGGNKLTF

SEQ ID NO: 410250 - protein, 13 aa, Homo sapiens
  CDR3 for beta chain variable domain of TCR clone 205125 (TRBV7-6, TRBJ2-3)
CASSLAVGDTQYF

SEQ ID NO: 410251 - protein, 12 aa, Homo sapiens
  CDR3 for alpha chain variable domain of TCR clone 205126 (TRAV1-1, TRAJ39)
CAVPVVGNMLTF

SEQ ID NO: 410252 - protein, 15 aa, Homo sapiens
  CDR3 for beta chain variable domain of TCR clone 205126 (TRBV19, TRBJ1-6)
CASSTQGAVGSPLRF

SEQ ID NO: 410253 - protein, 15 aa, Homo sapiens
  CDR3 for alpha chain variable domain of TCR clone 205127 (TRAV23/DV6, TRAJ10)
CAASRLLYSREEVTN

SEQ ID NO: 410254 - protein, 15 aa, Homo sapiens
  CDR3 for beta chain variable domain of TCR clone 205127 (TRBV20-1, TRBJ2-1)
CSAEGGLLAGDEQFF

SEQ ID NO: 410255 - protein, 14 aa, Homo sapiens
  CDR3 for alpha chain variable domain of TCR clone 205128 (TRAV1-2, TRAJ16)
CAVNRFSDGQKLLF

SEQ ID NO: 410256 - protein, 15 aa, Homo sapiens
  CDR3 for beta chain variable domain of TCR clone 205128 (TRBV27, TRBJ2-1)
CASSNGGGFSNEQFF

SEQ ID NO: 410257 - protein, 14 aa, Homo sapiens
  CDR3 for alpha chain variable domain of TCR clone 205129 (TRAV1-2, TRAJ16)
CAVNRFSDCQKLLF

SEQ ID NO: 410258 - protein, 15 aa, Homo sapiens
  CDR3 for beta chain variable domain of TCR clone 205129 (TRBV20-1, TRBJ1-5)
CSAFKNGQRNQPQHF

SEQ ID NO: 410259 - protein, 10 aa, Homo sapiens
  CDR3 for alpha chain variable domain of TCR clone 205130 (TRAV23/DV6, TRAJ57)
CAASSTLSQG

SEQ ID NO: 410260 - protein, 12 aa, Homo sapiens
  CDR3 for beta chain variable domain of TCR clone 205130 (TRBV11-2, TRBJ2-2)
CASSLGGGGLFF

SEQ ID NO: 410261 - protein, 12 aa, Homo sapiens
  CDR3 for alpha chain variable domain of TCR clone 205131 (TRAV25, TRAJ29)
CAGPRGNTPLVF

SEQ ID NO: 410262 - protein, 15 aa, Homo sapiens
  CDR3 for beta chain variable domain of TCR clone 205131 (TRBV9, TRBJ1-6)
CASSVSGTGDSPLHF

SEQ ID NO: 410263 - protein, 15 aa, Homo sapiens
  CDR3 for alpha chain variable domain of TCR clone 205132 (TRAV25, TRAJ53)
CAATGGGGSNYKLTF

SEQ ID NO: 410264 - protein, 13 aa, Homo sapiens
  CDR3 for beta chain variable domain of TCR clone 205132 (TRBV2, TRBJ1-1)
CASSEGGNTEAFF

SEQ ID NO: 410265 - protein, 14 aa, Homo sapiens
  CDR3 for alpha chain variable domain of TCR clone 205133 (TRAV1-2, TRAJ12)
CAVSGTDSSYKFIF

SEQ ID NO: 410266 - protein, 15 aa, Homo sapiens
  CDR3 for beta chain variable domain of TCR clone 205133 (TRBV2, TRBJ2-4)
CASSGTNLAKNIQYF

SEQ ID NO: 410267 - protein, 12 aa, Homo sapiens
  CDR3 for alpha chain variable domain of TCR clone 205134 (TRAV26-1, TRAJ17)
CISQSCRQQANF

SEQ ID NO: 410268 - protein, 16 aa, Homo sapiens
  CDR3 for beta chain variable domain of TCR clone 205134 (TRBV28, TRBJ1-4)
CTSSSRTGAANEKLFF

SEQ ID NO: 410269 - protein, 12 aa, Homo sapiens
  CDR3 for alpha chain variable domain of TCR clone 205135 (TRAV13-1, TRAJ53)
AASGGSNYKLTF

SEQ ID NO: 410270 - protein, 12 aa, Homo sapiens
  CDR3 for beta chain variable domain of TCR clone 205135 (TRBV5-1, TRBJ1-2)
CASSWDRDGYTF

SEQ ID NO: 410271 - protein, 11 aa, Homo sapiens
  CDR3 for alpha chain variable domain of TCR clone 205136 (TRAV1-2, TRAJ31)
CAVKKNARLMF

SEQ ID NO: 410272 - protein, 12 aa, Homo sapiens
  CDR3 for beta chain variable domain of TCR clone 205136 (TRBV20-1, TRBJ2-5)
CSAPRSQETQYF

SEQ ID NO: 410273 - protein, 11 aa, Homo sapiens
  CDR3 for alpha chain variable domain of TCR clone 205137 (TRAV1-1, TRAJ23)
CVVRQGGKLTF

SEQ ID NO: 410274 - protein, 20 aa, Homo sapiens
  CDR3 for beta chain variable domain of TCR clone 205137 (TRBV7-8, TRBJ2-2)
CASSHLFPGPTIHITGELFF

SEQ ID NO: 410275 - protein, 14 aa, Homo sapiens
  CDR3 for alpha chain variable domain of TCR clone 205138 (TRAV34, TRAJ22)
CGADTSGSARQLTF

SEQ ID NO: 410276 - protein, 14 aa, Homo sapiens
  CDR3 for beta chain variable domain of TCR clone 205138 (TRBV13, TRBJ2-7)
CASSLKGASYEQYF

SEQ ID NO: 410277 - protein, 13 aa, Homo sapiens
  CDR3 for alpha chain variable domain of TCR clone 205139 (TRAV16, TRAJ10)
CALLPGGGNKLTF

SEQ ID NO: 410278 - protein, 12 aa, Homo sapiens
  CDR3 for beta chain variable domain of TCR clone 205139 (TRBV28, TRBJ2-7)
CASTGNHYEQYF

SEQ ID NO: 410279 - protein, 15 aa, Homo sapiens
  CDR3 for alpha chain variable domain of TCR clone 205140 (TRAV17, TRAJ4)
CATGTWSGGYNKLIF

SEQ ID NO: 410280 - protein, 16 aa, Homo sapiens
  CDR3 for beta chain variable domain of TCR clone 205140 (TRBV19, TRBJ1-5)
CASRPGTGGRNQPQHF

SEQ ID NO: 410281 - protein, 16 aa, Homo sapiens
  CDR3 for alpha chain variable domain of TCR clone 205141 (TRAV17, TRAJ53)
CATDALSGGSNYKLTF

SEQ ID NO: 410282 - protein, 16 aa, Homo sapiens
  CDR3 for beta chain variable domain of TCR clone 205141 (TRBV4-1, TRBJ1-5)
CASSQGGHTTNQPQHF

SEQ ID NO: 410283 - protein, 14 aa, Homo sapiens
  CDR3 for alpha chain variable domain of TCR clone 205142 (TRAV1-2, TRAJ8)
CAVREDTGFEKLVF

SEQ ID NO: 410284 - protein, 12 aa, Homo sapiens
  CDR3 for beta chain variable domain of TCR clone 205142 (TRBV14, TRBJ2-5)
CASSQLKETQYF

SEQ ID NO: 410285 - protein, 14 aa, Homo sapiens
  CDR3 for alpha chain variable domain of TCR clone 205143 (TRAV26-1, TRAJ38)
CIADNAGNNRKLIW

SEQ ID NO: 410286 - protein, 16 aa, Homo sapiens
  CDR3 for beta chain variable domain of TCR clone 205143 (TRBV19, TRBJ2-1)
CASSKAGPSSYNEQFS

SEQ ID NO: 410287 - protein, 12 aa, Homo sapiens
  CDR3 for alpha chain variable domain of TCR clone 205144 (TRAV17, TRAJ43)
CATDALPADMRF

SEQ ID NO: 410288 - protein, 14 aa, Homo sapiens
  CDR3 for beta chain variable domain of TCR clone 205144 (TRBV20-1, TRBJ2-3)
CSARDGGSTDTQYF

SEQ ID NO: 410289 - protein, 13 aa, Homo sapiens
  CDR3 for alpha chain variable domain of TCR clone 205145 (TRAV8-3, TRAJ48)
CAVVPFGNEKLTF

SEQ ID NO: 410290 - protein, 13 aa, Homo sapiens
  CDR3 for beta chain variable domain of TCR clone 205145 (TRBV11-2, TRBJ2-1)
CASSLGLAGGRFF

SEQ ID NO: 410291 - protein, 13 aa, Homo sapiens
  CDR3 for alpha chain variable domain of TCR clone 205146 (TRAV8-6, TRAJ21)
CAVSPSSLNKFYF

SEQ ID NO: 410292 - protein, 14 aa, Homo sapiens
  CDR3 for beta chain variable domain of TCR clone 205146 (TRBV7-9, TRBJ2-5)
CASSLATAQETQHF

SEQ ID NO: 410293 - protein, 14 aa, Homo sapiens
  CDR3 for alpha chain variable domain of TCR clone 205147 (TRAV12-3, TRAJ10)
SHLPLTGGGNKLTF

SEQ ID NO: 410294 - protein, 12 aa, Homo sapiens
  CDR3 for beta chain variable domain of TCR clone 205147 (TRBV7-3, TRBJ2-5)
CASSSPGGTQNF

SEQ ID NO: 410295 - protein, 13 aa, Homo sapiens
  CDR3 for alpha chain variable domain of TCR clone 205148 (TRAV13-1, TRAJ27)
CSASTHQCRQINL

SEQ ID NO: 410296 - protein, 16 aa, Homo sapiens
  CDR3 for beta chain variable domain of TCR clone 205148 (TRBV27, TRBJ2-2)
CASSFRGLVRTGELFF

SEQ ID NO: 410297 - protein, 13 aa, Homo sapiens
  CDR3 for alpha chain variable domain of TCR clone 205149 (TRAV27, TRAJ41)
CAGEGNSGYALNF

SEQ ID NO: 410298 - protein, 11 aa, Homo sapiens
  CDR3 for beta chain variable domain of TCR clone 205149 (TRBV6-3, TRBJ2-3)
CATGQADTQYF

SEQ ID NO: 410299 - protein, 14 aa, Homo sapiens
  CDR3 for alpha chain variable domain of TCR clone 205150 (TRAV8-4, TRAJ9)
CAVRINTGGFKTIF

SEQ ID NO: 410300 - protein, 13 aa, Homo sapiens
  CDR3 for beta chain variable domain of TCR clone 205150 (TRBV7-2, TRBJ2-7)
CASSSPSGSEQYF

SEQ ID NO: 410301 - protein, 14 aa, Homo sapiens
  CDR3 for alpha chain variable domain of TCR clone 205151 (TRAV26-1, TRAJ38)
CIADNAGNNRKLIW

SEQ ID NO: 410302 - protein, 17 aa, Homo sapiens
  CDR3 for beta chain variable domain of TCR clone 205151 (TRBV20-1, TRBJ1-5)
CSASLSPGQGGNQPQHF

SEQ ID NO: 410303 - protein, 11 aa, Homo sapiens
  CDR3 for alpha chain variable domain of TCR clone 205152 (TRAV17, TRAJ54)
CATDANREPRS

SEQ ID NO: 410304 - protein, 14 aa, Homo sapiens
  CDR3 for beta chain variable domain of TCR clone 205152 (TRBV25-1, TRBJ1-1)
CASTHLGGNTEAFF

SEQ ID NO: 410305 - protein, 16 aa, Homo sapiens
  CDR3 for alpha chain variable domain of TCR clone 205153 (TRAV3, TRAJ37)
CAVRGKGSGNTGKLIF

SEQ ID NO: 410306 - protein, 15 aa, Homo sapiens
  CDR3 for beta chain variable domain of TCR clone 205153 (TRBV7-3, TRBJ2-2)
GASSETGQGTGELFF

SEQ ID NO: 410307 - protein, 23 aa, Homo sapiens
  CDR3 for alpha chain variable domain of TCR clone 205154 (TRAV26-1, TRAJ38)
CIVRPLNAGNNHIQNPDPAVYQL

SEQ ID NO: 410308 - protein, 13 aa, Homo sapiens
  CDR3 for beta chain variable domain of TCR clone 205154 (TRBV18, TRBJ1-1)
CASSPNGVTEAFF

SEQ ID NO: 410309 - protein, 14 aa, Homo sapiens
  CDR3 for alpha chain variable domain of TCR clone 205155 (TRAV26-1, TRAJ49)
CIVRLTNTGNHFYF

SEQ ID NO: 410310 - protein, 13 aa, Homo sapiens
  CDR3 for beta chain variable domain of TCR clone 205155 (TRBV4-1, TRBJ2-7)
CASSQGQAYEQYF

SEQ ID NO: 410311 - protein, 20 aa, Homo sapiens
  CDR3 for alpha chain variable domain of TCR clone 205156 (TRAV4, TRAJ29)
CCVLLPRGCVPFSGNTPLVF

SEQ ID NO: 410312 - protein, 17 aa, Homo sapiens
  CDR3 for beta chain variable domain of TCR clone 205156 (TRBV25-1, TRBJ2-7)
CASSDTRVVFSSYEQYF

SEQ ID NO: 410313 - protein, 13 aa, Homo sapiens
  CDR3 for alpha chain variable domain of TCR clone 205157 (TRAV22, TRAJ48)
CAVERFGNEKLTF

SEQ ID NO: 410314 - protein, 13 aa, Homo sapiens
  CDR3 for beta chain variable domain of TCR clone 205157 (TRBV20-1, TRBJ2-5)
CSARGDYQATQYF

SEQ ID NO: 410315 - protein, 15 aa, Homo sapiens
  CDR3 for alpha chain variable domain of TCR clone 205158 (TRAV27, TRAJ38)
CAARRNAGNNRKLIW

SEQ ID NO: 410316 - protein, 13 aa, Homo sapiens
  CDR3 for beta chain variable domain of TCR clone 205158 (TRBV12-5, TRBJ2-3)
CASGDRQSDTEYF

SEQ ID NO: 410317 - protein, 15 aa, Homo sapiens
  CDR3 for alpha chain variable domain of TCR clone 205159 (TRAV26-1, TRAJ29)
CIVRVEGSGNTPLVF

SEQ ID NO: 410318 - protein, 15 aa, Homo sapiens
  CDR3 for beta chain variable domain of TCR clone 205159 (TRBV7-2, TRBJ2-1)
CASSLASGRVNEQFF

SEQ ID NO: 410319 - protein, 19 aa, Homo sapiens
  CDR3 for alpha chain variable domain of TCR clone 205160 (TRAV38-2/DV8, TRAJ42)
CAYRSAGMNYGGSQGNLIL

SEQ ID NO: 410320 - protein, 13 aa, Homo sapiens
  CDR3 for beta chain variable domain of TCR clone 205160 (TRBV18, TRBJ2-7)
CASSRSGSYEQYF

SEQ ID NO: 410321 - protein, 14 aa, Homo sapiens
  CDR3 for alpha chain variable domain of TCR clone 205161 (TRAV3, TRAJ33)
CAVRDMDSNYQLIW

SEQ ID NO: 410322 - protein, 19 aa, Homo sapiens
  CDR3 for beta chain variable domain of TCR clone 205161 (TRBV7-3, TRBJ1-2)
CARSFPQGNDGELWLHLRF

SEQ ID NO: 410323 - protein, 11 aa, Homo sapiens
  CDR3 for alpha chain variable domain of TCR clone 205162 (TRAV2, TRAJ20)
CAVADDYKLSF

SEQ ID NO: 410324 - protein, 13 aa, Homo sapiens
  CDR3 for beta chain variable domain of TCR clone 205162 (TRBV2, TRBJ2-7)
CASSVGGSGEQYF

SEQ ID NO: 410325 - protein, 11 aa, Homo sapiens
  CDR3 for alpha chain variable domain of TCR clone 205163 (TRAV12-1, TRAJ43)
CVEYDNNDMRF

SEQ ID NO: 410326 - protein, 16 aa, Homo sapiens
  CDR3 for beta chain variable domain of TCR clone 205163 (TRBV5-4, TRBJ2-1)
CASSVVGSGQDNEQFF

SEQ ID NO: 410327 - protein, 16 aa, Homo sapiens
  CDR3 for alpha chain variable domain of TCR clone 205164 (TRAV30, TRAJ24)
CGTEIVDADSWGKFQF

SEQ ID NO: 410328 - protein, 15 aa, Homo sapiens
  CDR3 for beta chain variable domain of TCR clone 205164 (TRBV6-3, TRBJ2-7)
CACSSPGTVFYEQYF

SEQ ID NO: 410329 - protein, 15 aa, Homo sapiens
  CDR3 for alpha chain variable domain of TCR clone 205165 (TRAV1-2, TRAJ28)
CAVQYSGAGSYQLTF

SEQ ID NO: 410330 - protein, 15 aa, Homo sapiens
  CDR3 for beta chain variable domain of TCR clone 205165 (TRBV9, TRBJ1-6)
CASSVAGTGDSTLHF

SEQ ID NO: 410331 - protein, 16 aa, Homo sapiens
  CDR3 for alpha chain variable domain of TCR clone 205166 (TRAV3, TRAJ37)
CAVRGKGTGNTGKLIF

SEQ ID NO: 410332 - protein, 16 aa, Homo sapiens
  CDR3 for beta chain variable domain of TCR clone 205166 (TRBV28, TRBJ1-5)
CASSFRGGYSNQPQHF

SEQ ID NO: 410333 - protein, 14 aa, Homo sapiens
  CDR3 for alpha chain variable domain of TCR clone 205167 (TRAV26-1, TRAJ39)
CIVRGSRAGNMLTF

SEQ ID NO: 410334 - protein, 15 aa, Homo sapiens
  CDR3 for beta chain variable domain of TCR clone 205167 (TRBV19, TRBJ2-1)
CASNAQGLAGREQFF

SEQ ID NO: 410335 - protein, 15 aa, Homo sapiens
  CDR3 for alpha chain variable domain of TCR clone 205168 (TRAV20, TRAJ53)
CAVQASGGSNYKLTY

SEQ ID NO: 410336 - protein, 12 aa, Homo sapiens
  CDR3 for beta chain variable domain of TCR clone 205168 (TRBV7-6, TRBJ2-5)
CASSLSQETQYF

SEQ ID NO: 410337 - protein, 12 aa, Homo sapiens
  CDR3 for alpha chain variable domain of TCR clone 205169 (TRAV1-2, TRAJ42)
CVAGGSQGNIIF

SEQ ID NO: 410338 - protein, 12 aa, Homo sapiens
  CDR3 for beta chain variable domain of TCR clone 205169 (TRBV24-1, TRBJ1-1)
CATSDSDRGAFF

SEQ ID NO: 410339 - protein, 14 aa, Homo sapiens
  CDR3 for alpha chain variable domain of TCR clone 205170 (TRAV12-2, TRAJ9)
CAVNMEGGGFKTIF

SEQ ID NO: 410340 - protein, 14 aa, Homo sapiens
  CDR3 for beta chain variable domain of TCR clone 205170 (TRBV27, TRBJ2-3)
CGSRKGGRTDTQYF

SEQ ID NO: 410341 - protein, 13 aa, Homo sapiens
  CDR3 for alpha chain variable domain of TCR clone 205171 (TRAV8-6, TRAJ40)
CAVSVTGTYKYIF

SEQ ID NO: 410342 - protein, 13 aa, Homo sapiens
  CDR3 for beta chain variable domain of TCR clone 205171 (TRBV12-4, TRBJ1-2)
CASSLRQGKGYTF

SEQ ID NO: 410343 - protein, 14 aa, Homo sapiens
  CDR3 for alpha chain variable domain of TCR clone 205172 (TRAV12-1, TRAJ22)
CVVNVGGSARQLTF

SEQ ID NO: 410344 - protein, 13 aa, Homo sapiens
  CDR3 for beta chain variable domain of TCR clone 205172 (TRBV7-8, TRBJ1-5)
CASSLGGDQPQHF

SEQ ID NO: 410345 - protein, 14 aa, Homo sapiens
  CDR3 for alpha chain variable domain of TCR clone 205173 (TRAV17, TRAJ34)
CATDSLEGADKLIF

SEQ ID NO: 410346 - protein, 13 aa, Homo sapiens
  CDR3 for beta chain variable domain of TCR clone 205173 (TRBV11-2, TRBJ2-7)
CASSGTRPYEQYF

SEQ ID NO: 410347 - protein, 16 aa, Homo sapiens
  CDR3 for alpha chain variable domain of TCR clone 205174 (TRAV35, TRAJ28)
CAGQKYSGAGSYQLTF

SEQ ID NO: 410348 - protein, 11 aa, Homo sapiens
  CDR3 for beta chain variable domain of TCR clone 205174 (TRBV5-6, TRBJ1-2)
CASSRGGGYTF

SEQ ID NO: 410349 - protein, 15 aa, Homo sapiens
  CDR3 for alpha chain variable domain of TCR clone 205175 (TRAV8-3, TRAJ45)
CASSYSGGGADGLTF

SEQ ID NO: 410350 - protein, 13 aa, Homo sapiens
  CDR3 for beta chain variable domain of TCR clone 205175 (TRBV10-3, TRBJ2-7)
CASELAVNYVQYF

SEQ ID NO: 410351 - protein, 10 aa, Homo sapiens
  CDR3 for alpha chain variable domain of TCR clone 205176 (TRAV13-1, TRAJ52)
CAATTPMLVV

SEQ ID NO: 410352 - protein, 14 aa, Homo sapiens
  CDR3 for beta chain variable domain of TCR clone 205176 (TRBV6-5, TRBJ1-1)
CASSFGQRLTEAFF

SEQ ID NO: 410353 - protein, 12 aa, Homo sapiens
  CDR3 for alpha chain variable domain of TCR clone 205177 (TRAV1-2, TRAJ42)
CVAGGSQGNLIF

SEQ ID NO: 410354 - protein, 13 aa, Homo sapiens
  CDR3 for beta chain variable domain of TCR clone 205177 (TRBV10-3, TRBJ2-7)
CASKLAVNYEQYF

SEQ ID NO: 410355 - protein, 14 aa, Homo sapiens
  CDR3 for alpha chain variable domain of TCR clone 205178 (TRAV1-1, TRAJ27)
CAVIYNTNAGKSTF

SEQ ID NO: 410356 - protein, 14 aa, Homo sapiens
  CDR3 for beta chain variable domain of TCR clone 205178 (TRBV7-2, TRBJ2-1)
CSSSGLAGGNEQFF

SEQ ID NO: 410357 - protein, 11 aa, Homo sapiens
  CDR3 for alpha chain variable domain of TCR clone 205179 (TRAV12-2, TRAJ23)
CARGRGGKLIF

SEQ ID NO: 410358 - protein, 14 aa, Homo sapiens
  CDR3 for beta chain variable domain of TCR clone 205179 (TRBV28, TRBJ2-5)
CASSLGDREETQYF

SEQ ID NO: 410359 - protein, 14 aa, Homo sapiens
  CDR3 for alpha chain variable domain of TCR clone 205180 (TRAV1-2, TRAJ29)
CAVRELTSATPLVF

SEQ ID NO: 410360 - protein, 14 aa, Homo sapiens
  CDR3 for beta chain variable domain of TCR clone 205180 (TRBV3-1, TRBJ2-5)
CASSQGPDEETQYF

SEQ ID NO: 410361 - protein, 12 aa, Homo sapiens
  CDR3 for alpha chain variable domain of TCR clone 205181 (TRAV23/DV6, TRAJ30)
CAASQGDDKIIF

SEQ ID NO: 410362 - protein, 15 aa, Homo sapiens
  CDR3 for beta chain variable domain of TCR clone 205181 (TRBV20-1, TRBJ2-7)
CSARDRVSGMDEQYF

SEQ ID NO: 410363 - protein, 14 aa, Homo sapiens
  CDR3 for alpha chain variable domain of TCR clone 205182 (TRAV12-1, TRAJ17)
CVVNYKAAGNKLTF

SEQ ID NO: 410364 - protein, 13 aa, Homo sapiens
  CDR3 for beta chain variable domain of TCR clone 205182 (TRBV10-2, TRBJ2-7)
CASGASGGYEQYF

SEQ ID NO: 410365 - protein, 14 aa, Homo sapiens
  CDR3 for alpha chain variable domain of TCR clone 205183 (TRAV12-2, TRAJ45)
CAVHLGGGADGLTF

SEQ ID NO: 410366 - protein, 14 aa, Homo sapiens
  CDR3 for beta chain variable domain of TCR clone 205183 (TRBV6-5, TRBJ1-2)
CASTRGGGSDGYTF

SEQ ID NO: 410367 - protein, 11 aa, Homo sapiens
  CDR3 for alpha chain variable domain of TCR clone 205184 (TRAV21, TRAJ11)
CAVNGYSTLTF

SEQ ID NO: 410368 - protein, 14 aa, Homo sapiens
  CDR3 for beta chain variable domain of TCR clone 205184 (TRBV4-1, TRBJ1-1)
CASSPPGVNTEAFF

SEQ ID NO: 410369 - protein, 15 aa, Homo sapiens
  CDR3 for alpha chain variable domain of TCR clone 205185 (TRAV26-1, TRAJ44)
CIARGPFGTASKLTF

SEQ ID NO: 410370 - protein, 17 aa, Homo sapiens
  CDR3 for beta chain variable domain of TCR clone 205185 (TRBV24-1, TRBJ2-4)
CATSDAEARGVRNIQYF

SEQ ID NO: 410371 - protein, 12 aa, Homo sapiens
  CDR3 for alpha chain variable domain of TCR clone 205186 (TRAV12-2, TRAJ43)
CALNVNNNDMRF

SEQ ID NO: 410372 - protein, 14 aa, Homo sapiens
  CDR3 for beta chain variable domain of TCR clone 205186 (TRBV12-5, TRBJ2-5)
CASGSRTHQETQYF

SEQ ID NO: 410373 - protein, 16 aa, Homo sapiens
  CDR3 for alpha chain variable domain of TCR clone 205187 (TRAV3, TRAJ3)
CAVRDRANSSASKIIF

SEQ ID NO: 410374 - protein, 16 aa, Homo sapiens
  CDR3 for beta chain variable domain of TCR clone 205187 (TRBV20-1, TRBJ2-4)
CSATSLAELAKNIQYF

SEQ ID NO: 410375 - protein, 15 aa, Homo sapiens
  CDR3 for alpha chain variable domain of TCR clone 205188 (TRAV17, TRAJ57)
CATGPSQGGSEKLVF

SEQ ID NO: 410376 - protein, 14 aa, Homo sapiens
  CDR3 for beta chain variable domain of TCR clone 205188 (TRBV12-5, TRBJ2-5)
CASGTRTHQETQYF

SEQ ID NO: 410377 - protein, 16 aa, Homo sapiens
  CDR3 for alpha chain variable domain of TCR clone 205189 (TRAV4, TRAJ4)
CLVGAAFSGGYNKLIF

SEQ ID NO: 410378 - protein, 14 aa, Homo sapiens
  CDR3 for beta chain variable domain of TCR clone 205189 (TRBV7-2, TRBJ1-2)
CASSQTGSTYGYTF

SEQ ID NO: 410379 - protein, 17 aa, Homo sapiens
  CDR3 for alpha chain variable domain of TCR clone 205190 (TRAV3, TRAJ6)
CAVRDGPRAGGGFIPTF

SEQ ID NO: 410380 - protein, 14 aa, Homo sapiens
  CDR3 for beta chain variable domain of TCR clone 205190 (TRBV7-2, TRBJ2-7)
CASSPKTSFYEQYF

SEQ ID NO: 410381 - protein, 14 aa, Homo sapiens
  CDR3 for alpha chain variable domain of TCR clone 205191 (TRAV1-2, TRAJ16)
CAVKRFSDGQKLPF

SEQ ID NO: 410382 - protein, 16 aa, Homo sapiens
  CDR3 for beta chain variable domain of TCR clone 205191 (TRBV7-3, TRBJ2-2)
CASSLKRGTLSGELFF

SEQ ID NO: 410383 - protein, 13 aa, Homo sapiens
  CDR3 for alpha chain variable domain of TCR clone 205192 (TRAV21, TRAJ27)
FAARPGNAGKSTF

SEQ ID NO: 410384 - protein, 14 aa, Homo sapiens
  CDR3 for beta chain variable domain of TCR clone 205192 (TRBV5-4, TRBJ1-1)
CASSLDSRRDEAFF

SEQ ID NO: 410385 - protein, 13 aa, Homo sapiens
  CDR3 for alpha chain variable domain of TCR clone 205193 (TRAV12-3, TRAJ33)
CAMSVNSNYQLIW

SEQ ID NO: 410386 - protein, 13 aa, Homo sapiens
  CDR3 for beta chain variable domain of TCR clone 205193 (TRBV7-2, TRBJ2-2)
FSSSLAVTGELFF

SEQ ID NO: 410387 - protein, 14 aa, Homo sapiens
  CDR3 for alpha chain variable domain of TCR clone 205194 (TRAV12-2, TRAJ40)
CAVKIPSGTYKYIF

SEQ ID NO: 410388 - protein, 15 aa, Homo sapiens
  CDR3 for beta chain variable domain of TCR clone 205194 (TRBV27, TRBJ2-1)
CASSNGGGSSNEQFF

SEQ ID NO: 410389 - protein, 10 aa, Homo sapiens
  CDR3 for alpha chain variable domain of TCR clone 205195 (TRAV8-4, TRAJ43)
CAVSADDMRF

SEQ ID NO: 410390 - protein, 12 aa, Homo sapiens
  CDR3 for beta chain variable domain of TCR clone 205195 (TRBV7-9, TRBJ2-7)
CATRTDAYEQYF

SEQ ID NO: 410391 - protein, 11 aa, Homo sapiens
  CDR3 for alpha chain variable domain of TCR clone 205196 (TRAV12-3, TRAJ49)
CAANTGHQFYF

SEQ ID NO: 410392 - protein, 12 aa, Homo sapiens
  CDR3 for beta chain variable domain of TCR clone 205196 (TRBV6-3, TRBJ2-7)
CASSEPGFEQYF

SEQ ID NO: 410393 - protein, 14 aa, Homo sapiens
  CDR3 for alpha chain variable domain of TCR clone 205197 (TRAV12-3, TRAJ10)
SHLPLTGGGNKLTF

SEQ ID NO: 410394 - protein, 14 aa, Homo sapiens
  CDR3 for beta chain variable domain of TCR clone 205197 (TRBV6-1, TRBJ1-3)
CASVQGGGGHTIYF

SEQ ID NO: 410395 - protein, 10 aa, Homo sapiens
  CDR3 for alpha chain variable domain of TCR clone 205198 (TRAV1-2, TRAJ31)
CAFFDARLMF

SEQ ID NO: 410396 - protein, 13 aa, Homo sapiens
  CDR3 for beta chain variable domain of TCR clone 205198 (TRBV7-9, TRBJ1-2)
CAGSLKQNYGYTF

SEQ ID NO: 410397 - protein, 14 aa, Homo sapiens
  CDR3 for alpha chain variable domain of TCR clone 205199 (TRAV2, TRAJ9)
CAVEDRSGGVKTIF

SEQ ID NO: 410398 - protein, 16 aa, Homo sapiens
  CDR3 for beta chain variable domain of TCR clone 205199 (TRBV4-3, TRBJ2-3)
CASSQGGLAGTDTQYF

SEQ ID NO: 410399 - protein, 14 aa, Homo sapiens
  CDR3 for alpha chain variable domain of TCR clone 205200 (TRAV13-2, TRAJ32)
CAENYGGATNKLIF

SEQ ID NO: 410400 - protein, 15 aa, Homo sapiens
  CDR3 for beta chain variable domain of TCR clone 205200 (TRBV12-4, TRBJ2-5)
CASTLNSGRGETQCF

SEQ ID NO: 410401 - protein, 14 aa, Homo sapiens
  CDR3 for alpha chain variable domain of TCR clone 205201 (TRAV12-2, TRAJ13)
CAVKKTGGYQKVTF

SEQ ID NO: 410402 - protein, 13 aa, Homo sapiens
  CDR3 for beta chain variable domain of TCR clone 205201 (TRBV24-1, TRBJ2-2)
CATSDWSTGELFF

SEQ ID NO: 410403 - protein, 12 aa, Homo sapiens
  CDR3 for alpha chain variable domain of TCR clone 205202 (TRAV13-1, TRAJ48)
CAANFGNEKLTF

SEQ ID NO: 410404 - protein, 16 aa, Homo sapiens
  CDR3 for beta chain variable domain of TCR clone 205202 (TRBV12-5, TRBJ2-5)
CASGPRTSGNQETQYF

SEQ ID NO: 410405 - protein, 13 aa, Homo sapiens
  CDR3 for alpha chain variable domain of TCR clone 205203 (TRAV13-1, TRAJ6)
CAASKGGSYIPTF

SEQ ID NO: 410406 - protein, 14 aa, Homo sapiens
  CDR3 for beta chain variable domain of TCR clone 205203 (TRBV7-2, TRBJ2-1)
CASSLGIGYNEQLF

SEQ ID NO: 410407 - protein, 10 aa, Homo sapiens
  CDR3 for alpha chain variable domain of TCR clone 205204 (TRAV13-1, TRAJ8)
CAAPFQKLVF

SEQ ID NO: 410408 - protein, 13 aa, Homo sapiens
  CDR3 for beta chain variable domain of TCR clone 205204 (TRBV12-4, TRBJ1-1)
CASSPGTGFEAFF

SEQ ID NO: 410409 - protein, 10 aa, Homo sapiens
  CDR3 for alpha chain variable domain of TCR clone 205205 (TRAV23/DV6, TRAJ43)
CAAAIAALEQ

SEQ ID NO: 410410 - protein, 13 aa, Homo sapiens
  CDR3 for beta chain variable domain of TCR clone 205205 (TRBV12-4, TRBJ1-2)
CASSLRQGKGYTF

SEQ ID NO: 410411 - protein, 14 aa, Homo sapiens
  CDR3 for alpha chain variable domain of TCR clone 205206 (TRAV16, TRAJ48)
CALTPGFGNEKLTF

SEQ ID NO: 410412 - protein, 12 aa, Homo sapiens
  CDR3 for beta chain variable domain of TCR clone 205206 (TRBV6-3, TRBJ2-7)
CASSLTPYEQYF

SEQ ID NO: 410413 - protein, 14 aa, Homo sapiens
  CDR3 for alpha chain variable domain of TCR clone 205207 (TRAV20, TRAJ42)
CAVQGWRSQGNLIF

SEQ ID NO: 410414 - protein, 13 aa, Homo sapiens
  CDR3 for beta chain variable domain of TCR clone 205207 (TRBV20-1, TRBJ2-7)
CSASPFSSYEQYF

SEQ ID NO: 410415 - protein, 14 aa, Homo sapiens
  CDR3 for alpha chain variable domain of TCR clone 205208 (TRAV14/DV4, TRAJ34)
CAMREGRPHRQAHL

SEQ ID NO: 410416 - protein, 14 aa, Homo sapiens
  CDR3 for beta chain variable domain of TCR clone 205208 (TRBV28, TRBJ1-3)
CASSFRDRVNTIYF

SEQ ID NO: 410417 - protein, 14 aa, Homo sapiens
  CDR3 for alpha chain variable domain of TCR clone 205209 (TRAV12-2, TRAJ17)
CAVLFKAAGNKLTF

SEQ ID NO: 410418 - protein, 15 aa, Homo sapiens
  CDR3 for beta chain variable domain of TCR clone 205209 (TRBV27, TRBJ2-2)
CASSLEGPNTGELFF

SEQ ID NO: 410419 - protein, 17 aa, Homo sapiens
  CDR3 for alpha chain variable domain of TCR clone 205210 (TRAV38-1, TRAJ45)
CAFMKHYMGGGADGLTF

SEQ ID NO: 410420 - protein, 15 aa, Homo sapiens
  CDR3 for beta chain variable domain of TCR clone 205210 (TRBV27, TRBJ2-1)
CASSNGGGSSNEQFF

SEQ ID NO: 410421 - protein, 14 aa, Homo sapiens
  CDR3 for alpha chain variable domain of TCR clone 205211 (TRAV1-2, TRAJ16)
CAVNRFSDGQKLLF

SEQ ID NO: 410422 - protein, 15 aa, Homo sapiens
  CDR3 for beta chain variable domain of TCR clone 205211 (TRBV7-9, TRBJ1-6)
CASSSPGRGNSPLCF

SEQ ID NO: 410423 - protein, 12 aa, Homo sapiens
  CDR3 for alpha chain variable domain of TCR clone 205212 (TRAV12-2, TRAJ10)
CRPHGGGNKLTF

SEQ ID NO: 410424 - protein, 11 aa, Homo sapiens
  CDR3 for beta chain variable domain of TCR clone 205212 (TRBV6-1, TRBJ2-1)
CASISSNEQFF

SEQ ID NO: 410425 - protein, 14 aa, Homo sapiens
  CDR3 for alpha chain variable domain of TCR clone 205213 (TRAV12-1, TRAJ23)
CVVIVYNQGGKLIF

SEQ ID NO: 410426 - protein, 13 aa, Homo sapiens
  CDR3 for beta chain variable domain of TCR clone 205213 (TRBV11-2, TRBJ2-5)
CASSFSSKETQYF

SEQ ID NO: 410427 - protein, 13 aa, Homo sapiens
  CDR3 for alpha chain variable domain of TCR clone 205214 (TRAV13-1, TRAJ10)
CAATLGGGNKLTF

SEQ ID NO: 410428 - protein, 13 aa, Homo sapiens
  CDR3 for beta chain variable domain of TCR clone 205214 (TRBV12-4, TRBJ2-7)
CASSPTETYEQYF

SEQ ID NO: 410429 - protein, 16 aa, Homo sapiens
  CDR3 for alpha chain variable domain of TCR clone 205215 (TRAV16, TRAJ4)
CALSRMFSGGYNKLIF

SEQ ID NO: 410430 - protein, 14 aa, Homo sapiens
  CDR3 for beta chain variable domain of TCR clone 205215 (TRBV20-1, TRBJ2-7)
CSAKRGRSSYEQYF

SEQ ID NO: 410431 - protein, 17 aa, Homo sapiens
  CDR3 for alpha chain variable domain of TCR clone 205216 (TRAV16, TRAJ58)
CITVLSNGETSGSRLTF

SEQ ID NO: 410432 - protein, 19 aa, Homo sapiens
  CDR3 for beta chain variable domain of TCR clone 205216 (TRBV18, TRBJ2-3)
CASSKGLSGGLLIRSILAQ

SEQ ID NO: 410433 - protein, 12 aa, Homo sapiens
  CDR3 for alpha chain variable domain of TCR clone 205217 (TRAV8-2, TRAJ45)
CVQGGGADGLTF

SEQ ID NO: 410434 - protein, 13 aa, Homo sapiens
  CDR3 for beta chain variable domain of TCR clone 205217 (TRBV11-2, TRBJ2-5)
CASSFSSQETQYF

SEQ ID NO: 410435 - protein, 12 aa, Homo sapiens
  CDR3 for alpha chain variable domain of TCR clone 205218 (TRAV12-2, TRAJ8)
CAVNIGFQKLVF

SEQ ID NO: 410436 - protein, 15 aa, Homo sapiens
  CDR3 for beta chain variable domain of TCR clone 205218 (TRBV7-8, TRBJ1-5)
CASSLERRGLEPQHF

SEQ ID NO: 410437 - protein, 13 aa, Homo sapiens
  CDR3 for alpha chain variable domain of TCR clone 205219 (TRAV2, TRAJ40)
CAVVTSGTYNYIF

SEQ ID NO: 410438 - protein, 14 aa, Homo sapiens
  CDR3 for beta chain variable domain of TCR clone 205219 (TRBV28, TRBJ2-1)
CASSYYTAYNEQFF

SEQ ID NO: 410439 - protein, 13 aa, Homo sapiens
  CDR3 for alpha chain variable domain of TCR clone 205220 (TRAV12-2, TRAJ42)
CAVKRGSHGNFIF

SEQ ID NO: 410440 - protein, 16 aa, Homo sapiens
  CDR3 for beta chain variable domain of TCR clone 205220 (TRBV9, TRBJ2-2)
CASSAMGKGNTGELFF

SEQ ID NO: 410441 - protein, 15 aa, Homo sapiens
  CDR3 for alpha chain variable domain of TCR clone 205221 (TRAV13-1, TRAJ11)
CAASNRNSGYSTLTF

SEQ ID NO: 410442 - protein, 11 aa, Homo sapiens
  CDR3 for beta chain variable domain of TCR clone 205221 (TRBV6-1, TRBJ2-1)
CASISSNEQFF

SEQ ID NO: 410443 - protein, 15 aa, Homo sapiens
  CDR3 for alpha chain variable domain of TCR clone 205222 (TRAV14/DV4, TRAJ27)
CAMRGGSYQCRQINL

SEQ ID NO: 410444 - protein, 11 aa, Homo sapiens
  CDR3 for beta chain variable domain of TCR clone 205222 (TRBV12-4, TRBJ2-3)
CASSSVRGRYF

SEQ ID NO: 410445 - protein, 13 aa, Homo sapiens
  CDR3 for alpha chain variable domain of TCR clone 205223 (TRAV22, TRAJ29)
CAVGGSGKTPLVF

SEQ ID NO: 410446 - protein, 14 aa, Homo sapiens
  CDR3 for beta chain variable domain of TCR clone 205223 (TRBV5-1, TRBJ2-7)
CASSRGESLYEQYF

SEQ ID NO: 410447 - protein, 12 aa, Homo sapiens
  CDR3 for alpha chain variable domain of TCR clone 205224 (TRAV12-3, TRAJ17)
CAMTLTGNNLTF

SEQ ID NO: 410448 - protein, 17 aa, Homo sapiens
  CDR3 for beta chain variable domain of TCR clone 205224 (TRBV7-3, TRBJ2-3)
CASSFMKRMRGADTQYF

SEQ ID NO: 410449 - protein, 15 aa, Homo sapiens
  CDR3 for alpha chain variable domain of TCR clone 205225 (TRAV26-1, TRAJ29)
CIVRVEGSGNTPLVF

SEQ ID NO: 410450 - protein, 18 aa, Homo sapiens
  CDR3 for beta chain variable domain of TCR clone 205225 (TRBV5-5, TRBJ1-5)
CASSVRQVKGSSNQPQHF

SEQ ID NO: 410451 - protein, 10 aa, Homo sapiens
  CDR3 for alpha chain variable domain of TCR clone 205226 (TRAV27, TRAJ37)
CAGGVGKLIF

SEQ ID NO: 410452 - protein, 15 aa, Homo sapiens
  CDR3 for beta chain variable domain of TCR clone 205226 (TRBV7-2, TRBJ1-2)
CASSLVSGGDYGYTF

SEQ ID NO: 410453 - protein, 14 aa, Homo sapiens
  CDR3 for alpha chain variable domain of TCR clone 205227 (TRAV12-2, TRAJ13)
CAVKKTGGYQKVTF

SEQ ID NO: 410454 - protein, 16 aa, Homo sapiens
  CDR3 for beta chain variable domain of TCR clone 205227 (TRBV12-5, TRBJ2-5)
CASGPRTCGNQETQYF

SEQ ID NO: 410455 - protein, 14 aa, Homo sapiens
  CDR3 for alpha chain variable domain of TCR clone 205228 (TRAV26-2, TRAJ11)
CIPRLNSGYSTLTF

SEQ ID NO: 410456 - protein, 17 aa, Homo sapiens
  CDR3 for beta chain variable domain of TCR clone 205228 (TRBV13, TRBJ2-3)
CASSLSRVAGGRNTQYS

SEQ ID NO: 410457 - protein, 13 aa, Homo sapiens
  CDR3 for alpha chain variable domain of TCR clone 205229 (TRAV8-4, TRAJ9)
CAVSETGGFKTIF

SEQ ID NO: 410458 - protein, 18 aa, Homo sapiens
  CDR3 for beta chain variable domain of TCR clone 205229 (TRBV7-2, TRBJ2-3)
CASSLKREGSGITDTQYF

SEQ ID NO: 410459 - protein, 14 aa, Homo sapiens
  CDR3 for alpha chain variable domain of TCR clone 205230 (TRAV2, TRAJ37)
CAVDFTSNTGKLIF

SEQ ID NO: 410460 - protein, 13 aa, Homo sapiens
  CDR3 for beta chain variable domain of TCR clone 205230 (TRBV20-1, TRBJ1-1)
CSAPLGGGTEAFF

SEQ ID NO: 410461 - protein, 15 aa, Homo sapiens
  CDR3 for alpha chain variable domain of TCR clone 205231 (TRAV26-1, TRAJ23)
CIVRVLNNQGGKLIF

SEQ ID NO: 410462 - protein, 15 aa, Homo sapiens
  CDR3 for beta chain variable domain of TCR clone 205231 (TRBV11-3, TRBJ2-1)
CASSLAGQTYNEQFS

SEQ ID NO: 410463 - protein, 14 aa, Homo sapiens
  CDR3 for alpha chain variable domain of TCR clone 205232 (TRAV12-2, TRAJ13)
CAVKKTGGYQKVTF

SEQ ID NO: 410464 - protein, 14 aa, Homo sapiens
  CDR3 for beta chain variable domain of TCR clone 205232 (TRBV11-2, TRBJ2-7)
CASSLRAGAYEQYF

SEQ ID NO: 410465 - protein, 11 aa, Homo sapiens
  CDR3 for alpha chain variable domain of TCR clone 205233 (TRAV29/DV5, TRAJ31)
CAASSQCQTHV

SEQ ID NO: 410466 - protein, 17 aa, Homo sapiens
  CDR3 for beta chain variable domain of TCR clone 205233 (TRBV18, TRBJ2-6)
CASSPRQGAVGANVLTF

SEQ ID NO: 410467 - protein, 15 aa, Homo sapiens
  CDR3 for alpha chain variable domain of TCR clone 205234 (TRAV8-2, TRAJ15)
CVVTMGNQAGTALLF

SEQ ID NO: 410468 - protein, 15 aa, Homo sapiens
  CDR3 for beta chain variable domain of TCR clone 205234 (TRBV19, TRBJ2-7)
CASSPAGSGEALRYF

SEQ ID NO: 410469 - protein, 16 aa, Homo sapiens
  CDR3 for alpha chain variable domain of TCR clone 205235 (TRAV12-1, TRAJ4)
CVVRRLPAGGYNKLIF

SEQ ID NO: 410470 - protein, 13 aa, Homo sapiens
  CDR3 for beta chain variable domain of TCR clone 205235 (TRBV7-3, TRBJ1-1)
CASSQDWGAEALF

SEQ ID NO: 410471 - protein, 18 aa, Homo sapiens
  CDR3 for alpha chain variable domain of TCR clone 205236 (TRAV13-1, TRAJ52)
CAAKNPNAGGTSYGKLTF

SEQ ID NO: 410472 - protein, 18 aa, Homo sapiens
  CDR3 for beta chain variable domain of TCR clone 205236 (TRBV4-1, TRBJ2-1)
CASSLVGGELAGFNEQFF

SEQ ID NO: 410473 - protein, 13 aa, Homo sapiens
  CDR3 for alpha chain variable domain of TCR clone 205237 (TRAV8-3, TRAJ28)
CAVGAVGSDQLTF

SEQ ID NO: 410474 - protein, 14 aa, Homo sapiens
  CDR3 for beta chain variable domain of TCR clone 205237 (TRBV7-2, TRBJ2-7)
YASRSQGAAYEQYF

SEQ ID NO: 410475 - protein, 16 aa, Homo sapiens
  CDR3 for alpha chain variable domain of TCR clone 205238 (TRAV30, TRAJ24)
CSTEIVDADSWGKFRF

SEQ ID NO: 410476 - protein, 14 aa, Homo sapiens
  CDR3 for beta chain variable domain of TCR clone 205238 (TRBV12-5, TRBJ2-5)
CASGSRTHQETQYF

SEQ ID NO: 410477 - protein, 16 aa, Homo sapiens
  CDR3 for alpha chain variable domain of TCR clone 205239 (TRAV16, TRAJ4)
CALSRMFSGGYNKLIF

SEQ ID NO: 410478 - protein, 17 aa, Homo sapiens
  CDR3 for beta chain variable domain of TCR clone 205239 (TRBV19, TRBJ2-6)
CASSTGQVFSGANVLTF

SEQ ID NO: 410479 - protein, 14 aa, Homo sapiens
  CDR3 for alpha chain variable domain of TCR clone 205240 (TRAV38-1, TRAJ43)
CAFMKHNNNNDIRF

SEQ ID NO: 410480 - protein, 16 aa, Homo sapiens
  CDR3 for beta chain variable domain of TCR clone 205240 (TRBV7-9, TRBJ1-2)
CASSLGFSSGEDGYTF

SEQ ID NO: 410481 - protein, 11 aa, Homo sapiens
  CDR3 for alpha chain variable domain of TCR clone 205241 (TRAV1-2, TRAJ20)
CAVANDYKLSF

SEQ ID NO: 410482 - protein, 18 aa, Homo sapiens
  CDR3 for beta chain variable domain of TCR clone 205241 (TRBV20-1, TRBJ2-6)
CSAETTPTHGCGANVLTF

SEQ ID NO: 410483 - protein, 14 aa, Homo sapiens
  CDR3 for alpha chain variable domain of TCR clone 205242 (TRAV12-2, TRAJ6)
CASKWGGGSYIPTF

SEQ ID NO: 410484 - protein, 12 aa, Homo sapiens
  CDR3 for beta chain variable domain of TCR clone 205242 (TRBV11-2, TRBJ2-2)
CASSLPTGELFF

SEQ ID NO: 410485 - protein, 13 aa, Homo sapiens
  CDR3 for alpha chain variable domain of TCR clone 205243 (TRAV1-2, TRAJ9)
CAALNTGGCKTIF

SEQ ID NO: 410486 - protein, 14 aa, Homo sapiens
  CDR3 for beta chain variable domain of TCR clone 205243 (TRBV19, TRBJ2-1)
CASPTFVLSGEQFF

SEQ ID NO: 410487 - protein, 15 aa, Homo sapiens
  CDR3 for alpha chain variable domain of TCR clone 205244 (TRAV3, TRAJ33)
CPYERLLLWNYPLIW

SEQ ID NO: 410488 - protein, 15 aa, Homo sapiens
  CDR3 for beta chain variable domain of TCR clone 205244 (TRBV20-1, TRBJ1-1)
CSASRGVTGNTEAFF

SEQ ID NO: 410489 - protein, 11 aa, Homo sapiens
  CDR3 for alpha chain variable domain of TCR clone 205245 (TRAV21, TRAJ41)
CAVRSGYALHF

SEQ ID NO: 410490 - protein, 13 aa, Homo sapiens
  CDR3 for beta chain variable domain of TCR clone 205245 (TRBV7-9, TRBJ1-2)
CASSLKQNYGYTF

SEQ ID NO: 410491 - protein, 12 aa, Homo sapiens
  CDR3 for alpha chain variable domain of TCR clone 205246 (TRAV12-3, TRAJ17)
CAMTLTGTKLTF

SEQ ID NO: 410492 - protein, 15 aa, Homo sapiens
  CDR3 for beta chain variable domain of TCR clone 205246 (TRBV20-1, TRBJ2-7)
CSARDRVSGMDGQYF

SEQ ID NO: 410493 - protein, 13 aa, Homo sapiens
  CDR3 for alpha chain variable domain of TCR clone 205247 (TRAV2, TRAJ40)
CAVVTSGTYKYIS

SEQ ID NO: 410494 - protein, 15 aa, Homo sapiens
  CDR3 for beta chain variable domain of TCR clone 205247 (TRBV20-1, TRBJ2-7)
CSARDRVSGMDEQYF

SEQ ID NO: 410495 - protein, 19 aa, Homo sapiens
  CDR3 for alpha chain variable domain of TCR clone 205248 (TRAV17, TRAJ17)
CATDGRPGVIKAAGNKLTF

SEQ ID NO: 410496 - protein, 14 aa, Homo sapiens
  CDR3 for beta chain variable domain of TCR clone 205248 (TRBV7-2, TRBJ2-7)
CASSPKTSFYEQYF

SEQ ID NO: 410497 - protein, 13 aa, Homo sapiens
  CDR3 for alpha chain variable domain of TCR clone 205249 (TRAV21, TRAJ27)
CAARPGSAGKSTF

SEQ ID NO: 410498 - protein, 14 aa, Homo sapiens
  CDR3 for beta chain variable domain of TCR clone 205249 (TRBV7-9, TRBJ2-5)
CASSLDTAQETQYF

SEQ ID NO: 410499 - protein, 14 aa, Homo sapiens
  CDR3 for alpha chain variable domain of TCR clone 205250 (TRAV23/DV6, TRAJ4)
CAAPSSVGYNKLIF

SEQ ID NO: 410500 - protein, 16 aa, Homo sapiens
  CDR3 for beta chain variable domain of TCR clone 205250 (TRBV19, TRBJ1-1)
CASRFGGPVNGTEAFF

SEQ ID NO: 410501 - protein, 13 aa, Homo sapiens
  CDR3 for alpha chain variable domain of TCR clone 205251 (TRAV21, TRAJ37)
CAVSSGNTDKLIF

SEQ ID NO: 410502 - protein, 17 aa, Homo sapiens
  CDR3 for beta chain variable domain of TCR clone 205251 (TRBV5-1, TRBJ2-5)
CASSLLGLAANQETQYF

SEQ ID NO: 410503 - protein, 13 aa, Homo sapiens
  CDR3 for alpha chain variable domain of TCR clone 205252 (TRAV29/DV5, TRAJ31)
CAASRNNNARLMC

SEQ ID NO: 410504 - protein, 14 aa, Homo sapiens
  CDR3 for beta chain variable domain of TCR clone 205252 (TRBV7-9, TRBJ2-2)
CASSLVQDTGELFF

SEQ ID NO: 410505 - protein, 10 aa, Homo sapiens
  CDR3 for alpha chain variable domain of TCR clone 205253 (TRAV23/DV6, TRAJ57)
CAASSTLSRG

SEQ ID NO: 410506 - protein, 14 aa, Homo sapiens
  CDR3 for beta chain variable domain of TCR clone 205253 (TRBV7-2, TRBJ2-7)
CASSPKTSFYEQYF

SEQ ID NO: 410507 - protein, 11 aa, Homo sapiens
  CDR3 for alpha chain variable domain of TCR clone 205254 (TRAV19, TRAJ21)
CALSGFNKFYF

SEQ ID NO: 410508 - protein, 12 aa, Homo sapiens
  CDR3 for beta chain variable domain of TCR clone 205254 (TRBV7-9, TRBJ1-4)
CASSTDREKLFI

SEQ ID NO: 410509 - protein, 15 aa, Homo sapiens
  CDR3 for alpha chain variable domain of TCR clone 205255 (TRAV17, TRAJ4)
CATGTWSGGYNKLIF

SEQ ID NO: 410510 - protein, 17 aa, Homo sapiens
  CDR3 for beta chain variable domain of TCR clone 205255 (TRBV4-2, TRBJ2-2)
CASSPRTSGGSAGELFF

SEQ ID NO: 410511 - protein, 13 aa, Homo sapiens
  CDR3 for alpha chain variable domain of TCR clone 205256 (TRAV17, TRAJ9)
CATDYTGGFKTIF

SEQ ID NO: 410512 - protein, 13 aa, Homo sapiens
  CDR3 for beta chain variable domain of TCR clone 205256 (TRBV7-2, TRBJ2-4)
CASSREHANIQYF

SEQ ID NO: 410513 - protein, 12 aa, Homo sapiens
  CDR3 for alpha chain variable domain of TCR clone 205257 (TRAV13-1, TRAJ21)
CAAKEGFNKFSF

SEQ ID NO: 410514 - protein, 15 aa, Homo sapiens
  CDR3 for beta chain variable domain of TCR clone 205257 (TRBV27, TRBJ2-1)
CASSNGGGSSNEQFF

SEQ ID NO: 410515 - protein, 17 aa, Homo sapiens
  CDR3 for alpha chain variable domain of TCR clone 205258 (TRAV8-6, TRAJ8)
CAVKEGIENTGFQKLVF

SEQ ID NO: 410516 - protein, 14 aa, Homo sapiens
  CDR3 for beta chain variable domain of TCR clone 205258 (TRBV19, TRBJ2-2)
CASSTLHRSGELFF

SEQ ID NO: 410517 - protein, 12 aa, Homo sapiens
  CDR3 for alpha chain variable domain of TCR clone 205259 (TRAV8-3, TRAJ41)
CAVGALGYALNF

SEQ ID NO: 410518 - protein, 12 aa, Homo sapiens
  CDR3 for beta chain variable domain of TCR clone 205259 (TRBV7-8, TRBJ2-7)
CASSLGDREQYF

SEQ ID NO: 410519 - protein, 16 aa, Homo sapiens
  CDR3 for alpha chain variable domain of TCR clone 205260 (TRAV13-1, TRAJ40)
CAASMTSGTYKYILEQ

SEQ ID NO: 410520 - protein, 15 aa, Homo sapiens
  CDR3 for beta chain variable domain of TCR clone 205260 (TRBV7-3, TRBJ2-1)
CASSPTGGGEVEQFF

SEQ ID NO: 410521 - protein, 17 aa, Homo sapiens
  CDR3 for alpha chain variable domain of TCR clone 205261 (TRAV8-3, TRAJ34)
CAIPGKLIFGTGTRLQV

SEQ ID NO: 410522 - protein, 15 aa, Homo sapiens
  CDR3 for beta chain variable domain of TCR clone 205261 (TRBV7-3, TRBJ2-2)
CASSETGQGTGELFF

SEQ ID NO: 410523 - protein, 14 aa, Homo sapiens
  CDR3 for alpha chain variable domain of TCR clone 205262 (TRAV1-2, TRAJ27)
CAPAEYTNAGKSTF

SEQ ID NO: 410524 - protein, 18 aa, Homo sapiens
  CDR3 for beta chain variable domain of TCR clone 205262 (TRBV28, TRBJ1-2)
CASRQQQGKRCSNYGDTF

SEQ ID NO: 410525 - protein, 15 aa, Homo sapiens
  CDR3 for alpha chain variable domain of TCR clone 205263 (TRAV13-1, TRAJ5)
CAASKADKGRRARTF

SEQ ID NO: 410526 - protein, 16 aa, Homo sapiens
  CDR3 for beta chain variable domain of TCR clone 205263 (TRBV7-2, TRBJ2-1)
CASSLGRTSGDNEQFF

SEQ ID NO: 410527 - protein, 17 aa, Homo sapiens
  CDR3 for alpha chain variable domain of TCR clone 205264 (TRAV4, TRAJ13)
CLVGVQGSSGGYQKFTF

SEQ ID NO: 410528 - protein, 16 aa, Homo sapiens
  CDR3 for beta chain variable domain of TCR clone 205264 (TRBV28, TRBJ2-7)
CASSLFFETGGPEQYF

SEQ ID NO: 410529 - protein, 11 aa, Homo sapiens
  CDR3 for alpha chain variable domain of TCR clone 205265 (TRAV21, TRAJ48)
CAVDGNERLNF

SEQ ID NO: 410530 - protein, 15 aa, Homo sapiens
  CDR3 for beta chain variable domain of TCR clone 205265 (TRBV2, TRBJ2-1)
CASSELAGSYNEQFF

SEQ ID NO: 410531 - protein, 10 aa, Homo sapiens
  CDR3 for alpha chain variable domain of TCR clone 205266 (TRAV23/DV6, TRAJ49)
CAVAPVTSSI

SEQ ID NO: 410532 - protein, 13 aa, Homo sapiens
  CDR3 for beta chain variable domain of TCR clone 205266 (TRBV6-1, TRBJ1-1)
CASSRQGNTEAFF

SEQ ID NO: 410533 - protein, 15 aa, Homo sapiens
  CDR3 for alpha chain variable domain of TCR clone 205267 (TRAV25, TRAJ52)
CAGTSGGTSYGKLTF

SEQ ID NO: 410534 - protein, 12 aa, Homo sapiens
  CDR3 for beta chain variable domain of TCR clone 205267 (TRBV6-3, TRBJ1-1)
CASSYFQAEAFF

SEQ ID NO: 410535 - protein, 12 aa, Homo sapiens
  CDR3 for alpha chain variable domain of TCR clone 205268 (TRAV2, TRAJ36)
CAELTGANNLFF

SEQ ID NO: 410536 - protein, 14 aa, Homo sapiens
  CDR3 for beta chain variable domain of TCR clone 205268 (TRBV4-1, TRBJ2-2)
CASSQAVNTGELFF

SEQ ID NO: 410537 - protein, 14 aa, Homo sapiens
  CDR3 for alpha chain variable domain of TCR clone 205269 (TRAV19, TRAJ20)
CALSEAPRGRTTTS

SEQ ID NO: 410538 - protein, 15 aa, Homo sapiens
  CDR3 for beta chain variable domain of TCR clone 205269 (TRBV10-3, TRBJ2-3)
CAISLTSGGIDTQYF

SEQ ID NO: 410539 - protein, 15 aa, Homo sapiens
  CDR3 for alpha chain variable domain of TCR clone 205270 (TRAV26-1, TRAJ29)
CIVRVEGSGNTPLVV

SEQ ID NO: 410540 - protein, 15 aa, Homo sapiens
  CDR3 for beta chain variable domain of TCR clone 205270 (TRBV28, TRBJ2-5)
CASSPGQGSIETQYF

SEQ ID NO: 410541 - protein, 12 aa, Homo sapiens
  CDR3 for alpha chain variable domain of TCR clone 205271 (TRAV13-1, TRAJ27)
CAAHTNAGKSTF

SEQ ID NO: 410542 - protein, 15 aa, Homo sapiens
  CDR3 for beta chain variable domain of TCR clone 205271 (TRBV7-9, TRBJ1-6)
GASSSPGRGNSPLHF

SEQ ID NO: 410543 - protein, 14 aa, Homo sapiens
  CDR3 for alpha chain variable domain of TCR clone 205272 (TRAV17, TRAJ6)
CATNPAGGSYIPTF

SEQ ID NO: 410544 - protein, 13 aa, Homo sapiens
  CDR3 for beta chain variable domain of TCR clone 205272 (TRBV10-3, TRBJ2-7)
CASKLAVNYEQYF

SEQ ID NO: 410545 - protein, 11 aa, Homo sapiens
  CDR3 for alpha chain variable domain of TCR clone 205273 (TRAV21, TRAJ11)
CAVNGYSTLTF

SEQ ID NO: 410546 - protein, 17 aa, Homo sapiens
  CDR3 for beta chain variable domain of TCR clone 205273 (TRBV28, TRBJ2-5)
CASSRQGGLAGAETQYF

SEQ ID NO: 410547 - protein, 19 aa, Homo sapiens
  CDR3 for alpha chain variable domain of TCR clone 205274 (TRAV1-2, TRAJ26)
CLLPLCCERPDNYGQNFVF

SEQ ID NO: 410548 - protein, 13 aa, Homo sapiens
  CDR3 for beta chain variable domain of TCR clone 205274 (TRBV27, TRBJ1-1)
CASSLSIGAEAFF

SEQ ID NO: 410549 - protein, 11 aa, Homo sapiens
  CDR3 for alpha chain variable domain of TCR clone 205275 (TRAV1-2, TRAJ20)
CAVSNDYELSF

SEQ ID NO: 410550 - protein, 16 aa, Homo sapiens
  CDR3 for beta chain variable domain of TCR clone 205275 (TRBV29-1, TRBJ2-6)
CSVEDITYSGANVLTF

SEQ ID NO: 410551 - protein, 14 aa, Homo sapiens
  CDR3 for alpha chain variable domain of TCR clone 205276 (TRAV26-1, TRAJ38)
CIADNAGNKRKLIW

SEQ ID NO: 410552 - protein, 13 aa, Homo sapiens
  CDR3 for beta chain variable domain of TCR clone 205276 (TRBV7-9, TRBJ1-2)
CASSLKQNYGYTF

SEQ ID NO: 410553 - protein, 12 aa, Homo sapiens
  CDR3 for alpha chain variable domain of TCR clone 205277 (TRAV12-3, TRAJ40)
CAVSSGTYKYIF

SEQ ID NO: 410554 - protein, 15 aa, Homo sapiens
  CDR3 for beta chain variable domain of TCR clone 205277 (TRBV7-9, TRBJ2-7)
CPSSPGGGLTYEQYF

SEQ ID NO: 410555 - protein, 13 aa, Homo sapiens
  CDR3 for alpha chain variable domain of TCR clone 205278 (TRAV8-2, TRAJ49)
CVLTPNTGNQFYF

SEQ ID NO: 410556 - protein, 15 aa, Homo sapiens
  CDR3 for beta chain variable domain of TCR clone 205278 (TRBV11-2, TRBJ2-1)
CASSLTSGGYNEQFF

SEQ ID NO: 410557 - protein, 14 aa, Homo sapiens
  CDR3 for alpha chain variable domain of TCR clone 205279 (TRAV12-2, TRAJ17)
CAVLFKAAGNKLTF

SEQ ID NO: 410558 - protein, 14 aa, Homo sapiens
  CDR3 for beta chain variable domain of TCR clone 205279 (TRBV4-1, TRBJ2-2)
CASSQAVSTGELFY

SEQ ID NO: 410559 - protein, 12 aa, Homo sapiens
  CDR3 for alpha chain variable domain of TCR clone 205280 (TRAV21, TRAJ58)
CAAETRGSRLTF

SEQ ID NO: 410560 - protein, 18 aa, Homo sapiens
  CDR3 for beta chain variable domain of TCR clone 205280 (TRBV20-1, TRBJ2-6)
CSAETTPTHGSGANVLTF

SEQ ID NO: 410561 - protein, 11 aa, Homo sapiens
  CDR3 for alpha chain variable domain of TCR clone 205281 (TRAV21, TRAJ11)
CAANGYSTLTF

SEQ ID NO: 410562 - protein, 11 aa, Homo sapiens
  CDR3 for beta chain variable domain of TCR clone 205281 (TRBV19, TRBJ1-1)
CASSIGSEAFS

SEQ ID NO: 410563 - protein, 11 aa, Homo sapiens
  CDR3 for alpha chain variable domain of TCR clone 205282 (TRAV3, TRAJ21)
CSVGNFNKFYF

SEQ ID NO: 410564 - protein, 13 aa, Homo sapiens
  CDR3 for beta chain variable domain of TCR clone 205282 (TRBV9, TRBJ2-1)
CASSVGQGGEQSF

SEQ ID NO: 410565 - protein, 15 aa, Homo sapiens
  CDR3 for alpha chain variable domain of TCR clone 205283 (TRAV26-1, TRAJ47)
CIVRVGWGYGNKLFF

SEQ ID NO: 410566 - protein, 13 aa, Homo sapiens
  CDR3 for beta chain variable domain of TCR clone 205283 (TRBV20-1, TRBJ2-7)
CSARGDTQDEQYF

SEQ ID NO: 410567 - protein, 13 aa, Homo sapiens
  CDR3 for alpha chain variable domain of TCR clone 205284 (TRAV12-3, TRAJ40)
CAMSDSGTYKYIF

SEQ ID NO: 410568 - protein, 15 aa, Homo sapiens
  CDR3 for beta chain variable domain of TCR clone 205284 (TRBV19, TRBJ2-4)
CASRGPRRGENIQYF

SEQ ID NO: 410569 - protein, 15 aa, Homo sapiens
  CDR3 for alpha chain variable domain of TCR clone 205285 (TRAV26-1, TRAJ37)
CIVKTGSSNTGKLIF

SEQ ID NO: 410570 - protein, 14 aa, Homo sapiens
  CDR3 for beta chain variable domain of TCR clone 205285 (TRBV25-1, TRBJ1-1)
CASTHLGGNTEAFF

SEQ ID NO: 410571 - protein, 13 aa, Homo sapiens
  CDR3 for alpha chain variable domain of TCR clone 205286 (TRAV17, TRAJ7)
CATDNYGNNRLAF

SEQ ID NO: 410572 - protein, 16 aa, Homo sapiens
  CDR3 for beta chain variable domain of TCR clone 205286 (TRBV4-1, TRBJ2-5)
CASSPAIAASSATQYF

SEQ ID NO: 410573 - protein, 14 aa, Homo sapiens
  CDR3 for alpha chain variable domain of TCR clone 205287 (TRAV8-4, TRAJ4)
CAVSPSGGYTKLIF

SEQ ID NO: 410574 - protein, 15 aa, Homo sapiens
  CDR3 for beta chain variable domain of TCR clone 205287 (TRBV7-8, TRBJ2-3)
CASSLSADSGGAQYF

SEQ ID NO: 410575 - protein, 14 aa, Homo sapiens
  CDR3 for alpha chain variable domain of TCR clone 205288 (TRAV13-1, TRAJ44)
CAAKATGPASKLTF

SEQ ID NO: 410576 - protein, 14 aa, Homo sapiens
  CDR3 for beta chain variable domain of TCR clone 205288 (TRBV25-1, TRBJ1-1)
CASTHLGGNTEAFF

SEQ ID NO: 410577 - protein, 16 aa, Homo sapiens
  CDR3 for alpha chain variable domain of TCR clone 205289 (TRAV30, TRAJ24)
CGTEIVDADSWGTFQF

SEQ ID NO: 410578 - protein, 15 aa, Homo sapiens
  CDR3 for beta chain variable domain of TCR clone 205289 (TRBV18, TRBJ2-1)
CASLPDRGRDNEQFF

SEQ ID NO: 410579 - protein, 14 aa, Homo sapiens
  CDR3 for alpha chain variable domain of TCR clone 205290 (TRAV38-1, TRAJ29)
CAFITPSGNTPLVF

SEQ ID NO: 410580 - protein, 14 aa, Homo sapiens
  CDR3 for beta chain variable domain of TCR clone 205290 (TRBV5-1, TRBJ2-7)
CASSRGESLYEQYF

SEQ ID NO: 410581 - protein, 13 aa, Homo sapiens
  CDR3 for alpha chain variable domain of TCR clone 205291 (TRAV35, TRAJ21)
CAGLLSNFNKFYF

SEQ ID NO: 410582 - protein, 11 aa, Homo sapiens
  CDR3 for beta chain variable domain of TCR clone 205291 (TRBV7-6, TRBJ2-5)
CASSSQETQYF

SEQ ID NO: 410583 - protein, 15 aa, Homo sapiens
  CDR3 for alpha chain variable domain of TCR clone 205292 (TRAV17, TRAJ16)
CATALRFSDGQKLLF

SEQ ID NO: 410584 - protein, 15 aa, Homo sapiens
  CDR3 for beta chain variable domain of TCR clone 205292 (TRBV20-1, TRBJ1-1)
CSAGRGVTGNTEAFF

SEQ ID NO: 410585 - protein, 14 aa, Homo sapiens
  CDR3 for alpha chain variable domain of TCR clone 205293 (TRAV12-3, TRAJ43)
CAMSLGGSGTRLTV

SEQ ID NO: 410586 - protein, 13 aa, Homo sapiens
  CDR3 for beta chain variable domain of TCR clone 205293 (TRBV7-9, TRBJ1-2)
CASSLKQNYGYTF

SEQ ID NO: 410587 - protein, 16 aa, Homo sapiens
  CDR3 for alpha chain variable domain of TCR clone 205294 (TRAV30, TRAJ24)
CGTEIVDADSWGRLQF

SEQ ID NO: 410588 - protein, 14 aa, Homo sapiens
  CDR3 for beta chain variable domain of TCR clone 205294 (TRBV12-5, TRBJ2-5)
CASGSRTHQETQYF

SEQ ID NO: 410589 - protein, 12 aa, Homo sapiens
  CDR3 for alpha chain variable domain of TCR clone 205295 (TRAV16, TRAJ27)
CALNTNAGESTF

SEQ ID NO: 410590 - protein, 14 aa, Homo sapiens
  CDR3 for beta chain variable domain of TCR clone 205295 (TRBV5-1, TRBJ2-7)
CASSLGVRAYEQYF

SEQ ID NO: 410591 - protein, 11 aa, Homo sapiens
  CDR3 for alpha chain variable domain of TCR clone 205296 (TRAV14/DV4, )
CAMREISRTLT

SEQ ID NO: 410592 - protein, 14 aa, Homo sapiens
  CDR3 for beta chain variable domain of TCR clone 205296 (TRBV2, TRBJ2-1)
CASSGRAYYNEQFF

SEQ ID NO: 410593 - protein, 14 aa, Homo sapiens
  CDR3 for alpha chain variable domain of TCR clone 205297 (TRAV12-2, TRAJ45)
CAVNIGGGADGLTF

SEQ ID NO: 410594 - protein, 17 aa, Homo sapiens
  CDR3 for beta chain variable domain of TCR clone 205297 (TRBV7-8, TRBJ2-6)
CASSAGTGGAGANVLSF

SEQ ID NO: 410595 - protein, 13 aa, Homo sapiens
  CDR3 for alpha chain variable domain of TCR clone 205298 (TRAV26-2, TRAJ43)
CILRAVNNNDMRF

SEQ ID NO: 410596 - protein, 15 aa, Homo sapiens
  CDR3 for beta chain variable domain of TCR clone 205298 (TRBV20-1, TRBJ2-7)
CSASIRSGRENEQYF

SEQ ID NO: 410597 - protein, 14 aa, Homo sapiens
  CDR3 for alpha chain variable domain of TCR clone 205299 (TRAV9-2, TRAJ39)
CALYIYNAGNMLTF

SEQ ID NO: 410598 - protein, 16 aa, Homo sapiens
  CDR3 for beta chain variable domain of TCR clone 205299 (TRBV19, TRBJ1-1)
CASSPTRFWPGTEAFF

SEQ ID NO: 410599 - protein, 15 aa, Homo sapiens
  CDR3 for alpha chain variable domain of TCR clone 205300 (TRAV21, TRAJ53)
CATLNSGGSNYKLTF

SEQ ID NO: 410600 - protein, 20 aa, Homo sapiens
  CDR3 for beta chain variable domain of TCR clone 205300 (TRBV7-3, TRBJ1-1)
GGTQPCISVPAARIGAEAFF

SEQ ID NO: 410601 - protein, 13 aa, Homo sapiens
  CDR3 for alpha chain variable domain of TCR clone 205301 (TRAV26-2, TRAJ37)
CIRGSSNTGKLIF

SEQ ID NO: 410602 - protein, 16 aa, Homo sapiens
  CDR3 for beta chain variable domain of TCR clone 205301 (TRBV7-2, TRBJ2-5)
CARSPGGARRGETQYF

SEQ ID NO: 410603 - protein, 12 aa, Homo sapiens
  CDR3 for alpha chain variable domain of TCR clone 205302 (TRAV23/DV6, TRAJ30)
CAASKGDDKIIF

SEQ ID NO: 410604 - protein, 18 aa, Homo sapiens
  CDR3 for beta chain variable domain of TCR clone 205302 (TRBV10-3, TRBJ2-3)
CAISESRVGPMRGDTKYF

SEQ ID NO: 410605 - protein, 12 aa, Homo sapiens
  CDR3 for alpha chain variable domain of TCR clone 205303 (TRAV3, TRAJ27)
CAVRDGAGKLTF

SEQ ID NO: 410606 - protein, 16 aa, Homo sapiens
  CDR3 for beta chain variable domain of TCR clone 205303 (TRBV19, TRBJ2-1)
CASSKAGPSSYNEQFF

SEQ ID NO: 410607 - protein, 14 aa, Homo sapiens
  CDR3 for alpha chain variable domain of TCR clone 205304 (TRAV1-2, TRAJ29)
CAVRYLTSATPLVF

SEQ ID NO: 410608 - protein, 14 aa, Homo sapiens
  CDR3 for beta chain variable domain of TCR clone 205304 (TRBV3-1, TRBJ2-5)
CASSQGPDQETQYF

SEQ ID NO: 410609 - protein, 11 aa, Homo sapiens
  CDR3 for alpha chain variable domain of TCR clone 205305 (TRAV17, TRAJ31)
CATSNNARLMF

SEQ ID NO: 410610 - protein, 20 aa, Homo sapiens
  CDR3 for beta chain variable domain of TCR clone 205305 (TRBV7-8, TRBJ2-2)
CASSHLFPGPTIHITGELFF

SEQ ID NO: 410611 - protein, 14 aa, Homo sapiens
  CDR3 for alpha chain variable domain of TCR clone 205306 (TRAV35, TRAJ10)
CAGILTGGGNKLTF

SEQ ID NO: 410612 - protein, 16 aa, Homo sapiens
  CDR3 for beta chain variable domain of TCR clone 205306 (TRBV12-5, TRBJ2-5)
CASGPRTSGKQETQYF

SEQ ID NO: 410613 - protein, 12 aa, Homo sapiens
  CDR3 for alpha chain variable domain of TCR clone 205307 (TRAV1-1, TRAJ15)
CAVGQAGTALIF

SEQ ID NO: 410614 - protein, 18 aa, Homo sapiens
  CDR3 for beta chain variable domain of TCR clone 205307 (TRBV12-4, TRBJ2-2)
CASSLVAGTRGRTGELFF

SEQ ID NO: 410615 - protein, 11 aa, Homo sapiens
  CDR3 for alpha chain variable domain of TCR clone 205308 (TRAV1-2, TRAJ10)
CFTGGGNKLAF

SEQ ID NO: 410616 - protein, 13 aa, Homo sapiens
  CDR3 for beta chain variable domain of TCR clone 205308 (TRBV27, TRBJ2-1)
CASRTRGVGEQFF

SEQ ID NO: 410617 - protein, 17 aa, Homo sapiens
  CDR3 for alpha chain variable domain of TCR clone 205309 (TRAV3, TRAJ42)
CAVRDRDYGGGQGNLIF

SEQ ID NO: 410618 - protein, 18 aa, Homo sapiens
  CDR3 for beta chain variable domain of TCR clone 205309 (TRBV20-1, TRBJ2-3)
CSASGLAGGPGTTDTQYF

SEQ ID NO: 410619 - protein, 12 aa, Homo sapiens
  CDR3 for alpha chain variable domain of TCR clone 205310 (TRAV12-1, TRAJ40)
CVMPSGTYKYIF

SEQ ID NO: 410620 - protein, 15 aa, Homo sapiens
  CDR3 for beta chain variable domain of TCR clone 205310 (TRBV12-4, TRBJ2-1)
CAGSPLSGRNSEQFF

SEQ ID NO: 410621 - protein, 16 aa, Homo sapiens
  CDR3 for alpha chain variable domain of TCR clone 205311 (TRAV26-1, TRAJ38)
CIVRVAGAGNNRKLIW

SEQ ID NO: 410622 - protein, 13 aa, Homo sapiens
  CDR3 for beta chain variable domain of TCR clone 205311 (TRBV14, TRBJ1-2)
CASSQDRRRGYTF

SEQ ID NO: 410623 - protein, 14 aa, Homo sapiens
  CDR3 for alpha chain variable domain of TCR clone 205312 (TRAV12-2, TRAJ11)
CAVNRETGYSTLTF

SEQ ID NO: 410624 - protein, 10 aa, Homo sapiens
  CDR3 for beta chain variable domain of TCR clone 205312 (TRBV20-1, TRBJ2-5)
CSARFETQYL

SEQ ID NO: 410625 - protein, 15 aa, Homo sapiens
  CDR3 for alpha chain variable domain of TCR clone 205313 (TRAV8-3, TRAJ27)
CAVGPSKTNAGKSTF

SEQ ID NO: 410626 - protein, 14 aa, Homo sapiens
  CDR3 for beta chain variable domain of TCR clone 205313 (TRBV18, TRBJ2-7)
CASSPRGGAYEQYF

SEQ ID NO: 410627 - protein, 13 aa, Homo sapiens
  CDR3 for alpha chain variable domain of TCR clone 205314 (TRAV12-1, TRAJ6)
SVVFPGGSYIPTF

SEQ ID NO: 410628 - protein, 14 aa, Homo sapiens
  CDR3 for beta chain variable domain of TCR clone 205314 (TRBV20-1, TRBJ1-3)
CSASPTGAGNTIYF

SEQ ID NO: 410629 - protein, 17 aa, Homo sapiens
  CDR3 for alpha chain variable domain of TCR clone 205315 (TRAV4, TRAJ42)
CLVGVLNYGGSQGNPNF

SEQ ID NO: 410630 - protein, 12 aa, Homo sapiens
  CDR3 for beta chain variable domain of TCR clone 205315 (TRBV20-1, TRBJ2-1)
CSAQYTYNEQFF

SEQ ID NO: 410631 - protein, 13 aa, Homo sapiens
  CDR3 for alpha chain variable domain of TCR clone 205316 (TRAV8-6, TRAJ40)
CAVSVTGTYTYIF

SEQ ID NO: 410632 - protein, 15 aa, Homo sapiens
  CDR3 for beta chain variable domain of TCR clone 205316 (TRBV4-1, TRBJ2-3)
CASGRGQGIPDTQYF

SEQ ID NO: 410633 - protein, 15 aa, Homo sapiens
  CDR3 for alpha chain variable domain of TCR clone 205317 (TRAV8-3, TRAJ6)
CAVGPLGGGSYIPAF

SEQ ID NO: 410634 - protein, 14 aa, Homo sapiens
  CDR3 for beta chain variable domain of TCR clone 205317 (TRBV19, TRBJ2-2)
CASSTGQGAGELFF

SEQ ID NO: 410635 - protein, 14 aa, Homo sapiens
  CDR3 for alpha chain variable domain of TCR clone 205318 (TRAV8-3, TRAJ15)
CAVGLNQAGTALIF

SEQ ID NO: 410636 - protein, 14 aa, Homo sapiens
  CDR3 for beta chain variable domain of TCR clone 205318 (TRBV15, TRBJ1-2)
CATSRDFDRVGYTF

SEQ ID NO: 410637 - protein, 21 aa, Homo sapiens
  CDR3 for alpha chain variable domain of TCR clone 205319 (TRAV1-1, TRAJ6)
CLLLLRCERLERTGGSYIPTF

SEQ ID NO: 410638 - protein, 13 aa, Homo sapiens
  CDR3 for beta chain variable domain of TCR clone 205319 (TRBV7-2, TRBJ2-5)
CQQLVRGEETQYF

SEQ ID NO: 410639 - protein, 16 aa, Homo sapiens
  CDR3 for alpha chain variable domain of TCR clone 205320 (TRAV38-1, TRAJ42)
CAFRLVRGGSQGNLIF

SEQ ID NO: 410640 - protein, 15 aa, Homo sapiens
  CDR3 for beta chain variable domain of TCR clone 205320 (TRBV5-1, TRBJ2-3)
CASSVTSGSTDTQYF

SEQ ID NO: 410641 - protein, 13 aa, Homo sapiens
  CDR3 for alpha chain variable domain of TCR clone 205321 (TRAV21, TRAJ57)
CAVTQGGSEKLVF

SEQ ID NO: 410642 - protein, 15 aa, Homo sapiens
  CDR3 for beta chain variable domain of TCR clone 205321 (TRBV11-2, TRBJ1-1)
CASSSRSSLLLSLDK

SEQ ID NO: 410643 - protein, 13 aa, Homo sapiens
  CDR3 for alpha chain variable domain of TCR clone 205322 (TRAV13-1, TRAJ5)
CAAEHTGRRALTF

SEQ ID NO: 410644 - protein, 20 aa, Homo sapiens
  CDR3 for beta chain variable domain of TCR clone 205322 (TRBV28, TRBJ2-1)
CASTPIGRSPGLAGGNEQFF

SEQ ID NO: 410645 - protein, 11 aa, Homo sapiens
  CDR3 for alpha chain variable domain of TCR clone 205323 (TRAV12-3, TRAJ49)
CAANTGNQFYF

SEQ ID NO: 410646 - protein, 11 aa, Homo sapiens
  CDR3 for beta chain variable domain of TCR clone 205323 (TRBV7-2, TRBJ2-7)
CASSSGLWQYF

SEQ ID NO: 410647 - protein, 11 aa, Homo sapiens
  CDR3 for alpha chain variable domain of TCR clone 205324 (TRAV2, TRAJ33)
CSVDSNYQLIW

SEQ ID NO: 410648 - protein, 13 aa, Homo sapiens
  CDR3 for beta chain variable domain of TCR clone 205324 (TRBV7-2, TRBJ2-7)
CASSSPSGSEQYF

SEQ ID NO: 410649 - protein, 15 aa, Homo sapiens
  CDR3 for alpha chain variable domain of TCR clone 205325 (TRAV21, TRAJ57)
CAVIITQGGSEKLVF

SEQ ID NO: 410650 - protein, 14 aa, Homo sapiens
  CDR3 for beta chain variable domain of TCR clone 205325 (TRBV11-2, TRBJ2-3)
CASSLYAGRDTQYF

SEQ ID NO: 410651 - protein, 16 aa, Homo sapiens
  CDR3 for alpha chain variable domain of TCR clone 205326 (TRAV12-1, TRAJ22)
CVVNSISSGSARQLTF

SEQ ID NO: 410652 - protein, 14 aa, Homo sapiens
  CDR3 for beta chain variable domain of TCR clone 205326 (TRBV19, TRBJ2-5)
CASSMTGQQETQYF

SEQ ID NO: 410653 - protein, 15 aa, Homo sapiens
  CDR3 for alpha chain variable domain of TCR clone 205327 (TRAV23/DV6, TRAJ18)
CAARYRGSTLGRLYS

SEQ ID NO: 410654 - protein, 11 aa, Homo sapiens
  CDR3 for beta chain variable domain of TCR clone 205327 (TRBV29-1, TRBJ2-5)
CSEDRTGTQYF

SEQ ID NO: 410655 - protein, 11 aa, Homo sapiens
  CDR3 for alpha chain variable domain of TCR clone 205328 (TRAV13-1, TRAJ15)
CAATPGTALIF

SEQ ID NO: 410656 - protein, 13 aa, Homo sapiens
  CDR3 for beta chain variable domain of TCR clone 205328 (TRBV7-2, TRBJ2-1)
CASSLGVYSEQFF

SEQ ID NO: 410657 - protein, 17 aa, Homo sapiens
  CDR3 for alpha chain variable domain of TCR clone 205329 (TRAV17, TRAJ7)
SATLGRLAFGKGNQVVV

SEQ ID NO: 410658 - protein, 13 aa, Homo sapiens
  CDR3 for beta chain variable domain of TCR clone 205329 (TRBV12-4, TRBJ2-7)
CASSLERVREQYF

SEQ ID NO: 410659 - protein, 15 aa, Homo sapiens
  CDR3 for alpha chain variable domain of TCR clone 205330 (TRAV8-3, TRAJ40)
CAAPSLGPGPYKYIF

SEQ ID NO: 410660 - protein, 16 aa, Homo sapiens
  CDR3 for beta chain variable domain of TCR clone 205330 (TRBV7-3, TRBJ2-3)
CASSLSGYRPEDTQYF

SEQ ID NO: 410661 - protein, 14 aa, Homo sapiens
  CDR3 for alpha chain variable domain of TCR clone 205331 (TRAV27, TRAJ45)
CAGAQEEVLTDYPL

SEQ ID NO: 410662 - protein, 17 aa, Homo sapiens
  CDR3 for beta chain variable domain of TCR clone 205331 (TRBV11-2, TRBJ2-1)
CASSLYPPGVEYNEQFF

SEQ ID NO: 410663 - protein, 12 aa, Homo sapiens
  CDR3 for alpha chain variable domain of TCR clone 205332 (TRAV1-2, TRAJ24)
CAVCGSWGKFQF

SEQ ID NO: 410664 - protein, 15 aa, Homo sapiens
  CDR3 for beta chain variable domain of TCR clone 205332 (TRBV6-1, TRBJ2-7)
CASSEGVGNPYEQYF

SEQ ID NO: 410665 - protein, 16 aa, Homo sapiens
  CDR3 for alpha chain variable domain of TCR clone 205333 (TRAV12-2, TRAJ40)
CAVIRGGTSGTYKYIF

SEQ ID NO: 410666 - protein, 14 aa, Homo sapiens
  CDR3 for beta chain variable domain of TCR clone 205333 (TRBV11-2, TRBJ2-3)
CASSRLARTDTQYF

SEQ ID NO: 410667 - protein, 17 aa, Homo sapiens
  CDR3 for alpha chain variable domain of TCR clone 205334 (TRAV12-3, TRAJ26)
CAMGGGRWDNYGQNFVF

SEQ ID NO: 410668 - protein, 14 aa, Homo sapiens
  CDR3 for beta chain variable domain of TCR clone 205334 (TRBV19, TRBJ1-1)
CASSTQGLKLSLDK

SEQ ID NO: 410669 - protein, 13 aa, Homo sapiens
  CDR3 for alpha chain variable domain of TCR clone 205335 (TRAV2, TRAJ40)
CAVFTSGTYKYIF

SEQ ID NO: 410670 - protein, 14 aa, Homo sapiens
  CDR3 for beta chain variable domain of TCR clone 205335 (TRBV19, TRBJ2-3)
CASSAPRGTDTQYF

SEQ ID NO: 410671 - protein, 12 aa, Homo sapiens
  CDR3 for alpha chain variable domain of TCR clone 205336 (TRAV12-3, TRAJ17)
CAMTLTGNKLTF

SEQ ID NO: 410672 - protein, 13 aa, Homo sapiens
  CDR3 for beta chain variable domain of TCR clone 205336 (TRBV7-9, TRBJ1-2)
CASSLKQNYCYTF

SEQ ID NO: 410673 - protein, 13 aa, Homo sapiens
  CDR3 for alpha chain variable domain of TCR clone 205337 (TRAV13-1, TRAJ39)
CAASIWAGNMLTF

SEQ ID NO: 410674 - protein, 14 aa, Homo sapiens
  CDR3 for beta chain variable domain of TCR clone 205337 (TRBV6-1, TRBJ1-3)
CASVQGGGGNTIYF

SEQ ID NO: 410675 - protein, 14 aa, Homo sapiens
  CDR3 for alpha chain variable domain of TCR clone 205338 (TRAV21, TRAJ12)
CAVRNGDSSYKWIV

SEQ ID NO: 410676 - protein, 14 aa, Homo sapiens
  CDR3 for beta chain variable domain of TCR clone 205338 (TRBV7-6, TRBJ2-7)
CASSLTGTGNEQYF

SEQ ID NO: 410677 - protein, 12 aa, Homo sapiens
  CDR3 for alpha chain variable domain of TCR clone 205339 (TRAV17, TRAJ20)
CATDSNDYKLSF

SEQ ID NO: 410678 - protein, 15 aa, Homo sapiens
  CDR3 for beta chain variable domain of TCR clone 205339 (TRBV18, TRBJ2-7)
CASSPLQGRTYEQYF

SEQ ID NO: 410679 - protein, 16 aa, Homo sapiens
  CDR3 for alpha chain variable domain of TCR clone 205340 (TRAV14/DV4, TRAJ53)
CAMREGGGGSNYKLTF

SEQ ID NO: 410680 - protein, 13 aa, Homo sapiens
  CDR3 for beta chain variable domain of TCR clone 205340 (TRBV7-9, TRBJ2-5)
CASTPVGQETQYF

SEQ ID NO: 410681 - protein, 16 aa, Homo sapiens
  CDR3 for alpha chain variable domain of TCR clone 205341 (TRAV23/DV6, TRAJ3)
CSKHAVSYSSASKILF

SEQ ID NO: 410682 - protein, 15 aa, Homo sapiens
  CDR3 for beta chain variable domain of TCR clone 205341 (TRBV27, TRBJ2-1)
CASSNGGGSSNEQFF

SEQ ID NO: 410683 - protein, 14 aa, Homo sapiens
  CDR3 for alpha chain variable domain of TCR clone 205342 (TRAV12-2, TRAJ13)
CAVKKAGGYQKVTL

SEQ ID NO: 410684 - protein, 15 aa, Homo sapiens
  CDR3 for beta chain variable domain of TCR clone 205342 (TRBV27, TRBJ2-1)
CASSNGGGSSNEQFF

SEQ ID NO: 410685 - protein, 15 aa, Homo sapiens
  CDR3 for alpha chain variable domain of TCR clone 205343 (TRAV26-1, TRAJ47)
CIVRVGWGYGNKLVF

SEQ ID NO: 410686 - protein, 12 aa, Homo sapiens
  CDR3 for beta chain variable domain of TCR clone 205343 (TRBV7-2, TRBJ1-6)
CASSLSSSPLHF

SEQ ID NO: 410687 - protein, 19 aa, Homo sapiens
  CDR3 for alpha chain variable domain of TCR clone 205344 (TRAV13-1, TRAJ52)
CGASSSPNAGGTSYGKLTF

SEQ ID NO: 410688 - protein, 15 aa, Homo sapiens
  CDR3 for beta chain variable domain of TCR clone 205344 (TRBV9, TRBJ1-6)
CASSTGGGVDSPLHF

SEQ ID NO: 410689 - protein, 12 aa, Homo sapiens
  CDR3 for alpha chain variable domain of TCR clone 205345 (TRAV13-1, TRAJ48)
CAANFGNEKLTF

SEQ ID NO: 410690 - protein, 13 aa, Homo sapiens
  CDR3 for beta chain variable domain of TCR clone 205345 (TRBV7-3, TRBJ1-1)
CASSHDWGADAFF

SEQ ID NO: 410691 - protein, 15 aa, Homo sapiens
  CDR3 for alpha chain variable domain of TCR clone 205346 (TRAV34, TRAJ38)
CGADFTPGNNRKLIW

SEQ ID NO: 410692 - protein, 14 aa, Homo sapiens
  CDR3 for beta chain variable domain of TCR clone 205346 (TRBV7-8, TRBJ2-3)
CASSSRDSTDTQYF

SEQ ID NO: 410693 - protein, 12 aa, Homo sapiens
  CDR3 for alpha chain variable domain of TCR clone 205347 (TRAV23/DV6, TRAJ16)
CAATGTGQKRLF

SEQ ID NO: 410694 - protein, 20 aa, Homo sapiens
  CDR3 for beta chain variable domain of TCR clone 205347 (TRBV6-7, TRBJ1-2)
CASSYSAGQGNPLRVYGYTF

SEQ ID NO: 410695 - protein, 15 aa, Homo sapiens
  CDR3 for alpha chain variable domain of TCR clone 205348 (TRAV17, TRAJ57)
CATGPSQGGSKKLVF

SEQ ID NO: 410696 - protein, 16 aa, Homo sapiens
  CDR3 for beta chain variable domain of TCR clone 205348 (TRBV12-4, TRBJ1-5)
CASSRPVGGSNQPQHS

SEQ ID NO: 410697 - protein, 14 aa, Homo sapiens
  CDR3 for alpha chain variable domain of TCR clone 205349 (TRAV1-2, TRAJ10)
CAVRVTGGGNKLTY

SEQ ID NO: 410698 - protein, 12 aa, Homo sapiens
  CDR3 for beta chain variable domain of TCR clone 205349 (TRBV5-4, TRBJ1-1)
CASSFGQTEAFF

SEQ ID NO: 410699 - protein, 13 aa, Homo sapiens
  CDR3 for alpha chain variable domain of TCR clone 205350 (TRAV27, TRAJ6)
CAGGTRGSYIPKF

SEQ ID NO: 410700 - protein, 15 aa, Homo sapiens
  CDR3 for beta chain variable domain of TCR clone 205350 (TRBV9, TRBJ1-6)
CASSVAGTGDSPLHF

SEQ ID NO: 410701 - protein, 14 aa, Homo sapiens
  CDR3 for alpha chain variable domain of TCR clone 205351 (TRAV17, TRAJ57)
CATEAQGGSEKLVF

SEQ ID NO: 410702 - protein, 16 aa, Homo sapiens
  CDR3 for beta chain variable domain of TCR clone 205351 (TRBV7-3, TRBJ2-2)
CASSLKRGTLSGELFF

SEQ ID NO: 410703 - protein, 18 aa, Homo sapiens
  CDR3 for alpha chain variable domain of TCR clone 205352 (TRAV26-1, TRAJ5)
CIVRVVPPRDTGRRALAF

SEQ ID NO: 410704 - protein, 15 aa, Homo sapiens
  CDR3 for beta chain variable domain of TCR clone 205352 (TRBV7-9, TRBJ2-7)
CASSLPMGQANEQYF

SEQ ID NO: 410705 - protein, 16 aa, Homo sapiens
  CDR3 for alpha chain variable domain of TCR clone 205353 (TRAV13-1, TRAJ13)
CTAFFLGVTRKLPLEL

SEQ ID NO: 410706 - protein, 15 aa, Homo sapiens
  CDR3 for beta chain variable domain of TCR clone 205353 (TRBV7-8, TRBJ2-1)
CASSLADSLYNEQFV

SEQ ID NO: 410707 - protein, 14 aa, Homo sapiens
  CDR3 for alpha chain variable domain of TCR clone 205354 (TRAV2, TRAJ22)
CAVEDSGSARQRTF

SEQ ID NO: 410708 - protein, 15 aa, Homo sapiens
  CDR3 for beta chain variable domain of TCR clone 205354 (TRBV28, TRBJ1-2)
CASSLPVGHGDGYTF

SEQ ID NO: 410709 - protein, 15 aa, Homo sapiens
  CDR3 for alpha chain variable domain of TCR clone 205355 (TRAV12-2, TRAJ53)
CAVNGGGGSNYKLTF

SEQ ID NO: 410710 - protein, 16 aa, Homo sapiens
  CDR3 for beta chain variable domain of TCR clone 205355 (TRBV19, TRBJ1-1)
CASSAWPQGLNTEAFF

SEQ ID NO: 410711 - protein, 16 aa, Homo sapiens
  CDR3 for alpha chain variable domain of TCR clone 205356 (TRAV14/DV4, TRAJ21)
CAIREGPENNFNKFYF

SEQ ID NO: 410712 - protein, 12 aa, Homo sapiens
  CDR3 for beta chain variable domain of TCR clone 205356 (TRBV29-1, TRBJ2-2)
CSVDKYTGELFF

SEQ ID NO: 410713 - protein, 15 aa, Homo sapiens
  CDR3 for alpha chain variable domain of TCR clone 205357 (TRAV13-2, TRAJ16)
CAENDRFSDGQKLLF

SEQ ID NO: 410714 - protein, 14 aa, Homo sapiens
  CDR3 for beta chain variable domain of TCR clone 205357 (TRBV29-1, TRBJ2-1)
CSVGAVAGGNEQFF

SEQ ID NO: 410715 - protein, 15 aa, Homo sapiens
  CDR3 for alpha chain variable domain of TCR clone 205358 (TRAV3, TRAJ9)
CAVRDSNTGGFKTIF

SEQ ID NO: 410716 - protein, 14 aa, Homo sapiens
  CDR3 for beta chain variable domain of TCR clone 205358 (TRBV19, TRBJ1-5)
CASSLGPGGEPQHF

SEQ ID NO: 410717 - protein, 16 aa, Homo sapiens
  CDR3 for alpha chain variable domain of TCR clone 205359 (TRAV36/DV7, TRAJ52)
CAVEDAGGTSYGKLTF

SEQ ID NO: 410718 - protein, 13 aa, Homo sapiens
  CDR3 for beta chain variable domain of TCR clone 205359 (TRBV5-7, TRBJ1-1)
CASSLFQNTEAFF

SEQ ID NO: 410719 - protein, 11 aa, Homo sapiens
  CDR3 for alpha chain variable domain of TCR clone 205360 (TRAV12-2, TRAJ31)
CAVTRWAGLMF

SEQ ID NO: 410720 - protein, 15 aa, Homo sapiens
  CDR3 for beta chain variable domain of TCR clone 205360 (TRBV19, TRBJ2-7)
CASSIGGGLVNEQYF

SEQ ID NO: 410721 - protein, 11 aa, Homo sapiens
  CDR3 for alpha chain variable domain of TCR clone 205361 (TRAV3, TRAJ21)
CAVGNFNKFYF

SEQ ID NO: 410722 - protein, 12 aa, Homo sapiens
  CDR3 for beta chain variable domain of TCR clone 205361 (TRBV14, TRBJ2-5)
CASSPLKETQYF

SEQ ID NO: 410723 - protein, 15 aa, Homo sapiens
  CDR3 for alpha chain variable domain of TCR clone 205362 (TRAV23/DV6, TRAJ18)
CSARYRGSTLGRRYF

SEQ ID NO: 410724 - protein, 13 aa, Homo sapiens
  CDR3 for beta chain variable domain of TCR clone 205362 (TRBV7-2, TRBJ2-7)
CASSSPSGSEQYF

SEQ ID NO: 410725 - protein, 14 aa, Homo sapiens
  CDR3 for alpha chain variable domain of TCR clone 205363 (TRAV12-3, TRAJ6)
CAMSATGGRYIPPF

SEQ ID NO: 410726 - protein, 16 aa, Homo sapiens
  CDR3 for beta chain variable domain of TCR clone 205363 (TRBV4-2, TRBJ2-1)
CASSPRAGQGANEQFF

SEQ ID NO: 410727 - protein, 18 aa, Homo sapiens
  CDR3 for alpha chain variable domain of TCR clone 205364 (TRAV13-1, TRAJ52)
CTAKNHNAGGTSYGKLTF

SEQ ID NO: 410728 - protein, 15 aa, Homo sapiens
  CDR3 for beta chain variable domain of TCR clone 205364 (TRBV6-1, TRBJ2-3)
CASSERGGITDTQYF

SEQ ID NO: 410729 - protein, 14 aa, Homo sapiens
  CDR3 for alpha chain variable domain of TCR clone 205365 (TRAV26-1, TRAJ45)
CIVRVVGGAGGLTF

SEQ ID NO: 410730 - protein, 16 aa, Homo sapiens
  CDR3 for beta chain variable domain of TCR clone 205365 (TRBV7-9, TRBJ1-1)
CASSLTQVRSNTEAFF

SEQ ID NO: 410731 - protein, 12 aa, Homo sapiens
  CDR3 for alpha chain variable domain of TCR clone 205366 (TRAV4, TRAJ34)
CLVCEGTDKLIF

SEQ ID NO: 410732 - protein, 13 aa, Homo sapiens
  CDR3 for beta chain variable domain of TCR clone 205366 (TRBV2, TRBJ2-7)
CATSMGLVYEQYF

SEQ ID NO: 410733 - protein, 12 aa, Homo sapiens
  CDR3 for alpha chain variable domain of TCR clone 205367 (TRAV16, TRAJ10)
CSRTGGGNKLTF

SEQ ID NO: 410734 - protein, 12 aa, Homo sapiens
  CDR3 for beta chain variable domain of TCR clone 205367 (TRBV7-8, TRBJ2-3)
CASSLWDEAQYF

SEQ ID NO: 410735 - protein, 15 aa, Homo sapiens
  CDR3 for alpha chain variable domain of TCR clone 205368 (TRAV17, TRAJ37)
CATGHGSSNTGKLIF

SEQ ID NO: 410736 - protein, 14 aa, Homo sapiens
  CDR3 for beta chain variable domain of TCR clone 205368 (TRBV7-2, TRBJ2-3)
CTSSRTSGADTQYF

SEQ ID NO: 410737 - protein, 13 aa, Homo sapiens
  CDR3 for alpha chain variable domain of TCR clone 205369 (TRAV13-2, TRAJ13)
CAERPGGYQKVTF

SEQ ID NO: 410738 - protein, 16 aa, Homo sapiens
  CDR3 for beta chain variable domain of TCR clone 205369 (TRBV15, TRBJ1-2)
CATSRGPRTGGGGYTF

SEQ ID NO: 410739 - protein, 13 aa, Homo sapiens
  CDR3 for alpha chain variable domain of TCR clone 205370 (TRAV2, TRAJ15)
CAVEAQAGTALIF

SEQ ID NO: 410740 - protein, 13 aa, Homo sapiens
  CDR3 for beta chain variable domain of TCR clone 205370 (TRBV7-3, TRBJ1-1)
CASSQDWGAEAFF

SEQ ID NO: 410741 - protein, 13 aa, Homo sapiens
  CDR3 for alpha chain variable domain of TCR clone 205371 (TRAV27, TRAJ41)
CAGEGNSGYALNF

SEQ ID NO: 410742 - protein, 15 aa, Homo sapiens
  CDR3 for beta chain variable domain of TCR clone 205371 (TRBV5-1, TRBJ2-5)
CASSFKGGDQETQYF

SEQ ID NO: 410743 - protein, 12 aa, Homo sapiens
  CDR3 for alpha chain variable domain of TCR clone 205372 (TRAV1-1, TRAJ24)
CAVRGSWGKFQF

SEQ ID NO: 410744 - protein, 15 aa, Homo sapiens
  CDR3 for beta chain variable domain of TCR clone 205372 (TRBV6-3, TRBJ2-7)
CASGSPGTVFYEQYF

SEQ ID NO: 410745 - protein, 15 aa, Homo sapiens
  CDR3 for alpha chain variable domain of TCR clone 205373 (TRAV12-2, TRAJ53)
CAVNGGGGSNYKLTF

SEQ ID NO: 410746 - protein, 14 aa, Homo sapiens
  CDR3 for beta chain variable domain of TCR clone 205373 (TRBV6-3, TRBJ2-2)
CASTYTPDTGELFF

SEQ ID NO: 410747 - protein, 14 aa, Homo sapiens
  CDR3 for alpha chain variable domain of TCR clone 205374 (TRAV13-2, TRAJ17)
CAENSKAAGNKLTF

SEQ ID NO: 410748 - protein, 13 aa, Homo sapiens
  CDR3 for beta chain variable domain of TCR clone 205374 (TRBV6-3, TRBJ2-3)
CTSVPQEADTQYF

SEQ ID NO: 410749 - protein, 16 aa, Homo sapiens
  CDR3 for alpha chain variable domain of TCR clone 205375 (TRAV17, TRAJ52)
CAPGIIGGTSYGKLTF

SEQ ID NO: 410750 - protein, 12 aa, Homo sapiens
  CDR3 for beta chain variable domain of TCR clone 205375 (TRBV7-3, TRBJ2-1)
CASSFINNEQFF

SEQ ID NO: 410751 - protein, 14 aa, Homo sapiens
  CDR3 for alpha chain variable domain of TCR clone 205376 (TRAV26-1, TRAJ39)
CIVRGSRAGNMLTF

SEQ ID NO: 410752 - protein, 15 aa, Homo sapiens
  CDR3 for beta chain variable domain of TCR clone 205376 (TRBV7-9, TRBJ1-5)
CASSQGPQPNQPQHF

SEQ ID NO: 410753 - protein, 14 aa, Homo sapiens
  CDR3 for alpha chain variable domain of TCR clone 205377 (TRAV16, TRAJ54)
FALSLIQGAQKLVS

SEQ ID NO: 410754 - protein, 17 aa, Homo sapiens
  CDR3 for beta chain variable domain of TCR clone 205377 (TRBV11-2, TRBJ2-4)
CASSSVGPGGDRNIQYF

SEQ ID NO: 410755 - protein, 12 aa, Homo sapiens
  CDR3 for alpha chain variable domain of TCR clone 205378 (TRAV8-3, TRAJ26)
CAGDNYGQNFVF

SEQ ID NO: 410756 - protein, 15 aa, Homo sapiens
  CDR3 for beta chain variable domain of TCR clone 205378 (TRBV9, TRBJ2-1)
CASGLAGRSYNEQFF

SEQ ID NO: 410757 - protein, 14 aa, Homo sapiens
  CDR3 for alpha chain variable domain of TCR clone 205379 (TRAV1-2, TRAJ8)
CAVREDTGFQKLVF

SEQ ID NO: 410758 - protein, 12 aa, Homo sapiens
  CDR3 for beta chain variable domain of TCR clone 205379 (TRBV7-9, TRBJ2-7)
CASSRTVYEQYF

SEQ ID NO: 410759 - protein, 14 aa, Homo sapiens
  CDR3 for alpha chain variable domain of TCR clone 205380 (TRAV1-1, TRAJ35)
CAVRSIGFGNVLHC

SEQ ID NO: 410760 - protein, 13 aa, Homo sapiens
  CDR3 for beta chain variable domain of TCR clone 205380 (TRBV7-7, TRBJ2-2)
CASSLTSAGELFF

SEQ ID NO: 410761 - protein, 12 aa, Homo sapiens
  CDR3 for alpha chain variable domain of TCR clone 205381 (TRAV3, TRAJ7)
CADLLWEQQTRF

SEQ ID NO: 410762 - protein, 13 aa, Homo sapiens
  CDR3 for beta chain variable domain of TCR clone 205381 (TRBV7-3, TRBJ2-5)
CQQLPGGGETQYF

SEQ ID NO: 410763 - protein, 13 aa, Homo sapiens
  CDR3 for alpha chain variable domain of TCR clone 205382 (TRAV27, TRAJ58)
CAGAETSGSRLTF

SEQ ID NO: 410764 - protein, 13 aa, Homo sapiens
  CDR3 for beta chain variable domain of TCR clone 205382 (TRBV7-2, TRBJ2-1)
CASNRDRWNEQFV

SEQ ID NO: 410765 - protein, 12 aa, Homo sapiens
  CDR3 for alpha chain variable domain of TCR clone 205383 (TRAV24, TRAJ26)
CALDNYGQNFVF

SEQ ID NO: 410766 - protein, 15 aa, Homo sapiens
  CDR3 for beta chain variable domain of TCR clone 205383 (TRBV11-2, TRBJ1-3)
CASSLDGTVGNTIYF

SEQ ID NO: 410767 - protein, 15 aa, Homo sapiens
  CDR3 for alpha chain variable domain of TCR clone 205384 (TRAV26-1, TRAJ29)
CIVRVEGSGNTPLVF

SEQ ID NO: 410768 - protein, 18 aa, Homo sapiens
  CDR3 for beta chain variable domain of TCR clone 205384 (TRBV18, TRBJ2-5)
CASSPGVSQETQYWARHA

SEQ ID NO: 410769 - protein, 13 aa, Homo sapiens
  CDR3 for alpha chain variable domain of TCR clone 205385 (TRAV13-1, TRAJ39)
CAAPFECRQHAHL

SEQ ID NO: 410770 - protein, 14 aa, Homo sapiens
  CDR3 for beta chain variable domain of TCR clone 205385 (TRBV25-1, TRBJ1-1)
CASTHLGGNTEAFF

SEQ ID NO: 410771 - protein, 14 aa, Homo sapiens
  CDR3 for alpha chain variable domain of TCR clone 205386 (TRAV13-1, TRAJ44)
CAAKATGTARKLTF

SEQ ID NO: 410772 - protein, 15 aa, Homo sapiens
  CDR3 for beta chain variable domain of TCR clone 205386 (TRBV4-3, TRBJ1-1)
CASSQELGRGTEAFF

SEQ ID NO: 410773 - protein, 19 aa, Homo sapiens
  CDR3 for alpha chain variable domain of TCR clone 205387 (TRAV1-2, TRAJ26)
CLLPLCCERPDNYGQNFVF

SEQ ID NO: 410774 - protein, 13 aa, Homo sapiens
  CDR3 for beta chain variable domain of TCR clone 205387 (TRBV12-4, TRBJ2-7)
CASSLERVREQYF

SEQ ID NO: 410775 - protein, 16 aa, Homo sapiens
  CDR3 for alpha chain variable domain of TCR clone 205388 (TRAV30, TRAJ24)
CGTEIVDADSWGKFQF

SEQ ID NO: 410776 - protein, 17 aa, Homo sapiens
  CDR3 for beta chain variable domain of TCR clone 205388 (TRBV5-1, TRBJ2-5)
CASSPVALGQNQETQYF

SEQ ID NO: 410777 - protein, 13 aa, Homo sapiens
  CDR3 for alpha chain variable domain of TCR clone 205389 (TRAV24, TRAJ23)
CASHWNQGGKLIF

SEQ ID NO: 410778 - protein, 15 aa, Homo sapiens
  CDR3 for beta chain variable domain of TCR clone 205389 (TRBV11-2, TRBJ2-1)
CASSSPSTRYNEQFF

SEQ ID NO: 410779 - protein, 16 aa, Homo sapiens
  CDR3 for alpha chain variable domain of TCR clone 205390 (TRAV3, TRAJ10)
CAVRDMRAGGGNKLTF

SEQ ID NO: 410780 - protein, 15 aa, Homo sapiens
  CDR3 for beta chain variable domain of TCR clone 205390 (TRBV20-1, TRBJ2-1)
CSAGGGLLAGDEQFF

SEQ ID NO: 410781 - protein, 19 aa, Homo sapiens
  CDR3 for alpha chain variable domain of TCR clone 205391 (TRAV26-1, TRAJ56)
CCVLCIVRVATGANSKLTF

SEQ ID NO: 410782 - protein, 15 aa, Homo sapiens
  CDR3 for beta chain variable domain of TCR clone 205391 (TRBV27, TRBJ2-7)
CASSPQREGQREQYF

SEQ ID NO: 410783 - protein, 12 aa, Homo sapiens
  CDR3 for alpha chain variable domain of TCR clone 205392 (TRAV13-1, TRAJ49)
CAASIRSNQFYF

SEQ ID NO: 410784 - protein, 14 aa, Homo sapiens
  CDR3 for beta chain variable domain of TCR clone 205392 (TRBV7-2, TRBJ2-1)
CARSPGLAGNEQFF

SEQ ID NO: 410785 - protein, 15 aa, Homo sapiens
  CDR3 for alpha chain variable domain of TCR clone 205393 (TRAV6, TRAJ21)
CAGLDTTSTNFTLDL

SEQ ID NO: 410786 - protein, 15 aa, Homo sapiens
  CDR3 for beta chain variable domain of TCR clone 205393 (TRBV23-1, TRBJ2-3)
RQQSRLAGVPDAQYF

SEQ ID NO: 410787 - protein, 18 aa, Homo sapiens
  CDR3 for alpha chain variable domain of TCR clone 205394 (TRAV9-2, TRAJ52)
CALSRHNAGGTSYGKLTF

SEQ ID NO: 410788 - protein, 15 aa, Homo sapiens
  CDR3 for beta chain variable domain of TCR clone 205394 (TRBV6-9, TRBJ1-5)
CASSYRGERDQPQHF

SEQ ID NO: 410789 - protein, 12 aa, Homo sapiens
  CDR3 for alpha chain variable domain of TCR clone 205395 (TRAV13-2, TRAJ23)
CAERHRGGKLIF

SEQ ID NO: 410790 - protein, 16 aa, Homo sapiens
  CDR3 for beta chain variable domain of TCR clone 205395 (TRBV11-2, TRBJ1-1)
CASSLRQGGGHSKAFF

SEQ ID NO: 410791 - protein, 14 aa, Homo sapiens
  CDR3 for alpha chain variable domain of TCR clone 205396 (TRAV2, TRAJ9)
CAVEDRSGVFKTIF

SEQ ID NO: 410792 - protein, 12 aa, Homo sapiens
  CDR3 for beta chain variable domain of TCR clone 205396 (TRBV7-9, TRBJ2-7)
CASSLEGYEQYF

SEQ ID NO: 410793 - protein, 14 aa, Homo sapiens
  CDR3 for alpha chain variable domain of TCR clone 205397 (TRAV20, TRAJ56)
CAVQFGGADSKLTF

SEQ ID NO: 410794 - protein, 14 aa, Homo sapiens
  CDR3 for beta chain variable domain of TCR clone 205397 (TRBV5-4, TRBJ1-1)
CASSLDSRRDEAFF

SEQ ID NO: 410795 - protein, 13 aa, Homo sapiens
  CDR3 for alpha chain variable domain of TCR clone 205398 (TRAV8-6, TRAJ49)
CAVITNTVNQFYF

SEQ ID NO: 410796 - protein, 17 aa, Homo sapiens
  CDR3 for beta chain variable domain of TCR clone 205398 (TRBV11-2, TRBJ2-1)
CASSLYPPGVEYNEQFF

SEQ ID NO: 410797 - protein, 16 aa, Homo sapiens
  CDR3 for alpha chain variable domain of TCR clone 205399 (TRAV4, TRAJ9)
CLVGDPNRPGGLQTIF

SEQ ID NO: 410798 - protein, 16 aa, Homo sapiens
  CDR3 for beta chain variable domain of TCR clone 205399 (TRBV28, TRBJ1-4)
CASSPPYRGRSEKLFF

SEQ ID NO: 410799 - protein, 14 aa, Homo sapiens
  CDR3 for alpha chain variable domain of TCR clone 205400 (TRAV8-4, TRAJ9)
CAVSDRTGGFKTIF

SEQ ID NO: 410800 - protein, 13 aa, Homo sapiens
  CDR3 for beta chain variable domain of TCR clone 205400 (TRBV11-2, TRBJ2-7)
CASSLRDSYEQYF

SEQ ID NO: 410801 - protein, 17 aa, Homo sapiens
  CDR3 for alpha chain variable domain of TCR clone 205401 (TRAV3, TRAJ12)
CAVRDGGRMDSSYKLTF

SEQ ID NO: 410802 - protein, 13 aa, Homo sapiens
  CDR3 for beta chain variable domain of TCR clone 205401 (TRBV15, TRBJ1-6)
CATSGGLNSPLHF

SEQ ID NO: 410803 - protein, 14 aa, Homo sapiens
  CDR3 for alpha chain variable domain of TCR clone 205402 (TRAV27, TRAJ23)
CAGAFDNQGGKLIF

SEQ ID NO: 410804 - protein, 15 aa, Homo sapiens
  CDR3 for beta chain variable domain of TCR clone 205402 (TRBV7-3, TRBJ2-7)
CASSLTGQGKYEQYY

SEQ ID NO: 410805 - protein, 15 aa, Homo sapiens
  CDR3 for alpha chain variable domain of TCR clone 205403 (TRAV35, TRAJ58)
CAGRRQETSGSRLTF

SEQ ID NO: 410806 - protein, 16 aa, Homo sapiens
  CDR3 for beta chain variable domain of TCR clone 205403 (TRBV2, TRBJ2-1)
CASSVGGSLSYNEQFC

SEQ ID NO: 410807 - protein, 15 aa, Homo sapiens
  CDR3 for alpha chain variable domain of TCR clone 205404 (TRAV3, TRAJ4)
CAQNMFSGGYNKLIF

SEQ ID NO: 410808 - protein, 16 aa, Homo sapiens
  CDR3 for beta chain variable domain of TCR clone 205404 (TRBV3-1, TRBJ1-6)
CASSQEFHGSYSPLHF

SEQ ID NO: 410809 - protein, 15 aa, Homo sapiens
  CDR3 for alpha chain variable domain of TCR clone 205405 (TRAV23/DV6, TRAJ44)
CAARTLTGTASKLTF

SEQ ID NO: 410810 - protein, 17 aa, Homo sapiens
  CDR3 for beta chain variable domain of TCR clone 205405 (TRBV7-3, TRBJ2-5)
CASSLGSGRGGSETQYF

SEQ ID NO: 410811 - protein, 12 aa, Homo sapiens
  CDR3 for alpha chain variable domain of TCR clone 205406 (TRAV35, TRAJ30)
CAGQLADDKLIF

SEQ ID NO: 410812 - protein, 17 aa, Homo sapiens
  CDR3 for beta chain variable domain of TCR clone 205406 (TRBV4-2, TRBJ2-5)
CASSPGRWRNFQETQYF

SEQ ID NO: 410813 - protein, 13 aa, Homo sapiens
  CDR3 for alpha chain variable domain of TCR clone 205407 (TRAV29/DV5, TRAJ49)
CAASTNTGNPFYF

SEQ ID NO: 410814 - protein, 11 aa, Homo sapiens
  CDR3 for beta chain variable domain of TCR clone 205407 (TRBV6-1, TRBJ2-1)
CASISSNEQFF

SEQ ID NO: 410815 - protein, 12 aa, Homo sapiens
  CDR3 for alpha chain variable domain of TCR clone 205408 (TRAV20, TRAJ39)
CAVGNAGNMLTF

SEQ ID NO: 410816 - protein, 15 aa, Homo sapiens
  CDR3 for beta chain variable domain of TCR clone 205408 (TRBV4-1, TRBJ2-3)
CASSRGQGIPDTQYF

SEQ ID NO: 410817 - protein, 16 aa, Homo sapiens
  CDR3 for alpha chain variable domain of TCR clone 205409 (TRAV1-2, TRAJ10)
CAVRGVLTGGGNKLTF

SEQ ID NO: 410818 - protein, 14 aa, Homo sapiens
  CDR3 for beta chain variable domain of TCR clone 205409 (TRBV7-3, TRBJ1-1)
CASSLKGGNTEAFF

SEQ ID NO: 410819 - protein, 14 aa, Homo sapiens
  CDR3 for alpha chain variable domain of TCR clone 205410 (TRAV4, TRAJ9)
CLVGSGTGGFKTIF

SEQ ID NO: 410820 - protein, 12 aa, Homo sapiens
  CDR3 for beta chain variable domain of TCR clone 205410 (TRBV11-2, TRBJ2-2)
CASSLGGGELFF

SEQ ID NO: 410821 - protein, 15 aa, Homo sapiens
  CDR3 for alpha chain variable domain of TCR clone 205411 (TRAV17, TRAJ28)
CATDPSGAGSYQLTF

SEQ ID NO: 410822 - protein, 13 aa, Homo sapiens
  CDR3 for beta chain variable domain of TCR clone 205411 (TRBV10-3, TRBJ1-2)
CAINADLNYGYTF

SEQ ID NO: 410823 - protein, 13 aa, Homo sapiens
  CDR3 for alpha chain variable domain of TCR clone 205412 (TRAV27, TRAJ53)
CAGQGGSNDNLTF

SEQ ID NO: 410824 - protein, 13 aa, Homo sapiens
  CDR3 for beta chain variable domain of TCR clone 205412 (TRBV29-1, TRBJ1-1)
CSVESGFGTEAFF

SEQ ID NO: 410825 - protein, 14 aa, Homo sapiens
  CDR3 for alpha chain variable domain of TCR clone 205413 (TRAV26-2, TRAJ38)
CILYNSGNNRKLIW

SEQ ID NO: 410826 - protein, 14 aa, Homo sapiens
  CDR3 for beta chain variable domain of TCR clone 205413 (TRBV19, TRBJ2-1)
CASPTFVLSGEQFF

SEQ ID NO: 410827 - protein, 18 aa, Homo sapiens
  CDR3 for alpha chain variable domain of TCR clone 205414 (TRAV26-2, )
CILTDIQNPDPAVYQLRD

SEQ ID NO: 410828 - protein, 15 aa, Homo sapiens
  CDR3 for beta chain variable domain of TCR clone 205414 (TRBV5-7, TRBJ1-2)
CASSLGVAANYGYTF

SEQ ID NO: 410829 - protein, 14 aa, Homo sapiens
  CDR3 for alpha chain variable domain of TCR clone 205415 (TRAV1-2, TRAJ16)
CAVNRFSDGQKLLL

SEQ ID NO: 410830 - protein, 15 aa, Homo sapiens
  CDR3 for beta chain variable domain of TCR clone 205415 (TRBV27, TRBJ2-3)
CASRSLAGVIDTQYF

SEQ ID NO: 410831 - protein, 11 aa, Homo sapiens
  CDR3 for alpha chain variable domain of TCR clone 205416 (TRAV3, TRAJ21)
CSVGNFNKFYF

SEQ ID NO: 410832 - protein, 16 aa, Homo sapiens
  CDR3 for beta chain variable domain of TCR clone 205416 (TRBV19, TRBJ2-1)
CASSKAGPSSYNGQFF

SEQ ID NO: 410833 - protein, 15 aa, Homo sapiens
  CDR3 for alpha chain variable domain of TCR clone 205417 (TRAV21, TRAJ40)
CAVRPQTSGTYKYIF

SEQ ID NO: 410834 - protein, 11 aa, Homo sapiens
  CDR3 for beta chain variable domain of TCR clone 205417 (TRBV7-2, TRBJ2-7)
CASSSVRAGHQ

SEQ ID NO: 410835 - protein, 14 aa, Homo sapiens
  CDR3 for alpha chain variable domain of TCR clone 205418 (TRAV12-2, TRAJ5)
CAVNRSTGRRALTF

SEQ ID NO: 410836 - protein, 15 aa, Homo sapiens
  CDR3 for beta chain variable domain of TCR clone 205418 (TRBV11-2, TRBJ1-3)
CASSLSPLVRDTIYF

SEQ ID NO: 410837 - protein, 13 aa, Homo sapiens
  CDR3 for alpha chain variable domain of TCR clone 205419 (TRAV17, TRAJ26)
CATVDNYGQNFVF

SEQ ID NO: 410838 - protein, 13 aa, Homo sapiens
  CDR3 for beta chain variable domain of TCR clone 205419 (TRBV7-9, TRBJ1-2)
CASGLKQNYGYTF

SEQ ID NO: 410839 - protein, 15 aa, Homo sapiens
  CDR3 for alpha chain variable domain of TCR clone 205420 (TRAV27, TRAJ37)
CAGIHGSSNTGKLIF

SEQ ID NO: 410840 - protein, 13 aa, Homo sapiens
  CDR3 for beta chain variable domain of TCR clone 205420 (TRBV19, TRBJ2-1)
CASSIRSSCEQFF

SEQ ID NO: 410841 - protein, 13 aa, Homo sapiens
  CDR3 for alpha chain variable domain of TCR clone 205421 (TRAV2, TRAJ16)
CAVEDRDGQKLLF

SEQ ID NO: 410842 - protein, 14 aa, Homo sapiens
  CDR3 for beta chain variable domain of TCR clone 205421 (TRBV25-1, TRBJ1-1)
CASTHLGGNTEAFF

SEQ ID NO: 410843 - protein, 12 aa, Homo sapiens
  CDR3 for alpha chain variable domain of TCR clone 205422 (TRAV8-3, TRAJ26)
CAGDNYGQNFVF

SEQ ID NO: 410844 - protein, 17 aa, Homo sapiens
  CDR3 for beta chain variable domain of TCR clone 205422 (TRBV7-8, TRBJ2-6)
CASSAGTGGAGANALTF

SEQ ID NO: 410845 - protein, 14 aa, Homo sapiens
  CDR3 for alpha chain variable domain of TCR clone 205423 (TRAV1-2, TRAJ16)
CAVNRFSDGQKLLF

SEQ ID NO: 410846 - protein, 15 aa, Homo sapiens
  CDR3 for beta chain variable domain of TCR clone 205423 (TRBV11-2, TRBJ2-5)
CASSLVRGGIETQYF

SEQ ID NO: 410847 - protein, 12 aa, Homo sapiens
  CDR3 for alpha chain variable domain of TCR clone 205424 (TRAV13-1, TRAJ21)
CAAKEGFNKFYF

SEQ ID NO: 410848 - protein, 18 aa, Homo sapiens
  CDR3 for beta chain variable domain of TCR clone 205424 (TRBV20-1, TRBJ2-6)
SSAETTPTHGSGANVLTF

SEQ ID NO: 410849 - protein, 13 aa, Homo sapiens
  CDR3 for alpha chain variable domain of TCR clone 205425 (TRAV3, TRAJ29)
CAVRDIIDTPLVF

SEQ ID NO: 410850 - protein, 15 aa, Homo sapiens
  CDR3 for beta chain variable domain of TCR clone 205425 (TRBV7-9, TRBJ2-7)
CASSLALAEDYEQYF

SEQ ID NO: 410851 - protein, 20 aa, Homo sapiens
  CDR3 for alpha chain variable domain of TCR clone 205426 (TRAV1-2, TRAJ34)
LLKELQMKDSASPNTDKLIF

SEQ ID NO: 410852 - protein, 13 aa, Homo sapiens
  CDR3 for beta chain variable domain of TCR clone 205426 (TRBV15, TRBJ1-6)
CATSGGLNSPLHF

SEQ ID NO: 410853 - protein, 13 aa, Homo sapiens
  CDR3 for alpha chain variable domain of TCR clone 205427 (TRAV2, TRAJ40)
CAVVTSGAYKYIF

SEQ ID NO: 410854 - protein, 14 aa, Homo sapiens
  CDR3 for beta chain variable domain of TCR clone 205427 (TRBV4-2, TRBJ2-1)
CASGLDRAYNEQFF

SEQ ID NO: 410855 - protein, 15 aa, Homo sapiens
  CDR3 for alpha chain variable domain of TCR clone 205428 (TRAV26-1, TRAJ37)
CIVRVADGNTGNLIF

SEQ ID NO: 410856 - protein, 14 aa, Homo sapiens
  CDR3 for beta chain variable domain of TCR clone 205428 (TRBV10-3, TRBJ2-2)
CATFGQLNTGELFF

SEQ ID NO: 410857 - protein, 10 aa, Homo sapiens
  CDR3 for alpha chain variable domain of TCR clone 205429 (TRAV1-2, TRAJ31)
CVSEDARLMF

SEQ ID NO: 410858 - protein, 15 aa, Homo sapiens
  CDR3 for beta chain variable domain of TCR clone 205429 (TRBV19, TRBJ2-7)
CASSPAGSGEALRYF

SEQ ID NO: 410859 - protein, 14 aa, Homo sapiens
  CDR3 for alpha chain variable domain of TCR clone 205430 (TRAV1-2, TRAJ8)
CAVREDTGFQKLVF

SEQ ID NO: 410860 - protein, 14 aa, Homo sapiens
  CDR3 for beta chain variable domain of TCR clone 205430 (TRBV6-3, TRBJ2-7)
CSSSPGTVFYEQYF

SEQ ID NO: 410861 - protein, 15 aa, Homo sapiens
  CDR3 for alpha chain variable domain of TCR clone 205431 (TRAV8-3, TRAJ37)
CAVGAWASNTGKLIF

SEQ ID NO: 410862 - protein, 15 aa, Homo sapiens
  CDR3 for beta chain variable domain of TCR clone 205431 (TRBV5-4, TRBJ2-3)
CASSLAGRVTDTQYF

SEQ ID NO: 410863 - protein, 15 aa, Homo sapiens
  CDR3 for alpha chain variable domain of TCR clone 205432 (TRAV8-2, TRAJ40)
CVVLGTTSGIYKYIF

SEQ ID NO: 410864 - protein, 16 aa, Homo sapiens
  CDR3 for beta chain variable domain of TCR clone 205432 (TRBV7-3, TRBJ2-1)
CASSLEGYRSYNEQFF

SEQ ID NO: 410865 - protein, 19 aa, Homo sapiens
  CDR3 for alpha chain variable domain of TCR clone 205433 (TRAV1-2, TRAJ26)
CLLPLCCERPDNYGQNFVF

SEQ ID NO: 410866 - protein, 14 aa, Homo sapiens
  CDR3 for beta chain variable domain of TCR clone 205433 (TRBV11-2, TRBJ2-7)
CASSLGAGAYEQYF

SEQ ID NO: 410867 - protein, 14 aa, Homo sapiens
  CDR3 for alpha chain variable domain of TCR clone 205434 (TRAV17, TRAJ11)
CATDTSRGYSTFTF

SEQ ID NO: 410868 - protein, 13 aa, Homo sapiens
  CDR3 for beta chain variable domain of TCR clone 205434 (TRBV19, TRBJ2-5)
CASRDSRRETQYF

SEQ ID NO: 410869 - protein, 12 aa, Homo sapiens
  CDR3 for alpha chain variable domain of TCR clone 205435 (TRAV23/DV6, TRAJ16)
CAARGRGQKLLF

SEQ ID NO: 410870 - protein, 15 aa, Homo sapiens
  CDR3 for beta chain variable domain of TCR clone 205435 (TRBV15, TRBJ2-1)
CATSRPGQGLHEQYF

SEQ ID NO: 410871 - protein, 13 aa, Homo sapiens
  CDR3 for alpha chain variable domain of TCR clone 205436 (TRAV17, TRAJ5)
CAPMDTGRRALTF

SEQ ID NO: 410872 - protein, 12 aa, Homo sapiens
  CDR3 for beta chain variable domain of TCR clone 205436 (TRBV7-2, TRBJ1-2)
CASRDSIYGYTF

SEQ ID NO: 410873 - protein, 12 aa, Homo sapiens
  CDR3 for alpha chain variable domain of TCR clone 205437 (TRAV26-1, TRAJ26)
CIVFIYGQNFVF

SEQ ID NO: 410874 - protein, 16 aa, Homo sapiens
  CDR3 for beta chain variable domain of TCR clone 205437 (TRBV12-4, TRBJ1-4)
CASSLKGIGHGEKLFF

SEQ ID NO: 410875 - protein, 13 aa, Homo sapiens
  CDR3 for alpha chain variable domain of TCR clone 205438 (TRAV30, TRAJ16)
CGTFGGDGQKLLF

SEQ ID NO: 410876 - protein, 13 aa, Homo sapiens
  CDR3 for beta chain variable domain of TCR clone 205438 (TRBV2, TRBJ1-1)
CASSVLMNTEAFF

SEQ ID NO: 410877 - protein, 16 aa, Homo sapiens
  CDR3 for alpha chain variable domain of TCR clone 205439 (TRAV8-3, TRAJ13)
CAVVLMNSGGYQKVTF

SEQ ID NO: 410878 - protein, 15 aa, Homo sapiens
  CDR3 for beta chain variable domain of TCR clone 205439 (TRBV5-4, TRBJ2-1)
CASSLAGGAKETQYF

SEQ ID NO: 410879 - protein, 14 aa, Homo sapiens
  CDR3 for alpha chain variable domain of TCR clone 205440 (TRAV12-2, TRAJ33)
CAGKRARSNYQLIW

SEQ ID NO: 410880 - protein, 14 aa, Homo sapiens
  CDR3 for beta chain variable domain of TCR clone 205440 (TRBV13, TRBJ2-7)
CASSLKGASYEQYF

SEQ ID NO: 410881 - protein, 15 aa, Homo sapiens
  CDR3 for alpha chain variable domain of TCR clone 205441 (TRAV2, TRAJ37)
CAVEDGSSNTGKLIF

SEQ ID NO: 410882 - protein, 13 aa, Homo sapiens
  CDR3 for beta chain variable domain of TCR clone 205441 (TRBV20-1, TRBJ1-6)
CSTFRERNSPLHF

SEQ ID NO: 410883 - protein, 10 aa, Homo sapiens
  CDR3 for alpha chain variable domain of TCR clone 205442 (TRAV17, TRAJ45)
TGGGADELTF

SEQ ID NO: 410884 - protein, 15 aa, Homo sapiens
  CDR3 for beta chain variable domain of TCR clone 205442 (TRBV5-7, TRBJ1-5)
CASSYGKLWDQPQHF

SEQ ID NO: 410885 - protein, 10 aa, Homo sapiens
  CDR3 for alpha chain variable domain of TCR clone 205443 (TRAV13-1, TRAJ47)
CAAPKLVFGA

SEQ ID NO: 410886 - protein, 14 aa, Homo sapiens
  CDR3 for beta chain variable domain of TCR clone 205443 (TRBV27, TRBJ2-2)
CASSSRLVPGELLF

SEQ ID NO: 410887 - protein, 13 aa, Homo sapiens
  CDR3 for alpha chain variable domain of TCR clone 205444 (TRAV20, TRAJ37)
CAGCSSNTGKLIF

SEQ ID NO: 410888 - protein, 15 aa, Homo sapiens
  CDR3 for beta chain variable domain of TCR clone 205444 (TRBV7-9, TRBJ2-3)
CASSHGDRVPDTQYF

SEQ ID NO: 410889 - protein, 12 aa, Homo sapiens
  CDR3 for alpha chain variable domain of TCR clone 205445 (TRAV8-1, TRAJ23)
CAVGNQGGKLIF

SEQ ID NO: 410890 - protein, 12 aa, Homo sapiens
  CDR3 for beta chain variable domain of TCR clone 205445 (TRBV7-8, TRBJ2-7)
CASSLGDREQYF

SEQ ID NO: 410891 - protein, 14 aa, Homo sapiens
  CDR3 for alpha chain variable domain of TCR clone 205446 (TRAV17, TRAJ12)
CAILPIDSSYKLIF

SEQ ID NO: 410892 - protein, 13 aa, Homo sapiens
  CDR3 for beta chain variable domain of TCR clone 205446 (TRBV4-1, TRBJ2-2)
CASSQENTGELFF

SEQ ID NO: 410893 - protein, 13 aa, Homo sapiens
  CDR3 for alpha chain variable domain of TCR clone 205447 (TRAV2, TRAJ40)
CAVVTSGTYKYIF

SEQ ID NO: 410894 - protein, 10 aa, Homo sapiens
  CDR3 for beta chain variable domain of TCR clone 205447 (TRBV20-1, TRBJ2-7)
CSEGYYEQYF

SEQ ID NO: 410895 - protein, 14 aa, Homo sapiens
  CDR3 for alpha chain variable domain of TCR clone 205448 (TRAV16, TRAJ37)
CPLDISGNTGKLIF

SEQ ID NO: 410896 - protein, 14 aa, Homo sapiens
  CDR3 for beta chain variable domain of TCR clone 205448 (TRBV7-6, TRBJ2-7)
CASSFRQGADEQYF

SEQ ID NO: 410897 - protein, 16 aa, Homo sapiens
  CDR3 for alpha chain variable domain of TCR clone 205449 (TRAV16, TRAJ57)
CAPYLITQGGSEKLVF

SEQ ID NO: 410898 - protein, 14 aa, Homo sapiens
  CDR3 for beta chain variable domain of TCR clone 205449 (TRBV7-8, TRBJ2-3)
CASSLEAGTDTQYF

SEQ ID NO: 410899 - protein, 14 aa, Homo sapiens
  CDR3 for alpha chain variable domain of TCR clone 205450 (TRAV16, TRAJ33)
CALSAMDSNYQLIW

SEQ ID NO: 410900 - protein, 12 aa, Homo sapiens
  CDR3 for beta chain variable domain of TCR clone 205450 (TRBV5-1, TRBJ1-2)
RASSQDTYGYSF

SEQ ID NO: 410901 - protein, 17 aa, Homo sapiens
  CDR3 for alpha chain variable domain of TCR clone 205451 (TRAV12-2, TRAJ52)
CAVNPYAGGTSYGKLTF

SEQ ID NO: 410902 - protein, 16 aa, Homo sapiens
  CDR3 for beta chain variable domain of TCR clone 205451 (TRBV5-5, TRBJ2-2)
CASSGRGEGATGELFF

SEQ ID NO: 410903 - protein, 13 aa, Homo sapiens
  CDR3 for alpha chain variable domain of TCR clone 205452 (TRAV12-2, TRAJ12)
CAVNWDSSYKLIF

SEQ ID NO: 410904 - protein, 13 aa, Homo sapiens
  CDR3 for beta chain variable domain of TCR clone 205452 (TRBV7-2, TRBJ2-2)
CASSSVRAGELFF

SEQ ID NO: 410905 - protein, 15 aa, Homo sapiens
  CDR3 for alpha chain variable domain of TCR clone 205453 (TRAV17, TRAJ57)
CATGPSQVGSEKLVI

SEQ ID NO: 410906 - protein, 16 aa, Homo sapiens
  CDR3 for beta chain variable domain of TCR clone 205453 (TRBV12-4, TRBJ1-5)
CASSRPVGGSNQPQHF

SEQ ID NO: 410907 - protein, 14 aa, Homo sapiens
  CDR3 for alpha chain variable domain of TCR clone 205454 (TRAV20, TRAJ20)
CAVRQGYNDYKLSF

SEQ ID NO: 410908 - protein, 13 aa, Homo sapiens
  CDR3 for beta chain variable domain of TCR clone 205454 (TRBV19, TRBJ2-5)
CASSETAPETQYF

SEQ ID NO: 410909 - protein, 16 aa, Homo sapiens
  CDR3 for alpha chain variable domain of TCR clone 205455 (TRAV21, TRAJ45)
CAVSWGSGGGADGLTF

SEQ ID NO: 410910 - protein, 18 aa, Homo sapiens
  CDR3 for beta chain variable domain of TCR clone 205455 (TRBV4-1, TRBJ1-5)
CASSQDPRGQGLNQPQHF

SEQ ID NO: 410911 - protein, 14 aa, Homo sapiens
  CDR3 for alpha chain variable domain of TCR clone 205456 (TRAV23/DV6, TRAJ37)
CAASTSSNTGKLIF

SEQ ID NO: 410912 - protein, 13 aa, Homo sapiens
  CDR3 for beta chain variable domain of TCR clone 205456 (TRBV7-7, TRBJ1-1)
CASSLGANTEAFV

SEQ ID NO: 410913 - protein, 16 aa, Homo sapiens
  CDR3 for alpha chain variable domain of TCR clone 205457 (TRAV13-2, TRAJ37)
FAENIRGSSNTGKLIF

SEQ ID NO: 410914 - protein, 15 aa, Homo sapiens
  CDR3 for beta chain variable domain of TCR clone 205457 (TRBV5-1, TRBJ2-7)
CASSPQGRPLDEQYF

SEQ ID NO: 410915 - protein, 15 aa, Homo sapiens
  CDR3 for alpha chain variable domain of TCR clone 205458 (TRAV35, TRAJ40)
CAGQLGPSGTYKYIF

SEQ ID NO: 410916 - protein, 14 aa, Homo sapiens
  CDR3 for beta chain variable domain of TCR clone 205458 (TRBV7-3, TRBJ2-1)
CASSLAGGTNEQFF

SEQ ID NO: 410917 - protein, 18 aa, Homo sapiens
  CDR3 for alpha chain variable domain of TCR clone 205459 (TRAV21, TRAJ52)
CAVRPSPAGGTSDGKLTF

SEQ ID NO: 410918 - protein, 16 aa, Homo sapiens
  CDR3 for beta chain variable domain of TCR clone 205459 (TRBV19, TRBJ2-2)
CASRSPGTGATGELFF

SEQ ID NO: 410919 - protein, 16 aa, Homo sapiens
  CDR3 for alpha chain variable domain of TCR clone 205460 (TRAV13-1, TRAJ48)
CSASIFGNFGNEKLTF

SEQ ID NO: 410920 - protein, 16 aa, Homo sapiens
  CDR3 for beta chain variable domain of TCR clone 205460 (TRBV18, TRBJ1-5)
CASSPYRVEGNQPQHF

SEQ ID NO: 410921 - protein, 16 aa, Homo sapiens
  CDR3 for alpha chain variable domain of TCR clone 205461 (TRAV3, TRAJ18)
CAVRNGRGSTLGRLYF

SEQ ID NO: 410922 - protein, 15 aa, Homo sapiens
  CDR3 for beta chain variable domain of TCR clone 205461 (TRBV7-9, TRBJ1-6)
CASSSPGRGNSPLHF

SEQ ID NO: 410923 - protein, 12 aa, Homo sapiens
  CDR3 for alpha chain variable domain of TCR clone 205462 (TRAV1-1, TRAJ43)
CAPRVSSNDMRF

SEQ ID NO: 410924 - protein, 14 aa, Homo sapiens
  CDR3 for beta chain variable domain of TCR clone 205462 (TRBV19, TRBJ2-7)
CASSIFAGTYEQYF

SEQ ID NO: 410925 - protein, 13 aa, Homo sapiens
  CDR3 for alpha chain variable domain of TCR clone 205463 (TRAV2, TRAJ29)
CAAQNSGNTPLVF

SEQ ID NO: 410926 - protein, 14 aa, Homo sapiens
  CDR3 for beta chain variable domain of TCR clone 205463 (TRBV7-2, TRBJ2-5)
CASSLSGGGETQYF

SEQ ID NO: 410927 - protein, 14 aa, Homo sapiens
  CDR3 for alpha chain variable domain of TCR clone 205464 (TRAV9-2, TRAJ39)
CALYTYNAGNMLIF

SEQ ID NO: 410928 - protein, 15 aa, Homo sapiens
  CDR3 for beta chain variable domain of TCR clone 205464 (TRBV27, TRBJ1-6)
CASSFDRGLGSPLHF

SEQ ID NO: 410929 - protein, 15 aa, Homo sapiens
  CDR3 for alpha chain variable domain of TCR clone 205465 (TRAV26-1, TRAJ3)
CIVRSGYSSASKIIF

SEQ ID NO: 410930 - protein, 13 aa, Homo sapiens
  CDR3 for beta chain variable domain of TCR clone 205465 (TRBV19, TRBJ1-2)
CASSVPGQDGYTF

SEQ ID NO: 410931 - protein, 14 aa, Homo sapiens
  CDR3 for alpha chain variable domain of TCR clone 205466 (TRAV2, TRAJ9)
CAVEDRSGGFTTIF

SEQ ID NO: 410932 - protein, 14 aa, Homo sapiens
  CDR3 for beta chain variable domain of TCR clone 205466 (TRBV28, TRBJ2-7)
CASTFYGRAHEQYF

SEQ ID NO: 410933 - protein, 13 aa, Homo sapiens
  CDR3 for alpha chain variable domain of TCR clone 205467 (TRAV22, TRAJ29)
CSVGGSGNTPLVF

SEQ ID NO: 410934 - protein, 11 aa, Homo sapiens
  CDR3 for beta chain variable domain of TCR clone 205467 (TRBV11-2, TRBJ2-2)
CASSLPGELFF

SEQ ID NO: 410935 - protein, 14 aa, Homo sapiens
  CDR3 for alpha chain variable domain of TCR clone 205468 (TRAV1-2, TRAJ8)
CAVREDTGFQKLVL

SEQ ID NO: 410936 - protein, 15 aa, Homo sapiens
  CDR3 for beta chain variable domain of TCR clone 205468 (TRBV12-4, TRBJ2-5)
CASSPPTGLQETQYF

SEQ ID NO: 410937 - protein, 15 aa, Homo sapiens
  CDR3 for alpha chain variable domain of TCR clone 205469 (TRAV16, TRAJ16)
CALQGGGSDGQKLLF

SEQ ID NO: 410938 - protein, 13 aa, Homo sapiens
  CDR3 for beta chain variable domain of TCR clone 205469 (TRBV7-2, TRBJ2-5)
CASSQTSVETQYF

SEQ ID NO: 410939 - protein, 12 aa, Homo sapiens
  CDR3 for alpha chain variable domain of TCR clone 205470 (TRAV13-1, TRAJ49)
CAAPNTGNQFYF

SEQ ID NO: 410940 - protein, 17 aa, Homo sapiens
  CDR3 for beta chain variable domain of TCR clone 205470 (TRBV25-1, TRBJ2-7)
CASSDARVVFLSYEQYF

SEQ ID NO: 410941 - protein, 14 aa, Homo sapiens
  CDR3 for alpha chain variable domain of TCR clone 205471 (TRAV13-2, TRAJ6)
CAERGSGGSYIPTF

SEQ ID NO: 410942 - protein, 14 aa, Homo sapiens
  CDR3 for beta chain variable domain of TCR clone 205471 (TRBV2, TRBJ2-3)
CASSEGQNTDTQYF

SEQ ID NO: 410943 - protein, 16 aa, Homo sapiens
  CDR3 for alpha chain variable domain of TCR clone 205472 (TRAV12-1, TRAJ28)
CVVIAYSGAGSYQLTF

SEQ ID NO: 410944 - protein, 15 aa, Homo sapiens
  CDR3 for beta chain variable domain of TCR clone 205472 (TRBV14, TRBJ1-1)
CAGSQEGMGFTEAFF

SEQ ID NO: 410945 - protein, 12 aa, Homo sapiens
  CDR3 for alpha chain variable domain of TCR clone 205473 (TRAV17, TRAJ49)
CATVTTGHQFYF

SEQ ID NO: 410946 - protein, 18 aa, Homo sapiens
  CDR3 for beta chain variable domain of TCR clone 205473 (TRBV11-2, TRBJ2-6)
CASSLNPFLGTGANVLTF

SEQ ID NO: 410947 - protein, 16 aa, Homo sapiens
  CDR3 for alpha chain variable domain of TCR clone 205474 (TRAV14/DV4, TRAJ54)
CAMREGRIQGAQKLVF

SEQ ID NO: 410948 - protein, 12 aa, Homo sapiens
  CDR3 for beta chain variable domain of TCR clone 205474 (TRBV5-1, TRBJ2-3)
CASSLAEGTQYF

SEQ ID NO: 410949 - protein, 13 aa, Homo sapiens
  CDR3 for alpha chain variable domain of TCR clone 205475 (TRAV8-6, TRAJ24)
CAVSSDSWGKLQF

SEQ ID NO: 410950 - protein, 15 aa, Homo sapiens
  CDR3 for beta chain variable domain of TCR clone 205475 (TRBV5-1, TRBJ2-1)
RASSPPRAPYNEQFF

SEQ ID NO: 410951 - protein, 14 aa, Homo sapiens
  CDR3 for alpha chain variable domain of TCR clone 205476 (TRAV12-2, TRAJ13)
CAVKKTGGYQKVTF

SEQ ID NO: 410952 - protein, 15 aa, Homo sapiens
  CDR3 for beta chain variable domain of TCR clone 205476 (TRBV19, TRBJ1-1)
CASSKTGSTNTEAFF

SEQ ID NO: 410953 - protein, 13 aa, Homo sapiens
  CDR3 for alpha chain variable domain of TCR clone 205477 (TRAV26-2, TRAJ43)
CILRAVNNNDMRF

SEQ ID NO: 410954 - protein, 17 aa, Homo sapiens
  CDR3 for beta chain variable domain of TCR clone 205477 (TRBV25-1, TRBJ1-1)
CACSEYSRTGSNTEAFF

SEQ ID NO: 410955 - protein, 15 aa, Homo sapiens
  CDR3 for alpha chain variable domain of TCR clone 205478 (TRAV12-2, TRAJ43)
CAFAMRFGAGTRLTV

SEQ ID NO: 410956 - protein, 17 aa, Homo sapiens
  CDR3 for beta chain variable domain of TCR clone 205478 (TRBV13, TRBJ2-3)
CASSLSRVAGGRNTQYF

SEQ ID NO: 410957 - protein, 12 aa, Homo sapiens
  CDR3 for alpha chain variable domain of TCR clone 205479 (TRAV29/DV5, TRAJ43)
CAAPYNNNDMRF

SEQ ID NO: 410958 - protein, 13 aa, Homo sapiens
  CDR3 for beta chain variable domain of TCR clone 205479 (TRBV7-3, TRBJ1-1)
CASSQDWGAEAFF

SEQ ID NO: 410959 - protein, 13 aa, Homo sapiens
  CDR3 for alpha chain variable domain of TCR clone 205480 (TRAV21, TRAJ26)
CAVIGNYGQNFVF

SEQ ID NO: 410960 - protein, 17 aa, Homo sapiens
  CDR3 for beta chain variable domain of TCR clone 205480 (TRBV15, TRBJ1-2)
CATSGREIDVVNYGYTF

SEQ ID NO: 410961 - protein, 15 aa, Homo sapiens
  CDR3 for alpha chain variable domain of TCR clone 205481 (TRAV38-1, TRAJ37)
CAFIFGSVNTGKLIF

SEQ ID NO: 410962 - protein, 15 aa, Homo sapiens
  CDR3 for beta chain variable domain of TCR clone 205481 (TRBV7-8, TRBJ1-5)
CASSLERRGLEPQHF

SEQ ID NO: 410963 - protein, 12 aa, Homo sapiens
  CDR3 for alpha chain variable domain of TCR clone 205482 (TRAV12-1, TRAJ40)
CVVYSGAYKYTF

SEQ ID NO: 410964 - protein, 14 aa, Homo sapiens
  CDR3 for beta chain variable domain of TCR clone 205482 (TRBV7-9, TRBJ2-5)
CASSLDTAQETQYF

SEQ ID NO: 410965 - protein, 16 aa, Homo sapiens
  CDR3 for alpha chain variable domain of TCR clone 205483 (TRAV38-1, TRAJ53)
CACPLNRGGTNYKLTF

SEQ ID NO: 410966 - protein, 15 aa, Homo sapiens
  CDR3 for beta chain variable domain of TCR clone 205483 (TRBV5-7, TRBJ2-5)
CASSLGLAAQETQYF

SEQ ID NO: 410967 - protein, 14 aa, Homo sapiens
  CDR3 for alpha chain variable domain of TCR clone 205484 (TRAV13-1, TRAJ39)
CAASYNNAGNMLTF

SEQ ID NO: 410968 - protein, 17 aa, Homo sapiens
  CDR3 for beta chain variable domain of TCR clone 205484 (TRBV13, TRBJ2-3)
CASSLSRVAGGRNTQYF

SEQ ID NO: 410969 - protein, 14 aa, Homo sapiens
  CDR3 for alpha chain variable domain of TCR clone 205485 (TRAV20, TRAJ29)
CAVQAWVGNTPLVF

SEQ ID NO: 410970 - protein, 13 aa, Homo sapiens
  CDR3 for beta chain variable domain of TCR clone 205485 (TRBV25-1, TRBJ2-5)
CASSPGGVETQYF

SEQ ID NO: 410971 - protein, 16 aa, Homo sapiens
  CDR3 for alpha chain variable domain of TCR clone 205486 (TRAV22, TRAJ45)
CAVERGKRGGADGLTF

SEQ ID NO: 410972 - protein, 16 aa, Homo sapiens
  CDR3 for beta chain variable domain of TCR clone 205486 (TRBV15, TRBJ2-3)
CATSRGGPRGGYTQYF

SEQ ID NO: 410973 - protein, 13 aa, Homo sapiens
  CDR3 for alpha chain variable domain of TCR clone 205487 (TRAV13-2, TRAJ40)
CAETLSGTYKYIF

SEQ ID NO: 410974 - protein, 16 aa, Homo sapiens
  CDR3 for beta chain variable domain of TCR clone 205487 (TRBV20-1, TRBJ2-1)
CSASDFSGRIGDEQFF

SEQ ID NO: 410975 - protein, 11 aa, Homo sapiens
  CDR3 for alpha chain variable domain of TCR clone 205488 (TRAV8-6, TRAJ34)
CAVWNTDKLIF

SEQ ID NO: 410976 - protein, 12 aa, Homo sapiens
  CDR3 for beta chain variable domain of TCR clone 205488 (TRBV19, TRBJ2-1)
CASSQISNEQFF

SEQ ID NO: 410977 - protein, 15 aa, Homo sapiens
  CDR3 for alpha chain variable domain of TCR clone 205489 (TRAV21, TRAJ24)
CAARSSTDSWGKLQV

SEQ ID NO: 410978 - protein, 13 aa, Homo sapiens
  CDR3 for beta chain variable domain of TCR clone 205489 (TRBV11-2, TRBJ2-5)
CASSSTGEETQCF

SEQ ID NO: 410979 - protein, 13 aa, Homo sapiens
  CDR3 for alpha chain variable domain of TCR clone 205490 (TRAV12-1, TRAJ16)
CVVKGPDGQKLLF

SEQ ID NO: 410980 - protein, 13 aa, Homo sapiens
  CDR3 for beta chain variable domain of TCR clone 205490 (TRBV2, TRBJ1-1)
CARNPTGGFHAFF

SEQ ID NO: 410981 - protein, 16 aa, Homo sapiens
  CDR3 for alpha chain variable domain of TCR clone 205491 (TRAV30, TRAJ24)
CGTEIVDADSWGKFQF

SEQ ID NO: 410982 - protein, 16 aa, Homo sapiens
  CDR3 for beta chain variable domain of TCR clone 205491 (TRBV5-1, TRBJ2-7)
CPSSYASTSSGGEQYF

SEQ ID NO: 410983 - protein, 14 aa, Homo sapiens
  CDR3 for alpha chain variable domain of TCR clone 205492 (TRAV4, TRAJ9)
CLVGPGTGGFKTIF

SEQ ID NO: 410984 - protein, 15 aa, Homo sapiens
  CDR3 for beta chain variable domain of TCR clone 205492 (TRBV5-1, TRBJ2-3)
CASSVTSGSTDTQYF

SEQ ID NO: 410985 - protein, 13 aa, Homo sapiens
  CDR3 for alpha chain variable domain of TCR clone 205493 (TRAV21, TRAJ20)
CAVGVFADYKLSF

SEQ ID NO: 410986 - protein, 14 aa, Homo sapiens
  CDR3 for beta chain variable domain of TCR clone 205493 (TRBV4-2, TRBJ1-4)
CASSPSSGNEKLSF

SEQ ID NO: 410987 - protein, 14 aa, Homo sapiens
  CDR3 for alpha chain variable domain of TCR clone 205494 (TRAV12-2, TRAJ13)
CAVKKTGGYQKVNF

SEQ ID NO: 410988 - protein, 11 aa, Homo sapiens
  CDR3 for beta chain variable domain of TCR clone 205494 (TRBV12-4, TRBJ2-2)
CASSSAGELFF

SEQ ID NO: 410989 - protein, 14 aa, Homo sapiens
  CDR3 for alpha chain variable domain of TCR clone 205495 (TRAV12-3, TRAJ10)
SHLPRTGGGNKLTF

SEQ ID NO: 410990 - protein, 15 aa, Homo sapiens
  CDR3 for beta chain variable domain of TCR clone 205495 (TRBV10-2, TRBJ2-6)
CASSEQGTGANVLTF

SEQ ID NO: 410991 - protein, 13 aa, Homo sapiens
  CDR3 for alpha chain variable domain of TCR clone 205496 (TRAV27, TRAJ49)
CAPRPYTGSQFYF

SEQ ID NO: 410992 - protein, 18 aa, Homo sapiens
  CDR3 for beta chain variable domain of TCR clone 205496 (TRBV7-3, TRBJ2-5)
CASSLGGAAQGRWETQYF

SEQ ID NO: 410993 - protein, 12 aa, Homo sapiens
  CDR3 for alpha chain variable domain of TCR clone 205497 (TRAV12-3, TRAJ20)
CAMVRGDYKLSF

SEQ ID NO: 410994 - protein, 12 aa, Homo sapiens
  CDR3 for beta chain variable domain of TCR clone 205497 (TRBV5-7, TRBJ1-2)
CASSLVQNGYTF

SEQ ID NO: 410995 - protein, 14 aa, Homo sapiens
  CDR3 for alpha chain variable domain of TCR clone 205498 (TRAV1-2, TRAJ16)
CAVNRLSDGQKLLF

SEQ ID NO: 410996 - protein, 14 aa, Homo sapiens
  CDR3 for beta chain variable domain of TCR clone 205498 (TRBV7-2, TRBJ2-5)
CASSPLGQSETQYF

SEQ ID NO: 410997 - protein, 13 aa, Homo sapiens
  CDR3 for alpha chain variable domain of TCR clone 205499 (TRAV20, TRAJ34)
CAVSSYNTDKTIF

SEQ ID NO: 410998 - protein, 13 aa, Homo sapiens
  CDR3 for beta chain variable domain of TCR clone 205499 (TRBV7-9, TRBJ1-2)
CASSLKQNYGYTF

SEQ ID NO: 410999 - protein, 16 aa, Homo sapiens
  CDR3 for alpha chain variable domain of TCR clone 205500 (TRAV8-6, TRAJ39)
CAVMSMNTNAGNMLTF

SEQ ID NO: 411000 - protein, 16 aa, Homo sapiens
  CDR3 for beta chain variable domain of TCR clone 205500 (TRBV15, TRBJ2-5)
CATSRYLETAQETQYF

SEQ ID NO: 411001 - protein, 14 aa, Homo sapiens
  CDR3 for alpha chain variable domain of TCR clone 205501 (TRAV1-2, TRAJ16)
CDVNRFSDGQKLLF

SEQ ID NO: 411002 - protein, 12 aa, Homo sapiens
  CDR3 for beta chain variable domain of TCR clone 205501 (TRBV11-2, TRBJ2-2)
CASSLGGGELFF

SEQ ID NO: 411003 - protein, 14 aa, Homo sapiens
  CDR3 for alpha chain variable domain of TCR clone 205502 (TRAV17, TRAJ57)
CATDPQGGSEKLVF

SEQ ID NO: 411004 - protein, 16 aa, Homo sapiens
  CDR3 for beta chain variable domain of TCR clone 205502 (TRBV2, TRBJ2-1)
CASSVGGSLSYNEQFF

SEQ ID NO: 411005 - protein, 14 aa, Homo sapiens
  CDR3 for alpha chain variable domain of TCR clone 205503 (TRAV2, TRAJ9)
CAVEDRSGGFKTIF

SEQ ID NO: 411006 - protein, 17 aa, Homo sapiens
  CDR3 for beta chain variable domain of TCR clone 205503 (TRBV11-2, TRBJ2-1)
CASSFYPPGVEYNEQFF

SEQ ID NO: 411007 - protein, 13 aa, Homo sapiens
  CDR3 for alpha chain variable domain of TCR clone 205504 (TRAV12-2, TRAJ4)
CAVFSGGYTKLIF

SEQ ID NO: 411008 - protein, 13 aa, Homo sapiens
  CDR3 for beta chain variable domain of TCR clone 205504 (TRBV19, TRBJ1-5)
CASSIDRDQPQHF

SEQ ID NO: 411009 - protein, 15 aa, Homo sapiens
  CDR3 for alpha chain variable domain of TCR clone 205505 (TRAV26-1, TRAJ38)
CIVRAEGGNNRTLIW

SEQ ID NO: 411010 - protein, 14 aa, Homo sapiens
  CDR3 for beta chain variable domain of TCR clone 205505 (TRBV7-6, TRBJ2-5)
CASSSPSGSETQYF

SEQ ID NO: 411011 - protein, 13 aa, Homo sapiens
  CDR3 for alpha chain variable domain of TCR clone 205506 (TRAV13-1, TRAJ39)
CAASIWAGDMLTF

SEQ ID NO: 411012 - protein, 15 aa, Homo sapiens
  CDR3 for beta chain variable domain of TCR clone 205506 (TRBV7-9, TRBJ1-1)
CASSLLEQGGTEALF

SEQ ID NO: 411013 - protein, 14 aa, Homo sapiens
  CDR3 for alpha chain variable domain of TCR clone 205507 (TRAV8-4, TRAJ43)
CAVSDPRNNNDMRF

SEQ ID NO: 411014 - protein, 15 aa, Homo sapiens
  CDR3 for beta chain variable domain of TCR clone 205507 (TRBV9, TRBJ1-6)
CASSVAGTGDSPLHF

SEQ ID NO: 411015 - protein, 13 aa, Homo sapiens
  CDR3 for alpha chain variable domain of TCR clone 205508 (TRAV2, TRAJ21)
CAVEDRNVNKFYF

SEQ ID NO: 411016 - protein, 15 aa, Homo sapiens
  CDR3 for beta chain variable domain of TCR clone 205508 (TRBV28, TRBJ2-5)
CASSPGQGSIETQYF

SEQ ID NO: 411017 - protein, 14 aa, Homo sapiens
  CDR3 for alpha chain variable domain of TCR clone 205509 (TRAV1-2, TRAJ16)
CAVNRFSDGQKLLF

SEQ ID NO: 411018 - protein, 15 aa, Homo sapiens
  CDR3 for beta chain variable domain of TCR clone 205509 (TRBV12-4, TRBJ2-5)
CASSTPTGLQETQYF

SEQ ID NO: 411019 - protein, 15 aa, Homo sapiens
  CDR3 for alpha chain variable domain of TCR clone 205510 (TRAV25, TRAJ53)
CAATGGGGSNYKLTF

SEQ ID NO: 411020 - protein, 15 aa, Homo sapiens
  CDR3 for beta chain variable domain of TCR clone 205510 (TRBV28, TRBJ1-3)
CASSMGWASGNTIYF

SEQ ID NO: 411021 - protein, 14 aa, Homo sapiens
  CDR3 for alpha chain variable domain of TCR clone 205511 (TRAV17, TRAJ16)
CATAGFSDGQKLPF

SEQ ID NO: 411022 - protein, 15 aa, Homo sapiens
  CDR3 for beta chain variable domain of TCR clone 205511 (TRBV18, TRBJ2-1)
CASSPPSASYNEQFF

SEQ ID NO: 411023 - protein, 14 aa, Homo sapiens
  CDR3 for alpha chain variable domain of TCR clone 205512 (TRAV9-2, TRAJ39)
CALYIYNAGNMLTF

SEQ ID NO: 411024 - protein, 14 aa, Homo sapiens
  CDR3 for beta chain variable domain of TCR clone 205512 (TRBV7-9, TRBJ2-1)
CASSLVVGADEQFF

SEQ ID NO: 411025 - protein, 11 aa, Homo sapiens
  CDR3 for alpha chain variable domain of TCR clone 205513 (TRAV2, TRAJ21)
CAVFNFNKFYF

SEQ ID NO: 411026 - protein, 11 aa, Homo sapiens
  CDR3 for beta chain variable domain of TCR clone 205513 (TRBV7-9, TRBJ2-5)
CASSLGETQYF

SEQ ID NO: 411027 - protein, 13 aa, Homo sapiens
  CDR3 for alpha chain variable domain of TCR clone 205514 (TRAV21, TRAJ15)
CAVANQAGTALIF

SEQ ID NO: 411028 - protein, 14 aa, Homo sapiens
  CDR3 for beta chain variable domain of TCR clone 205514 (TRBV11-2, TRBJ2-3)
CASSRLARTDTQYF

SEQ ID NO: 411029 - protein, 12 aa, Homo sapiens
  CDR3 for alpha chain variable domain of TCR clone 205515 (TRAV1-1, TRAJ39)
CAVPVVGNMLTC

SEQ ID NO: 411030 - protein, 15 aa, Homo sapiens
  CDR3 for beta chain variable domain of TCR clone 205515 (TRBV19, TRBJ1-6)
CASSTQGAVGSPLHF

SEQ ID NO: 411031 - protein, 14 aa, Homo sapiens
  CDR3 for alpha chain variable domain of TCR clone 205516 (TRAV12-2, TRAJ45)
CAVNKGGGADGLTF

SEQ ID NO: 411032 - protein, 14 aa, Homo sapiens
  CDR3 for beta chain variable domain of TCR clone 205516 (TRBV20-1, TRBJ1-1)
CSAMGGTANTEDFF

SEQ ID NO: 411033 - protein, 13 aa, Homo sapiens
  CDR3 for alpha chain variable domain of TCR clone 205517 (TRAV2, TRAJ9)
CAVVETGGFKTIF

SEQ ID NO: 411034 - protein, 13 aa, Homo sapiens
  CDR3 for beta chain variable domain of TCR clone 205517 (TRBV4-2, TRBJ1-1)
CASSQAGNTEAFF

SEQ ID NO: 411035 - protein, 14 aa, Homo sapiens
  CDR3 for alpha chain variable domain of TCR clone 205518 (TRAV12-1, TRAJ38)
CVVHNAGNNRKLIW

SEQ ID NO: 411036 - protein, 13 aa, Homo sapiens
  CDR3 for beta chain variable domain of TCR clone 205518 (TRBV19, TRBJ2-1)
CATSRGVFNEQFF

SEQ ID NO: 411037 - protein, 13 aa, Homo sapiens
  CDR3 for alpha chain variable domain of TCR clone 205519 (TRAV12-1, TRAJ3)
CVVNPRGASKINF

SEQ ID NO: 411038 - protein, 13 aa, Homo sapiens
  CDR3 for beta chain variable domain of TCR clone 205519 (TRBV28, TRBJ1-5)
CASSDRGNQPQHF

SEQ ID NO: 411039 - protein, 12 aa, Homo sapiens
  CDR3 for alpha chain variable domain of TCR clone 205520 (TRAV3, TRAJ26)
CAVRDYGQHFVF

SEQ ID NO: 411040 - protein, 16 aa, Homo sapiens
  CDR3 for beta chain variable domain of TCR clone 205520 (TRBV11-3, TRBJ1-2)
CASSTSGREANYGYTF

SEQ ID NO: 411041 - protein, 15 aa, Homo sapiens
  CDR3 for alpha chain variable domain of TCR clone 205521 (TRAV8-3, TRAJ11)
CAVGLLNSGNSTLTF

SEQ ID NO: 411042 - protein, 16 aa, Homo sapiens
  CDR3 for beta chain variable domain of TCR clone 205521 (TRBV7-9, TRBJ1-2)
CASSLGFSAGEDGYTF

SEQ ID NO: 411043 - protein, 18 aa, Homo sapiens
  CDR3 for alpha chain variable domain of TCR clone 205522 (TRAV29/DV5, TRAJ52)
CAAGFRGAGGTSSGKLTF

SEQ ID NO: 411044 - protein, 16 aa, Homo sapiens
  CDR3 for beta chain variable domain of TCR clone 205522 (TRBV7-3, TRBJ2-2)
CASSLKRGTLSGELFF

SEQ ID NO: 411045 - protein, 12 aa, Homo sapiens
  CDR3 for alpha chain variable domain of TCR clone 205523 (TRAV12-2, TRAJ31)
FAVNTPDARLMF

SEQ ID NO: 411046 - protein, 17 aa, Homo sapiens
  CDR3 for beta chain variable domain of TCR clone 205523 (TRBV20-1, TRBJ1-6)
CSARGGYTFSYNSPLHF

SEQ ID NO: 411047 - protein, 15 aa, Homo sapiens
  CDR3 for alpha chain variable domain of TCR clone 205524 (TRAV8-3, TRAJ11)
CAVGLLNSGYSTLTF

SEQ ID NO: 411048 - protein, 16 aa, Homo sapiens
  CDR3 for beta chain variable domain of TCR clone 205524 (TRBV11-2, TRBJ2-1)
CASSVTADFSYNEQFF

SEQ ID NO: 411049 - protein, 16 aa, Homo sapiens
  CDR3 for alpha chain variable domain of TCR clone 205525 (TRAV12-2, TRAJ32)
CAVNLGQGGSTNKLIF

SEQ ID NO: 411050 - protein, 12 aa, Homo sapiens
  CDR3 for beta chain variable domain of TCR clone 205525 (TRBV29-1, TRBJ2-3)
CSVTGGADTQYF

SEQ ID NO: 411051 - protein, 13 aa, Homo sapiens
  CDR3 for alpha chain variable domain of TCR clone 205526 (TRAV1-1, TRAJ23)
CAVVANQGGKLIF

SEQ ID NO: 411052 - protein, 16 aa, Homo sapiens
  CDR3 for beta chain variable domain of TCR clone 205526 (TRBV5-5, TRBJ1-2)
CARSPTWGRGLYGYTF

SEQ ID NO: 411053 - protein, 10 aa, Homo sapiens
  CDR3 for alpha chain variable domain of TCR clone 205527 (TRAV1-2, TRAJ31)
CVSEDARLMF

SEQ ID NO: 411054 - protein, 14 aa, Homo sapiens
  CDR3 for beta chain variable domain of TCR clone 205527 (TRBV7-2, TRBJ1-1)
CASSFLTGTTEAFF

SEQ ID NO: 411055 - protein, 14 aa, Homo sapiens
  CDR3 for alpha chain variable domain of TCR clone 205528 (TRAV12-2, TRAJ13)
CAVKKTGGYQKVNF

SEQ ID NO: 411056 - protein, 17 aa, Homo sapiens
  CDR3 for beta chain variable domain of TCR clone 205528 (TRBV20-1, TRBJ2-2)
CSASGSGQGGLTGELFF

SEQ ID NO: 411057 - protein, 16 aa, Homo sapiens
  CDR3 for alpha chain variable domain of TCR clone 205529 (TRAV12-3, TRAJ53)
CAMSPGSGGSNYKLRF

SEQ ID NO: 411058 - protein, 17 aa, Homo sapiens
  CDR3 for beta chain variable domain of TCR clone 205529 (TRBV28, TRBJ2-5)
CASSTPEGDALQETQYF

SEQ ID NO: 411059 - protein, 16 aa, Homo sapiens
  CDR3 for alpha chain variable domain of TCR clone 205530 (TRAV30, TRAJ24)
CGTEIVDADSWGKFQF

SEQ ID NO: 411060 - protein, 15 aa, Homo sapiens
  CDR3 for beta chain variable domain of TCR clone 205530 (TRBV20-1, TRBJ2-4)
CSARDLTGGPNIQYC

SEQ ID NO: 411061 - protein, 15 aa, Homo sapiens
  CDR3 for alpha chain variable domain of TCR clone 205531 (TRAV3, TRAJ27)
CAVRDPRTNAGKSTF

SEQ ID NO: 411062 - protein, 15 aa, Homo sapiens
  CDR3 for beta chain variable domain of TCR clone 205531 (TRBV28, TRBJ2-1)
CASSIIAGGRSEQFF

SEQ ID NO: 411063 - protein, 15 aa, Homo sapiens
  CDR3 for alpha chain variable domain of TCR clone 205532 (TRAV13-1, TRAJ4)
CAASLLSGGYNKLIF

SEQ ID NO: 411064 - protein, 15 aa, Homo sapiens
  CDR3 for beta chain variable domain of TCR clone 205532 (TRBV28, TRBJ2-3)
CASTPRGENTDTQYF

SEQ ID NO: 411065 - protein, 18 aa, Homo sapiens
  CDR3 for alpha chain variable domain of TCR clone 205533 (TRAV8-3, TRAJ6)
CAVGAEHQEEATYLHLEE

SEQ ID NO: 411066 - protein, 13 aa, Homo sapiens
  CDR3 for beta chain variable domain of TCR clone 205533 (TRBV7-3, TRBJ1-1)
CASSQDWGAEAFF

SEQ ID NO: 411067 - protein, 13 aa, Homo sapiens
  CDR3 for alpha chain variable domain of TCR clone 205534 (TRAV35, TRAJ43)
CAGYPYNNNDMRL

SEQ ID NO: 411068 - protein, 15 aa, Homo sapiens
  CDR3 for beta chain variable domain of TCR clone 205534 (TRBV25-1, TRBJ1-4)
CASSKRIATNEKLFF

SEQ ID NO: 411069 - protein, 13 aa, Homo sapiens
  CDR3 for alpha chain variable domain of TCR clone 205535 (TRAV13-1, TRAJ39)
CSKYSNAGNMLTF

SEQ ID NO: 411070 - protein, 15 aa, Homo sapiens
  CDR3 for beta chain variable domain of TCR clone 205535 (TRBV2, TRBJ1-4)
CASSERRGTNEKLFF

SEQ ID NO: 411071 - protein, 17 aa, Homo sapiens
  CDR3 for alpha chain variable domain of TCR clone 205536 (TRAV4, TRAJ13)
CLVGVQGSSGGYQKVTF

SEQ ID NO: 411072 - protein, 17 aa, Homo sapiens
  CDR3 for beta chain variable domain of TCR clone 205536 (TRBV13, TRBJ2-3)
CASSLSRVAGGRNTQYF

SEQ ID NO: 411073 - protein, 15 aa, Homo sapiens
  CDR3 for alpha chain variable domain of TCR clone 205537 (TRAV12-1, TRAJ10)
CVVNKLTEGGNKLTF

SEQ ID NO: 411074 - protein, 17 aa, Homo sapiens
  CDR3 for beta chain variable domain of TCR clone 205537 (TRBV5-1, TRBJ1-6)
CASSPSLQGSDNSPLHF

SEQ ID NO: 411075 - protein, 16 aa, Homo sapiens
  CDR3 for alpha chain variable domain of TCR clone 205538 (TRAV3, TRAJ37)
CAVRPHGSGNTGKLIF

SEQ ID NO: 411076 - protein, 10 aa, Homo sapiens
  CDR3 for beta chain variable domain of TCR clone 205538 (TRBV19, TRBJ1-1)
CASRQVEAFF

SEQ ID NO: 411077 - protein, 14 aa, Homo sapiens
  CDR3 for alpha chain variable domain of TCR clone 205539 (TRAV12-2, TRAJ13)
CAVKKTGGYQKVTF

SEQ ID NO: 411078 - protein, 14 aa, Homo sapiens
  CDR3 for beta chain variable domain of TCR clone 205539 (TRBV15, TRBJ2-5)
CATSEDRGQETQYF

SEQ ID NO: 411079 - protein, 11 aa, Homo sapiens
  CDR3 for alpha chain variable domain of TCR clone 205540 (TRAV3, TRAJ21)
CAVGNYNKFYF

SEQ ID NO: 411080 - protein, 13 aa, Homo sapiens
  CDR3 for beta chain variable domain of TCR clone 205540 (TRBV5-4, TRBJ1-1)
CASSVDLGTEAFF

SEQ ID NO: 411081 - protein, 19 aa, Homo sapiens
  CDR3 for alpha chain variable domain of TCR clone 205541 (TRAV1-2, TRAJ26)
CLLPLCCERPDNYGQNFVF

SEQ ID NO: 411082 - protein, 13 aa, Homo sapiens
  CDR3 for beta chain variable domain of TCR clone 205541 (TRBV7-2, TRBJ2-7)
CASSSPSGSEQYF

SEQ ID NO: 411083 - protein, 11 aa, Homo sapiens
  CDR3 for alpha chain variable domain of TCR clone 205542 (TRAV21, TRAJ39)
LLVNAGNMLTF

SEQ ID NO: 411084 - protein, 14 aa, Homo sapiens
  CDR3 for beta chain variable domain of TCR clone 205542 (TRBV11-3, TRBJ2-3)
CASSLSGSTDTQYF

SEQ ID NO: 411085 - protein, 19 aa, Homo sapiens
  CDR3 for alpha chain variable domain of TCR clone 205543 (TRAV26-1, TRAJ52)
CIVRVANNAGGTSYGKLAF

SEQ ID NO: 411086 - protein, 14 aa, Homo sapiens
  CDR3 for beta chain variable domain of TCR clone 205543 (TRBV19, TRBJ1-2)
CASSIGAGSYGYTF

SEQ ID NO: 411087 - protein, 13 aa, Homo sapiens
  CDR3 for alpha chain variable domain of TCR clone 205544 (TRAV23/DV6, TRAJ27)
CAASKPMQANQTL

SEQ ID NO: 411088 - protein, 14 aa, Homo sapiens
  CDR3 for beta chain variable domain of TCR clone 205544 (TRBV5-4, TRBJ1-1)
CASSLDSRRDEAFF

SEQ ID NO: 411089 - protein, 15 aa, Homo sapiens
  CDR3 for alpha chain variable domain of TCR clone 205545 (TRAV3, TRAJ5)
CAVRDRKAGRRALTF

SEQ ID NO: 411090 - protein, 15 aa, Homo sapiens
  CDR3 for beta chain variable domain of TCR clone 205545 (TRBV7-8, TRBJ2-1)
CASSLADSLYNAQFF

SEQ ID NO: 411091 - protein, 12 aa, Homo sapiens
  CDR3 for alpha chain variable domain of TCR clone 205546 (TRAV16, TRAJ10)
CSRTGGGNKLTF

SEQ ID NO: 411092 - protein, 14 aa, Homo sapiens
  CDR3 for beta chain variable domain of TCR clone 205546 (TRBV11-1, TRBJ2-7)
CASTFAVPSYEQYF

SEQ ID NO: 411093 - protein, 13 aa, Homo sapiens
  CDR3 for alpha chain variable domain of TCR clone 205547 (TRAV8-2, TRAJ49)
CVVTPNTGNQFYF

SEQ ID NO: 411094 - protein, 14 aa, Homo sapiens
  CDR3 for beta chain variable domain of TCR clone 205547 (TRBV24-1, TRBJ1-1)
CATSIPRGDTEAFF

SEQ ID NO: 411095 - protein, 15 aa, Homo sapiens
  CDR3 for alpha chain variable domain of TCR clone 205548 (TRAV12-2, TRAJ8)
CAVREENTGFQKLVF

SEQ ID NO: 411096 - protein, 16 aa, Homo sapiens
  CDR3 for beta chain variable domain of TCR clone 205548 (TRBV7-9, TRBJ2-1)
CASSDVAGGSYNEQFF

SEQ ID NO: 411097 - protein, 13 aa, Homo sapiens
  CDR3 for alpha chain variable domain of TCR clone 205549 (TRAV25, TRAJ30)
CAGRVDRDDKIIF

SEQ ID NO: 411098 - protein, 13 aa, Homo sapiens
  CDR3 for beta chain variable domain of TCR clone 205549 (TRBV10-3, TRBJ2-7)
CASKLAVNYEQYF

SEQ ID NO: 411099 - protein, 11 aa, Homo sapiens
  CDR3 for alpha chain variable domain of TCR clone 205550 (TRAV35, TRAJ30)
CAPGGDDKIIF

SEQ ID NO: 411100 - protein, 15 aa, Homo sapiens
  CDR3 for beta chain variable domain of TCR clone 205550 (TRBV7-9, TRBJ1-6)
CASSSPGRGNSPLHF

SEQ ID NO: 411101 - protein, 12 aa, Homo sapiens
  CDR3 for alpha chain variable domain of TCR clone 205551 (TRAV13-1, TRAJ21)
CAAKEGSNNFYF

SEQ ID NO: 411102 - protein, 17 aa, Homo sapiens
  CDR3 for beta chain variable domain of TCR clone 205551 (TRBV19, TRBJ2-7)
CASSISFYDSYPYEQYF

SEQ ID NO: 411103 - protein, 13 aa, Homo sapiens
  CDR3 for alpha chain variable domain of TCR clone 205552 (TRAV38-1, TRAJ42)
CARWGGRRGNLIF

SEQ ID NO: 411104 - protein, 17 aa, Homo sapiens
  CDR3 for beta chain variable domain of TCR clone 205552 (TRBV20-1, TRBJ2-1)
CSARDPLAGVWDNEQFF

SEQ ID NO: 411105 - protein, 14 aa, Homo sapiens
  CDR3 for alpha chain variable domain of TCR clone 205553 (TRAV3, TRAJ17)
CAVRDAAAGNNLTF

SEQ ID NO: 411106 - protein, 13 aa, Homo sapiens
  CDR3 for beta chain variable domain of TCR clone 205553 (TRBV2, TRBJ1-1)
CASSVSGYTEAFF

SEQ ID NO: 411107 - protein, 13 aa, Homo sapiens
  CDR3 for alpha chain variable domain of TCR clone 205554 (TRAV22, TRAJ26)
CAVEHNYGQNFCF

SEQ ID NO: 411108 - protein, 16 aa, Homo sapiens
  CDR3 for beta chain variable domain of TCR clone 205554 (TRBV7-2, TRBJ2-6)
CASSERRASGANVLTF

SEQ ID NO: 411109 - protein, 18 aa, Homo sapiens
  CDR3 for alpha chain variable domain of TCR clone 205555 (TRAV21, TRAJ52)
CAVRPPPAGGASYGKLTF

SEQ ID NO: 411110 - protein, 17 aa, Homo sapiens
  CDR3 for beta chain variable domain of TCR clone 205555 (TRBV13, TRBJ2-3)
CASSLSRVAGGRNTQYF

SEQ ID NO: 411111 - protein, 14 aa, Homo sapiens
  CDR3 for alpha chain variable domain of TCR clone 205556 (TRAV1-2, TRAJ16)
CAVNRFSDGQKLLF

SEQ ID NO: 411112 - protein, 14 aa, Homo sapiens
  CDR3 for beta chain variable domain of TCR clone 205556 (TRBV7-3, TRBJ2-2)
CASSLYPLTGELFF

SEQ ID NO: 411113 - protein, 18 aa, Homo sapiens
  CDR3 for alpha chain variable domain of TCR clone 205557 (TRAV13-1, TRAJ52)
CAAKNPNAGGTSYGKLTF

SEQ ID NO: 411114 - protein, 12 aa, Homo sapiens
  CDR3 for beta chain variable domain of TCR clone 205557 (TRBV5-5, TRBJ2-5)
CASSYFGETQYF

SEQ ID NO: 411115 - protein, 11 aa, Homo sapiens
  CDR3 for alpha chain variable domain of TCR clone 205558 (TRAV13-1, TRAJ30)
CAASRDDKIIF

SEQ ID NO: 411116 - protein, 15 aa, Homo sapiens
  CDR3 for beta chain variable domain of TCR clone 205558 (TRBV18, TRBJ1-1)
CASSPSSWVNIEAFF

SEQ ID NO: 411117 - protein, 17 aa, Homo sapiens
  CDR3 for alpha chain variable domain of TCR clone 205559 (TRAV12-2, TRAJ6)
CAPQGPPRGGGSYIPTF

SEQ ID NO: 411118 - protein, 16 aa, Homo sapiens
  CDR3 for beta chain variable domain of TCR clone 205559 (TRBV19, TRBJ2-2)
CVSSTARASNTGELFF

SEQ ID NO: 411119 - protein, 14 aa, Homo sapiens
  CDR3 for alpha chain variable domain of TCR clone 205560 (TRAV1-2, TRAJ16)
CAVNRSSDGQKLLF

SEQ ID NO: 411120 - protein, 13 aa, Homo sapiens
  CDR3 for beta chain variable domain of TCR clone 205560 (TRBV7-2, TRBJ1-1)
CASNLKGAKVAFF

SEQ ID NO: 411121 - protein, 17 aa, Homo sapiens
  CDR3 for alpha chain variable domain of TCR clone 205561 (TRAV3, TRAJ42)
CALRDRDYGGSQGNLIF

SEQ ID NO: 411122 - protein, 15 aa, Homo sapiens
  CDR3 for beta chain variable domain of TCR clone 205561 (TRBV2, TRBJ2-7)
CASSEGLARSYEQYF

SEQ ID NO: 411123 - protein, 15 aa, Homo sapiens
  CDR3 for alpha chain variable domain of TCR clone 205562 (TRAV26-1, TRAJ12)
IASSELMDNSYKLIF

SEQ ID NO: 411124 - protein, 11 aa, Homo sapiens
  CDR3 for beta chain variable domain of TCR clone 205562 (TRBV7-9, TRBJ2-3)
CASSPPDTQYF

SEQ ID NO: 411125 - protein, 14 aa, Homo sapiens
  CDR3 for alpha chain variable domain of TCR clone 205563 (TRAV13-1, TRAJ35)
CAASKGGFGNVLHC

SEQ ID NO: 411126 - protein, 15 aa, Homo sapiens
  CDR3 for beta chain variable domain of TCR clone 205563 (TRBV20-1, TRBJ2-3)
CSAEPLAGHGDTQYF

SEQ ID NO: 411127 - protein, 13 aa, Homo sapiens
  CDR3 for alpha chain variable domain of TCR clone 205564 (TRAV12-2, TRAJ40)
CREDPLGTYKYIF

SEQ ID NO: 411128 - protein, 14 aa, Homo sapiens
  CDR3 for beta chain variable domain of TCR clone 205564 (TRBV20-1, TRBJ1-1)
CSAQTRIGGTEAFF

SEQ ID NO: 411129 - protein, 15 aa, Homo sapiens
  CDR3 for alpha chain variable domain of TCR clone 205565 (TRAV26-1, TRAJ20)
CIVRVAGSNDYKLSF

SEQ ID NO: 411130 - protein, 14 aa, Homo sapiens
  CDR3 for beta chain variable domain of TCR clone 205565 (TRBV4-1, TRBJ2-2)
CASSQAVNTGEQFF

SEQ ID NO: 411131 - protein, 15 aa, Homo sapiens
  CDR3 for alpha chain variable domain of TCR clone 205566 (TRAV8-2, TRAJ24)
CVVSDRTDSWGKLQF

SEQ ID NO: 411132 - protein, 15 aa, Homo sapiens
  CDR3 for beta chain variable domain of TCR clone 205566 (TRBV7-3, TRBJ2-1)
CASSPTGGGEVEQFF

SEQ ID NO: 411133 - protein, 13 aa, Homo sapiens
  CDR3 for alpha chain variable domain of TCR clone 205567 (TRAV2, TRAJ5)
CAVPDTGRRALTF

SEQ ID NO: 411134 - protein, 13 aa, Homo sapiens
  CDR3 for beta chain variable domain of TCR clone 205567 (TRBV29-1, TRBJ2-2)
CSTTGVNTGELFF

SEQ ID NO: 411135 - protein, 13 aa, Homo sapiens
  CDR3 for alpha chain variable domain of TCR clone 205568 (TRAV12-1, TRAJ22)
CVASGGSARQLTF

SEQ ID NO: 411136 - protein, 12 aa, Homo sapiens
  CDR3 for beta chain variable domain of TCR clone 205568 (TRBV29-1, TRBJ2-3)
SSVTGGADTQYF

SEQ ID NO: 411137 - protein, 12 aa, Homo sapiens
  CDR3 for alpha chain variable domain of TCR clone 205569 (TRAV2, TRAJ33)
CAVPDSNYQLIW

SEQ ID NO: 411138 - protein, 17 aa, Homo sapiens
  CDR3 for beta chain variable domain of TCR clone 205569 (TRBV6-5, TRBJ2-3)
CASSYGTSLYNSDTQYF

SEQ ID NO: 411139 - protein, 13 aa, Homo sapiens
  CDR3 for alpha chain variable domain of TCR clone 205570 (TRAV12-3, TRAJ9)
CAMRKTGGFKTIF

SEQ ID NO: 411140 - protein, 15 aa, Homo sapiens
  CDR3 for beta chain variable domain of TCR clone 205570 (TRBV20-1, TRBJ2-7)
CSARDRVSGMDEQYF

SEQ ID NO: 411141 - protein, 15 aa, Homo sapiens
  CDR3 for alpha chain variable domain of TCR clone 205571 (TRAV17, TRAJ45)
CATAERGGGADGLTF

SEQ ID NO: 411142 - protein, 14 aa, Homo sapiens
  CDR3 for beta chain variable domain of TCR clone 205571 (TRBV3-1, TRBJ2-5)
CASSQAVRQETQYF

SEQ ID NO: 411143 - protein, 13 aa, Homo sapiens
  CDR3 for alpha chain variable domain of TCR clone 205572 (TRAV8-1, TRAJ39)
CAGLNNAGNMPTF

SEQ ID NO: 411144 - protein, 17 aa, Homo sapiens
  CDR3 for beta chain variable domain of TCR clone 205572 (TRBV19, TRBJ2-3)
CASSIDPAGGGTDTQYF

SEQ ID NO: 411145 - protein, 13 aa, Homo sapiens
  CDR3 for alpha chain variable domain of TCR clone 205573 (TRAV21, TRAJ15)
CAVANQSGTALIF

SEQ ID NO: 411146 - protein, 15 aa, Homo sapiens
  CDR3 for beta chain variable domain of TCR clone 205573 (TRBV28, TRBJ2-1)
CASSIIAGGRSEKFF

SEQ ID NO: 411147 - protein, 15 aa, Homo sapiens
  CDR3 for alpha chain variable domain of TCR clone 205574 (TRAV12-3, TRAJ11)
CAMSEENSGYSTLTF

SEQ ID NO: 411148 - protein, 14 aa, Homo sapiens
  CDR3 for beta chain variable domain of TCR clone 205574 (TRBV19, TRBJ1-5)
CASSLGLIGQPQHF

SEQ ID NO: 411149 - protein, 14 aa, Homo sapiens
  CDR3 for alpha chain variable domain of TCR clone 205575 (TRAV1-2, TRAJ8)
CAVREDTGFQKLVF

SEQ ID NO: 411150 - protein, 15 aa, Homo sapiens
  CDR3 for beta chain variable domain of TCR clone 205575 (TRBV7-2, TRBJ2-1)
CASTSASGDYNEQFF

SEQ ID NO: 411151 - protein, 15 aa, Homo sapiens
  CDR3 for alpha chain variable domain of TCR clone 205576 (TRAV8-1, TRAJ23)
CAVNSHYNQGGKLIF

SEQ ID NO: 411152 - protein, 16 aa, Homo sapiens
  CDR3 for beta chain variable domain of TCR clone 205576 (TRBV5-7, TRBJ1-2)
CASSRGVTGGSYGYTF

SEQ ID NO: 411153 - protein, 14 aa, Homo sapiens
  CDR3 for alpha chain variable domain of TCR clone 205577 (TRAV23/DV6, TRAJ12)
CAASRMDSSYKLIF

SEQ ID NO: 411154 - protein, 11 aa, Homo sapiens
  CDR3 for beta chain variable domain of TCR clone 205577 (TRBV6-1, TRBJ2-7)
CASSDFRDQYF

SEQ ID NO: 411155 - protein, 19 aa, Homo sapiens
  CDR3 for alpha chain variable domain of TCR clone 205578 (TRAV25, TRAJ20)
TATQTTDVGILPHDYKLSF

SEQ ID NO: 411156 - protein, 17 aa, Homo sapiens
  CDR3 for beta chain variable domain of TCR clone 205578 (TRBV20-1, TRBJ2-1)
CSASSSGLAGSYNEQFF

SEQ ID NO: 411157 - protein, 11 aa, Homo sapiens
  CDR3 for alpha chain variable domain of TCR clone 205579 (TRAV2, TRAJ13)
CAYGGYQKVTF

SEQ ID NO: 411158 - protein, 13 aa, Homo sapiens
  CDR3 for beta chain variable domain of TCR clone 205579 (TRBV10-3, TRBJ1-2)
CAISERDSYGYTF

SEQ ID NO: 411159 - protein, 13 aa, Homo sapiens
  CDR3 for alpha chain variable domain of TCR clone 205580 (TRAV8-3, TRAJ42)
CARYGGSQGNLIF

SEQ ID NO: 411160 - protein, 14 aa, Homo sapiens
  CDR3 for beta chain variable domain of TCR clone 205580 (TRBV20-1, TRBJ2-1)
CSALDRGAYDEQFF

SEQ ID NO: 411161 - protein, 15 aa, Homo sapiens
  CDR3 for alpha chain variable domain of TCR clone 205581 (TRAV26-1, TRAJ24)
CIVPLTTDSWGKFPF

SEQ ID NO: 411162 - protein, 14 aa, Homo sapiens
  CDR3 for beta chain variable domain of TCR clone 205581 (TRBV10-3, TRBJ2-3)
CAISEKGLGDTQYF

SEQ ID NO: 411163 - protein, 14 aa, Homo sapiens
  CDR3 for alpha chain variable domain of TCR clone 205582 (TRAV8-3, TRAJ6)
CAVGASGGSYRPTF

SEQ ID NO: 411164 - protein, 17 aa, Homo sapiens
  CDR3 for beta chain variable domain of TCR clone 205582 (TRBV18, TRBJ2-2)
CASSPSDPWQNTGELFF

SEQ ID NO: 411165 - protein, 15 aa, Homo sapiens
  CDR3 for alpha chain variable domain of TCR clone 205583 (TRAV26-1, TRAJ29)
CIVRVEGSGNTPLVF

SEQ ID NO: 411166 - protein, 14 aa, Homo sapiens
  CDR3 for beta chain variable domain of TCR clone 205583 (TRBV18, TRBJ2-5)
CASSPGVSQETQSL

SEQ ID NO: 411167 - protein, 16 aa, Homo sapiens
  CDR3 for alpha chain variable domain of TCR clone 205584 (TRAV3, TRAJ23)
CAVEPLIYNQGGKLIV

SEQ ID NO: 411168 - protein, 15 aa, Homo sapiens
  CDR3 for beta chain variable domain of TCR clone 205584 (TRBV19, TRBJ1-5)
CASSPEGRPNQPQHF

SEQ ID NO: 411169 - protein, 14 aa, Homo sapiens
  CDR3 for alpha chain variable domain of TCR clone 205585 (TRAV1-2, TRAJ16)
CAVNRFSDGRKLLF

SEQ ID NO: 411170 - protein, 13 aa, Homo sapiens
  CDR3 for beta chain variable domain of TCR clone 205585 (TRBV4-1, TRBJ2-1)
CASSQAGGDEQFV

SEQ ID NO: 411171 - protein, 14 aa, Homo sapiens
  CDR3 for alpha chain variable domain of TCR clone 205586 (TRAV1-2, TRAJ16)
CAVNRFSDGQKLLF

SEQ ID NO: 411172 - protein, 11 aa, Homo sapiens
  CDR3 for beta chain variable domain of TCR clone 205586 (TRBV11-2, TRBJ2-2)
WASSLPGELFF

SEQ ID NO: 411173 - protein, 15 aa, Homo sapiens
  CDR3 for alpha chain variable domain of TCR clone 205587 (TRAV36/DV7, TRAJ53)
CAVEGSGGSNYTLTF

SEQ ID NO: 411174 - protein, 16 aa, Homo sapiens
  CDR3 for beta chain variable domain of TCR clone 205587 (TRBV27, TRBJ2-2)
CASSLSGFWVTGELFF

SEQ ID NO: 411175 - protein, 12 aa, Homo sapiens
  CDR3 for alpha chain variable domain of TCR clone 205588 (TRAV25, TRAJ38)
CAGTGNNRKMIW

SEQ ID NO: 411176 - protein, 14 aa, Homo sapiens
  CDR3 for beta chain variable domain of TCR clone 205588 (TRBV19, TRBJ1-5)
CASSKMTGPQPQHF

SEQ ID NO: 411177 - protein, 14 aa, Homo sapiens
  CDR3 for alpha chain variable domain of TCR clone 205589 (TRAV12-2, TRAJ45)
CAVNIGGGADGLTF

SEQ ID NO: 411178 - protein, 19 aa, Homo sapiens
  CDR3 for beta chain variable domain of TCR clone 205589 (TRBV19, TRBJ2-2)
CASTRPGLAGGRVTGELFF

SEQ ID NO: 411179 - protein, 15 aa, Homo sapiens
  CDR3 for alpha chain variable domain of TCR clone 205590 (TRAV3, TRAJ22)
CAVRDRGGSARQLTF

SEQ ID NO: 411180 - protein, 14 aa, Homo sapiens
  CDR3 for beta chain variable domain of TCR clone 205590 (TRBV7-2, TRBJ1-2)
CASSQTGSTYGYTF

SEQ ID NO: 411181 - protein, 15 aa, Homo sapiens
  CDR3 for alpha chain variable domain of TCR clone 205591 (TRAV2, TRAJ15)
CAVADRGQAGTALIV

SEQ ID NO: 411182 - protein, 13 aa, Homo sapiens
  CDR3 for beta chain variable domain of TCR clone 205591 (TRBV10-2, TRBJ2-7)
CASGASGGYEQYF

SEQ ID NO: 411183 - protein, 13 aa, Homo sapiens
  CDR3 for alpha chain variable domain of TCR clone 205592 (TRAV12-2, TRAJ39)
CAVNNNAGNMLTF

SEQ ID NO: 411184 - protein, 12 aa, Homo sapiens
  CDR3 for beta chain variable domain of TCR clone 205592 (TRBV11-2, TRBJ2-2)
CASSLGGGELFF

SEQ ID NO: 411185 - protein, 12 aa, Homo sapiens
  CDR3 for alpha chain variable domain of TCR clone 205593 (TRAV8-3, TRAJ20)
CAVGANDYKLSF

SEQ ID NO: 411186 - protein, 13 aa, Homo sapiens
  CDR3 for beta chain variable domain of TCR clone 205593 (TRBV20-1, TRBJ1-1)
CSAPLGGGTEAFF

SEQ ID NO: 411187 - protein, 14 aa, Homo sapiens
  CDR3 for alpha chain variable domain of TCR clone 205594 (TRAV3, TRAJ9)
CAVRGNTGGFKTIF

SEQ ID NO: 411188 - protein, 14 aa, Homo sapiens
  CDR3 for beta chain variable domain of TCR clone 205594 (TRBV15, TRBJ2-1)
CATSGVEDYNEQFF

SEQ ID NO: 411189 - protein, 14 aa, Homo sapiens
  CDR3 for alpha chain variable domain of TCR clone 205595 (TRAV12-2, TRAJ40)
CAVKIPSGTYKCIF

SEQ ID NO: 411190 - protein, 11 aa, Homo sapiens
  CDR3 for beta chain variable domain of TCR clone 205595 (TRBV29-1, TRBJ2-5)
CSEDRTGTQYF

SEQ ID NO: 411191 - protein, 14 aa, Homo sapiens
  CDR3 for alpha chain variable domain of TCR clone 205596 (TRAV12-2, TRAJ40)
YAVKIPSGTYKYIF

SEQ ID NO: 411192 - protein, 13 aa, Homo sapiens
  CDR3 for beta chain variable domain of TCR clone 205596 (TRBV7-9, TRBJ1-2)
CASSVKQNYGYTF

SEQ ID NO: 411193 - protein, 14 aa, Homo sapiens
  CDR3 for alpha chain variable domain of TCR clone 205597 (TRAV1-2, TRAJ8)
CAVREDTRFQKLVF

SEQ ID NO: 411194 - protein, 14 aa, Homo sapiens
  CDR3 for beta chain variable domain of TCR clone 205597 (TRBV29-1, TRBJ1-4)
CSVTGTGGNEKLFF

SEQ ID NO: 411195 - protein, 17 aa, Homo sapiens
  CDR3 for alpha chain variable domain of TCR clone 205598 (TRAV27, TRAJ18)
CAGLHRGRGSTLGRLYF

SEQ ID NO: 411196 - protein, 13 aa, Homo sapiens
  CDR3 for beta chain variable domain of TCR clone 205598 (TRBV7-7, TRBJ2-2)
CASSLTSAGELFF

SEQ ID NO: 411197 - protein, 15 aa, Homo sapiens
  CDR3 for alpha chain variable domain of TCR clone 205599 (TRAV26-1, TRAJ39)
CIVRVYNNAGNMLTF

SEQ ID NO: 411198 - protein, 14 aa, Homo sapiens
  CDR3 for beta chain variable domain of TCR clone 205599 (TRBV7-8, TRBJ2-7)
CASSPRGRVCEQYF

SEQ ID NO: 411199 - protein, 15 aa, Homo sapiens
  CDR3 for alpha chain variable domain of TCR clone 205600 (TRAV17, TRAJ57)
CATGPSQGGSEKLVF

SEQ ID NO: 411200 - protein, 18 aa, Homo sapiens
  CDR3 for beta chain variable domain of TCR clone 205600 (TRBV7-9, TRBJ2-7)
CASSLTTSGIRTWYEQYF

SEQ ID NO: 411201 - protein, 14 aa, Homo sapiens
  CDR3 for alpha chain variable domain of TCR clone 205601 (TRAV8-4, TRAJ17)
CAVSEGAAGNKLTF

SEQ ID NO: 411202 - protein, 13 aa, Homo sapiens
  CDR3 for beta chain variable domain of TCR clone 205601 (TRBV19, TRBJ2-1)
CASSMYRVNQQFF

SEQ ID NO: 411203 - protein, 15 aa, Homo sapiens
  CDR3 for alpha chain variable domain of TCR clone 205602 (TRAV1-2, TRAJ15)
CAVDVMGSAGTALIF

SEQ ID NO: 411204 - protein, 13 aa, Homo sapiens
  CDR3 for beta chain variable domain of TCR clone 205602 (TRBV20-1, TRBJ1-1)
CSSFDRENTEAFF

SEQ ID NO: 411205 - protein, 17 aa, Homo sapiens
  CDR3 for alpha chain variable domain of TCR clone 205603 (TRAV27, TRAJ52)
CAGAGWAGGTSYGKLTF

SEQ ID NO: 411206 - protein, 16 aa, Homo sapiens
  CDR3 for beta chain variable domain of TCR clone 205603 (TRBV19, TRBJ2-1)
CASNKAGPSSYNEQFF

SEQ ID NO: 411207 - protein, 16 aa, Homo sapiens
  CDR3 for alpha chain variable domain of TCR clone 205604 (TRAV13-1, TRAJ13)
CAASRVGGYQKVPLEL

SEQ ID NO: 411208 - protein, 17 aa, Homo sapiens
  CDR3 for beta chain variable domain of TCR clone 205604 (TRBV15, TRBJ1-5)
CATSRAPPGTRNQPQHF

SEQ ID NO: 411209 - protein, 16 aa, Homo sapiens
  CDR3 for alpha chain variable domain of TCR clone 205605 (TRAV1-2, TRAJ10)
CAVRGVPTGGGNKLTF

SEQ ID NO: 411210 - protein, 15 aa, Homo sapiens
  CDR3 for beta chain variable domain of TCR clone 205605 (TRBV4-1, TRBJ2-7)
CASSQNTGRLYEQYL

SEQ ID NO: 411211 - protein, 16 aa, Homo sapiens
  CDR3 for alpha chain variable domain of TCR clone 205606 (TRAV26-1, TRAJ53)
FIVRVAMGGSNYKLTF

SEQ ID NO: 411212 - protein, 13 aa, Homo sapiens
  CDR3 for beta chain variable domain of TCR clone 205606 (TRBV7-9, TRBJ1-2)
CASSLKQNYGYTF

SEQ ID NO: 411213 - protein, 17 aa, Homo sapiens
  CDR3 for alpha chain variable domain of TCR clone 205607 (TRAV3, TRAJ6)
CAVRDGPRAGGRHLPTF

SEQ ID NO: 411214 - protein, 14 aa, Homo sapiens
  CDR3 for beta chain variable domain of TCR clone 205607 (TRBV7-2, TRBJ2-7)
CASSPKTSFYEQYF

SEQ ID NO: 411215 - protein, 13 aa, Homo sapiens
  CDR3 for alpha chain variable domain of TCR clone 205608 (TRAV2, TRAJ21)
CAVEDLNFNKFYF

SEQ ID NO: 411216 - protein, 15 aa, Homo sapiens
  CDR3 for beta chain variable domain of TCR clone 205608 (TRBV5-1, TRBJ2-1)
CASSLVADSYNEQFF

SEQ ID NO: 411217 - protein, 11 aa, Homo sapiens
  CDR3 for alpha chain variable domain of TCR clone 205609 (TRAV8-2, TRAJ26)
CVVTLLLGSEF

SEQ ID NO: 411218 - protein, 15 aa, Homo sapiens
  CDR3 for beta chain variable domain of TCR clone 205609 (TRBV3-1, TRBJ2-7)
CASSQEWTGSYGQYF

SEQ ID NO: 411219 - protein, 14 aa, Homo sapiens
  CDR3 for alpha chain variable domain of TCR clone 205610 (TRAV1-2, TRAJ16)
CAVNRFSDGQKLLF

SEQ ID NO: 411220 - protein, 14 aa, Homo sapiens
  CDR3 for beta chain variable domain of TCR clone 205610 (TRBV18, TRBJ2-7)
CARSPRGGAYEQYF

SEQ ID NO: 411221 - protein, 13 aa, Homo sapiens
  CDR3 for alpha chain variable domain of TCR clone 205611 (TRAV21, TRAJ27)
CAARPGNAGKSTF

SEQ ID NO: 411222 - protein, 15 aa, Homo sapiens
  CDR3 for beta chain variable domain of TCR clone 205611 (TRBV27, TRBJ1-5)
CASKIQGAGNQPQHF

SEQ ID NO: 411223 - protein, 16 aa, Homo sapiens
  CDR3 for alpha chain variable domain of TCR clone 205612 (TRAV1-2, TRAJ18)
CAVRVERGSTLGRLYF

SEQ ID NO: 411224 - protein, 13 aa, Homo sapiens
  CDR3 for beta chain variable domain of TCR clone 205612 (TRBV19, TRBJ2-7)
CASSPRQSYEQYF

SEQ ID NO: 411225 - protein, 16 aa, Homo sapiens
  CDR3 for alpha chain variable domain of TCR clone 205613 (TRAV23/DV6, TRAJ34)
CAASGALSYNTDKLIF

SEQ ID NO: 411226 - protein, 12 aa, Homo sapiens
  CDR3 for beta chain variable domain of TCR clone 205613 (TRBV28, TRBJ2-1)
CASSVQINEQFF

SEQ ID NO: 411227 - protein, 16 aa, Homo sapiens
  CDR3 for alpha chain variable domain of TCR clone 205614 (TRAV8-3, TRAJ13)
CAVGAYPSGGYLKVTF

SEQ ID NO: 411228 - protein, 15 aa, Homo sapiens
  CDR3 for beta chain variable domain of TCR clone 205614 (TRBV19, TRBJ1-5)
CASSIVWADNQPQHF

SEQ ID NO: 411229 - protein, 14 aa, Homo sapiens
  CDR3 for alpha chain variable domain of TCR clone 205615 (TRAV8-2, TRAJ4)
CVVSPSGGYNKLIF

SEQ ID NO: 411230 - protein, 15 aa, Homo sapiens
  CDR3 for beta chain variable domain of TCR clone 205615 (TRBV4-1, TRBJ1-4)
CATSDTGGTNEKLFF

SEQ ID NO: 411231 - protein, 14 aa, Homo sapiens
  CDR3 for alpha chain variable domain of TCR clone 205616 (TRAV26-1, TRAJ45)
CIEVTGGCADGLTF

SEQ ID NO: 411232 - protein, 15 aa, Homo sapiens
  CDR3 for beta chain variable domain of TCR clone 205616 (TRBV5-1, TRBJ1-1)
CASSSTTGTNTEAFF

SEQ ID NO: 411233 - protein, 12 aa, Homo sapiens
  CDR3 for alpha chain variable domain of TCR clone 205617 (TRAV8-6, TRAJ33)
CAVTDSNYQLIW

SEQ ID NO: 411234 - protein, 12 aa, Homo sapiens
  CDR3 for beta chain variable domain of TCR clone 205617 (TRBV7-9, TRBJ2-7)
CASSIKREEQYF

SEQ ID NO: 411235 - protein, 14 aa, Homo sapiens
  CDR3 for alpha chain variable domain of TCR clone 205618 (TRAV17, TRAJ34)
CATDSLEGTDKLNF

SEQ ID NO: 411236 - protein, 13 aa, Homo sapiens
  CDR3 for beta chain variable domain of TCR clone 205618 (TRBV11-2, TRBJ2-7)
CASSGTRPYEQYF

SEQ ID NO: 411237 - protein, 10 aa, Homo sapiens
  CDR3 for alpha chain variable domain of TCR clone 205619 (TRAV12-1, TRAJ37)
ARGNTGKLIF

SEQ ID NO: 411238 - protein, 15 aa, Homo sapiens
  CDR3 for beta chain variable domain of TCR clone 205619 (TRBV7-2, TRBJ2-3)
CASSLEQGGTDTRYF

SEQ ID NO: 411239 - protein, 13 aa, Homo sapiens
  CDR3 for alpha chain variable domain of TCR clone 205620 (TRAV29/DV5, TRAJ47)
CAASAEYGNKLVF

SEQ ID NO: 411240 - protein, 15 aa, Homo sapiens
  CDR3 for beta chain variable domain of TCR clone 205620 (TRBV7-9, TRBJ1-4)
CASSARTGGNEQLFF

SEQ ID NO: 411241 - protein, 14 aa, Homo sapiens
  CDR3 for alpha chain variable domain of TCR clone 205621 (TRAV26-1, TRAJ30)
CIVRPRNRDDKIIF

SEQ ID NO: 411242 - protein, 13 aa, Homo sapiens
  CDR3 for beta chain variable domain of TCR clone 205621 (TRBV10-3, TRBJ1-2)
CAISERDSYGYTF

SEQ ID NO: 411243 - protein, 16 aa, Homo sapiens
  CDR3 for alpha chain variable domain of TCR clone 205622 (TRAV30, TRAJ24)
CGTEIVDADSWGKFQF

SEQ ID NO: 411244 - protein, 13 aa, Homo sapiens
  CDR3 for beta chain variable domain of TCR clone 205622 (TRBV29-1, TRBJ1-1)
CSVGDSRNTEAFF

SEQ ID NO: 411245 - protein, 18 aa, Homo sapiens
  CDR3 for alpha chain variable domain of TCR clone 205623 (TRAV17, TRAJ28)
CATDPPRGTGAGSYQLTF

SEQ ID NO: 411246 - protein, 14 aa, Homo sapiens
  CDR3 for beta chain variable domain of TCR clone 205623 (TRBV13, TRBJ2-5)
CASSLDYPQETQYF

SEQ ID NO: 411247 - protein, 14 aa, Homo sapiens
  CDR3 for alpha chain variable domain of TCR clone 205624 (TRAV12-2, TRAJ40)
CAVKIPSGTSNYIF

SEQ ID NO: 411248 - protein, 14 aa, Homo sapiens
  CDR3 for beta chain variable domain of TCR clone 205624 (TRBV20-1, TRBJ1-1)
CSAQTRSGGTEAFF

SEQ ID NO: 411249 - protein, 15 aa, Homo sapiens
  CDR3 for alpha chain variable domain of TCR clone 205625 (TRAV8-6, TRAJ10)
CAVSDQAGGGNKLTS

SEQ ID NO: 411250 - protein, 15 aa, Homo sapiens
  CDR3 for beta chain variable domain of TCR clone 205625 (TRBV3-1, TRBJ2-5)
CASSANLGGPETQYF

SEQ ID NO: 411251 - protein, 16 aa, Homo sapiens
  CDR3 for alpha chain variable domain of TCR clone 205626 (TRAV23/DV6, TRAJ34)
CAASGALSYNTDKPIF

SEQ ID NO: 411252 - protein, 15 aa, Homo sapiens
  CDR3 for beta chain variable domain of TCR clone 205626 (TRBV10-3, TRBJ1-2)
CAISESTSRGYGYTF

SEQ ID NO: 411253 - protein, 15 aa, Homo sapiens
  CDR3 for alpha chain variable domain of TCR clone 205627 (TRAV3, TRAJ9)
CAVRARNTVGFKTIF

SEQ ID NO: 411254 - protein, 14 aa, Homo sapiens
  CDR3 for beta chain variable domain of TCR clone 205627 (TRBV20-1, TRBJ2-1)
CSAQIGGSANEQFF

SEQ ID NO: 411255 - protein, 12 aa, Homo sapiens
  CDR3 for alpha chain variable domain of TCR clone 205628 (TRAV17, TRAJ49)
CATVTTGNQFYF

SEQ ID NO: 411256 - protein, 18 aa, Homo sapiens
  CDR3 for beta chain variable domain of TCR clone 205628 (TRBV11-2, TRBJ2-6)
CASSLNPFLGTGANVLPF

SEQ ID NO: 411257 - protein, 11 aa, Homo sapiens
  CDR3 for alpha chain variable domain of TCR clone 205629 (TRAV21, TRAJ4)
HVSGGYNKLIF

SEQ ID NO: 411258 - protein, 13 aa, Homo sapiens
  CDR3 for beta chain variable domain of TCR clone 205629 (TRBV7-3, TRBJ2-5)
CASSLTAGETQYV

SEQ ID NO: 411259 - protein, 15 aa, Homo sapiens
  CDR3 for alpha chain variable domain of TCR clone 205630 (TRAV8-2, TRAJ40)
CVALGTTSGTYKYTS

SEQ ID NO: 411260 - protein, 16 aa, Homo sapiens
  CDR3 for beta chain variable domain of TCR clone 205630 (TRBV7-3, TRBJ2-1)
CASSLEGYRSYNEQFF

SEQ ID NO: 411261 - protein, 11 aa, Homo sapiens
  CDR3 for alpha chain variable domain of TCR clone 205631 (TRAV3, TRAJ21)
CAMGNFNKFYF

SEQ ID NO: 411262 - protein, 16 aa, Homo sapiens
  CDR3 for beta chain variable domain of TCR clone 205631 (TRBV19, TRBJ2-1)
CASSRAGASSYNEQFF

SEQ ID NO: 411263 - protein, 14 aa, Homo sapiens
  CDR3 for alpha chain variable domain of TCR clone 205632 (TRAV12-2, TRAJ13)
CAVEKTGGYQKVTF

SEQ ID NO: 411264 - protein, 15 aa, Homo sapiens
  CDR3 for beta chain variable domain of TCR clone 205632 (TRBV6-3, TRBJ2-7)
CASSSPGTVFYEQYF

SEQ ID NO: 411265 - protein, 13 aa, Homo sapiens
  CDR3 for alpha chain variable domain of TCR clone 205633 (TRAV3, TRAJ20)
CAVRSLNDYKLSF

SEQ ID NO: 411266 - protein, 14 aa, Homo sapiens
  CDR3 for beta chain variable domain of TCR clone 205633 (TRBV6-3, TRBJ2-7)
CASSYSTGGDERYF

SEQ ID NO: 411267 - protein, 16 aa, Homo sapiens
  CDR3 for alpha chain variable domain of TCR clone 205634 (TRAV30, TRAJ24)
CGTEIVDADSWGKFQF

SEQ ID NO: 411268 - protein, 16 aa, Homo sapiens
  CDR3 for beta chain variable domain of TCR clone 205634 (TRBV6-3, TRBJ1-1)
CASTDLGTVHNTEAFF

SEQ ID NO: 411269 - protein, 16 aa, Homo sapiens
  CDR3 for alpha chain variable domain of TCR clone 205635 (TRAV8-6, TRAJ39)
CAVMPMNNNAGNMLTF

SEQ ID NO: 411270 - protein, 16 aa, Homo sapiens
  CDR3 for beta chain variable domain of TCR clone 205635 (TRBV15, TRBJ2-5)
CATSRYPEAAQETQYF

SEQ ID NO: 411271 - protein, 14 aa, Homo sapiens
  CDR3 for alpha chain variable domain of TCR clone 205636 (TRAV3, TRAJ27)
CAVIDDTNAGKSTF

SEQ ID NO: 411272 - protein, 15 aa, Homo sapiens
  CDR3 for beta chain variable domain of TCR clone 205636 (TRBV7-7, TRBJ2-2)
CATSKLAKNTGELFF

SEQ ID NO: 411273 - protein, 10 aa, Homo sapiens
  CDR3 for alpha chain variable domain of TCR clone 205637 (TRAV1-2, TRAJ20)
CAVTDYKLSF

SEQ ID NO: 411274 - protein, 17 aa, Homo sapiens
  CDR3 for beta chain variable domain of TCR clone 205637 (TRBV15, TRBJ1-1)
CATSRVGGADGDTEAFF

SEQ ID NO: 411275 - protein, 11 aa, Homo sapiens
  CDR3 for alpha chain variable domain of TCR clone 205638 (TRAV21, TRAJ41)
CAVRSGYAFNF

SEQ ID NO: 411276 - protein, 13 aa, Homo sapiens
  CDR3 for beta chain variable domain of TCR clone 205638 (TRBV7-9, TRBJ1-2)
CASSLKQNYGYTF

SEQ ID NO: 411277 - protein, 16 aa, Homo sapiens
  CDR3 for alpha chain variable domain of TCR clone 205639 (TRAV3, TRAJ4)
CAVRPSPSGGYNKLIF

SEQ ID NO: 411278 - protein, 16 aa, Homo sapiens
  CDR3 for beta chain variable domain of TCR clone 205639 (TRBV5-1, TRBJ2-3)
CASSLGLAVYTDTQYF

SEQ ID NO: 411279 - protein, 12 aa, Homo sapiens
  CDR3 for alpha chain variable domain of TCR clone 205640 (TRAV21, TRAJ33)
CAKMDSNYQLIW

SEQ ID NO: 411280 - protein, 16 aa, Homo sapiens
  CDR3 for beta chain variable domain of TCR clone 205640 (TRBV18, TRBJ1-4)
CASSPLVGDRAEKLFF

SEQ ID NO: 411281 - protein, 13 aa, Homo sapiens
  CDR3 for alpha chain variable domain of TCR clone 205641 (TRAV9-2, TRAJ53)
CALSGGSNYKLTF

SEQ ID NO: 411282 - protein, 14 aa, Homo sapiens
  CDR3 for beta chain variable domain of TCR clone 205641 (TRBV7-2, TRBJ2-2)
CASRGQGAAGELFF

SEQ ID NO: 411283 - protein, 12 aa, Homo sapiens
  CDR3 for alpha chain variable domain of TCR clone 205642 (TRAV13-1, TRAJ42)
SVLRGSQGNLIF

SEQ ID NO: 411284 - protein, 13 aa, Homo sapiens
  CDR3 for beta chain variable domain of TCR clone 205642 (TRBV2, TRBJ1-4)
CTSSELGVEKLFF

SEQ ID NO: 411285 - protein, 11 aa, Homo sapiens
  CDR3 for alpha chain variable domain of TCR clone 205643 (TRAV3, TRAJ21)
CAVGTFNKFYF

SEQ ID NO: 411286 - protein, 17 aa, Homo sapiens
  CDR3 for beta chain variable domain of TCR clone 205643 (TRBV5-1, TRBJ2-5)
CASAVTRQFGNKETQYF

SEQ ID NO: 411287 - protein, 13 aa, Homo sapiens
  CDR3 for alpha chain variable domain of TCR clone 205644 (TRAV12-1, TRAJ34)
CGEPLGNTDKLIF

SEQ ID NO: 411288 - protein, 20 aa, Homo sapiens
  CDR3 for beta chain variable domain of TCR clone 205644 (TRBV19, TRBJ2-1)
CASSISRTVTSTRLNNEQFS

SEQ ID NO: 411289 - protein, 16 aa, Homo sapiens
  CDR3 for alpha chain variable domain of TCR clone 205645 (TRAV26-1, TRAJ52)
CIVSNAGGTSYGKLTF

SEQ ID NO: 411290 - protein, 13 aa, Homo sapiens
  CDR3 for beta chain variable domain of TCR clone 205645 (TRBV7-3, TRBJ2-1)
CASSPSGGNEQFF

SEQ ID NO: 411291 - protein, 15 aa, Homo sapiens
  CDR3 for alpha chain variable domain of TCR clone 205646 (TRAV8-2, TRAJ40)
CVVLGTTSGTYKYIF

SEQ ID NO: 411292 - protein, 16 aa, Homo sapiens
  CDR3 for beta chain variable domain of TCR clone 205646 (TRBV5-4, TRBJ2-3)
CASQQPGAGGADTQYF

SEQ ID NO: 411293 - protein, 14 aa, Homo sapiens
  CDR3 for alpha chain variable domain of TCR clone 205647 (TRAV17, TRAJ57)
CVTDASGGSEKLVF

SEQ ID NO: 411294 - protein, 14 aa, Homo sapiens
  CDR3 for beta chain variable domain of TCR clone 205647 (TRBV4-2, TRBJ2-1)
CASGLDRAYNEQFF

SEQ ID NO: 411295 - protein, 11 aa, Homo sapiens
  CDR3 for alpha chain variable domain of TCR clone 205648 (TRAV8-3, TRAJ15)
CAVGPGTALIF

SEQ ID NO: 411296 - protein, 18 aa, Homo sapiens
  CDR3 for beta chain variable domain of TCR clone 205648 (TRBV18, TRBJ2-3)
CASSYTSGAAGGTDTQYL

SEQ ID NO: 411297 - protein, 13 aa, Homo sapiens
  CDR3 for alpha chain variable domain of TCR clone 205649 (TRAV2, TRAJ40)
CAVVTSGTYKYIF

SEQ ID NO: 411298 - protein, 16 aa, Homo sapiens
  CDR3 for beta chain variable domain of TCR clone 205649 (TRBV19, TRBJ2-2)
CASRAPGTGATGELFF

SEQ ID NO: 411299 - protein, 14 aa, Homo sapiens
  CDR3 for alpha chain variable domain of TCR clone 205650 (TRAV12-1, TRAJ23)
CVVNAAGRKAYLRT

SEQ ID NO: 411300 - protein, 12 aa, Homo sapiens
  CDR3 for beta chain variable domain of TCR clone 205650 (TRBV6-5, TRBJ2-3)
CASSDTTDMQYF

SEQ ID NO: 411301 - protein, 16 aa, Homo sapiens
  CDR3 for alpha chain variable domain of TCR clone 205651 (TRAV16, TRAJ4)
CALSRMYSGGYNKLIF

SEQ ID NO: 411302 - protein, 16 aa, Homo sapiens
  CDR3 for beta chain variable domain of TCR clone 205651 (TRBV24-1, TRBJ2-3)
CATSDPGTGATDTQYF

SEQ ID NO: 411303 - protein, 17 aa, Homo sapiens
  CDR3 for alpha chain variable domain of TCR clone 205652 (TRAV3, TRAJ6)
CAVRDGPKAGGSYIPKF

SEQ ID NO: 411304 - protein, 14 aa, Homo sapiens
  CDR3 for beta chain variable domain of TCR clone 205652 (TRBV7-2, TRBJ2-7)
CASSPKTSFYEQYF

SEQ ID NO: 411305 - protein, 14 aa, Homo sapiens
  CDR3 for alpha chain variable domain of TCR clone 205653 (TRAV38-1, TRAJ45)
CAYYSGGGADGLTF

SEQ ID NO: 411306 - protein, 13 aa, Homo sapiens
  CDR3 for beta chain variable domain of TCR clone 205653 (TRBV20-1, TRBJ2-2)
CSASAAGTGELFF

SEQ ID NO: 411307 - protein, 11 aa, Homo sapiens
  CDR3 for alpha chain variable domain of TCR clone 205654 (TRAV26-2, TRAJ8)
CILTGFQKLVF

SEQ ID NO: 411308 - protein, 13 aa, Homo sapiens
  CDR3 for beta chain variable domain of TCR clone 205654 (TRBV4-2, TRBJ1-1)
CASSQAGNTEAFF

SEQ ID NO: 411309 - protein, 13 aa, Homo sapiens
  CDR3 for alpha chain variable domain of TCR clone 205655 (TRAV12-1, TRAJ33)
CCDAPDSNYQLIW

SEQ ID NO: 411310 - protein, 15 aa, Homo sapiens
  CDR3 for beta chain variable domain of TCR clone 205655 (TRBV27, TRBJ2-1)
CASSNGGGSSNEQFF

SEQ ID NO: 411311 - protein, 15 aa, Homo sapiens
  CDR3 for alpha chain variable domain of TCR clone 205656 (TRAV12-2, TRAJ24)
CAVRMTTDSWGKFQF

SEQ ID NO: 411312 - protein, 15 aa, Homo sapiens
  CDR3 for beta chain variable domain of TCR clone 205656 (TRBV2, TRBJ2-3)
CASSADRGSTDTQYF

SEQ ID NO: 411313 - protein, 12 aa, Homo sapiens
  CDR3 for alpha chain variable domain of TCR clone 205657 (TRAV13-1, TRAJ43)
CAAGRFNNYMRF

SEQ ID NO: 411314 - protein, 14 aa, Homo sapiens
  CDR3 for beta chain variable domain of TCR clone 205657 (TRBV6-3, TRBJ2-5)
CASRRDGGEETQYF

SEQ ID NO: 411315 - protein, 17 aa, Homo sapiens
  CDR3 for alpha chain variable domain of TCR clone 205658 (TRAV13-1, TRAJ31)
CAPRDRLVFGDGTQLVV

SEQ ID NO: 411316 - protein, 12 aa, Homo sapiens
  CDR3 for beta chain variable domain of TCR clone 205658 (TRBV7-9, TRBJ2-7)
CANSLEGYEQYF

SEQ ID NO: 411317 - protein, 12 aa, Homo sapiens
  CDR3 for alpha chain variable domain of TCR clone 205659 (TRAV12-1, TRAJ31)
CVSWNNNARTMF

SEQ ID NO: 411318 - protein, 15 aa, Homo sapiens
  CDR3 for beta chain variable domain of TCR clone 205659 (TRBV7-2, TRBJ1-5)
CASSLDRGQDQPQHF

SEQ ID NO: 411319 - protein, 15 aa, Homo sapiens
  CDR3 for alpha chain variable domain of TCR clone 205660 (TRAV8-3, TRAJ21)
CAVGALPPRGYKFYF

SEQ ID NO: 411320 - protein, 13 aa, Homo sapiens
  CDR3 for beta chain variable domain of TCR clone 205660 (TRBV12-4, TRBJ2-7)
CASSPTETYEQYF

SEQ ID NO: 411321 - protein, 12 aa, Homo sapiens
  CDR3 for alpha chain variable domain of TCR clone 205661 (TRAV12-2, TRAJ10)
WGVTGGGNKLTF

SEQ ID NO: 411322 - protein, 14 aa, Homo sapiens
  CDR3 for beta chain variable domain of TCR clone 205661 (TRBV27, TRBJ2-7)
CASATGTARREQYF

SEQ ID NO: 411323 - protein, 18 aa, Homo sapiens
  CDR3 for alpha chain variable domain of TCR clone 205662 (TRAV13-1, TRAJ52)
CAASKRSTGGTSYGKLTF

SEQ ID NO: 411324 - protein, 13 aa, Homo sapiens
  CDR3 for beta chain variable domain of TCR clone 205662 (TRBV12-4, TRBJ1-2)
CASSLRQGKGENF

SEQ ID NO: 411325 - protein, 14 aa, Homo sapiens
  CDR3 for alpha chain variable domain of TCR clone 205663 (TRAV17, TRAJ34)
CATDSLEGTDKLIF

SEQ ID NO: 411326 - protein, 14 aa, Homo sapiens
  CDR3 for beta chain variable domain of TCR clone 205663 (TRBV7-2, TRBJ1-1)
CASSFLTGTTEAFF

SEQ ID NO: 411327 - protein, 17 aa, Homo sapiens
  CDR3 for alpha chain variable domain of TCR clone 205664 (TRAV17, TRAJ52)
CATDRNAGGTSYGRLTF

SEQ ID NO: 411328 - protein, 16 aa, Homo sapiens
  CDR3 for beta chain variable domain of TCR clone 205664 (TRBV10-3, TRBJ2-1)
CAISGVGDGGGGEQFF

SEQ ID NO: 411329 - protein, 14 aa, Homo sapiens
  CDR3 for alpha chain variable domain of TCR clone 205665 (TRAV12-3, TRAJ10)
SHLPLTGGGNKLTF

SEQ ID NO: 411330 - protein, 14 aa, Homo sapiens
  CDR3 for beta chain variable domain of TCR clone 205665 (TRBV28, TRBJ2-5)
CASSLGDRAETQYF

SEQ ID NO: 411331 - protein, 13 aa, Homo sapiens
  CDR3 for alpha chain variable domain of TCR clone 205666 (TRAV12-1, TRAJ53)
CVVNAESNYKLTF

SEQ ID NO: 411332 - protein, 12 aa, Homo sapiens
  CDR3 for beta chain variable domain of TCR clone 205666 (TRBV11-2, TRBJ2-7)
CASSPPADEQYF

SEQ ID NO: 411333 - protein, 13 aa, Homo sapiens
  CDR3 for alpha chain variable domain of TCR clone 205667 (TRAV20, TRAJ31)
CAVQAWNNARLMF

SEQ ID NO: 411334 - protein, 16 aa, Homo sapiens
  CDR3 for beta chain variable domain of TCR clone 205667 (TRBV6-6, TRBJ2-1)
GASSWGGQGPYNEQFF

SEQ ID NO: 411335 - protein, 13 aa, Homo sapiens
  CDR3 for alpha chain variable domain of TCR clone 205668 (TRAV16, TRAJ53)
CALRGGSNYKLTF

SEQ ID NO: 411336 - protein, 14 aa, Homo sapiens
  CDR3 for beta chain variable domain of TCR clone 205668 (TRBV2, TRBJ2-4)
CASPTGRVQKHSVL

SEQ ID NO: 411337 - protein, 12 aa, Homo sapiens
  CDR3 for alpha chain variable domain of TCR clone 205669 (TRAV25, TRAJ53)
CQSGGSNYKLTF

SEQ ID NO: 411338 - protein, 15 aa, Homo sapiens
  CDR3 for beta chain variable domain of TCR clone 205669 (TRBV5-1, TRBJ2-2)
CASSWASPNTGELFF

SEQ ID NO: 411339 - protein, 15 aa, Homo sapiens
  CDR3 for alpha chain variable domain of TCR clone 205670 (TRAV26-1, TRAJ40)
CIVRVTTSGTYKYLF

SEQ ID NO: 411340 - protein, 12 aa, Homo sapiens
  CDR3 for beta chain variable domain of TCR clone 205670 (TRBV7-9, TRBJ1-4)
CASSTDREKLFF

SEQ ID NO: 411341 - protein, 14 aa, Homo sapiens
  CDR3 for alpha chain variable domain of TCR clone 205671 (TRAV1-1, TRAJ27)
CDVIYNTNAGKSTF

SEQ ID NO: 411342 - protein, 14 aa, Homo sapiens
  CDR3 for beta chain variable domain of TCR clone 205671 (TRBV7-9, TRBJ2-2)
CASSGLADTGELFF

SEQ ID NO: 411343 - protein, 14 aa, Homo sapiens
  CDR3 for alpha chain variable domain of TCR clone 205672 (TRAV1-2, TRAJ8)
CAVREDKGFQKLVF

SEQ ID NO: 411344 - protein, 14 aa, Homo sapiens
  CDR3 for beta chain variable domain of TCR clone 205672 (TRBV7-6, TRBJ2-3)
CASSLGTVTDTQYF

SEQ ID NO: 411345 - protein, 14 aa, Homo sapiens
  CDR3 for alpha chain variable domain of TCR clone 205673 (TRAV16, TRAJ33)
CALSAMDSNYQLIW

SEQ ID NO: 411346 - protein, 16 aa, Homo sapiens
  CDR3 for beta chain variable domain of TCR clone 205673 (TRBV4-2, TRBJ1-5)
CASSQGQGASNQPQHF

SEQ ID NO: 411347 - protein, 13 aa, Homo sapiens
  CDR3 for alpha chain variable domain of TCR clone 205674 (TRAV1-1, TRAJ9)
CAAKNTGGFKTIL

SEQ ID NO: 411348 - protein, 14 aa, Homo sapiens
  CDR3 for beta chain variable domain of TCR clone 205674 (TRBV20-1, TRBJ2-1)
CSAKIGGSANEQFF

SEQ ID NO: 411349 - protein, 13 aa, Homo sapiens
  CDR3 for alpha chain variable domain of TCR clone 205675 (TRAV20, TRAJ37)
CAGCSSNTGKLIF

SEQ ID NO: 411350 - protein, 21 aa, Homo sapiens
  CDR3 for beta chain variable domain of TCR clone 205675 (TRBV4-2, TRBJ2-3)
PCSQKIRPCISVPAAPDTQYF

SEQ ID NO: 411351 - protein, 15 aa, Homo sapiens
  CDR3 for alpha chain variable domain of TCR clone 205676 (TRAV17, TRAJ57)
CATGPSQGGSEKLVF

SEQ ID NO: 411352 - protein, 13 aa, Homo sapiens
  CDR3 for beta chain variable domain of TCR clone 205676 (TRBV27, TRBJ1-4)
CASSLMGDEQLFF

SEQ ID NO: 411353 - protein, 14 aa, Homo sapiens
  CDR3 for alpha chain variable domain of TCR clone 205677 (TRAV1-2, TRAJ16)
CAVNRFSDGQKLLF

SEQ ID NO: 411354 - protein, 12 aa, Homo sapiens
  CDR3 for beta chain variable domain of TCR clone 205677 (TRBV20-1, TRBJ2-5)
CSAPRSQETQYL

SEQ ID NO: 411355 - protein, 14 aa, Homo sapiens
  CDR3 for alpha chain variable domain of TCR clone 205678 (TRAV1-2, TRAJ8)
CAVREDTGFQKLVL

SEQ ID NO: 411356 - protein, 14 aa, Homo sapiens
  CDR3 for beta chain variable domain of TCR clone 205678 (TRBV5-4, TRBJ1-1)
CASSLDSRRDEAFF

SEQ ID NO: 411357 - protein, 12 aa, Homo sapiens
  CDR3 for alpha chain variable domain of TCR clone 205679 (TRAV13-1, TRAJ21)
CSAKEGFNKFYF

SEQ ID NO: 411358 - protein, 14 aa, Homo sapiens
  CDR3 for beta chain variable domain of TCR clone 205679 (TRBV5-1, TRBJ2-7)
CASSRGESLYEQYF

SEQ ID NO: 411359 - protein, 14 aa, Homo sapiens
  CDR3 for alpha chain variable domain of TCR clone 205680 (TRAV13-2, TRAJ17)
CAENGKAAGNKLTF

SEQ ID NO: 411360 - protein, 14 aa, Homo sapiens
  CDR3 for beta chain variable domain of TCR clone 205680 (TRBV5-4, TRBJ1-1)
CASSLDSRWDEAFF

SEQ ID NO: 411361 - protein, 14 aa, Homo sapiens
  CDR3 for alpha chain variable domain of TCR clone 205681 (TRAV12-2, TRAJ13)
CAVKKTGGYQKVTF

SEQ ID NO: 411362 - protein, 13 aa, Homo sapiens
  CDR3 for beta chain variable domain of TCR clone 205681 (TRBV27, TRBJ2-7)
CASSFVSSYEQYF

SEQ ID NO: 411363 - protein, 15 aa, Homo sapiens
  CDR3 for alpha chain variable domain of TCR clone 205682 (TRAV4, TRAJ10)
CLVGDEEGGGNKLTF

SEQ ID NO: 411364 - protein, 15 aa, Homo sapiens
  CDR3 for beta chain variable domain of TCR clone 205682 (TRBV7-2, TRBJ2-1)
CASTHGTGIYNEQFF

SEQ ID NO: 411365 - protein, 13 aa, Homo sapiens
  CDR3 for alpha chain variable domain of TCR clone 205683 (TRAV12-2, TRAJ10)
CAVPTGGGNKLTF

SEQ ID NO: 411366 - protein, 11 aa, Homo sapiens
  CDR3 for beta chain variable domain of TCR clone 205683 (TRBV6-1, TRBJ2-1)
CASISSNDQFF

SEQ ID NO: 411367 - protein, 16 aa, Homo sapiens
  CDR3 for alpha chain variable domain of TCR clone 205684 (TRAV12-1, TRAJ43)
CVVNPHSFGAGTRLTV

SEQ ID NO: 411368 - protein, 13 aa, Homo sapiens
  CDR3 for beta chain variable domain of TCR clone 205684 (TRBV20-1, TRBJ1-1)
CSARGGGNTEAFF

SEQ ID NO: 411369 - protein, 13 aa, Homo sapiens
  CDR3 for alpha chain variable domain of TCR clone 205685 (TRAV26-2, TRAJ43)
CVLRAVNNNDMRF

SEQ ID NO: 411370 - protein, 15 aa, Homo sapiens
  CDR3 for beta chain variable domain of TCR clone 205685 (TRBV7-2, TRBJ2-1)
CASTHGTGIYNEQFF

SEQ ID NO: 411371 - protein, 14 aa, Homo sapiens
  CDR3 for alpha chain variable domain of TCR clone 205686 (TRAV9-2, TRAJ39)
WALYIYNAGNMLTF

SEQ ID NO: 411372 - protein, 13 aa, Homo sapiens
  CDR3 for beta chain variable domain of TCR clone 205686 (TRBV12-5, TRBJ2-3)
CASGDRQSDTQYF

SEQ ID NO: 411373 - protein, 13 aa, Homo sapiens
  CDR3 for alpha chain variable domain of TCR clone 205687 (TRAV27, TRAJ6)
CAGGTRGSYIPTF

SEQ ID NO: 411374 - protein, 15 aa, Homo sapiens
  CDR3 for beta chain variable domain of TCR clone 205687 (TRBV11-2, TRBJ1-3)
CASSLSPLVRDNMYF

SEQ ID NO: 411375 - protein, 14 aa, Homo sapiens
  CDR3 for alpha chain variable domain of TCR clone 205688 (TRAV14/DV4, TRAJ15)
CAMRRDQAGTALIF

SEQ ID NO: 411376 - protein, 16 aa, Homo sapiens
  CDR3 for beta chain variable domain of TCR clone 205688 (TRBV15, TRBJ2-3)
CATSRDLGIVKDTQYF

SEQ ID NO: 411377 - protein, 14 aa, Homo sapiens
  CDR3 for alpha chain variable domain of TCR clone 205689 (TRAV12-3, TRAJ9)
CAMSPNTGGFKTIF

SEQ ID NO: 411378 - protein, 16 aa, Homo sapiens
  CDR3 for beta chain variable domain of TCR clone 205689 (TRBV7-3, TRBJ2-2)
CASSLKRGTLSGELFF

SEQ ID NO: 411379 - protein, 13 aa, Homo sapiens
  CDR3 for alpha chain variable domain of TCR clone 205690 (TRAV2, TRAJ40)
CAVVTSGTYKYIF

SEQ ID NO: 411380 - protein, 16 aa, Homo sapiens
  CDR3 for beta chain variable domain of TCR clone 205690 (TRBV7-9, TRBJ1-3)
CASSLGAGSSRNTIYF

SEQ ID NO: 411381 - protein, 13 aa, Homo sapiens
  CDR3 for alpha chain variable domain of TCR clone 205691 (TRAV13-2, TRAJ21)
CAENLYNFNKFYF

SEQ ID NO: 411382 - protein, 17 aa, Homo sapiens
  CDR3 for beta chain variable domain of TCR clone 205691 (TRBV11-2, TRBJ2-1)
CASSLYPPGVEYNEQFF

SEQ ID NO: 411383 - protein, 13 aa, Homo sapiens
  CDR3 for alpha chain variable domain of TCR clone 205692 (TRAV8-1, TRAJ28)
CAVSGAGSYQLTF

SEQ ID NO: 411384 - protein, 14 aa, Homo sapiens
  CDR3 for beta chain variable domain of TCR clone 205692 (TRBV4-2, TRBJ2-1)
CASGLDRAYNEQFF

SEQ ID NO: 411385 - protein, 16 aa, Homo sapiens
  CDR3 for alpha chain variable domain of TCR clone 205693 (TRAV1-2, TRAJ6)
CAVREQGTGGSYIPTF

SEQ ID NO: 411386 - protein, 13 aa, Homo sapiens
  CDR3 for beta chain variable domain of TCR clone 205693 (TRBV28, TRBJ2-7)
CASTPGLAGEQYF

SEQ ID NO: 411387 - protein, 13 aa, Homo sapiens
  CDR3 for alpha chain variable domain of TCR clone 205694 (TRAV8-4, TRAJ49)
CAVSAPTGNQFYF

SEQ ID NO: 411388 - protein, 12 aa, Homo sapiens
  CDR3 for beta chain variable domain of TCR clone 205694 (TRBV7-8, TRBJ2-7)
CASSLGDREQYF

SEQ ID NO: 411389 - protein, 12 aa, Homo sapiens
  CDR3 for alpha chain variable domain of TCR clone 205695 (TRAV8-3, TRAJ26)
CAGDNYGHNFVF

SEQ ID NO: 411390 - protein, 12 aa, Homo sapiens
  CDR3 for beta chain variable domain of TCR clone 205695 (TRBV11-2, TRBJ2-1)
CASSPGNNEQFF

SEQ ID NO: 411391 - protein, 13 aa, Homo sapiens
  CDR3 for alpha chain variable domain of TCR clone 205696 (TRAV2, TRAJ15)
CAVASQAGTALIF

SEQ ID NO: 411392 - protein, 13 aa, Homo sapiens
  CDR3 for beta chain variable domain of TCR clone 205696 (TRBV7-9, TRBJ1-1)
CASSLAGVTEAFF

SEQ ID NO: 411393 - protein, 16 aa, Homo sapiens
  CDR3 for alpha chain variable domain of TCR clone 205697 (TRAV22, TRAJ45)
CAVERGKRGGADGITF

SEQ ID NO: 411394 - protein, 11 aa, Homo sapiens
  CDR3 for beta chain variable domain of TCR clone 205697 (TRBV29-1, TRBJ2-5)
CSEDRTGTQYF

SEQ ID NO: 411395 - protein, 13 aa, Homo sapiens
  CDR3 for alpha chain variable domain of TCR clone 205698 (TRAV8-3, TRAJ4)
WVFSSGGYNKLIF

SEQ ID NO: 411396 - protein, 14 aa, Homo sapiens
  CDR3 for beta chain variable domain of TCR clone 205698 (TRBV7-9, TRBJ2-3)
CASSLEDGTDTQYF

SEQ ID NO: 411397 - protein, 12 aa, Homo sapiens
  CDR3 for alpha chain variable domain of TCR clone 205699 (TRAV16, TRAJ27)
CALNTNAGKSTF

SEQ ID NO: 411398 - protein, 12 aa, Homo sapiens
  CDR3 for beta chain variable domain of TCR clone 205699 (TRBV4-1, TRBJ2-3)
CASSQGTDTQYF

SEQ ID NO: 411399 - protein, 14 aa, Homo sapiens
  CDR3 for alpha chain variable domain of TCR clone 205700 (TRAV8-3, TRAJ36)
CAVGLITGANNLYF

SEQ ID NO: 411400 - protein, 15 aa, Homo sapiens
  CDR3 for beta chain variable domain of TCR clone 205700 (TRBV4-1, TRBJ2-1)
CASSQDPGNYNEQFF

SEQ ID NO: 411401 - protein, 12 aa, Homo sapiens
  CDR3 for alpha chain variable domain of TCR clone 205701 (TRAV13-2, TRAJ8)
CAPWLGFQKLVF

SEQ ID NO: 411402 - protein, 12 aa, Homo sapiens
  CDR3 for beta chain variable domain of TCR clone 205701 (TRBV12-4, TRBJ1-5)
CASSLGRQPQHF

SEQ ID NO: 411403 - protein, 16 aa, Homo sapiens
  CDR3 for alpha chain variable domain of TCR clone 205702 (TRAV12-3, TRAJ53)
CAMSPGSGGSNYKLTF

SEQ ID NO: 411404 - protein, 15 aa, Homo sapiens
  CDR3 for beta chain variable domain of TCR clone 205702 (TRBV2, TRBJ2-1)
CASSELAGSYDEQFF

SEQ ID NO: 411405 - protein, 20 aa, Homo sapiens
  CDR3 for alpha chain variable domain of TCR clone 205703 (TRAV17, TRAJ28)
CFLLLCYGLGLWAGSYQLTF

SEQ ID NO: 411406 - protein, 15 aa, Homo sapiens
  CDR3 for beta chain variable domain of TCR clone 205703 (TRBV12-4, TRBJ1-2)
CASSFEAGLGYGYTF

SEQ ID NO: 411407 - protein, 13 aa, Homo sapiens
  CDR3 for alpha chain variable domain of TCR clone 205704 (TRAV26-1, TRAJ40)
CIVRGTGTYKYIF

SEQ ID NO: 411408 - protein, 14 aa, Homo sapiens
  CDR3 for beta chain variable domain of TCR clone 205704 (TRBV12-5, TRBJ2-5)
CASGSRTHQETQYF

SEQ ID NO: 411409 - protein, 12 aa, Homo sapiens
  CDR3 for alpha chain variable domain of TCR clone 205705 (TRAV13-2, TRAJ41)
CAKNIGRYALNF

SEQ ID NO: 411410 - protein, 15 aa, Homo sapiens
  CDR3 for beta chain variable domain of TCR clone 205705 (TRBV5-7, TRBJ2-7)
CASSLPGQVFYEQYF

SEQ ID NO: 411411 - protein, 18 aa, Homo sapiens
  CDR3 for alpha chain variable domain of TCR clone 205706 (TRAV16, TRAJ26)
CALRLWSEFCLWSRNQIF

SEQ ID NO: 411412 - protein, 14 aa, Homo sapiens
  CDR3 for beta chain variable domain of TCR clone 205706 (TRBV7-2, TRBJ2-7)
CASRSQGAAYEQYF

SEQ ID NO: 411413 - protein, 15 aa, Homo sapiens
  CDR3 for alpha chain variable domain of TCR clone 205707 (TRAV2, TRAJ9)
CAVDDRGTGGFKTIF

SEQ ID NO: 411414 - protein, 13 aa, Homo sapiens
  CDR3 for beta chain variable domain of TCR clone 205707 (TRBV20-1, TRBJ1-1)
CSARGGGNTEAFF

SEQ ID NO: 411415 - protein, 11 aa, Homo sapiens
  CDR3 for alpha chain variable domain of TCR clone 205708 (TRAV13-1, TRAJ39)
CASHAGNMLTF

SEQ ID NO: 411416 - protein, 13 aa, Homo sapiens
  CDR3 for beta chain variable domain of TCR clone 205708 (TRBV7-6, TRBJ1-2)
CASSLVADYGYTF

SEQ ID NO: 411417 - protein, 14 aa, Homo sapiens
  CDR3 for alpha chain variable domain of TCR clone 205709 (TRAV13-1, TRAJ44)
CAAKATGTASKLTV

SEQ ID NO: 411418 - protein, 14 aa, Homo sapiens
  CDR3 for beta chain variable domain of TCR clone 205709 (TRBV19, TRBJ2-2)
CASSTLHRSGELFF

SEQ ID NO: 411419 - protein, 16 aa, Homo sapiens
  CDR3 for alpha chain variable domain of TCR clone 205710 (TRAV20, TRAJ28)
CAVRDPSGAGSYQLTF

SEQ ID NO: 411420 - protein, 16 aa, Homo sapiens
  CDR3 for beta chain variable domain of TCR clone 205710 (TRBV15, TRBJ2-3)
CATSRDLGIVTDTQYF

SEQ ID NO: 411421 - protein, 17 aa, Homo sapiens
  CDR3 for alpha chain variable domain of TCR clone 205711 (TRAV13-1, TRAJ31)
CAPRDRPMFGDGTQPVV

SEQ ID NO: 411422 - protein, 12 aa, Homo sapiens
  CDR3 for beta chain variable domain of TCR clone 205711 (TRBV7-9, TRBJ2-7)
CASSLEGYEQYF

SEQ ID NO: 411423 - protein, 15 aa, Homo sapiens
  CDR3 for alpha chain variable domain of TCR clone 205712 (TRAV8-3, TRAJ11)
CAVGLLNSGHSTLTF

SEQ ID NO: 411424 - protein, 16 aa, Homo sapiens
  CDR3 for beta chain variable domain of TCR clone 205712 (TRBV7-9, TRBJ1-2)
CASSLGFSSGGDGYTF

SEQ ID NO: 411425 - protein, 13 aa, Homo sapiens
  CDR3 for alpha chain variable domain of TCR clone 205713 (TRAV3, TRAJ21)
CAVREPDFNKSYF

SEQ ID NO: 411426 - protein, 16 aa, Homo sapiens
  CDR3 for beta chain variable domain of TCR clone 205713 (TRBV27, TRBJ2-2)
CASSFRGLVRTGELFF

SEQ ID NO: 411427 - protein, 13 aa, Homo sapiens
  CDR3 for alpha chain variable domain of TCR clone 205714 (TRAV3, TRAJ21)
CAVREPDVNKFYF

SEQ ID NO: 411428 - protein, 15 aa, Homo sapiens
  CDR3 for beta chain variable domain of TCR clone 205714 (TRBV7-9, TRBJ1-5)
CASSQGHQPNQPQHF

SEQ ID NO: 411429 - protein, 13 aa, Homo sapiens
  CDR3 for alpha chain variable domain of TCR clone 205715 (TRAV12-1, TRAJ6)
CVVFPGGSNIPTF

SEQ ID NO: 411430 - protein, 14 aa, Homo sapiens
  CDR3 for beta chain variable domain of TCR clone 205715 (TRBV20-1, TRBJ1-3)
CSASPTGAGNTMYF

SEQ ID NO: 411431 - protein, 14 aa, Homo sapiens
  CDR3 for alpha chain variable domain of TCR clone 205716 (TRAV2, TRAJ9)
CAVEDRSGGFNTIF

SEQ ID NO: 411432 - protein, 14 aa, Homo sapiens
  CDR3 for beta chain variable domain of TCR clone 205716 (TRBV6-1, TRBJ1-3)
CASVQGGGGNTIYF

SEQ ID NO: 411433 - protein, 15 aa, Homo sapiens
  CDR3 for alpha chain variable domain of TCR clone 205717 (TRAV12-3, TRAJ49)
CAMAVTPNTGNQFYF

SEQ ID NO: 411434 - protein, 18 aa, Homo sapiens
  CDR3 for beta chain variable domain of TCR clone 205717 (TRBV4-1, TRBJ1-5)
CASSQDPRGQGLIQPQHF

SEQ ID NO: 411435 - protein, 11 aa, Homo sapiens
  CDR3 for alpha chain variable domain of TCR clone 205718 (TRAV2, TRAJ13)
CASGGYQKVTF

SEQ ID NO: 411436 - protein, 16 aa, Homo sapiens
  CDR3 for beta chain variable domain of TCR clone 205718 (TRBV19, TRBJ2-1)
CASSKAGPSYYNEQFF

SEQ ID NO: 411437 - protein, 15 aa, Homo sapiens
  CDR3 for alpha chain variable domain of TCR clone 205719 (TRAV12-3, TRAJ27)
CAMMAYNTNAGKSTF

SEQ ID NO: 411438 - protein, 16 aa, Homo sapiens
  CDR3 for beta chain variable domain of TCR clone 205719 (TRBV20-1, TRBJ1-2)
CSASMGQGVANYGYTF

SEQ ID NO: 411439 - protein, 14 aa, Homo sapiens
  CDR3 for alpha chain variable domain of TCR clone 205720 (TRAV26-1, TRAJ38)
CIADNAGNNRKLIW

SEQ ID NO: 411440 - protein, 15 aa, Homo sapiens
  CDR3 for beta chain variable domain of TCR clone 205720 (TRBV6-6, TRBJ2-5)
CASSPGGGLEETQYF

SEQ ID NO: 411441 - protein, 15 aa, Homo sapiens
  CDR3 for alpha chain variable domain of TCR clone 205721 (TRAV8-3, TRAJ41)
CAVGSNSNSGYALNF

SEQ ID NO: 411442 - protein, 16 aa, Homo sapiens
  CDR3 for beta chain variable domain of TCR clone 205721 (TRBV7-3, TRBJ2-1)
CASSSKSGGIYNEQFF

SEQ ID NO: 411443 - protein, 12 aa, Homo sapiens
  CDR3 for alpha chain variable domain of TCR clone 205722 (TRAV13-2, TRAJ23)
CAERHRGGKLIF

SEQ ID NO: 411444 - protein, 15 aa, Homo sapiens
  CDR3 for beta chain variable domain of TCR clone 205722 (TRBV20-1, TRBJ1-4)
QCSGTGLITNEKLFF

SEQ ID NO: 411445 - protein, 16 aa, Homo sapiens
  CDR3 for alpha chain variable domain of TCR clone 205723 (TRAV30, TRAJ24)
CGTEIVDADRWGKFQF

SEQ ID NO: 411446 - protein, 15 aa, Homo sapiens
  CDR3 for beta chain variable domain of TCR clone 205723 (TRBV27, TRBJ2-1)
CASSNGGGSSNEQFF

SEQ ID NO: 411447 - protein, 16 aa, Homo sapiens
  CDR3 for alpha chain variable domain of TCR clone 205724 (TRAV3, TRAJ28)
CAVLPRSGAGRYQRTF

SEQ ID NO: 411448 - protein, 13 aa, Homo sapiens
  CDR3 for beta chain variable domain of TCR clone 205724 (TRBV12-4, TRBJ2-5)
CASRLAVQETQYF

SEQ ID NO: 411449 - protein, 19 aa, Homo sapiens
  CDR3 for alpha chain variable domain of TCR clone 205725 (TRAV3, TRAJ6)
CAVRDRNPSRSGGRYLPTF

SEQ ID NO: 411450 - protein, 15 aa, Homo sapiens
  CDR3 for beta chain variable domain of TCR clone 205725 (TRBV18, TRBJ2-7)
CASSPTFMDSYEQYF

SEQ ID NO: 411451 - protein, 16 aa, Homo sapiens
  CDR3 for alpha chain variable domain of TCR clone 205726 (TRAV12-3, TRAJ53)
CAMSPGSGGSNYKLTF

SEQ ID NO: 411452 - protein, 12 aa, Homo sapiens
  CDR3 for beta chain variable domain of TCR clone 205726 (TRBV11-2, TRBJ2-2)
CASSLGGGELFL

SEQ ID NO: 411453 - protein, 15 aa, Homo sapiens
  CDR3 for alpha chain variable domain of TCR clone 205727 (TRAV3, TRAJ29)
CAVRDLYSVNTPLVF

SEQ ID NO: 411454 - protein, 17 aa, Homo sapiens
  CDR3 for beta chain variable domain of TCR clone 205727 (TRBV20-1, TRBJ2-1)
CSARDPLAGVWDNEQFF

SEQ ID NO: 411455 - protein, 15 aa, Homo sapiens
  CDR3 for alpha chain variable domain of TCR clone 205728 (TRAV21, TRAJ53)
CATLNSGGSNYNLTF

SEQ ID NO: 411456 - protein, 15 aa, Homo sapiens
  CDR3 for beta chain variable domain of TCR clone 205728 (TRBV5-1, TRBJ2-1)
CASSPPRAPYNEQFF

SEQ ID NO: 411457 - protein, 14 aa, Homo sapiens
  CDR3 for alpha chain variable domain of TCR clone 205729 (TRAV1-2, TRAJ8)
CAVREDTGFQKLVF

SEQ ID NO: 411458 - protein, 14 aa, Homo sapiens
  CDR3 for beta chain variable domain of TCR clone 205729 (TRBV20-1, TRBJ1-1)
CSARAVNGYTEAFF

SEQ ID NO: 411459 - protein, 12 aa, Homo sapiens
  CDR3 for alpha chain variable domain of TCR clone 205730 (TRAV8-6, TRAJ11)
CAVSEGYSTLPF

SEQ ID NO: 411460 - protein, 15 aa, Homo sapiens
  CDR3 for beta chain variable domain of TCR clone 205730 (TRBV7-2, TRBJ2-5)
CASTSRSGFVETQYF

SEQ ID NO: 411461 - protein, 15 aa, Homo sapiens
  CDR3 for alpha chain variable domain of TCR clone 205731 (TRAV25, TRAJ52)
CAGRPGGTSYGKLTF

SEQ ID NO: 411462 - protein, 18 aa, Homo sapiens
  CDR3 for beta chain variable domain of TCR clone 205731 (TRBV6-1, TRBJ1-2)
CASSENRVGYGAIGGYTF

SEQ ID NO: 411463 - protein, 16 aa, Homo sapiens
  CDR3 for alpha chain variable domain of TCR clone 205732 (TRAV23/DV6, TRAJ9)
CAASIGGNTGGFKTIF

SEQ ID NO: 411464 - protein, 14 aa, Homo sapiens
  CDR3 for beta chain variable domain of TCR clone 205732 (TRBV4-1, TRBJ2-2)
CASSQAVNTGEPFF

SEQ ID NO: 411465 - protein, 16 aa, Homo sapiens
  CDR3 for alpha chain variable domain of TCR clone 205733 (TRAV26-2, TRAJ48)
CILRPPFNFGNEKLTF

SEQ ID NO: 411466 - protein, 15 aa, Homo sapiens
  CDR3 for beta chain variable domain of TCR clone 205733 (TRBV20-1, TRBJ2-3)
WSARVEGTYTDTQYF

SEQ ID NO: 411467 - protein, 14 aa, Homo sapiens
  CDR3 for alpha chain variable domain of TCR clone 205734 (TRAV1-2, TRAJ16)
CSVNRFSDGQKLLF

SEQ ID NO: 411468 - protein, 17 aa, Homo sapiens
  CDR3 for beta chain variable domain of TCR clone 205734 (TRBV13, TRBJ2-3)
CASSLSRVAGGRNTQYF

SEQ ID NO: 411469 - protein, 14 aa, Homo sapiens
  CDR3 for alpha chain variable domain of TCR clone 205735 (TRAV1-2, TRAJ8)
CAVREDTGFQKLVF

SEQ ID NO: 411470 - protein, 16 aa, Homo sapiens
  CDR3 for beta chain variable domain of TCR clone 205735 (TRBV29-1, TRBJ2-6)
CSVEDSTYSGANVLTF

SEQ ID NO: 411471 - protein, 18 aa, Homo sapiens
  CDR3 for alpha chain variable domain of TCR clone 205736 (TRAV3, TRAJ32)
CAVRDIRGYGCATNKLIF

SEQ ID NO: 411472 - protein, 15 aa, Homo sapiens
  CDR3 for beta chain variable domain of TCR clone 205736 (TRBV12-4, TRBJ2-2)
CASSLGVRHTGELFF

SEQ ID NO: 411473 - protein, 14 aa, Homo sapiens
  CDR3 for alpha chain variable domain of TCR clone 205737 (TRAV23/DV6, TRAJ8)
CAASKATGFQKLVF

SEQ ID NO: 411474 - protein, 15 aa, Homo sapiens
  CDR3 for beta chain variable domain of TCR clone 205737 (TRBV28, TRBJ2-3)
CARSPDRQGANTQYF

SEQ ID NO: 411475 - protein, 14 aa, Homo sapiens
  CDR3 for alpha chain variable domain of TCR clone 205738 (TRAV26-1, TRAJ39)
CIVRGSRAGNMLTF

SEQ ID NO: 411476 - protein, 14 aa, Homo sapiens
  CDR3 for beta chain variable domain of TCR clone 205738 (TRBV7-9, TRBJ1-5)
CQQPRSQPNQPQHF

SEQ ID NO: 411477 - protein, 15 aa, Homo sapiens
  CDR3 for alpha chain variable domain of TCR clone 205739 (TRAV23/DV6, TRAJ18)
CAARYRGSTLGRLYF

SEQ ID NO: 411478 - protein, 12 aa, Homo sapiens
  CDR3 for beta chain variable domain of TCR clone 205739 (TRBV12-5, TRBJ2-5)
CAIGQGVETQYF

SEQ ID NO: 411479 - protein, 16 aa, Homo sapiens
  CDR3 for alpha chain variable domain of TCR clone 205740 (TRAV27, TRAJ52)
CAGAGAGGTSFGKLTC

SEQ ID NO: 411480 - protein, 17 aa, Homo sapiens
  CDR3 for beta chain variable domain of TCR clone 205740 (TRBV24-1, TRBJ2-3)
CATSDLPSGEDTDTQYF

SEQ ID NO: 411481 - protein, 17 aa, Homo sapiens
  CDR3 for alpha chain variable domain of TCR clone 205741 (TRAV3, TRAJ28)
CAVREAYSGAGSYQLTS

SEQ ID NO: 411482 - protein, 18 aa, Homo sapiens
  CDR3 for beta chain variable domain of TCR clone 205741 (TRBV27, TRBJ2-1)
CASGNRAVGVGSKNEQFF

SEQ ID NO: 411483 - protein, 19 aa, Homo sapiens
  CDR3 for alpha chain variable domain of TCR clone 205742 (TRAV26-1, TRAJ52)
CIVRAHRNADGTSYGKLTF

SEQ ID NO: 411484 - protein, 13 aa, Homo sapiens
  CDR3 for beta chain variable domain of TCR clone 205742 (TRBV19, TRBJ2-7)
CASRKAGGSEQYF

SEQ ID NO: 411485 - protein, 16 aa, Homo sapiens
  CDR3 for alpha chain variable domain of TCR clone 205743 (TRAV30, TRAJ24)
CGTEIVDADSWGKFQF

SEQ ID NO: 411486 - protein, 19 aa, Homo sapiens
  CDR3 for beta chain variable domain of TCR clone 205743 (TRBV25-1, TRBJ2-2)
CAILVYRVDRWRKTGELFF

SEQ ID NO: 411487 - protein, 17 aa, Homo sapiens
  CDR3 for alpha chain variable domain of TCR clone 205744 (TRAV4, TRAJ18)
CLVGDRSVGSTLGRLYF

SEQ ID NO: 411488 - protein, 14 aa, Homo sapiens
  CDR3 for beta chain variable domain of TCR clone 205744 (TRBV6-5, TRBJ1-2)
CASSYDGTGGGYTF

SEQ ID NO: 411489 - protein, 14 aa, Homo sapiens
  CDR3 for alpha chain variable domain of TCR clone 205745 (TRAV29/DV5, TRAJ40)
CAAAVASGTYKYIF

SEQ ID NO: 411490 - protein, 13 aa, Homo sapiens
  CDR3 for beta chain variable domain of TCR clone 205745 (TRBV7-9, TRBJ2-7)
CASSVAGAYEQYF

SEQ ID NO: 411491 - protein, 15 aa, Homo sapiens
  CDR3 for alpha chain variable domain of TCR clone 205746 (TRAV27, TRAJ33)
CAGADSMDSNDQLIW

SEQ ID NO: 411492 - protein, 13 aa, Homo sapiens
  CDR3 for beta chain variable domain of TCR clone 205746 (TRBV28, TRBJ1-2)
CASSLQGRGGYTF

SEQ ID NO: 411493 - protein, 15 aa, Homo sapiens
  CDR3 for alpha chain variable domain of TCR clone 205747 (TRAV13-1, TRAJ10)
CAAEMVTGGGNKLTF

SEQ ID NO: 411494 - protein, 13 aa, Homo sapiens
  CDR3 for beta chain variable domain of TCR clone 205747 (TRBV28, TRBJ2-5)
CAGVSRGEETRYF

SEQ ID NO: 411495 - protein, 10 aa, Homo sapiens
  CDR3 for alpha chain variable domain of TCR clone 205748 (TRAV8-4, TRAJ43)
CAVSADDMRF

SEQ ID NO: 411496 - protein, 13 aa, Homo sapiens
  CDR3 for beta chain variable domain of TCR clone 205748 (TRBV12-4, TRBJ2-5)
CASSPETEETQYF

SEQ ID NO: 411497 - protein, 12 aa, Homo sapiens
  CDR3 for alpha chain variable domain of TCR clone 205749 (TRAV17, TRAJ4)
CATDGGYNKLIF

SEQ ID NO: 411498 - protein, 14 aa, Homo sapiens
  CDR3 for beta chain variable domain of TCR clone 205749 (TRBV4-2, TRBJ2-1)
CASGLDRAYNEQFF

SEQ ID NO: 411499 - protein, 14 aa, Homo sapiens
  CDR3 for alpha chain variable domain of TCR clone 205750 (TRAV1-2, TRAJ16)
CAVNRFSDGQKLLF

SEQ ID NO: 411500 - protein, 13 aa, Homo sapiens
  CDR3 for beta chain variable domain of TCR clone 205750 (TRBV6-6, TRBJ1-5)
CASRAYQDQPQHF

SEQ ID NO: 411501 - protein, 10 aa, Homo sapiens
  CDR3 for alpha chain variable domain of TCR clone 205751 (TRAV23/DV6, TRAJ57)
CAASTTLSQG

SEQ ID NO: 411502 - protein, 16 aa, Homo sapiens
  CDR3 for beta chain variable domain of TCR clone 205751 (TRBV7-3, TRBJ2-2)
CASSLKRGTLSGELFF

SEQ ID NO: 411503 - protein, 14 aa, Homo sapiens
  CDR3 for alpha chain variable domain of TCR clone 205752 (TRAV16, TRAJ15)
CALSGPQAGTALIF

SEQ ID NO: 411504 - protein, 12 aa, Homo sapiens
  CDR3 for beta chain variable domain of TCR clone 205752 (TRBV18, TRBJ2-5)
CASSPSKETRYF

SEQ ID NO: 411505 - protein, 14 aa, Homo sapiens
  CDR3 for alpha chain variable domain of TCR clone 205753 (TRAV8-1, TRAJ39)
CAVNASNAGNMLTF

SEQ ID NO: 411506 - protein, 13 aa, Homo sapiens
  CDR3 for beta chain variable domain of TCR clone 205753 (TRBV12-4, TRBJ2-5)
CASSPGTGETQYF

SEQ ID NO: 411507 - protein, 13 aa, Homo sapiens
  CDR3 for alpha chain variable domain of TCR clone 205754 (TRAV12-3, TRAJ33)
CAMSVNSNYQLIW

SEQ ID NO: 411508 - protein, 17 aa, Homo sapiens
  CDR3 for beta chain variable domain of TCR clone 205754 (TRBV28, TRBJ2-5)
CASSRQGGLAGAETQYF

SEQ ID NO: 411509 - protein, 14 aa, Homo sapiens
  CDR3 for alpha chain variable domain of TCR clone 205755 (TRAV26-1, TRAJ38)
CIADNAGNTRKLIW

SEQ ID NO: 411510 - protein, 15 aa, Homo sapiens
  CDR3 for beta chain variable domain of TCR clone 205755 (TRBV7-6, TRBJ1-4)
CASSLGAGAGEKLFF

SEQ ID NO: 411511 - protein, 12 aa, Homo sapiens
  CDR3 for alpha chain variable domain of TCR clone 205756 (TRAV3, TRAJ31)
CAAQRANARLML

SEQ ID NO: 411512 - protein, 16 aa, Homo sapiens
  CDR3 for beta chain variable domain of TCR clone 205756 (TRBV4-2, TRBJ1-1)
CASSPSPGRAAPEAFF

SEQ ID NO: 411513 - protein, 14 aa, Homo sapiens
  CDR3 for alpha chain variable domain of TCR clone 205757 (TRAV20, TRAJ18)
CAVGRGSTLGRRYF

SEQ ID NO: 411514 - protein, 14 aa, Homo sapiens
  CDR3 for beta chain variable domain of TCR clone 205757 (TRBV28, TRBJ2-4)
CASTQVTGVNIQYF

SEQ ID NO: 411515 - protein, 13 aa, Homo sapiens
  CDR3 for alpha chain variable domain of TCR clone 205758 (TRAV2, TRAJ40)
CAVVTSGTYEYIF

SEQ ID NO: 411516 - protein, 15 aa, Homo sapiens
  CDR3 for beta chain variable domain of TCR clone 205758 (TRBV10-3, TRBJ2-1)
CATNGGPGQGDEQFF

SEQ ID NO: 411517 - protein, 18 aa, Homo sapiens
  CDR3 for alpha chain variable domain of TCR clone 205759 (TRAV21, TRAJ52)
CAVRPSPAGGTRYGKLTF

SEQ ID NO: 411518 - protein, 13 aa, Homo sapiens
  CDR3 for beta chain variable domain of TCR clone 205759 (TRBV7-9, TRBJ2-5)
CASLPSGRETQYF

SEQ ID NO: 411519 - protein, 17 aa, Homo sapiens
  CDR3 for alpha chain variable domain of TCR clone 205760 (TRAV3, TRAJ6)
CAVRDGPRAGGSYIPTF

SEQ ID NO: 411520 - protein, 16 aa, Homo sapiens
  CDR3 for beta chain variable domain of TCR clone 205760 (TRBV5-1, TRBJ2-3)
CASSLTSGTSGGTQYF

SEQ ID NO: 411521 - protein, 13 aa, Homo sapiens
  CDR3 for alpha chain variable domain of TCR clone 205761 (TRAV27, TRAJ41)
CAGEGNSGYALNF

SEQ ID NO: 411522 - protein, 15 aa, Homo sapiens
  CDR3 for beta chain variable domain of TCR clone 205761 (TRBV7-2, TRBJ2-4)
CASSLREVAKNIQYF

SEQ ID NO: 411523 - protein, 14 aa, Homo sapiens
  CDR3 for alpha chain variable domain of TCR clone 205762 (TRAV12-3, TRAJ10)
SHLPLTGGGNKLTF

SEQ ID NO: 411524 - protein, 17 aa, Homo sapiens
  CDR3 for beta chain variable domain of TCR clone 205762 (TRBV28, TRBJ2-5)
CASSTPEGDAHQETQYF

SEQ ID NO: 411525 - protein, 15 aa, Homo sapiens
  CDR3 for alpha chain variable domain of TCR clone 205763 (TRAV27, TRAJ38)
CAGRFNAGNNRKLCW

SEQ ID NO: 411526 - protein, 13 aa, Homo sapiens
  CDR3 for beta chain variable domain of TCR clone 205763 (TRBV12-5, TRBJ2-3)
CASQNRGTDTQYF

SEQ ID NO: 411527 - protein, 14 aa, Homo sapiens
  CDR3 for alpha chain variable domain of TCR clone 205764 (TRAV6, TRAJ6)
CALPTSGGSYTPTF

SEQ ID NO: 411528 - protein, 17 aa, Homo sapiens
  CDR3 for beta chain variable domain of TCR clone 205764 (TRBV5-1, TRBJ2-5)
WASSPVALGQNQETQYF

SEQ ID NO: 411529 - protein, 13 aa, Homo sapiens
  CDR3 for alpha chain variable domain of TCR clone 205765 (TRAV12-1, TRAJ40)
CVVNSSGTYKYIF

SEQ ID NO: 411530 - protein, 14 aa, Homo sapiens
  CDR3 for beta chain variable domain of TCR clone 205765 (TRBV2, TRBJ1-6)
CASEVSSYDSPLHF

SEQ ID NO: 411531 - protein, 15 aa, Homo sapiens
  CDR3 for alpha chain variable domain of TCR clone 205766 (TRAV20, TRAJ4)
CAVQVFSGGYNKLIF

SEQ ID NO: 411532 - protein, 13 aa, Homo sapiens
  CDR3 for beta chain variable domain of TCR clone 205766 (TRBV12-5, TRBJ2-3)
CASGDRQSDTQYF

SEQ ID NO: 411533 - protein, 13 aa, Homo sapiens
  CDR3 for alpha chain variable domain of TCR clone 205767 (TRAV1-1, TRAJ31)
CASYLSNNARLMF

SEQ ID NO: 411534 - protein, 13 aa, Homo sapiens
  CDR3 for beta chain variable domain of TCR clone 205767 (TRBV15, TRBJ1-6)
CATSGGLNSPLHF

SEQ ID NO: 411535 - protein, 15 aa, Homo sapiens
  CDR3 for alpha chain variable domain of TCR clone 205768 (TRAV8-3, TRAJ45)
CASSYSGGGTDGLTF

SEQ ID NO: 411536 - protein, 13 aa, Homo sapiens
  CDR3 for beta chain variable domain of TCR clone 205768 (TRBV10-3, TRBJ2-7)
CASKRAVNYEQYF

SEQ ID NO: 411537 - protein, 14 aa, Homo sapiens
  CDR3 for alpha chain variable domain of TCR clone 205769 (TRAV12-1, TRAJ6)
CVAARIRRKLHTYI

SEQ ID NO: 411538 - protein, 15 aa, Homo sapiens
  CDR3 for beta chain variable domain of TCR clone 205769 (TRBV7-3, TRBJ2-1)
CASSLKASEYNERFF

SEQ ID NO: 411539 - protein, 13 aa, Homo sapiens
  CDR3 for alpha chain variable domain of TCR clone 205770 (TRAV27, TRAJ49)
CAPRPYTGNPFYF

SEQ ID NO: 411540 - protein, 16 aa, Homo sapiens
  CDR3 for beta chain variable domain of TCR clone 205770 (TRBV4-1, TRBJ1-2)
CASSQDAGQVLYGYAF

SEQ ID NO: 411541 - protein, 14 aa, Homo sapiens
  CDR3 for alpha chain variable domain of TCR clone 205771 (TRAV27, TRAJ23)
CAGAFDNQGGKLIF

SEQ ID NO: 411542 - protein, 15 aa, Homo sapiens
  CDR3 for beta chain variable domain of TCR clone 205771 (TRBV7-3, TRBJ2-7)
CASSLTGKGKYEQYF

SEQ ID NO: 411543 - protein, 15 aa, Homo sapiens
  CDR3 for alpha chain variable domain of TCR clone 205772 (TRAV10, TRAJ44)
CVVSGATDTASKLTF

SEQ ID NO: 411544 - protein, 14 aa, Homo sapiens
  CDR3 for beta chain variable domain of TCR clone 205772 (TRBV23-1, TRBJ2-5)
CASSFLRSQETQYF

SEQ ID NO: 411545 - protein, 15 aa, Homo sapiens
  CDR3 for alpha chain variable domain of TCR clone 205773 (TRAV8-3, TRAJ27)
CAVGPSKTNAGKSTF

SEQ ID NO: 411546 - protein, 15 aa, Homo sapiens
  CDR3 for beta chain variable domain of TCR clone 205773 (TRBV11-3, TRBJ2-3)
CASLKDGREGDTQYF

SEQ ID NO: 411547 - protein, 14 aa, Homo sapiens
  CDR3 for alpha chain variable domain of TCR clone 205774 (TRAV26-1, TRAJ40)
CIVRVARGTYKYIF

SEQ ID NO: 411548 - protein, 14 aa, Homo sapiens
  CDR3 for beta chain variable domain of TCR clone 205774 (TRBV7-3, TRBJ2-7)
CASILKADSYEQYF

SEQ ID NO: 411549 - protein, 18 aa, Homo sapiens
  CDR3 for alpha chain variable domain of TCR clone 205775 (TRAV1-1, TRAJ42)
CAVSPFAFYGGSQGNLIF

SEQ ID NO: 411550 - protein, 14 aa, Homo sapiens
  CDR3 for beta chain variable domain of TCR clone 205775 (TRBV6-3, TRBJ2-7)
CASSYSTGGDEQYF

SEQ ID NO: 411551 - protein, 16 aa, Homo sapiens
  CDR3 for alpha chain variable domain of TCR clone 205776 (TRAV12-3, TRAJ50)
CAMRDPMKTSYDKVIF

SEQ ID NO: 411552 - protein, 13 aa, Homo sapiens
  CDR3 for beta chain variable domain of TCR clone 205776 (TRBV4-1, TRBJ2-3)
CASSLDFTETQYF

SEQ ID NO: 411553 - protein, 13 aa, Homo sapiens
  CDR3 for alpha chain variable domain of TCR clone 205777 (TRAV12-2, TRAJ6)
CAVNVSRKLHTYI

SEQ ID NO: 411554 - protein, 12 aa, Homo sapiens
  CDR3 for beta chain variable domain of TCR clone 205777 (TRBV29-1, TRBJ2-3)
CSVTGGADTQYL

SEQ ID NO: 411555 - protein, 17 aa, Homo sapiens
  CDR3 for alpha chain variable domain of TCR clone 205778 (TRAV4, TRAJ18)
CLVGERSVGSTLGRLYF

SEQ ID NO: 411556 - protein, 11 aa, Homo sapiens
  CDR3 for beta chain variable domain of TCR clone 205778 (TRBV6-5, TRBJ1-2)
CASSYTVLEVA

SEQ ID NO: 411557 - protein, 18 aa, Homo sapiens
  CDR3 for alpha chain variable domain of TCR clone 205779 (TRAV26-2, TRAJ54)
CILRDVEVGIQGAQKLVF

SEQ ID NO: 411558 - protein, 14 aa, Homo sapiens
  CDR3 for beta chain variable domain of TCR clone 205779 (TRBV19, TRBJ1-5)
CASSLGTGGQPQHF

SEQ ID NO: 411559 - protein, 16 aa, Homo sapiens
  CDR3 for alpha chain variable domain of TCR clone 205780 (TRAV14/DV4, TRAJ54)
CAMREGRIQGAQKLVF

SEQ ID NO: 411560 - protein, 15 aa, Homo sapiens
  CDR3 for beta chain variable domain of TCR clone 205780 (TRBV7-3, TRBJ2-2)
CASSETGQGTGELFF

SEQ ID NO: 411561 - protein, 18 aa, Homo sapiens
  CDR3 for alpha chain variable domain of TCR clone 205781 (TRAV26-1, TRAJ56)
CIVRVASRLTGANSKPTF

SEQ ID NO: 411562 - protein, 15 aa, Homo sapiens
  CDR3 for beta chain variable domain of TCR clone 205781 (TRBV7-9, TRBJ2-5)
CASSDTGRGRETQYF

SEQ ID NO: 411563 - protein, 18 aa, Homo sapiens
  CDR3 for alpha chain variable domain of TCR clone 205782 (TRAV13-1, TRAJ52)
CAAKNPNAGGTSYGKLTF

SEQ ID NO: 411564 - protein, 14 aa, Homo sapiens
  CDR3 for beta chain variable domain of TCR clone 205782 (TRBV19, TRBJ2-3)
CASSIRLAGDTQYF

SEQ ID NO: 411565 - protein, 12 aa, Homo sapiens
  CDR3 for alpha chain variable domain of TCR clone 205783 (TRAV12-2, TRAJ21)
CAVRYNFNKFYF

SEQ ID NO: 411566 - protein, 14 aa, Homo sapiens
  CDR3 for beta chain variable domain of TCR clone 205783 (TRBV28, TRBJ2-1)
GASSYYTAYNEQFF

SEQ ID NO: 411567 - protein, 14 aa, Homo sapiens
  CDR3 for alpha chain variable domain of TCR clone 205784 (TRAV35, TRAJ22)
CAGLRPGSARQLTS

SEQ ID NO: 411568 - protein, 15 aa, Homo sapiens
  CDR3 for beta chain variable domain of TCR clone 205784 (TRBV12-4, TRBJ2-1)
CASSPPTGLQETQFF

SEQ ID NO: 411569 - protein, 13 aa, Homo sapiens
  CDR3 for alpha chain variable domain of TCR clone 205785 (TRAV17, TRAJ34)
SATDLYNTDKLIF

SEQ ID NO: 411570 - protein, 12 aa, Homo sapiens
  CDR3 for beta chain variable domain of TCR clone 205785 (TRBV11-2, TRBJ2-2)
CASSLGGGELFF

SEQ ID NO: 411571 - protein, 14 aa, Homo sapiens
  CDR3 for alpha chain variable domain of TCR clone 205786 (TRAV1-2, TRAJ8)
CAVREDTGFKKLVF

SEQ ID NO: 411572 - protein, 15 aa, Homo sapiens
  CDR3 for beta chain variable domain of TCR clone 205786 (TRBV6-3, TRBJ2-7)
CARSSPGTVFYEQYF

SEQ ID NO: 411573 - protein, 12 aa, Homo sapiens
  CDR3 for alpha chain variable domain of TCR clone 205787 (TRAV12-3, TRAJ34)
CAMGYNTDKLIF

SEQ ID NO: 411574 - protein, 11 aa, Homo sapiens
  CDR3 for beta chain variable domain of TCR clone 205787 (TRBV19, TRBJ1-1)
CASSIGSEAFF

SEQ ID NO: 411575 - protein, 13 aa, Homo sapiens
  CDR3 for alpha chain variable domain of TCR clone 205788 (TRAV12-1, TRAJ11)
CVVNRAGYSNLTF

SEQ ID NO: 411576 - protein, 15 aa, Homo sapiens
  CDR3 for beta chain variable domain of TCR clone 205788 (TRBV7-3, TRBJ2-2)
CASSETGQGTGELFF

SEQ ID NO: 411577 - protein, 15 aa, Homo sapiens
  CDR3 for alpha chain variable domain of TCR clone 205789 (TRAV17, TRAJ45)
CAAAELGGGADGLTF

SEQ ID NO: 411578 - protein, 14 aa, Homo sapiens
  CDR3 for beta chain variable domain of TCR clone 205789 (TRBV3-1, TRBJ2-5)
CASSQAVRQETQYF

SEQ ID NO: 411579 - protein, 17 aa, Homo sapiens
  CDR3 for alpha chain variable domain of TCR clone 205790 (TRAV1-1, TRAJ11)
CAGYSTLTFGKGPMLLV

SEQ ID NO: 411580 - protein, 15 aa, Homo sapiens
  CDR3 for beta chain variable domain of TCR clone 205790 (TRBV6-5, TRBJ2-1)
CASRGDLDSYNEQFF

SEQ ID NO: 411581 - protein, 18 aa, Homo sapiens
  CDR3 for alpha chain variable domain of TCR clone 205791 (TRAV17, TRAJ28)
CATDPPRGSGAGSYKLTF

SEQ ID NO: 411582 - protein, 14 aa, Homo sapiens
  CDR3 for beta chain variable domain of TCR clone 205791 (TRBV13, TRBJ2-5)
CASSLDYPQETQYF

SEQ ID NO: 411583 - protein, 12 aa, Homo sapiens
  CDR3 for alpha chain variable domain of TCR clone 205792 (TRAV38-1, TRAJ47)
CAFETYGNKLVF

SEQ ID NO: 411584 - protein, 15 aa, Homo sapiens
  CDR3 for beta chain variable domain of TCR clone 205792 (TRBV9, TRBJ1-6)
CASSVAGTGDSPLHF

SEQ ID NO: 411585 - protein, 10 aa, Homo sapiens
  CDR3 for alpha chain variable domain of TCR clone 205793 (TRAV23/DV6, TRAJ57)
CAASSTPSQV

SEQ ID NO: 411586 - protein, 14 aa, Homo sapiens
  CDR3 for beta chain variable domain of TCR clone 205793 (TRBV25-1, TRBJ1-1)
CASTHLGGNTEAFF

SEQ ID NO: 411587 - protein, 13 aa, Homo sapiens
  CDR3 for alpha chain variable domain of TCR clone 205794 (TRAV21, TRAJ27)
CAARPGNAGKSTF

SEQ ID NO: 411588 - protein, 14 aa, Homo sapiens
  CDR3 for beta chain variable domain of TCR clone 205794 (TRBV11-2, TRBJ2-7)
CASSLEAGAYEHYF

SEQ ID NO: 411589 - protein, 15 aa, Homo sapiens
  CDR3 for alpha chain variable domain of TCR clone 205795 (TRAV14/DV4, TRAJ49)
CAMREGRNTGNQFYF

SEQ ID NO: 411590 - protein, 17 aa, Homo sapiens
  CDR3 for beta chain variable domain of TCR clone 205795 (TRBV12-4, TRBJ1-5)
CASSLRGDRGPNQPQHF

SEQ ID NO: 411591 - protein, 19 aa, Homo sapiens
  CDR3 for alpha chain variable domain of TCR clone 205796 (TRAV17, TRAJ40)
TASRAADTASYFCASKYIF

SEQ ID NO: 411592 - protein, 17 aa, Homo sapiens
  CDR3 for beta chain variable domain of TCR clone 205796 (TRBV11-2, TRBJ2-4)
CASSFLALGGAGDIQYC

SEQ ID NO: 411593 - protein, 16 aa, Homo sapiens
  CDR3 for alpha chain variable domain of TCR clone 205797 (TRAV13-2, TRAJ32)
CSENMNYGGATNKLIF

SEQ ID NO: 411594 - protein, 14 aa, Homo sapiens
  CDR3 for beta chain variable domain of TCR clone 205797 (TRBV15, TRBJ2-5)
CATSSTGYQETQYF

SEQ ID NO: 411595 - protein, 13 aa, Homo sapiens
  CDR3 for alpha chain variable domain of TCR clone 205798 (TRAV12-3, TRAJ7)
CAMSASGNNRLAF

SEQ ID NO: 411596 - protein, 14 aa, Homo sapiens
  CDR3 for beta chain variable domain of TCR clone 205798 (TRBV13, TRBJ2-5)
CGSSLGPRGETQYF

SEQ ID NO: 411597 - protein, 13 aa, Homo sapiens
  CDR3 for alpha chain variable domain of TCR clone 205799 (TRAV12-3, TRAJ7)
CAMSASGNNRLAF

SEQ ID NO: 411598 - protein, 14 aa, Homo sapiens
  CDR3 for beta chain variable domain of TCR clone 205799 (TRBV13, TRBJ2-5)
CASSLGPRGVTQYF

SEQ ID NO: 411599 - protein, 18 aa, Homo sapiens
  CDR3 for alpha chain variable domain of TCR clone 205800 (TRAV26-2, TRAJ45)
CILRVDKYSGGGADGLTF

SEQ ID NO: 411600 - protein, 11 aa, Homo sapiens
  CDR3 for beta chain variable domain of TCR clone 205800 (TRBV29-1, TRBJ2-5)
CSEDGTGTQYF

SEQ ID NO: 411601 - protein, 16 aa, Homo sapiens
  CDR3 for alpha chain variable domain of TCR clone 205801 (TRAV8-3, TRAJ44)
CAVGASNTGTAGKPTF

SEQ ID NO: 411602 - protein, 15 aa, Homo sapiens
  CDR3 for beta chain variable domain of TCR clone 205801 (TRBV27, TRBJ1-5)
CASTFNRGSNQPQHF

SEQ ID NO: 411603 - protein, 14 aa, Homo sapiens
  CDR3 for alpha chain variable domain of TCR clone 205802 (TRAV1-2, TRAJ16)
CAVNRFSDGQKLLF

SEQ ID NO: 411604 - protein, 16 aa, Homo sapiens
  CDR3 for beta chain variable domain of TCR clone 205802 (TRBV7-3, TRBJ2-3)
CASSPGGGAVSDTQYF

SEQ ID NO: 411605 - protein, 11 aa, Homo sapiens
  CDR3 for alpha chain variable domain of TCR clone 205803 (TRAV4, TRAJ23)
CLVAPRGKLIF

SEQ ID NO: 411606 - protein, 15 aa, Homo sapiens
  CDR3 for beta chain variable domain of TCR clone 205803 (TRBV7-2, TRBJ2-1)
CASSFQADEYNEQFF

SEQ ID NO: 411607 - protein, 11 aa, Homo sapiens
  CDR3 for alpha chain variable domain of TCR clone 205804 (TRAV17, TRAJ31)
CATSNNARLMF

SEQ ID NO: 411608 - protein, 16 aa, Homo sapiens
  CDR3 for beta chain variable domain of TCR clone 205804 (TRBV7-8, TRBJ2-4)
CASSAERTLAKKIQYF

SEQ ID NO: 411609 - protein, 12 aa, Homo sapiens
  CDR3 for alpha chain variable domain of TCR clone 205805 (TRAV8-3, TRAJ27)
CAVGAEAGKSTF

SEQ ID NO: 411610 - protein, 14 aa, Homo sapiens
  CDR3 for beta chain variable domain of TCR clone 205805 (TRBV2, TRBJ2-1)
CASRLKVGHDEQFF

SEQ ID NO: 411611 - protein, 16 aa, Homo sapiens
  CDR3 for alpha chain variable domain of TCR clone 205806 (TRAV3, TRAJ37)
CAVRPQGSGNTGKLIF

SEQ ID NO: 411612 - protein, 14 aa, Homo sapiens
  CDR3 for beta chain variable domain of TCR clone 205806 (TRBV25-1, TRBJ1-1)
CASTHLGGNTEAFF

SEQ ID NO: 411613 - protein, 19 aa, Homo sapiens
  CDR3 for alpha chain variable domain of TCR clone 205807 (TRAV38-1, TRAJ53)
CAFMKHGLESGGSNYKLTF

SEQ ID NO: 411614 - protein, 15 aa, Homo sapiens
  CDR3 for beta chain variable domain of TCR clone 205807 (TRBV19, TRBJ1-1)
CASSGDGLGNTEAFF

SEQ ID NO: 411615 - protein, 12 aa, Homo sapiens
  CDR3 for alpha chain variable domain of TCR clone 205808 (TRAV12-2, TRAJ31)
CAVNTPDARLMF

SEQ ID NO: 411616 - protein, 17 aa, Homo sapiens
  CDR3 for beta chain variable domain of TCR clone 205808 (TRBV20-1, TRBJ1-6)
CSARSGYTFSYNSPIHF

SEQ ID NO: 411617 - protein, 16 aa, Homo sapiens
  CDR3 for alpha chain variable domain of TCR clone 205809 (TRAV3, TRAJ10)
CAVRDTRAGGGNKLPF

SEQ ID NO: 411618 - protein, 13 aa, Homo sapiens
  CDR3 for beta chain variable domain of TCR clone 205809 (TRBV6-1, TRBJ1-1)
CASSRQGNTEAFF

SEQ ID NO: 411619 - protein, 12 aa, Homo sapiens
  CDR3 for alpha chain variable domain of TCR clone 205810 (TRAV12-3, TRAJ17)
CAMTLTGNNLTF

SEQ ID NO: 411620 - protein, 15 aa, Homo sapiens
  CDR3 for beta chain variable domain of TCR clone 205810 (TRBV20-1, TRBJ2-7)
CSARDRVPGMDEQYF

SEQ ID NO: 411621 - protein, 15 aa, Homo sapiens
  CDR3 for alpha chain variable domain of TCR clone 205811 (TRAV17, TRAJ57)
CTTGPSQGGSEKLVF

SEQ ID NO: 411622 - protein, 15 aa, Homo sapiens
  CDR3 for beta chain variable domain of TCR clone 205811 (TRBV9, TRBJ1-6)
CASSVAGTGDSPLHF

SEQ ID NO: 411623 - protein, 14 aa, Homo sapiens
  CDR3 for alpha chain variable domain of TCR clone 205812 (TRAV8-3, TRAJ39)
CAVGANNAGNMLTF

SEQ ID NO: 411624 - protein, 15 aa, Homo sapiens
  CDR3 for beta chain variable domain of TCR clone 205812 (TRBV19, TRBJ2-7)
CASSSGGGLVNEQYF

SEQ ID NO: 411625 - protein, 13 aa, Homo sapiens
  CDR3 for alpha chain variable domain of TCR clone 205813 (TRAV16, TRAJ39)
CALKDNAGNMLTF

SEQ ID NO: 411626 - protein, 13 aa, Homo sapiens
  CDR3 for beta chain variable domain of TCR clone 205813 (TRBV24-1, TRBJ2-1)
CATSAGPYNEQFF

SEQ ID NO: 411627 - protein, 14 aa, Homo sapiens
  CDR3 for alpha chain variable domain of TCR clone 205814 (TRAV1-2, TRAJ16)
CAVSRFSDGQKLLF

SEQ ID NO: 411628 - protein, 18 aa, Homo sapiens
  CDR3 for beta chain variable domain of TCR clone 205814 (TRBV11-2, TRBJ2-3)
CASSLGGASRGAPNTQYF

SEQ ID NO: 411629 - protein, 12 aa, Homo sapiens
  CDR3 for alpha chain variable domain of TCR clone 205815 (TRAV12-3, TRAJ17)
CAMTLTGNKLTF

SEQ ID NO: 411630 - protein, 14 aa, Homo sapiens
  CDR3 for beta chain variable domain of TCR clone 205815 (TRBV4-1, TRBJ2-2)
CASSQAVNTGGLFF

SEQ ID NO: 411631 - protein, 14 aa, Homo sapiens
  CDR3 for alpha chain variable domain of TCR clone 205816 (TRAV12-2, TRAJ13)
CAVKKTGGYQKVAF

SEQ ID NO: 411632 - protein, 15 aa, Homo sapiens
  CDR3 for beta chain variable domain of TCR clone 205816 (TRBV5-1, TRBJ2-5)
CASSLGLAEQETQYF

SEQ ID NO: 411633 - protein, 17 aa, Homo sapiens
  CDR3 for alpha chain variable domain of TCR clone 205817 (TRAV13-1, TRAJ5)
CSNPSLSRDTGWRELTF

SEQ ID NO: 411634 - protein, 17 aa, Homo sapiens
  CDR3 for beta chain variable domain of TCR clone 205817 (TRBV24-1, TRBJ2-1)
CATSDVSTSGTYNEQFF

SEQ ID NO: 411635 - protein, 14 aa, Homo sapiens
  CDR3 for alpha chain variable domain of TCR clone 205818 (TRAV17, TRAJ12)
CAIRPMDSSYKLIF

SEQ ID NO: 411636 - protein, 11 aa, Homo sapiens
  CDR3 for beta chain variable domain of TCR clone 205818 (TRBV19, TRBJ1-1)
CASSTGSEAFF

SEQ ID NO: 411637 - protein, 16 aa, Homo sapiens
  CDR3 for alpha chain variable domain of TCR clone 205819 (TRAV13-1, TRAJ45)
CAARGSRKVGADGLTF

SEQ ID NO: 411638 - protein, 13 aa, Homo sapiens
  CDR3 for beta chain variable domain of TCR clone 205819 (TRBV12-4, TRBJ2-5)
CASRKRGKETQYF

SEQ ID NO: 411639 - protein, 15 aa, Homo sapiens
  CDR3 for alpha chain variable domain of TCR clone 205820 (TRAV8-3, TRAJ40)
CAAPSLGSGTYKYIF

SEQ ID NO: 411640 - protein, 16 aa, Homo sapiens
  CDR3 for beta chain variable domain of TCR clone 205820 (TRBV7-3, TRBJ2-3)
CASSLRGYRPEDTQYF

SEQ ID NO: 411641 - protein, 13 aa, Homo sapiens
  CDR3 for alpha chain variable domain of TCR clone 205821 (TRAV1-2, TRAJ9)
CAALNTGGFKTIF

SEQ ID NO: 411642 - protein, 17 aa, Homo sapiens
  CDR3 for beta chain variable domain of TCR clone 205821 (TRBV20-1, TRBJ2-3)
CSARDGWNAKERDTQYF

SEQ ID NO: 411643 - protein, 13 aa, Homo sapiens
  CDR3 for alpha chain variable domain of TCR clone 205822 (TRAV13-1, TRAJ10)
CAALEGGGNKLTF

SEQ ID NO: 411644 - protein, 13 aa, Homo sapiens
  CDR3 for beta chain variable domain of TCR clone 205822 (TRBV10-2, TRBJ2-7)
CASGTSGGYEQYF

SEQ ID NO: 411645 - protein, 10 aa, Homo sapiens
  CDR3 for alpha chain variable domain of TCR clone 205823 (TRAV13-1, TRAJ30)
CAARNDKIIF

SEQ ID NO: 411646 - protein, 13 aa, Homo sapiens
  CDR3 for beta chain variable domain of TCR clone 205823 (TRBV10-3, TRBJ2-7)
CASKLAVNYEQYF

SEQ ID NO: 411647 - protein, 16 aa, Homo sapiens
  CDR3 for alpha chain variable domain of TCR clone 205824 (TRAV8-3, TRAJ44)
CAVGTLMTGTASKLTF

SEQ ID NO: 411648 - protein, 15 aa, Homo sapiens
  CDR3 for beta chain variable domain of TCR clone 205824 (TRBV10-2, TRBJ2-6)
CASSEQGAGANVLTF

SEQ ID NO: 411649 - protein, 11 aa, Homo sapiens
  CDR3 for alpha chain variable domain of TCR clone 205825 (TRAV23/DV6, TRAJ48)
CAPRWGKNLTF

SEQ ID NO: 411650 - protein, 13 aa, Homo sapiens
  CDR3 for beta chain variable domain of TCR clone 205825 (TRBV12-4, TRBJ2-5)
CASSPGTEETQYF

SEQ ID NO: 411651 - protein, 16 aa, Homo sapiens
  CDR3 for alpha chain variable domain of TCR clone 205826 (TRAV3, TRAJ37)
CAVRVRGSGNTGKLIF

SEQ ID NO: 411652 - protein, 16 aa, Homo sapiens
  CDR3 for beta chain variable domain of TCR clone 205826 (TRBV7-7, TRBJ2-1)
CASSFASGTSYNEQFF

SEQ ID NO: 411653 - protein, 17 aa, Homo sapiens
  CDR3 for alpha chain variable domain of TCR clone 205827 (TRAV3, TRAJ12)
CAVRDGGRMDSSYKLTF

SEQ ID NO: 411654 - protein, 13 aa, Homo sapiens
  CDR3 for beta chain variable domain of TCR clone 205827 (TRBV20-1, TRBJ1-1)
CSAPLGGGTEAFF

SEQ ID NO: 411655 - protein, 13 aa, Homo sapiens
  CDR3 for alpha chain variable domain of TCR clone 205828 (TRAV13-1, TRAJ5)
CAARVTGRRALTF

SEQ ID NO: 411656 - protein, 15 aa, Homo sapiens
  CDR3 for beta chain variable domain of TCR clone 205828 (TRBV7-9, TRBJ2-7)
CASSPGGGLTDEQYF

SEQ ID NO: 411657 - protein, 13 aa, Homo sapiens
  CDR3 for alpha chain variable domain of TCR clone 205829 (TRAV13-1, TRAJ10)
CAATAGGGTKLTF

SEQ ID NO: 411658 - protein, 12 aa, Homo sapiens
  CDR3 for beta chain variable domain of TCR clone 205829 (TRBV7-3, TRBJ2-1)
CASSFQSGPQFF

SEQ ID NO: 411659 - protein, 14 aa, Homo sapiens
  CDR3 for alpha chain variable domain of TCR clone 205830 (TRAV12-3, TRAJ10)
SHLPLTGGGNKLTF

SEQ ID NO: 411660 - protein, 15 aa, Homo sapiens
  CDR3 for beta chain variable domain of TCR clone 205830 (TRBV11-1, TRBJ2-7)
CASSRGRFKTYEQYF

SEQ ID NO: 411661 - protein, 14 aa, Homo sapiens
  CDR3 for alpha chain variable domain of TCR clone 205831 (TRAV12-3, TRAJ47)
CAMSVREYGNKLVF

SEQ ID NO: 411662 - protein, 15 aa, Homo sapiens
  CDR3 for beta chain variable domain of TCR clone 205831 (TRBV20-1, TRBJ2-2)
YSARDTRLNTGELFF

SEQ ID NO: 411663 - protein, 15 aa, Homo sapiens
  CDR3 for alpha chain variable domain of TCR clone 205832 (TRAV12-2, TRAJ53)
CATLNSGGSNYKLTF

SEQ ID NO: 411664 - protein, 13 aa, Homo sapiens
  CDR3 for beta chain variable domain of TCR clone 205832 (TRBV7-9, TRBJ2-3)
CASSPGSTDTQYF

SEQ ID NO: 411665 - protein, 15 aa, Homo sapiens
  CDR3 for alpha chain variable domain of TCR clone 205833 (TRAV12-3, TRAJ6)
CAMSASTVGSYIPTF

SEQ ID NO: 411666 - protein, 16 aa, Homo sapiens
  CDR3 for beta chain variable domain of TCR clone 205833 (TRBV20-1, TRBJ1-2)
CSASMGQGVANYGYTF

SEQ ID NO: 411667 - protein, 15 aa, Homo sapiens
  CDR3 for alpha chain variable domain of TCR clone 205834 (TRAV25, TRAJ52)
CAGTSGGTSYGKLTF

SEQ ID NO: 411668 - protein, 16 aa, Homo sapiens
  CDR3 for beta chain variable domain of TCR clone 205834 (TRBV13, TRBJ2-2)
CASSPRTGEHTGELFF

SEQ ID NO: 411669 - protein, 13 aa, Homo sapiens
  CDR3 for alpha chain variable domain of TCR clone 205835 (TRAV1-2, TRAJ9)
CAVLNTGGFKTIF

SEQ ID NO: 411670 - protein, 14 aa, Homo sapiens
  CDR3 for beta chain variable domain of TCR clone 205835 (TRBV20-1, TRBJ2-3)
CSAIGGTSTDTQYF

SEQ ID NO: 411671 - protein, 11 aa, Homo sapiens
  CDR3 for alpha chain variable domain of TCR clone 205836 (TRAV21, TRAJ34)
CAVTNTDKLIF

SEQ ID NO: 411672 - protein, 13 aa, Homo sapiens
  CDR3 for beta chain variable domain of TCR clone 205836 (TRBV5-1, TRBJ1-2)
CASSIDRPEGYTF

SEQ ID NO: 411673 - protein, 11 aa, Homo sapiens
  CDR3 for alpha chain variable domain of TCR clone 205837 (TRAV2, TRAJ33)
CGVDSNYQLIW

SEQ ID NO: 411674 - protein, 15 aa, Homo sapiens
  CDR3 for beta chain variable domain of TCR clone 205837 (TRBV19, TRBJ1-2)
CASSVGQVLNYGYTF

SEQ ID NO: 411675 - protein, 11 aa, Homo sapiens
  CDR3 for alpha chain variable domain of TCR clone 205838 (TRAV3, TRAJ13)
CAVTSCQKVTF

SEQ ID NO: 411676 - protein, 15 aa, Homo sapiens
  CDR3 for beta chain variable domain of TCR clone 205838 (TRBV7-9, TRBJ2-7)
CASSSSGLAVYEQYF

SEQ ID NO: 411677 - protein, 16 aa, Homo sapiens
  CDR3 for alpha chain variable domain of TCR clone 205839 (TRAV8-4, TRAJ5)
CAVSPLTDTGRRALTF

SEQ ID NO: 411678 - protein, 14 aa, Homo sapiens
  CDR3 for beta chain variable domain of TCR clone 205839 (TRBV19, TRBJ1-6)
CANSTDGWNSPLHF

SEQ ID NO: 411679 - protein, 11 aa, Homo sapiens
  CDR3 for alpha chain variable domain of TCR clone 205840 (TRAV4, TRAJ31)
CLVGDNARLMF

SEQ ID NO: 411680 - protein, 14 aa, Homo sapiens
  CDR3 for beta chain variable domain of TCR clone 205840 (TRBV4-1, TRBJ2-2)
CASSHAVNTGELFF

SEQ ID NO: 411681 - protein, 14 aa, Homo sapiens
  CDR3 for alpha chain variable domain of TCR clone 205841 (TRAV13-1, TRAJ35)
CAASKGGFGNVLHG

SEQ ID NO: 411682 - protein, 13 aa, Homo sapiens
  CDR3 for beta chain variable domain of TCR clone 205841 (TRBV7-3, TRBJ1-1)
CASSQDWGGEAFF

SEQ ID NO: 411683 - protein, 13 aa, Homo sapiens
  CDR3 for alpha chain variable domain of TCR clone 205842 (TRAV12-2, TRAJ12)
CAVNEDSSHKLIF

SEQ ID NO: 411684 - protein, 17 aa, Homo sapiens
  CDR3 for beta chain variable domain of TCR clone 205842 (TRBV20-1, TRBJ2-7)
CSATRAGGVAGVEEQYF

SEQ ID NO: 411685 - protein, 12 aa, Homo sapiens
  CDR3 for alpha chain variable domain of TCR clone 205843 (TRAV21, TRAJ11)
CAATSGYSTLTF

SEQ ID NO: 411686 - protein, 13 aa, Homo sapiens
  CDR3 for beta chain variable domain of TCR clone 205843 (TRBV4-1, TRBJ1-5)
RQQPKRGAKPQHF

SEQ ID NO: 411687 - protein, 12 aa, Homo sapiens
  CDR3 for alpha chain variable domain of TCR clone 205844 (TRAV26-1, TRAJ36)
CIVRVRADNLFF

SEQ ID NO: 411688 - protein, 12 aa, Homo sapiens
  CDR3 for beta chain variable domain of TCR clone 205844 (TRBV11-1, TRBJ1-2)
CASSLWVDTPMA

SEQ ID NO: 411689 - protein, 11 aa, Homo sapiens
  CDR3 for alpha chain variable domain of TCR clone 205845 (TRAV30, TRAJ24)
WMLTAGGKYQF

SEQ ID NO: 411690 - protein, 13 aa, Homo sapiens
  CDR3 for beta chain variable domain of TCR clone 205845 (TRBV7-3, TRBJ1-1)
CASSQDWGAEAFF

SEQ ID NO: 411691 - protein, 15 aa, Homo sapiens
  CDR3 for alpha chain variable domain of TCR clone 205846 (TRAV1-1, TRAJ36)
CAVRPQGTGANNLFF

SEQ ID NO: 411692 - protein, 17 aa, Homo sapiens
  CDR3 for beta chain variable domain of TCR clone 205846 (TRBV20-1, TRBJ2-7)
GSASGTSGRVGESEQYF

SEQ ID NO: 411693 - protein, 15 aa, Homo sapiens
  CDR3 for alpha chain variable domain of TCR clone 205847 (TRAV12-3, TRAJ22)
CAMRTISGSARQLPF

SEQ ID NO: 411694 - protein, 16 aa, Homo sapiens
  CDR3 for beta chain variable domain of TCR clone 205847 (TRBV20-1, TRBJ2-2)
CSARRHGTGNTEELFF

SEQ ID NO: 411695 - protein, 19 aa, Homo sapiens
  CDR3 for alpha chain variable domain of TCR clone 205848 (TRAV3, TRAJ21)
SAVGNFNKFYCGSVTKLNV

SEQ ID NO: 411696 - protein, 16 aa, Homo sapiens
  CDR3 for beta chain variable domain of TCR clone 205848 (TRBV19, TRBJ2-1)
CASSKAGPSYYNEQFF

SEQ ID NO: 411697 - protein, 16 aa, Homo sapiens
  CDR3 for alpha chain variable domain of TCR clone 205849 (TRAV12-2, TRAJ6)
CAAPLAGSGGSYIPTF

SEQ ID NO: 411698 - protein, 12 aa, Homo sapiens
  CDR3 for beta chain variable domain of TCR clone 205849 (TRBV11-2, TRBJ2-2)
CASSLGGGELFF

SEQ ID NO: 411699 - protein, 14 aa, Homo sapiens
  CDR3 for alpha chain variable domain of TCR clone 205850 (TRAV1-2, TRAJ16)
CAVNRFSEGQKLLF

SEQ ID NO: 411700 - protein, 16 aa, Homo sapiens
  CDR3 for beta chain variable domain of TCR clone 205850 (TRBV20-1, TRBJ1-4)
CSAPGQGLLTNEKLFF

SEQ ID NO: 411701 - protein, 13 aa, Homo sapiens
  CDR3 for alpha chain variable domain of TCR clone 205851 (TRAV2, TRAJ40)
CAVVTSGTYKYIF

SEQ ID NO: 411702 - protein, 13 aa, Homo sapiens
  CDR3 for beta chain variable domain of TCR clone 205851 (TRBV12-4, TRBJ2-5)
CASSPGTEETQYF

SEQ ID NO: 411703 - protein, 11 aa, Homo sapiens
  CDR3 for alpha chain variable domain of TCR clone 205852 (TRAV17, TRAJ21)
RATGNFNKFYF

SEQ ID NO: 411704 - protein, 16 aa, Homo sapiens
  CDR3 for beta chain variable domain of TCR clone 205852 (TRBV2, TRBJ2-1)
CASSANPRDWQAEQFF

SEQ ID NO: 411705 - protein, 13 aa, Homo sapiens
  CDR3 for alpha chain variable domain of TCR clone 205853 (TRAV9-2, TRAJ53)
CALIGGSNYKLTF

SEQ ID NO: 411706 - protein, 17 aa, Homo sapiens
  CDR3 for beta chain variable domain of TCR clone 205853 (TRBV11-2, TRBJ2-1)
CASSLYPAGVEYNEQFF

SEQ ID NO: 411707 - protein, 14 aa, Homo sapiens
  CDR3 for alpha chain variable domain of TCR clone 205854 (TRAV12-1, TRAJ3)
CGAARYSSASKIIF

SEQ ID NO: 411708 - protein, 15 aa, Homo sapiens
  CDR3 for beta chain variable domain of TCR clone 205854 (TRBV7-8, TRBJ2-6)
CASSREGSGANVLTF

SEQ ID NO: 411709 - protein, 14 aa, Homo sapiens
  CDR3 for alpha chain variable domain of TCR clone 205855 (TRAV9-2, TRAJ39)
CALYIYNAGNMLTV

SEQ ID NO: 411710 - protein, 11 aa, Homo sapiens
  CDR3 for beta chain variable domain of TCR clone 205855 (TRBV7-8, TRBJ2-7)
CASSLSLEQYF

SEQ ID NO: 411711 - protein, 11 aa, Homo sapiens
  CDR3 for alpha chain variable domain of TCR clone 205856 (TRAV2, TRAJ13)
CASGGYQKVTF

SEQ ID NO: 411712 - protein, 16 aa, Homo sapiens
  CDR3 for beta chain variable domain of TCR clone 205856 (TRBV6-1, TRBJ2-1)
CASSDTLDRGAETQYF

SEQ ID NO: 411713 - protein, 13 aa, Homo sapiens
  CDR3 for alpha chain variable domain of TCR clone 205857 (TRAV35, TRAJ42)
CAGFPGSQGNLIF

SEQ ID NO: 411714 - protein, 12 aa, Homo sapiens
  CDR3 for beta chain variable domain of TCR clone 205857 (TRBV12-4, TRBJ1-5)
CASSLGRQPQHF

SEQ ID NO: 411715 - protein, 13 aa, Homo sapiens
  CDR3 for alpha chain variable domain of TCR clone 205858 (TRAV13-1, TRAJ39)
CSKYSNAVNMLTF

SEQ ID NO: 411716 - protein, 13 aa, Homo sapiens
  CDR3 for beta chain variable domain of TCR clone 205858 (TRBV20-1, TRBJ1-1)
CSARGGGNTEDFF

SEQ ID NO: 411717 - protein, 18 aa, Homo sapiens
  CDR3 for alpha chain variable domain of TCR clone 205859 (TRAV16, TRAJ52)
CALSGVDAGGTSYGKLTL

SEQ ID NO: 411718 - protein, 14 aa, Homo sapiens
  CDR3 for beta chain variable domain of TCR clone 205859 (TRBV19, TRBJ2-1)
CASPTFVLSGEQFF

SEQ ID NO: 411719 - protein, 15 aa, Homo sapiens
  CDR3 for alpha chain variable domain of TCR clone 205860 (TRAV16, TRAJ12)
FSKWPLMDSSYKFIF

SEQ ID NO: 411720 - protein, 13 aa, Homo sapiens
  CDR3 for beta chain variable domain of TCR clone 205860 (TRBV4-2, TRBJ1-1)
CASSQAGNTEAFF

SEQ ID NO: 411721 - protein, 12 aa, Homo sapiens
  CDR3 for alpha chain variable domain of TCR clone 205861 (TRAV12-3, TRAJ17)
CAMTLTGNKLTF

SEQ ID NO: 411722 - protein, 15 aa, Homo sapiens
  CDR3 for beta chain variable domain of TCR clone 205861 (TRBV4-3, TRBJ2-1)
CASSQDGVRQNEQFF

SEQ ID NO: 411723 - protein, 14 aa, Homo sapiens
  CDR3 for alpha chain variable domain of TCR clone 205862 (TRAV12-1, TRAJ17)
CVVNYKAAGNKLTF

SEQ ID NO: 411724 - protein, 15 aa, Homo sapiens
  CDR3 for beta chain variable domain of TCR clone 205862 (TRBV18, TRBJ2-1)
CASSPPSASDNEQFF

SEQ ID NO: 411725 - protein, 15 aa, Homo sapiens
  CDR3 for alpha chain variable domain of TCR clone 205863 (TRAV12-3, TRAJ5)
CAMSGLGTGRRALTF

SEQ ID NO: 411726 - protein, 16 aa, Homo sapiens
  CDR3 for beta chain variable domain of TCR clone 205863 (TRBV20-1, TRBJ2-3)
CSARLHSAGTIDTQYF

SEQ ID NO: 411727 - protein, 15 aa, Homo sapiens
  CDR3 for alpha chain variable domain of TCR clone 205864 (TRAV21, TRAJ32)
CAVNSYGGATNKLIF

SEQ ID NO: 411728 - protein, 18 aa, Homo sapiens
  CDR3 for beta chain variable domain of TCR clone 205864 (TRBV7-9, TRBJ2-1)
CASSTGLAEGSSYKEQFF

SEQ ID NO: 411729 - protein, 16 aa, Homo sapiens
  CDR3 for alpha chain variable domain of TCR clone 205865 (TRAV22, TRAJ45)
CAVEGGKRGGADGLTF

SEQ ID NO: 411730 - protein, 13 aa, Homo sapiens
  CDR3 for beta chain variable domain of TCR clone 205865 (TRBV27, TRBJ1-1)
CASSLSIGAEAFC

SEQ ID NO: 411731 - protein, 14 aa, Homo sapiens
  CDR3 for alpha chain variable domain of TCR clone 205866 (TRAV1-2, TRAJ8)
CAVREDTGFQKLVF

SEQ ID NO: 411732 - protein, 16 aa, Homo sapiens
  CDR3 for beta chain variable domain of TCR clone 205866 (TRBV19, TRBJ2-1)
CASIKAGPSSYNEQFF

SEQ ID NO: 411733 - protein, 11 aa, Homo sapiens
  CDR3 for alpha chain variable domain of TCR clone 205867 (TRAV3, TRAJ49)
CAPITGNQFYF

SEQ ID NO: 411734 - protein, 15 aa, Homo sapiens
  CDR3 for beta chain variable domain of TCR clone 205867 (TRBV5-1, TRBJ2-3)
RSSVFPMSSTDTQYF

SEQ ID NO: 411735 - protein, 16 aa, Homo sapiens
  CDR3 for alpha chain variable domain of TCR clone 205868 (TRAV30, TRAJ24)
CGTEIVDADSWGKFQF

SEQ ID NO: 411736 - protein, 12 aa, Homo sapiens
  CDR3 for beta chain variable domain of TCR clone 205868 (TRBV2, TRBJ2-1)
CASSERFREQFF

SEQ ID NO: 411737 - protein, 12 aa, Homo sapiens
  CDR3 for alpha chain variable domain of TCR clone 205869 (TRAV21, TRAJ30)
CAVMNRDDKIIF

SEQ ID NO: 411738 - protein, 13 aa, Homo sapiens
  CDR3 for beta chain variable domain of TCR clone 205869 (TRBV27, TRBJ1-1)
CASSLSIGAEAFF

SEQ ID NO: 411739 - protein, 12 aa, Homo sapiens
  CDR3 for alpha chain variable domain of TCR clone 205870 (TRAV17, TRAJ20)
CATDSNDYKLSF

SEQ ID NO: 411740 - protein, 13 aa, Homo sapiens
  CDR3 for beta chain variable domain of TCR clone 205870 (TRBV28, TRBJ2-7)
CASKAGGVYEQYF

SEQ ID NO: 411741 - protein, 15 aa, Homo sapiens
  CDR3 for alpha chain variable domain of TCR clone 205871 (TRAV29/DV5, TRAJ36)
CAARRKTGANNLLRL

SEQ ID NO: 411742 - protein, 14 aa, Homo sapiens
  CDR3 for beta chain variable domain of TCR clone 205871 (TRBV12-5, TRBJ2-5)
CASGSRTHQETQYF

SEQ ID NO: 411743 - protein, 13 aa, Homo sapiens
  CDR3 for alpha chain variable domain of TCR clone 205872 (TRAV3, TRAJ29)
CAVRDWGNTPIVF

SEQ ID NO: 411744 - protein, 15 aa, Homo sapiens
  CDR3 for beta chain variable domain of TCR clone 205872 (TRBV12-4, TRBJ2-5)
CASTGRTGEGETQYF

SEQ ID NO: 411745 - protein, 13 aa, Homo sapiens
  CDR3 for alpha chain variable domain of TCR clone 205873 (TRAV12-3, TRAJ9)
CAMRNTGGFKTIF

SEQ ID NO: 411746 - protein, 16 aa, Homo sapiens
  CDR3 for beta chain variable domain of TCR clone 205873 (TRBV19, TRBJ2-1)
FASSIDGSFAYNEQFF

SEQ ID NO: 411747 - protein, 13 aa, Homo sapiens
  CDR3 for alpha chain variable domain of TCR clone 205874 (TRAV23/DV6, TRAJ22)
CAPYSGSARPLTF

SEQ ID NO: 411748 - protein, 15 aa, Homo sapiens
  CDR3 for beta chain variable domain of TCR clone 205874 (TRBV11-2, TRBJ1-6)
CASSLDPWAVSPLHF

SEQ ID NO: 411749 - protein, 13 aa, Homo sapiens
  CDR3 for alpha chain variable domain of TCR clone 205875 (TRAV17, TRAJ26)
CATVDNYGHNFVF

SEQ ID NO: 411750 - protein, 16 aa, Homo sapiens
  CDR3 for beta chain variable domain of TCR clone 205875 (TRBV2, TRBJ2-1)
CASSVGGSLSYNEQFF

SEQ ID NO: 411751 - protein, 16 aa, Homo sapiens
  CDR3 for alpha chain variable domain of TCR clone 205876 (TRAV26-1, TRAJ56)
CIVRVAETGANSKLTF

SEQ ID NO: 411752 - protein, 13 aa, Homo sapiens
  CDR3 for beta chain variable domain of TCR clone 205876 (TRBV19, TRBJ1-2)
CASSVPGQDGYTF

SEQ ID NO: 411753 - protein, 11 aa, Homo sapiens
  CDR3 for alpha chain variable domain of TCR clone 205877 (TRAV21, TRAJ11)
CAVNGYSTLTF

SEQ ID NO: 411754 - protein, 17 aa, Homo sapiens
  CDR3 for beta chain variable domain of TCR clone 205877 (TRBV18, TRBJ2-3)
CASSAAGTSGSTDTHYF

SEQ ID NO: 411755 - protein, 14 aa, Homo sapiens
  CDR3 for alpha chain variable domain of TCR clone 205878 (TRAV20, TRAJ42)
CAVQAGGSQGNLIF

SEQ ID NO: 411756 - protein, 15 aa, Homo sapiens
  CDR3 for beta chain variable domain of TCR clone 205878 (TRBV28, TRBJ2-1)
CASSIIAGGRSEQFF

SEQ ID NO: 411757 - protein, 19 aa, Homo sapiens
  CDR3 for alpha chain variable domain of TCR clone 205879 (TRAV3, TRAJ6)
CAVRDRNPSRSGGSYIHTF

SEQ ID NO: 411758 - protein, 15 aa, Homo sapiens
  CDR3 for beta chain variable domain of TCR clone 205879 (TRBV18, TRBJ2-7)
CASSPTFMDSYEQYV

SEQ ID NO: 411759 - protein, 13 aa, Homo sapiens
  CDR3 for alpha chain variable domain of TCR clone 205880 (TRAV8-3, TRAJ42)
CARYGGSQGHLIF

SEQ ID NO: 411760 - protein, 14 aa, Homo sapiens
  CDR3 for beta chain variable domain of TCR clone 205880 (TRBV20-1, TRBJ2-1)
CSALDRGTYDEQFF

SEQ ID NO: 411761 - protein, 14 aa, Homo sapiens
  CDR3 for alpha chain variable domain of TCR clone 205881 (TRAV12-2, TRAJ17)
CAVLFKAAGNKLTF

SEQ ID NO: 411762 - protein, 15 aa, Homo sapiens
  CDR3 for beta chain variable domain of TCR clone 205881 (TRBV7-2, TRBJ2-3)
CASSSTGLETDTQYF

SEQ ID NO: 411763 - protein, 15 aa, Homo sapiens
  CDR3 for alpha chain variable domain of TCR clone 205882 (TRAV2, TRAJ24)
CAVVRLKNSWGKLQF

SEQ ID NO: 411764 - protein, 13 aa, Homo sapiens
  CDR3 for beta chain variable domain of TCR clone 205882 (TRBV12-4, TRBJ1-2)
CASSLRQGKGYTF

SEQ ID NO: 411765 - protein, 16 aa, Homo sapiens
  CDR3 for alpha chain variable domain of TCR clone 205883 (TRAV8-3, TRAJ44)
CAVGASNTGTASKLTF

SEQ ID NO: 411766 - protein, 17 aa, Homo sapiens
  CDR3 for beta chain variable domain of TCR clone 205883 (TRBV27, TRBJ1-5)
CASTFNRGAISPSILVM

SEQ ID NO: 411767 - protein, 16 aa, Homo sapiens
  CDR3 for alpha chain variable domain of TCR clone 205884 (TRAV17, TRAJ53)
CATDALSGGSNYKLTF

SEQ ID NO: 411768 - protein, 14 aa, Homo sapiens
  CDR3 for beta chain variable domain of TCR clone 205884 (TRBV5-1, TRBJ2-7)
CASSFRGYEQYLGR

SEQ ID NO: 411769 - protein, 15 aa, Homo sapiens
  CDR3 for alpha chain variable domain of TCR clone 205885 (TRAV26-1, TRAJ39)
CIVRDGSNAGNMLTF

SEQ ID NO: 411770 - protein, 14 aa, Homo sapiens
  CDR3 for beta chain variable domain of TCR clone 205885 (TRBV10-3, TRBJ1-2)
CTIRAGTGDYGYTF

SEQ ID NO: 411771 - protein, 14 aa, Homo sapiens
  CDR3 for alpha chain variable domain of TCR clone 205886 (TRAV3, TRAJ6)
CAVRDPWGSYIPTF

SEQ ID NO: 411772 - protein, 15 aa, Homo sapiens
  CDR3 for beta chain variable domain of TCR clone 205886 (TRBV11-3, TRBJ2-2)
CASSYFSTGTGELFF

SEQ ID NO: 411773 - protein, 14 aa, Homo sapiens
  CDR3 for alpha chain variable domain of TCR clone 205887 (TRAV12-1, TRAJ8)
CVVNSNTGFQKLVF

SEQ ID NO: 411774 - protein, 16 aa, Homo sapiens
  CDR3 for beta chain variable domain of TCR clone 205887 (TRBV20-1, TRBJ2-2)
CSARDDRVGWTGELFF

SEQ ID NO: 411775 - protein, 15 aa, Homo sapiens
  CDR3 for alpha chain variable domain of TCR clone 205888 (TRAV4, TRAJ39)
CLVGPNNNAGNMLTF

SEQ ID NO: 411776 - protein, 13 aa, Homo sapiens
  CDR3 for beta chain variable domain of TCR clone 205888 (TRBV7-3, TRBJ2-1)
CASSLDSYNEQFF

SEQ ID NO: 411777 - protein, 11 aa, Homo sapiens
  CDR3 for alpha chain variable domain of TCR clone 205889 (TRAV2, TRAJ33)
CAVDSNYQLIW

SEQ ID NO: 411778 - protein, 14 aa, Homo sapiens
  CDR3 for beta chain variable domain of TCR clone 205889 (TRBV11-2, TRBJ2-3)
CASSRLACTDTQYF

SEQ ID NO: 411779 - protein, 15 aa, Homo sapiens
  CDR3 for alpha chain variable domain of TCR clone 205890 (TRAV3, TRAJ29)
CAVRDLYSGKTPLVF

SEQ ID NO: 411780 - protein, 17 aa, Homo sapiens
  CDR3 for beta chain variable domain of TCR clone 205890 (TRBV20-1, TRBJ2-1)
CSARDPLAGVWDNEQFF

SEQ ID NO: 411781 - protein, 15 aa, Homo sapiens
  CDR3 for alpha chain variable domain of TCR clone 205891 (TRAV3, TRAJ9)
CAVRDSNTGGFKTIF

SEQ ID NO: 411782 - protein, 16 aa, Homo sapiens
  CDR3 for beta chain variable domain of TCR clone 205891 (TRBV15, TRBJ2-5)
CASSPTTGQGMETQYF

SEQ ID NO: 411783 - protein, 14 aa, Homo sapiens
  CDR3 for alpha chain variable domain of TCR clone 205892 (TRAV29/DV5, TRAJ44)
CAAFLVGTASKLTF

SEQ ID NO: 411784 - protein, 16 aa, Homo sapiens
  CDR3 for beta chain variable domain of TCR clone 205892 (TRBV19, TRBJ1-5)
CASSSQGGYSNQPQHF

SEQ ID NO: 411785 - protein, 15 aa, Homo sapiens
  CDR3 for alpha chain variable domain of TCR clone 205893 (TRAV26-1, TRAJ29)
CIVRVEGSGNTTLVF

SEQ ID NO: 411786 - protein, 19 aa, Homo sapiens
  CDR3 for beta chain variable domain of TCR clone 205893 (TRBV25-1, TRBJ2-2)
CAILVYRVDRGRKTGELFF

SEQ ID NO: 411787 - protein, 13 aa, Homo sapiens
  CDR3 for alpha chain variable domain of TCR clone 205894 (TRAV35, TRAJ36)
CAGPRIGANNLFF

SEQ ID NO: 411788 - protein, 14 aa, Homo sapiens
  CDR3 for beta chain variable domain of TCR clone 205894 (TRBV28, TRBJ2-5)
CQQPPVVVQETQYF

SEQ ID NO: 411789 - protein, 14 aa, Homo sapiens
  CDR3 for alpha chain variable domain of TCR clone 205895 (TRAV2, TRAJ8)
CAGRGNTGFQKLVF

SEQ ID NO: 411790 - protein, 16 aa, Homo sapiens
  CDR3 for beta chain variable domain of TCR clone 205895 (TRBV11-2, TRBJ2-7)
CASSPTTGGVSYEQYF

SEQ ID NO: 411791 - protein, 13 aa, Homo sapiens
  CDR3 for alpha chain variable domain of TCR clone 205896 (TRAV8-3, TRAJ21)
CAVGAYNFNNFYF

SEQ ID NO: 411792 - protein, 14 aa, Homo sapiens
  CDR3 for beta chain variable domain of TCR clone 205896 (TRBV2, TRBJ2-7)
CASSLTSGGYEQYF

SEQ ID NO: 411793 - protein, 16 aa, Homo sapiens
  CDR3 for alpha chain variable domain of TCR clone 205897 (TRAV2, TRAJ20)
TTVLWSFRSNDYKLSF

SEQ ID NO: 411794 - protein, 12 aa, Homo sapiens
  CDR3 for beta chain variable domain of TCR clone 205897 (TRBV7-6, TRBJ2-3)
CARSTGTDTQYF

SEQ ID NO: 411795 - protein, 17 aa, Homo sapiens
  CDR3 for alpha chain variable domain of TCR clone 205898 (TRAV8-6, TRAJ58)
CAVSSWVGETSGSRLTF

SEQ ID NO: 411796 - protein, 12 aa, Homo sapiens
  CDR3 for beta chain variable domain of TCR clone 205898 (TRBV29-1, TRBJ2-3)
CSVTGGADTQYF

SEQ ID NO: 411797 - protein, 13 aa, Homo sapiens
  CDR3 for alpha chain variable domain of TCR clone 205899 (TRAV3, TRAJ4)
CAVRDGGYNKRIF

SEQ ID NO: 411798 - protein, 14 aa, Homo sapiens
  CDR3 for beta chain variable domain of TCR clone 205899 (TRBV12-4, TRBJ1-2)
CASSSAAAGSSYTF

SEQ ID NO: 411799 - protein, 15 aa, Homo sapiens
  CDR3 for alpha chain variable domain of TCR clone 205900 (TRAV3, TRAJ5)
CAVRDLDTGRKALTL

SEQ ID NO: 411800 - protein, 13 aa, Homo sapiens
  CDR3 for beta chain variable domain of TCR clone 205900 (TRBV12-4, TRBJ2-7)
CASSPTETYEQYF

SEQ ID NO: 411801 - protein, 15 aa, Homo sapiens
  CDR3 for alpha chain variable domain of TCR clone 205901 (TRAV12-3, TRAJ6)
CAMSATTGGIYIPTF

SEQ ID NO: 411802 - protein, 15 aa, Homo sapiens
  CDR3 for beta chain variable domain of TCR clone 205901 (TRBV7-6, TRBJ1-5)
CASSQSSGINQPQHF

SEQ ID NO: 411803 - protein, 11 aa, Homo sapiens
  CDR3 for alpha chain variable domain of TCR clone 205902 (TRAV2, TRAJ13)
CASGGYQKVTF

SEQ ID NO: 411804 - protein, 14 aa, Homo sapiens
  CDR3 for beta chain variable domain of TCR clone 205902 (TRBV7-8, TRBJ2-7)
CASSPRDRVYEQYF

SEQ ID NO: 411805 - protein, 22 aa, Homo sapiens
  CDR3 for alpha chain variable domain of TCR clone 205903 (TRAV4, )
CLVGPHNYDIQNPDPAVSQLRD

SEQ ID NO: 411806 - protein, 17 aa, Homo sapiens
  CDR3 for beta chain variable domain of TCR clone 205903 (TRBV24-1, TRBJ2-1)
CATSDVSTSGTYNEQFS

SEQ ID NO: 411807 - protein, 14 aa, Homo sapiens
  CDR3 for alpha chain variable domain of TCR clone 205904 (TRAV26-1, TRAJ38)
CIADNAGNNRKLIW

SEQ ID NO: 411808 - protein, 13 aa, Homo sapiens
  CDR3 for beta chain variable domain of TCR clone 205904 (TRBV20-1, TRBJ2-7)
CSAQDRDSYEQYF

SEQ ID NO: 411809 - protein, 12 aa, Homo sapiens
  CDR3 for alpha chain variable domain of TCR clone 205905 (TRAV20, TRAJ39)
CAVGNAGNMLTF

SEQ ID NO: 411810 - protein, 14 aa, Homo sapiens
  CDR3 for beta chain variable domain of TCR clone 205905 (TRBV20-1, TRBJ2-7)
CSAKRGRGSYEQYF

SEQ ID NO: 411811 - protein, 17 aa, Homo sapiens
  CDR3 for alpha chain variable domain of TCR clone 205906 (TRAV13-1, TRAJ28)
CAASPPYSGAGSYQLTF

SEQ ID NO: 411812 - protein, 16 aa, Homo sapiens
  CDR3 for beta chain variable domain of TCR clone 205906 (TRBV6-1, TRBJ2-5)
GASSETLDRGAETQYF

SEQ ID NO: 411813 - protein, 11 aa, Homo sapiens
  CDR3 for alpha chain variable domain of TCR clone 205907 (TRAV35, TRAJ22)
CAGPGVGQLTF

SEQ ID NO: 411814 - protein, 16 aa, Homo sapiens
  CDR3 for beta chain variable domain of TCR clone 205907 (TRBV20-1, TRBJ1-4)
CSAPGQGLLTNEKLFF

SEQ ID NO: 411815 - protein, 13 aa, Homo sapiens
  CDR3 for alpha chain variable domain of TCR clone 205908 (TRAV5, TRAJ30)
CAEIANRDDKIIF

SEQ ID NO: 411816 - protein, 16 aa, Homo sapiens
  CDR3 for beta chain variable domain of TCR clone 205908 (TRBV28, TRBJ2-7)
CASSPWVATGDLSQYF

SEQ ID NO: 411817 - protein, 10 aa, Homo sapiens
  CDR3 for alpha chain variable domain of TCR clone 205909 (TRAV23/DV6, TRAJ57)
CAASSTLSQG

SEQ ID NO: 411818 - protein, 16 aa, Homo sapiens
  CDR3 for beta chain variable domain of TCR clone 205909 (TRBV5-1, TRBJ1-3)
CASSPWAPSSGNTIYF

SEQ ID NO: 411819 - protein, 18 aa, Homo sapiens
  CDR3 for alpha chain variable domain of TCR clone 205910 (TRAV21, TRAJ52)
CAVRPSPAGGTSYGKLTF

SEQ ID NO: 411820 - protein, 16 aa, Homo sapiens
  CDR3 for beta chain variable domain of TCR clone 205910 (TRBV13, TRBJ2-3)
FQQPLQGSGGRNTQYF

SEQ ID NO: 411821 - protein, 15 aa, Homo sapiens
  CDR3 for alpha chain variable domain of TCR clone 205911 (TRAV29/DV5, TRAJ24)
CAAGGATDSWGKFQF

SEQ ID NO: 411822 - protein, 20 aa, Homo sapiens
  CDR3 for beta chain variable domain of TCR clone 205911 (TRBV11-2, TRBJ2-2)
LRTRPCISVPAASLPGSCFF

SEQ ID NO: 411823 - protein, 13 aa, Homo sapiens
  CDR3 for alpha chain variable domain of TCR clone 205912 (TRAV3, TRAJ20)
CAVRSLNDYKLRF

SEQ ID NO: 411824 - protein, 12 aa, Homo sapiens
  CDR3 for beta chain variable domain of TCR clone 205912 (TRBV6-1, TRBJ2-1)
CASYSTYNERFF

SEQ ID NO: 411825 - protein, 17 aa, Homo sapiens
  CDR3 for alpha chain variable domain of TCR clone 205913 (TRAV3, TRAJ6)
CAVRDGPRAGGRYIPTF

SEQ ID NO: 411826 - protein, 17 aa, Homo sapiens
  CDR3 for beta chain variable domain of TCR clone 205913 (TRBV7-8, TRBJ2-6)
CASSAGTGGAGANVLTF

SEQ ID NO: 411827 - protein, 13 aa, Homo sapiens
  CDR3 for alpha chain variable domain of TCR clone 205914 (TRAV8-3, TRAJ47)
CAVSMEYGNKLVF

SEQ ID NO: 411828 - protein, 16 aa, Homo sapiens
  CDR3 for beta chain variable domain of TCR clone 205914 (TRBV11-2, TRBJ2-7)
CASSPTTGGVSYEQYF

SEQ ID NO: 411829 - protein, 12 aa, Homo sapiens
  CDR3 for alpha chain variable domain of TCR clone 205915 (TRAV26-1, TRAJ26)
CIVFIYGQNFVF

SEQ ID NO: 411830 - protein, 16 aa, Homo sapiens
  CDR3 for beta chain variable domain of TCR clone 205915 (TRBV2, TRBJ2-2)
CASSAFGDANTGELFF

SEQ ID NO: 411831 - protein, 16 aa, Homo sapiens
  CDR3 for alpha chain variable domain of TCR clone 205916 (TRAV13-1, TRAJ52)
CAAFAKAGTSYGKLTF

SEQ ID NO: 411832 - protein, 12 aa, Homo sapiens
  CDR3 for beta chain variable domain of TCR clone 205916 (TRBV13, TRBJ2-7)
CASSLQAYEQYF

SEQ ID NO: 411833 - protein, 13 aa, Homo sapiens
  CDR3 for alpha chain variable domain of TCR clone 205917 (TRAV22, TRAJ29)
CAVGGSGNTPLVF

SEQ ID NO: 411834 - protein, 12 aa, Homo sapiens
  CDR3 for beta chain variable domain of TCR clone 205917 (TRBV12-4, TRBJ2-7)
CASSLGGYEQYF

SEQ ID NO: 411835 - protein, 16 aa, Homo sapiens
  CDR3 for alpha chain variable domain of TCR clone 205918 (TRAV3, TRAJ18)
CAVRDGGGSTLGRRYF

SEQ ID NO: 411836 - protein, 15 aa, Homo sapiens
  CDR3 for beta chain variable domain of TCR clone 205918 (TRBV7-9, TRBJ1-6)
CASSSPGRGNSPLHF

SEQ ID NO: 411837 - protein, 14 aa, Homo sapiens
  CDR3 for alpha chain variable domain of TCR clone 205919 (TRAV12-3, TRAJ10)
SHLPLPGGGNKLTF

SEQ ID NO: 411838 - protein, 14 aa, Homo sapiens
  CDR3 for beta chain variable domain of TCR clone 205919 (TRBV19, TRBJ2-1)
CASPTFVLSGEQFF

SEQ ID NO: 411839 - protein, 13 aa, Homo sapiens
  CDR3 for alpha chain variable domain of TCR clone 205920 (TRAV1-2, TRAJ9)
CAALNTGVFKTIF

SEQ ID NO: 411840 - protein, 13 aa, Homo sapiens
  CDR3 for beta chain variable domain of TCR clone 205920 (TRBV12-5, TRBJ2-3)
CASGDRQSDTQYF

SEQ ID NO: 411841 - protein, 10 aa, Homo sapiens
  CDR3 for alpha chain variable domain of TCR clone 205921 (TRAV8-4, TRAJ39)
CAVAGNMLTF

SEQ ID NO: 411842 - protein, 13 aa, Homo sapiens
  CDR3 for beta chain variable domain of TCR clone 205921 (TRBV10-3, TRBJ2-7)
CASKLAVNYEQYF

SEQ ID NO: 411843 - protein, 11 aa, Homo sapiens
  CDR3 for alpha chain variable domain of TCR clone 205922 (TRAV30, TRAJ23)
CGTEIAGKLIF

SEQ ID NO: 411844 - protein, 16 aa, Homo sapiens
  CDR3 for beta chain variable domain of TCR clone 205922 (TRBV7-2, TRBJ2-7)
CASTSQAASGGYEQFF

SEQ ID NO: 411845 - protein, 10 aa, Homo sapiens
  CDR3 for alpha chain variable domain of TCR clone 205923 (TRAV16, TRAJ22)
SAMYLRQLTF

SEQ ID NO: 411846 - protein, 15 aa, Homo sapiens
  CDR3 for beta chain variable domain of TCR clone 205923 (TRBV7-9, TRBJ2-2)
CASGPLDTFPGELFF

SEQ ID NO: 411847 - protein, 14 aa, Homo sapiens
  CDR3 for alpha chain variable domain of TCR clone 205924 (TRAV1-2, TRAJ8)
CAVREDTGFQKLVF

SEQ ID NO: 411848 - protein, 14 aa, Homo sapiens
  CDR3 for beta chain variable domain of TCR clone 205924 (TRBV29-1, TRBJ2-2)
CSVLAETNTGELFF

SEQ ID NO: 411849 - protein, 15 aa, Homo sapiens
  CDR3 for alpha chain variable domain of TCR clone 205925 (TRAV3, TRAJ22)
CAVRDRGGSARQLTF

SEQ ID NO: 411850 - protein, 16 aa, Homo sapiens
  CDR3 for beta chain variable domain of TCR clone 205925 (TRBV11-2, TRBJ2-1)
CASARGSYSHHNEQFC

SEQ ID NO: 411851 - protein, 12 aa, Homo sapiens
  CDR3 for alpha chain variable domain of TCR clone 205926 (TRAV13-1, TRAJ49)
CAASPMGNQFYF

SEQ ID NO: 411852 - protein, 12 aa, Homo sapiens
  CDR3 for beta chain variable domain of TCR clone 205926 (TRBV11-2, TRBJ2-1)
CASSPGNNEQFF

SEQ ID NO: 411853 - protein, 12 aa, Homo sapiens
  CDR3 for alpha chain variable domain of TCR clone 205927 (TRAV22, TRAJ43)
CSVELNNNDMRF

SEQ ID NO: 411854 - protein, 20 aa, Homo sapiens
  CDR3 for beta chain variable domain of TCR clone 205927 (TRBV7-8, TRBJ2-2)
CASSHLFPGPTIHITGELFF

SEQ ID NO: 411855 - protein, 17 aa, Homo sapiens
  CDR3 for alpha chain variable domain of TCR clone 205928 (TRAV3, TRAJ6)
CAVSRRTDTGGGYIPTF

SEQ ID NO: 411856 - protein, 18 aa, Homo sapiens
  CDR3 for beta chain variable domain of TCR clone 205928 (TRBV7-2, TRBJ2-3)
CASSLETSRGRKADTQYF

SEQ ID NO: 411857 - protein, 13 aa, Homo sapiens
  CDR3 for alpha chain variable domain of TCR clone 205929 (TRAV8-6, TRAJ49)
CAVITNTGNQFYF

SEQ ID NO: 411858 - protein, 15 aa, Homo sapiens
  CDR3 for beta chain variable domain of TCR clone 205929 (TRBV19, TRBJ1-1)
CASSIRRQMNTEAFF

SEQ ID NO: 411859 - protein, 17 aa, Homo sapiens
  CDR3 for alpha chain variable domain of TCR clone 205930 (TRAV3, TRAJ6)
FAVRDGPRAGGSYIPTF

SEQ ID NO: 411860 - protein, 16 aa, Homo sapiens
  CDR3 for beta chain variable domain of TCR clone 205930 (TRBV7-8, TRBJ2-3)
CASSTEGQRETDTQYF

SEQ ID NO: 411861 - protein, 14 aa, Homo sapiens
  CDR3 for alpha chain variable domain of TCR clone 205931 (TRAV12-3, TRAJ54)
CAMSALQGAQKLVF

SEQ ID NO: 411862 - protein, 15 aa, Homo sapiens
  CDR3 for beta chain variable domain of TCR clone 205931 (TRBV19, TRBJ2-4)
CASSAPGIAKNIQYF

SEQ ID NO: 411863 - protein, 14 aa, Homo sapiens
  CDR3 for alpha chain variable domain of TCR clone 205932 (TRAV16, TRAJ3)
CALSQYSSASKIIF

SEQ ID NO: 411864 - protein, 16 aa, Homo sapiens
  CDR3 for beta chain variable domain of TCR clone 205932 (TRBV7-3, TRBJ2-2)
CASSLKRGTLSGELFF

SEQ ID NO: 411865 - protein, 14 aa, Homo sapiens
  CDR3 for alpha chain variable domain of TCR clone 205933 (TRAV12-3, TRAJ42)
CAMNYGGSQGNLIF

SEQ ID NO: 411866 - protein, 17 aa, Homo sapiens
  CDR3 for beta chain variable domain of TCR clone 205933 (TRBV5-7, TRBJ1-5)
CASSYGKLWDQPSILVM

SEQ ID NO: 411867 - protein, 15 aa, Homo sapiens
  CDR3 for alpha chain variable domain of TCR clone 205934 (TRAV17, TRAJ57)
CATGPSQGGSEKLVF

SEQ ID NO: 411868 - protein, 16 aa, Homo sapiens
  CDR3 for beta chain variable domain of TCR clone 205934 (TRBV12-4, TRBJ1-5)
CASSRPVGRSNQPHHF

SEQ ID NO: 411869 - protein, 14 aa, Homo sapiens
  CDR3 for alpha chain variable domain of TCR clone 205935 (TRAV12-3, TRAJ22)
CAGSLFGSARQLTF

SEQ ID NO: 411870 - protein, 11 aa, Homo sapiens
  CDR3 for beta chain variable domain of TCR clone 205935 (TRBV12-4, TRBJ2-2)
CASSSAGELFF

SEQ ID NO: 411871 - protein, 17 aa, Homo sapiens
  CDR3 for alpha chain variable domain of TCR clone 205936 (TRAV14/DV4, TRAJ28)
CAMIEVSSGAGSYQLTF

SEQ ID NO: 411872 - protein, 15 aa, Homo sapiens
  CDR3 for beta chain variable domain of TCR clone 205936 (TRBV11-2, TRBJ1-6)
CASTLRETGNSPLHF

SEQ ID NO: 411873 - protein, 15 aa, Homo sapiens
  CDR3 for alpha chain variable domain of TCR clone 205937 (TRAV4, TRAJ39)
CLVGPNNNAGNMLTF

SEQ ID NO: 411874 - protein, 15 aa, Homo sapiens
  CDR3 for beta chain variable domain of TCR clone 205937 (TRBV11-3, TRBJ2-3)
CASLKDGREGDTQYF

SEQ ID NO: 411875 - protein, 12 aa, Homo sapiens
  CDR3 for alpha chain variable domain of TCR clone 205938 (TRAV30, TRAJ43)
CGTEERGNDMRF

SEQ ID NO: 411876 - protein, 16 aa, Homo sapiens
  CDR3 for beta chain variable domain of TCR clone 205938 (TRBV19, TRBJ1-6)
CASSVAPVAGNSPLHF

SEQ ID NO: 411877 - protein, 14 aa, Homo sapiens
  CDR3 for alpha chain variable domain of TCR clone 205939 (TRAV8-4, TRAJ17)
CAVSDQAAGNKLTF

SEQ ID NO: 411878 - protein, 13 aa, Homo sapiens
  CDR3 for beta chain variable domain of TCR clone 205939 (TRBV7-9, TRBJ1-2)
CASSLKQNYGYTF

SEQ ID NO: 411879 - protein, 15 aa, Homo sapiens
  CDR3 for alpha chain variable domain of TCR clone 205940 (TRAV26-1, TRAJ29)
CIVRVEGAGKTPLVF

SEQ ID NO: 411880 - protein, 15 aa, Homo sapiens
  CDR3 for beta chain variable domain of TCR clone 205940 (TRBV7-9, TRBJ1-5)
CASSQGHQPNQPQHF

SEQ ID NO: 411881 - protein, 14 aa, Homo sapiens
  CDR3 for alpha chain variable domain of TCR clone 205941 (TRAV1-2, TRAJ8)
CAVREDTGFQKLVF

SEQ ID NO: 411882 - protein, 14 aa, Homo sapiens
  CDR3 for beta chain variable domain of TCR clone 205941 (TRBV5-4, TRBJ1-1)
CASSLYSRRDEAFF

SEQ ID NO: 411883 - protein, 16 aa, Homo sapiens
  CDR3 for alpha chain variable domain of TCR clone 205942 (TRAV12-1, TRAJ17)
CVVNYKAAGNKLTLEQ

SEQ ID NO: 411884 - protein, 17 aa, Homo sapiens
  CDR3 for beta chain variable domain of TCR clone 205942 (TRBV20-1, TRBJ2-1)
CSASSSGLAGSYNEQFF

SEQ ID NO: 411885 - protein, 14 aa, Homo sapiens
  CDR3 for alpha chain variable domain of TCR clone 205943 (TRAV2, TRAJ9)
CAVEDRSGGFKTIL

SEQ ID NO: 411886 - protein, 16 aa, Homo sapiens
  CDR3 for beta chain variable domain of TCR clone 205943 (TRBV12-5, TRBJ2-5)
CASGPRTSGNQETQYF

SEQ ID NO: 411887 - protein, 16 aa, Homo sapiens
  CDR3 for alpha chain variable domain of TCR clone 205944 (TRAV4, TRAJ22)
CLVGDLYSGSARHLTF

SEQ ID NO: 411888 - protein, 16 aa, Homo sapiens
  CDR3 for beta chain variable domain of TCR clone 205944 (TRBV7-9, TRBJ2-1)
CASSDVAGGSYNEKFF

SEQ ID NO: 411889 - protein, 11 aa, Homo sapiens
  CDR3 for alpha chain variable domain of TCR clone 205945 (TRAV1-1, TRAJ23)
CAVRQGGKLIF

SEQ ID NO: 411890 - protein, 15 aa, Homo sapiens
  CDR3 for beta chain variable domain of TCR clone 205945 (TRBV5-1, TRBJ2-1)
CAGSPPRAPYNEQFF

SEQ ID NO: 411891 - protein, 14 aa, Homo sapiens
  CDR3 for alpha chain variable domain of TCR clone 205946 (TRAV13-1, TRAJ35)
CAASKGGFGNVLHC

SEQ ID NO: 411892 - protein, 14 aa, Homo sapiens
  CDR3 for beta chain variable domain of TCR clone 205946 (TRBV19, TRBJ2-1)
CASSAGLSGNEQFF

SEQ ID NO: 411893 - protein, 13 aa, Homo sapiens
  CDR3 for alpha chain variable domain of TCR clone 205947 (TRAV12-1, TRAJ22)
CVASGGSARQLTF

SEQ ID NO: 411894 - protein, 14 aa, Homo sapiens
  CDR3 for beta chain variable domain of TCR clone 205947 (TRBV11-3, TRBJ1-2)
CASSLGSGTYGYTL

SEQ ID NO: 411895 - protein, 14 aa, Homo sapiens
  CDR3 for alpha chain variable domain of TCR clone 205948 (TRAV1-2, TRAJ16)
CAVNRFSDGQKLLF

SEQ ID NO: 411896 - protein, 12 aa, Homo sapiens
  CDR3 for beta chain variable domain of TCR clone 205948 (TRBV28, TRBJ2-1)
CASSVQINEQFF

SEQ ID NO: 411897 - protein, 14 aa, Homo sapiens
  CDR3 for alpha chain variable domain of TCR clone 205949 (TRAV26-1, TRAJ39)
CIVFTNDAGNMLTF

SEQ ID NO: 411898 - protein, 15 aa, Homo sapiens
  CDR3 for beta chain variable domain of TCR clone 205949 (TRBV19, TRBJ2-4)
CASSLTGLTKNIQYF

SEQ ID NO: 411899 - protein, 17 aa, Homo sapiens
  CDR3 for alpha chain variable domain of TCR clone 205950 (TRAV3, TRAJ12)
CAVRDGGRMDSSYKLIF

SEQ ID NO: 411900 - protein, 16 aa, Homo sapiens
  CDR3 for beta chain variable domain of TCR clone 205950 (TRBV9, TRBJ2-2)
CASSAMGKGSTGELFF

SEQ ID NO: 411901 - protein, 15 aa, Homo sapiens
  CDR3 for alpha chain variable domain of TCR clone 205951 (TRAV23/DV6, TRAJ13)
CAAWPGGGGYQTVTF

SEQ ID NO: 411902 - protein, 17 aa, Homo sapiens
  CDR3 for beta chain variable domain of TCR clone 205951 (TRBV19, TRBJ2-7)
CASSISLYDSYPYEQYF

SEQ ID NO: 411903 - protein, 14 aa, Homo sapiens
  CDR3 for alpha chain variable domain of TCR clone 205952 (TRAV12-2, TRAJ44)
CAVNPAGTASKLTF

SEQ ID NO: 411904 - protein, 12 aa, Homo sapiens
  CDR3 for beta chain variable domain of TCR clone 205952 (TRBV29-1, TRBJ2-3)
CSVTGGADTQYF

SEQ ID NO: 411905 - protein, 15 aa, Homo sapiens
  CDR3 for alpha chain variable domain of TCR clone 205953 (TRAV34, TRAJ38)
CGADLTPGNNRKLIW

SEQ ID NO: 411906 - protein, 12 aa, Homo sapiens
  CDR3 for beta chain variable domain of TCR clone 205953 (TRBV7-9, TRBJ2-7)
CATRTDAYEQYF

SEQ ID NO: 411907 - protein, 12 aa, Homo sapiens
  CDR3 for alpha chain variable domain of TCR clone 205954 (TRAV12-1, TRAJ34)
CVVTFNTDKLIF

SEQ ID NO: 411908 - protein, 14 aa, Homo sapiens
  CDR3 for beta chain variable domain of TCR clone 205954 (TRBV19, TRBJ1-1)
CASLRAGLNTEAFF

SEQ ID NO: 411909 - protein, 13 aa, Homo sapiens
  CDR3 for alpha chain variable domain of TCR clone 205955 (TRAV3, TRAJ21)
CAVREPDFNKFYF

SEQ ID NO: 411910 - protein, 15 aa, Homo sapiens
  CDR3 for beta chain variable domain of TCR clone 205955 (TRBV7-9, TRBJ1-1)
CASSLREQGGTEAFF

SEQ ID NO: 411911 - protein, 14 aa, Homo sapiens
  CDR3 for alpha chain variable domain of TCR clone 205956 (TRAV2, TRAJ22)
CAVGRGGSARQLTF

SEQ ID NO: 411912 - protein, 12 aa, Homo sapiens
  CDR3 for beta chain variable domain of TCR clone 205956 (TRBV19, TRBJ2-1)
CASSVQDTEQFF

SEQ ID NO: 411913 - protein, 15 aa, Homo sapiens
  CDR3 for alpha chain variable domain of TCR clone 205957 (TRAV26-1, TRAJ44)
CIVRIGTGTASKHTF

SEQ ID NO: 411914 - protein, 12 aa, Homo sapiens
  CDR3 for beta chain variable domain of TCR clone 205957 (TRBV19, TRBJ2-5)
CASGTGQETQYF

SEQ ID NO: 411915 - protein, 12 aa, Homo sapiens
  CDR3 for alpha chain variable domain of TCR clone 205958 (TRAV21, TRAJ42)
CAGGGSQGNLIF

SEQ ID NO: 411916 - protein, 14 aa, Homo sapiens
  CDR3 for beta chain variable domain of TCR clone 205958 (TRBV12-4, TRBJ1-1)
CASSLGTGGTEAFF

SEQ ID NO: 411917 - protein, 13 aa, Homo sapiens
  CDR3 for alpha chain variable domain of TCR clone 205959 (TRAV13-2, TRAJ48)
CAEMDFGNEKLTF

SEQ ID NO: 411918 - protein, 15 aa, Homo sapiens
  CDR3 for beta chain variable domain of TCR clone 205959 (TRBV7-9, TRBJ1-6)
CASSSRGRGNSRLHF

SEQ ID NO: 411919 - protein, 11 aa, Homo sapiens
  CDR3 for alpha chain variable domain of TCR clone 205960 (TRAV2, TRAJ23)
CAVETRGKLIF

SEQ ID NO: 411920 - protein, 14 aa, Homo sapiens
  CDR3 for beta chain variable domain of TCR clone 205960 (TRBV7-2, TRBJ2-5)
CASSFTQGQETQYF

SEQ ID NO: 411921 - protein, 14 aa, Homo sapiens
  CDR3 for alpha chain variable domain of TCR clone 205961 (TRAV35, TRAJ38)
CAGSNAGNNRKLIW

SEQ ID NO: 411922 - protein, 12 aa, Homo sapiens
  CDR3 for beta chain variable domain of TCR clone 205961 (TRBV19, TRBJ2-7)
CASTHRGYEQYF

SEQ ID NO: 411923 - protein, 13 aa, Homo sapiens
  CDR3 for alpha chain variable domain of TCR clone 205962 (TRAV26-1, TRAJ40)
CIVRVEGTYKYIF

SEQ ID NO: 411924 - protein, 14 aa, Homo sapiens
  CDR3 for beta chain variable domain of TCR clone 205962 (TRBV7-2, TRBJ2-5)
CASSTGGELKTQYF

SEQ ID NO: 411925 - protein, 13 aa, Homo sapiens
  CDR3 for alpha chain variable domain of TCR clone 205963 (TRAV3, TRAJ21)
CAVREPDFNIFYF

SEQ ID NO: 411926 - protein, 18 aa, Homo sapiens
  CDR3 for beta chain variable domain of TCR clone 205963 (TRBV11-2, TRBJ2-3)
CASSLGGASRGAPNTQYF

SEQ ID NO: 411927 - protein, 13 aa, Homo sapiens
  CDR3 for alpha chain variable domain of TCR clone 205964 (TRAV20, TRAJ37)
CAGCSSNTGKLIF

SEQ ID NO: 411928 - protein, 14 aa, Homo sapiens
  CDR3 for beta chain variable domain of TCR clone 205964 (TRBV7-2, TRBJ1-2)
CASSQTGSTYGYTF

SEQ ID NO: 411929 - protein, 16 aa, Homo sapiens
  CDR3 for alpha chain variable domain of TCR clone 205965 (TRAV30, TRAJ24)
CGTEIVDADSWGEFQF

SEQ ID NO: 411930 - protein, 14 aa, Homo sapiens
  CDR3 for beta chain variable domain of TCR clone 205965 (TRBV7-2, TRBJ2-2)
CASRGQGAAGELFF

SEQ ID NO: 411931 - protein, 12 aa, Homo sapiens
  CDR3 for alpha chain variable domain of TCR clone 205966 (TRAV12-3, TRAJ17)
CAMTLTGNKLTF

SEQ ID NO: 411932 - protein, 13 aa, Homo sapiens
  CDR3 for beta chain variable domain of TCR clone 205966 (TRBV20-1, TRBJ2-7)
CSARGDTQDEQYF

SEQ ID NO: 411933 - protein, 14 aa, Homo sapiens
  CDR3 for alpha chain variable domain of TCR clone 205967 (TRAV17, TRAJ16)
CATADFSDGQKLLF

SEQ ID NO: 411934 - protein, 13 aa, Homo sapiens
  CDR3 for beta chain variable domain of TCR clone 205967 (TRBV7-9, TRBJ1-1)
CASSLAGVTEAFF

SEQ ID NO: 411935 - protein, 15 aa, Homo sapiens
  CDR3 for alpha chain variable domain of TCR clone 205968 (TRAV2, TRAJ36)
CAVQGAQTGANNLFF

SEQ ID NO: 411936 - protein, 14 aa, Homo sapiens
  CDR3 for beta chain variable domain of TCR clone 205968 (TRBV19, TRBJ2-1)
CASPTFVLSGEQFF

SEQ ID NO: 411937 - protein, 11 aa, Homo sapiens
  CDR3 for alpha chain variable domain of TCR clone 205969 (TRAV1-2, TRAJ20)
CAVSNDYKLSF

SEQ ID NO: 411938 - protein, 17 aa, Homo sapiens
  CDR3 for beta chain variable domain of TCR clone 205969 (TRBV15, TRBJ1-4)
CATSRYGTGDPNEKLFF

SEQ ID NO: 411939 - protein, 13 aa, Homo sapiens
  CDR3 for alpha chain variable domain of TCR clone 205970 (TRAV8-6, TRAJ13)
CAVSSGGYQTVTF

SEQ ID NO: 411940 - protein, 15 aa, Homo sapiens
  CDR3 for beta chain variable domain of TCR clone 205970 (TRBV7-9, TRBJ2-7)
CASSLPMGQANEQYF

SEQ ID NO: 411941 - protein, 14 aa, Homo sapiens
  CDR3 for alpha chain variable domain of TCR clone 205971 (TRAV8-3, TRAJ39)
CAVGANNAGNMLTL

SEQ ID NO: 411942 - protein, 14 aa, Homo sapiens
  CDR3 for beta chain variable domain of TCR clone 205971 (TRBV6-3, TRBJ1-1)
CASSYQRRDTEAFF

SEQ ID NO: 411943 - protein, 12 aa, Homo sapiens
  CDR3 for alpha chain variable domain of TCR clone 205972 (TRAV12-3, TRAJ17)
CSTTLTGNKLTF

SEQ ID NO: 411944 - protein, 16 aa, Homo sapiens
  CDR3 for beta chain variable domain of TCR clone 205972 (TRBV29-1, TRBJ2-7)
CSVDDAEDGTAYEQYF

SEQ ID NO: 411945 - protein, 16 aa, Homo sapiens
  CDR3 for alpha chain variable domain of TCR clone 205973 (TRAV16, TRAJ52)
CALSAAGGTSDGKLTF

SEQ ID NO: 411946 - protein, 12 aa, Homo sapiens
  CDR3 for beta chain variable domain of TCR clone 205973 (TRBV12-4, TRBJ1-3)
CASSLSGNTIYF

SEQ ID NO: 411947 - protein, 11 aa, Homo sapiens
  CDR3 for alpha chain variable domain of TCR clone 205974 (TRAV4, TRAJ23)
CLVAPGGKLIF

SEQ ID NO: 411948 - protein, 13 aa, Homo sapiens
  CDR3 for beta chain variable domain of TCR clone 205974 (TRBV19, TRBJ1-2)
CASSVPGQDGYTF

SEQ ID NO: 411949 - protein, 15 aa, Homo sapiens
  CDR3 for alpha chain variable domain of TCR clone 205975 (TRAV26-1, TRAJ48)
CIVRVGDFGNEELTF

SEQ ID NO: 411950 - protein, 16 aa, Homo sapiens
  CDR3 for beta chain variable domain of TCR clone 205975 (TRBV4-1, TRBJ2-3)
CASSRRAGGLTDTQYF

SEQ ID NO: 411951 - protein, 16 aa, Homo sapiens
  CDR3 for alpha chain variable domain of TCR clone 205976 (TRAV30, TRAJ24)
CGTEIVDADSWGKFQF

SEQ ID NO: 411952 - protein, 12 aa, Homo sapiens
  CDR3 for beta chain variable domain of TCR clone 205976 (TRBV11-2, TRBJ2-5)
CASSPPAETQYF

SEQ ID NO: 411953 - protein, 13 aa, Homo sapiens
  CDR3 for alpha chain variable domain of TCR clone 205977 (TRAV20, TRAJ31)
CAVQAWNNARLMF

SEQ ID NO: 411954 - protein, 14 aa, Homo sapiens
  CDR3 for beta chain variable domain of TCR clone 205977 (TRBV11-2, TRBJ2-3)
CASSRLARTDTQYF

SEQ ID NO: 411955 - protein, 16 aa, Homo sapiens
  CDR3 for alpha chain variable domain of TCR clone 205978 (TRAV8-1, TRAJ48)
CAVTLISNFGNEKLTF

SEQ ID NO: 411956 - protein, 12 aa, Homo sapiens
  CDR3 for beta chain variable domain of TCR clone 205978 (TRBV20-1, TRBJ1-2)
CSAPGFNYGYIF

SEQ ID NO: 411957 - protein, 16 aa, Homo sapiens
  CDR3 for alpha chain variable domain of TCR clone 205979 (TRAV1-1, TRAJ45)
CAVRAYSGGGAAGLTF

SEQ ID NO: 411958 - protein, 13 aa, Homo sapiens
  CDR3 for beta chain variable domain of TCR clone 205979 (TRBV20-1, TRBJ1-2)
CSARGTADYGYTF

SEQ ID NO: 411959 - protein, 18 aa, Homo sapiens
  CDR3 for alpha chain variable domain of TCR clone 205980 (TRAV21, TRAJ52)
CAVRPSPAGGTSYGKLTF

SEQ ID NO: 411960 - protein, 19 aa, Homo sapiens
  CDR3 for beta chain variable domain of TCR clone 205980 (TRBV27, TRBJ2-2)
CTSVPAVPPGRERTGELFF

SEQ ID NO: 411961 - protein, 17 aa, Homo sapiens
  CDR3 for alpha chain variable domain of TCR clone 205981 (TRAV26-1, TRAJ21)
CIAKGKFYFGSGPKLNV

SEQ ID NO: 411962 - protein, 15 aa, Homo sapiens
  CDR3 for beta chain variable domain of TCR clone 205981 (TRBV7-2, TRBJ2-1)
CASSSGLAGGNEQFF

SEQ ID NO: 411963 - protein, 14 aa, Homo sapiens
  CDR3 for alpha chain variable domain of TCR clone 205982 (TRAV3, TRAJ40)
CAVRDRRGTYKYIF

SEQ ID NO: 411964 - protein, 22 aa, Homo sapiens
  CDR3 for beta chain variable domain of TCR clone 205982 (TRBV6-1, TRBJ1-3)
CASVQGGGWKHHIFWRGKLAHR

SEQ ID NO: 411965 - protein, 15 aa, Homo sapiens
  CDR3 for alpha chain variable domain of TCR clone 205983 (TRAV3, TRAJ20)
CAVRDIKLSDYELSF

SEQ ID NO: 411966 - protein, 15 aa, Homo sapiens
  CDR3 for beta chain variable domain of TCR clone 205983 (TRBV27, TRBJ2-1)
CASSNGGGSSNEQFF

SEQ ID NO: 411967 - protein, 10 aa, Homo sapiens
  CDR3 for alpha chain variable domain of TCR clone 205984 (TRAV1-2, TRAJ20)
CAVTDYKLSF

SEQ ID NO: 411968 - protein, 15 aa, Homo sapiens
  CDR3 for beta chain variable domain of TCR clone 205984 (TRBV2, TRBJ2-1)
CASSELAGGYNEQFF

SEQ ID NO: 411969 - protein, 12 aa, Homo sapiens
  CDR3 for alpha chain variable domain of TCR clone 205985 (TRAV12-3, TRAJ40)
CAMSSGTYKYIF

SEQ ID NO: 411970 - protein, 15 aa, Homo sapiens
  CDR3 for beta chain variable domain of TCR clone 205985 (TRBV7-8, TRBJ2-1)
CASSLADSLYNEQFF

SEQ ID NO: 411971 - protein, 14 aa, Homo sapiens
  CDR3 for alpha chain variable domain of TCR clone 205986 (TRAV17, TRAJ34)
CATDSLEGTDKLIF

SEQ ID NO: 411972 - protein, 14 aa, Homo sapiens
  CDR3 for beta chain variable domain of TCR clone 205986 (TRBV7-2, TRBJ2-7)
CASGSQGAAYEQYF

SEQ ID NO: 411973 - protein, 13 aa, Homo sapiens
  CDR3 for alpha chain variable domain of TCR clone 205987 (TRAV12-3, TRAJ7)
CAMTPYGNNRLAF

SEQ ID NO: 411974 - protein, 18 aa, Homo sapiens
  CDR3 for beta chain variable domain of TCR clone 205987 (TRBV5-1, TRBJ1-6)
CASSVGGGYGERNSPLHF

SEQ ID NO: 411975 - protein, 13 aa, Homo sapiens
  CDR3 for alpha chain variable domain of TCR clone 205988 (TRAV8-3, TRAJ28)
CAVGAGGSYQLTV

SEQ ID NO: 411976 - protein, 15 aa, Homo sapiens
  CDR3 for beta chain variable domain of TCR clone 205988 (TRBV7-9, TRBJ1-5)
CASSQGHQPNQPQHF

SEQ ID NO: 411977 - protein, 16 aa, Homo sapiens
  CDR3 for alpha chain variable domain of TCR clone 205989 (TRAV17, TRAJ53)
CAPDALSGGSHYKLTF

SEQ ID NO: 411978 - protein, 12 aa, Homo sapiens
  CDR3 for beta chain variable domain of TCR clone 205989 (TRBV5-1, TRBJ2-7)
CASSFRGYEQYF

SEQ ID NO: 411979 - protein, 14 aa, Homo sapiens
  CDR3 for alpha chain variable domain of TCR clone 205990 (TRAV14/DV4, TRAJ9)
CNERESTGGFKTIF

SEQ ID NO: 411980 - protein, 16 aa, Homo sapiens
  CDR3 for beta chain variable domain of TCR clone 205990 (TRBV5-1, TRBJ1-1)
CASSSGGNSLNTEAFF

SEQ ID NO: 411981 - protein, 12 aa, Homo sapiens
  CDR3 for alpha chain variable domain of TCR clone 205991 (TRAV12-3, TRAJ39)
CAMTQAGNMLTF

SEQ ID NO: 411982 - protein, 15 aa, Homo sapiens
  CDR3 for beta chain variable domain of TCR clone 205991 (TRBV19, TRBJ1-1)
CASTSGQIQNTEAFF

SEQ ID NO: 411983 - protein, 18 aa, Homo sapiens
  CDR3 for alpha chain variable domain of TCR clone 205992 (TRAV21, TRAJ52)
CAVRPSLAGGTSYGKLTF

SEQ ID NO: 411984 - protein, 17 aa, Homo sapiens
  CDR3 for beta chain variable domain of TCR clone 205992 (TRBV13, TRBJ2-3)
RASSLSMVAGGRNTQYF

SEQ ID NO: 411985 - protein, 13 aa, Homo sapiens
  CDR3 for alpha chain variable domain of TCR clone 205993 (TRAV1-2, TRAJ9)
CAALNTGGFKTIF

SEQ ID NO: 411986 - protein, 16 aa, Homo sapiens
  CDR3 for beta chain variable domain of TCR clone 205993 (TRBV11-2, TRBJ2-1)
CASSPLLAGVYNEQFF

SEQ ID NO: 411987 - protein, 15 aa, Homo sapiens
  CDR3 for alpha chain variable domain of TCR clone 205994 (TRAV17, TRAJ57)
CATGPSQGGSEKLVF

SEQ ID NO: 411988 - protein, 12 aa, Homo sapiens
  CDR3 for beta chain variable domain of TCR clone 205994 (TRBV6-3, TRBJ2-1)
CASSGSYNEQFF

SEQ ID NO: 411989 - protein, 10 aa, Homo sapiens
  CDR3 for alpha chain variable domain of TCR clone 205995 (TRAV23/DV6, TRAJ57)
CAASSTLSQC

SEQ ID NO: 411990 - protein, 13 aa, Homo sapiens
  CDR3 for beta chain variable domain of TCR clone 205995 (TRBV15, TRBJ1-6)
CATSGGLNSPLHF

SEQ ID NO: 411991 - protein, 16 aa, Homo sapiens
  CDR3 for alpha chain variable domain of TCR clone 205996 (TRAV12-1, TRAJ53)
CVVTSVAEGSNYKLTF

SEQ ID NO: 411992 - protein, 16 aa, Homo sapiens
  CDR3 for beta chain variable domain of TCR clone 205996 (TRBV6-6, TRBJ2-3)
CASSYSHAGSTDTQYF

SEQ ID NO: 411993 - protein, 14 aa, Homo sapiens
  CDR3 for alpha chain variable domain of TCR clone 205997 (TRAV8-3, TRAJ4)
CAVGAACGYNKLIF

SEQ ID NO: 411994 - protein, 17 aa, Homo sapiens
  CDR3 for beta chain variable domain of TCR clone 205997 (TRBV13, TRBJ2-3)
CASSLSRVAGGRNTQYF

SEQ ID NO: 411995 - protein, 14 aa, Homo sapiens
  CDR3 for alpha chain variable domain of TCR clone 205998 (TRAV12-2, TRAJ38)
CAPQTAGNNRKLVW

SEQ ID NO: 411996 - protein, 18 aa, Homo sapiens
  CDR3 for beta chain variable domain of TCR clone 205998 (TRBV28, TRBJ1-3)
CASKTPVGQIGSGNTIYF

SEQ ID NO: 411997 - protein, 19 aa, Homo sapiens
  CDR3 for alpha chain variable domain of TCR clone 205999 (TRAV26-1, TRAJ52)
FIVRAYRNAGGTSYGKLTF

SEQ ID NO: 411998 - protein, 15 aa, Homo sapiens
  CDR3 for beta chain variable domain of TCR clone 205999 (TRBV12-4, TRBJ2-5)
CASSPPTGLQETQYF

SEQ ID NO: 411999 - protein, 14 aa, Homo sapiens
  CDR3 for alpha chain variable domain of TCR clone 206000 (TRAV20, TRAJ4)
CAVRLGGGYNKLMF

SEQ ID NO: 412000 - protein, 21 aa, Homo sapiens
  CDR3 for beta chain variable domain of TCR clone 206000 (TRBV15, TRBJ2-1)
AWGTQPCTCVPPAEVDTARFF

SEQ ID NO: 412001 - protein, 14 aa, Homo sapiens
  CDR3 for alpha chain variable domain of TCR clone 206001 (TRAV17, TRAJ37)
CATDGSSNTGKLIF

SEQ ID NO: 412002 - protein, 12 aa, Homo sapiens
  CDR3 for beta chain variable domain of TCR clone 206001 (TRBV12-5, TRBJ2-5)
CASGQGVETQYF

SEQ ID NO: 412003 - protein, 13 aa, Homo sapiens
  CDR3 for alpha chain variable domain of TCR clone 206002 (TRAV8-6, TRAJ8)
CAFMKTGFQKLVF

SEQ ID NO: 412004 - protein, 15 aa, Homo sapiens
  CDR3 for beta chain variable domain of TCR clone 206002 (TRBV28, TRBJ2-5)
CASSSGRVIQETQYF

SEQ ID NO: 412005 - protein, 12 aa, Homo sapiens
  CDR3 for alpha chain variable domain of TCR clone 206003 (TRAV1-1, TRAJ20)
CAVREDDYKLSF

SEQ ID NO: 412006 - protein, 15 aa, Homo sapiens
  CDR3 for beta chain variable domain of TCR clone 206003 (TRBV5-7, TRBJ2-7)
CASSLPGQGFYEQYF

SEQ ID NO: 412007 - protein, 15 aa, Homo sapiens
  CDR3 for alpha chain variable domain of TCR clone 206004 (TRAV8-3, TRAJ45)
YASSYSGGGADGLTF

SEQ ID NO: 412008 - protein, 15 aa, Homo sapiens
  CDR3 for beta chain variable domain of TCR clone 206004 (TRBV7-2, TRBJ2-2)
CASSSLTGGTGELFF

SEQ ID NO: 412009 - protein, 12 aa, Homo sapiens
  CDR3 for alpha chain variable domain of TCR clone 206005 (TRAV20, TRAJ56)
CAVTGANSKLTF

SEQ ID NO: 412010 - protein, 14 aa, Homo sapiens
  CDR3 for beta chain variable domain of TCR clone 206005 (TRBV20-1, TRBJ2-5)
CSALVPGYQGTQYF

SEQ ID NO: 412011 - protein, 11 aa, Homo sapiens
  CDR3 for alpha chain variable domain of TCR clone 206006 (TRAV3, TRAJ49)
CAPITGNQFYF

SEQ ID NO: 412012 - protein, 15 aa, Homo sapiens
  CDR3 for beta chain variable domain of TCR clone 206006 (TRBV28, TRBJ2-1)
CASSGLAEVDNEQFF

SEQ ID NO: 412013 - protein, 13 aa, Homo sapiens
  CDR3 for alpha chain variable domain of TCR clone 206007 (TRAV27, TRAJ40)
CAGPPSGTYKYIF

SEQ ID NO: 412014 - protein, 13 aa, Homo sapiens
  CDR3 for beta chain variable domain of TCR clone 206007 (TRBV4-2, TRBJ1-1)
CASSQAGNTEAFF

SEQ ID NO: 412015 - protein, 13 aa, Homo sapiens
  CDR3 for alpha chain variable domain of TCR clone 206008 (TRAV23/DV6, TRAJ58)
CSARLIRGSRLIF

SEQ ID NO: 412016 - protein, 13 aa, Homo sapiens
  CDR3 for beta chain variable domain of TCR clone 206008 (TRBV2, TRBJ1-6)
CADSGSYNSPLHF

SEQ ID NO: 412017 - protein, 11 aa, Homo sapiens
  CDR3 for alpha chain variable domain of TCR clone 206009 (TRAV1-2, TRAJ20)
CAVSNDYKLSF

SEQ ID NO: 412018 - protein, 14 aa, Homo sapiens
  CDR3 for beta chain variable domain of TCR clone 206009 (TRBV18, TRBJ1-2)
CASSPDRVVYGYTF

SEQ ID NO: 412019 - protein, 13 aa, Homo sapiens
  CDR3 for alpha chain variable domain of TCR clone 206010 (TRAV29/DV5, TRAJ9)
CSARETGGFKTIF

SEQ ID NO: 412020 - protein, 15 aa, Homo sapiens
  CDR3 for beta chain variable domain of TCR clone 206010 (TRBV19, TRBJ2-1)
CASSMGSGTGRQQFF

SEQ ID NO: 412021 - protein, 14 aa, Homo sapiens
  CDR3 for alpha chain variable domain of TCR clone 206011 (TRAV23/DV6, TRAJ17)
CAARGRAAGNKLTF

SEQ ID NO: 412022 - protein, 13 aa, Homo sapiens
  CDR3 for beta chain variable domain of TCR clone 206011 (TRBV7-6, TRBJ1-2)
CASSLVADYGYAF

SEQ ID NO: 412023 - protein, 15 aa, Homo sapiens
  CDR3 for alpha chain variable domain of TCR clone 206012 (TRAV3, TRAJ29)
CAVRDLYSGNTPLVF

SEQ ID NO: 412024 - protein, 15 aa, Homo sapiens
  CDR3 for beta chain variable domain of TCR clone 206012 (TRBV20-1, TRBJ2-1)
CSARGMGGTYNEQFF

SEQ ID NO: 412025 - protein, 15 aa, Homo sapiens
  CDR3 for alpha chain variable domain of TCR clone 206013 (TRAV25, TRAJ52)
CAGRPGGTSYGKLTF

SEQ ID NO: 412026 - protein, 16 aa, Homo sapiens
  CDR3 for beta chain variable domain of TCR clone 206013 (TRBV7-8, TRBJ2-6)
CQQRRDRGAGTNVLTF

SEQ ID NO: 412027 - protein, 17 aa, Homo sapiens
  CDR3 for alpha chain variable domain of TCR clone 206014 (TRAV3, TRAJ6)
CAVSDGPRAGGSYIPTF

SEQ ID NO: 412028 - protein, 16 aa, Homo sapiens
  CDR3 for beta chain variable domain of TCR clone 206014 (TRBV7-8, TRBJ2-3)
CASSTEGQRETDTQYF

SEQ ID NO: 412029 - protein, 11 aa, Homo sapiens
  CDR3 for alpha chain variable domain of TCR clone 206015 (TRAV13-2, TRAJ36)
GAETGANNLFF

SEQ ID NO: 412030 - protein, 13 aa, Homo sapiens
  CDR3 for beta chain variable domain of TCR clone 206015 (TRBV7-9, TRBJ2-4)
CATEGLAGNIQYF

SEQ ID NO: 412031 - protein, 12 aa, Homo sapiens
  CDR3 for alpha chain variable domain of TCR clone 206016 (TRAV16, TRAJ22)
CALEVSVRQLTF

SEQ ID NO: 412032 - protein, 14 aa, Homo sapiens
  CDR3 for beta chain variable domain of TCR clone 206016 (TRBV11-2, TRBJ2-3)
CASSSIASTDTQYF

SEQ ID NO: 412033 - protein, 17 aa, Homo sapiens
  CDR3 for alpha chain variable domain of TCR clone 206017 (TRAV27, TRAJ26)
CAGARAPLDNYGQNFVF

SEQ ID NO: 412034 - protein, 15 aa, Homo sapiens
  CDR3 for beta chain variable domain of TCR clone 206017 (TRBV11-2, TRBJ2-5)
CASSPRSGGLEAQYF

SEQ ID NO: 412035 - protein, 16 aa, Homo sapiens
  CDR3 for alpha chain variable domain of TCR clone 206018 (TRAV38-2/DV8, TRAJ45)
CAYTTTSGGGADGLIF

SEQ ID NO: 412036 - protein, 14 aa, Homo sapiens
  CDR3 for beta chain variable domain of TCR clone 206018 (TRBV7-9, TRBJ2-2)
CASSLGHRTGELFF

SEQ ID NO: 412037 - protein, 15 aa, Homo sapiens
  CDR3 for alpha chain variable domain of TCR clone 206019 (TRAV17, TRAJ22)
CATVAPSGSARQLTF

SEQ ID NO: 412038 - protein, 14 aa, Homo sapiens
  CDR3 for beta chain variable domain of TCR clone 206019 (TRBV4-1, TRBJ2-2)
CASRQAVNTGELFF

SEQ ID NO: 412039 - protein, 14 aa, Homo sapiens
  CDR3 for alpha chain variable domain of TCR clone 206020 (TRAV12-3, TRAJ5)
CVMSTYTGRRALTF

SEQ ID NO: 412040 - protein, 13 aa, Homo sapiens
  CDR3 for beta chain variable domain of TCR clone 206020 (TRBV28, TRBJ2-3)
CASSTGGGDSQYF

SEQ ID NO: 412041 - protein, 11 aa, Homo sapiens
  CDR3 for alpha chain variable domain of TCR clone 206021 (TRAV21, TRAJ34)
CAHYNTDKLIF

SEQ ID NO: 412042 - protein, 11 aa, Homo sapiens
  CDR3 for beta chain variable domain of TCR clone 206021 (TRBV29-1, TRBJ2-5)
WSEDRTGTQYF

SEQ ID NO: 412043 - protein, 14 aa, Homo sapiens
  CDR3 for alpha chain variable domain of TCR clone 206022 (TRAV16, TRAJ33)
CALSAMDSNYQLIW

SEQ ID NO: 412044 - protein, 14 aa, Homo sapiens
  CDR3 for beta chain variable domain of TCR clone 206022 (TRBV2, TRBJ2-1)
CASRTGSSYNEQFF

SEQ ID NO: 412045 - protein, 14 aa, Homo sapiens
  CDR3 for alpha chain variable domain of TCR clone 206023 (TRAV26-1, TRAJ38)
CIADNAGNNRKLIW

SEQ ID NO: 412046 - protein, 16 aa, Homo sapiens
  CDR3 for beta chain variable domain of TCR clone 206023 (TRBV28, TRBJ2-7)
CASSLFFETGGPEQYF

SEQ ID NO: 412047 - protein, 16 aa, Homo sapiens
  CDR3 for alpha chain variable domain of TCR clone 206024 (TRAV30, TRAJ24)
CGTEIVDADSWGKFQF

SEQ ID NO: 412048 - protein, 13 aa, Homo sapiens
  CDR3 for beta chain variable domain of TCR clone 206024 (TRBV12-5, TRBJ1-1)
CASGLVQGPEAFF

SEQ ID NO: 412049 - protein, 13 aa, Homo sapiens
  CDR3 for alpha chain variable domain of TCR clone 206025 (TRAV1-1, TRAJ9)
CAAKNTGGFTTIF

SEQ ID NO: 412050 - protein, 14 aa, Homo sapiens
  CDR3 for beta chain variable domain of TCR clone 206025 (TRBV20-1, TRBJ2-1)
CSAQIGRSANEHFF

SEQ ID NO: 412051 - protein, 15 aa, Homo sapiens
  CDR3 for alpha chain variable domain of TCR clone 206026 (TRAV24, TRAJ21)
CALDFTTSTNFTLDL

SEQ ID NO: 412052 - protein, 13 aa, Homo sapiens
  CDR3 for beta chain variable domain of TCR clone 206026 (TRBV7-9, TRBJ1-2)
CASSLKQNYGYTF

SEQ ID NO: 412053 - protein, 14 aa, Homo sapiens
  CDR3 for alpha chain variable domain of TCR clone 206027 (TRAV1-2, TRAJ16)
CAVNRFSDGQKLLF

SEQ ID NO: 412054 - protein, 15 aa, Homo sapiens
  CDR3 for beta chain variable domain of TCR clone 206027 (TRBV20-1, TRBJ2-7)
GSARKGLAESYEQYF

SEQ ID NO: 412055 - protein, 11 aa, Homo sapiens
  CDR3 for alpha chain variable domain of TCR clone 206028 (TRAV2, TRAJ33)
CAVDSNYQLIW

SEQ ID NO: 412056 - protein, 14 aa, Homo sapiens
  CDR3 for beta chain variable domain of TCR clone 206028 (TRBV10-3, TRBJ2-1)
CAISSDLAYNEQFF

SEQ ID NO: 412057 - protein, 14 aa, Homo sapiens
  CDR3 for alpha chain variable domain of TCR clone 206029 (TRAV8-3, TRAJ9)
CAVVYNTGGFKTIF

SEQ ID NO: 412058 - protein, 14 aa, Homo sapiens
  CDR3 for beta chain variable domain of TCR clone 206029 (TRBV7-3, TRBJ2-2)
CAISSGGYTGELFF

SEQ ID NO: 412059 - protein, 15 aa, Homo sapiens
  CDR3 for alpha chain variable domain of TCR clone 206030 (TRAV17, TRAJ16)
CATALRFSDGQKLLF

SEQ ID NO: 412060 - protein, 14 aa, Homo sapiens
  CDR3 for beta chain variable domain of TCR clone 206030 (TRBV13, TRBJ1-5)
CQQLRTGGVQPQHF

SEQ ID NO: 412061 - protein, 15 aa, Homo sapiens
  CDR3 for alpha chain variable domain of TCR clone 206031 (TRAV21, TRAJ52)
CAVRGGGTSYGKLTF

SEQ ID NO: 412062 - protein, 14 aa, Homo sapiens
  CDR3 for beta chain variable domain of TCR clone 206031 (TRBV7-2, TRBJ2-5)
CASSPRGSSETQYF

SEQ ID NO: 412063 - protein, 12 aa, Homo sapiens
  CDR3 for alpha chain variable domain of TCR clone 206032 (TRAV12-1, TRAJ6)
CVVSERSYIPTF

SEQ ID NO: 412064 - protein, 16 aa, Homo sapiens
  CDR3 for beta chain variable domain of TCR clone 206032 (TRBV3-1, TRBJ2-5)
CASSPGQFNGFGTQYF

SEQ ID NO: 412065 - protein, 12 aa, Homo sapiens
  CDR3 for alpha chain variable domain of TCR clone 206033 (TRAV13-2, TRAJ23)
CAERHRGGKLIF

SEQ ID NO: 412066 - protein, 16 aa, Homo sapiens
  CDR3 for beta chain variable domain of TCR clone 206033 (TRBV7-3, TRBJ2-2)
CASSFLPSGYTGELFF

SEQ ID NO: 412067 - protein, 11 aa, Homo sapiens
  CDR3 for alpha chain variable domain of TCR clone 206034 (TRAV16, TRAJ20)
CALSEAFKAAL

SEQ ID NO: 412068 - protein, 13 aa, Homo sapiens
  CDR3 for beta chain variable domain of TCR clone 206034 (TRBV7-3, TRBJ2-1)
CASSLDSYNEQFF

SEQ ID NO: 412069 - protein, 15 aa, Homo sapiens
  CDR3 for alpha chain variable domain of TCR clone 206035 (TRAV8-3, TRAJ27)
CAVGPSKTNAGKSTF

SEQ ID NO: 412070 - protein, 16 aa, Homo sapiens
  CDR3 for beta chain variable domain of TCR clone 206035 (TRBV4-1, TRBJ2-3)
CASSQSTSGAEDTQYF

SEQ ID NO: 412071 - protein, 13 aa, Homo sapiens
  CDR3 for alpha chain variable domain of TCR clone 206036 (TRAV17, TRAJ8)
CATPPRGFQKLVF

SEQ ID NO: 412072 - protein, 14 aa, Homo sapiens
  CDR3 for beta chain variable domain of TCR clone 206036 (TRBV2, TRBJ1-5)
CASSGTGFNQPQHF

SEQ ID NO: 412073 - protein, 17 aa, Homo sapiens
  CDR3 for alpha chain variable domain of TCR clone 206037 (TRAV26-1, TRAJ28)
CIVRVPDSGAGSYQLTF

SEQ ID NO: 412074 - protein, 17 aa, Homo sapiens
  CDR3 for beta chain variable domain of TCR clone 206037 (TRBV28, TRBJ2-7)
CASSPLPAGDKSYEQYF

SEQ ID NO: 412075 - protein, 18 aa, Homo sapiens
  CDR3 for alpha chain variable domain of TCR clone 206038 (TRAV13-1, TRAJ52)
CAASKRSAGGTSYGKLTF

SEQ ID NO: 412076 - protein, 15 aa, Homo sapiens
  CDR3 for beta chain variable domain of TCR clone 206038 (TRBV12-4, TRBJ2-5)
CASSPPTGLQETQYF

SEQ ID NO: 412077 - protein, 22 aa, Homo sapiens
  CDR3 for alpha chain variable domain of TCR clone 206039 (TRAV8-3, TRAJ28)
CAVGATLGLGVTNSLSGRGPNF

SEQ ID NO: 412078 - protein, 14 aa, Homo sapiens
  CDR3 for beta chain variable domain of TCR clone 206039 (TRBV7-2, TRBJ2-1)
CASSLGVGYNEQFF

SEQ ID NO: 412079 - protein, 16 aa, Homo sapiens
  CDR3 for alpha chain variable domain of TCR clone 206040 (TRAV12-3, TRAJ53)
CAMSPWSGGSNYKLTF

SEQ ID NO: 412080 - protein, 11 aa, Homo sapiens
  CDR3 for beta chain variable domain of TCR clone 206040 (TRBV29-1, TRBJ2-5)
CSEDRTETQYF

SEQ ID NO: 412081 - protein, 14 aa, Homo sapiens
  CDR3 for alpha chain variable domain of TCR clone 206041 (TRAV3, TRAJ6)
CAVRDWGGIYIPTF

SEQ ID NO: 412082 - protein, 17 aa, Homo sapiens
  CDR3 for beta chain variable domain of TCR clone 206041 (TRBV6-5, TRBJ2-1)
CASRLSGRFESYNEQFF

SEQ ID NO: 412083 - protein, 17 aa, Homo sapiens
  CDR3 for alpha chain variable domain of TCR clone 206042 (TRAV3, TRAJ6)
CAVRDGPRAGGSHIPTF

SEQ ID NO: 412084 - protein, 14 aa, Homo sapiens
  CDR3 for beta chain variable domain of TCR clone 206042 (TRBV7-2, TRBJ2-7)
CASSPKTSFYEKYF

SEQ ID NO: 412085 - protein, 11 aa, Homo sapiens
  CDR3 for alpha chain variable domain of TCR clone 206043 (TRAV13-1, TRAJ30)
CAASRDDKIIF

SEQ ID NO: 412086 - protein, 15 aa, Homo sapiens
  CDR3 for beta chain variable domain of TCR clone 206043 (TRBV18, TRBJ1-1)
SASSPSSWVNTEAFF

SEQ ID NO: 412087 - protein, 11 aa, Homo sapiens
  CDR3 for alpha chain variable domain of TCR clone 206044 (TRAV2, TRAJ13)
CASGGYQKVTF

SEQ ID NO: 412088 - protein, 13 aa, Homo sapiens
  CDR3 for beta chain variable domain of TCR clone 206044 (TRBV11-2, TRBJ1-2)
CASSLDSPSGYTF

SEQ ID NO: 412089 - protein, 14 aa, Homo sapiens
  CDR3 for alpha chain variable domain of TCR clone 206045 (TRAV38-1, TRAJ45)
CAYYSGGGADGLTF

SEQ ID NO: 412090 - protein, 15 aa, Homo sapiens
  CDR3 for beta chain variable domain of TCR clone 206045 (TRBV28, TRBJ2-1)
CASSIIAGGRSEQFF

SEQ ID NO: 412091 - protein, 13 aa, Homo sapiens
  CDR3 for alpha chain variable domain of TCR clone 206046 (TRAV29/DV5, TRAJ31)
CAASRKYDARLMF

SEQ ID NO: 412092 - protein, 12 aa, Homo sapiens
  CDR3 for beta chain variable domain of TCR clone 206046 (TRBV14, TRBJ2-7)
CASSLYKDEQYF

SEQ ID NO: 412093 - protein, 17 aa, Homo sapiens
  CDR3 for alpha chain variable domain of TCR clone 206047 (TRAV3, TRAJ12)
CAVRDGGMMDSSHKLIF

SEQ ID NO: 412094 - protein, 16 aa, Homo sapiens
  CDR3 for beta chain variable domain of TCR clone 206047 (TRBV12-5, TRBJ2-5)
CASGPRTSGNQETQYF

SEQ ID NO: 412095 - protein, 12 aa, Homo sapiens
  CDR3 for alpha chain variable domain of TCR clone 206048 (TRAV1-1, TRAJ8)
CAGGTGFQKLVF

SEQ ID NO: 412096 - protein, 15 aa, Homo sapiens
  CDR3 for beta chain variable domain of TCR clone 206048 (TRBV7-9, TRBJ1-4)
CACSRTGGFNGKLFF

SEQ ID NO: 412097 - protein, 18 aa, Homo sapiens
  CDR3 for alpha chain variable domain of TCR clone 206049 (TRAV29/DV5, TRAJ37)
CSVLLCSEGSGNTGHLIF

SEQ ID NO: 412098 - protein, 14 aa, Homo sapiens
  CDR3 for beta chain variable domain of TCR clone 206049 (TRBV5-1, TRBJ1-1)
CASSLAVGSGEAFF

SEQ ID NO: 412099 - protein, 14 aa, Homo sapiens
  CDR3 for alpha chain variable domain of TCR clone 206050 (TRAV3, TRAJ33)
CAVRDMDSNYQLIW

SEQ ID NO: 412100 - protein, 18 aa, Homo sapiens
  CDR3 for beta chain variable domain of TCR clone 206050 (TRBV12-4, TRBJ2-2)
CASSLVAGTRGRTGELFF

SEQ ID NO: 412101 - protein, 13 aa, Homo sapiens
  CDR3 for alpha chain variable domain of TCR clone 206051 (TRAV12-3, TRAJ13)
CAMSSGGYQEVTF

SEQ ID NO: 412102 - protein, 13 aa, Homo sapiens
  CDR3 for beta chain variable domain of TCR clone 206051 (TRBV20-1, TRBJ1-1)
CSAPPGGHTEAVF

SEQ ID NO: 412103 - protein, 10 aa, Homo sapiens
  CDR3 for alpha chain variable domain of TCR clone 206052 (TRAV25, TRAJ34)
CAENTDKLIF

SEQ ID NO: 412104 - protein, 15 aa, Homo sapiens
  CDR3 for beta chain variable domain of TCR clone 206052 (TRBV5-5, TRBJ2-2)
CASSRQASGAGELFF

SEQ ID NO: 412105 - protein, 16 aa, Homo sapiens
  CDR3 for alpha chain variable domain of TCR clone 206053 (TRAV12-3, TRAJ53)
CAMSPESGGSNYKLTF

SEQ ID NO: 412106 - protein, 11 aa, Homo sapiens
  CDR3 for beta chain variable domain of TCR clone 206053 (TRBV29-1, TRBJ2-5)
CSEDRTGTQYV

SEQ ID NO: 412107 - protein, 15 aa, Homo sapiens
  CDR3 for alpha chain variable domain of TCR clone 206054 (TRAV2, TRAJ9)
CAVEDRGTGGFKTIF

SEQ ID NO: 412108 - protein, 16 aa, Homo sapiens
  CDR3 for beta chain variable domain of TCR clone 206054 (TRBV28, TRBJ2-6)
CASSNRRGSGANVLTF

SEQ ID NO: 412109 - protein, 14 aa, Homo sapiens
  CDR3 for alpha chain variable domain of TCR clone 206055 (TRAV12-3, TRAJ57)
CAMSAWGGSEKLVF

SEQ ID NO: 412110 - protein, 16 aa, Homo sapiens
  CDR3 for beta chain variable domain of TCR clone 206055 (TRBV7-3, TRBJ2-2)
CASSLKRVTLSGELFF

SEQ ID NO: 412111 - protein, 17 aa, Homo sapiens
  CDR3 for alpha chain variable domain of TCR clone 206056 (TRAV3, TRAJ38)
CAVRDCLNAGNNRKLIW

SEQ ID NO: 412112 - protein, 16 aa, Homo sapiens
  CDR3 for beta chain variable domain of TCR clone 206056 (TRBV20-1, TRBJ1-4)
CSAPGQCLLTNEKLFF

SEQ ID NO: 412113 - protein, 14 aa, Homo sapiens
  CDR3 for alpha chain variable domain of TCR clone 206057 (TRAV12-2, TRAJ13)
CAVEETGGYQKVTF

SEQ ID NO: 412114 - protein, 15 aa, Homo sapiens
  CDR3 for beta chain variable domain of TCR clone 206057 (TRBV27, TRBJ2-1)
CASSNGGGSSNEQFF

SEQ ID NO: 412115 - protein, 15 aa, Homo sapiens
  CDR3 for alpha chain variable domain of TCR clone 206058 (TRAV26-1, TRAJ29)
CIVRVEGSGNTPLVV

SEQ ID NO: 412116 - protein, 14 aa, Homo sapiens
  CDR3 for beta chain variable domain of TCR clone 206058 (TRBV18, TRBJ2-5)
CASSPGVSKETQYF

SEQ ID NO: 412117 - protein, 16 aa, Homo sapiens
  CDR3 for alpha chain variable domain of TCR clone 206059 (TRAV30, TRAJ24)
CGTEIVDADSWGKFQF

SEQ ID NO: 412118 - protein, 16 aa, Homo sapiens
  CDR3 for beta chain variable domain of TCR clone 206059 (TRBV7-8, TRBJ2-1)
CASSLVGGGPYNEQFF

SEQ ID NO: 412119 - protein, 16 aa, Homo sapiens
  CDR3 for alpha chain variable domain of TCR clone 206060 (TRAV3, TRAJ37)
CAVRGKGSGNTGKLIF

SEQ ID NO: 412120 - protein, 13 aa, Homo sapiens
  CDR3 for beta chain variable domain of TCR clone 206060 (TRBV11-2, TRBJ2-5)
CASGHGAKETQYF

SEQ ID NO: 412121 - protein, 12 aa, Homo sapiens
  CDR3 for alpha chain variable domain of TCR clone 206061 (TRAV21, TRAJ13)
PGPSGGYQKVTF

SEQ ID NO: 412122 - protein, 17 aa, Homo sapiens
  CDR3 for beta chain variable domain of TCR clone 206061 (TRBV20-1, TRBJ2-7)
CSARDRVSGWTSSTSGR

SEQ ID NO: 412123 - protein, 11 aa, Homo sapiens
  CDR3 for alpha chain variable domain of TCR clone 206062 (TRAV21, TRAJ34)
CAVTNTDKLIF

SEQ ID NO: 412124 - protein, 14 aa, Homo sapiens
  CDR3 for beta chain variable domain of TCR clone 206062 (TRBV19, TRBJ2-1)
FASPTFVLSGEQFF

SEQ ID NO: 412125 - protein, 14 aa, Homo sapiens
  CDR3 for alpha chain variable domain of TCR clone 206063 (TRAV9-2, TRAJ39)
CALYIYNAGNMLTF

SEQ ID NO: 412126 - protein, 13 aa, Homo sapiens
  CDR3 for beta chain variable domain of TCR clone 206063 (TRBV13, TRBJ2-7)
CASSKGLTYEQYF

SEQ ID NO: 412127 - protein, 13 aa, Homo sapiens
  CDR3 for alpha chain variable domain of TCR clone 206064 (TRAV1-1, TRAJ31)
CASYLNNNARLMF

SEQ ID NO: 412128 - protein, 16 aa, Homo sapiens
  CDR3 for beta chain variable domain of TCR clone 206064 (TRBV6-1, TRBJ2-5)
CASSETLDRGAETQYF

SEQ ID NO: 412129 - protein, 17 aa, Homo sapiens
  CDR3 for alpha chain variable domain of TCR clone 206065 (TRAV3, TRAJ6)
CAVRDGPRAGGSYIPPF

SEQ ID NO: 412130 - protein, 14 aa, Homo sapiens
  CDR3 for beta chain variable domain of TCR clone 206065 (TRBV20-1, TRBJ2-7)
CSAKRGRSSYEQYF

SEQ ID NO: 412131 - protein, 11 aa, Homo sapiens
  CDR3 for alpha chain variable domain of TCR clone 206066 (TRAV2, TRAJ33)
CAVEGNYQLIW

SEQ ID NO: 412132 - protein, 15 aa, Homo sapiens
  CDR3 for beta chain variable domain of TCR clone 206066 (TRBV7-2, TRBJ2-2)
CASRRPGQNTGELFF

SEQ ID NO: 412133 - protein, 13 aa, Homo sapiens
  CDR3 for alpha chain variable domain of TCR clone 206067 (TRAV8-6, TRAJ49)
CAVITNTGNQFYS

SEQ ID NO: 412134 - protein, 13 aa, Homo sapiens
  CDR3 for beta chain variable domain of TCR clone 206067 (TRBV7-9, TRBJ1-2)
CASSLKQKYGYTF

SEQ ID NO: 412135 - protein, 14 aa, Homo sapiens
  CDR3 for alpha chain variable domain of TCR clone 206068 (TRAV26-1, TRAJ21)
CIAHTTSTNFTLDL

SEQ ID NO: 412136 - protein, 17 aa, Homo sapiens
  CDR3 for beta chain variable domain of TCR clone 206068 (TRBV20-1, TRBJ2-7)
CSARDRSLGWTSSTSGR

SEQ ID NO: 412137 - protein, 14 aa, Homo sapiens
  CDR3 for alpha chain variable domain of TCR clone 206069 (TRAV12-1, TRAJ6)
CVVPTSGGSYIPTF

SEQ ID NO: 412138 - protein, 16 aa, Homo sapiens
  CDR3 for beta chain variable domain of TCR clone 206069 (TRBV2, TRBJ2-7)
CASSEPWTGPSYEHYF

SEQ ID NO: 412139 - protein, 16 aa, Homo sapiens
  CDR3 for alpha chain variable domain of TCR clone 206070 (TRAV22, TRAJ45)
CAVERGKRGGANGLTF

SEQ ID NO: 412140 - protein, 11 aa, Homo sapiens
  CDR3 for beta chain variable domain of TCR clone 206070 (TRBV29-1, TRBJ2-5)
CSEDRTGTQYF

SEQ ID NO: 412141 - protein, 11 aa, Homo sapiens
  CDR3 for alpha chain variable domain of TCR clone 206071 (TRAV21, TRAJ34)
CAVTNTDKLIF

SEQ ID NO: 412142 - protein, 16 aa, Homo sapiens
  CDR3 for beta chain variable domain of TCR clone 206071 (TRBV25-1, TRBJ1-1)
CASSGDRDRGRIEAFF

SEQ ID NO: 412143 - protein, 14 aa, Homo sapiens
  CDR3 for alpha chain variable domain of TCR clone 206072 (TRAV12-2, TRAJ40)
CAVKIPSGTYKYIF

SEQ ID NO: 412144 - protein, 14 aa, Homo sapiens
  CDR3 for beta chain variable domain of TCR clone 206072 (TRBV20-1, TRBJ1-1)
GSAQTRIGGTEEFF

SEQ ID NO: 412145 - protein, 13 aa, Homo sapiens
  CDR3 for alpha chain variable domain of TCR clone 206073 (TRAV27, TRAJ41)
CAGEGNSGYALNF

SEQ ID NO: 412146 - protein, 15 aa, Homo sapiens
  CDR3 for beta chain variable domain of TCR clone 206073 (TRBV9, TRBJ1-6)
CASSVAGTGDSPLHV

SEQ ID NO: 412147 - protein, 16 aa, Homo sapiens
  CDR3 for alpha chain variable domain of TCR clone 206074 (TRAV3, TRAJ23)
CAVEPLIYNQGGKLIF

SEQ ID NO: 412148 - protein, 11 aa, Homo sapiens
  CDR3 for beta chain variable domain of TCR clone 206074 (TRBV12-4, TRBJ2-3)
CASTATDTQYF

SEQ ID NO: 412149 - protein, 14 aa, Homo sapiens
  CDR3 for alpha chain variable domain of TCR clone 206075 (TRAV29/DV5, TRAJ32)
CAAAYGGATNKLIL

SEQ ID NO: 412150 - protein, 13 aa, Homo sapiens
  CDR3 for beta chain variable domain of TCR clone 206075 (TRBV20-1, TRBJ1-1)
CSARVGGNTEAFF

SEQ ID NO: 412151 - protein, 15 aa, Homo sapiens
  CDR3 for alpha chain variable domain of TCR clone 206076 (TRAV26-1, TRAJ29)
CIARDEGSGNTPLVF

SEQ ID NO: 412152 - protein, 15 aa, Homo sapiens
  CDR3 for beta chain variable domain of TCR clone 206076 (TRBV19, TRBJ2-7)
CASSPAGSCEALRYF

SEQ ID NO: 412153 - protein, 12 aa, Homo sapiens
  CDR3 for alpha chain variable domain of TCR clone 206077 (TRAV13-1, TRAJ39)
SKYSNAGDRLTF

SEQ ID NO: 412154 - protein, 16 aa, Homo sapiens
  CDR3 for beta chain variable domain of TCR clone 206077 (TRBV12-4, TRBJ2-5)
CASSFFVRGRQETQYF

SEQ ID NO: 412155 - protein, 22 aa, Homo sapiens
  CDR3 for alpha chain variable domain of TCR clone 206078 (TRAV8-2, TRAJ45)
HLTKTSAHMSDAAEYSADGLTF

SEQ ID NO: 412156 - protein, 13 aa, Homo sapiens
  CDR3 for beta chain variable domain of TCR clone 206078 (TRBV7-3, TRBJ2-1)
CASSPVAYNEQFF

SEQ ID NO: 412157 - protein, 17 aa, Homo sapiens
  CDR3 for alpha chain variable domain of TCR clone 206079 (TRAV38-1, TRAJ45)
CAFMRSHSGGGADGLTF

SEQ ID NO: 412158 - protein, 15 aa, Homo sapiens
  CDR3 for beta chain variable domain of TCR clone 206079 (TRBV7-2, TRBJ2-3)
CASSLVVRGPETQYF

SEQ ID NO: 412159 - protein, 15 aa, Homo sapiens
  CDR3 for alpha chain variable domain of TCR clone 206080 (TRAV12-1, TRAJ9)
CVVSFGDTGGFKTIF

SEQ ID NO: 412160 - protein, 14 aa, Homo sapiens
  CDR3 for beta chain variable domain of TCR clone 206080 (TRBV5-1, TRBJ2-2)
CASSLGGGSGELFF

SEQ ID NO: 412161 - protein, 12 aa, Homo sapiens
  CDR3 for alpha chain variable domain of TCR clone 206081 (TRAV19, TRAJ26)
CSDLDYGQNFVF

SEQ ID NO: 412162 - protein, 14 aa, Homo sapiens
  CDR3 for beta chain variable domain of TCR clone 206081 (TRBV7-8, TRBJ2-3)
CASSLEAGTDTQYF

SEQ ID NO: 412163 - protein, 19 aa, Homo sapiens
  CDR3 for alpha chain variable domain of TCR clone 206082 (TRAV12-1, TRAJ42)
SVVQPPTSVKGGSQGNLIF

SEQ ID NO: 412164 - protein, 13 aa, Homo sapiens
  CDR3 for beta chain variable domain of TCR clone 206082 (TRBV7-3, TRBJ1-1)
CASSQDWGAEAFF

SEQ ID NO: 412165 - protein, 14 aa, Homo sapiens
  CDR3 for alpha chain variable domain of TCR clone 206083 (TRAV12-3, TRAJ22)
CAMGLFGSSRQLTF

SEQ ID NO: 412166 - protein, 11 aa, Homo sapiens
  CDR3 for beta chain variable domain of TCR clone 206083 (TRBV12-4, TRBJ2-2)
CASSYDGELFF

SEQ ID NO: 412167 - protein, 13 aa, Homo sapiens
  CDR3 for alpha chain variable domain of TCR clone 206084 (TRAV21, TRAJ56)
CAVRTGANSKLTF

SEQ ID NO: 412168 - protein, 15 aa, Homo sapiens
  CDR3 for beta chain variable domain of TCR clone 206084 (TRBV20-1, TRBJ2-7)
CSARDRVSGMDEQYF

SEQ ID NO: 412169 - protein, 13 aa, Homo sapiens
  CDR3 for alpha chain variable domain of TCR clone 206085 (TRAV24, TRAJ37)
CAFSPGNTGKLIL

SEQ ID NO: 412170 - protein, 15 aa, Homo sapiens
  CDR3 for beta chain variable domain of TCR clone 206085 (TRBV7-6, TRBJ2-5)
CASSKPTGPQETQYF

SEQ ID NO: 412171 - protein, 15 aa, Homo sapiens
  CDR3 for alpha chain variable domain of TCR clone 206086 (TRAV3, TRAJ22)
CAVRDLGGSARQLTF

SEQ ID NO: 412172 - protein, 15 aa, Homo sapiens
  CDR3 for beta chain variable domain of TCR clone 206086 (TRBV7-3, TRBJ2-2)
CASSETGQGTGELFF

SEQ ID NO: 412173 - protein, 13 aa, Homo sapiens
  CDR3 for alpha chain variable domain of TCR clone 206087 (TRAV3, TRAJ20)
CAVRPLNDYKLSF

SEQ ID NO: 412174 - protein, 12 aa, Homo sapiens
  CDR3 for beta chain variable domain of TCR clone 206087 (TRBV6-1, TRBJ2-1)
CATYGLNNEQFC

SEQ ID NO: 412175 - protein, 14 aa, Homo sapiens
  CDR3 for alpha chain variable domain of TCR clone 206088 (TRAV1-2, TRAJ6)
CAVSLSGGSYIHTF

SEQ ID NO: 412176 - protein, 15 aa, Homo sapiens
  CDR3 for beta chain variable domain of TCR clone 206088 (TRBV28, TRBJ2-7)
CASSPGGRGFYEKYF

SEQ ID NO: 412177 - protein, 14 aa, Homo sapiens
  CDR3 for alpha chain variable domain of TCR clone 206089 (TRAV12-3, TRAJ10)
SHLPLPGGGNKLTF

SEQ ID NO: 412178 - protein, 19 aa, Homo sapiens
  CDR3 for beta chain variable domain of TCR clone 206089 (TRBV25-1, TRBJ2-2)
CAILVYRVDRGRKTGELFS

SEQ ID NO: 412179 - protein, 12 aa, Homo sapiens
  CDR3 for alpha chain variable domain of TCR clone 206090 (TRAV3, TRAJ27)
CAVRDGAGQSTF

SEQ ID NO: 412180 - protein, 13 aa, Homo sapiens
  CDR3 for beta chain variable domain of TCR clone 206090 (TRBV10-3, TRBJ1-2)
CAINADLNYGYTF

SEQ ID NO: 412181 - protein, 11 aa, Homo sapiens
  CDR3 for alpha chain variable domain of TCR clone 206091 (TRAV12-2, TRAJ49)
CAVHTGNQFCF

SEQ ID NO: 412182 - protein, 15 aa, Homo sapiens
  CDR3 for beta chain variable domain of TCR clone 206091 (TRBV4-2, TRBJ1-1)
CASSQQGAGDTEAFF

SEQ ID NO: 412183 - protein, 14 aa, Homo sapiens
  CDR3 for alpha chain variable domain of TCR clone 206092 (TRAV12-3, TRAJ22)
CAMSLFGSARQLTF

SEQ ID NO: 412184 - protein, 15 aa, Homo sapiens
  CDR3 for beta chain variable domain of TCR clone 206092 (TRBV7-2, TRBJ1-2)
CASSPRAGWNYGYTF

SEQ ID NO: 412185 - protein, 15 aa, Homo sapiens
  CDR3 for alpha chain variable domain of TCR clone 206093 (TRAV12-2, TRAJ57)
CAVSRGQGGSEKLVF

SEQ ID NO: 412186 - protein, 16 aa, Homo sapiens
  CDR3 for beta chain variable domain of TCR clone 206093 (TRBV11-2, TRBJ2-7)
CASSPTTGGVSYEQYF

SEQ ID NO: 412187 - protein, 13 aa, Homo sapiens
  CDR3 for alpha chain variable domain of TCR clone 206094 (TRAV27, TRAJ41)
FAGEGNSGYAPNF

SEQ ID NO: 412188 - protein, 14 aa, Homo sapiens
  CDR3 for beta chain variable domain of TCR clone 206094 (TRBV7-2, TRBJ1-1)
CASSFLTGTTEAFF

SEQ ID NO: 412189 - protein, 13 aa, Homo sapiens
  CDR3 for alpha chain variable domain of TCR clone 206095 (TRAV8-1, TRAJ34)
FAVRPYNTDKLIF

SEQ ID NO: 412190 - protein, 15 aa, Homo sapiens
  CDR3 for beta chain variable domain of TCR clone 206095 (TRBV7-9, TRBJ1-3)
CASSLRSGSGNTIYF

SEQ ID NO: 412191 - protein, 11 aa, Homo sapiens
  CDR3 for alpha chain variable domain of TCR clone 206096 (TRAV29/DV5, TRAJ49)
CSAVPGNQFYF

SEQ ID NO: 412192 - protein, 13 aa, Homo sapiens
  CDR3 for beta chain variable domain of TCR clone 206096 (TRBV10-3, TRBJ2-7)
CASKLAVNYEQYF

SEQ ID NO: 412193 - protein, 15 aa, Homo sapiens
  CDR3 for alpha chain variable domain of TCR clone 206097 (TRAV29/DV5, TRAJ42)
CAAKTDGGSQGNLIL

SEQ ID NO: 412194 - protein, 12 aa, Homo sapiens
  CDR3 for beta chain variable domain of TCR clone 206097 (TRBV11-2, TRBJ2-1)
CASSPGNNEQFF

SEQ ID NO: 412195 - protein, 15 aa, Homo sapiens
  CDR3 for alpha chain variable domain of TCR clone 206098 (TRAV29/DV5, TRAJ53)
CAASASGGSNYKLAF

SEQ ID NO: 412196 - protein, 19 aa, Homo sapiens
  CDR3 for beta chain variable domain of TCR clone 206098 (TRBV5-1, TRBJ2-3)
CASSLWLAGGITTTDTQYF

SEQ ID NO: 412197 - protein, 16 aa, Homo sapiens
  CDR3 for alpha chain variable domain of TCR clone 206099 (TRAV30, TRAJ24)
CGTEIVDADSWAKFQF

SEQ ID NO: 412198 - protein, 20 aa, Homo sapiens
  CDR3 for beta chain variable domain of TCR clone 206099 (TRBV28, TRBJ2-1)
CASTPIGRSPGLAGGNEQFF

SEQ ID NO: 412199 - protein, 15 aa, Homo sapiens
  CDR3 for alpha chain variable domain of TCR clone 206100 (TRAV26-1, TRAJ44)
CIARVPFGTSSKLTF

SEQ ID NO: 412200 - protein, 17 aa, Homo sapiens
  CDR3 for beta chain variable domain of TCR clone 206100 (TRBV24-1, TRBJ2-4)
CATSDAEARGVRNIQYL

SEQ ID NO: 412201 - protein, 15 aa, Homo sapiens
  CDR3 for alpha chain variable domain of TCR clone 206101 (TRAV12-1, TRAJ45)
CVVISGGGGADGLTF

SEQ ID NO: 412202 - protein, 19 aa, Homo sapiens
  CDR3 for beta chain variable domain of TCR clone 206101 (TRBV28, TRBJ2-4)
CASSFQPGGPAHSKNIQYF

SEQ ID NO: 412203 - protein, 13 aa, Homo sapiens
  CDR3 for alpha chain variable domain of TCR clone 206102 (TRAV8-3, TRAJ28)
CAVGAVGSYQLTF

SEQ ID NO: 412204 - protein, 17 aa, Homo sapiens
  CDR3 for beta chain variable domain of TCR clone 206102 (TRBV11-2, TRBJ2-1)
CASSLYPPGVEYNERFF

SEQ ID NO: 412205 - protein, 13 aa, Homo sapiens
  CDR3 for alpha chain variable domain of TCR clone 206103 (TRAV17, TRAJ9)
CAADGTGGFKTIF

SEQ ID NO: 412206 - protein, 17 aa, Homo sapiens
  CDR3 for beta chain variable domain of TCR clone 206103 (TRBV6-5, TRBJ2-7)
CASSYSFWGQGSYEQYF

SEQ ID NO: 412207 - protein, 14 aa, Homo sapiens
  CDR3 for alpha chain variable domain of TCR clone 206104 (TRAV1-2, TRAJ16)
CAVNRFSDGQKLLS

SEQ ID NO: 412208 - protein, 15 aa, Homo sapiens
  CDR3 for beta chain variable domain of TCR clone 206104 (TRBV5-1, TRBJ2-1)
CASSPPRAPYNEQFF

SEQ ID NO: 412209 - protein, 13 aa, Homo sapiens
  CDR3 for alpha chain variable domain of TCR clone 206105 (TRAV21, TRAJ20)
CAVGLRVDYKLSF

SEQ ID NO: 412210 - protein, 15 aa, Homo sapiens
  CDR3 for beta chain variable domain of TCR clone 206105 (TRBV11-2, TRBJ2-2)
CASSSDRVNAGELFF

SEQ ID NO: 412211 - protein, 14 aa, Homo sapiens
  CDR3 for alpha chain variable domain of TCR clone 206106 (TRAV1-2, TRAJ16)
CAVNRFSDGQKPLF

SEQ ID NO: 412212 - protein, 13 aa, Homo sapiens
  CDR3 for beta chain variable domain of TCR clone 206106 (TRBV4-1, TRBJ2-1)
CASSQAGGDEQFF

SEQ ID NO: 412213 - protein, 13 aa, Homo sapiens
  CDR3 for alpha chain variable domain of TCR clone 206107 (TRAV3, TRAJ30)
CAVRDRGDDKIIF

SEQ ID NO: 412214 - protein, 16 aa, Homo sapiens
  CDR3 for beta chain variable domain of TCR clone 206107 (TRBV7-3, TRBJ2-2)
CASSLKRGTLSGELFF

SEQ ID NO: 412215 - protein, 13 aa, Homo sapiens
  CDR3 for alpha chain variable domain of TCR clone 206108 (TRAV8-3, TRAJ48)
CAVVPFGNEKLTF

SEQ ID NO: 412216 - protein, 14 aa, Homo sapiens
  CDR3 for beta chain variable domain of TCR clone 206108 (TRBV18, TRBJ2-7)
CASSPRGGAYEQYF

SEQ ID NO: 412217 - protein, 16 aa, Homo sapiens
  CDR3 for alpha chain variable domain of TCR clone 206109 (TRAV30, TRAJ24)
CGTEIVDADSWRKFPF

SEQ ID NO: 412218 - protein, 14 aa, Homo sapiens
  CDR3 for beta chain variable domain of TCR clone 206109 (TRBV12-5, TRBJ2-5)
CASGSRTHQETQYF

SEQ ID NO: 412219 - protein, 16 aa, Homo sapiens
  CDR3 for alpha chain variable domain of TCR clone 206110 (TRAV3, TRAJ10)
CAVRDMRAGGGNKLTF

SEQ ID NO: 412220 - protein, 11 aa, Homo sapiens
  CDR3 for beta chain variable domain of TCR clone 206110 (TRBV5-1, TRBJ2-5)
CASSYQETQYF

SEQ ID NO: 412221 - protein, 14 aa, Homo sapiens
  CDR3 for alpha chain variable domain of TCR clone 206111 (TRAV12-2, TRAJ17)
CAVLFKAAGNTLTF

SEQ ID NO: 412222 - protein, 15 aa, Homo sapiens
  CDR3 for beta chain variable domain of TCR clone 206111 (TRBV20-1, TRBJ2-7)
CSARDRVSGMDEQYF

SEQ ID NO: 412223 - protein, 12 aa, Homo sapiens
  CDR3 for alpha chain variable domain of TCR clone 206112 (TRAV2, TRAJ32)
CAVGGATNKLIF

SEQ ID NO: 412224 - protein, 16 aa, Homo sapiens
  CDR3 for beta chain variable domain of TCR clone 206112 (TRBV7-3, TRBJ2-1)
CASSLEGYRSYNEQFF

SEQ ID NO: 412225 - protein, 11 aa, Homo sapiens
  CDR3 for alpha chain variable domain of TCR clone 206113 (TRAV21, TRAJ11)
CAVNGYSTLTF

SEQ ID NO: 412226 - protein, 12 aa, Homo sapiens
  CDR3 for beta chain variable domain of TCR clone 206113 (TRBV27, TRBJ2-2)
CASKLFTGELFF

SEQ ID NO: 412227 - protein, 16 aa, Homo sapiens
  CDR3 for alpha chain variable domain of TCR clone 206114 (TRAV38-1, TRAJ37)
CAFKGDGSSNTGKLIF

SEQ ID NO: 412228 - protein, 13 aa, Homo sapiens
  CDR3 for beta chain variable domain of TCR clone 206114 (TRBV12-4, TRBJ2-5)
CSSSLFRRETQYF

SEQ ID NO: 412229 - protein, 10 aa, Homo sapiens
  CDR3 for alpha chain variable domain of TCR clone 206115 (TRAV21, TRAJ31)
CAVDNARLMF

SEQ ID NO: 412230 - protein, 13 aa, Homo sapiens
  CDR3 for beta chain variable domain of TCR clone 206115 (TRBV27, TRBJ2-7)
CASSLTTGYEQYF

SEQ ID NO: 412231 - protein, 14 aa, Homo sapiens
  CDR3 for alpha chain variable domain of TCR clone 206116 (TRAV2, TRAJ37)
CAVDFTSNTGKLIF

SEQ ID NO: 412232 - protein, 13 aa, Homo sapiens
  CDR3 for beta chain variable domain of TCR clone 206116 (TRBV25-1, TRBJ2-3)
CASSEWGTDTQYF

SEQ ID NO: 412233 - protein, 18 aa, Homo sapiens
  CDR3 for alpha chain variable domain of TCR clone 206117 (TRAV21, TRAJ52)
YAVRPSPAGGTSYGKLTF

SEQ ID NO: 412234 - protein, 14 aa, Homo sapiens
  CDR3 for beta chain variable domain of TCR clone 206117 (TRBV10-2, TRBJ1-5)
CASSSTGRNQPQHF

SEQ ID NO: 412235 - protein, 12 aa, Homo sapiens
  CDR3 for alpha chain variable domain of TCR clone 206118 (TRAV8-3, TRAJ20)
CAVGANDYKLSF

SEQ ID NO: 412236 - protein, 17 aa, Homo sapiens
  CDR3 for beta chain variable domain of TCR clone 206118 (TRBV13, TRBJ2-3)
CASSLSRVAGARNTQYF

SEQ ID NO: 412237 - protein, 16 aa, Homo sapiens
  CDR3 for alpha chain variable domain of TCR clone 206119 (TRAV3, TRAJ10)
CAVRDMRAGGGNKLTF

SEQ ID NO: 412238 - protein, 19 aa, Homo sapiens
  CDR3 for beta chain variable domain of TCR clone 206119 (TRBV6-3, TRBJ1-2)
CASSYSKGRTGPANYGYTF

SEQ ID NO: 412239 - protein, 13 aa, Homo sapiens
  CDR3 for alpha chain variable domain of TCR clone 206120 (TRAV1-2, TRAJ26)
CAVRPHYGQNFVF

SEQ ID NO: 412240 - protein, 14 aa, Homo sapiens
  CDR3 for beta chain variable domain of TCR clone 206120 (TRBV4-1, TRBJ2-5)
CASSQDLALETHYF

SEQ ID NO: 412241 - protein, 11 aa, Homo sapiens
  CDR3 for alpha chain variable domain of TCR clone 206121 (TRAV21, TRAJ11)
CAVNGYNTLTF

SEQ ID NO: 412242 - protein, 14 aa, Homo sapiens
  CDR3 for beta chain variable domain of TCR clone 206121 (TRBV19, TRBJ2-7)
CASNFRDTFTGMYF

SEQ ID NO: 412243 - protein, 15 aa, Homo sapiens
  CDR3 for alpha chain variable domain of TCR clone 206122 (TRAV4, TRAJ36)
CLVGDRQTGTNNLFF

SEQ ID NO: 412244 - protein, 15 aa, Homo sapiens
  CDR3 for beta chain variable domain of TCR clone 206122 (TRBV7-6, TRBJ2-1)
CASSSLAGEGNEQFF

SEQ ID NO: 412245 - protein, 14 aa, Homo sapiens
  CDR3 for alpha chain variable domain of TCR clone 206123 (TRAV26-1, TRAJ49)
CSVRLTNTGNQFYF

SEQ ID NO: 412246 - protein, 13 aa, Homo sapiens
  CDR3 for beta chain variable domain of TCR clone 206123 (TRBV4-1, TRBJ2-7)
CASSQGQAYEQYF

SEQ ID NO: 412247 - protein, 15 aa, Homo sapiens
  CDR3 for alpha chain variable domain of TCR clone 206124 (TRAV21, TRAJ13)
CAVRPTSGGYHKVTF

SEQ ID NO: 412248 - protein, 15 aa, Homo sapiens
  CDR3 for beta chain variable domain of TCR clone 206124 (TRBV28, TRBJ2-7)
CASSPGGRGFYEQYF

SEQ ID NO: 412249 - protein, 16 aa, Homo sapiens
  CDR3 for alpha chain variable domain of TCR clone 206125 (TRAV23/DV6, TRAJ9)
CAASIGGNTGGFKPIF

SEQ ID NO: 412250 - protein, 14 aa, Homo sapiens
  CDR3 for beta chain variable domain of TCR clone 206125 (TRBV9, TRBJ2-7)
CASSVGVGSYEQDF

SEQ ID NO: 412251 - protein, 13 aa, Homo sapiens
  CDR3 for alpha chain variable domain of TCR clone 206126 (TRAV12-2, TRAJ10)
CAVPTGGGNKLTF

SEQ ID NO: 412252 - protein, 14 aa, Homo sapiens
  CDR3 for beta chain variable domain of TCR clone 206126 (TRBV4-1, TRBJ2-7)
CASSPVAGGDEQYF

SEQ ID NO: 412253 - protein, 12 aa, Homo sapiens
  CDR3 for alpha chain variable domain of TCR clone 206127 (TRAV3, TRAJ20)
CALRDPDYKLSF

SEQ ID NO: 412254 - protein, 14 aa, Homo sapiens
  CDR3 for beta chain variable domain of TCR clone 206127 (TRBV7-2, TRBJ2-7)
CASSPKTSFYEQYF

SEQ ID NO: 412255 - protein, 12 aa, Homo sapiens
  CDR3 for alpha chain variable domain of TCR clone 206128 (TRAV12-2, TRAJ20)
CAVRPSDYKLSF

SEQ ID NO: 412256 - protein, 15 aa, Homo sapiens
  CDR3 for beta chain variable domain of TCR clone 206128 (TRBV19, TRBJ2-5)
CASHGLAGAQETQYF

SEQ ID NO: 412257 - protein, 15 aa, Homo sapiens
  CDR3 for alpha chain variable domain of TCR clone 206129 (TRAV8-3, TRAJ11)
FAVGLLNFGYSTLTF

SEQ ID NO: 412258 - protein, 16 aa, Homo sapiens
  CDR3 for beta chain variable domain of TCR clone 206129 (TRBV7-9, TRBJ1-2)
CASSLGFSSGEDGYTF

SEQ ID NO: 412259 - protein, 16 aa, Homo sapiens
  CDR3 for alpha chain variable domain of TCR clone 206130 (TRAV38-2/DV8, TRAJ47)
CAYRSAIMEYGNKLDF

SEQ ID NO: 412260 - protein, 14 aa, Homo sapiens
  CDR3 for beta chain variable domain of TCR clone 206130 (TRBV19, TRBJ2-7)
CASSIFAGTYEQYF

SEQ ID NO: 412261 - protein, 14 aa, Homo sapiens
  CDR3 for alpha chain variable domain of TCR clone 206131 (TRAV1-2, TRAJ16)
CAVNRLSDDQKLLF

SEQ ID NO: 412262 - protein, 16 aa, Homo sapiens
  CDR3 for beta chain variable domain of TCR clone 206131 (TRBV10-3, TRBJ2-7)
CAISADFAGRPYEQYF

SEQ ID NO: 412263 - protein, 18 aa, Homo sapiens
  CDR3 for alpha chain variable domain of TCR clone 206132 (TRAV8-3, TRAJ6)
CAVSAEHQEEATYLHLEE

SEQ ID NO: 412264 - protein, 14 aa, Homo sapiens
  CDR3 for beta chain variable domain of TCR clone 206132 (TRBV6-6, TRBJ2-7)
CASSDSGAGYEQYF

SEQ ID NO: 412265 - protein, 14 aa, Homo sapiens
  CDR3 for alpha chain variable domain of TCR clone 206133 (TRAV1-2, TRAJ8)
CAVREDTGFQQLVF

SEQ ID NO: 412266 - protein, 15 aa, Homo sapiens
  CDR3 for beta chain variable domain of TCR clone 206133 (TRBV19, TRBJ2-1)
CASSTGTSSYNEQFF

SEQ ID NO: 412267 - protein, 14 aa, Homo sapiens
  CDR3 for alpha chain variable domain of TCR clone 206134 (TRAV27, TRAJ33)
CAGPDVDSNYQLIW

SEQ ID NO: 412268 - protein, 15 aa, Homo sapiens
  CDR3 for beta chain variable domain of TCR clone 206134 (TRBV19, TRBJ2-1)
CASSRPGQNYNEQFF

SEQ ID NO: 412269 - protein, 12 aa, Homo sapiens
  CDR3 for alpha chain variable domain of TCR clone 206135 (TRAV17, TRAJ57)
CATDGGSEKLVF

SEQ ID NO: 412270 - protein, 13 aa, Homo sapiens
  CDR3 for beta chain variable domain of TCR clone 206135 (TRBV7-9, TRBJ2-7)
CASSFAGAYEQYC

SEQ ID NO: 412271 - protein, 13 aa, Homo sapiens
  CDR3 for alpha chain variable domain of TCR clone 206136 (TRAV8-4, TRAJ21)
CAVSEYNFNKFYF

SEQ ID NO: 412272 - protein, 11 aa, Homo sapiens
  CDR3 for beta chain variable domain of TCR clone 206136 (TRBV7-9, TRBJ1-5)
CSSSDQAPQHF

SEQ ID NO: 412273 - protein, 12 aa, Homo sapiens
  CDR3 for alpha chain variable domain of TCR clone 206137 (TRAV12-3, TRAJ20)
CAMVRGDYKLSF

SEQ ID NO: 412274 - protein, 14 aa, Homo sapiens
  CDR3 for beta chain variable domain of TCR clone 206137 (TRBV6-1, TRBJ2-7)
CASSDTPTSSTSGR

SEQ ID NO: 412275 - protein, 19 aa, Homo sapiens
  CDR3 for alpha chain variable domain of TCR clone 206138 (TRAV26-1, TRAJ52)
CIVRAHRNARDTSYGKLTF

SEQ ID NO: 412276 - protein, 15 aa, Homo sapiens
  CDR3 for beta chain variable domain of TCR clone 206138 (TRBV12-4, TRBJ2-5)
CASSPPTGLQETQYF

SEQ ID NO: 412277 - protein, 13 aa, Homo sapiens
  CDR3 for alpha chain variable domain of TCR clone 206139 (TRAV21, TRAJ27)
CAALNTNAGKSTF

SEQ ID NO: 412278 - protein, 20 aa, Homo sapiens
  CDR3 for beta chain variable domain of TCR clone 206139 (TRBV7-8, TRBJ2-2)
CASSHLFPGPTIQITGELFF

SEQ ID NO: 412279 - protein, 15 aa, Homo sapiens
  CDR3 for alpha chain variable domain of TCR clone 206140 (TRAV8-4, TRAJ3)
CAVAGENLVQQCFQD

SEQ ID NO: 412280 - protein, 16 aa, Homo sapiens
  CDR3 for beta chain variable domain of TCR clone 206140 (TRBV4-2, TRBJ1-1)
CASSQAGFGMNTEAFF

SEQ ID NO: 412281 - protein, 14 aa, Homo sapiens
  CDR3 for alpha chain variable domain of TCR clone 206141 (TRAV26-1, TRAJ38)
CIADNAGNNRQLIW

SEQ ID NO: 412282 - protein, 15 aa, Homo sapiens
  CDR3 for beta chain variable domain of TCR clone 206141 (TRBV7-6, TRBJ1-4)
CASSLGAGAGEKLFF

SEQ ID NO: 412283 - protein, 14 aa, Homo sapiens
  CDR3 for alpha chain variable domain of TCR clone 206142 (TRAV13-1, TRAJ35)
CAASKGGFGNVLHC

SEQ ID NO: 412284 - protein, 15 aa, Homo sapiens
  CDR3 for beta chain variable domain of TCR clone 206142 (TRBV20-1, TRBJ2-1)
CSARSPGGPGNEQFF

SEQ ID NO: 412285 - protein, 15 aa, Homo sapiens
  CDR3 for alpha chain variable domain of TCR clone 206143 (TRAV6, TRAJ13)
CALGGDSGGYQKVTF

SEQ ID NO: 412286 - protein, 14 aa, Homo sapiens
  CDR3 for beta chain variable domain of TCR clone 206143 (TRBV5-1, TRBJ2-3)
CASSRGQGGGTQYF

SEQ ID NO: 412287 - protein, 14 aa, Homo sapiens
  CDR3 for alpha chain variable domain of TCR clone 206144 (TRAV8-3, TRAJ34)
CAVGLWIYTDQLIF

SEQ ID NO: 412288 - protein, 13 aa, Homo sapiens
  CDR3 for beta chain variable domain of TCR clone 206144 (TRBV6-4, TRBJ2-3)
CASSVSWADTQYF

SEQ ID NO: 412289 - protein, 11 aa, Homo sapiens
  CDR3 for alpha chain variable domain of TCR clone 206145 (TRAV12-3, TRAJ43)
CAMSVSNDMRF

SEQ ID NO: 412290 - protein, 15 aa, Homo sapiens
  CDR3 for beta chain variable domain of TCR clone 206145 (TRBV12-5, TRBJ2-2)
CASGRLGGNTGELFF

SEQ ID NO: 412291 - protein, 16 aa, Homo sapiens
  CDR3 for alpha chain variable domain of TCR clone 206146 (TRAV8-3, TRAJ13)
CAVGAYPSGGYQKITF

SEQ ID NO: 412292 - protein, 15 aa, Homo sapiens
  CDR3 for beta chain variable domain of TCR clone 206146 (TRBV19, TRBJ1-5)
CASSIVWADNQPQHF

SEQ ID NO: 412293 - protein, 14 aa, Homo sapiens
  CDR3 for alpha chain variable domain of TCR clone 206147 (TRAV22, TRAJ6)
CAGVGPRGSYIPTF

SEQ ID NO: 412294 - protein, 11 aa, Homo sapiens
  CDR3 for beta chain variable domain of TCR clone 206147 (TRBV20-1, TRBJ2-1)
CSLSSGSEQFF

SEQ ID NO: 412295 - protein, 13 aa, Homo sapiens
  CDR3 for alpha chain variable domain of TCR clone 206148 (TRAV13-1, TRAJ39)
CSKYSNAGNILTF

SEQ ID NO: 412296 - protein, 18 aa, Homo sapiens
  CDR3 for beta chain variable domain of TCR clone 206148 (TRBV10-2, TRBJ2-2)
CISAPAVHRQADAGELFF

SEQ ID NO: 412297 - protein, 12 aa, Homo sapiens
  CDR3 for alpha chain variable domain of TCR clone 206149 (TRAV29/DV5, TRAJ15)
CASNQAGTALIF

SEQ ID NO: 412298 - protein, 13 aa, Homo sapiens
  CDR3 for beta chain variable domain of TCR clone 206149 (TRBV11-2, TRBJ2-1)
CASSLGLAGGRFF

SEQ ID NO: 412299 - protein, 22 aa, Homo sapiens
  CDR3 for alpha chain variable domain of TCR clone 206150 (TRAV4, )
CLGGRVKPNIQNPDPAVSQLRD

SEQ ID NO: 412300 - protein, 16 aa, Homo sapiens
  CDR3 for beta chain variable domain of TCR clone 206150 (TRBV6-6, TRBJ2-7)
CASIETGTNSSYEQYF

SEQ ID NO: 412301 - protein, 15 aa, Homo sapiens
  CDR3 for alpha chain variable domain of TCR clone 206151 (TRAV29/DV5, TRAJ42)
CAAKTDGESQGNLIF

SEQ ID NO: 412302 - protein, 15 aa, Homo sapiens
  CDR3 for beta chain variable domain of TCR clone 206151 (TRBV5-1, TRBJ2-2)
CASSSQGGNTGELFF

SEQ ID NO: 412303 - protein, 16 aa, Homo sapiens
  CDR3 for alpha chain variable domain of TCR clone 206152 (TRAV4, TRAJ22)
RLVGDLYSGSARQLTF

SEQ ID NO: 412304 - protein, 16 aa, Homo sapiens
  CDR3 for beta chain variable domain of TCR clone 206152 (TRBV7-9, TRBJ2-3)
CASSPWREVGTDTQYF

SEQ ID NO: 412305 - protein, 14 aa, Homo sapiens
  CDR3 for alpha chain variable domain of TCR clone 206153 (TRAV1-2, TRAJ16)
CAVNRFSDGQKLFF

SEQ ID NO: 412306 - protein, 13 aa, Homo sapiens
  CDR3 for beta chain variable domain of TCR clone 206153 (TRBV7-9, TRBJ2-2)
CASSTVLGRGSYF

SEQ ID NO: 412307 - protein, 14 aa, Homo sapiens
  CDR3 for alpha chain variable domain of TCR clone 206154 (TRAV12-2, TRAJ45)
CAVYSGGGADGLTF

SEQ ID NO: 412308 - protein, 17 aa, Homo sapiens
  CDR3 for beta chain variable domain of TCR clone 206154 (TRBV20-1, TRBJ2-2)
CSASGSGQCGLTGELFF

SEQ ID NO: 412309 - protein, 14 aa, Homo sapiens
  CDR3 for alpha chain variable domain of TCR clone 206155 (TRAV38-1, TRAJ45)
CAYYSGGGADGLTF

SEQ ID NO: 412310 - protein, 20 aa, Homo sapiens
  CDR3 for beta chain variable domain of TCR clone 206155 (TRBV28, TRBJ2-1)
CASTTIGRSPGLAGGNKQFF

SEQ ID NO: 412311 - protein, 13 aa, Homo sapiens
  CDR3 for alpha chain variable domain of TCR clone 206156 (TRAV21, TRAJ57)
CAVTQGGAEKLVF

SEQ ID NO: 412312 - protein, 16 aa, Homo sapiens
  CDR3 for beta chain variable domain of TCR clone 206156 (TRBV4-2, TRBJ2-3)
CASSQELAGDTDTQYF

SEQ ID NO: 412313 - protein, 14 aa, Homo sapiens
  CDR3 for alpha chain variable domain of TCR clone 206157 (TRAV12-2, TRAJ45)
CAVTIQGKAAGLTF

SEQ ID NO: 412314 - protein, 13 aa, Homo sapiens
  CDR3 for beta chain variable domain of TCR clone 206157 (TRBV9, TRBJ2-1)
CASSSDSYNEQFF

SEQ ID NO: 412315 - protein, 14 aa, Homo sapiens
  CDR3 for alpha chain variable domain of TCR clone 206158 (TRAV9-2, TRAJ39)
CALYIYNAGNMLTF

SEQ ID NO: 412316 - protein, 13 aa, Homo sapiens
  CDR3 for beta chain variable domain of TCR clone 206158 (TRBV4-1, TRBJ2-2)
CASSQANTGELFF

SEQ ID NO: 412317 - protein, 13 aa, Homo sapiens
  CDR3 for alpha chain variable domain of TCR clone 206159 (TRAV8-2, TRAJ43)
SVVSDQGDNDMRF

SEQ ID NO: 412318 - protein, 12 aa, Homo sapiens
  CDR3 for beta chain variable domain of TCR clone 206159 (TRBV7-9, TRBJ2-7)
CASRTGFDEQYF

SEQ ID NO: 412319 - protein, 14 aa, Homo sapiens
  CDR3 for alpha chain variable domain of TCR clone 206160 (TRAV1-2, TRAJ8)
CAVREDTGFQKLVF

SEQ ID NO: 412320 - protein, 11 aa, Homo sapiens
  CDR3 for beta chain variable domain of TCR clone 206160 (TRBV11-3, TRBJ2-7)
CAISRTYEQYF

SEQ ID NO: 412321 - protein, 10 aa, Homo sapiens
  CDR3 for alpha chain variable domain of TCR clone 206161 (TRAV12-1, TRAJ37)
ARGNTGKLIF

SEQ ID NO: 412322 - protein, 11 aa, Homo sapiens
  CDR3 for beta chain variable domain of TCR clone 206161 (TRBV29-1, TRBJ2-5)
CSEDRTGTQYF

SEQ ID NO: 412323 - protein, 12 aa, Homo sapiens
  CDR3 for alpha chain variable domain of TCR clone 206162 (TRAV20, TRAJ39)
CAVGNAGNMLTF

SEQ ID NO: 412324 - protein, 11 aa, Homo sapiens
  CDR3 for beta chain variable domain of TCR clone 206162 (TRBV13, TRBJ2-3)
CASGNADTQYF

SEQ ID NO: 412325 - protein, 15 aa, Homo sapiens
  CDR3 for alpha chain variable domain of TCR clone 206163 (TRAV3, TRAJ5)
CAVRDLDTGRRALTF

SEQ ID NO: 412326 - protein, 14 aa, Homo sapiens
  CDR3 for beta chain variable domain of TCR clone 206163 (TRBV19, TRBJ2-1)
CASSRLASINEQFF

SEQ ID NO: 412327 - protein, 14 aa, Homo sapiens
  CDR3 for alpha chain variable domain of TCR clone 206164 (TRAV13-1, TRAJ44)
CAAKATGTAGKLTF

SEQ ID NO: 412328 - protein, 15 aa, Homo sapiens
  CDR3 for beta chain variable domain of TCR clone 206164 (TRBV4-3, TRBJ1-1)
CASSQELGRGTEAFF

SEQ ID NO: 412329 - protein, 12 aa, Homo sapiens
  CDR3 for alpha chain variable domain of TCR clone 206165 (TRAV13-1, TRAJ11)
CAGPSGYSTLTF

SEQ ID NO: 412330 - protein, 14 aa, Homo sapiens
  CDR3 for beta chain variable domain of TCR clone 206165 (TRBV4-1, TRBJ2-2)
CASSQAVNTGELFF

SEQ ID NO: 412331 - protein, 15 aa, Homo sapiens
  CDR3 for alpha chain variable domain of TCR clone 206166 (TRAV35, TRAJ58)
CAGRRQETSGSRLTF

SEQ ID NO: 412332 - protein, 13 aa, Homo sapiens
  CDR3 for beta chain variable domain of TCR clone 206166 (TRBV19, TRBJ2-2)
CAASGRNTGELFF

SEQ ID NO: 412333 - protein, 16 aa, Homo sapiens
  CDR3 for alpha chain variable domain of TCR clone 206167 (TRAV30, TRAJ24)
CGTEIVDADSWGKFQF

SEQ ID NO: 412334 - protein, 16 aa, Homo sapiens
  CDR3 for beta chain variable domain of TCR clone 206167 (TRBV2, TRBJ2-6)
CASSETGGSGANVLTF

SEQ ID NO: 412335 - protein, 14 aa, Homo sapiens
  CDR3 for alpha chain variable domain of TCR clone 206168 (TRAV1-2, TRAJ8)
CAVREDTGLQKLVF

SEQ ID NO: 412336 - protein, 15 aa, Homo sapiens
  CDR3 for beta chain variable domain of TCR clone 206168 (TRBV6-3, TRBJ2-7)
CASNSPGTVFYEQYF

SEQ ID NO: 412337 - protein, 14 aa, Homo sapiens
  CDR3 for alpha chain variable domain of TCR clone 206169 (TRAV12-2, TRAJ36)
CAVKISTGANNLFF

SEQ ID NO: 412338 - protein, 14 aa, Homo sapiens
  CDR3 for beta chain variable domain of TCR clone 206169 (TRBV25-1, TRBJ1-2)
CASSDATGVVGDTF

SEQ ID NO: 412339 - protein, 14 aa, Homo sapiens
  CDR3 for alpha chain variable domain of TCR clone 206170 (TRAV16, TRAJ8)
SALLLNTGFQKLVF

SEQ ID NO: 412340 - protein, 15 aa, Homo sapiens
  CDR3 for beta chain variable domain of TCR clone 206170 (TRBV7-7, TRBJ2-2)
CATSKLAKNTGELFF

SEQ ID NO: 412341 - protein, 13 aa, Homo sapiens
  CDR3 for alpha chain variable domain of TCR clone 206171 (TRAV12-3, TRAJ5)
CAMIYTGRRALTF

SEQ ID NO: 412342 - protein, 15 aa, Homo sapiens
  CDR3 for beta chain variable domain of TCR clone 206171 (TRBV11-2, TRBJ2-1)
CASSSPSTRYNEQFF

SEQ ID NO: 412343 - protein, 11 aa, Homo sapiens
  CDR3 for alpha chain variable domain of TCR clone 206172 (TRAV3, TRAJ21)
CAVGNFNKFYF

SEQ ID NO: 412344 - protein, 15 aa, Homo sapiens
  CDR3 for beta chain variable domain of TCR clone 206172 (TRBV11-2, TRBJ1-2)
CASSLEGVQRNGYTF

SEQ ID NO: 412345 - protein, 12 aa, Homo sapiens
  CDR3 for alpha chain variable domain of TCR clone 206173 (TRAV12-3, TRAJ17)
CAMTLTGNKLTI

SEQ ID NO: 412346 - protein, 15 aa, Homo sapiens
  CDR3 for beta chain variable domain of TCR clone 206173 (TRBV19, TRBJ2-5)
CASHGLAGAQETQYF

SEQ ID NO: 412347 - protein, 12 aa, Homo sapiens
  CDR3 for alpha chain variable domain of TCR clone 206174 (TRAV12-3, TRAJ17)
CAMTLTGNKLTF

SEQ ID NO: 412348 - protein, 15 aa, Homo sapiens
  CDR3 for beta chain variable domain of TCR clone 206174 (TRBV28, TRBJ2-3)
CSSSPDRQGANTQYF

SEQ ID NO: 412349 - protein, 12 aa, Homo sapiens
  CDR3 for alpha chain variable domain of TCR clone 206175 (TRAV21, TRAJ33)
CAKMDSNYPLIW

SEQ ID NO: 412350 - protein, 14 aa, Homo sapiens
  CDR3 for beta chain variable domain of TCR clone 206175 (TRBV2, TRBJ2-7)
CASSLTSGGYEHYF

SEQ ID NO: 412351 - protein, 12 aa, Homo sapiens
  CDR3 for alpha chain variable domain of TCR clone 206176 (TRAV17, TRAJ57)
CATDGGSEKLVF

SEQ ID NO: 412352 - protein, 15 aa, Homo sapiens
  CDR3 for beta chain variable domain of TCR clone 206176 (TRBV6-5, TRBJ1-2)
CASSYSPGQGNGYTF

SEQ ID NO: 412353 - protein, 15 aa, Homo sapiens
  CDR3 for alpha chain variable domain of TCR clone 206177 (TRAV21, TRAJ24)
CAARSSTDSWGKFQF

SEQ ID NO: 412354 - protein, 13 aa, Homo sapiens
  CDR3 for beta chain variable domain of TCR clone 206177 (TRBV10-3, TRBJ2-7)
CASKLAVNYEQYF

SEQ ID NO: 412355 - protein, 14 aa, Homo sapiens
  CDR3 for alpha chain variable domain of TCR clone 206178 (TRAV3, TRAJ22)
CAVKDYGSARQLTF

SEQ ID NO: 412356 - protein, 13 aa, Homo sapiens
  CDR3 for beta chain variable domain of TCR clone 206178 (TRBV11-2, TRBJ2-5)
CASGHGAKETQYF

SEQ ID NO: 412357 - protein, 14 aa, Homo sapiens
  CDR3 for alpha chain variable domain of TCR clone 206179 (TRAV12-2, TRAJ13)
CAVKKTGGYQKVTF

SEQ ID NO: 412358 - protein, 17 aa, Homo sapiens
  CDR3 for beta chain variable domain of TCR clone 206179 (TRBV15, TRBJ2-4)
CATSRSNPQTGLDIQYF

SEQ ID NO: 412359 - protein, 11 aa, Homo sapiens
  CDR3 for alpha chain variable domain of TCR clone 206180 (TRAV2, TRAJ33)
CAVESNYQLIW

SEQ ID NO: 412360 - protein, 14 aa, Homo sapiens
  CDR3 for beta chain variable domain of TCR clone 206180 (TRBV7-2, TRBJ2-7)
CASSLYPGRYEQYF

SEQ ID NO: 412361 - protein, 19 aa, Homo sapiens
  CDR3 for alpha chain variable domain of TCR clone 206181 (TRAV13-1, TRAJ52)
CAASSSPNAGGTSYGKPTF

SEQ ID NO: 412362 - protein, 15 aa, Homo sapiens
  CDR3 for beta chain variable domain of TCR clone 206181 (TRBV9, TRBJ1-6)
CASSTGGGVDSPLHF

SEQ ID NO: 412363 - protein, 13 aa, Homo sapiens
  CDR3 for alpha chain variable domain of TCR clone 206182 (TRAV4, TRAJ31)
CLVYRNNNARLMF

SEQ ID NO: 412364 - protein, 15 aa, Homo sapiens
  CDR3 for beta chain variable domain of TCR clone 206182 (TRBV19, TRBJ2-1)
CASSSPGVPLDEQFF

SEQ ID NO: 412365 - protein, 13 aa, Homo sapiens
  CDR3 for alpha chain variable domain of TCR clone 206183 (TRAV13-2, TRAJ40)
CAETLSGTYKYIF

SEQ ID NO: 412366 - protein, 16 aa, Homo sapiens
  CDR3 for beta chain variable domain of TCR clone 206183 (TRBV20-1, TRBJ2-1)
CSARDFSGRNGDEQFF

SEQ ID NO: 412367 - protein, 15 aa, Homo sapiens
  CDR3 for alpha chain variable domain of TCR clone 206184 (TRAV20, TRAJ58)
CAVQDLETSGSRLTF

SEQ ID NO: 412368 - protein, 11 aa, Homo sapiens
  CDR3 for beta chain variable domain of TCR clone 206184 (TRBV19, TRBJ2-7)
CASGNSYEQYF

SEQ ID NO: 412369 - protein, 16 aa, Homo sapiens
  CDR3 for alpha chain variable domain of TCR clone 206185 (TRAV21, TRAJ33)
CAVSPASLDSNNQLIW

SEQ ID NO: 412370 - protein, 17 aa, Homo sapiens
  CDR3 for beta chain variable domain of TCR clone 206185 (TRBV2, TRBJ1-4)
CASSKRELTQGEEKLFF

SEQ ID NO: 412371 - protein, 14 aa, Homo sapiens
  CDR3 for alpha chain variable domain of TCR clone 206186 (TRAV8-4, TRAJ54)
CVVSGVLGAQKLVF

SEQ ID NO: 412372 - protein, 13 aa, Homo sapiens
  CDR3 for beta chain variable domain of TCR clone 206186 (TRBV27, TRBJ2-7)
CASSFVSSYEQYF

SEQ ID NO: 412373 - protein, 13 aa, Homo sapiens
  CDR3 for alpha chain variable domain of TCR clone 206187 (TRAV17, TRAJ5)
CATGDTGRRALTF

SEQ ID NO: 412374 - protein, 21 aa, Homo sapiens
  CDR3 for beta chain variable domain of TCR clone 206187 (TRBV7-3, TRBJ2-1)
GGTQPCISVPAAGRSYNEQFF

SEQ ID NO: 412375 - protein, 15 aa, Homo sapiens
  CDR3 for alpha chain variable domain of TCR clone 206188 (TRAV3, TRAJ7)
CAVRDKDNGNNRLAF

SEQ ID NO: 412376 - protein, 14 aa, Homo sapiens
  CDR3 for beta chain variable domain of TCR clone 206188 (TRBV12-5, TRBJ2-5)
CASGSRTHQETQYF

SEQ ID NO: 412377 - protein, 13 aa, Homo sapiens
  CDR3 for alpha chain variable domain of TCR clone 206189 (TRAV17, TRAJ9)
CATDYTGGFKTIF

SEQ ID NO: 412378 - protein, 14 aa, Homo sapiens
  CDR3 for beta chain variable domain of TCR clone 206189 (TRBV20-1, TRBJ1-1)
CSAMGGTANTEAFF

SEQ ID NO: 412379 - protein, 13 aa, Homo sapiens
  CDR3 for alpha chain variable domain of TCR clone 206190 (TRAV12-2, TRAJ50)
CAVIVTSYDKVIF

SEQ ID NO: 412380 - protein, 14 aa, Homo sapiens
  CDR3 for beta chain variable domain of TCR clone 206190 (TRBV7-2, TRBJ2-7)
CASSPKTSFYEQYF

SEQ ID NO: 412381 - protein, 12 aa, Homo sapiens
  CDR3 for alpha chain variable domain of TCR clone 206191 (TRAV13-1, TRAJ21)
CSAKEGFNKFYF

SEQ ID NO: 412382 - protein, 17 aa, Homo sapiens
  CDR3 for beta chain variable domain of TCR clone 206191 (TRBV19, TRBJ2-7)
CASSISFYDSYPYEQYF

SEQ ID NO: 412383 - protein, 15 aa, Homo sapiens
  CDR3 for alpha chain variable domain of TCR clone 206192 (TRAV17, TRAJ16)
CATALRFSDGQKLLF

SEQ ID NO: 412384 - protein, 15 aa, Homo sapiens
  CDR3 for beta chain variable domain of TCR clone 206192 (TRBV4-1, TRBJ2-1)
CASSQDAGGLYEQFF

SEQ ID NO: 412385 - protein, 14 aa, Homo sapiens
  CDR3 for alpha chain variable domain of TCR clone 206193 (TRAV13-1, TRAJ35)
CAASKGGFGNVLHC

SEQ ID NO: 412386 - protein, 17 aa, Homo sapiens
  CDR3 for beta chain variable domain of TCR clone 206193 (TRBV7-3, TRBJ2-2)
CASSPRTSGGSAGELFF

SEQ ID NO: 412387 - protein, 20 aa, Homo sapiens
  CDR3 for alpha chain variable domain of TCR clone 206194 (TRAV12-1, TRAJ42)
SSVIQPPTSVKGGSQGNLIF

SEQ ID NO: 412388 - protein, 15 aa, Homo sapiens
  CDR3 for beta chain variable domain of TCR clone 206194 (TRBV19, TRBJ1-6)
CASSTQGAVGSPLHF

SEQ ID NO: 412389 - protein, 15 aa, Homo sapiens
  CDR3 for alpha chain variable domain of TCR clone 206195 (TRAV16, TRAJ53)
CALIDSGGSNYKLTF

SEQ ID NO: 412390 - protein, 14 aa, Homo sapiens
  CDR3 for beta chain variable domain of TCR clone 206195 (TRBV19, TRBJ2-1)
CASPTFVLSGEQFF

SEQ ID NO: 412391 - protein, 13 aa, Homo sapiens
  CDR3 for alpha chain variable domain of TCR clone 206196 (TRAV29/DV5, TRAJ48)
CASSSFGNENLTF

SEQ ID NO: 412392 - protein, 14 aa, Homo sapiens
  CDR3 for beta chain variable domain of TCR clone 206196 (TRBV3-1, TRBJ2-2)
CASSQDWVQGELFF

SEQ ID NO: 412393 - protein, 12 aa, Homo sapiens
  CDR3 for alpha chain variable domain of TCR clone 206197 (TRAV13-2, TRAJ23)
CAERHRGGKLIF

SEQ ID NO: 412394 - protein, 13 aa, Homo sapiens
  CDR3 for beta chain variable domain of TCR clone 206197 (TRBV5-5, TRBJ2-7)
CASSLIGDYEQYF

SEQ ID NO: 412395 - protein, 15 aa, Homo sapiens
  CDR3 for alpha chain variable domain of TCR clone 206198 (TRAV17, TRAJ56)
CATDLGTGANSKLTF

SEQ ID NO: 412396 - protein, 13 aa, Homo sapiens
  CDR3 for beta chain variable domain of TCR clone 206198 (TRBV7-9, TRBJ1-1)
CASSLAGVTEAFF

SEQ ID NO: 412397 - protein, 12 aa, Homo sapiens
  CDR3 for alpha chain variable domain of TCR clone 206199 (TRAV13-1, TRAJ20)
CAARMGDYKLSF

SEQ ID NO: 412398 - protein, 15 aa, Homo sapiens
  CDR3 for beta chain variable domain of TCR clone 206199 (TRBV11-3, TRBJ2-3)
CASNGGLDSTDTQYF

SEQ ID NO: 412399 - protein, 14 aa, Homo sapiens
  CDR3 for alpha chain variable domain of TCR clone 206200 (TRAV12-2, TRAJ13)
SAVKKTGGYQEVTF

SEQ ID NO: 412400 - protein, 15 aa, Homo sapiens
  CDR3 for beta chain variable domain of TCR clone 206200 (TRBV27, TRBJ2-1)
CASSNGGGSSNEQFF

SEQ ID NO: 412401 - protein, 17 aa, Homo sapiens
  CDR3 for alpha chain variable domain of TCR clone 206201 (TRAV35, TRAJ52)
CAGQLAAGGTSYGNLTF

SEQ ID NO: 412402 - protein, 12 aa, Homo sapiens
  CDR3 for beta chain variable domain of TCR clone 206201 (TRBV20-1, TRBJ2-7)
CSAGRRQSEQYF

SEQ ID NO: 412403 - protein, 14 aa, Homo sapiens
  CDR3 for alpha chain variable domain of TCR clone 206202 (TRAV17, TRAJ16)
CATADFSDGQKLLF

SEQ ID NO: 412404 - protein, 12 aa, Homo sapiens
  CDR3 for beta chain variable domain of TCR clone 206202 (TRBV24-1, TRBJ1-1)
CTTLYPDTEAFF

SEQ ID NO: 412405 - protein, 16 aa, Homo sapiens
  CDR3 for alpha chain variable domain of TCR clone 206203 (TRAV22, TRAJ45)
CAVERGKRGGADGLTF

SEQ ID NO: 412406 - protein, 13 aa, Homo sapiens
  CDR3 for beta chain variable domain of TCR clone 206203 (TRBV19, TRBJ2-1)
CATSRGVYNEQFF

SEQ ID NO: 412407 - protein, 12 aa, Homo sapiens
  CDR3 for alpha chain variable domain of TCR clone 206204 (TRAV12-2, TRAJ10)
WGVTGGGNKPTF

SEQ ID NO: 412408 - protein, 14 aa, Homo sapiens
  CDR3 for beta chain variable domain of TCR clone 206204 (TRBV19, TRBJ2-3)
CASSAPRGTDTQYF

SEQ ID NO: 412409 - protein, 14 aa, Homo sapiens
  CDR3 for alpha chain variable domain of TCR clone 206205 (TRAV1-2, TRAJ16)
CAVNRLSDGQKLLF

SEQ ID NO: 412410 - protein, 11 aa, Homo sapiens
  CDR3 for beta chain variable domain of TCR clone 206205 (TRBV12-4, TRBJ2-3)
CASTATDTQYF

SEQ ID NO: 412411 - protein, 12 aa, Homo sapiens
  CDR3 for alpha chain variable domain of TCR clone 206206 (TRAV21, TRAJ11)
CAVRGGNSTLTF

SEQ ID NO: 412412 - protein, 15 aa, Homo sapiens
  CDR3 for beta chain variable domain of TCR clone 206206 (TRBV6-1, TRBJ2-7)
CASSERIAATTEQYF

SEQ ID NO: 412413 - protein, 14 aa, Homo sapiens
  CDR3 for alpha chain variable domain of TCR clone 206207 (TRAV12-1, TRAJ43)
CVVNGRSNNNDMRF

SEQ ID NO: 412414 - protein, 15 aa, Homo sapiens
  CDR3 for beta chain variable domain of TCR clone 206207 (TRBV6-3, TRBJ2-7)
CASSSPGTVFYEQYF

SEQ ID NO: 412415 - protein, 11 aa, Homo sapiens
  CDR3 for alpha chain variable domain of TCR clone 206208 (TRAV3, TRAJ17)
PRGAAGNKLTF

SEQ ID NO: 412416 - protein, 12 aa, Homo sapiens
  CDR3 for beta chain variable domain of TCR clone 206208 (TRBV28, TRBJ2-7)
CASSFSSYEQYF

SEQ ID NO: 412417 - protein, 15 aa, Homo sapiens
  CDR3 for alpha chain variable domain of TCR clone 206209 (TRAV13-1, TRAJ17)
CAASIHGGCRQQANF

SEQ ID NO: 412418 - protein, 14 aa, Homo sapiens
  CDR3 for beta chain variable domain of TCR clone 206209 (TRBV20-1, TRBJ2-4)
RSARDRGQGGIQYF

SEQ ID NO: 412419 - protein, 14 aa, Homo sapiens
  CDR3 for alpha chain variable domain of TCR clone 206210 (TRAV13-1, TRAJ36)
CAAIYQTGANNLFF

SEQ ID NO: 412420 - protein, 15 aa, Homo sapiens
  CDR3 for beta chain variable domain of TCR clone 206210 (TRBV5-4, TRBJ1-4)
CASSHGDGENEKLFF

SEQ ID NO: 412421 - protein, 11 aa, Homo sapiens
  CDR3 for alpha chain variable domain of TCR clone 206211 (TRAV13-1, TRAJ15)
CAATPGTALTF

SEQ ID NO: 412422 - protein, 13 aa, Homo sapiens
  CDR3 for beta chain variable domain of TCR clone 206211 (TRBV7-2, TRBJ2-1)
CASSLGVYNAQFF

SEQ ID NO: 412423 - protein, 12 aa, Homo sapiens
  CDR3 for alpha chain variable domain of TCR clone 206212 (TRAV21, TRAJ11)
CAVRGGNSTLTF

SEQ ID NO: 412424 - protein, 15 aa, Homo sapiens
  CDR3 for beta chain variable domain of TCR clone 206212 (TRBV6-1, TRBJ2-7)
CDSSEPIAATTEQYF

SEQ ID NO: 412425 - protein, 17 aa, Homo sapiens
  CDR3 for alpha chain variable domain of TCR clone 206213 (TRAV13-1, TRAJ31)
CAPRDRLMFGDGTQLLV

SEQ ID NO: 412426 - protein, 13 aa, Homo sapiens
  CDR3 for beta chain variable domain of TCR clone 206213 (TRBV7-3, TRBJ1-1)
CASSLTQGTEAFF

SEQ ID NO: 412427 - protein, 23 aa, Homo sapiens
  CDR3 for alpha chain variable domain of TCR clone 206214 (TRAV26-1, TRAJ38)
CIADSAGNNRIQNPDPAVYQLRD

SEQ ID NO: 412428 - protein, 13 aa, Homo sapiens
  CDR3 for beta chain variable domain of TCR clone 206214 (TRBV20-1, TRBJ2-1)
CSARSSPRDEQFF

SEQ ID NO: 412429 - protein, 14 aa, Homo sapiens
  CDR3 for alpha chain variable domain of TCR clone 206215 (TRAV12-2, TRAJ45)
CALPESGGADGLTF

SEQ ID NO: 412430 - protein, 16 aa, Homo sapiens
  CDR3 for beta chain variable domain of TCR clone 206215 (TRBV27, TRBJ2-7)
CASSSERRDSAYEQYF

SEQ ID NO: 412431 - protein, 11 aa, Homo sapiens
  CDR3 for alpha chain variable domain of TCR clone 206216 (TRAV2, TRAJ33)
CAVESNYQLIW

SEQ ID NO: 412432 - protein, 12 aa, Homo sapiens
  CDR3 for beta chain variable domain of TCR clone 206216 (TRBV11-2, TRBJ2-2)
CPSSLGGGELFF

SEQ ID NO: 412433 - protein, 14 aa, Homo sapiens
  CDR3 for alpha chain variable domain of TCR clone 206217 (TRAV13-1, TRAJ23)
CAASRLGRGGKLIF

SEQ ID NO: 412434 - protein, 13 aa, Homo sapiens
  CDR3 for beta chain variable domain of TCR clone 206217 (TRBV20-1, TRBJ1-1)
CSGPLGGGTGAFF

SEQ ID NO: 412435 - protein, 10 aa, Homo sapiens
  CDR3 for alpha chain variable domain of TCR clone 206218 (TRAV12-2, TRAJ10)
CAAWTGVETH

SEQ ID NO: 412436 - protein, 17 aa, Homo sapiens
  CDR3 for beta chain variable domain of TCR clone 206218 (TRBV7-8, TRBJ2-6)
CASSAGTGGAGANVLTF

SEQ ID NO: 412437 - protein, 13 aa, Homo sapiens
  CDR3 for alpha chain variable domain of TCR clone 206219 (TRAV12-1, TRAJ7)
CVVNMRGNNRLAF

SEQ ID NO: 412438 - protein, 14 aa, Homo sapiens
  CDR3 for beta chain variable domain of TCR clone 206219 (TRBV7-9, TRBJ2-7)
CASSLAPSLGEQYF

SEQ ID NO: 412439 - protein, 13 aa, Homo sapiens
  CDR3 for alpha chain variable domain of TCR clone 206220 (TRAV12-3, TRAJ35)
CAMAIGFGHVLHC

SEQ ID NO: 412440 - protein, 15 aa, Homo sapiens
  CDR3 for beta chain variable domain of TCR clone 206220 (TRBV20-1, TRBJ2-1)
CSARGSGTYYNEQFF

SEQ ID NO: 412441 - protein, 14 aa, Homo sapiens
  CDR3 for alpha chain variable domain of TCR clone 206221 (TRAV13-1, TRAJ10)
CAAKEPGGGNKLTV

SEQ ID NO: 412442 - protein, 14 aa, Homo sapiens
  CDR3 for beta chain variable domain of TCR clone 206221 (TRBV20-1, TRBJ1-1)
CSAQTRIGGTEAFF

SEQ ID NO: 412443 - protein, 14 aa, Homo sapiens
  CDR3 for alpha chain variable domain of TCR clone 206222 (TRAV12-3, TRAJ57)
CAMSAWGGSEKLVF

SEQ ID NO: 412444 - protein, 16 aa, Homo sapiens
  CDR3 for beta chain variable domain of TCR clone 206222 (TRBV7-3, TRBJ2-2)
CASSLKRGTVSGELFF

SEQ ID NO: 412445 - protein, 13 aa, Homo sapiens
  CDR3 for alpha chain variable domain of TCR clone 206223 (TRAV6, TRAJ4)
CALLRGGYNKLIF

SEQ ID NO: 412446 - protein, 15 aa, Homo sapiens
  CDR3 for beta chain variable domain of TCR clone 206223 (TRBV7-9, TRBJ2-1)
CASSLGWGRANEQFF

SEQ ID NO: 412447 - protein, 12 aa, Homo sapiens
  CDR3 for alpha chain variable domain of TCR clone 206224 (TRAV10, TRAJ43)
CVVVRVGKDMRF

SEQ ID NO: 412448 - protein, 15 aa, Homo sapiens
  CDR3 for beta chain variable domain of TCR clone 206224 (TRBV2, TRBJ2-7)
CASSEGLARSYEQYF

SEQ ID NO: 412449 - protein, 14 aa, Homo sapiens
  CDR3 for alpha chain variable domain of TCR clone 206225 (TRAV14/DV4, TRAJ41)
CARGGPDSGYALNF

SEQ ID NO: 412450 - protein, 13 aa, Homo sapiens
  CDR3 for beta chain variable domain of TCR clone 206225 (TRBV7-2, TRBJ2-2)
CASSLAVTGELFF

SEQ ID NO: 412451 - protein, 15 aa, Homo sapiens
  CDR3 for alpha chain variable domain of TCR clone 206226 (TRAV17, TRAJ4)
CATGTWSGGYNKLIF

SEQ ID NO: 412452 - protein, 20 aa, Homo sapiens
  CDR3 for beta chain variable domain of TCR clone 206226 (TRBV7-8, TRBJ2-2)
CASSHLFPGPTIHITGELFF

SEQ ID NO: 412453 - protein, 18 aa, Homo sapiens
  CDR3 for alpha chain variable domain of TCR clone 206227 (TRAV13-1, TRAJ52)
CAAKNPNAGGTSYGKLTF

SEQ ID NO: 412454 - protein, 16 aa, Homo sapiens
  CDR3 for beta chain variable domain of TCR clone 206227 (TRBV7-9, TRBJ1-3)
CASSQTSGLRMGTIYF

SEQ ID NO: 412455 - protein, 12 aa, Homo sapiens
  CDR3 for alpha chain variable domain of TCR clone 206228 (TRAV12-2, TRAJ4)
EWPEGGYNKLIF

SEQ ID NO: 412456 - protein, 16 aa, Homo sapiens
  CDR3 for beta chain variable domain of TCR clone 206228 (TRBV6-1, TRBJ2-5)
CASSETLDRGAETQYF

SEQ ID NO: 412457 - protein, 14 aa, Homo sapiens
  CDR3 for alpha chain variable domain of TCR clone 206229 (TRAV12-3, TRAJ10)
SHLPLTGGGNKLTF

SEQ ID NO: 412458 - protein, 15 aa, Homo sapiens
  CDR3 for beta chain variable domain of TCR clone 206229 (TRBV2, TRBJ2-7)
CASSEGLARSYEQYL

SEQ ID NO: 412459 - protein, 15 aa, Homo sapiens
  CDR3 for alpha chain variable domain of TCR clone 206230 (TRAV4, TRAJ5)
CLVGAMDTGRRALTF

SEQ ID NO: 412460 - protein, 17 aa, Homo sapiens
  CDR3 for beta chain variable domain of TCR clone 206230 (TRBV11-2, TRBJ2-1)
CASSLYPPGVEYNEQFF

SEQ ID NO: 412461 - protein, 13 aa, Homo sapiens
  CDR3 for alpha chain variable domain of TCR clone 206231 (TRAV21, TRAJ27)
CAARPGNAGKSTF

SEQ ID NO: 412462 - protein, 11 aa, Homo sapiens
  CDR3 for beta chain variable domain of TCR clone 206231 (TRBV7-8, TRBJ2-7)
CASSLSLEQYF

SEQ ID NO: 412463 - protein, 14 aa, Homo sapiens
  CDR3 for alpha chain variable domain of TCR clone 206232 (TRAV12-2, TRAJ13)
CDVKNTGGYQKVTF

SEQ ID NO: 412464 - protein, 15 aa, Homo sapiens
  CDR3 for beta chain variable domain of TCR clone 206232 (TRBV7-2, TRBJ2-1)
CASSSGLAGGDEQFF

SEQ ID NO: 412465 - protein, 12 aa, Homo sapiens
  CDR3 for alpha chain variable domain of TCR clone 206233 (TRAV12-2, TRAJ52)
LGGGTSYGKLTF

SEQ ID NO: 412466 - protein, 13 aa, Homo sapiens
  CDR3 for beta chain variable domain of TCR clone 206233 (TRBV12-4, TRBJ1-1)
CASSPGTGFEAFF

SEQ ID NO: 412467 - protein, 18 aa, Homo sapiens
  CDR3 for alpha chain variable domain of TCR clone 206234 (TRAV26-1, TRAJ23)
CIVRVGLEVWNQGGKLIF

SEQ ID NO: 412468 - protein, 16 aa, Homo sapiens
  CDR3 for beta chain variable domain of TCR clone 206234 (TRBV12-4, TRBJ2-5)
WASSFFGRGRQETQYF

SEQ ID NO: 412469 - protein, 12 aa, Homo sapiens
  CDR3 for alpha chain variable domain of TCR clone 206235 (TRAV12-3, TRAJ17)
CAMTLTGNRLTF

SEQ ID NO: 412470 - protein, 15 aa, Homo sapiens
  CDR3 for beta chain variable domain of TCR clone 206235 (TRBV20-1, TRBJ2-7)
CGARDRVSGMDEQYF

SEQ ID NO: 412471 - protein, 13 aa, Homo sapiens
  CDR3 for alpha chain variable domain of TCR clone 206236 (TRAV13-2, TRAJ45)
QSVTGGGADGLTF

SEQ ID NO: 412472 - protein, 17 aa, Homo sapiens
  CDR3 for beta chain variable domain of TCR clone 206236 (TRBV19, TRBJ1-1)
CASSIAGRGLMNTEAFF

SEQ ID NO: 412473 - protein, 15 aa, Homo sapiens
  CDR3 for alpha chain variable domain of TCR clone 206237 (TRAV3, TRAJ17)
CAVRDTGAEGNKLTF

SEQ ID NO: 412474 - protein, 14 aa, Homo sapiens
  CDR3 for beta chain variable domain of TCR clone 206237 (TRBV6-3, TRBJ1-1)
CASSNLLPGAEAFF

SEQ ID NO: 412475 - protein, 14 aa, Homo sapiens
  CDR3 for alpha chain variable domain of TCR clone 206238 (TRAV1-2, TRAJ8)
CAVREDTGFQKLVL

SEQ ID NO: 412476 - protein, 14 aa, Homo sapiens
  CDR3 for beta chain variable domain of TCR clone 206238 (TRBV11-2, TRBJ2-3)
CASSRLARTDTQYF

SEQ ID NO: 412477 - protein, 14 aa, Homo sapiens
  CDR3 for alpha chain variable domain of TCR clone 206239 (TRAV12-2, TRAJ13)
CAVNPSGGYQKVTF

SEQ ID NO: 412478 - protein, 14 aa, Homo sapiens
  CDR3 for beta chain variable domain of TCR clone 206239 (TRBV12-4, TRBJ1-1)
CASSLGTGGTEALF

SEQ ID NO: 412479 - protein, 15 aa, Homo sapiens
  CDR3 for alpha chain variable domain of TCR clone 206240 (TRAV3, TRAJ22)
CAVRDRGGSARQLTL

SEQ ID NO: 412480 - protein, 15 aa, Homo sapiens
  CDR3 for beta chain variable domain of TCR clone 206240 (TRBV19, TRBJ2-5)
CASSIVRASQETQYF

SEQ ID NO: 412481 - protein, 14 aa, Homo sapiens
  CDR3 for alpha chain variable domain of TCR clone 206241 (TRAV12-3, TRAJ11)
CAMTTNSGYSTLTF

SEQ ID NO: 412482 - protein, 13 aa, Homo sapiens
  CDR3 for beta chain variable domain of TCR clone 206241 (TRBV7-2, TRBJ2-7)
CASSSPSGSEQYF

SEQ ID NO: 412483 - protein, 14 aa, Homo sapiens
  CDR3 for alpha chain variable domain of TCR clone 206242 (TRAV35, TRAJ22)
CAGLRPGSARQLTF

SEQ ID NO: 412484 - protein, 13 aa, Homo sapiens
  CDR3 for beta chain variable domain of TCR clone 206242 (TRBV12-4, TRBJ1-2)
CASSLDSNCGYTF

SEQ ID NO: 412485 - protein, 15 aa, Homo sapiens
  CDR3 for alpha chain variable domain of TCR clone 206243 (TRAV17, TRAJ57)
CATGPSQGGSEKRVF

SEQ ID NO: 412486 - protein, 14 aa, Homo sapiens
  CDR3 for beta chain variable domain of TCR clone 206243 (TRBV12-5, TRBJ2-5)
CASGSRTHQETKYF

SEQ ID NO: 412487 - protein, 14 aa, Homo sapiens
  CDR3 for alpha chain variable domain of TCR clone 206244 (TRAV16, TRAJ26)
CALSSANYGQNFVF

SEQ ID NO: 412488 - protein, 14 aa, Homo sapiens
  CDR3 for beta chain variable domain of TCR clone 206244 (TRBV7-6, TRBJ2-3)
CASSLGTVTDTQYF

SEQ ID NO: 412489 - protein, 14 aa, Homo sapiens
  CDR3 for alpha chain variable domain of TCR clone 206245 (TRAV12-3, TRAJ22)
CAMSLFGSARQLTF

SEQ ID NO: 412490 - protein, 13 aa, Homo sapiens
  CDR3 for beta chain variable domain of TCR clone 206245 (TRBV4-2, TRBJ1-1)
CASSQAGNTEAFF

SEQ ID NO: 412491 - protein, 15 aa, Homo sapiens
  CDR3 for alpha chain variable domain of TCR clone 206246 (TRAV2, TRAJ24)
CAVVRLKNSWGKLQF

SEQ ID NO: 412492 - protein, 15 aa, Homo sapiens
  CDR3 for beta chain variable domain of TCR clone 206246 (TRBV11-2, TRBJ2-2)
CASSSDRVNAGELFF

SEQ ID NO: 412493 - protein, 14 aa, Homo sapiens
  CDR3 for alpha chain variable domain of TCR clone 206247 (TRAV12-2, TRAJ53)
CAVKGGGSNYKLTF

SEQ ID NO: 412494 - protein, 17 aa, Homo sapiens
  CDR3 for beta chain variable domain of TCR clone 206247 (TRBV7-2, TRBJ2-3)
CASSLAGGLAGTAGQYF

SEQ ID NO: 412495 - protein, 12 aa, Homo sapiens
  CDR3 for alpha chain variable domain of TCR clone 206248 (TRAV26-1, TRAJ13)
CIVSRGYQKVTF

SEQ ID NO: 412496 - protein, 14 aa, Homo sapiens
  CDR3 for beta chain variable domain of TCR clone 206248 (TRBV11-2, TRBJ2-5)
CASSRTGGIETQYF

SEQ ID NO: 412497 - protein, 14 aa, Homo sapiens
  CDR3 for alpha chain variable domain of TCR clone 206249 (TRAV38-1, TRAJ40)
CALRPTSGTYKYIF

SEQ ID NO: 412498 - protein, 14 aa, Homo sapiens
  CDR3 for beta chain variable domain of TCR clone 206249 (TRBV27, TRBJ2-1)
CASSRWGAFNEQFF

SEQ ID NO: 412499 - protein, 14 aa, Homo sapiens
  CDR3 for alpha chain variable domain of TCR clone 206250 (TRAV17, TRAJ45)
CATASGGGADGLTF

SEQ ID NO: 412500 - protein, 14 aa, Homo sapiens
  CDR3 for beta chain variable domain of TCR clone 206250 (TRBV11-2, TRBJ1-2)
CASSLGTANYGYTF

SEQ ID NO: 412501 - protein, 15 aa, Homo sapiens
  CDR3 for alpha chain variable domain of TCR clone 206251 (TRAV17, TRAJ16)
CATALRFSDGHQLLF

SEQ ID NO: 412502 - protein, 12 aa, Homo sapiens
  CDR3 for beta chain variable domain of TCR clone 206251 (TRBV2, TRBJ2-7)
CASSDPDYEQYF

SEQ ID NO: 412503 - protein, 13 aa, Homo sapiens
  CDR3 for alpha chain variable domain of TCR clone 206252 (TRAV21, TRAJ20)
CAVGLRVDYKLSF

SEQ ID NO: 412504 - protein, 21 aa, Homo sapiens
  CDR3 for beta chain variable domain of TCR clone 206252 (TRBV24-1, TRBJ2-5)
ESAIPNQTALYFCATRETQYF

SEQ ID NO: 412505 - protein, 16 aa, Homo sapiens
  CDR3 for alpha chain variable domain of TCR clone 206253 (TRAV1-2, TRAJ10)
CAVRGVLTGGGNKLTF

SEQ ID NO: 412506 - protein, 12 aa, Homo sapiens
  CDR3 for beta chain variable domain of TCR clone 206253 (TRBV7-8, TRBJ2-7)
CASGRGDREQYF

SEQ ID NO: 412507 - protein, 11 aa, Homo sapiens
  CDR3 for alpha chain variable domain of TCR clone 206254 (TRAV1-2, TRAJ20)
CAVANDYKLSF

SEQ ID NO: 412508 - protein, 15 aa, Homo sapiens
  CDR3 for beta chain variable domain of TCR clone 206254 (TRBV2, TRBJ2-1)
CASSELAGSYNDQFF

SEQ ID NO: 412509 - protein, 16 aa, Homo sapiens
  CDR3 for alpha chain variable domain of TCR clone 206255 (TRAV3, TRAJ10)
CAVRDMRSGGGNKLTF

SEQ ID NO: 412510 - protein, 14 aa, Homo sapiens
  CDR3 for beta chain variable domain of TCR clone 206255 (TRBV7-2, TRBJ2-7)
CASSPKTSFYEQYF

SEQ ID NO: 412511 - protein, 14 aa, Homo sapiens
  CDR3 for alpha chain variable domain of TCR clone 206256 (TRAV2, TRAJ37)
CAVDFTSNTGKLIF

SEQ ID NO: 412512 - protein, 16 aa, Homo sapiens
  CDR3 for beta chain variable domain of TCR clone 206256 (TRBV7-6, TRBJ2-1)
CIAVPAAWGGADEQFF

SEQ ID NO: 412513 - protein, 12 aa, Homo sapiens
  CDR3 for alpha chain variable domain of TCR clone 206257 (TRAV16, TRAJ10)
CSRTGGGNKLTF

SEQ ID NO: 412514 - protein, 15 aa, Homo sapiens
  CDR3 for beta chain variable domain of TCR clone 206257 (TRBV7-2, TRBJ2-1)
CASSLVGSSYNEQFF

SEQ ID NO: 412515 - protein, 14 aa, Homo sapiens
  CDR3 for alpha chain variable domain of TCR clone 206258 (TRAV9-2, TRAJ39)
CALYIYNSGNMLTF

SEQ ID NO: 412516 - protein, 17 aa, Homo sapiens
  CDR3 for beta chain variable domain of TCR clone 206258 (TRBV9, TRBJ2-3)
CASRSTAGGPSTDTQYF

SEQ ID NO: 412517 - protein, 13 aa, Homo sapiens
  CDR3 for alpha chain variable domain of TCR clone 206259 (TRAV21, TRAJ27)
CAARPGTEGKSTF

SEQ ID NO: 412518 - protein, 14 aa, Homo sapiens
  CDR3 for beta chain variable domain of TCR clone 206259 (TRBV7-6, TRBJ2-3)
CASSLGTVTDTQYF

SEQ ID NO: 412519 - protein, 16 aa, Homo sapiens
  CDR3 for alpha chain variable domain of TCR clone 206260 (TRAV3, TRAJ23)
CAVKIGIYNQGGKLIS

SEQ ID NO: 412520 - protein, 17 aa, Homo sapiens
  CDR3 for beta chain variable domain of TCR clone 206260 (TRBV10-3, TRBJ2-6)
CAISESTAPSGANVLTF

SEQ ID NO: 412521 - protein, 11 aa, Homo sapiens
  CDR3 for alpha chain variable domain of TCR clone 206261 (TRAV3, TRAJ21)
CAVGNFNKFYF

SEQ ID NO: 412522 - protein, 11 aa, Homo sapiens
  CDR3 for beta chain variable domain of TCR clone 206261 (TRBV7-8, TRBJ2-7)
CASSLSLEQYF

SEQ ID NO: 412523 - protein, 13 aa, Homo sapiens
  CDR3 for alpha chain variable domain of TCR clone 206262 (TRAV2, TRAJ15)
CAVASHARTALIF

SEQ ID NO: 412524 - protein, 16 aa, Homo sapiens
  CDR3 for beta chain variable domain of TCR clone 206262 (TRBV5-1, TRBJ1-1)
CASSSGGNSLNTEAFF

SEQ ID NO: 412525 - protein, 13 aa, Homo sapiens
  CDR3 for alpha chain variable domain of TCR clone 206263 (TRAV35, TRAJ36)
CAEPRIGANNLFF

SEQ ID NO: 412526 - protein, 15 aa, Homo sapiens
  CDR3 for beta chain variable domain of TCR clone 206263 (TRBV28, TRBJ2-5)
CASSPPWSYQETQYS

SEQ ID NO: 412527 - protein, 13 aa, Homo sapiens
  CDR3 for alpha chain variable domain of TCR clone 206264 (TRAV8-4, TRAJ30)
RAVSVNRDDKIIF

SEQ ID NO: 412528 - protein, 13 aa, Homo sapiens
  CDR3 for beta chain variable domain of TCR clone 206264 (TRBV3-1, TRBJ2-2)
CASLARGSGELFF

SEQ ID NO: 412529 - protein, 14 aa, Homo sapiens
  CDR3 for alpha chain variable domain of TCR clone 206265 (TRAV1-2, TRAJ15)
CAVRDRQAGTALIF

SEQ ID NO: 412530 - protein, 13 aa, Homo sapiens
  CDR3 for beta chain variable domain of TCR clone 206265 (TRBV18, TRBJ2-7)
CASQSGGGYEQYF

SEQ ID NO: 412531 - protein, 12 aa, Homo sapiens
  CDR3 for alpha chain variable domain of TCR clone 206266 (TRAV1-1, TRAJ23)
CAVTNQGGKLIF

SEQ ID NO: 412532 - protein, 17 aa, Homo sapiens
  CDR3 for beta chain variable domain of TCR clone 206266 (TRBV6-6, TRBJ2-7)
CASSYSYGVPTISTSGR

SEQ ID NO: 412533 - protein, 12 aa, Homo sapiens
  CDR3 for alpha chain variable domain of TCR clone 206267 (TRAV35, TRAJ39)
LAPNNAGNMLTF

SEQ ID NO: 412534 - protein, 16 aa, Homo sapiens
  CDR3 for beta chain variable domain of TCR clone 206267 (TRBV2, TRBJ2-3)
RASSTSVEGVTDTQYF

SEQ ID NO: 412535 - protein, 13 aa, Homo sapiens
  CDR3 for alpha chain variable domain of TCR clone 206268 (TRAV2, TRAJ15)
CAVASQAGTALYF

SEQ ID NO: 412536 - protein, 16 aa, Homo sapiens
  CDR3 for beta chain variable domain of TCR clone 206268 (TRBV5-1, TRBJ1-1)
CASSSGGNSLNTEAFF

SEQ ID NO: 412537 - protein, 13 aa, Homo sapiens
  CDR3 for alpha chain variable domain of TCR clone 206269 (TRAV17, TRAJ26)
CATVDNYGQNFVF

SEQ ID NO: 412538 - protein, 13 aa, Homo sapiens
  CDR3 for beta chain variable domain of TCR clone 206269 (TRBV12-4, TRBJ1-2)
CASSLRQGKGYTF

SEQ ID NO: 412539 - protein, 13 aa, Homo sapiens
  CDR3 for alpha chain variable domain of TCR clone 206270 (TRAV1-2, TRAJ9)
CAALNTGGFKTIF

SEQ ID NO: 412540 - protein, 15 aa, Homo sapiens
  CDR3 for beta chain variable domain of TCR clone 206270 (TRBV19, TRBJ1-1)
CASTSGQIQNPEAFF

SEQ ID NO: 412541 - protein, 13 aa, Homo sapiens
  CDR3 for alpha chain variable domain of TCR clone 206271 (TRAV35, TRAJ42)
CAGFPGSQGNRIF

SEQ ID NO: 412542 - protein, 14 aa, Homo sapiens
  CDR3 for beta chain variable domain of TCR clone 206271 (TRBV4-1, TRBJ2-2)
CASSQAVNTGELFF

SEQ ID NO: 412543 - protein, 15 aa, Homo sapiens
  CDR3 for alpha chain variable domain of TCR clone 206272 (TRAV26-1, TRAJ40)
CIVSFATSGTYKYIF

SEQ ID NO: 412544 - protein, 11 aa, Homo sapiens
  CDR3 for beta chain variable domain of TCR clone 206272 (TRBV7-8, TRBJ2-7)
CASSLSLEQYF

SEQ ID NO: 412545 - protein, 14 aa, Homo sapiens
  CDR3 for alpha chain variable domain of TCR clone 206273 (TRAV4, TRAJ26)
CLVGPHNYGQNFVF

SEQ ID NO: 412546 - protein, 15 aa, Homo sapiens
  CDR3 for beta chain variable domain of TCR clone 206273 (TRBV19, TRBJ1-6)
CASSTQGAVGSPLHF

SEQ ID NO: 412547 - protein, 11 aa, Homo sapiens
  CDR3 for alpha chain variable domain of TCR clone 206274 (TRAV2, TRAJ13)
CASGGYQKVTF

SEQ ID NO: 412548 - protein, 16 aa, Homo sapiens
  CDR3 for beta chain variable domain of TCR clone 206274 (TRBV19, TRBJ2-1)
CASSKAEPSSYNEQFF

SEQ ID NO: 412549 - protein, 13 aa, Homo sapiens
  CDR3 for alpha chain variable domain of TCR clone 206275 (TRAV2, TRAJ10)
CAVETGGENKLTF

SEQ ID NO: 412550 - protein, 14 aa, Homo sapiens
  CDR3 for beta chain variable domain of TCR clone 206275 (TRBV20-1, TRBJ2-3)
CSAGGRRGTDTQYF

SEQ ID NO: 412551 - protein, 15 aa, Homo sapiens
  CDR3 for alpha chain variable domain of TCR clone 206276 (TRAV13-1, TRAJ36)
CAASIRQTGVNNLFF

SEQ ID NO: 412552 - protein, 14 aa, Homo sapiens
  CDR3 for beta chain variable domain of TCR clone 206276 (TRBV6-1, TRBJ1-3)
CASVQGGGGNTIYF

SEQ ID NO: 412553 - protein, 13 aa, Homo sapiens
  CDR3 for alpha chain variable domain of TCR clone 206277 (TRAV25, TRAJ17)
CAGLRAAGNKLTF

SEQ ID NO: 412554 - protein, 15 aa, Homo sapiens
  CDR3 for beta chain variable domain of TCR clone 206277 (TRBV29-1, TRBJ2-7)
CSVEFFDRGSYEQYF

SEQ ID NO: 412555 - protein, 14 aa, Homo sapiens
  CDR3 for alpha chain variable domain of TCR clone 206278 (TRAV12-3, TRAJ10)
SHLPLTGGGNKLTF

SEQ ID NO: 412556 - protein, 15 aa, Homo sapiens
  CDR3 for beta chain variable domain of TCR clone 206278 (TRBV9, TRBJ2-1)
CASSLAGSSYNAQFF

SEQ ID NO: 412557 - protein, 16 aa, Homo sapiens
  CDR3 for alpha chain variable domain of TCR clone 206279 (TRAV38-2/DV8, TRAJ47)
CAYRSAIMEYGDKLVF

SEQ ID NO: 412558 - protein, 14 aa, Homo sapiens
  CDR3 for beta chain variable domain of TCR clone 206279 (TRBV19, TRBJ2-7)
CAGSIFAGTYEQYF

SEQ ID NO: 412559 - protein, 14 aa, Homo sapiens
  CDR3 for alpha chain variable domain of TCR clone 206280 (TRAV12-3, TRAJ10)
SHLPLTGGGNKLTF

SEQ ID NO: 412560 - protein, 16 aa, Homo sapiens
  CDR3 for beta chain variable domain of TCR clone 206280 (TRBV9, TRBJ2-2)
CASSGPSGTGIGELFF

SEQ ID NO: 412561 - protein, 19 aa, Homo sapiens
  CDR3 for alpha chain variable domain of TCR clone 206281 (TRAV26-1, TRAJ52)
CIVIAHRNAGGTSYGKLTF

SEQ ID NO: 412562 - protein, 15 aa, Homo sapiens
  CDR3 for beta chain variable domain of TCR clone 206281 (TRBV5-7, TRBJ1-5)
CASSYGKLWDQPQHF

SEQ ID NO: 412563 - protein, 18 aa, Homo sapiens
  CDR3 for alpha chain variable domain of TCR clone 206282 (TRAV21, TRAJ52)
CAVRPSPAGGTSYGKLTF

SEQ ID NO: 412564 - protein, 13 aa, Homo sapiens
  CDR3 for beta chain variable domain of TCR clone 206282 (TRBV12-4, TRBJ2-5)
CASSPGTEETQYF

SEQ ID NO: 412565 - protein, 14 aa, Homo sapiens
  CDR3 for alpha chain variable domain of TCR clone 206283 (TRAV21, TRAJ35)
CAVMPIGFGNVLHC

SEQ ID NO: 412566 - protein, 14 aa, Homo sapiens
  CDR3 for beta chain variable domain of TCR clone 206283 (TRBV11-2, TRBJ2-1)
CASSRATSYNEQFF

SEQ ID NO: 412567 - protein, 17 aa, Homo sapiens
  CDR3 for alpha chain variable domain of TCR clone 206284 (TRAV26-1, TRAJ37)
CMVRVITVSSNTGKLIF

SEQ ID NO: 412568 - protein, 14 aa, Homo sapiens
  CDR3 for beta chain variable domain of TCR clone 206284 (TRBV19, TRBJ2-1)
CASPTFVLSGEQFF

SEQ ID NO: 412569 - protein, 10 aa, Homo sapiens
  CDR3 for alpha chain variable domain of TCR clone 206285 (TRAV26-1, TRAJ28)
CIVRVAHAYS

SEQ ID NO: 412570 - protein, 15 aa, Homo sapiens
  CDR3 for beta chain variable domain of TCR clone 206285 (TRBV5-1, TRBJ1-3)
CASSSKTGAGNTIYF

SEQ ID NO: 412571 - protein, 17 aa, Homo sapiens
  CDR3 for alpha chain variable domain of TCR clone 206286 (TRAV3, TRAJ12)
CAVRDGGRMDSSYKFIF

SEQ ID NO: 412572 - protein, 14 aa, Homo sapiens
  CDR3 for beta chain variable domain of TCR clone 206286 (TRBV12-4, TRBJ1-3)
CASTLTGAGNTIYF

SEQ ID NO: 412573 - protein, 13 aa, Homo sapiens
  CDR3 for alpha chain variable domain of TCR clone 206287 (TRAV3, TRAJ30)
CAVRDRGDDKIIF

SEQ ID NO: 412574 - protein, 16 aa, Homo sapiens
  CDR3 for beta chain variable domain of TCR clone 206287 (TRBV7-3, TRBJ2-2)
CASSLKRGTLSGELFV

SEQ ID NO: 412575 - protein, 13 aa, Homo sapiens
  CDR3 for alpha chain variable domain of TCR clone 206288 (TRAV12-1, TRAJ21)
CVVPQYNFNKFYF

SEQ ID NO: 412576 - protein, 14 aa, Homo sapiens
  CDR3 for beta chain variable domain of TCR clone 206288 (TRBV7-2, TRBJ2-7)
CASSPKTSFYEQYF

SEQ ID NO: 412577 - protein, 13 aa, Homo sapiens
  CDR3 for alpha chain variable domain of TCR clone 206289 (TRAV13-2, TRAJ13)
CAERQGGYQKVTF

SEQ ID NO: 412578 - protein, 17 aa, Homo sapiens
  CDR3 for beta chain variable domain of TCR clone 206289 (TRBV11-2, TRBJ2-1)
CASSLYPPGVEYNEQFF

SEQ ID NO: 412579 - protein, 11 aa, Homo sapiens
  CDR3 for alpha chain variable domain of TCR clone 206290 (TRAV12-1, TRAJ30)
CVVNGQDKIIF

SEQ ID NO: 412580 - protein, 14 aa, Homo sapiens
  CDR3 for beta chain variable domain of TCR clone 206290 (TRBV7-2, TRBJ2-7)
CASSPKTSFYEQYF

SEQ ID NO: 412581 - protein, 13 aa, Homo sapiens
  CDR3 for alpha chain variable domain of TCR clone 206291 (TRAV2, TRAJ40)
CAVVTSGTYKYIF

SEQ ID NO: 412582 - protein, 14 aa, Homo sapiens
  CDR3 for beta chain variable domain of TCR clone 206291 (TRBV19, TRBJ2-1)
CASPTFVLSGEQFA

SEQ ID NO: 412583 - protein, 13 aa, Homo sapiens
  CDR3 for alpha chain variable domain of TCR clone 206292 (TRAV21, TRAJ27)
CAARPGNAGKSTV

SEQ ID NO: 412584 - protein, 13 aa, Homo sapiens
  CDR3 for beta chain variable domain of TCR clone 206292 (TRBV7-3, TRBJ1-1)
CASSQDWGAEAFF

SEQ ID NO: 412585 - protein, 12 aa, Homo sapiens
  CDR3 for alpha chain variable domain of TCR clone 206293 (TRAV4, TRAJ26)
CLVGDYGQNFVF

SEQ ID NO: 412586 - protein, 16 aa, Homo sapiens
  CDR3 for beta chain variable domain of TCR clone 206293 (TRBV7-3, TRBJ2-2)
CASSLKRGTLSGELFY

SEQ ID NO: 412587 - protein, 14 aa, Homo sapiens
  CDR3 for alpha chain variable domain of TCR clone 206294 (TRAV35, TRAJ40)
CAGSSTSGTYEYIF

SEQ ID NO: 412588 - protein, 14 aa, Homo sapiens
  CDR3 for beta chain variable domain of TCR clone 206294 (TRBV10-3, TRBJ2-2)
CAASSRVNTGELFF

SEQ ID NO: 412589 - protein, 10 aa, Homo sapiens
  CDR3 for alpha chain variable domain of TCR clone 206295 (TRAV12-3, TRAJ49)
CAMNDDQFYF

SEQ ID NO: 412590 - protein, 14 aa, Homo sapiens
  CDR3 for beta chain variable domain of TCR clone 206295 (TRBV19, TRBJ2-3)
CASSAPRGTDTQYF

SEQ ID NO: 412591 - protein, 15 aa, Homo sapiens
  CDR3 for alpha chain variable domain of TCR clone 206296 (TRAV8-3, TRAJ13)
CAVAPNSGGYQKVTF

SEQ ID NO: 412592 - protein, 19 aa, Homo sapiens
  CDR3 for beta chain variable domain of TCR clone 206296 (TRBV25-1, TRBJ2-2)
CAILVYRVDRGRKTGELFF

SEQ ID NO: 412593 - protein, 17 aa, Homo sapiens
  CDR3 for alpha chain variable domain of TCR clone 206297 (TRAV3, TRAJ6)
CAVRGGPRAGGSYIPTF

SEQ ID NO: 412594 - protein, 15 aa, Homo sapiens
  CDR3 for beta chain variable domain of TCR clone 206297 (TRBV7-9, TRBJ1-6)
CASSSPGRGNSPLHF

SEQ ID NO: 412595 - protein, 15 aa, Homo sapiens
  CDR3 for alpha chain variable domain of TCR clone 206298 (TRAV3, TRAJ36)
CAVRASQTGANNLFF

SEQ ID NO: 412596 - protein, 15 aa, Homo sapiens
  CDR3 for beta chain variable domain of TCR clone 206298 (TRBV3-1, TRBJ2-1)
CASSQDYTPRGGQFF

SEQ ID NO: 412597 - protein, 18 aa, Homo sapiens
  CDR3 for alpha chain variable domain of TCR clone 206299 (TRAV26-1, TRAJ37)
CIVRVDRHGSSNTGKLIF

SEQ ID NO: 412598 - protein, 15 aa, Homo sapiens
  CDR3 for beta chain variable domain of TCR clone 206299 (TRBV20-1, TRBJ2-7)
CSARVLASPLYEQYF

SEQ ID NO: 412599 - protein, 13 aa, Homo sapiens
  CDR3 for alpha chain variable domain of TCR clone 206300 (TRAV25, TRAJ30)
CAGRVDRDDKIIF

SEQ ID NO: 412600 - protein, 17 aa, Homo sapiens
  CDR3 for beta chain variable domain of TCR clone 206300 (TRBV7-9, TRBJ2-6)
CASGFGAGYSGANVLTF

SEQ ID NO: 412601 - protein, 15 aa, Homo sapiens
  CDR3 for alpha chain variable domain of TCR clone 206301 (TRAV23/DV6, TRAJ30)
CAASSQESRDDKIIL

SEQ ID NO: 412602 - protein, 17 aa, Homo sapiens
  CDR3 for beta chain variable domain of TCR clone 206301 (TRBV4-3, TRBJ2-1)
CASSQFSSGRASGKQFF

SEQ ID NO: 412603 - protein, 15 aa, Homo sapiens
  CDR3 for alpha chain variable domain of TCR clone 206302 (TRAV17, TRAJ38)
CATVLNAGNNRKLIW

SEQ ID NO: 412604 - protein, 12 aa, Homo sapiens
  CDR3 for beta chain variable domain of TCR clone 206302 (TRBV5-5, TRBJ2-5)
CASSYFGETQYF

SEQ ID NO: 412605 - protein, 14 aa, Homo sapiens
  CDR3 for alpha chain variable domain of TCR clone 206303 (TRAV12-1, TRAJ12)
CVVNGRDSSYKLIF

SEQ ID NO: 412606 - protein, 13 aa, Homo sapiens
  CDR3 for beta chain variable domain of TCR clone 206303 (TRBV28, TRBJ2-2)
CASIRESTGELFL

SEQ ID NO: 412607 - protein, 15 aa, Homo sapiens
  CDR3 for alpha chain variable domain of TCR clone 206304 (TRAV4, TRAJ39)
CLVGPNNNAGNMLTV

SEQ ID NO: 412608 - protein, 14 aa, Homo sapiens
  CDR3 for beta chain variable domain of TCR clone 206304 (TRBV11-2, TRBJ2-5)
CASSRTGGIETQYF

SEQ ID NO: 412609 - protein, 18 aa, Homo sapiens
  CDR3 for alpha chain variable domain of TCR clone 206305 (TRAV17, TRAJ45)
CATSLDLYSGGGADGLTF

SEQ ID NO: 412610 - protein, 12 aa, Homo sapiens
  CDR3 for beta chain variable domain of TCR clone 206305 (TRBV11-2, TRBJ2-2)
CASSLPTVELFF

SEQ ID NO: 412611 - protein, 11 aa, Homo sapiens
  CDR3 for alpha chain variable domain of TCR clone 206306 (TRAV29/DV5, TRAJ31)
CAASYSDILMF

SEQ ID NO: 412612 - protein, 19 aa, Homo sapiens
  CDR3 for beta chain variable domain of TCR clone 206306 (TRBV19, TRBJ2-5)
CASSIGQVTDFFLGETQYF

SEQ ID NO: 412613 - protein, 12 aa, Homo sapiens
  CDR3 for alpha chain variable domain of TCR clone 206307 (TRAV13-1, TRAJ16)
FAASNGGQKLLF

SEQ ID NO: 412614 - protein, 14 aa, Homo sapiens
  CDR3 for beta chain variable domain of TCR clone 206307 (TRBV20-1, TRBJ2-7)
CSARDPTGLDEQYF

SEQ ID NO: 412615 - protein, 13 aa, Homo sapiens
  CDR3 for alpha chain variable domain of TCR clone 206308 (TRAV1-2, TRAJ9)
CAALNTGGFKTIF

SEQ ID NO: 412616 - protein, 13 aa, Homo sapiens
  CDR3 for beta chain variable domain of TCR clone 206308 (TRBV19, TRBJ1-2)
RASSVPGQDGWAF

SEQ ID NO: 412617 - protein, 16 aa, Homo sapiens
  CDR3 for alpha chain variable domain of TCR clone 206309 (TRAV3, TRAJ37)
CAVRGKGSGNTGKLIF

SEQ ID NO: 412618 - protein, 16 aa, Homo sapiens
  CDR3 for beta chain variable domain of TCR clone 206309 (TRBV12-4, TRBJ1-5)
CASSRPVGGSNQAQHF

SEQ ID NO: 412619 - protein, 16 aa, Homo sapiens
  CDR3 for alpha chain variable domain of TCR clone 206310 (TRAV38-1, TRAJ34)
CASSTKLTYNTDKLIF

SEQ ID NO: 412620 - protein, 12 aa, Homo sapiens
  CDR3 for beta chain variable domain of TCR clone 206310 (TRBV6-3, TRBJ2-3)
CASTNGADTQYF

SEQ ID NO: 412621 - protein, 12 aa, Homo sapiens
  CDR3 for alpha chain variable domain of TCR clone 206311 (TRAV13-1, TRAJ21)
CAATEGFNKFYL

SEQ ID NO: 412622 - protein, 17 aa, Homo sapiens
  CDR3 for beta chain variable domain of TCR clone 206311 (TRBV19, TRBJ2-7)
CASSISFYDSYPYEQYF

SEQ ID NO: 412623 - protein, 13 aa, Homo sapiens
  CDR3 for alpha chain variable domain of TCR clone 206312 (TRAV8-3, TRAJ36)
CAVGAPGANNLFF

SEQ ID NO: 412624 - protein, 17 aa, Homo sapiens
  CDR3 for beta chain variable domain of TCR clone 206312 (TRBV4-2, TRBJ1-1)
CASTQFGGGSGNTEAFF

SEQ ID NO: 412625 - protein, 14 aa, Homo sapiens
  CDR3 for alpha chain variable domain of TCR clone 206313 (TRAV2, TRAJ42)
CAVVGGGSQGNLIF

SEQ ID NO: 412626 - protein, 15 aa, Homo sapiens
  CDR3 for beta chain variable domain of TCR clone 206313 (TRBV11-3, TRBJ2-3)
CASSFRAAFPDTQYC

SEQ ID NO: 412627 - protein, 14 aa, Homo sapiens
  CDR3 for alpha chain variable domain of TCR clone 206314 (TRAV35, TRAJ22)
CAGLRPGSARQLTF

SEQ ID NO: 412628 - protein, 14 aa, Homo sapiens
  CDR3 for beta chain variable domain of TCR clone 206314 (TRBV7-2, TRBJ2-1)
CASSLEGGYNEQFF

SEQ ID NO: 412629 - protein, 16 aa, Homo sapiens
  CDR3 for alpha chain variable domain of TCR clone 206315 (TRAV3, TRAJ37)
YAVRGKGSGNTGKLIF

SEQ ID NO: 412630 - protein, 13 aa, Homo sapiens
  CDR3 for beta chain variable domain of TCR clone 206315 (TRBV14, TRBJ2-7)
CASSQDRRYEQYF

SEQ ID NO: 412631 - protein, 15 aa, Homo sapiens
  CDR3 for alpha chain variable domain of TCR clone 206316 (TRAV17, TRAJ16)
CATALRFSDGQKLFF

SEQ ID NO: 412632 - protein, 12 aa, Homo sapiens
  CDR3 for beta chain variable domain of TCR clone 206316 (TRBV2, TRBJ2-7)
CASSDPDYEQYF

SEQ ID NO: 412633 - protein, 16 aa, Homo sapiens
  CDR3 for alpha chain variable domain of TCR clone 206317 (TRAV35, TRAJ28)
CAGRRGGWELPTHFRE

SEQ ID NO: 412634 - protein, 13 aa, Homo sapiens
  CDR3 for beta chain variable domain of TCR clone 206317 (TRBV9, TRBJ2-1)
CASSPSGGSEQFF

SEQ ID NO: 412635 - protein, 14 aa, Homo sapiens
  CDR3 for alpha chain variable domain of TCR clone 206318 (TRAV9-2, TRAJ39)
CALYIYNAGNMLTF

SEQ ID NO: 412636 - protein, 11 aa, Homo sapiens
  CDR3 for beta chain variable domain of TCR clone 206318 (TRBV10-1, TRBJ2-3)
CASSDSDTQYF

SEQ ID NO: 412637 - protein, 12 aa, Homo sapiens
  CDR3 for alpha chain variable domain of TCR clone 206319 (TRAV2, TRAJ9)
CAVGAGGFKTIF

SEQ ID NO: 412638 - protein, 15 aa, Homo sapiens
  CDR3 for beta chain variable domain of TCR clone 206319 (TRBV27, TRBJ2-7)
CASSTAGTGSYEQYF

SEQ ID NO: 412639 - protein, 13 aa, Homo sapiens
  CDR3 for alpha chain variable domain of TCR clone 206320 (TRAV21, TRAJ27)
CAARPGNAGKSTF

SEQ ID NO: 412640 - protein, 16 aa, Homo sapiens
  CDR3 for beta chain variable domain of TCR clone 206320 (TRBV7-3, TRBJ2-1)
CASSKPLAGGYNEHFF

SEQ ID NO: 412641 - protein, 14 aa, Homo sapiens
  CDR3 for alpha chain variable domain of TCR clone 206321 (TRAV1-2, TRAJ8)
CAVREDTGFQKLVF

SEQ ID NO: 412642 - protein, 13 aa, Homo sapiens
  CDR3 for beta chain variable domain of TCR clone 206321 (TRBV7-8, TRBJ2-7)
CASSFAGLYEQYF

SEQ ID NO: 412643 - protein, 12 aa, Homo sapiens
  CDR3 for alpha chain variable domain of TCR clone 206322 (TRAV8-6, TRAJ20)
CAVSSNDYKLSF

SEQ ID NO: 412644 - protein, 19 aa, Homo sapiens
  CDR3 for beta chain variable domain of TCR clone 206322 (TRBV19, TRBJ2-5)
CASSIGQVTDFFLGETQYF

SEQ ID NO: 412645 - protein, 15 aa, Homo sapiens
  CDR3 for alpha chain variable domain of TCR clone 206323 (TRAV8-3, TRAJ11)
CAVGLLNSGYSTLTF

SEQ ID NO: 412646 - protein, 16 aa, Homo sapiens
  CDR3 for beta chain variable domain of TCR clone 206323 (TRBV15, TRBJ1-2)
CATSRGPRAGGGGYTF

SEQ ID NO: 412647 - protein, 13 aa, Homo sapiens
  CDR3 for alpha chain variable domain of TCR clone 206324 (TRAV12-2, TRAJ9)
CAVNRAGGFKTIF

SEQ ID NO: 412648 - protein, 15 aa, Homo sapiens
  CDR3 for beta chain variable domain of TCR clone 206324 (TRBV11-2, TRBJ2-1)
CASSLGPDSYNEQFF

SEQ ID NO: 412649 - protein, 16 aa, Homo sapiens
  CDR3 for alpha chain variable domain of TCR clone 206325 (TRAV3, TRAJ3)
CAVRDRAKSSASKIIF

SEQ ID NO: 412650 - protein, 16 aa, Homo sapiens
  CDR3 for beta chain variable domain of TCR clone 206325 (TRBV20-1, TRBJ2-4)
CSATSLAELAKNIQYF

SEQ ID NO: 412651 - protein, 17 aa, Homo sapiens
  CDR3 for alpha chain variable domain of TCR clone 206326 (TRAV38-2/DV8, TRAJ54)
CADRRGWGSQGAQKLVF

SEQ ID NO: 412652 - protein, 14 aa, Homo sapiens
  CDR3 for beta chain variable domain of TCR clone 206326 (TRBV20-1, TRBJ2-3)
CSARDGVGTDTQYF

SEQ ID NO: 412653 - protein, 13 aa, Homo sapiens
  CDR3 for alpha chain variable domain of TCR clone 206327 (TRAV1-2, TRAJ16)
CAVNRFHGQQLLF

SEQ ID NO: 412654 - protein, 15 aa, Homo sapiens
  CDR3 for beta chain variable domain of TCR clone 206327 (TRBV20-1, TRBJ1-1)
CSASRGVTGNTEAFF

SEQ ID NO: 412655 - protein, 13 aa, Homo sapiens
  CDR3 for alpha chain variable domain of TCR clone 206328 (TRAV26-1, TRAJ34)
CIVRPWITDKLIF

SEQ ID NO: 412656 - protein, 13 aa, Homo sapiens
  CDR3 for beta chain variable domain of TCR clone 206328 (TRBV5-1, TRBJ2-1)
CASSLGSYNEHFF

SEQ ID NO: 412657 - protein, 12 aa, Homo sapiens
  CDR3 for alpha chain variable domain of TCR clone 206329 (TRAV23/DV6, TRAJ31)
CAARRIGARLMF

SEQ ID NO: 412658 - protein, 15 aa, Homo sapiens
  CDR3 for beta chain variable domain of TCR clone 206329 (TRBV28, TRBJ2-5)
CASSSGRTIQETQYF

SEQ ID NO: 412659 - protein, 16 aa, Homo sapiens
  CDR3 for alpha chain variable domain of TCR clone 206330 (TRAV14/DV4, TRAJ53)
CAMREGGGGSNYKLTF

SEQ ID NO: 412660 - protein, 12 aa, Homo sapiens
  CDR3 for beta chain variable domain of TCR clone 206330 (TRBV28, TRBJ2-6)
CAIQAGANVLTF

SEQ ID NO: 412661 - protein, 14 aa, Homo sapiens
  CDR3 for alpha chain variable domain of TCR clone 206331 (TRAV12-3, TRAJ13)
CAVKKTGGYPKVTF

SEQ ID NO: 412662 - protein, 15 aa, Homo sapiens
  CDR3 for beta chain variable domain of TCR clone 206331 (TRBV27, TRBJ2-1)
CASSNGGGSSNEQFF

SEQ ID NO: 412663 - protein, 14 aa, Homo sapiens
  CDR3 for alpha chain variable domain of TCR clone 206332 (TRAV12-3, TRAJ10)
SHLPLTGGGNKLTF

SEQ ID NO: 412664 - protein, 13 aa, Homo sapiens
  CDR3 for beta chain variable domain of TCR clone 206332 (TRBV7-9, TRBJ1-2)
CASSLKQNYGYNF

SEQ ID NO: 412665 - protein, 16 aa, Homo sapiens
  CDR3 for alpha chain variable domain of TCR clone 206333 (TRAV12-3, TRAJ50)
CAMRDPMKTSYAKVIF

SEQ ID NO: 412666 - protein, 13 aa, Homo sapiens
  CDR3 for beta chain variable domain of TCR clone 206333 (TRBV4-1, TRBJ2-3)
CASSLDFTDTQYF

SEQ ID NO: 412667 - protein, 17 aa, Homo sapiens
  CDR3 for alpha chain variable domain of TCR clone 206334 (TRAV3, TRAJ12)
CAVRDGVRMDSSYKLIF

SEQ ID NO: 412668 - protein, 13 aa, Homo sapiens
  CDR3 for beta chain variable domain of TCR clone 206334 (TRBV20-1, TRBJ1-1)
CSAPLGGGTEAFF

SEQ ID NO: 412669 - protein, 12 aa, Homo sapiens
  CDR3 for alpha chain variable domain of TCR clone 206335 (TRAV2, TRAJ24)
CAATDSWGKFQF

SEQ ID NO: 412670 - protein, 15 aa, Homo sapiens
  CDR3 for beta chain variable domain of TCR clone 206335 (TRBV4-1, TRBJ2-5)
CASSQASGEYETQYF

SEQ ID NO: 412671 - protein, 13 aa, Homo sapiens
  CDR3 for alpha chain variable domain of TCR clone 206336 (TRAV21, TRAJ27)
CAARPGNPGKSTF

SEQ ID NO: 412672 - protein, 15 aa, Homo sapiens
  CDR3 for beta chain variable domain of TCR clone 206336 (TRBV11-3, TRBJ2-7)
CASSPGPASSYEQYF

SEQ ID NO: 412673 - protein, 11 aa, Homo sapiens
  CDR3 for alpha chain variable domain of TCR clone 206337 (TRAV3, TRAJ21)
CAVGNFNRFYF

SEQ ID NO: 412674 - protein, 15 aa, Homo sapiens
  CDR3 for beta chain variable domain of TCR clone 206337 (TRBV2, TRBJ2-5)
CASSEQGLIGETQYF

SEQ ID NO: 412675 - protein, 13 aa, Homo sapiens
  CDR3 for alpha chain variable domain of TCR clone 206338 (TRAV36/DV7, TRAJ53)
CALSGGSNYKLTF

SEQ ID NO: 412676 - protein, 15 aa, Homo sapiens
  CDR3 for beta chain variable domain of TCR clone 206338 (TRBV7-9, TRBJ1-6)
CASSSPGRGNSPLHF

SEQ ID NO: 412677 - protein, 14 aa, Homo sapiens
  CDR3 for alpha chain variable domain of TCR clone 206339 (TRAV3, TRAJ6)
CAVRDPWGSYIPTF

SEQ ID NO: 412678 - protein, 15 aa, Homo sapiens
  CDR3 for beta chain variable domain of TCR clone 206339 (TRBV2, TRBJ2-7)
CASSEGLARSYEQYF

SEQ ID NO: 412679 - protein, 13 aa, Homo sapiens
  CDR3 for alpha chain variable domain of TCR clone 206340 (TRAV23/DV6, TRAJ34)
CAAIENNTDKLIF

SEQ ID NO: 412680 - protein, 15 aa, Homo sapiens
  CDR3 for beta chain variable domain of TCR clone 206340 (TRBV5-1, TRBJ2-1)
CASSLVANSYNEQFF

SEQ ID NO: 412681 - protein, 15 aa, Homo sapiens
  CDR3 for alpha chain variable domain of TCR clone 206341 (TRAV17, TRAJ13)
CATDAGSGGYQKVTF

SEQ ID NO: 412682 - protein, 17 aa, Homo sapiens
  CDR3 for beta chain variable domain of TCR clone 206341 (TRBV11-2, TRBJ2-1)
CASSLYPQGSSTMSSSS

SEQ ID NO: 412683 - protein, 16 aa, Homo sapiens
  CDR3 for alpha chain variable domain of TCR clone 206342 (TRAV4, TRAJ42)
CLLGPIYGGSQGNLIF

SEQ ID NO: 412684 - protein, 13 aa, Homo sapiens
  CDR3 for beta chain variable domain of TCR clone 206342 (TRBV11-2, TRBJ2-7)
CASSPLGSYEQYF

SEQ ID NO: 412685 - protein, 10 aa, Homo sapiens
  CDR3 for alpha chain variable domain of TCR clone 206343 (TRAV30, TRAJ48)
CGIGNEKLTF

SEQ ID NO: 412686 - protein, 16 aa, Homo sapiens
  CDR3 for beta chain variable domain of TCR clone 206343 (TRBV15, TRBJ2-3)
CATSRDLGIVTDTQYF

SEQ ID NO: 412687 - protein, 16 aa, Homo sapiens
  CDR3 for alpha chain variable domain of TCR clone 206344 (TRAV4, TRAJ18)
CCVLLIGGSTLRRLYF

SEQ ID NO: 412688 - protein, 14 aa, Homo sapiens
  CDR3 for beta chain variable domain of TCR clone 206344 (TRBV18, TRBJ1-2)
CASSPSGRDYGYTF

SEQ ID NO: 412689 - protein, 14 aa, Homo sapiens
  CDR3 for alpha chain variable domain of TCR clone 206345 (TRAV21, TRAJ48)
CAVRSNFGNEKLTF

SEQ ID NO: 412690 - protein, 17 aa, Homo sapiens
  CDR3 for beta chain variable domain of TCR clone 206345 (TRBV7-3, TRBJ2-3)
RASSLMKRMRGADTQYF

SEQ ID NO: 412691 - protein, 11 aa, Homo sapiens
  CDR3 for alpha chain variable domain of TCR clone 206346 (TRAV2, TRAJ13)
CASGGYQKVTF

SEQ ID NO: 412692 - protein, 13 aa, Homo sapiens
  CDR3 for beta chain variable domain of TCR clone 206346 (TRBV2, TRBJ1-1)
CASSVLMNTEAFF

SEQ ID NO: 412693 - protein, 11 aa, Homo sapiens
  CDR3 for alpha chain variable domain of TCR clone 206347 (TRAV26-1, TRAJ37)
CIVRVGRKLIF

SEQ ID NO: 412694 - protein, 19 aa, Homo sapiens
  CDR3 for beta chain variable domain of TCR clone 206347 (TRBV7-2, TRBJ2-3)
CASSFLSRNWGGGTDTQYF

SEQ ID NO: 412695 - protein, 14 aa, Homo sapiens
  CDR3 for alpha chain variable domain of TCR clone 206348 (TRAV9-2, TRAJ39)
CALYIYNAGNMLTF

SEQ ID NO: 412696 - protein, 15 aa, Homo sapiens
  CDR3 for beta chain variable domain of TCR clone 206348 (TRBV11-2, TRBJ2-7)
CASSLDRGPTYEQYF

SEQ ID NO: 412697 - protein, 14 aa, Homo sapiens
  CDR3 for alpha chain variable domain of TCR clone 206349 (TRAV13-1, TRAJ40)
CAARSTSGTYKYIF

SEQ ID NO: 412698 - protein, 15 aa, Homo sapiens
  CDR3 for beta chain variable domain of TCR clone 206349 (TRBV20-1, TRBJ2-7)
CSARDRVSGMDEQYF

SEQ ID NO: 412699 - protein, 12 aa, Homo sapiens
  CDR3 for alpha chain variable domain of TCR clone 206350 (TRAV12-1, TRAJ40)
CVVPSGTYKYIF

SEQ ID NO: 412700 - protein, 15 aa, Homo sapiens
  CDR3 for beta chain variable domain of TCR clone 206350 (TRBV12-4, TRBJ2-1)
CAGSPLSGRNTEQFF

SEQ ID NO: 412701 - protein, 15 aa, Homo sapiens
  CDR3 for alpha chain variable domain of TCR clone 206351 (TRAV8-3, TRAJ6)
CAVGEDRGGGYIPTF

SEQ ID NO: 412702 - protein, 14 aa, Homo sapiens
  CDR3 for beta chain variable domain of TCR clone 206351 (TRBV27, TRBJ2-2)
CASLRSPPGGELFF

SEQ ID NO: 412703 - protein, 15 aa, Homo sapiens
  CDR3 for alpha chain variable domain of TCR clone 206352 (TRAV12-1, TRAJ45)
CVVLSGGGGADGLTF

SEQ ID NO: 412704 - protein, 14 aa, Homo sapiens
  CDR3 for beta chain variable domain of TCR clone 206352 (TRBV11-2, TRBJ2-5)
CASSRTGGIETQYV

SEQ ID NO: 412705 - protein, 12 aa, Homo sapiens
  CDR3 for alpha chain variable domain of TCR clone 206353 (TRAV17, TRAJ12)
CATLRSSYKLNF

SEQ ID NO: 412706 - protein, 16 aa, Homo sapiens
  CDR3 for beta chain variable domain of TCR clone 206353 (TRBV28, TRBJ2-7)
CASSLFFETGGPEQYL

SEQ ID NO: 412707 - protein, 13 aa, Homo sapiens
  CDR3 for alpha chain variable domain of TCR clone 206354 (TRAV29/DV5, TRAJ54)
CAASAQGAQKLVF

SEQ ID NO: 412708 - protein, 17 aa, Homo sapiens
  CDR3 for beta chain variable domain of TCR clone 206354 (TRBV11-2, TRBJ2-1)
CASSLYPPGVEYNEQFF

SEQ ID NO: 412709 - protein, 17 aa, Homo sapiens
  CDR3 for alpha chain variable domain of TCR clone 206355 (TRAV3, TRAJ6)
CAVRDGPRAGGSYIPTF

SEQ ID NO: 412710 - protein, 16 aa, Homo sapiens
  CDR3 for beta chain variable domain of TCR clone 206355 (TRBV25-1, TRBJ2-7)
CASSELTGGGIYEQYF

SEQ ID NO: 412711 - protein, 10 aa, Homo sapiens
  CDR3 for alpha chain variable domain of TCR clone 206356 (TRAV23/DV6, TRAJ57)
CAAGSTLSQG

SEQ ID NO: 412712 - protein, 15 aa, Homo sapiens
  CDR3 for beta chain variable domain of TCR clone 206356 (TRBV27, TRBJ1-4)
CASSAQQDLNEKLFF

SEQ ID NO: 412713 - protein, 13 aa, Homo sapiens
  CDR3 for alpha chain variable domain of TCR clone 206357 (TRAV1-1, TRAJ9)
CAAKNTGGFKTIF

SEQ ID NO: 412714 - protein, 13 aa, Homo sapiens
  CDR3 for beta chain variable domain of TCR clone 206357 (TRBV7-9, TRBJ1-2)
CASSLKQNYGYTS

SEQ ID NO: 412715 - protein, 13 aa, Homo sapiens
  CDR3 for alpha chain variable domain of TCR clone 206358 (TRAV13-2, TRAJ13)
CAERPGGYQKVTF

SEQ ID NO: 412716 - protein, 12 aa, Homo sapiens
  CDR3 for beta chain variable domain of TCR clone 206358 (TRBV5-1, TRBJ1-2)
CASSQDTYGYTF

SEQ ID NO: 412717 - protein, 15 aa, Homo sapiens
  CDR3 for alpha chain variable domain of TCR clone 206359 (TRAV3, TRAJ3)
CAVRDGHSSASKIIL

SEQ ID NO: 412718 - protein, 14 aa, Homo sapiens
  CDR3 for beta chain variable domain of TCR clone 206359 (TRBV28, TRBJ1-4)
CASSFGTFDEELFF

SEQ ID NO: 412719 - protein, 14 aa, Homo sapiens
  CDR3 for alpha chain variable domain of TCR clone 206360 (TRAV1-2, TRAJ16)
CAVNRFSDGQKLLF

SEQ ID NO: 412720 - protein, 15 aa, Homo sapiens
  CDR3 for beta chain variable domain of TCR clone 206360 (TRBV7-9, TRBJ1-6)
CVSSSPGRGNSTLHF

SEQ ID NO: 412721 - protein, 14 aa, Homo sapiens
  CDR3 for alpha chain variable domain of TCR clone 206361 (TRAV13-1, TRAJ12)
CAASYMDSSYKLIF

SEQ ID NO: 412722 - protein, 14 aa, Homo sapiens
  CDR3 for beta chain variable domain of TCR clone 206361 (TRBV11-2, TRBJ2-5)
CASSRTGGIETQYF

SEQ ID NO: 412723 - protein, 16 aa, Homo sapiens
  CDR3 for alpha chain variable domain of TCR clone 206362 (TRAV26-1, TRAJ11)
CIVRVAKNSGYSTLTF

SEQ ID NO: 412724 - protein, 11 aa, Homo sapiens
  CDR3 for beta chain variable domain of TCR clone 206362 (TRBV7-8, TRBJ2-7)
CASSLSLEQYF

SEQ ID NO: 412725 - protein, 16 aa, Homo sapiens
  CDR3 for alpha chain variable domain of TCR clone 206363 (TRAV13-2, TRAJ53)
CAENANSGGSNYKMTF

SEQ ID NO: 412726 - protein, 19 aa, Homo sapiens
  CDR3 for beta chain variable domain of TCR clone 206363 (TRBV28, TRBJ2-7)
CASSYSGTSRLGWVYEQYF

SEQ ID NO: 412727 - protein, 14 aa, Homo sapiens
  CDR3 for alpha chain variable domain of TCR clone 206364 (TRAV34, TRAJ44)
CGADGTGTASKLTF

SEQ ID NO: 412728 - protein, 20 aa, Homo sapiens
  CDR3 for beta chain variable domain of TCR clone 206364 (TRBV28, TRBJ2-1)
CASTPIGRSPGLAGGNEQFF

SEQ ID NO: 412729 - protein, 12 aa, Homo sapiens
  CDR3 for alpha chain variable domain of TCR clone 206365 (TRAV12-3, TRAJ5)
CAKDTGRRALTF

SEQ ID NO: 412730 - protein, 13 aa, Homo sapiens
  CDR3 for beta chain variable domain of TCR clone 206365 (TRBV7-7, TRBJ2-2)
CASSLTSAGELFF

SEQ ID NO: 412731 - protein, 14 aa, Homo sapiens
  CDR3 for alpha chain variable domain of TCR clone 206366 (TRAV1-2, TRAJ16)
CAVNRSSDGQKLLF

SEQ ID NO: 412732 - protein, 16 aa, Homo sapiens
  CDR3 for beta chain variable domain of TCR clone 206366 (TRBV5-1, TRBJ2-5)
CASSLRRTSGQETQYF

SEQ ID NO: 412733 - protein, 12 aa, Homo sapiens
  CDR3 for alpha chain variable domain of TCR clone 206367 (TRAV17, TRAJ4)
CATDGGSNKLIF

SEQ ID NO: 412734 - protein, 13 aa, Homo sapiens
  CDR3 for beta chain variable domain of TCR clone 206367 (TRBV29-1, TRBJ2-2)
CSTTGVDTGELFF

SEQ ID NO: 412735 - protein, 15 aa, Homo sapiens
  CDR3 for alpha chain variable domain of TCR clone 206368 (TRAV23/DV6, TRAJ12)
CAAIDLGAMDSSYNL

SEQ ID NO: 412736 - protein, 14 aa, Homo sapiens
  CDR3 for beta chain variable domain of TCR clone 206368 (TRBV20-1, TRBJ2-1)
CSARRGGSYNEQFF

SEQ ID NO: 412737 - protein, 11 aa, Homo sapiens
  CDR3 for alpha chain variable domain of TCR clone 206369 (TRAV26-1, TRAJ40)
CIVSGTYKYIF

SEQ ID NO: 412738 - protein, 15 aa, Homo sapiens
  CDR3 for beta chain variable domain of TCR clone 206369 (TRBV5-1, TRBJ2-1)
CASSPPRAPYNEQFF

SEQ ID NO: 412739 - protein, 16 aa, Homo sapiens
  CDR3 for alpha chain variable domain of TCR clone 206370 (TRAV26-1, TRAJ45)
CIVEKYSGGGAEGLTF

SEQ ID NO: 412740 - protein, 11 aa, Homo sapiens
  CDR3 for beta chain variable domain of TCR clone 206370 (TRBV7-9, TRBJ2-5)
CASSLGETQYF

SEQ ID NO: 412741 - protein, 11 aa, Homo sapiens
  CDR3 for alpha chain variable domain of TCR clone 206371 (TRAV1-2, TRAJ40)
CAVPGTYKYIF

SEQ ID NO: 412742 - protein, 14 aa, Homo sapiens
  CDR3 for beta chain variable domain of TCR clone 206371 (TRBV4-1, TRBJ2-2)
CASSQAVNTGELFF

SEQ ID NO: 412743 - protein, 14 aa, Homo sapiens
  CDR3 for alpha chain variable domain of TCR clone 206372 (TRAV12-3, TRAJ15)
CAMIPPLAGTALIF

SEQ ID NO: 412744 - protein, 14 aa, Homo sapiens
  CDR3 for beta chain variable domain of TCR clone 206372 (TRBV20-1, TRBJ2-2)
CSARKRLATVELFF

SEQ ID NO: 412745 - protein, 12 aa, Homo sapiens
  CDR3 for alpha chain variable domain of TCR clone 206373 (TRAV8-4, TRAJ43)
CSVSVNNNDMRF

SEQ ID NO: 412746 - protein, 14 aa, Homo sapiens
  CDR3 for beta chain variable domain of TCR clone 206373 (TRBV11-2, TRBJ1-2)
CASSLGTANYGYTF

SEQ ID NO: 412747 - protein, 14 aa, Homo sapiens
  CDR3 for alpha chain variable domain of TCR clone 206374 (TRAV12-3, TRAJ10)
SHLPLTGGGNKITF

SEQ ID NO: 412748 - protein, 14 aa, Homo sapiens
  CDR3 for beta chain variable domain of TCR clone 206374 (TRBV12-5, TRBJ2-5)
CASGSRTHQETQYF

SEQ ID NO: 412749 - protein, 14 aa, Homo sapiens
  CDR3 for alpha chain variable domain of TCR clone 206375 (TRAV8-6, TRAJ49)
CAVSDPGTGNQFYF

SEQ ID NO: 412750 - protein, 16 aa, Homo sapiens
  CDR3 for beta chain variable domain of TCR clone 206375 (TRBV24-1, TRBJ2-1)
CATSGVAGANYNEQCF

SEQ ID NO: 412751 - protein, 14 aa, Homo sapiens
  CDR3 for alpha chain variable domain of TCR clone 206376 (TRAV1-2, TRAJ16)
CAVNRFSDGQKLLF

SEQ ID NO: 412752 - protein, 13 aa, Homo sapiens
  CDR3 for beta chain variable domain of TCR clone 206376 (TRBV20-1, TRBJ1-1)
CSAVGQVNTEAFF

SEQ ID NO: 412753 - protein, 16 aa, Homo sapiens
  CDR3 for alpha chain variable domain of TCR clone 206377 (TRAV3, TRAJ37)
CAVRVRGSGKTGKLIF

SEQ ID NO: 412754 - protein, 15 aa, Homo sapiens
  CDR3 for beta chain variable domain of TCR clone 206377 (TRBV3-1, TRBJ2-1)
CASSPRDSGFNEQFF

SEQ ID NO: 412755 - protein, 20 aa, Homo sapiens
  CDR3 for alpha chain variable domain of TCR clone 206378 (TRAV2, TRAJ37)
CCLLLCCGPDGSSNTGKLIF

SEQ ID NO: 412756 - protein, 12 aa, Homo sapiens
  CDR3 for beta chain variable domain of TCR clone 206378 (TRBV11-2, TRBJ2-3)
CASRPGTDTQYF

SEQ ID NO: 412757 - protein, 12 aa, Homo sapiens
  CDR3 for alpha chain variable domain of TCR clone 206379 (TRAV4, TRAJ26)
CLVGDYGQNFVF

SEQ ID NO: 412758 - protein, 13 aa, Homo sapiens
  CDR3 for beta chain variable domain of TCR clone 206379 (TRBV7-9, TRBJ2-3)
CTSSPGSTDTQYF

SEQ ID NO: 412759 - protein, 12 aa, Homo sapiens
  CDR3 for alpha chain variable domain of TCR clone 206380 (TRAV26-1, TRAJ35)
CIGLSFGNVLHC

SEQ ID NO: 412760 - protein, 13 aa, Homo sapiens
  CDR3 for beta chain variable domain of TCR clone 206380 (TRBV9, TRBJ2-2)
CASSTFSSGELFF

SEQ ID NO: 412761 - protein, 15 aa, Homo sapiens
  CDR3 for alpha chain variable domain of TCR clone 206381 (TRAV23/DV6, TRAJ37)
CAAGEGSSNTGKRIF

SEQ ID NO: 412762 - protein, 17 aa, Homo sapiens
  CDR3 for beta chain variable domain of TCR clone 206381 (TRBV20-1, TRBJ2-7)
CSATRAGGVAGVEEQYF

SEQ ID NO: 412763 - protein, 14 aa, Homo sapiens
  CDR3 for alpha chain variable domain of TCR clone 206382 (TRAV12-2, TRAJ9)
CAGNMEGGGFKTIF

SEQ ID NO: 412764 - protein, 14 aa, Homo sapiens
  CDR3 for beta chain variable domain of TCR clone 206382 (TRBV27, TRBJ2-3)
CASRKGGRTETQYF

SEQ ID NO: 412765 - protein, 11 aa, Homo sapiens
  CDR3 for alpha chain variable domain of TCR clone 206383 (TRAV12-3, TRAJ27)
CAMANAGKSTF

SEQ ID NO: 412766 - protein, 17 aa, Homo sapiens
  CDR3 for beta chain variable domain of TCR clone 206383 (TRBV19, TRBJ1-5)
CASSRDRILSRFQPQHF

SEQ ID NO: 412767 - protein, 16 aa, Homo sapiens
  CDR3 for alpha chain variable domain of TCR clone 206384 (TRAV12-3, TRAJ53)
CAMSPGSGGSNSKLTF

SEQ ID NO: 412768 - protein, 11 aa, Homo sapiens
  CDR3 for beta chain variable domain of TCR clone 206384 (TRBV29-1, TRBJ2-5)
CGEDRTGTQYF

SEQ ID NO: 412769 - protein, 16 aa, Homo sapiens
  CDR3 for alpha chain variable domain of TCR clone 206385 (TRAV38-2/DV8, TRAJ47)
CAYRCAIMEYGNKLVF

SEQ ID NO: 412770 - protein, 14 aa, Homo sapiens
  CDR3 for beta chain variable domain of TCR clone 206385 (TRBV19, TRBJ2-7)
CASSIFAGTYEQYF

SEQ ID NO: 412771 - protein, 13 aa, Homo sapiens
  CDR3 for alpha chain variable domain of TCR clone 206386 (TRAV1-1, TRAJ23)
CAVVANQGGKLIF

SEQ ID NO: 412772 - protein, 16 aa, Homo sapiens
  CDR3 for beta chain variable domain of TCR clone 206386 (TRBV5-5, TRBJ1-2)
CASSPTWGGGLYGYTF

SEQ ID NO: 412773 - protein, 16 aa, Homo sapiens
  CDR3 for alpha chain variable domain of TCR clone 206387 (TRAV27, TRAJ52)
CAGAGAGGTSYGKLTF

SEQ ID NO: 412774 - protein, 17 aa, Homo sapiens
  CDR3 for beta chain variable domain of TCR clone 206387 (TRBV24-1, TRBJ2-3)
CATSDLPSGEDTATQYF

SEQ ID NO: 412775 - protein, 17 aa, Homo sapiens
  CDR3 for alpha chain variable domain of TCR clone 206388 (TRAV3, TRAJ6)
CAVRDGPRAGGSYIPTF

SEQ ID NO: 412776 - protein, 14 aa, Homo sapiens
  CDR3 for beta chain variable domain of TCR clone 206388 (TRBV11-2, TRBJ2-7)
CASSLELEGYEQYF

SEQ ID NO: 412777 - protein, 14 aa, Homo sapiens
  CDR3 for alpha chain variable domain of TCR clone 206389 (TRAV26-1, TRAJ38)
CIADNAGNNRKLIW

SEQ ID NO: 412778 - protein, 14 aa, Homo sapiens
  CDR3 for beta chain variable domain of TCR clone 206389 (TRBV11-1, TRBJ2-7)
CASSFRQGSYEQYF

SEQ ID NO: 412779 - protein, 16 aa, Homo sapiens
  CDR3 for alpha chain variable domain of TCR clone 206390 (TRAV39, TRAJ32)
CAVDMEYGGATNKLIF

SEQ ID NO: 412780 - protein, 17 aa, Homo sapiens
  CDR3 for beta chain variable domain of TCR clone 206390 (TRBV11-2, TRBJ2-1)
CASSLYPPGVEYNEQFF

SEQ ID NO: 412781 - protein, 16 aa, Homo sapiens
  CDR3 for alpha chain variable domain of TCR clone 206391 (TRAV3, TRAJ37)
CAVRPHGSGSPGKLIF

SEQ ID NO: 412782 - protein, 15 aa, Homo sapiens
  CDR3 for beta chain variable domain of TCR clone 206391 (TRBV10-3, TRBJ2-3)
CAISLTSGGTETQYF

SEQ ID NO: 412783 - protein, 11 aa, Homo sapiens
  CDR3 for alpha chain variable domain of TCR clone 206392 (TRAV2, TRAJ20)
CAVKNDYKLSF

SEQ ID NO: 412784 - protein, 14 aa, Homo sapiens
  CDR3 for beta chain variable domain of TCR clone 206392 (TRBV7-9, TRBJ2-3)
CASSSEDGTDTQYF

SEQ ID NO: 412785 - protein, 11 aa, Homo sapiens
  CDR3 for alpha chain variable domain of TCR clone 206393 (TRAV2, TRAJ13)
CASGGYQKVTF

SEQ ID NO: 412786 - protein, 15 aa, Homo sapiens
  CDR3 for beta chain variable domain of TCR clone 206393 (TRBV27, TRBJ1-6)
CASSFDRGLGSPLHF

SEQ ID NO: 412787 - protein, 17 aa, Homo sapiens
  CDR3 for alpha chain variable domain of TCR clone 206394 (TRAV3, TRAJ28)
CAVREAYSGAGSYQLTF

SEQ ID NO: 412788 - protein, 13 aa, Homo sapiens
  CDR3 for beta chain variable domain of TCR clone 206394 (TRBV12-4, TRBJ1-2)
CASSVRQGKGYTF

SEQ ID NO: 412789 - protein, 15 aa, Homo sapiens
  CDR3 for alpha chain variable domain of TCR clone 206395 (TRAV26-1, TRAJ42)
CIVRVKGGSQGNLIF

SEQ ID NO: 412790 - protein, 17 aa, Homo sapiens
  CDR3 for beta chain variable domain of TCR clone 206395 (TRBV7-8, TRBJ2-6)
CASSAGTEGAGANVLTF

SEQ ID NO: 412791 - protein, 15 aa, Homo sapiens
  CDR3 for alpha chain variable domain of TCR clone 206396 (TRAV26-1, TRAJ23)
CIVRVPNNQGGKLIF

SEQ ID NO: 412792 - protein, 15 aa, Homo sapiens
  CDR3 for beta chain variable domain of TCR clone 206396 (TRBV7-3, TRBJ2-1)
CASSFGQSNYNEQFF

SEQ ID NO: 412793 - protein, 13 aa, Homo sapiens
  CDR3 for alpha chain variable domain of TCR clone 206397 (TRAV17, TRAJ34)
CATVYYNTDKLIF

SEQ ID NO: 412794 - protein, 14 aa, Homo sapiens
  CDR3 for beta chain variable domain of TCR clone 206397 (TRBV11-2, TRBJ2-5)
CASRPLAGRETQYF

SEQ ID NO: 412795 - protein, 22 aa, Homo sapiens
  CDR3 for alpha chain variable domain of TCR clone 206398 (TRAV23/DV6, TRAJ43)
CISWIPSLETQSPLLCSRRCSF

SEQ ID NO: 412796 - protein, 13 aa, Homo sapiens
  CDR3 for beta chain variable domain of TCR clone 206398 (TRBV12-4, TRBJ1-2)
CASSLRQGKGYTF

SEQ ID NO: 412797 - protein, 15 aa, Homo sapiens
  CDR3 for alpha chain variable domain of TCR clone 206399 (TRAV13-1, TRAJ32)
CAASIYGGATNKLIF

SEQ ID NO: 412798 - protein, 14 aa, Homo sapiens
  CDR3 for beta chain variable domain of TCR clone 206399 (TRBV12-5, TRBJ2-5)
CASGSRTHQETQYF

SEQ ID NO: 412799 - protein, 12 aa, Homo sapiens
  CDR3 for alpha chain variable domain of TCR clone 206400 (TRAV29/DV5, TRAJ15)
CASNQAVTVLIF

SEQ ID NO: 412800 - protein, 15 aa, Homo sapiens
  CDR3 for beta chain variable domain of TCR clone 206400 (TRBV11-3, TRBJ2-2)
CASSSDRVNAGELFF

SEQ ID NO: 412801 - protein, 12 aa, Homo sapiens
  CDR3 for alpha chain variable domain of TCR clone 206401 (TRAV26-1, TRAJ53)
CIEGGSNYKLTF

SEQ ID NO: 412802 - protein, 16 aa, Homo sapiens
  CDR3 for beta chain variable domain of TCR clone 206401 (TRBV20-1, TRBJ2-7)
CSARGSVVADIYEQYF

SEQ ID NO: 412803 - protein, 12 aa, Homo sapiens
  CDR3 for alpha chain variable domain of TCR clone 206402 (TRAV29/DV5, TRAJ34)
CAARHNTDKLIF

SEQ ID NO: 412804 - protein, 14 aa, Homo sapiens
  CDR3 for beta chain variable domain of TCR clone 206402 (TRBV7-2, TRBJ2-7)
CASSPKTSFYEQYF

SEQ ID NO: 412805 - protein, 12 aa, Homo sapiens
  CDR3 for alpha chain variable domain of TCR clone 206403 (TRAV8-1, TRAJ26)
CAVNDYGQNFVF

SEQ ID NO: 412806 - protein, 12 aa, Homo sapiens
  CDR3 for beta chain variable domain of TCR clone 206403 (TRBV5-5, TRBJ2-5)
CASSYFGETQYF

SEQ ID NO: 412807 - protein, 13 aa, Homo sapiens
  CDR3 for alpha chain variable domain of TCR clone 206404 (TRAV13-1, TRAJ20)
RAARVSNDYKLSF

SEQ ID NO: 412808 - protein, 12 aa, Homo sapiens
  CDR3 for beta chain variable domain of TCR clone 206404 (TRBV20-1, TRBJ2-1)
CSARLGTDEQFF

SEQ ID NO: 412809 - protein, 15 aa, Homo sapiens
  CDR3 for alpha chain variable domain of TCR clone 206405 (TRAV3, TRAJ4)
CAVRDGTGGYNKQVF

SEQ ID NO: 412810 - protein, 16 aa, Homo sapiens
  CDR3 for beta chain variable domain of TCR clone 206405 (TRBV27, TRBJ2-2)
CASSSSGVSNTGELFF

SEQ ID NO: 412811 - protein, 13 aa, Homo sapiens
  CDR3 for alpha chain variable domain of TCR clone 206406 (TRAV21, TRAJ20)
CAVGLRVDYKLSF

SEQ ID NO: 412812 - protein, 15 aa, Homo sapiens
  CDR3 for beta chain variable domain of TCR clone 206406 (TRBV7-9, TRBJ2-2)
CASGPLDTFPGELFF

SEQ ID NO: 412813 - protein, 15 aa, Homo sapiens
  CDR3 for alpha chain variable domain of TCR clone 206407 (TRAV8-3, TRAJ27)
CAVGPSKTNAGESTF

SEQ ID NO: 412814 - protein, 15 aa, Homo sapiens
  CDR3 for beta chain variable domain of TCR clone 206407 (TRBV7-2, TRBJ2-1)
CASSSGLAGGIEQFF

SEQ ID NO: 412815 - protein, 15 aa, Homo sapiens
  CDR3 for alpha chain variable domain of TCR clone 206408 (TRAV2, TRAJ9)
CAVAALNTGGFKTIF

SEQ ID NO: 412816 - protein, 13 aa, Homo sapiens
  CDR3 for beta chain variable domain of TCR clone 206408 (TRBV7-9, TRBJ1-2)
CASSLKQNYGYAF

SEQ ID NO: 412817 - protein, 16 aa, Homo sapiens
  CDR3 for alpha chain variable domain of TCR clone 206409 (TRAV21, TRAJ17)
CAVRPCEEAAGNKLTL

SEQ ID NO: 412818 - protein, 16 aa, Homo sapiens
  CDR3 for beta chain variable domain of TCR clone 206409 (TRBV2, TRBJ2-7)
CASSEPWTGPSYEQYF

SEQ ID NO: 412819 - protein, 15 aa, Homo sapiens
  CDR3 for alpha chain variable domain of TCR clone 206410 (TRAV27, TRAJ38)
CAARRNAGNNRKRIW

SEQ ID NO: 412820 - protein, 10 aa, Homo sapiens
  CDR3 for beta chain variable domain of TCR clone 206410 (TRBV12-4, TRBJ2-2)
CQQLRRGAVF

SEQ ID NO: 412821 - protein, 16 aa, Homo sapiens
  CDR3 for alpha chain variable domain of TCR clone 206411 (TRAV30, TRAJ24)
CGTEIVEADSWGKFSL

SEQ ID NO: 412822 - protein, 14 aa, Homo sapiens
  CDR3 for beta chain variable domain of TCR clone 206411 (TRBV12-5, TRBJ2-5)
CASGSRTHQETQYF

SEQ ID NO: 412823 - protein, 20 aa, Homo sapiens
  CDR3 for alpha chain variable domain of TCR clone 206412 (TRAV36/DV7, TRAJ28)
CAVDTNSGLWGWELPTHFRE

SEQ ID NO: 412824 - protein, 15 aa, Homo sapiens
  CDR3 for beta chain variable domain of TCR clone 206412 (TRBV2, TRBJ2-1)
CASRGTGANYNEQFF

SEQ ID NO: 412825 - protein, 10 aa, Homo sapiens
  CDR3 for alpha chain variable domain of TCR clone 206413 (TRAV1-2, TRAJ31)
CAFFDARLMF

SEQ ID NO: 412826 - protein, 17 aa, Homo sapiens
  CDR3 for beta chain variable domain of TCR clone 206413 (TRBV15, TRBJ1-5)
CATSRAPPGTRNQPQHF

SEQ ID NO: 412827 - protein, 12 aa, Homo sapiens
  CDR3 for alpha chain variable domain of TCR clone 206414 (TRAV27, TRAJ42)
CAGGGSQGILIF

SEQ ID NO: 412828 - protein, 13 aa, Homo sapiens
  CDR3 for beta chain variable domain of TCR clone 206414 (TRBV19, TRBJ2-7)
CASSIRSSYEQYF

SEQ ID NO: 412829 - protein, 14 aa, Homo sapiens
  CDR3 for alpha chain variable domain of TCR clone 206415 (TRAV12-3, TRAJ10)
SHLPLTGGGNKLIF

SEQ ID NO: 412830 - protein, 15 aa, Homo sapiens
  CDR3 for beta chain variable domain of TCR clone 206415 (TRBV6-6, TRBJ1-5)
CASSSIQGTNQPQHF

SEQ ID NO: 412831 - protein, 14 aa, Homo sapiens
  CDR3 for alpha chain variable domain of TCR clone 206416 (TRAV1-2, TRAJ16)
CAVNRFSDGQKLPF

SEQ ID NO: 412832 - protein, 14 aa, Homo sapiens
  CDR3 for beta chain variable domain of TCR clone 206416 (TRBV28, TRBJ2-1)
CASSFDSVSDEQFF

SEQ ID NO: 412833 - protein, 13 aa, Homo sapiens
  CDR3 for alpha chain variable domain of TCR clone 206417 (TRAV1-1, TRAJ9)
CAAKNTGGFKTIF

SEQ ID NO: 412834 - protein, 14 aa, Homo sapiens
  CDR3 for beta chain variable domain of TCR clone 206417 (TRBV20-1, TRBJ2-1)
CTAQIGGSANEQFF

SEQ ID NO: 412835 - protein, 15 aa, Homo sapiens
  CDR3 for alpha chain variable domain of TCR clone 206418 (TRAV16, TRAJ10)
FALRELTGGGNKLTF

SEQ ID NO: 412836 - protein, 15 aa, Homo sapiens
  CDR3 for beta chain variable domain of TCR clone 206418 (TRBV5-1, TRBJ2-3)
CASSVTSGSTDTQYF

SEQ ID NO: 412837 - protein, 13 aa, Homo sapiens
  CDR3 for alpha chain variable domain of TCR clone 206419 (TRAV23/DV6, TRAJ36)
CAASQTGAINLFF

SEQ ID NO: 412838 - protein, 13 aa, Homo sapiens
  CDR3 for beta chain variable domain of TCR clone 206419 (TRBV5-4, TRBJ1-5)
CASSLGGDQPQHF

SEQ ID NO: 412839 - protein, 13 aa, Homo sapiens
  CDR3 for alpha chain variable domain of TCR clone 206420 (TRAV21, TRAJ27)
CAARPGNVGKSTF

SEQ ID NO: 412840 - protein, 15 aa, Homo sapiens
  CDR3 for beta chain variable domain of TCR clone 206420 (TRBV6-3, TRBJ2-7)
CASSSPGTVFYEQYF

SEQ ID NO: 412841 - protein, 16 aa, Homo sapiens
  CDR3 for alpha chain variable domain of TCR clone 206421 (TRAV4, TRAJ18)
CCVLLIGGSTLGRLYF

SEQ ID NO: 412842 - protein, 12 aa, Homo sapiens
  CDR3 for beta chain variable domain of TCR clone 206421 (TRBV6-3, TRBJ2-7)
CDSSLTPYEQYF

SEQ ID NO: 412843 - protein, 13 aa, Homo sapiens
  CDR3 for alpha chain variable domain of TCR clone 206422 (TRAV12-2, TRAJ40)
CAVKRTGTYKYIF

SEQ ID NO: 412844 - protein, 15 aa, Homo sapiens
  CDR3 for beta chain variable domain of TCR clone 206422 (TRBV11-2, TRBJ2-2)
CASRGLAANTGELFF

SEQ ID NO: 412845 - protein, 14 aa, Homo sapiens
  CDR3 for alpha chain variable domain of TCR clone 206423 (TRAV29/DV5, TRAJ48)
CAAMALLGNEKLTF

SEQ ID NO: 412846 - protein, 17 aa, Homo sapiens
  CDR3 for beta chain variable domain of TCR clone 206423 (TRBV7-3, TRBJ2-3)
CASSLMKRMRGADTQYF

SEQ ID NO: 412847 - protein, 16 aa, Homo sapiens
  CDR3 for alpha chain variable domain of TCR clone 206424 (TRAV30, TRAJ24)
CGTEIVDADSWGKFEF

SEQ ID NO: 412848 - protein, 14 aa, Homo sapiens
  CDR3 for beta chain variable domain of TCR clone 206424 (TRBV7-2, TRBJ1-2)
CASSQTGSTYGYTF

SEQ ID NO: 412849 - protein, 15 aa, Homo sapiens
  CDR3 for alpha chain variable domain of TCR clone 206425 (TRAV12-3, TRAJ6)
CAMSATTGGSYIPPF

SEQ ID NO: 412850 - protein, 16 aa, Homo sapiens
  CDR3 for beta chain variable domain of TCR clone 206425 (TRBV20-1, TRBJ1-2)
CSASMGQGVANYGYAF

SEQ ID NO: 412851 - protein, 15 aa, Homo sapiens
  CDR3 for alpha chain variable domain of TCR clone 206426 (TRAV1-2, TRAJ15)
CAVDVMGSAGTALFF

SEQ ID NO: 412852 - protein, 13 aa, Homo sapiens
  CDR3 for beta chain variable domain of TCR clone 206426 (TRBV20-1, TRBJ1-1)
CSAFDRENTEAFV

SEQ ID NO: 412853 - protein, 14 aa, Homo sapiens
  CDR3 for alpha chain variable domain of TCR clone 206427 (TRAV35, TRAJ40)
CAGSTTSGTYKYIF

SEQ ID NO: 412854 - protein, 13 aa, Homo sapiens
  CDR3 for beta chain variable domain of TCR clone 206427 (TRBV19, TRBJ1-5)
CASSIGGEQPQHF

SEQ ID NO: 412855 - protein, 15 aa, Homo sapiens
  CDR3 for alpha chain variable domain of TCR clone 206428 (TRAV27, TRAJ38)
CAARRNAGNNRNLIW

SEQ ID NO: 412856 - protein, 15 aa, Homo sapiens
  CDR3 for beta chain variable domain of TCR clone 206428 (TRBV5-1, TRBJ2-1)
CASSPPRAPYNEQFF

SEQ ID NO: 412857 - protein, 21 aa, Homo sapiens
  CDR3 for alpha chain variable domain of TCR clone 206429 (TRAV12-2, TRAJ4)
SPVIQPPTSVPAFLVANKLIF

SEQ ID NO: 412858 - protein, 14 aa, Homo sapiens
  CDR3 for beta chain variable domain of TCR clone 206429 (TRBV24-1, TRBJ1-1)
CATSIPRGDTEAFF

SEQ ID NO: 412859 - protein, 15 aa, Homo sapiens
  CDR3 for alpha chain variable domain of TCR clone 206430 (TRAV22, TRAJ56)
CAVRENSGANSKLTF

SEQ ID NO: 412860 - protein, 19 aa, Homo sapiens
  CDR3 for beta chain variable domain of TCR clone 206430 (TRBV12-4, TRBJ2-1)
CASTLAFDPRDKEANEQFF

SEQ ID NO: 412861 - protein, 14 aa, Homo sapiens
  CDR3 for alpha chain variable domain of TCR clone 206431 (TRAV13-2, TRAJ17)
CAENSKAAGNKQTF

SEQ ID NO: 412862 - protein, 14 aa, Homo sapiens
  CDR3 for beta chain variable domain of TCR clone 206431 (TRBV19, TRBJ2-1)
CASPTFVLSGEQFF

SEQ ID NO: 412863 - protein, 11 aa, Homo sapiens
  CDR3 for alpha chain variable domain of TCR clone 206432 (TRAV12-3, TRAJ27)
CAMANAGKSTC

SEQ ID NO: 412864 - protein, 14 aa, Homo sapiens
  CDR3 for beta chain variable domain of TCR clone 206432 (TRBV4-1, TRBJ2-2)
CASSQAVNTGELFF

SEQ ID NO: 412865 - protein, 12 aa, Homo sapiens
  CDR3 for alpha chain variable domain of TCR clone 206433 (TRAV4, TRAJ26)
CLVGDYGQNFVF

SEQ ID NO: 412866 - protein, 18 aa, Homo sapiens
  CDR3 for beta chain variable domain of TCR clone 206433 (TRBV6-6, TRBJ1-3)
CASSYSKWDSISGNTIYF

SEQ ID NO: 412867 - protein, 12 aa, Homo sapiens
  CDR3 for alpha chain variable domain of TCR clone 206434 (TRAV20, TRAJ24)
CAVYNSWGKLQF

SEQ ID NO: 412868 - protein, 15 aa, Homo sapiens
  CDR3 for beta chain variable domain of TCR clone 206434 (TRBV20-1, TRBJ2-5)
CSARGPPSGRETQYF

SEQ ID NO: 412869 - protein, 14 aa, Homo sapiens
  CDR3 for alpha chain variable domain of TCR clone 206435 (TRAV13-2, TRAJ15)
YAENPNQAGNALIF

SEQ ID NO: 412870 - protein, 16 aa, Homo sapiens
  CDR3 for beta chain variable domain of TCR clone 206435 (TRBV12-4, TRBJ1-2)
CASSPTATGKTRGYTF

SEQ ID NO: 412871 - protein, 15 aa, Homo sapiens
  CDR3 for alpha chain variable domain of TCR clone 206436 (TRAV12-3, TRAJ22)
CAMRTISGTARQLTF

SEQ ID NO: 412872 - protein, 16 aa, Homo sapiens
  CDR3 for beta chain variable domain of TCR clone 206436 (TRBV20-1, TRBJ2-2)
CSARRPGTGNTGELFF

SEQ ID NO: 412873 - protein, 15 aa, Homo sapiens
  CDR3 for alpha chain variable domain of TCR clone 206437 (TRAV1-2, TRAJ9)
CAVRDDGTGGFKTIF

SEQ ID NO: 412874 - protein, 16 aa, Homo sapiens
  CDR3 for beta chain variable domain of TCR clone 206437 (TRBV7-2, TRBJ1-6)
CASSSFESSYNPPLHF

SEQ ID NO: 412875 - protein, 12 aa, Homo sapiens
  CDR3 for alpha chain variable domain of TCR clone 206438 (TRAV8-3, TRAJ26)
CPGDNYGQNFVF

SEQ ID NO: 412876 - protein, 15 aa, Homo sapiens
  CDR3 for beta chain variable domain of TCR clone 206438 (TRBV9, TRBJ2-1)
CASSLAGSSYNEQFF

SEQ ID NO: 412877 - protein, 11 aa, Homo sapiens
  CDR3 for alpha chain variable domain of TCR clone 206439 (TRAV12-3, TRAJ41)
CAMNAREALNF

SEQ ID NO: 412878 - protein, 16 aa, Homo sapiens
  CDR3 for beta chain variable domain of TCR clone 206439 (TRBV7-8, TRBJ2-3)
CASSTEGQRETETQYF

SEQ ID NO: 412879 - protein, 10 aa, Homo sapiens
  CDR3 for alpha chain variable domain of TCR clone 206440 (TRAV12-3, TRAJ34)
CAMSADKPIF

SEQ ID NO: 412880 - protein, 15 aa, Homo sapiens
  CDR3 for beta chain variable domain of TCR clone 206440 (TRBV27, TRBJ2-1)
CASSNGGGSSNEQFF

SEQ ID NO: 412881 - protein, 13 aa, Homo sapiens
  CDR3 for alpha chain variable domain of TCR clone 206441 (TRAV12-2, TRAJ20)
CAVYPSNDYKPSF

SEQ ID NO: 412882 - protein, 14 aa, Homo sapiens
  CDR3 for beta chain variable domain of TCR clone 206441 (TRBV25-1, TRBJ1-1)
CASTHLGGNTEAFF

SEQ ID NO: 412883 - protein, 16 aa, Homo sapiens
  CDR3 for alpha chain variable domain of TCR clone 206442 (TRAV30, TRAJ26)
CGTESVGDNYGQNFVF

SEQ ID NO: 412884 - protein, 13 aa, Homo sapiens
  CDR3 for beta chain variable domain of TCR clone 206442 (TRBV6-1, TRBJ2-1)
CASREDGGHEQFF

SEQ ID NO: 412885 - protein, 17 aa, Homo sapiens
  CDR3 for alpha chain variable domain of TCR clone 206443 (TRAV36/DV7, TRAJ52)
CAVAQRAVGTSYGKLTF

SEQ ID NO: 412886 - protein, 14 aa, Homo sapiens
  CDR3 for beta chain variable domain of TCR clone 206443 (TRBV6-1, TRBJ1-3)
CASVQGGGGNTIYF

SEQ ID NO: 412887 - protein, 18 aa, Homo sapiens
  CDR3 for alpha chain variable domain of TCR clone 206444 (TRAV29/DV5, TRAJ26)
CSVLLCSKRKPEGENFVF

SEQ ID NO: 412888 - protein, 17 aa, Homo sapiens
  CDR3 for beta chain variable domain of TCR clone 206444 (TRBV20-1, TRBJ2-2)
CSASGSGQGGLTGELFF

SEQ ID NO: 412889 - protein, 11 aa, Homo sapiens
  CDR3 for alpha chain variable domain of TCR clone 206445 (TRAV2, TRAJ13)
CASGGYQKVTF

SEQ ID NO: 412890 - protein, 15 aa, Homo sapiens
  CDR3 for beta chain variable domain of TCR clone 206445 (TRBV20-1, TRBJ2-7)
CSARGPLAGGREQYF

SEQ ID NO: 412891 - protein, 17 aa, Homo sapiens
  CDR3 for alpha chain variable domain of TCR clone 206446 (TRAV3, TRAJ6)
CAVRDGPRAGGSYIHTF

SEQ ID NO: 412892 - protein, 15 aa, Homo sapiens
  CDR3 for beta chain variable domain of TCR clone 206446 (TRBV6-6, TRBJ2-7)
CASSYSYGGSYEQYF

SEQ ID NO: 412893 - protein, 15 aa, Homo sapiens
  CDR3 for alpha chain variable domain of TCR clone 206447 (TRAV16, TRAJ17)
CALSGNKAAGNKLTF

SEQ ID NO: 412894 - protein, 16 aa, Homo sapiens
  CDR3 for beta chain variable domain of TCR clone 206447 (TRBV7-6, TRBJ1-6)
CASSSLPAGEYSPLNF

SEQ ID NO: 412895 - protein, 15 aa, Homo sapiens
  CDR3 for alpha chain variable domain of TCR clone 206448 (TRAV12-2, TRAJ43)
CAFDMRFGAGTILTG

SEQ ID NO: 412896 - protein, 18 aa, Homo sapiens
  CDR3 for beta chain variable domain of TCR clone 206448 (TRBV20-1, TRBJ2-3)
CSASGLAGGPGTTDTQYF

SEQ ID NO: 412897 - protein, 16 aa, Homo sapiens
  CDR3 for alpha chain variable domain of TCR clone 206449 (TRAV8-4, TRAJ13)
CAVTLSGGYQKVTLEL

SEQ ID NO: 412898 - protein, 14 aa, Homo sapiens
  CDR3 for beta chain variable domain of TCR clone 206449 (TRBV7-2, TRBJ1-2)
CASSQTGSTYGYTF

SEQ ID NO: 412899 - protein, 11 aa, Homo sapiens
  CDR3 for alpha chain variable domain of TCR clone 206450 (TRAV20, TRAJ31)
CAVQMRARLMF

SEQ ID NO: 412900 - protein, 15 aa, Homo sapiens
  CDR3 for beta chain variable domain of TCR clone 206450 (TRBV5-1, TRBJ2-1)
CASSPPRAPYNEQFF

SEQ ID NO: 412901 - protein, 14 aa, Homo sapiens
  CDR3 for alpha chain variable domain of TCR clone 206451 (TRAV2, TRAJ22)
CAVGRGGSARQLTF

SEQ ID NO: 412902 - protein, 14 aa, Homo sapiens
  CDR3 for beta chain variable domain of TCR clone 206451 (TRBV7-9, TRBJ2-2)
CASSLIQDTGELFF

SEQ ID NO: 412903 - protein, 14 aa, Homo sapiens
  CDR3 for alpha chain variable domain of TCR clone 206452 (TRAV27, TRAJ17)
CRSTIRAAGNKLTF

SEQ ID NO: 412904 - protein, 16 aa, Homo sapiens
  CDR3 for beta chain variable domain of TCR clone 206452 (TRBV5-7, TRBJ2-5)
CASTLAPAGGRDTQYF

SEQ ID NO: 412905 - protein, 14 aa, Homo sapiens
  CDR3 for alpha chain variable domain of TCR clone 206453 (TRAV14/DV4, TRAJ34)
CAMREGRPHRQAHL

SEQ ID NO: 412906 - protein, 15 aa, Homo sapiens
  CDR3 for beta chain variable domain of TCR clone 206453 (TRBV7-3, TRBJ2-1)
CASSPTGGGEVEQFF

SEQ ID NO: 412907 - protein, 12 aa, Homo sapiens
  CDR3 for alpha chain variable domain of TCR clone 206454 (TRAV27, TRAJ35)
CAGADFGNVLHC

SEQ ID NO: 412908 - protein, 16 aa, Homo sapiens
  CDR3 for beta chain variable domain of TCR clone 206454 (TRBV18, TRBJ1-1)
CASSPGVGGRGGEAFF

SEQ ID NO: 412909 - protein, 11 aa, Homo sapiens
  CDR3 for alpha chain variable domain of TCR clone 206455 (TRAV12-2, TRAJ33)
CAVGSNYQLVW

SEQ ID NO: 412910 - protein, 14 aa, Homo sapiens
  CDR3 for beta chain variable domain of TCR clone 206455 (TRBV6-1, TRBJ2-2)
CASVEHIESGELFF

SEQ ID NO: 412911 - protein, 15 aa, Homo sapiens
  CDR3 for alpha chain variable domain of TCR clone 206456 (TRAV23/DV6, TRAJ18)
CAARYRGSTLGRLYF

SEQ ID NO: 412912 - protein, 15 aa, Homo sapiens
  CDR3 for beta chain variable domain of TCR clone 206456 (TRBV10-2, TRBJ2-5)
CASRGSGGPQETQYF

SEQ ID NO: 412913 - protein, 13 aa, Homo sapiens
  CDR3 for alpha chain variable domain of TCR clone 206457 (TRAV17, TRAJ5)
CAPKDTGRRALTF

SEQ ID NO: 412914 - protein, 15 aa, Homo sapiens
  CDR3 for beta chain variable domain of TCR clone 206457 (TRBV6-6, TRBJ2-5)
CASSPGGGLEETQYF

SEQ ID NO: 412915 - protein, 11 aa, Homo sapiens
  CDR3 for alpha chain variable domain of TCR clone 206458 (TRAV8-4, TRAJ18)
CAVTANGGSTL

SEQ ID NO: 412916 - protein, 14 aa, Homo sapiens
  CDR3 for beta chain variable domain of TCR clone 206458 (TRBV12-4, TRBJ1-2)
CASSSAGHIYGYTF

SEQ ID NO: 412917 - protein, 15 aa, Homo sapiens
  CDR3 for alpha chain variable domain of TCR clone 206459 (TRAV27, TRAJ38)
CAGRFNAGNNRKLIW

SEQ ID NO: 412918 - protein, 13 aa, Homo sapiens
  CDR3 for beta chain variable domain of TCR clone 206459 (TRBV12-4, TRBJ1-2)
CASSLRQGKGYTF

SEQ ID NO: 412919 - protein, 14 aa, Homo sapiens
  CDR3 for alpha chain variable domain of TCR clone 206460 (TRAV1-2, TRAJ8)
CAVREDTGFQKLGF

SEQ ID NO: 412920 - protein, 13 aa, Homo sapiens
  CDR3 for beta chain variable domain of TCR clone 206460 (TRBV27, TRBJ2-7)
CTSSVTTGYEQYF

SEQ ID NO: 412921 - protein, 16 aa, Homo sapiens
  CDR3 for alpha chain variable domain of TCR clone 206461 (TRAV30, TRAJ49)
SAAQRVGPNTGNQFYF

SEQ ID NO: 412922 - protein, 14 aa, Homo sapiens
  CDR3 for beta chain variable domain of TCR clone 206461 (TRBV7-2, TRBJ2-7)
CASSPKTSFYEQYF

SEQ ID NO: 412923 - protein, 15 aa, Homo sapiens
  CDR3 for alpha chain variable domain of TCR clone 206462 (TRAV8-3, TRAJ45)
CASSYSGGGADRLTF

SEQ ID NO: 412924 - protein, 17 aa, Homo sapiens
  CDR3 for beta chain variable domain of TCR clone 206462 (TRBV7-8, TRBJ1-2)
CASSLRPLQGHLYGYTF

SEQ ID NO: 412925 - protein, 15 aa, Homo sapiens
  CDR3 for alpha chain variable domain of TCR clone 206463 (TRAV23/DV6, TRAJ18)
CAASFRGSTLGRLYL

SEQ ID NO: 412926 - protein, 13 aa, Homo sapiens
  CDR3 for beta chain variable domain of TCR clone 206463 (TRBV28, TRBJ2-7)
CAILDRAGGEQYF

SEQ ID NO: 412927 - protein, 13 aa, Homo sapiens
  CDR3 for alpha chain variable domain of TCR clone 206464 (TRAV12-3, TRAJ5)
CAMIYKGRRALTF

SEQ ID NO: 412928 - protein, 12 aa, Homo sapiens
  CDR3 for beta chain variable domain of TCR clone 206464 (TRBV18, TRBJ1-4)
CASSPSREKLFF

SEQ ID NO: 412929 - protein, 12 aa, Homo sapiens
  CDR3 for alpha chain variable domain of TCR clone 206465 (TRAV12-3, TRAJ17)
CAMTLTGNKLTF

SEQ ID NO: 412930 - protein, 15 aa, Homo sapiens
  CDR3 for beta chain variable domain of TCR clone 206465 (TRBV10-2, TRBJ2-6)
CASSEQGTGANVMTF

SEQ ID NO: 412931 - protein, 14 aa, Homo sapiens
  CDR3 for alpha chain variable domain of TCR clone 206466 (TRAV16, TRAJ33)
CALSAMDSNYQLIW

SEQ ID NO: 412932 - protein, 19 aa, Homo sapiens
  CDR3 for beta chain variable domain of TCR clone 206466 (TRBV11-2, TRBJ2-2)
LRTRPCISGPAAYPGSCFF

SEQ ID NO: 412933 - protein, 16 aa, Homo sapiens
  CDR3 for alpha chain variable domain of TCR clone 206467 (TRAV30, TRAJ24)
CGTEIVDADSWGKFQF

SEQ ID NO: 412934 - protein, 13 aa, Homo sapiens
  CDR3 for beta chain variable domain of TCR clone 206467 (TRBV11-2, TRBJ1-1)
CASSFTENTEAFF

SEQ ID NO: 412935 - protein, 14 aa, Homo sapiens
  CDR3 for alpha chain variable domain of TCR clone 206468 (TRAV8-4, TRAJ13)
CAVTLSGGYQKVTF

SEQ ID NO: 412936 - protein, 15 aa, Homo sapiens
  CDR3 for beta chain variable domain of TCR clone 206468 (TRBV7-2, TRBJ2-6)
CASSLQEAGANVLTF

SEQ ID NO: 412937 - protein, 13 aa, Homo sapiens
  CDR3 for alpha chain variable domain of TCR clone 206469 (TRAV20, TRAJ37)
CAGCSSNTGKLIF

SEQ ID NO: 412938 - protein, 17 aa, Homo sapiens
  CDR3 for beta chain variable domain of TCR clone 206469 (TRBV7-8, TRBJ2-6)
CASSAGTGGAGANDLTF

SEQ ID NO: 412939 - protein, 13 aa, Homo sapiens
  CDR3 for alpha chain variable domain of TCR clone 206470 (TRAV12-3, TRAJ13)
CAMTSGGYLKVTF

SEQ ID NO: 412940 - protein, 13 aa, Homo sapiens
  CDR3 for beta chain variable domain of TCR clone 206470 (TRBV7-9, TRBJ1-2)
CASSLKQNYGYTF

SEQ ID NO: 412941 - protein, 14 aa, Homo sapiens
  CDR3 for alpha chain variable domain of TCR clone 206471 (TRAV12-1, TRAJ29)
CVVNEGSGNTPLVF

SEQ ID NO: 412942 - protein, 13 aa, Homo sapiens
  CDR3 for beta chain variable domain of TCR clone 206471 (TRBV7-9, TRBJ2-3)
CASSPGSTATQYF

SEQ ID NO: 412943 - protein, 14 aa, Homo sapiens
  CDR3 for alpha chain variable domain of TCR clone 206472 (TRAV12-2, TRAJ11)
YAVRKNSGYSTLTF

SEQ ID NO: 412944 - protein, 14 aa, Homo sapiens
  CDR3 for beta chain variable domain of TCR clone 206472 (TRBV7-2, TRBJ2-5)
CARWQERFRETQYF

SEQ ID NO: 412945 - protein, 16 aa, Homo sapiens
  CDR3 for alpha chain variable domain of TCR clone 206473 (TRAV30, TRAJ24)
CGTEIVDADSWGKFQF

SEQ ID NO: 412946 - protein, 19 aa, Homo sapiens
  CDR3 for beta chain variable domain of TCR clone 206473 (TRBV25-1, TRBJ2-2)
CAILVYRVDRGHKTGELFF

SEQ ID NO: 412947 - protein, 13 aa, Homo sapiens
  CDR3 for alpha chain variable domain of TCR clone 206474 (TRAV12-1, TRAJ6)
CVVFPGGSYIPTF

SEQ ID NO: 412948 - protein, 16 aa, Homo sapiens
  CDR3 for beta chain variable domain of TCR clone 206474 (TRBV3-1, TRBJ2-7)
CASSQGATGVAYEQYF

SEQ ID NO: 412949 - protein, 15 aa, Homo sapiens
  CDR3 for alpha chain variable domain of TCR clone 206475 (TRAV17, TRAJ57)
CATGPSQGGSEKLVF

SEQ ID NO: 412950 - protein, 15 aa, Homo sapiens
  CDR3 for beta chain variable domain of TCR clone 206475 (TRBV25-1, TRBJ1-4)
CASSPGDSTNEKLVF

SEQ ID NO: 412951 - protein, 14 aa, Homo sapiens
  CDR3 for alpha chain variable domain of TCR clone 206476 (TRAV23/DV6, TRAJ6)
CAASRSGGSYIPTF

SEQ ID NO: 412952 - protein, 17 aa, Homo sapiens
  CDR3 for beta chain variable domain of TCR clone 206476 (TRBV20-1, TRBJ2-1)
CSASASRLAGSYNEQFF

SEQ ID NO: 412953 - protein, 19 aa, Homo sapiens
  CDR3 for alpha chain variable domain of TCR clone 206477 (TRAV1-2, TRAJ26)
CLLPLCCERPDNYGQNFFF

SEQ ID NO: 412954 - protein, 11 aa, Homo sapiens
  CDR3 for beta chain variable domain of TCR clone 206477 (TRBV29-1, TRBJ2-5)
CSEDRTGTQYF

SEQ ID NO: 412955 - protein, 14 aa, Homo sapiens
  CDR3 for alpha chain variable domain of TCR clone 206478 (TRAV1-2, TRAJ16)
CAVNRFSDGQKLLF

SEQ ID NO: 412956 - protein, 18 aa, Homo sapiens
  CDR3 for beta chain variable domain of TCR clone 206478 (TRBV23-1, TRBJ2-7)
CASSQYRRTDSTSSTSGR

SEQ ID NO: 412957 - protein, 15 aa, Homo sapiens
  CDR3 for alpha chain variable domain of TCR clone 206479 (TRAV12-1, TRAJ45)
CVFLSGGGGADGLTF

SEQ ID NO: 412958 - protein, 12 aa, Homo sapiens
  CDR3 for beta chain variable domain of TCR clone 206479 (TRBV12-5, TRBJ2-5)
CASGQGVETQYF

SEQ ID NO: 412959 - protein, 13 aa, Homo sapiens
  CDR3 for alpha chain variable domain of TCR clone 206480 (TRAV8-3, TRAJ44)
GAVVPGTASKLTF

SEQ ID NO: 412960 - protein, 13 aa, Homo sapiens
  CDR3 for beta chain variable domain of TCR clone 206480 (TRBV10-3, TRBJ1-2)
CAISERDSYGYTF

SEQ ID NO: 412961 - protein, 17 aa, Homo sapiens
  CDR3 for alpha chain variable domain of TCR clone 206481 (TRAV17, TRAJ27)
CATSSLKKTPMQANQPL

SEQ ID NO: 412962 - protein, 17 aa, Homo sapiens
  CDR3 for beta chain variable domain of TCR clone 206481 (TRBV13, TRBJ2-3)
CASSLSRVAGGGNTQYF

SEQ ID NO: 412963 - protein, 16 aa, Homo sapiens
  CDR3 for alpha chain variable domain of TCR clone 206482 (TRAV14/DV4, TRAJ54)
CAMREGRIQGAQKLVF

SEQ ID NO: 412964 - protein, 14 aa, Homo sapiens
  CDR3 for beta chain variable domain of TCR clone 206482 (TRBV4-1, TRBJ2-5)
CASSRSGSGETQYF

SEQ ID NO: 412965 - protein, 12 aa, Homo sapiens
  CDR3 for alpha chain variable domain of TCR clone 206483 (TRAV17, TRAJ20)
CATDRYDYKLSF

SEQ ID NO: 412966 - protein, 14 aa, Homo sapiens
  CDR3 for beta chain variable domain of TCR clone 206483 (TRBV19, TRBJ2-1)
CASPNFVLSGEQFF

SEQ ID NO: 412967 - protein, 14 aa, Homo sapiens
  CDR3 for alpha chain variable domain of TCR clone 206484 (TRAV2, TRAJ41)
CALGTSNSGYALNF

SEQ ID NO: 412968 - protein, 13 aa, Homo sapiens
  CDR3 for beta chain variable domain of TCR clone 206484 (TRBV4-1, TRBJ2-1)
CASSQEVQYEQFF

SEQ ID NO: 412969 - protein, 13 aa, Homo sapiens
  CDR3 for alpha chain variable domain of TCR clone 206485 (TRAV3, TRAJ27)
CAVRPLGAGKSTF

SEQ ID NO: 412970 - protein, 13 aa, Homo sapiens
  CDR3 for beta chain variable domain of TCR clone 206485 (TRBV7-9, TRBJ2-3)
CASSPGATETQYF

SEQ ID NO: 412971 - protein, 13 aa, Homo sapiens
  CDR3 for alpha chain variable domain of TCR clone 206486 (TRAV8-6, TRAJ32)
CAVSDRPTNKLIF

SEQ ID NO: 412972 - protein, 13 aa, Homo sapiens
  CDR3 for beta chain variable domain of TCR clone 206486 (TRBV11-2, TRBJ2-7)
CASSLDLGYEQYF

SEQ ID NO: 412973 - protein, 14 aa, Homo sapiens
  CDR3 for alpha chain variable domain of TCR clone 206487 (TRAV23/DV6, TRAJ11)
CAASLESGYSTLTF

SEQ ID NO: 412974 - protein, 13 aa, Homo sapiens
  CDR3 for beta chain variable domain of TCR clone 206487 (TRBV4-1, TRBJ2-5)
CTSSLTRGETQYF

SEQ ID NO: 412975 - protein, 14 aa, Homo sapiens
  CDR3 for alpha chain variable domain of TCR clone 206488 (TRAV17, TRAJ6)
CATPAMGGSYIPTF

SEQ ID NO: 412976 - protein, 15 aa, Homo sapiens
  CDR3 for beta chain variable domain of TCR clone 206488 (TRBV20-1, TRBJ2-7)
CSARDRVSGMDEQYF

SEQ ID NO: 412977 - protein, 18 aa, Homo sapiens
  CDR3 for alpha chain variable domain of TCR clone 206489 (TRAV8-3, TRAJ6)
CAVGAEHQEEATYLHLEE

SEQ ID NO: 412978 - protein, 14 aa, Homo sapiens
  CDR3 for beta chain variable domain of TCR clone 206489 (TRBV6-6, TRBJ2-7)
CPSSDSGAGYEQYF

SEQ ID NO: 412979 - protein, 11 aa, Homo sapiens
  CDR3 for alpha chain variable domain of TCR clone 206490 (TRAV21, TRAJ31)
CAVRNNARLMF

SEQ ID NO: 412980 - protein, 13 aa, Homo sapiens
  CDR3 for beta chain variable domain of TCR clone 206490 (TRBV10-3, TRBJ2-7)
CASKLAVNYEQYF

SEQ ID NO: 412981 - protein, 12 aa, Homo sapiens
  CDR3 for alpha chain variable domain of TCR clone 206491 (TRAV1-1, TRAJ20)
CAVREDDYKLSF

SEQ ID NO: 412982 - protein, 16 aa, Homo sapiens
  CDR3 for beta chain variable domain of TCR clone 206491 (TRBV28, TRBJ2-2)
CASSLEGGSNTGELFF

SEQ ID NO: 412983 - protein, 11 aa, Homo sapiens
  CDR3 for alpha chain variable domain of TCR clone 206492 (TRAV38-1, TRAJ43)
CAFMKHNSGRH

SEQ ID NO: 412984 - protein, 11 aa, Homo sapiens
  CDR3 for beta chain variable domain of TCR clone 206492 (TRBV7-9, TRBJ2-3)
CANSYTDTQYF

SEQ ID NO: 412985 - protein, 15 aa, Homo sapiens
  CDR3 for alpha chain variable domain of TCR clone 206493 (TRAV8-4, TRAJ53)
CAVSDGGGSNYKRTF

SEQ ID NO: 412986 - protein, 15 aa, Homo sapiens
  CDR3 for beta chain variable domain of TCR clone 206493 (TRBV19, TRBJ2-5)
CASHGLAGAQETQYF

SEQ ID NO: 412987 - protein, 14 aa, Homo sapiens
  CDR3 for alpha chain variable domain of TCR clone 206494 (TRAV1-2, TRAJ8)
CAVREDTGFQKLVF

SEQ ID NO: 412988 - protein, 17 aa, Homo sapiens
  CDR3 for beta chain variable domain of TCR clone 206494 (TRBV11-3, TRBJ2-3)
SASSPGSSGGRTDTQYF

SEQ ID NO: 412989 - protein, 16 aa, Homo sapiens
  CDR3 for alpha chain variable domain of TCR clone 206495 (TRAV1-2, TRAJ16)
CAVNGFQMARSCSLQG

SEQ ID NO: 412990 - protein, 12 aa, Homo sapiens
  CDR3 for beta chain variable domain of TCR clone 206495 (TRBV11-2, TRBJ2-2)
CASSLGGGELFF

SEQ ID NO: 412991 - protein, 17 aa, Homo sapiens
  CDR3 for alpha chain variable domain of TCR clone 206496 (TRAV12-2, TRAJ53)
WAPLTDSQEGSNYKLTF

SEQ ID NO: 412992 - protein, 12 aa, Homo sapiens
  CDR3 for beta chain variable domain of TCR clone 206496 (TRBV11-2, TRBJ2-2)
CASSLGGGELFF

SEQ ID NO: 412993 - protein, 15 aa, Homo sapiens
  CDR3 for alpha chain variable domain of TCR clone 206497 (TRAV39, TRAJ32)
CAVDMEGGATNKLIF

SEQ ID NO: 412994 - protein, 17 aa, Homo sapiens
  CDR3 for beta chain variable domain of TCR clone 206497 (TRBV7-2, TRBJ1-4)
CASSVKAGPTTNEKLFF

SEQ ID NO: 412995 - protein, 15 aa, Homo sapiens
  CDR3 for alpha chain variable domain of TCR clone 206498 (TRAV12-3, TRAJ6)
CAMSAASGGSYIPTF

SEQ ID NO: 412996 - protein, 14 aa, Homo sapiens
  CDR3 for beta chain variable domain of TCR clone 206498 (TRBV7-8, TRBJ2-3)
CASSSRDSTDTQYF

SEQ ID NO: 412997 - protein, 14 aa, Homo sapiens
  CDR3 for alpha chain variable domain of TCR clone 206499 (TRAV12-2, TRAJ13)
CAVKKTGGYQKFIF

SEQ ID NO: 412998 - protein, 15 aa, Homo sapiens
  CDR3 for beta chain variable domain of TCR clone 206499 (TRBV27, TRBJ2-1)
CASSNGGGSSNEQFF

SEQ ID NO: 412999 - protein, 15 aa, Homo sapiens
  CDR3 for alpha chain variable domain of TCR clone 206500 (TRAV3, TRAJ4)
CAVRDGTGGFHKLIF

SEQ ID NO: 413000 - protein, 16 aa, Homo sapiens
  CDR3 for beta chain variable domain of TCR clone 206500 (TRBV27, TRBJ2-2)
CASSSSGVSNTGELFF

SEQ ID NO: 413001 - protein, 12 aa, Homo sapiens
  CDR3 for alpha chain variable domain of TCR clone 206501 (TRAV26-2, TRAJ21)
CILKGNFNKFYF

SEQ ID NO: 413002 - protein, 16 aa, Homo sapiens
  CDR3 for beta chain variable domain of TCR clone 206501 (TRBV19, TRBJ2-1)
CASSKAGPSSYNEQFF

SEQ ID NO: 413003 - protein, 11 aa, Homo sapiens
  CDR3 for alpha chain variable domain of TCR clone 206502 (TRAV12-1, TRAJ30)
CVVNGQDKIIF

SEQ ID NO: 413004 - protein, 14 aa, Homo sapiens
  CDR3 for beta chain variable domain of TCR clone 206502 (TRBV28, TRBJ2-5)
CQQFGTDDKETQYF

SEQ ID NO: 413005 - protein, 17 aa, Homo sapiens
  CDR3 for alpha chain variable domain of TCR clone 206503 (TRAV4, TRAJ42)
CLVGVLNYGGSQGNLIF

SEQ ID NO: 413006 - protein, 12 aa, Homo sapiens
  CDR3 for beta chain variable domain of TCR clone 206503 (TRBV20-1, TRBJ2-1)
CTAQYTYNEQFF

SEQ ID NO: 413007 - protein, 14 aa, Homo sapiens
  CDR3 for alpha chain variable domain of TCR clone 206504 (TRAV1-2, TRAJ16)
CAVRGVSDGQKLLF

SEQ ID NO: 413008 - protein, 12 aa, Homo sapiens
  CDR3 for beta chain variable domain of TCR clone 206504 (TRBV14, TRBJ2-7)
CASSRLKGEQYF

SEQ ID NO: 413009 - protein, 14 aa, Homo sapiens
  CDR3 for alpha chain variable domain of TCR clone 206505 (TRAV17, TRAJ45)
CATASGGGADGLTF

SEQ ID NO: 413010 - protein, 15 aa, Homo sapiens
  CDR3 for beta chain variable domain of TCR clone 206505 (TRBV11-2, TRBJ2-1)
CASSRHRGLMYEQFF

SEQ ID NO: 413011 - protein, 13 aa, Homo sapiens
  CDR3 for alpha chain variable domain of TCR clone 206506 (TRAV3, TRAJ21)
CAVREPDFNKFYF

SEQ ID NO: 413012 - protein, 15 aa, Homo sapiens
  CDR3 for beta chain variable domain of TCR clone 206506 (TRBV11-2, TRBJ2-7)
CASSLMVGGSYEQYF

SEQ ID NO: 413013 - protein, 12 aa, Homo sapiens
  CDR3 for alpha chain variable domain of TCR clone 206507 (TRAV1-2, TRAJ33)
CAALDSNYQLIW

SEQ ID NO: 413014 - protein, 16 aa, Homo sapiens
  CDR3 for beta chain variable domain of TCR clone 206507 (TRBV7-3, TRBJ2-2)
CASSLKRGTLSGELFF

SEQ ID NO: 413015 - protein, 14 aa, Homo sapiens
  CDR3 for alpha chain variable domain of TCR clone 206508 (TRAV26-1, TRAJ38)
CIADNAGNNRKLIS

SEQ ID NO: 413016 - protein, 16 aa, Homo sapiens
  CDR3 for beta chain variable domain of TCR clone 206508 (TRBV20-1, TRBJ2-7)
CSASTSGRLSSYEQYF

SEQ ID NO: 413017 - protein, 14 aa, Homo sapiens
  CDR3 for alpha chain variable domain of TCR clone 206509 (TRAV13-1, TRAJ12)
CAASYMDSSCKLIF

SEQ ID NO: 413018 - protein, 13 aa, Homo sapiens
  CDR3 for beta chain variable domain of TCR clone 206509 (TRBV2, TRBJ2-5)
CASSDGIQETQYF

SEQ ID NO: 413019 - protein, 11 aa, Homo sapiens
  CDR3 for alpha chain variable domain of TCR clone 206510 (TRAV12-1, TRAJ31)
CVGRVQCQTHV

SEQ ID NO: 413020 - protein, 12 aa, Homo sapiens
  CDR3 for beta chain variable domain of TCR clone 206510 (TRBV12-4, TRBJ2-3)
CASSSTTDTQYF

SEQ ID NO: 413021 - protein, 16 aa, Homo sapiens
  CDR3 for alpha chain variable domain of TCR clone 206511 (TRAV8-3, TRAJ44)
CAVGASNTGTASKLTI

SEQ ID NO: 413022 - protein, 15 aa, Homo sapiens
  CDR3 for beta chain variable domain of TCR clone 206511 (TRBV27, TRBJ1-5)
CASTFNRGSNQPQHF

SEQ ID NO: 413023 - protein, 17 aa, Homo sapiens
  CDR3 for alpha chain variable domain of TCR clone 206512 (TRAV3, TRAJ42)
CAVRYRDYGGSQGNLIF

SEQ ID NO: 413024 - protein, 18 aa, Homo sapiens
  CDR3 for beta chain variable domain of TCR clone 206512 (TRBV20-1, TRBJ2-3)
CSASGLAGGPGTTDTQYF

SEQ ID NO: 413025 - protein, 13 aa, Homo sapiens
  CDR3 for alpha chain variable domain of TCR clone 206513 (TRAV21, TRAJ57)
CAAIEGGSEKLVF

SEQ ID NO: 413026 - protein, 15 aa, Homo sapiens
  CDR3 for beta chain variable domain of TCR clone 206513 (TRBV10-3, TRBJ2-5)
CAISEFGRGQETQYF

SEQ ID NO: 413027 - protein, 13 aa, Homo sapiens
  CDR3 for alpha chain variable domain of TCR clone 206514 (TRAV13-1, TRAJ9)
CAARGTGGFKTIF

SEQ ID NO: 413028 - protein, 12 aa, Homo sapiens
  CDR3 for beta chain variable domain of TCR clone 206514 (TRBV2, TRBJ2-1)
CAYGPPGNEQFL

SEQ ID NO: 413029 - protein, 11 aa, Homo sapiens
  CDR3 for alpha chain variable domain of TCR clone 206515 (TRAV1-1, TRAJ23)
CAVRQGGKLLF

SEQ ID NO: 413030 - protein, 14 aa, Homo sapiens
  CDR3 for beta chain variable domain of TCR clone 206515 (TRBV19, TRBJ2-1)
CASPTFVLSGEQFF

SEQ ID NO: 413031 - protein, 14 aa, Homo sapiens
  CDR3 for alpha chain variable domain of TCR clone 206516 (TRAV1-2, TRAJ8)
CAVREDTGFQKLVF

SEQ ID NO: 413032 - protein, 12 aa, Homo sapiens
  CDR3 for beta chain variable domain of TCR clone 206516 (TRBV24-1, TRBJ1-1)
CATLDPDTEAFF

SEQ ID NO: 413033 - protein, 13 aa, Homo sapiens
  CDR3 for alpha chain variable domain of TCR clone 206517 (TRAV35, TRAJ13)
CAWRAGGYQKVTF

SEQ ID NO: 413034 - protein, 13 aa, Homo sapiens
  CDR3 for beta chain variable domain of TCR clone 206517 (TRBV12-4, TRBJ1-1)
CASTPRMNTEAFF

SEQ ID NO: 413035 - protein, 14 aa, Homo sapiens
  CDR3 for alpha chain variable domain of TCR clone 206518 (TRAV2, TRAJ37)
TTVPGSSNKGKLIF

SEQ ID NO: 413036 - protein, 14 aa, Homo sapiens
  CDR3 for beta chain variable domain of TCR clone 206518 (TRBV7-8, TRBJ2-7)
CASSLWQSSYEQYF

SEQ ID NO: 413037 - protein, 16 aa, Homo sapiens
  CDR3 for alpha chain variable domain of TCR clone 206519 (TRAV8-6, TRAJ4)
CAVSERISGGYNTLIF

SEQ ID NO: 413038 - protein, 19 aa, Homo sapiens
  CDR3 for beta chain variable domain of TCR clone 206519 (TRBV19, TRBJ1-5)
CASSISPRQTGGGNQPQHY

SEQ ID NO: 413039 - protein, 12 aa, Homo sapiens
  CDR3 for alpha chain variable domain of TCR clone 206520 (TRAV17, TRAJ30)
CVPERRDDMIIF

SEQ ID NO: 413040 - protein, 14 aa, Homo sapiens
  CDR3 for beta chain variable domain of TCR clone 206520 (TRBV7-7, TRBJ2-2)
CASSRDRSTGELFF

SEQ ID NO: 413041 - protein, 15 aa, Homo sapiens
  CDR3 for alpha chain variable domain of TCR clone 206521 (TRAV12-2, TRAJ23)
CRGEDDYNQGGKLIF

SEQ ID NO: 413042 - protein, 17 aa, Homo sapiens
  CDR3 for beta chain variable domain of TCR clone 206521 (TRBV3-1, TRBJ2-5)
CASSNWGGTSGQETQYF

SEQ ID NO: 413043 - protein, 12 aa, Homo sapiens
  CDR3 for alpha chain variable domain of TCR clone 206522 (TRAV21, TRAJ31)
CAVWGNNARLMF

SEQ ID NO: 413044 - protein, 17 aa, Homo sapiens
  CDR3 for beta chain variable domain of TCR clone 206522 (TRBV13, TRBJ2-3)
CASSLSRVAGGRNTQYF

SEQ ID NO: 413045 - protein, 19 aa, Homo sapiens
  CDR3 for alpha chain variable domain of TCR clone 206523 (TRAV26-1, TRAJ52)
CIVSAHRNAGGTSYGKLTF

SEQ ID NO: 413046 - protein, 15 aa, Homo sapiens
  CDR3 for beta chain variable domain of TCR clone 206523 (TRBV12-4, TRBJ2-5)
CASSPPTGLQETQYF

SEQ ID NO: 413047 - protein, 13 aa, Homo sapiens
  CDR3 for alpha chain variable domain of TCR clone 206524 (TRAV13-1, TRAJ57)
PPLSQGGSEKLVF

SEQ ID NO: 413048 - protein, 16 aa, Homo sapiens
  CDR3 for beta chain variable domain of TCR clone 206524 (TRBV7-3, TRBJ2-2)
CASSLKRGTLSGELFF

SEQ ID NO: 413049 - protein, 10 aa, Homo sapiens
  CDR3 for alpha chain variable domain of TCR clone 206525 (TRAV21, TRAJ27)
CTTNAGKSTF

SEQ ID NO: 413050 - protein, 16 aa, Homo sapiens
  CDR3 for beta chain variable domain of TCR clone 206525 (TRBV5-1, TRBJ2-3)
CASSLGLAVYTDTQYF

SEQ ID NO: 413051 - protein, 13 aa, Homo sapiens
  CDR3 for alpha chain variable domain of TCR clone 206526 (TRAV13-1, TRAJ9)
CAARGTGGFKTIF

SEQ ID NO: 413052 - protein, 13 aa, Homo sapiens
  CDR3 for beta chain variable domain of TCR clone 206526 (TRBV7-2, TRBJ2-5)
CASSQTSVETQYF

SEQ ID NO: 413053 - protein, 11 aa, Homo sapiens
  CDR3 for alpha chain variable domain of TCR clone 206527 (TRAV26-1, TRAJ37)
CIVRVGRKLVF

SEQ ID NO: 413054 - protein, 15 aa, Homo sapiens
  CDR3 for beta chain variable domain of TCR clone 206527 (TRBV19, TRBJ2-7)
CASSIGLAVSYEQYF

SEQ ID NO: 413055 - protein, 14 aa, Homo sapiens
  CDR3 for alpha chain variable domain of TCR clone 206528 (TRAV26-1, TRAJ34)
CIIRVAYNTDKLLF

SEQ ID NO: 413056 - protein, 15 aa, Homo sapiens
  CDR3 for beta chain variable domain of TCR clone 206528 (TRBV20-1, TRBJ2-7)
CSARVPAAYFYEQYL

SEQ ID NO: 413057 - protein, 14 aa, Homo sapiens
  CDR3 for alpha chain variable domain of TCR clone 206529 (TRAV16, TRAJ54)
CSLSLIQGAQKLVF

SEQ ID NO: 413058 - protein, 17 aa, Homo sapiens
  CDR3 for beta chain variable domain of TCR clone 206529 (TRBV11-2, TRBJ2-4)
CASSSVGPGGHRNIQYF

SEQ ID NO: 413059 - protein, 15 aa, Homo sapiens
  CDR3 for alpha chain variable domain of TCR clone 206530 (TRAV3, TRAJ3)
CAVRDRRSSASKIIF

SEQ ID NO: 413060 - protein, 13 aa, Homo sapiens
  CDR3 for beta chain variable domain of TCR clone 206530 (TRBV9, TRBJ2-5)
CASSPAGLGTKYF

SEQ ID NO: 413061 - protein, 16 aa, Homo sapiens
  CDR3 for alpha chain variable domain of TCR clone 206531 (TRAV38-2/DV8, TRAJ33)
CAYRTGLFASNYQLIW

SEQ ID NO: 413062 - protein, 13 aa, Homo sapiens
  CDR3 for beta chain variable domain of TCR clone 206531 (TRBV27, TRBJ1-4)
CASSLMGDEKLFF

SEQ ID NO: 413063 - protein, 13 aa, Homo sapiens
  CDR3 for alpha chain variable domain of TCR clone 206532 (TRAV1-2, TRAJ9)
CAVLNTGGFKTIF

SEQ ID NO: 413064 - protein, 18 aa, Homo sapiens
  CDR3 for beta chain variable domain of TCR clone 206532 (TRBV11-2, TRBJ2-3)
CASSLGGASRGAPNTQYF

SEQ ID NO: 413065 - protein, 11 aa, Homo sapiens
  CDR3 for alpha chain variable domain of TCR clone 206533 (TRAV21, TRAJ48)
CAVDGNEKSTF

SEQ ID NO: 413066 - protein, 15 aa, Homo sapiens
  CDR3 for beta chain variable domain of TCR clone 206533 (TRBV27, TRBJ2-1)
CASSNGGGSSNEQFF

SEQ ID NO: 413067 - protein, 17 aa, Homo sapiens
  CDR3 for alpha chain variable domain of TCR clone 206534 (TRAV4, TRAJ18)
CLVGERSVGSTLGRLYF

SEQ ID NO: 413068 - protein, 14 aa, Homo sapiens
  CDR3 for beta chain variable domain of TCR clone 206534 (TRBV6-5, TRBJ1-2)
CASSCDGTGGGYTF

SEQ ID NO: 413069 - protein, 16 aa, Homo sapiens
  CDR3 for alpha chain variable domain of TCR clone 206535 (TRAV12-2, TRAJ40)
CAVIRGGTSGTYKYIF

SEQ ID NO: 413070 - protein, 15 aa, Homo sapiens
  CDR3 for beta chain variable domain of TCR clone 206535 (TRBV10-2, TRBJ2-6)
CASSEQGTGANVLTF

SEQ ID NO: 413071 - protein, 19 aa, Homo sapiens
  CDR3 for alpha chain variable domain of TCR clone 206536 (TRAV1-1, TRAJ37)
CLLLLRCERSGSNAGKLIF

SEQ ID NO: 413072 - protein, 14 aa, Homo sapiens
  CDR3 for beta chain variable domain of TCR clone 206536 (TRBV29-1, TRBJ2-2)
CSALGGVGAGELFF

SEQ ID NO: 413073 - protein, 23 aa, Homo sapiens
  CDR3 for alpha chain variable domain of TCR clone 206537 (TRAV26-1, TRAJ38)
CIADNAGNNHIQNPDPAVYPLRA

SEQ ID NO: 413074 - protein, 13 aa, Homo sapiens
  CDR3 for beta chain variable domain of TCR clone 206537 (TRBV20-1, TRBJ1-1)
CSARGGGNTEAFF

SEQ ID NO: 413075 - protein, 15 aa, Homo sapiens
  CDR3 for alpha chain variable domain of TCR clone 206538 (TRAV29/DV5, TRAJ29)
WAASERSSGNTPLVF

SEQ ID NO: 413076 - protein, 17 aa, Homo sapiens
  CDR3 for beta chain variable domain of TCR clone 206538 (TRBV4-1, TRBJ1-4)
CASSQEGPRGVEEKLFF

SEQ ID NO: 413077 - protein, 13 aa, Homo sapiens
  CDR3 for alpha chain variable domain of TCR clone 206539 (TRAV12-3, TRAJ7)
CAMTPYGNNRLAF

SEQ ID NO: 413078 - protein, 14 aa, Homo sapiens
  CDR3 for beta chain variable domain of TCR clone 206539 (TRBV23-1, TRBJ2-5)
CASSFLRSQETQYF

SEQ ID NO: 413079 - protein, 12 aa, Homo sapiens
  CDR3 for alpha chain variable domain of TCR clone 206540 (TRAV17, TRAJ4)
CATDGGYNKLIF

SEQ ID NO: 413080 - protein, 12 aa, Homo sapiens
  CDR3 for beta chain variable domain of TCR clone 206540 (TRBV7-8, TRBJ2-7)
RASSLGDREQYF

SEQ ID NO: 413081 - protein, 12 aa, Homo sapiens
  CDR3 for alpha chain variable domain of TCR clone 206541 (TRAV13-1, TRAJ21)
CAAKEGFNKFYF

SEQ ID NO: 413082 - protein, 18 aa, Homo sapiens
  CDR3 for beta chain variable domain of TCR clone 206541 (TRBV7-9, TRBJ2-7)
CAISLTTSGSRTWYEQYF

SEQ ID NO: 413083 - protein, 14 aa, Homo sapiens
  CDR3 for alpha chain variable domain of TCR clone 206542 (TRAV17, TRAJ45)
CATASGGGADGRTF

SEQ ID NO: 413084 - protein, 13 aa, Homo sapiens
  CDR3 for beta chain variable domain of TCR clone 206542 (TRBV15, TRBJ2-7)
CATSTTGHYEQYF

SEQ ID NO: 413085 - protein, 16 aa, Homo sapiens
  CDR3 for alpha chain variable domain of TCR clone 206543 (TRAV8-3, TRAJ13)
CAVGAYPSGGYQKLTF

SEQ ID NO: 413086 - protein, 15 aa, Homo sapiens
  CDR3 for beta chain variable domain of TCR clone 206543 (TRBV19, TRBJ1-5)
CASIIVWADNQPQHF

SEQ ID NO: 413087 - protein, 13 aa, Homo sapiens
  CDR3 for alpha chain variable domain of TCR clone 206544 (TRAV22, TRAJ48)
CAVERFVNEKLTF

SEQ ID NO: 413088 - protein, 13 aa, Homo sapiens
  CDR3 for beta chain variable domain of TCR clone 206544 (TRBV20-1, TRBJ2-5)
CSARGDYQETQYF

SEQ ID NO: 413089 - protein, 15 aa, Homo sapiens
  CDR3 for alpha chain variable domain of TCR clone 206545 (TRAV26-1, TRAJ29)
CIVRVEGSGDTPLVF

SEQ ID NO: 413090 - protein, 14 aa, Homo sapiens
  CDR3 for beta chain variable domain of TCR clone 206545 (TRBV18, TRBJ2-5)
CASSPGVSQENQYF

SEQ ID NO: 413091 - protein, 13 aa, Homo sapiens
  CDR3 for alpha chain variable domain of TCR clone 206546 (TRAV27, TRAJ41)
CAGEGNAGYALNL

SEQ ID NO: 413092 - protein, 14 aa, Homo sapiens
  CDR3 for beta chain variable domain of TCR clone 206546 (TRBV7-2, TRBJ1-1)
CASSFLTGTTEAFF

SEQ ID NO: 413093 - protein, 14 aa, Homo sapiens
  CDR3 for alpha chain variable domain of TCR clone 206547 (TRAV12-3, TRAJ10)
SHLPLTGGGNKLTF

SEQ ID NO: 413094 - protein, 15 aa, Homo sapiens
  CDR3 for beta chain variable domain of TCR clone 206547 (TRBV11-2, TRBJ2-2)
CASSSVRVNAGELFF

SEQ ID NO: 413095 - protein, 13 aa, Homo sapiens
  CDR3 for alpha chain variable domain of TCR clone 206548 (TRAV35, TRAJ42)
CWALWRKQGNLIF

SEQ ID NO: 413096 - protein, 15 aa, Homo sapiens
  CDR3 for beta chain variable domain of TCR clone 206548 (TRBV11-2, TRBJ2-1)
CASSKNRGLIYEQFF

SEQ ID NO: 413097 - protein, 20 aa, Homo sapiens
  CDR3 for alpha chain variable domain of TCR clone 206549 (TRAV27, TRAJ36)
TAAQPGDTGLYPAGANNLFF

SEQ ID NO: 413098 - protein, 13 aa, Homo sapiens
  CDR3 for beta chain variable domain of TCR clone 206549 (TRBV7-9, TRBJ2-3)
CASSPGSTDTQYF

SEQ ID NO: 413099 - protein, 11 aa, Homo sapiens
  CDR3 for alpha chain variable domain of TCR clone 206550 (TRAV2, TRAJ13)
CASGGYQKVTF

SEQ ID NO: 413100 - protein, 15 aa, Homo sapiens
  CDR3 for beta chain variable domain of TCR clone 206550 (TRBV19, TRBJ1-1)
CASTSGQIQNTEAVF

SEQ ID NO: 413101 - protein, 13 aa, Homo sapiens
  CDR3 for alpha chain variable domain of TCR clone 206551 (TRAV12-1, TRAJ7)
CVVNMRGNNRLAF

SEQ ID NO: 413102 - protein, 15 aa, Homo sapiens
  CDR3 for beta chain variable domain of TCR clone 206551 (TRBV27, TRBJ2-3)
CASSLGLAATDTQFF

SEQ ID NO: 413103 - protein, 15 aa, Homo sapiens
  CDR3 for alpha chain variable domain of TCR clone 206552 (TRAV13-1, TRAJ52)
CAATSPRTSYGKLTF

SEQ ID NO: 413104 - protein, 16 aa, Homo sapiens
  CDR3 for beta chain variable domain of TCR clone 206552 (TRBV28, TRBJ2-7)
CASSLFFETGSPEQYF

SEQ ID NO: 413105 - protein, 15 aa, Homo sapiens
  CDR3 for alpha chain variable domain of TCR clone 206553 (TRAV3, TRAJ22)
CAVRDRGGSARQLTF

SEQ ID NO: 413106 - protein, 15 aa, Homo sapiens
  CDR3 for beta chain variable domain of TCR clone 206553 (TRBV29-1, TRBJ2-7)
CSVEFFDRGSYEQYF

SEQ ID NO: 413107 - protein, 14 aa, Homo sapiens
  CDR3 for alpha chain variable domain of TCR clone 206554 (TRAV12-2, TRAJ45)
CAVNIGGGADGLTF

SEQ ID NO: 413108 - protein, 14 aa, Homo sapiens
  CDR3 for beta chain variable domain of TCR clone 206554 (TRBV7-2, TRBJ1-2)
CASSQTGSTYGYTF

SEQ ID NO: 413109 - protein, 18 aa, Homo sapiens
  CDR3 for alpha chain variable domain of TCR clone 206555 (TRAV26-2, TRAJ33)
CCVLLHPEEPASNYQLIW

SEQ ID NO: 413110 - protein, 13 aa, Homo sapiens
  CDR3 for beta chain variable domain of TCR clone 206555 (TRBV9, TRBJ2-7)
CASSVAEYYEQYF

SEQ ID NO: 413111 - protein, 11 aa, Homo sapiens
  CDR3 for alpha chain variable domain of TCR clone 206556 (TRAV4, TRAJ31)
CLMGLNARLMF

SEQ ID NO: 413112 - protein, 16 aa, Homo sapiens
  CDR3 for beta chain variable domain of TCR clone 206556 (TRBV15, TRBJ2-6)
CATSVNGGFLDNVLTF

SEQ ID NO: 413113 - protein, 13 aa, Homo sapiens
  CDR3 for alpha chain variable domain of TCR clone 206557 (TRAV20, TRAJ20)
CAVRWVRDYKLSF

SEQ ID NO: 413114 - protein, 14 aa, Homo sapiens
  CDR3 for beta chain variable domain of TCR clone 206557 (TRBV19, TRBJ2-2)
CASTVTAHTGELFF

SEQ ID NO: 413115 - protein, 16 aa, Homo sapiens
  CDR3 for alpha chain variable domain of TCR clone 206558 (TRAV30, TRAJ24)
CGTEIVDADSWGKFQF

SEQ ID NO: 413116 - protein, 12 aa, Homo sapiens
  CDR3 for beta chain variable domain of TCR clone 206558 (TRBV11-2, TRBJ2-1)
CASSPGNKEQFF

SEQ ID NO: 413117 - protein, 17 aa, Homo sapiens
  CDR3 for alpha chain variable domain of TCR clone 206559 (TRAV13-1, TRAJ31)
CAPRDRLMFGDGTQLAV

SEQ ID NO: 413118 - protein, 17 aa, Homo sapiens
  CDR3 for beta chain variable domain of TCR clone 206559 (TRBV13, TRBJ2-3)
CASSLSRVAGGRNTQYF

SEQ ID NO: 413119 - protein, 14 aa, Homo sapiens
  CDR3 for alpha chain variable domain of TCR clone 206560 (TRAV8-1, TRAJ4)
CAVPFSGGYNKLIF

SEQ ID NO: 413120 - protein, 16 aa, Homo sapiens
  CDR3 for beta chain variable domain of TCR clone 206560 (TRBV7-2, TRBJ1-4)
CASSLAPGRRDEKLFF

SEQ ID NO: 413121 - protein, 15 aa, Homo sapiens
  CDR3 for alpha chain variable domain of TCR clone 206561 (TRAV12-3, TRAJ6)
CAMSAASGGSYIPTF

SEQ ID NO: 413122 - protein, 13 aa, Homo sapiens
  CDR3 for beta chain variable domain of TCR clone 206561 (TRBV20-1, TRBJ1-2)
CSASTERIYGYSF

SEQ ID NO: 413123 - protein, 14 aa, Homo sapiens
  CDR3 for alpha chain variable domain of TCR clone 206562 (TRAV12-2, TRAJ44)
CAMNPAGTTSKLTF

SEQ ID NO: 413124 - protein, 12 aa, Homo sapiens
  CDR3 for beta chain variable domain of TCR clone 206562 (TRBV5-1, TRBJ2-7)
CASSFRGYEQYL

SEQ ID NO: 413125 - protein, 13 aa, Homo sapiens
  CDR3 for alpha chain variable domain of TCR clone 206563 (TRAV17, TRAJ4)
CATKFGGYNKLIF

SEQ ID NO: 413126 - protein, 14 aa, Homo sapiens
  CDR3 for beta chain variable domain of TCR clone 206563 (TRBV20-1, TRBJ1-5)
CSARDDRGNQPQHF

SEQ ID NO: 413127 - protein, 19 aa, Homo sapiens
  CDR3 for alpha chain variable domain of TCR clone 206564 (TRAV2, TRAJ20)
ILQVREADAAVYRDCKLSF

SEQ ID NO: 413128 - protein, 13 aa, Homo sapiens
  CDR3 for beta chain variable domain of TCR clone 206564 (TRBV15, TRBJ1-6)
CASSGGLNSPLHF

SEQ ID NO: 413129 - protein, 12 aa, Homo sapiens
  CDR3 for alpha chain variable domain of TCR clone 206565 (TRAV12-3, TRAJ17)
CAMTLTGNKLTF

SEQ ID NO: 413130 - protein, 15 aa, Homo sapiens
  CDR3 for beta chain variable domain of TCR clone 206565 (TRBV19, TRBJ2-1)
CASSILGEARNEQFF

SEQ ID NO: 413131 - protein, 15 aa, Homo sapiens
  CDR3 for alpha chain variable domain of TCR clone 206566 (TRAV12-2, TRAJ53)
CAVHGVGGSNYKLTF

SEQ ID NO: 413132 - protein, 13 aa, Homo sapiens
  CDR3 for beta chain variable domain of TCR clone 206566 (TRBV3-1, TRBJ1-1)
CASSPGVITEAFF

SEQ ID NO: 413133 - protein, 13 aa, Homo sapiens
  CDR3 for alpha chain variable domain of TCR clone 206567 (TRAV13-1, TRAJ10)
CAALAGGGNKLTF

SEQ ID NO: 413134 - protein, 17 aa, Homo sapiens
  CDR3 for beta chain variable domain of TCR clone 206567 (TRBV7-3, TRBJ2-2)
CASSLSGTSGGTGELFF

SEQ ID NO: 413135 - protein, 18 aa, Homo sapiens
  CDR3 for alpha chain variable domain of TCR clone 206568 (TRAV9-2, TRAJ52)
CALSDLNPGGTSYGKLTF

SEQ ID NO: 413136 - protein, 15 aa, Homo sapiens
  CDR3 for beta chain variable domain of TCR clone 206568 (TRBV6-5, TRBJ1-2)
CASSYLLQGGYGYTF

SEQ ID NO: 413137 - protein, 14 aa, Homo sapiens
  CDR3 for alpha chain variable domain of TCR clone 206569 (TRAV29/DV5, TRAJ20)
CAASAPIEDYKLIF

SEQ ID NO: 413138 - protein, 15 aa, Homo sapiens
  CDR3 for beta chain variable domain of TCR clone 206569 (TRBV10-2, TRBJ2-6)
CASSEQGTGANVLTF

SEQ ID NO: 413139 - protein, 15 aa, Homo sapiens
  CDR3 for alpha chain variable domain of TCR clone 206570 (TRAV26-2, TRAJ39)
CSLRGNNNAGNMLTF

SEQ ID NO: 413140 - protein, 17 aa, Homo sapiens
  CDR3 for beta chain variable domain of TCR clone 206570 (TRBV7-8, TRBJ2-6)
CASSAGTGGAGANDLSF

SEQ ID NO: 413141 - protein, 14 aa, Homo sapiens
  CDR3 for alpha chain variable domain of TCR clone 206571 (TRAV4, TRAJ3)
CLVPPGSSASKIIF

SEQ ID NO: 413142 - protein, 18 aa, Homo sapiens
  CDR3 for beta chain variable domain of TCR clone 206571 (TRBV11-2, TRBJ2-3)
CASSVRTSGSKKTDTQYF

SEQ ID NO: 413143 - protein, 11 aa, Homo sapiens
  CDR3 for alpha chain variable domain of TCR clone 206572 (TRAV1-2, TRAJ40)
CAVPGTYKYIF

SEQ ID NO: 413144 - protein, 16 aa, Homo sapiens
  CDR3 for beta chain variable domain of TCR clone 206572 (TRBV10-3, TRBJ2-7)
CAISADFADRPYELYF

SEQ ID NO: 413145 - protein, 15 aa, Homo sapiens
  CDR3 for alpha chain variable domain of TCR clone 206573 (TRAV8-3, TRAJ37)
CAVGARASNTGKLIF

SEQ ID NO: 413146 - protein, 15 aa, Homo sapiens
  CDR3 for beta chain variable domain of TCR clone 206573 (TRBV28, TRBJ1-5)
CASSLSGYSNQPQHF

SEQ ID NO: 413147 - protein, 13 aa, Homo sapiens
  CDR3 for alpha chain variable domain of TCR clone 206574 (TRAV27, TRAJ45)
CRSSGGGADGLTF

SEQ ID NO: 413148 - protein, 17 aa, Homo sapiens
  CDR3 for beta chain variable domain of TCR clone 206574 (TRBV11-2, TRBJ2-1)
CASSLYPLGVEYNEQFF

SEQ ID NO: 413149 - protein, 16 aa, Homo sapiens
  CDR3 for alpha chain variable domain of TCR clone 206575 (TRAV30, TRAJ24)
RGTEIVDADSWGKFQF

SEQ ID NO: 413150 - protein, 14 aa, Homo sapiens
  CDR3 for beta chain variable domain of TCR clone 206575 (TRBV12-5, TRBJ2-5)
CASGSRTHQETQHF

SEQ ID NO: 413151 - protein, 15 aa, Homo sapiens
  CDR3 for alpha chain variable domain of TCR clone 206576 (TRAV38-2/DV8, TRAJ47)
CAYRSAKGYGNKMGF

SEQ ID NO: 413152 - protein, 15 aa, Homo sapiens
  CDR3 for beta chain variable domain of TCR clone 206576 (TRBV6-6, TRBJ2-7)
CASSYSYGGSYEQYF

SEQ ID NO: 413153 - protein, 14 aa, Homo sapiens
  CDR3 for alpha chain variable domain of TCR clone 206577 (TRAV12-3, TRAJ9)
CAMSPNTGGFKTIF

SEQ ID NO: 413154 - protein, 12 aa, Homo sapiens
  CDR3 for beta chain variable domain of TCR clone 206577 (TRBV19, TRBJ1-5)
CASSIAQQPQHS

SEQ ID NO: 413155 - protein, 13 aa, Homo sapiens
  CDR3 for alpha chain variable domain of TCR clone 206578 (TRAV8-3, TRAJ28)
CAVGAVGSYQLTF

SEQ ID NO: 413156 - protein, 17 aa, Homo sapiens
  CDR3 for beta chain variable domain of TCR clone 206578 (TRBV7-2, TRBJ2-1)
CASSLGPPWGGLDEQFF

SEQ ID NO: 413157 - protein, 19 aa, Homo sapiens
  CDR3 for alpha chain variable domain of TCR clone 206579 (TRAV3, TRAJ6)
CAVRDRNPSRSGGGSLPTF

SEQ ID NO: 413158 - protein, 15 aa, Homo sapiens
  CDR3 for beta chain variable domain of TCR clone 206579 (TRBV18, TRBJ2-7)
CASSPTFMDSYEQYF

SEQ ID NO: 413159 - protein, 16 aa, Homo sapiens
  CDR3 for alpha chain variable domain of TCR clone 206580 (TRAV17, TRAJ42)
TSVLRTPGGSQGNLIF

SEQ ID NO: 413160 - protein, 12 aa, Homo sapiens
  CDR3 for beta chain variable domain of TCR clone 206580 (TRBV7-3, TRBJ2-1)
CASSFINNEQFF

SEQ ID NO: 413161 - protein, 12 aa, Homo sapiens
  CDR3 for alpha chain variable domain of TCR clone 206581 (TRAV12-2, TRAJ20)
CAVRPSDYKLSF

SEQ ID NO: 413162 - protein, 13 aa, Homo sapiens
  CDR3 for beta chain variable domain of TCR clone 206581 (TRBV7-9, TRBJ2-2)
CASSLDPTGELFF

SEQ ID NO: 413163 - protein, 12 aa, Homo sapiens
  CDR3 for alpha chain variable domain of TCR clone 206582 (TRAV26-2, TRAJ54)
CIHVQGAQKLVF

SEQ ID NO: 413164 - protein, 14 aa, Homo sapiens
  CDR3 for beta chain variable domain of TCR clone 206582 (TRBV7-9, TRBJ2-7)
CASSSSGPSYEQYF

SEQ ID NO: 413165 - protein, 14 aa, Homo sapiens
  CDR3 for alpha chain variable domain of TCR clone 206583 (TRAV4, TRAJ6)
CFVGEAGGSYIPTV

SEQ ID NO: 413166 - protein, 16 aa, Homo sapiens
  CDR3 for beta chain variable domain of TCR clone 206583 (TRBV7-6, TRBJ2-1)
CASSLNEGPSYNEQFF

SEQ ID NO: 413167 - protein, 15 aa, Homo sapiens
  CDR3 for alpha chain variable domain of TCR clone 206584 (TRAV17, TRAJ35)
CATAFVIGFGKVLHC

SEQ ID NO: 413168 - protein, 15 aa, Homo sapiens
  CDR3 for beta chain variable domain of TCR clone 206584 (TRBV7-9, TRBJ2-7)
CASSLALAEAYEQYF

SEQ ID NO: 413169 - protein, 12 aa, Homo sapiens
  CDR3 for alpha chain variable domain of TCR clone 206585 (TRAV16, TRAJ10)
CSRTRGGNKLTF

SEQ ID NO: 413170 - protein, 14 aa, Homo sapiens
  CDR3 for beta chain variable domain of TCR clone 206585 (TRBV19, TRBJ2-1)
CASSRLASINEQFF

SEQ ID NO: 413171 - protein, 17 aa, Homo sapiens
  CDR3 for alpha chain variable domain of TCR clone 206586 (TRAV17, TRAJ52)
CATAPRAGGTSYGKLTF

SEQ ID NO: 413172 - protein, 17 aa, Homo sapiens
  CDR3 for beta chain variable domain of TCR clone 206586 (TRBV4-1, TRBJ1-4)
CASSQEGPRGVEEKLFF

SEQ ID NO: 413173 - protein, 14 aa, Homo sapiens
  CDR3 for alpha chain variable domain of TCR clone 206587 (TRAV30, TRAJ26)
CGTEIVSYGQNFVF

SEQ ID NO: 413174 - protein, 12 aa, Homo sapiens
  CDR3 for beta chain variable domain of TCR clone 206587 (TRBV24-1, TRBJ1-4)
CATSDPNEKLFF

SEQ ID NO: 413175 - protein, 13 aa, Homo sapiens
  CDR3 for alpha chain variable domain of TCR clone 206588 (TRAV2, TRAJ40)
CAVVTSGTYKYIF

SEQ ID NO: 413176 - protein, 14 aa, Homo sapiens
  CDR3 for beta chain variable domain of TCR clone 206588 (TRBV10-3, TRBJ1-1)
CAISDGSGVTEAFF

SEQ ID NO: 413177 - protein, 14 aa, Homo sapiens
  CDR3 for alpha chain variable domain of TCR clone 206589 (TRAV12-2, TRAJ44)
CAVNKAGTASKLTF

SEQ ID NO: 413178 - protein, 14 aa, Homo sapiens
  CDR3 for beta chain variable domain of TCR clone 206589 (TRBV11-2, TRBJ2-1)
CASTTGQGNNEQFF

SEQ ID NO: 413179 - protein, 15 aa, Homo sapiens
  CDR3 for alpha chain variable domain of TCR clone 206590 (TRAV38-1, TRAJ37)
CAFIFCSGNTGKPIF

SEQ ID NO: 413180 - protein, 12 aa, Homo sapiens
  CDR3 for beta chain variable domain of TCR clone 206590 (TRBV7-9, TRBJ2-7)
CASSLEGYEQYF

SEQ ID NO: 413181 - protein, 14 aa, Homo sapiens
  CDR3 for alpha chain variable domain of TCR clone 206591 (TRAV2, TRAJ9)
CAVEDRSGVFKTIF

SEQ ID NO: 413182 - protein, 13 aa, Homo sapiens
  CDR3 for beta chain variable domain of TCR clone 206591 (TRBV12-4, TRBJ1-5)
CASSPDRAQPQHF

SEQ ID NO: 413183 - protein, 10 aa, Homo sapiens
  CDR3 for alpha chain variable domain of TCR clone 206592 (TRAV12-3, TRAJ49)
CAMNDDQFYF

SEQ ID NO: 413184 - protein, 15 aa, Homo sapiens
  CDR3 for beta chain variable domain of TCR clone 206592 (TRBV27, TRBJ2-3)
CAGSLGLAATDTQYF

SEQ ID NO: 413185 - protein, 12 aa, Homo sapiens
  CDR3 for alpha chain variable domain of TCR clone 206593 (TRAV12-1, TRAJ40)
CVVTSGTYKYIF

SEQ ID NO: 413186 - protein, 14 aa, Homo sapiens
  CDR3 for beta chain variable domain of TCR clone 206593 (TRBV20-1, TRBJ2-2)
CSAPDTANTGELFF

SEQ ID NO: 413187 - protein, 13 aa, Homo sapiens
  CDR3 for alpha chain variable domain of TCR clone 206594 (TRAV8-6, TRAJ21)
CAVSPSSLNKFYF

SEQ ID NO: 413188 - protein, 12 aa, Homo sapiens
  CDR3 for beta chain variable domain of TCR clone 206594 (TRBV11-2, TRBJ2-3)
GASRGAPNTQYF

SEQ ID NO: 413189 - protein, 17 aa, Homo sapiens
  CDR3 for alpha chain variable domain of TCR clone 206595 (TRAV13-1, TRAJ53)
CSASWKSSGGGNYKLTF

SEQ ID NO: 413190 - protein, 19 aa, Homo sapiens
  CDR3 for beta chain variable domain of TCR clone 206595 (TRBV7-9, TRBJ2-1)
CASSHNRGALLRSYNEQFF

SEQ ID NO: 413191 - protein, 15 aa, Homo sapiens
  CDR3 for alpha chain variable domain of TCR clone 206596 (TRAV3, TRAJ22)
CAVRDRGGSAKQLTF

SEQ ID NO: 413192 - protein, 14 aa, Homo sapiens
  CDR3 for beta chain variable domain of TCR clone 206596 (TRBV19, TRBJ2-1)
CASSRLASINEQFF

SEQ ID NO: 413193 - protein, 16 aa, Homo sapiens
  CDR3 for alpha chain variable domain of TCR clone 206597 (TRAV3, TRAJ37)
CAVRGKGSGNTGKLIF

SEQ ID NO: 413194 - protein, 16 aa, Homo sapiens
  CDR3 for beta chain variable domain of TCR clone 206597 (TRBV12-4, TRBJ1-5)
CASSRPVGGFNQPQHF

SEQ ID NO: 413195 - protein, 14 aa, Homo sapiens
  CDR3 for alpha chain variable domain of TCR clone 206598 (TRAV12-1, TRAJ30)
CVVNIGGRDDKIIF

SEQ ID NO: 413196 - protein, 13 aa, Homo sapiens
  CDR3 for beta chain variable domain of TCR clone 206598 (TRBV12-5, TRBJ2-1)
CASGLSRGNEQFF

SEQ ID NO: 413197 - protein, 17 aa, Homo sapiens
  CDR3 for alpha chain variable domain of TCR clone 206599 (TRAV13-1, TRAJ52)
CAASSGDGGTSYGKLTF

SEQ ID NO: 413198 - protein, 17 aa, Homo sapiens
  CDR3 for beta chain variable domain of TCR clone 206599 (TRBV11-2, TRBJ2-1)
CASSLYPPGVEYNEQFF

SEQ ID NO: 413199 - protein, 12 aa, Homo sapiens
  CDR3 for alpha chain variable domain of TCR clone 206600 (TRAV12-1, TRAJ9)
CVVHTGGFKTIF

SEQ ID NO: 413200 - protein, 16 aa, Homo sapiens
  CDR3 for beta chain variable domain of TCR clone 206600 (TRBV6-1, TRBJ2-1)
CASSARLAGSHNEQFF

SEQ ID NO: 413201 - protein, 15 aa, Homo sapiens
  CDR3 for alpha chain variable domain of TCR clone 206601 (TRAV13-1, TRAJ5)
CAVYIRDTGRRALTF

SEQ ID NO: 413202 - protein, 15 aa, Homo sapiens
  CDR3 for beta chain variable domain of TCR clone 206601 (TRBV2, TRBJ2-3)
CASSDFEKATDTQYF

SEQ ID NO: 413203 - protein, 17 aa, Homo sapiens
  CDR3 for alpha chain variable domain of TCR clone 206602 (TRAV3, TRAJ6)
CAVRDGPRAGGSYIPTF

SEQ ID NO: 413204 - protein, 15 aa, Homo sapiens
  CDR3 for beta chain variable domain of TCR clone 206602 (TRBV4-1, TRBJ1-2)
CASSQGQGAAYGYTF

SEQ ID NO: 413205 - protein, 22 aa, Homo sapiens
  CDR3 for alpha chain variable domain of TCR clone 206603 (TRAV27, TRAJ41)
CAVRTQIPDIQNPDPAVYQLRD

SEQ ID NO: 413206 - protein, 15 aa, Homo sapiens
  CDR3 for beta chain variable domain of TCR clone 206603 (TRBV27, TRBJ1-2)
CASSLSSTVNYGYTF

SEQ ID NO: 413207 - protein, 13 aa, Homo sapiens
  CDR3 for alpha chain variable domain of TCR clone 206604 (TRAV30, TRAJ6)
CGFIEGGSYIPTS

SEQ ID NO: 413208 - protein, 13 aa, Homo sapiens
  CDR3 for beta chain variable domain of TCR clone 206604 (TRBV5-4, TRBJ2-5)
CASSPVSQETQYF

SEQ ID NO: 413209 - protein, 19 aa, Homo sapiens
  CDR3 for alpha chain variable domain of TCR clone 206605 (TRAV26-1, TRAJ22)
CCVLLHRWVFSGSARQRTF

SEQ ID NO: 413210 - protein, 19 aa, Homo sapiens
  CDR3 for beta chain variable domain of TCR clone 206605 (TRBV19, TRBJ2-5)
CASSIGQVTDFFLGETQYF

SEQ ID NO: 413211 - protein, 21 aa, Homo sapiens
  CDR3 for alpha chain variable domain of TCR clone 206606 (TRAV12-1, TRAJ32)
SSVIQPPTSMNYGGATTKLIF

SEQ ID NO: 413212 - protein, 18 aa, Homo sapiens
  CDR3 for beta chain variable domain of TCR clone 206606 (TRBV20-1, TRBJ2-3)
CSASGLAGGPGTTDTQYF

SEQ ID NO: 413213 - protein, 13 aa, Homo sapiens
  CDR3 for alpha chain variable domain of TCR clone 206607 (TRAV1-1, TRAJ9)
CAAKNTGGFKTIF

SEQ ID NO: 413214 - protein, 14 aa, Homo sapiens
  CDR3 for beta chain variable domain of TCR clone 206607 (TRBV20-1, TRBJ2-1)
CSAQIGGTANEQFF

SEQ ID NO: 413215 - protein, 13 aa, Homo sapiens
  CDR3 for alpha chain variable domain of TCR clone 206608 (TRAV1-2, TRAJ9)
CAALNTGGFKTIF

SEQ ID NO: 413216 - protein, 15 aa, Homo sapiens
  CDR3 for beta chain variable domain of TCR clone 206608 (TRBV24-1, TRBJ2-1)
CTTSGSGGFYNEQFF

SEQ ID NO: 413217 - protein, 14 aa, Homo sapiens
  CDR3 for alpha chain variable domain of TCR clone 206609 (TRAV12-3, TRAJ54)
CAMRGIQGAQKLVF

SEQ ID NO: 413218 - protein, 12 aa, Homo sapiens
  CDR3 for beta chain variable domain of TCR clone 206609 (TRBV28, TRBJ2-6)
CAIQAGANVLTF

SEQ ID NO: 413219 - protein, 14 aa, Homo sapiens
  CDR3 for alpha chain variable domain of TCR clone 206610 (TRAV12-2, TRAJ44)
CAVNPAGTASKLPF

SEQ ID NO: 413220 - protein, 16 aa, Homo sapiens
  CDR3 for beta chain variable domain of TCR clone 206610 (TRBV2, TRBJ2-1)
CASSVGGSLSYNEQFF

SEQ ID NO: 413221 - protein, 16 aa, Homo sapiens
  CDR3 for alpha chain variable domain of TCR clone 206611 (TRAV21, TRAJ52)
CAVSDAGSTSYGKLTF

SEQ ID NO: 413222 - protein, 13 aa, Homo sapiens
  CDR3 for beta chain variable domain of TCR clone 206611 (TRBV7-3, TRBJ2-5)
CASSFRGSQTQYV

SEQ ID NO: 413223 - protein, 14 aa, Homo sapiens
  CDR3 for alpha chain variable domain of TCR clone 206612 (TRAV35, TRAJ22)
CAGLRPSSARQLTF

SEQ ID NO: 413224 - protein, 13 aa, Homo sapiens
  CDR3 for beta chain variable domain of TCR clone 206612 (TRBV19, TRBJ1-1)
CASSITGESEAFF

SEQ ID NO: 413225 - protein, 16 aa, Homo sapiens
  CDR3 for alpha chain variable domain of TCR clone 206613 (TRAV3, TRAJ37)
CAVRPHGSGNTGKLIF

SEQ ID NO: 413226 - protein, 16 aa, Homo sapiens
  CDR3 for beta chain variable domain of TCR clone 206613 (TRBV9, TRBJ1-2)
CASSVEEMVSPYGYTF

SEQ ID NO: 413227 - protein, 11 aa, Homo sapiens
  CDR3 for alpha chain variable domain of TCR clone 206614 (TRAV17, TRAJ9)
CATTGGFKTIF

SEQ ID NO: 413228 - protein, 13 aa, Homo sapiens
  CDR3 for beta chain variable domain of TCR clone 206614 (TRBV19, TRBJ2-3)
CASSINGVDTQYF

SEQ ID NO: 413229 - protein, 13 aa, Homo sapiens
  CDR3 for alpha chain variable domain of TCR clone 206615 (TRAV12-1, TRAJ16)
CVVNGSDGQKLLF

SEQ ID NO: 413230 - protein, 13 aa, Homo sapiens
  CDR3 for beta chain variable domain of TCR clone 206615 (TRBV2, TRBJ1-1)
CARNPTGGFHAFF

SEQ ID NO: 413231 - protein, 15 aa, Homo sapiens
  CDR3 for alpha chain variable domain of TCR clone 206616 (TRAV8-3, TRAJ45)
CGSSYSGGGADGLTF

SEQ ID NO: 413232 - protein, 17 aa, Homo sapiens
  CDR3 for beta chain variable domain of TCR clone 206616 (TRBV7-8, TRBJ2-6)
CASSAGTGGAGANVLTF

SEQ ID NO: 413233 - protein, 13 aa, Homo sapiens
  CDR3 for alpha chain variable domain of TCR clone 206617 (TRAV12-3, TRAJ33)
CAMSVNSNYQLIW

SEQ ID NO: 413234 - protein, 12 aa, Homo sapiens
  CDR3 for beta chain variable domain of TCR clone 206617 (TRBV7-2, TRBJ2-2)
CQQLSSHGELFF

SEQ ID NO: 413235 - protein, 15 aa, Homo sapiens
  CDR3 for alpha chain variable domain of TCR clone 206618 (TRAV12-2, TRAJ53)
CAVNGGGGSHYKLTF

SEQ ID NO: 413236 - protein, 17 aa, Homo sapiens
  CDR3 for beta chain variable domain of TCR clone 206618 (TRBV7-3, TRBJ2-3)
CASSLMKRMRGADTQYF

SEQ ID NO: 413237 - protein, 18 aa, Homo sapiens
  CDR3 for alpha chain variable domain of TCR clone 206619 (TRAV21, TRAJ52)
CAVRPSPAGGTSYGKLTF

SEQ ID NO: 413238 - protein, 13 aa, Homo sapiens
  CDR3 for beta chain variable domain of TCR clone 206619 (TRBV29-1, TRBJ2-1)
CSVEGGRSMSSSS

SEQ ID NO: 413239 - protein, 14 aa, Homo sapiens
  CDR3 for alpha chain variable domain of TCR clone 206620 (TRAV1-2, TRAJ8)
SAVREDTGFQKLAF

SEQ ID NO: 413240 - protein, 13 aa, Homo sapiens
  CDR3 for beta chain variable domain of TCR clone 206620 (TRBV12-4, TRBJ2-5)
CASRKRGKETQYF

SEQ ID NO: 413241 - protein, 14 aa, Homo sapiens
  CDR3 for alpha chain variable domain of TCR clone 206621 (TRAV1-2, TRAJ8)
CAVREDTGFQKLVF

SEQ ID NO: 413242 - protein, 12 aa, Homo sapiens
  CDR3 for beta chain variable domain of TCR clone 206621 (TRBV5-1, TRBJ2-7)
CASRGGGLEQYF

SEQ ID NO: 413243 - protein, 11 aa, Homo sapiens
  CDR3 for alpha chain variable domain of TCR clone 206622 (TRAV12-3, TRAJ27)
CAMANTGKSTF

SEQ ID NO: 413244 - protein, 14 aa, Homo sapiens
  CDR3 for beta chain variable domain of TCR clone 206622 (TRBV12-5, TRBJ2-5)
CASGSRTHQETQYF

SEQ ID NO: 413245 - protein, 14 aa, Homo sapiens
  CDR3 for alpha chain variable domain of TCR clone 206623 (TRAV29/DV5, TRAJ34)
CAASASRETDKLIF

SEQ ID NO: 413246 - protein, 15 aa, Homo sapiens
  CDR3 for beta chain variable domain of TCR clone 206623 (TRBV2, TRBJ2-5)
CASTRDGGPQETQYF

SEQ ID NO: 413247 - protein, 18 aa, Homo sapiens
  CDR3 for alpha chain variable domain of TCR clone 206624 (TRAV9-2, TRAJ52)
CALSRHDAGGTSYGKLTF

SEQ ID NO: 413248 - protein, 13 aa, Homo sapiens
  CDR3 for beta chain variable domain of TCR clone 206624 (TRBV7-9, TRBJ1-2)
CASSLKQNYGYAF

SEQ ID NO: 413249 - protein, 14 aa, Homo sapiens
  CDR3 for alpha chain variable domain of TCR clone 206625 (TRAV12-1, TRAJ17)
CVANYKAAGNKLTF

SEQ ID NO: 413250 - protein, 14 aa, Homo sapiens
  CDR3 for beta chain variable domain of TCR clone 206625 (TRBV19, TRBJ2-1)
RASPTFVLSGEQFF

SEQ ID NO: 413251 - protein, 12 aa, Homo sapiens
  CDR3 for alpha chain variable domain of TCR clone 206626 (TRAV12-3, TRAJ17)
CAMTLTGNKLTF

SEQ ID NO: 413252 - protein, 15 aa, Homo sapiens
  CDR3 for beta chain variable domain of TCR clone 206626 (TRBV7-2, TRBJ1-2)
CAGSPRAGWNYGYTF

SEQ ID NO: 413253 - protein, 17 aa, Homo sapiens
  CDR3 for alpha chain variable domain of TCR clone 206627 (TRAV3, TRAJ42)
CAVRDRDYGGSQGNLIF

SEQ ID NO: 413254 - protein, 18 aa, Homo sapiens
  CDR3 for beta chain variable domain of TCR clone 206627 (TRBV20-1, TRBJ2-6)
CSAETTPTHGSGANVLTV

SEQ ID NO: 413255 - protein, 13 aa, Homo sapiens
  CDR3 for alpha chain variable domain of TCR clone 206628 (TRAV26-1, TRAJ33)
CIVRVDSNYQLNW

SEQ ID NO: 413256 - protein, 15 aa, Homo sapiens
  CDR3 for beta chain variable domain of TCR clone 206628 (TRBV7-2, TRBJ1-5)
CASSFSAGINQPQHF

SEQ ID NO: 413257 - protein, 17 aa, Homo sapiens
  CDR3 for alpha chain variable domain of TCR clone 206629 (TRAV3, TRAJ42)
CAVRDRDYGGSQGTLIF

SEQ ID NO: 413258 - protein, 13 aa, Homo sapiens
  CDR3 for beta chain variable domain of TCR clone 206629 (TRBV4-2, TRBJ1-1)
CASSQAGNTEAFF

SEQ ID NO: 413259 - protein, 14 aa, Homo sapiens
  CDR3 for alpha chain variable domain of TCR clone 206630 (TRAV1-2, TRAJ10)
CAVRVTRGGNKLTF

SEQ ID NO: 413260 - protein, 12 aa, Homo sapiens
  CDR3 for beta chain variable domain of TCR clone 206630 (TRBV5-4, TRBJ1-1)
CASSFGQTEAFF

SEQ ID NO: 413261 - protein, 13 aa, Homo sapiens
  CDR3 for alpha chain variable domain of TCR clone 206631 (TRAV1-1, TRAJ31)
CASYLNNNARLMF

SEQ ID NO: 413262 - protein, 13 aa, Homo sapiens
  CDR3 for beta chain variable domain of TCR clone 206631 (TRBV20-1, TRBJ1-1)
CSARVGGYTEAFF

SEQ ID NO: 413263 - protein, 18 aa, Homo sapiens
  CDR3 for alpha chain variable domain of TCR clone 206632 (TRAV21, TRAJ52)
CAVRPSPAGGTSYGKLTF

SEQ ID NO: 413264 - protein, 17 aa, Homo sapiens
  CDR3 for beta chain variable domain of TCR clone 206632 (TRBV20-1, TRBJ2-7)
CSARDMGKEGSSYEQYF

SEQ ID NO: 413265 - protein, 14 aa, Homo sapiens
  CDR3 for alpha chain variable domain of TCR clone 206633 (TRAV17, TRAJ12)
CATDETDSSYKLIF

SEQ ID NO: 413266 - protein, 16 aa, Homo sapiens
  CDR3 for beta chain variable domain of TCR clone 206633 (TRBV11-2, TRBJ2-1)
CASSPRLAGVYNEQFF

SEQ ID NO: 413267 - protein, 14 aa, Homo sapiens
  CDR3 for alpha chain variable domain of TCR clone 206634 (TRAV12-2, TRAJ13)
CAVKKTGGYQKVTF

SEQ ID NO: 413268 - protein, 16 aa, Homo sapiens
  CDR3 for beta chain variable domain of TCR clone 206634 (TRBV28, TRBJ2-2)
CASSLEGGSNTGELFF

SEQ ID NO: 413269 - protein, 21 aa, Homo sapiens
  CDR3 for alpha chain variable domain of TCR clone 206635 (TRAV12-1, TRAJ32)
CVVRWKGCYKQAHLWNWHFAC

SEQ ID NO: 413270 - protein, 13 aa, Homo sapiens
  CDR3 for beta chain variable domain of TCR clone 206635 (TRBV18, TRBJ2-7)
CASSPGRNYEQYF

SEQ ID NO: 413271 - protein, 11 aa, Homo sapiens
  CDR3 for alpha chain variable domain of TCR clone 206636 (TRAV21, TRAJ34)
CAVTNTNKLIF

SEQ ID NO: 413272 - protein, 16 aa, Homo sapiens
  CDR3 for beta chain variable domain of TCR clone 206636 (TRBV18, TRBJ1-1)
CASSPGVGGRGGEASF

SEQ ID NO: 413273 - protein, 16 aa, Homo sapiens
  CDR3 for alpha chain variable domain of TCR clone 206637 (TRAV21, TRAJ37)
RAVRPRGSSNTGKLIF

SEQ ID NO: 413274 - protein, 13 aa, Homo sapiens
  CDR3 for beta chain variable domain of TCR clone 206637 (TRBV7-9, TRBJ2-5)
CASLSPGQETQYF

SEQ ID NO: 413275 - protein, 14 aa, Homo sapiens
  CDR3 for alpha chain variable domain of TCR clone 206638 (TRAV12-3, TRAJ10)
SHLPLTGGGNKLTF

SEQ ID NO: 413276 - protein, 15 aa, Homo sapiens
  CDR3 for beta chain variable domain of TCR clone 206638 (TRBV20-1, TRBJ2-1)
CSASSAGSSYNEQFF

SEQ ID NO: 413277 - protein, 17 aa, Homo sapiens
  CDR3 for alpha chain variable domain of TCR clone 206639 (TRAV3, TRAJ12)
CAVRDGGRMDSSYKLIF

SEQ ID NO: 413278 - protein, 13 aa, Homo sapiens
  CDR3 for beta chain variable domain of TCR clone 206639 (TRBV15, TRBJ1-6)
CATSGGINSPLHF

SEQ ID NO: 413279 - protein, 12 aa, Homo sapiens
  CDR3 for alpha chain variable domain of TCR clone 206640 (TRAV8-4, TRAJ20)
CAVSDDDYKLSL

SEQ ID NO: 413280 - protein, 17 aa, Homo sapiens
  CDR3 for beta chain variable domain of TCR clone 206640 (TRBV12-4, TRBJ1-5)
CASSRHQAGGVNQPQHF

SEQ ID NO: 413281 - protein, 15 aa, Homo sapiens
  CDR3 for alpha chain variable domain of TCR clone 206641 (TRAV23/DV6, TRAJ18)
CAARYRGSTLGRLYF

SEQ ID NO: 413282 - protein, 15 aa, Homo sapiens
  CDR3 for beta chain variable domain of TCR clone 206641 (TRBV20-1, TRBJ2-7)
CSARDRVSRMDEQYF

SEQ ID NO: 413283 - protein, 16 aa, Homo sapiens
  CDR3 for alpha chain variable domain of TCR clone 206642 (TRAV8-3, TRAJ8)
CAVPRDGNTGFKKLVF

SEQ ID NO: 413284 - protein, 14 aa, Homo sapiens
  CDR3 for beta chain variable domain of TCR clone 206642 (TRBV28, TRBJ1-1)
CASSESGRGTEAFF

SEQ ID NO: 413285 - protein, 14 aa, Homo sapiens
  CDR3 for alpha chain variable domain of TCR clone 206643 (TRAV1-2, TRAJ16)
CAVNRFSDCQKLLF

SEQ ID NO: 413286 - protein, 17 aa, Homo sapiens
  CDR3 for beta chain variable domain of TCR clone 206643 (TRBV13, TRBJ2-3)
CASSLSRVAGGRNTQYF

SEQ ID NO: 413287 - protein, 13 aa, Homo sapiens
  CDR3 for alpha chain variable domain of TCR clone 206644 (TRAV36/DV7, TRAJ53)
CALSGGSNYKLTF

SEQ ID NO: 413288 - protein, 13 aa, Homo sapiens
  CDR3 for beta chain variable domain of TCR clone 206644 (TRBV28, TRBJ2-4)
CASSQSSKTIQYF

SEQ ID NO: 413289 - protein, 15 aa, Homo sapiens
  CDR3 for alpha chain variable domain of TCR clone 206645 (TRAV19, TRAJ23)
CALSEMGNQGGKLIF

SEQ ID NO: 413290 - protein, 13 aa, Homo sapiens
  CDR3 for beta chain variable domain of TCR clone 206645 (TRBV7-9, TRBJ1-2)
CASSLKQNYGYTF

SEQ ID NO: 413291 - protein, 15 aa, Homo sapiens
  CDR3 for alpha chain variable domain of TCR clone 206646 (TRAV16, TRAJ4)
CALEDPSGGYNKLIF

SEQ ID NO: 413292 - protein, 13 aa, Homo sapiens
  CDR3 for beta chain variable domain of TCR clone 206646 (TRBV7-3, TRBJ2-7)
CASGQAGGYEQYF

SEQ ID NO: 413293 - protein, 16 aa, Homo sapiens
  CDR3 for alpha chain variable domain of TCR clone 206647 (TRAV3, TRAJ34)
CAVRARGTPTSSSLGL

SEQ ID NO: 413294 - protein, 15 aa, Homo sapiens
  CDR3 for beta chain variable domain of TCR clone 206647 (TRBV6-3, TRBJ2-7)
CASSSPGTVFYEQYF

SEQ ID NO: 413295 - protein, 15 aa, Homo sapiens
  CDR3 for alpha chain variable domain of TCR clone 206648 (TRAV3, TRAJ4)
CAVRDRAGSYNKLIF

SEQ ID NO: 413296 - protein, 17 aa, Homo sapiens
  CDR3 for beta chain variable domain of TCR clone 206648 (TRBV28, TRBJ2-5)
CASSTPEGDALQETQYF

SEQ ID NO: 413297 - protein, 19 aa, Homo sapiens
  CDR3 for alpha chain variable domain of TCR clone 206649 (TRAV2, TRAJ20)
ILQVREADAAVYRDCKLSF

SEQ ID NO: 413298 - protein, 16 aa, Homo sapiens
  CDR3 for beta chain variable domain of TCR clone 206649 (TRBV11-2, TRBJ2-1)
CQQLITPGVEYNEQFF

SEQ ID NO: 413299 - protein, 11 aa, Homo sapiens
  CDR3 for alpha chain variable domain of TCR clone 206650 (TRAV21, TRAJ48)
CAVDGNEKLTF

SEQ ID NO: 413300 - protein, 16 aa, Homo sapiens
  CDR3 for beta chain variable domain of TCR clone 206650 (TRBV19, TRBJ2-1)
CASSSKGTRFYNEQFF

SEQ ID NO: 413301 - protein, 11 aa, Homo sapiens
  CDR3 for alpha chain variable domain of TCR clone 206651 (TRAV3, TRAJ21)
CAVGNFKKFYF

SEQ ID NO: 413302 - protein, 12 aa, Homo sapiens
  CDR3 for beta chain variable domain of TCR clone 206651 (TRBV29-1, TRBJ2-3)
CSVTGGADTQYF

SEQ ID NO: 413303 - protein, 20 aa, Homo sapiens
  CDR3 for alpha chain variable domain of TCR clone 206652 (TRAV12-3, TRAJ41)
SLFIRDSQPSDSATPEALNF

SEQ ID NO: 413304 - protein, 13 aa, Homo sapiens
  CDR3 for beta chain variable domain of TCR clone 206652 (TRBV10-3, TRBJ2-7)
CAIRAGGPHEQYF

SEQ ID NO: 413305 - protein, 14 aa, Homo sapiens
  CDR3 for alpha chain variable domain of TCR clone 206653 (TRAV12-2, TRAJ13)
CAVKKTGGYQKVTF

SEQ ID NO: 413306 - protein, 13 aa, Homo sapiens
  CDR3 for beta chain variable domain of TCR clone 206653 (TRBV4-3, TRBJ2-1)
CASSFWDYNEQFF

SEQ ID NO: 413307 - protein, 13 aa, Homo sapiens
  CDR3 for alpha chain variable domain of TCR clone 206654 (TRAV21, TRAJ27)
CAALNTNAGKSTF

SEQ ID NO: 413308 - protein, 16 aa, Homo sapiens
  CDR3 for beta chain variable domain of TCR clone 206654 (TRBV7-3, TRBJ2-2)
CASSLKRRTLSGELFF

SEQ ID NO: 413309 - protein, 15 aa, Homo sapiens
  CDR3 for alpha chain variable domain of TCR clone 206655 (TRAV21, TRAJ10)
CAVPLLTGGGNKLTF

SEQ ID NO: 413310 - protein, 14 aa, Homo sapiens
  CDR3 for beta chain variable domain of TCR clone 206655 (TRBV12-4, TRBJ1-1)
CASSLGTGGTDAFF

SEQ ID NO: 413311 - protein, 10 aa, Homo sapiens
  CDR3 for alpha chain variable domain of TCR clone 206656 (TRAV26-1, TRAJ22)
CIGRLNFFWF

SEQ ID NO: 413312 - protein, 15 aa, Homo sapiens
  CDR3 for beta chain variable domain of TCR clone 206656 (TRBV4-2, TRBJ1-2)
CASSQRTGGRDGYTF

SEQ ID NO: 413313 - protein, 17 aa, Homo sapiens
  CDR3 for alpha chain variable domain of TCR clone 206657 (TRAV1-1, TRAJ28)
CAVDPAYSGAGSYQLTF

SEQ ID NO: 413314 - protein, 14 aa, Homo sapiens
  CDR3 for beta chain variable domain of TCR clone 206657 (TRBV19, TRBJ2-1)
CASPTFVLSGDQFF

SEQ ID NO: 413315 - protein, 13 aa, Homo sapiens
  CDR3 for alpha chain variable domain of TCR clone 206658 (TRAV29/DV5, TRAJ44)
CAASTGTASKLTF

SEQ ID NO: 413316 - protein, 11 aa, Homo sapiens
  CDR3 for beta chain variable domain of TCR clone 206658 (TRBV12-4, TRBJ2-3)
CASTATDTQYL

SEQ ID NO: 413317 - protein, 16 aa, Homo sapiens
  CDR3 for alpha chain variable domain of TCR clone 206659 (TRAV4, TRAJ18)
CCVLLIGGSTLGRLYF

SEQ ID NO: 413318 - protein, 19 aa, Homo sapiens
  CDR3 for beta chain variable domain of TCR clone 206659 (TRBV28, TRBJ2-7)
CASSYSGTSRLGWVYEQYF

SEQ ID NO: 413319 - protein, 11 aa, Homo sapiens
  CDR3 for alpha chain variable domain of TCR clone 206660 (TRAV13-2, TRAJ20)
CADSNDYKPSF

SEQ ID NO: 413320 - protein, 14 aa, Homo sapiens
  CDR3 for beta chain variable domain of TCR clone 206660 (TRBV11-2, TRBJ1-5)
CASSLDRGRQPQHF

SEQ ID NO: 413321 - protein, 13 aa, Homo sapiens
  CDR3 for alpha chain variable domain of TCR clone 206661 (TRAV36/DV7, TRAJ49)
CAVEANTGNQFYF

SEQ ID NO: 413322 - protein, 14 aa, Homo sapiens
  CDR3 for beta chain variable domain of TCR clone 206661 (TRBV20-1, TRBJ2-5)
CSASSGSAAETQYF

SEQ ID NO: 413323 - protein, 13 aa, Homo sapiens
  CDR3 for alpha chain variable domain of TCR clone 206662 (TRAV6, TRAJ3)
CSTGYSSASKITF

SEQ ID NO: 413324 - protein, 13 aa, Homo sapiens
  CDR3 for beta chain variable domain of TCR clone 206662 (TRBV14, TRBJ1-2)
CASSQQGYYGYTF

SEQ ID NO: 413325 - protein, 13 aa, Homo sapiens
  CDR3 for alpha chain variable domain of TCR clone 206663 (TRAV21, TRAJ21)
CAVRTSTNFTLDL

SEQ ID NO: 413326 - protein, 13 aa, Homo sapiens
  CDR3 for beta chain variable domain of TCR clone 206663 (TRBV4-1, TRBJ1-1)
CASSRKMNTEAFF

SEQ ID NO: 413327 - protein, 15 aa, Homo sapiens
  CDR3 for alpha chain variable domain of TCR clone 206664 (TRAV2, TRAJ24)
CAVVRLKNSWGKLQF

SEQ ID NO: 413328 - protein, 15 aa, Homo sapiens
  CDR3 for beta chain variable domain of TCR clone 206664 (TRBV2, TRBJ2-1)
CASSELAGSYNEQFF

SEQ ID NO: 413329 - protein, 14 aa, Homo sapiens
  CDR3 for alpha chain variable domain of TCR clone 206665 (TRAV13-1, TRAJ40)
CAASMTTGTYQYIF

SEQ ID NO: 413330 - protein, 15 aa, Homo sapiens
  CDR3 for beta chain variable domain of TCR clone 206665 (TRBV7-3, TRBJ2-1)
CASSPTGGGEVEQFF

SEQ ID NO: 413331 - protein, 14 aa, Homo sapiens
  CDR3 for alpha chain variable domain of TCR clone 206666 (TRAV12-2, TRAJ13)
CALKKTGGYQKVTF

SEQ ID NO: 413332 - protein, 16 aa, Homo sapiens
  CDR3 for beta chain variable domain of TCR clone 206666 (TRBV4-1, TRBJ2-3)
CASSQSTGGAEDTQYF

SEQ ID NO: 413333 - protein, 13 aa, Homo sapiens
  CDR3 for alpha chain variable domain of TCR clone 206667 (TRAV23/DV6, TRAJ12)
CAPRADSSYKLIF

SEQ ID NO: 413334 - protein, 12 aa, Homo sapiens
  CDR3 for beta chain variable domain of TCR clone 206667 (TRBV7-6, TRBJ2-5)
CASSLSQETQYF

SEQ ID NO: 413335 - protein, 12 aa, Homo sapiens
  CDR3 for alpha chain variable domain of TCR clone 206668 (TRAV2, TRAJ36)
CAELTGAKNLFF

SEQ ID NO: 413336 - protein, 14 aa, Homo sapiens
  CDR3 for beta chain variable domain of TCR clone 206668 (TRBV18, TRBJ2-7)
RASSPRGGAYEQYF

SEQ ID NO: 413337 - protein, 14 aa, Homo sapiens
  CDR3 for alpha chain variable domain of TCR clone 206669 (TRAV27, TRAJ12)
CAGARMDSSYKLIF

SEQ ID NO: 413338 - protein, 18 aa, Homo sapiens
  CDR3 for beta chain variable domain of TCR clone 206669 (TRBV10-3, TRBJ2-7)
CAISESGRTSGGRVEQYF

SEQ ID NO: 413339 - protein, 13 aa, Homo sapiens
  CDR3 for alpha chain variable domain of TCR clone 206670 (TRAV2, TRAJ15)
CAVASQAGTALIF

SEQ ID NO: 413340 - protein, 14 aa, Homo sapiens
  CDR3 for beta chain variable domain of TCR clone 206670 (TRBV25-1, TRBJ1-1)
CARTHLGGNTEAFF

SEQ ID NO: 413341 - protein, 14 aa, Homo sapiens
  CDR3 for alpha chain variable domain of TCR clone 206671 (TRAV3, TRAJ40)
CAVRDRRGTYKYIF

SEQ ID NO: 413342 - protein, 15 aa, Homo sapiens
  CDR3 for beta chain variable domain of TCR clone 206671 (TRBV11-1, TRBJ1-3)
CASTDRRAFGNTIYF

SEQ ID NO: 413343 - protein, 16 aa, Homo sapiens
  CDR3 for alpha chain variable domain of TCR clone 206672 (TRAV8-3, TRAJ13)
CAVGAYPSGGYQKVTF

SEQ ID NO: 413344 - protein, 15 aa, Homo sapiens
  CDR3 for beta chain variable domain of TCR clone 206672 (TRBV28, TRBJ1-3)
CASSMGWASGNTIYF

SEQ ID NO: 413345 - protein, 13 aa, Homo sapiens
  CDR3 for alpha chain variable domain of TCR clone 206673 (TRAV20, TRAJ48)
CAVQGVGNEKLTL

SEQ ID NO: 413346 - protein, 14 aa, Homo sapiens
  CDR3 for beta chain variable domain of TCR clone 206673 (TRBV27, TRBJ2-7)
CASSFRDGPYEQYF

SEQ ID NO: 413347 - protein, 12 aa, Homo sapiens
  CDR3 for alpha chain variable domain of TCR clone 206674 (TRAV13-1, TRAJ21)
CAAKEVFNKFYF

SEQ ID NO: 413348 - protein, 14 aa, Homo sapiens
  CDR3 for beta chain variable domain of TCR clone 206674 (TRBV5-4, TRBJ1-1)
CASSLDSRRDEAFF

SEQ ID NO: 413349 - protein, 11 aa, Homo sapiens
  CDR3 for alpha chain variable domain of TCR clone 206675 (TRAV21, TRAJ34)
CAHYNTDKLLF

SEQ ID NO: 413350 - protein, 14 aa, Homo sapiens
  CDR3 for beta chain variable domain of TCR clone 206675 (TRBV6-1, TRBJ1-3)
CASVQGGGGNTIYF

SEQ ID NO: 413351 - protein, 13 aa, Homo sapiens
  CDR3 for alpha chain variable domain of TCR clone 206676 (TRAV17, TRAJ23)
CATDKNQGGKLIF

SEQ ID NO: 413352 - protein, 14 aa, Homo sapiens
  CDR3 for beta chain variable domain of TCR clone 206676 (TRBV6-3, TRBJ2-7)
CASTRGQRFNEQYF

SEQ ID NO: 413353 - protein, 13 aa, Homo sapiens
  CDR3 for alpha chain variable domain of TCR clone 206677 (TRAV2, TRAJ13)
CAVESGGYQKVTF

SEQ ID NO: 413354 - protein, 15 aa, Homo sapiens
  CDR3 for beta chain variable domain of TCR clone 206677 (TRBV7-8, TRBJ2-1)
CASSLAGGLYNEQFF

SEQ ID NO: 413355 - protein, 16 aa, Homo sapiens
  CDR3 for alpha chain variable domain of TCR clone 206678 (TRAV12-3, TRAJ28)
CALRANSGAGSYQLTF

SEQ ID NO: 413356 - protein, 16 aa, Homo sapiens
  CDR3 for beta chain variable domain of TCR clone 206678 (TRBV7-2, TRBJ1-3)
CASSRLEASSGNTIYF

SEQ ID NO: 413357 - protein, 14 aa, Homo sapiens
  CDR3 for alpha chain variable domain of TCR clone 206679 (TRAV1-2, TRAJ15)
CAVRDRQAGTALIF

SEQ ID NO: 413358 - protein, 14 aa, Homo sapiens
  CDR3 for beta chain variable domain of TCR clone 206679 (TRBV20-1, TRBJ1-1)
SAVLHLGGGTEAFF

SEQ ID NO: 413359 - protein, 12 aa, Homo sapiens
  CDR3 for alpha chain variable domain of TCR clone 206680 (TRAV13-1, TRAJ34)
CAASKGTDKLIF

SEQ ID NO: 413360 - protein, 20 aa, Homo sapiens
  CDR3 for beta chain variable domain of TCR clone 206680 (TRBV28, TRBJ2-1)
CASTPIGRSPGLAGGNEQFF

SEQ ID NO: 413361 - protein, 12 aa, Homo sapiens
  CDR3 for alpha chain variable domain of TCR clone 206681 (TRAV35, TRAJ30)
CAGLNRDDKIIF

SEQ ID NO: 413362 - protein, 15 aa, Homo sapiens
  CDR3 for beta chain variable domain of TCR clone 206681 (TRBV18, TRBJ2-3)
CAISPLAGETDTQYF

SEQ ID NO: 413363 - protein, 15 aa, Homo sapiens
  CDR3 for alpha chain variable domain of TCR clone 206682 (TRAV21, TRAJ53)
CATLNSGGSNYKLTF

SEQ ID NO: 413364 - protein, 17 aa, Homo sapiens
  CDR3 for beta chain variable domain of TCR clone 206682 (TRBV7-8, TRBJ2-6)
CASSPGTGGAGANVLTF

SEQ ID NO: 413365 - protein, 12 aa, Homo sapiens
  CDR3 for alpha chain variable domain of TCR clone 206683 (TRAV8-6, TRAJ57)
CAVQGGAEKLGF

SEQ ID NO: 413366 - protein, 11 aa, Homo sapiens
  CDR3 for beta chain variable domain of TCR clone 206683 (TRBV19, TRBJ1-1)
CASSIGSEAFF

SEQ ID NO: 413367 - protein, 13 aa, Homo sapiens
  CDR3 for alpha chain variable domain of TCR clone 206684 (TRAV13-2, TRAJ48)
CAEMDFGNEKLTF

SEQ ID NO: 413368 - protein, 13 aa, Homo sapiens
  CDR3 for beta chain variable domain of TCR clone 206684 (TRBV13, TRBJ2-5)
CARSPEVGETQYF

SEQ ID NO: 413369 - protein, 14 aa, Homo sapiens
  CDR3 for alpha chain variable domain of TCR clone 206685 (TRAV8-6, TRAJ49)
CSVSDPGTGNQFYF

SEQ ID NO: 413370 - protein, 16 aa, Homo sapiens
  CDR3 for beta chain variable domain of TCR clone 206685 (TRBV24-1, TRBJ2-1)
CATSGVAGANYNEQFF

SEQ ID NO: 413371 - protein, 14 aa, Homo sapiens
  CDR3 for alpha chain variable domain of TCR clone 206686 (TRAV16, TRAJ15)
CALSFNQAGTALIF

SEQ ID NO: 413372 - protein, 13 aa, Homo sapiens
  CDR3 for beta chain variable domain of TCR clone 206686 (TRBV11-2, TRBJ2-2)
CASGRDREEELFF

SEQ ID NO: 413373 - protein, 13 aa, Homo sapiens
  CDR3 for alpha chain variable domain of TCR clone 206687 (TRAV8-3, TRAJ28)
CAVGAVGSYQLTF

SEQ ID NO: 413374 - protein, 15 aa, Homo sapiens
  CDR3 for beta chain variable domain of TCR clone 206687 (TRBV7-9, TRBJ2-1)
CASSLGWGRANEQFF

SEQ ID NO: 413375 - protein, 14 aa, Homo sapiens
  CDR3 for alpha chain variable domain of TCR clone 206688 (TRAV38-1, TRAJ40)
CALRPTSGTYKYTF

SEQ ID NO: 413376 - protein, 13 aa, Homo sapiens
  CDR3 for beta chain variable domain of TCR clone 206688 (TRBV25-1, TRBJ1-1)
CQHPPGGNTEAFF

SEQ ID NO: 413377 - protein, 13 aa, Homo sapiens
  CDR3 for alpha chain variable domain of TCR clone 206689 (TRAV20, TRAJ34)
CAVSSYNTDKLIF

SEQ ID NO: 413378 - protein, 13 aa, Homo sapiens
  CDR3 for beta chain variable domain of TCR clone 206689 (TRBV2, TRBJ2-5)
CASGTPYQETQYF

SEQ ID NO: 413379 - protein, 14 aa, Homo sapiens
  CDR3 for alpha chain variable domain of TCR clone 206690 (TRAV9-2, TRAJ39)
CALYIYNAGNMLTF

SEQ ID NO: 413380 - protein, 15 aa, Homo sapiens
  CDR3 for beta chain variable domain of TCR clone 206690 (TRBV5-5, TRBJ1-5)
CASSTTPGSNQPQHF

SEQ ID NO: 413381 - protein, 17 aa, Homo sapiens
  CDR3 for alpha chain variable domain of TCR clone 206691 (TRAV3, TRAJ42)
CAVRDRDYGGSKGNLIF

SEQ ID NO: 413382 - protein, 13 aa, Homo sapiens
  CDR3 for beta chain variable domain of TCR clone 206691 (TRBV20-1, TRBJ2-5)
CSARRGTGATQYF

SEQ ID NO: 413383 - protein, 14 aa, Homo sapiens
  CDR3 for alpha chain variable domain of TCR clone 206692 (TRAV1-2, TRAJ6)
CAVSLPGGGYIPTF

SEQ ID NO: 413384 - protein, 15 aa, Homo sapiens
  CDR3 for beta chain variable domain of TCR clone 206692 (TRBV28, TRBJ2-7)
CASSPGGGGFYEQYF

SEQ ID NO: 413385 - protein, 12 aa, Homo sapiens
  CDR3 for alpha chain variable domain of TCR clone 206693 (TRAV12-1, TRAJ40)
CVVYSGTYKYIS

SEQ ID NO: 413386 - protein, 15 aa, Homo sapiens
  CDR3 for beta chain variable domain of TCR clone 206693 (TRBV7-9, TRBJ1-6)
CASSSPGRGNSPLHF

SEQ ID NO: 413387 - protein, 13 aa, Homo sapiens
  CDR3 for alpha chain variable domain of TCR clone 206694 (TRAV13-1, TRAJ43)
CAASLSNTNEMRF

SEQ ID NO: 413388 - protein, 15 aa, Homo sapiens
  CDR3 for beta chain variable domain of TCR clone 206694 (TRBV5-1, TRBJ2-1)
CASSQAGYWWNEQFF

SEQ ID NO: 413389 - protein, 13 aa, Homo sapiens
  CDR3 for alpha chain variable domain of TCR clone 206695 (TRAV20, TRAJ48)
CAVPGVGNEKLTF

SEQ ID NO: 413390 - protein, 19 aa, Homo sapiens
  CDR3 for beta chain variable domain of TCR clone 206695 (TRBV2, TRBJ2-2)
CASSQPGLAGGGNTGELFF

SEQ ID NO: 413391 - protein, 16 aa, Homo sapiens
  CDR3 for alpha chain variable domain of TCR clone 206696 (TRAV16, TRAJ4)
CALSRMFSGGYNKLIF

SEQ ID NO: 413392 - protein, 12 aa, Homo sapiens
  CDR3 for beta chain variable domain of TCR clone 206696 (TRBV29-1, TRBJ2-3)
CSVTGGADTQYC

SEQ ID NO: 413393 - protein, 15 aa, Homo sapiens
  CDR3 for alpha chain variable domain of TCR clone 206697 (TRAV3, TRAJ5)
CAVRDLDTGRRALTF

SEQ ID NO: 413394 - protein, 13 aa, Homo sapiens
  CDR3 for beta chain variable domain of TCR clone 206697 (TRBV12-4, TRBJ2-1)
CASSPTETYEQFF

SEQ ID NO: 413395 - protein, 14 aa, Homo sapiens
  CDR3 for alpha chain variable domain of TCR clone 206698 (TRAV12-2, TRAJ13)
CAVKKTGGYQKVTF

SEQ ID NO: 413396 - protein, 17 aa, Homo sapiens
  CDR3 for beta chain variable domain of TCR clone 206698 (TRBV5-1, TRBJ2-7)
CASSKPEGREASYEQYF

SEQ ID NO: 413397 - protein, 17 aa, Homo sapiens
  CDR3 for alpha chain variable domain of TCR clone 206699 (TRAV26-2, TRAJ42)
CILRDIGYGGSQGNLIF

SEQ ID NO: 413398 - protein, 16 aa, Homo sapiens
  CDR3 for beta chain variable domain of TCR clone 206699 (TRBV12-4, TRBJ2-7)
CASSLIGGTGTYEQYF

SEQ ID NO: 413399 - protein, 16 aa, Homo sapiens
  CDR3 for alpha chain variable domain of TCR clone 206700 (TRAV30, TRAJ57)
CGTGWAPQGGSEKLVF

SEQ ID NO: 413400 - protein, 14 aa, Homo sapiens
  CDR3 for beta chain variable domain of TCR clone 206700 (TRBV18, TRBJ1-1)
CASSPGCQGVAAFF

SEQ ID NO: 413401 - protein, 15 aa, Homo sapiens
  CDR3 for alpha chain variable domain of TCR clone 206701 (TRAV3, TRAJ9)
CAVRGLNTGGFKTIF

SEQ ID NO: 413402 - protein, 14 aa, Homo sapiens
  CDR3 for beta chain variable domain of TCR clone 206701 (TRBV19, TRBJ1-2)
CASEGTGVTYGDTF

SEQ ID NO: 413403 - protein, 15 aa, Homo sapiens
  CDR3 for alpha chain variable domain of TCR clone 206702 (TRAV13-2, TRAJ10)
CAENKIGGGGNKLTF

SEQ ID NO: 413404 - protein, 15 aa, Homo sapiens
  CDR3 for beta chain variable domain of TCR clone 206702 (TRBV5-1, TRBJ1-2)
CPSSPGDRGSYGYTF

SEQ ID NO: 413405 - protein, 11 aa, Homo sapiens
  CDR3 for alpha chain variable domain of TCR clone 206703 (TRAV21, TRAJ34)
CAHYNTDKLIF

SEQ ID NO: 413406 - protein, 15 aa, Homo sapiens
  CDR3 for beta chain variable domain of TCR clone 206703 (TRBV7-2, TRBJ2-3)
CASSVAGAFIDTQYF

SEQ ID NO: 413407 - protein, 18 aa, Homo sapiens
  CDR3 for alpha chain variable domain of TCR clone 206704 (TRAV21, TRAJ52)
CAVRPSPAGGTSYGKLTF

SEQ ID NO: 413408 - protein, 15 aa, Homo sapiens
  CDR3 for beta chain variable domain of TCR clone 206704 (TRBV7-2, TRBJ2-3)
CASSLNLRDTDTQYF

SEQ ID NO: 413409 - protein, 13 aa, Homo sapiens
  CDR3 for alpha chain variable domain of TCR clone 206705 (TRAV38-1, TRAJ42)
CARWGGSQGNLIF

SEQ ID NO: 413410 - protein, 15 aa, Homo sapiens
  CDR3 for beta chain variable domain of TCR clone 206705 (TRBV7-9, TRBJ2-7)
CASSSSGLAVYEQYF

SEQ ID NO: 413411 - protein, 14 aa, Homo sapiens
  CDR3 for alpha chain variable domain of TCR clone 206706 (TRAV17, TRAJ6)
CATFSSGGSYIPTF

SEQ ID NO: 413412 - protein, 13 aa, Homo sapiens
  CDR3 for beta chain variable domain of TCR clone 206706 (TRBV27, TRBJ1-4)
CASSLMGDEKLFF

SEQ ID NO: 413413 - protein, 14 aa, Homo sapiens
  CDR3 for alpha chain variable domain of TCR clone 206707 (TRAV8-6, TRAJ38)
CAAYNAGNNRKLIW

SEQ ID NO: 413414 - protein, 12 aa, Homo sapiens
  CDR3 for beta chain variable domain of TCR clone 206707 (TRBV7-3, TRBJ1-1)
CASSHGGTEAFF

SEQ ID NO: 413415 - protein, 14 aa, Homo sapiens
  CDR3 for alpha chain variable domain of TCR clone 206708 (TRAV24, TRAJ42)
CAQNYGGSQGNLIF

SEQ ID NO: 413416 - protein, 15 aa, Homo sapiens
  CDR3 for beta chain variable domain of TCR clone 206708 (TRBV19, TRBJ1-5)
CTSSIPGGAGQPQHF

SEQ ID NO: 413417 - protein, 15 aa, Homo sapiens
  CDR3 for alpha chain variable domain of TCR clone 206709 (TRAV4, TRAJ39)
CLVGPNNNAGNMLTF

SEQ ID NO: 413418 - protein, 15 aa, Homo sapiens
  CDR3 for beta chain variable domain of TCR clone 206709 (TRBV11-2, TRBJ2-1)
CASSSPSTRYNEQFF

SEQ ID NO: 413419 - protein, 18 aa, Homo sapiens
  CDR3 for alpha chain variable domain of TCR clone 206710 (TRAV21, TRAJ52)
CAVRPSLAGGTSYGKLTF

SEQ ID NO: 413420 - protein, 15 aa, Homo sapiens
  CDR3 for beta chain variable domain of TCR clone 206710 (TRBV7-8, TRBJ2-1)
CASSLASGRVNEQFF

SEQ ID NO: 413421 - protein, 14 aa, Homo sapiens
  CDR3 for alpha chain variable domain of TCR clone 206711 (TRAV21, TRAJ28)
CAVGSGAGSYQLTF

SEQ ID NO: 413422 - protein, 12 aa, Homo sapiens
  CDR3 for beta chain variable domain of TCR clone 206711 (TRBV11-2, TRBJ2-2)
CASSLGGGELFF

SEQ ID NO: 413423 - protein, 14 aa, Homo sapiens
  CDR3 for alpha chain variable domain of TCR clone 206712 (TRAV8-3, TRAJ10)
CAVGNAGGGNKLTF

SEQ ID NO: 413424 - protein, 12 aa, Homo sapiens
  CDR3 for beta chain variable domain of TCR clone 206712 (TRBV7-9, TRBJ2-7)
CASSLEGYEQYF

SEQ ID NO: 413425 - protein, 14 aa, Homo sapiens
  CDR3 for alpha chain variable domain of TCR clone 206713 (TRAV12-1, TRAJ17)
CVVNYKAAGSKLTF

SEQ ID NO: 413426 - protein, 15 aa, Homo sapiens
  CDR3 for beta chain variable domain of TCR clone 206713 (TRBV7-2, TRBJ2-1)
CASTHGAGIYNEQFF

SEQ ID NO: 413427 - protein, 22 aa, Homo sapiens
  CDR3 for alpha chain variable domain of TCR clone 206714 (TRAV8-3, TRAJ32)
CAVEVVLQTSSSLELELCLLSS

SEQ ID NO: 413428 - protein, 14 aa, Homo sapiens
  CDR3 for beta chain variable domain of TCR clone 206714 (TRBV25-1, TRBJ1-1)
CASTHLGGNTEAFF

SEQ ID NO: 413429 - protein, 17 aa, Homo sapiens
  CDR3 for alpha chain variable domain of TCR clone 206715 (TRAV3, TRAJ6)
CAVRDGPRAGGSYIPTF

SEQ ID NO: 413430 - protein, 14 aa, Homo sapiens
  CDR3 for beta chain variable domain of TCR clone 206715 (TRBV10-3, TRBJ2-1)
CAISDKGGVTEQFF

SEQ ID NO: 413431 - protein, 12 aa, Homo sapiens
  CDR3 for alpha chain variable domain of TCR clone 206716 (TRAV25, TRAJ33)
CAGMNSNYQLIW

SEQ ID NO: 413432 - protein, 14 aa, Homo sapiens
  CDR3 for beta chain variable domain of TCR clone 206716 (TRBV20-1, TRBJ2-1)
CSAQIGGSANEQFF

SEQ ID NO: 413433 - protein, 17 aa, Homo sapiens
  CDR3 for alpha chain variable domain of TCR clone 206717 (TRAV8-6, TRAJ58)
CAVSSWVGETSGSRLTF

SEQ ID NO: 413434 - protein, 15 aa, Homo sapiens
  CDR3 for beta chain variable domain of TCR clone 206717 (TRBV5-5, TRBJ2-7)
CASSLAAPLSYEQYF

SEQ ID NO: 413435 - protein, 10 aa, Homo sapiens
  CDR3 for alpha chain variable domain of TCR clone 206718 (TRAV8-4, TRAJ43)
CAVRADDMRF

SEQ ID NO: 413436 - protein, 15 aa, Homo sapiens
  CDR3 for beta chain variable domain of TCR clone 206718 (TRBV7-9, TRBJ1-4)
CASSARTGGNEKLFF

SEQ ID NO: 413437 - protein, 14 aa, Homo sapiens
  CDR3 for alpha chain variable domain of TCR clone 206719 (TRAV29/DV5, TRAJ45)
CAPYSGGGADGLTL

SEQ ID NO: 413438 - protein, 13 aa, Homo sapiens
  CDR3 for beta chain variable domain of TCR clone 206719 (TRBV29-1, TRBJ2-3)
CSATRGGRDTQYF

SEQ ID NO: 413439 - protein, 11 aa, Homo sapiens
  CDR3 for alpha chain variable domain of TCR clone 206720 (TRAV29/DV5, TRAJ47)
CAATYGNKLVF

SEQ ID NO: 413440 - protein, 13 aa, Homo sapiens
  CDR3 for beta chain variable domain of TCR clone 206720 (TRBV25-1, TRBJ1-1)
CQHPPGGNTEAFF

SEQ ID NO: 413441 - protein, 11 aa, Homo sapiens
  CDR3 for alpha chain variable domain of TCR clone 206721 (TRAV21, TRAJ34)
CAHYNTDKLLF

SEQ ID NO: 413442 - protein, 16 aa, Homo sapiens
  CDR3 for beta chain variable domain of TCR clone 206721 (TRBV28, TRBJ1-5)
CASSFRGGYSNQPQHF

SEQ ID NO: 413443 - protein, 14 aa, Homo sapiens
  CDR3 for alpha chain variable domain of TCR clone 206722 (TRAV23/DV6, TRAJ4)
CAAPSSGGYNKLIF

SEQ ID NO: 413444 - protein, 13 aa, Homo sapiens
  CDR3 for beta chain variable domain of TCR clone 206722 (TRBV7-3, TRBJ1-1)
CASSQDWGAEAFF

SEQ ID NO: 413445 - protein, 14 aa, Homo sapiens
  CDR3 for alpha chain variable domain of TCR clone 206723 (TRAV12-3, TRAJ58)
CAMSTETSGSRLTF

SEQ ID NO: 413446 - protein, 17 aa, Homo sapiens
  CDR3 for beta chain variable domain of TCR clone 206723 (TRBV4-1, TRBJ1-4)
CASSDTGGTNENCFLAV

SEQ ID NO: 413447 - protein, 15 aa, Homo sapiens
  CDR3 for alpha chain variable domain of TCR clone 206724 (TRAV2, TRAJ28)
CAVPYSGAGSYQLTF

SEQ ID NO: 413448 - protein, 17 aa, Homo sapiens
  CDR3 for beta chain variable domain of TCR clone 206724 (TRBV20-1, TRBJ2-4)
CSARDWASGGRENIQYS

SEQ ID NO: 413449 - protein, 14 aa, Homo sapiens
  CDR3 for alpha chain variable domain of TCR clone 206725 (TRAV8-4, TRAJ9)
CAVRINTGGFKTIF

SEQ ID NO: 413450 - protein, 15 aa, Homo sapiens
  CDR3 for beta chain variable domain of TCR clone 206725 (TRBV10-2, TRBJ2-6)
CASREQGTGANVLTF

SEQ ID NO: 413451 - protein, 14 aa, Homo sapiens
  CDR3 for alpha chain variable domain of TCR clone 206726 (TRAV1-2, TRAJ8)
CAVREDTGFQKRVF

SEQ ID NO: 413452 - protein, 12 aa, Homo sapiens
  CDR3 for beta chain variable domain of TCR clone 206726 (TRBV29-1, TRBJ2-7)
CSARDRPYEQYF

SEQ ID NO: 413453 - protein, 23 aa, Homo sapiens
  CDR3 for alpha chain variable domain of TCR clone 206727 (TRAV12-2, TRAJ43)
SLLIRDSQPSDSATYLCDFDMRF

SEQ ID NO: 413454 - protein, 18 aa, Homo sapiens
  CDR3 for beta chain variable domain of TCR clone 206727 (TRBV20-1, TRBJ2-3)
CSAPGLAGGPGTTDTQYF

SEQ ID NO: 413455 - protein, 12 aa, Homo sapiens
  CDR3 for alpha chain variable domain of TCR clone 206728 (TRAV29/DV5, TRAJ49)
CAATDTGNQFYF

SEQ ID NO: 413456 - protein, 17 aa, Homo sapiens
  CDR3 for beta chain variable domain of TCR clone 206728 (TRBV19, TRBJ2-6)
CASSSHGGPSGANVLTF

SEQ ID NO: 413457 - protein, 14 aa, Homo sapiens
  CDR3 for alpha chain variable domain of TCR clone 206729 (TRAV1-2, TRAJ16)
CAVNRFSDGQKLLF

SEQ ID NO: 413458 - protein, 18 aa, Homo sapiens
  CDR3 for beta chain variable domain of TCR clone 206729 (TRBV20-1, TRBJ2-6)
CSAETTPTHGSGANALTF

SEQ ID NO: 413459 - protein, 14 aa, Homo sapiens
  CDR3 for alpha chain variable domain of TCR clone 206730 (TRAV12-2, TRAJ17)
CAVLFKAAGNKLTF

SEQ ID NO: 413460 - protein, 14 aa, Homo sapiens
  CDR3 for beta chain variable domain of TCR clone 206730 (TRBV7-7, TRBJ2-2)
CATRQYSDTGELFF

SEQ ID NO: 413461 - protein, 12 aa, Homo sapiens
  CDR3 for alpha chain variable domain of TCR clone 206731 (TRAV13-1, TRAJ49)
CAASPMGNQFYF

SEQ ID NO: 413462 - protein, 19 aa, Homo sapiens
  CDR3 for beta chain variable domain of TCR clone 206731 (TRBV25-1, TRBJ2-2)
CAILVYRVDRGRKTGELFF

SEQ ID NO: 413463 - protein, 13 aa, Homo sapiens
  CDR3 for alpha chain variable domain of TCR clone 206732 (TRAV3, TRAJ8)
CAVRLTGFQKLVF

SEQ ID NO: 413464 - protein, 15 aa, Homo sapiens
  CDR3 for beta chain variable domain of TCR clone 206732 (TRBV20-1, TRBJ2-7)
CSARDRVSGMDEQYF

SEQ ID NO: 413465 - protein, 16 aa, Homo sapiens
  CDR3 for alpha chain variable domain of TCR clone 206733 (TRAV3, TRAJ21)
CAVRDIERGNFNKFYF

SEQ ID NO: 413466 - protein, 19 aa, Homo sapiens
  CDR3 for beta chain variable domain of TCR clone 206733 (TRBV4-3, TRBJ2-7)
CASSQEFIGWQVTPYEQYV

SEQ ID NO: 413467 - protein, 14 aa, Homo sapiens
  CDR3 for alpha chain variable domain of TCR clone 206734 (TRAV1-2, TRAJ16)
CAVNRFSDGQKLLF

SEQ ID NO: 413468 - protein, 15 aa, Homo sapiens
  CDR3 for beta chain variable domain of TCR clone 206734 (TRBV18, TRBJ1-5)
CASSPQASSNQPQHF

SEQ ID NO: 413469 - protein, 16 aa, Homo sapiens
  CDR3 for alpha chain variable domain of TCR clone 206735 (TRAV26-1, TRAJ23)
CIVRVANSNQGGKLIF

SEQ ID NO: 413470 - protein, 16 aa, Homo sapiens
  CDR3 for beta chain variable domain of TCR clone 206735 (TRBV10-3, TRBJ2-1)
CAISGVGDGGGGEKFF

SEQ ID NO: 413471 - protein, 12 aa, Homo sapiens
  CDR3 for alpha chain variable domain of TCR clone 206736 (TRAV9-2, TRAJ40)
CALTSGTYKYIF

SEQ ID NO: 413472 - protein, 16 aa, Homo sapiens
  CDR3 for beta chain variable domain of TCR clone 206736 (TRBV7-7, TRBJ2-2)
CASSPRTGLNTGELFY

SEQ ID NO: 413473 - protein, 13 aa, Homo sapiens
  CDR3 for alpha chain variable domain of TCR clone 206737 (TRAV26-1, TRAJ34)
CIVRGHNTDKLIF

SEQ ID NO: 413474 - protein, 13 aa, Homo sapiens
  CDR3 for beta chain variable domain of TCR clone 206737 (TRBV7-9, TRBJ1-2)
CASSLKQNYGYAF

SEQ ID NO: 413475 - protein, 16 aa, Homo sapiens
  CDR3 for alpha chain variable domain of TCR clone 206738 (TRAV30, TRAJ24)
CGTEIVDADSWGKFQF

SEQ ID NO: 413476 - protein, 15 aa, Homo sapiens
  CDR3 for beta chain variable domain of TCR clone 206738 (TRBV5-8, TRBJ2-2)
CASSLDRGATGELFF

SEQ ID NO: 413477 - protein, 13 aa, Homo sapiens
  CDR3 for alpha chain variable domain of TCR clone 206739 (TRAV16, TRAJ33)
CAVRDRSNYQLIW

SEQ ID NO: 413478 - protein, 16 aa, Homo sapiens
  CDR3 for beta chain variable domain of TCR clone 206739 (TRBV4-2, TRBJ2-7)
CASSQDRGTSSYEQYF

SEQ ID NO: 413479 - protein, 12 aa, Homo sapiens
  CDR3 for alpha chain variable domain of TCR clone 206740 (TRAV12-3, TRAJ17)
CAMTLTGNKLTF

SEQ ID NO: 413480 - protein, 13 aa, Homo sapiens
  CDR3 for beta chain variable domain of TCR clone 206740 (TRBV7-3, TRBJ2-2)
CASSQENTGELFF

SEQ ID NO: 413481 - protein, 13 aa, Homo sapiens
  CDR3 for alpha chain variable domain of TCR clone 206741 (TRAV13-1, TRAJ5)
CAAEHTGRRALTF

SEQ ID NO: 413482 - protein, 13 aa, Homo sapiens
  CDR3 for beta chain variable domain of TCR clone 206741 (TRBV2, TRBJ1-4)
CASNRGTNEELFF

SEQ ID NO: 413483 - protein, 17 aa, Homo sapiens
  CDR3 for alpha chain variable domain of TCR clone 206742 (TRAV8-2, TRAJ17)
CVVSDRLFKAAGNKLTF

SEQ ID NO: 413484 - protein, 18 aa, Homo sapiens
  CDR3 for beta chain variable domain of TCR clone 206742 (TRBV7-9, TRBJ2-7)
CASSLTTSGSRTWYEQYF

SEQ ID NO: 413485 - protein, 12 aa, Homo sapiens
  CDR3 for alpha chain variable domain of TCR clone 206743 (TRAV12-2, TRAJ8)
CAVNTGFQKLVL

SEQ ID NO: 413486 - protein, 15 aa, Homo sapiens
  CDR3 for beta chain variable domain of TCR clone 206743 (TRBV7-8, TRBJ1-5)
CASSLERRGLEPQHF

SEQ ID NO: 413487 - protein, 14 aa, Homo sapiens
  CDR3 for alpha chain variable domain of TCR clone 206744 (TRAV35, TRAJ13)
CAGRSPGGYQKVSF

SEQ ID NO: 413488 - protein, 14 aa, Homo sapiens
  CDR3 for beta chain variable domain of TCR clone 206744 (TRBV19, TRBJ2-2)
CASSMVGLSGELFF

SEQ ID NO: 413489 - protein, 12 aa, Homo sapiens
  CDR3 for alpha chain variable domain of TCR clone 206745 (TRAV3, TRAJ20)
CAVRDPDYKLSF

SEQ ID NO: 413490 - protein, 12 aa, Homo sapiens
  CDR3 for beta chain variable domain of TCR clone 206745 (TRBV28, TRBJ1-2)
CASLTLAEGYTF

SEQ ID NO: 413491 - protein, 12 aa, Homo sapiens
  CDR3 for alpha chain variable domain of TCR clone 206746 (TRAV13-1, TRAJ21)
CAAKEGFNKFYF

SEQ ID NO: 413492 - protein, 15 aa, Homo sapiens
  CDR3 for beta chain variable domain of TCR clone 206746 (TRBV25-1, TRBJ1-4)
CASSPGDSTNGKLFF

SEQ ID NO: 413493 - protein, 16 aa, Homo sapiens
  CDR3 for alpha chain variable domain of TCR clone 206747 (TRAV3, TRAJ37)
CAVRGKGSGNTGKLTF

SEQ ID NO: 413494 - protein, 16 aa, Homo sapiens
  CDR3 for beta chain variable domain of TCR clone 206747 (TRBV12-5, TRBJ2-5)
CASGPRTSGNQETQYF

SEQ ID NO: 413495 - protein, 14 aa, Homo sapiens
  CDR3 for alpha chain variable domain of TCR clone 206748 (TRAV1-2, TRAJ16)
CAVNRFSDGQKLLF

SEQ ID NO: 413496 - protein, 16 aa, Homo sapiens
  CDR3 for beta chain variable domain of TCR clone 206748 (TRBV12-5, TRBJ2-5)
CASGPRTSGDQETPYF

SEQ ID NO: 413497 - protein, 13 aa, Homo sapiens
  CDR3 for alpha chain variable domain of TCR clone 206749 (TRAV13-1, TRAJ6)
CSASSGGSYITTS

SEQ ID NO: 413498 - protein, 14 aa, Homo sapiens
  CDR3 for beta chain variable domain of TCR clone 206749 (TRBV12-4, TRBJ2-5)
CQQSPTGLQETQYF

SEQ ID NO: 413499 - protein, 14 aa, Homo sapiens
  CDR3 for alpha chain variable domain of TCR clone 206750 (TRAV8-2, TRAJ37)
CVVSISGNTGKLIF

SEQ ID NO: 413500 - protein, 15 aa, Homo sapiens
  CDR3 for beta chain variable domain of TCR clone 206750 (TRBV2, TRBJ2-7)
CASGEGTGLTYEQYF

SEQ ID NO: 413501 - protein, 13 aa, Homo sapiens
  CDR3 for alpha chain variable domain of TCR clone 206751 (TRAV12-2, TRAJ34)
CAVRGYNTDKLIF

SEQ ID NO: 413502 - protein, 17 aa, Homo sapiens
  CDR3 for beta chain variable domain of TCR clone 206751 (TRBV28, TRBJ2-7)
CASSPLPAGGKAYEQYF

SEQ ID NO: 413503 - protein, 13 aa, Homo sapiens
  CDR3 for alpha chain variable domain of TCR clone 206752 (TRAV12-2, TRAJ37)
CAGGSGNTGKLIF

SEQ ID NO: 413504 - protein, 17 aa, Homo sapiens
  CDR3 for beta chain variable domain of TCR clone 206752 (TRBV11-2, TRBJ2-1)
CASILYPPGVEYNEQFF

SEQ ID NO: 413505 - protein, 14 aa, Homo sapiens
  CDR3 for alpha chain variable domain of TCR clone 206753 (TRAV13-1, TRAJ26)
CAASSAHYGQNFVF

SEQ ID NO: 413506 - protein, 13 aa, Homo sapiens
  CDR3 for beta chain variable domain of TCR clone 206753 (TRBV10-3, TRBJ2-5)
CAISGSGKETQYF

SEQ ID NO: 413507 - protein, 14 aa, Homo sapiens
  CDR3 for alpha chain variable domain of TCR clone 206754 (TRAV29/DV5, TRAJ36)
CAARRKTGANNLFF

SEQ ID NO: 413508 - protein, 13 aa, Homo sapiens
  CDR3 for beta chain variable domain of TCR clone 206754 (TRBV12-4, TRBJ1-2)
CASSLRQGKGDTF

SEQ ID NO: 413509 - protein, 10 aa, Homo sapiens
  CDR3 for alpha chain variable domain of TCR clone 206755 (TRAV26-2, TRAJ49)
CILLGNQFYF

SEQ ID NO: 413510 - protein, 13 aa, Homo sapiens
  CDR3 for beta chain variable domain of TCR clone 206755 (TRBV20-1, TRBJ2-7)
CSADPGANYEQYF

SEQ ID NO: 413511 - protein, 15 aa, Homo sapiens
  CDR3 for alpha chain variable domain of TCR clone 206756 (TRAV8-2, TRAJ40)
CVVLGTTSGTYKYIF

SEQ ID NO: 413512 - protein, 17 aa, Homo sapiens
  CDR3 for beta chain variable domain of TCR clone 206756 (TRBV11-2, TRBJ2-1)
CASSLYPPGVEYNEQFF

SEQ ID NO: 413513 - protein, 15 aa, Homo sapiens
  CDR3 for alpha chain variable domain of TCR clone 206757 (TRAV12-2, TRAJ8)
CAVREENTGFQKLVF

SEQ ID NO: 413514 - protein, 14 aa, Homo sapiens
  CDR3 for beta chain variable domain of TCR clone 206757 (TRBV9, TRBJ1-3)
CSSSVVGDGNTIYF

SEQ ID NO: 413515 - protein, 12 aa, Homo sapiens
  CDR3 for alpha chain variable domain of TCR clone 206758 (TRAV30, TRAJ43)
CGTEERGNDMRF

SEQ ID NO: 413516 - protein, 17 aa, Homo sapiens
  CDR3 for beta chain variable domain of TCR clone 206758 (TRBV7-8, TRBJ2-6)
CASSAGTGGAGANILTF

SEQ ID NO: 413517 - protein, 16 aa, Homo sapiens
  CDR3 for alpha chain variable domain of TCR clone 206759 (TRAV2, TRAJ10)
CCGGSTVTGGGNKLTF

SEQ ID NO: 413518 - protein, 16 aa, Homo sapiens
  CDR3 for beta chain variable domain of TCR clone 206759 (TRBV18, TRBJ1-5)
CASSPSTGNSGQPQHF

SEQ ID NO: 413519 - protein, 12 aa, Homo sapiens
  CDR3 for alpha chain variable domain of TCR clone 206760 (TRAV12-1, TRAJ40)
CVVSSGTYKYIF

SEQ ID NO: 413520 - protein, 14 aa, Homo sapiens
  CDR3 for beta chain variable domain of TCR clone 206760 (TRBV20-1, TRBJ2-2)
CSAPDTANAGELFF

SEQ ID NO: 413521 - protein, 16 aa, Homo sapiens
  CDR3 for alpha chain variable domain of TCR clone 206761 (TRAV30, TRAJ24)
CGTEIVDADSWGKFQF

SEQ ID NO: 413522 - protein, 18 aa, Homo sapiens
  CDR3 for beta chain variable domain of TCR clone 206761 (TRBV25-1, TRBJ2-2)
CHPSLPGGQGRKTGELFF

SEQ ID NO: 413523 - protein, 20 aa, Homo sapiens
  CDR3 for alpha chain variable domain of TCR clone 206762 (TRAV8-3, TRAJ44)
LSTSVLWVRLYTGTASKLTF

SEQ ID NO: 413524 - protein, 16 aa, Homo sapiens
  CDR3 for beta chain variable domain of TCR clone 206762 (TRBV7-3, TRBJ2-1)
CASSLEGYRSYNEQFF

SEQ ID NO: 413525 - protein, 18 aa, Homo sapiens
  CDR3 for alpha chain variable domain of TCR clone 206763 (TRAV26-2, TRAJ45)
CILRVDKYSGGGADGLTF

SEQ ID NO: 413526 - protein, 16 aa, Homo sapiens
  CDR3 for beta chain variable domain of TCR clone 206763 (TRBV2, TRBJ1-4)
CASNLLQGATKEKPFF

SEQ ID NO: 413527 - protein, 14 aa, Homo sapiens
  CDR3 for alpha chain variable domain of TCR clone 206764 (TRAV35, TRAJ41)
CAGQASVRRNELNF

SEQ ID NO: 413528 - protein, 14 aa, Homo sapiens
  CDR3 for beta chain variable domain of TCR clone 206764 (TRBV20-1, TRBJ1-2)
CSASEQGAVYGYAF

SEQ ID NO: 413529 - protein, 13 aa, Homo sapiens
  CDR3 for alpha chain variable domain of TCR clone 206765 (TRAV8-3, TRAJ47)
CAVSMEYGNKLVF

SEQ ID NO: 413530 - protein, 10 aa, Homo sapiens
  CDR3 for beta chain variable domain of TCR clone 206765 (TRBV2, TRBJ1-5)
VGQGSISQHF

SEQ ID NO: 413531 - protein, 12 aa, Homo sapiens
  CDR3 for alpha chain variable domain of TCR clone 206766 (TRAV21, TRAJ42)
CAVGGSQGNLIF

SEQ ID NO: 413532 - protein, 14 aa, Homo sapiens
  CDR3 for beta chain variable domain of TCR clone 206766 (TRBV12-4, TRBJ1-1)
CASILGTGGTEAFF

SEQ ID NO: 413533 - protein, 14 aa, Homo sapiens
  CDR3 for alpha chain variable domain of TCR clone 206767 (TRAV12-3, TRAJ10)
SHLPLTGGGNKLTF

SEQ ID NO: 413534 - protein, 13 aa, Homo sapiens
  CDR3 for beta chain variable domain of TCR clone 206767 (TRBV12-4, TRBJ1-5)
CASSPRQYQPQHF

SEQ ID NO: 413535 - protein, 14 aa, Homo sapiens
  CDR3 for alpha chain variable domain of TCR clone 206768 (TRAV21, TRAJ48)
CAVIAHFGNEKLTF

SEQ ID NO: 413536 - protein, 16 aa, Homo sapiens
  CDR3 for beta chain variable domain of TCR clone 206768 (TRBV13, TRBJ2-2)
CASSPRTGEHTGELFF

SEQ ID NO: 413537 - protein, 14 aa, Homo sapiens
  CDR3 for alpha chain variable domain of TCR clone 206769 (TRAV12-2, TRAJ48)
CAVNAFFGNEKLTS

SEQ ID NO: 413538 - protein, 13 aa, Homo sapiens
  CDR3 for beta chain variable domain of TCR clone 206769 (TRBV28, TRBJ2-7)
CAGARQGLDEQYF

SEQ ID NO: 413539 - protein, 14 aa, Homo sapiens
  CDR3 for alpha chain variable domain of TCR clone 206770 (TRAV17, TRAJ56)
CATEDTGANSKRTF

SEQ ID NO: 413540 - protein, 16 aa, Homo sapiens
  CDR3 for beta chain variable domain of TCR clone 206770 (TRBV19, TRBJ2-1)
CASSIKLAGSYNEQFF

SEQ ID NO: 413541 - protein, 20 aa, Homo sapiens
  CDR3 for alpha chain variable domain of TCR clone 206771 (TRAV26-1, TRAJ37)
CCVLLHRQINGSINTGKLIF

SEQ ID NO: 413542 - protein, 13 aa, Homo sapiens
  CDR3 for beta chain variable domain of TCR clone 206771 (TRBV20-1, TRBJ2-7)
CSARTSGNYEQYF

SEQ ID NO: 413543 - protein, 14 aa, Homo sapiens
  CDR3 for alpha chain variable domain of TCR clone 206772 (TRAV12-2, TRAJ36)
CAVKISTVANNLFF

SEQ ID NO: 413544 - protein, 14 aa, Homo sapiens
  CDR3 for beta chain variable domain of TCR clone 206772 (TRBV20-1, TRBJ2-3)
CSARGGTSTDTQYF

SEQ ID NO: 413545 - protein, 13 aa, Homo sapiens
  CDR3 for alpha chain variable domain of TCR clone 206773 (TRAV29/DV5, TRAJ31)
CAASRNNNARLMF

SEQ ID NO: 413546 - protein, 15 aa, Homo sapiens
  CDR3 for beta chain variable domain of TCR clone 206773 (TRBV2, TRBJ2-1)
CASSELAGSYNEQSF

SEQ ID NO: 413547 - protein, 14 aa, Homo sapiens
  CDR3 for alpha chain variable domain of TCR clone 206774 (TRAV1-2, TRAJ8)
CAVREGTGFQNLVF

SEQ ID NO: 413548 - protein, 17 aa, Homo sapiens
  CDR3 for beta chain variable domain of TCR clone 206774 (TRBV11-3, TRBJ2-3)
CASSPGSSGGRTDTQYF

SEQ ID NO: 413549 - protein, 13 aa, Homo sapiens
  CDR3 for alpha chain variable domain of TCR clone 206775 (TRAV12-3, TRAJ33)
CAMSVNSNYQLIW

SEQ ID NO: 413550 - protein, 14 aa, Homo sapiens
  CDR3 for beta chain variable domain of TCR clone 206775 (TRBV16, TRBJ1-1)
CASSQAGPNIEAFF

SEQ ID NO: 413551 - protein, 21 aa, Homo sapiens
  CDR3 for alpha chain variable domain of TCR clone 206776 (TRAV12-1, TRAJ37)
CVVNGGLWQHRQTNLWARDNF

SEQ ID NO: 413552 - protein, 13 aa, Homo sapiens
  CDR3 for beta chain variable domain of TCR clone 206776 (TRBV7-9, TRBJ1-2)
CASSLKQNYGYTF

SEQ ID NO: 413553 - protein, 16 aa, Homo sapiens
  CDR3 for alpha chain variable domain of TCR clone 206777 (TRAV12-3, TRAJ53)
CAMSPGCGGSNYKLTF

SEQ ID NO: 413554 - protein, 14 aa, Homo sapiens
  CDR3 for beta chain variable domain of TCR clone 206777 (TRBV7-2, TRBJ1-1)
CASSFLTGTTEAFF

SEQ ID NO: 413555 - protein, 12 aa, Homo sapiens
  CDR3 for alpha chain variable domain of TCR clone 206778 (TRAV8-3, TRAJ20)
CAVGANDYKLSF

SEQ ID NO: 413556 - protein, 15 aa, Homo sapiens
  CDR3 for beta chain variable domain of TCR clone 206778 (TRBV11-3, TRBJ2-1)
CASSLAGQTYNEQFF

SEQ ID NO: 413557 - protein, 15 aa, Homo sapiens
  CDR3 for alpha chain variable domain of TCR clone 206779 (TRAV12-1, TRAJ53)
CVVNRSGGSNYKLTF

SEQ ID NO: 413558 - protein, 13 aa, Homo sapiens
  CDR3 for beta chain variable domain of TCR clone 206779 (TRBV7-6, TRBJ2-3)
CASSLRSDNTQYF

SEQ ID NO: 413559 - protein, 16 aa, Homo sapiens
  CDR3 for alpha chain variable domain of TCR clone 206780 (TRAV23/DV6, TRAJ32)
CAATPGGGGATNKLIF

SEQ ID NO: 413560 - protein, 15 aa, Homo sapiens
  CDR3 for beta chain variable domain of TCR clone 206780 (TRBV7-9, TRBJ1-6)
CASSSPGRGNSPLHF

SEQ ID NO: 413561 - protein, 12 aa, Homo sapiens
  CDR3 for alpha chain variable domain of TCR clone 206781 (TRAV12-2, TRAJ21)
CAVRYNFNKFYF

SEQ ID NO: 413562 - protein, 14 aa, Homo sapiens
  CDR3 for beta chain variable domain of TCR clone 206781 (TRBV28, TRBJ2-1)
CASSYYTAYNAQFF

SEQ ID NO: 413563 - protein, 17 aa, Homo sapiens
  CDR3 for alpha chain variable domain of TCR clone 206782 (TRAV13-1, TRAJ53)
CAASWKSSGGSNFKMTF

SEQ ID NO: 413564 - protein, 19 aa, Homo sapiens
  CDR3 for beta chain variable domain of TCR clone 206782 (TRBV7-9, TRBJ2-1)
CASSHNRGALLRSYNEQFF

SEQ ID NO: 413565 - protein, 16 aa, Homo sapiens
  CDR3 for alpha chain variable domain of TCR clone 206783 (TRAV30, TRAJ24)
CGTEIVDAGSWGKFQF

SEQ ID NO: 413566 - protein, 13 aa, Homo sapiens
  CDR3 for beta chain variable domain of TCR clone 206783 (TRBV18, TRBJ1-2)
CASSASATEGYTF

SEQ ID NO: 413567 - protein, 11 aa, Homo sapiens
  CDR3 for alpha chain variable domain of TCR clone 206784 (TRAV2, TRAJ33)
CAVESNDQLIW

SEQ ID NO: 413568 - protein, 15 aa, Homo sapiens
  CDR3 for beta chain variable domain of TCR clone 206784 (TRBV19, TRBJ1-1)
CASTSGQIQNTEAFF

SEQ ID NO: 413569 - protein, 15 aa, Homo sapiens
  CDR3 for alpha chain variable domain of TCR clone 206785 (TRAV26-1, TRAJ29)
CIVRVEGSGNTPLVF

SEQ ID NO: 413570 - protein, 17 aa, Homo sapiens
  CDR3 for beta chain variable domain of TCR clone 206785 (TRBV20-1, TRBJ2-2)
CSASGSGQGGLTGELFF

SEQ ID NO: 413571 - protein, 13 aa, Homo sapiens
  CDR3 for alpha chain variable domain of TCR clone 206786 (TRAV8-3, TRAJ28)
CAVGAVGGYQLTF

SEQ ID NO: 413572 - protein, 14 aa, Homo sapiens
  CDR3 for beta chain variable domain of TCR clone 206786 (TRBV7-2, TRBJ2-7)
CASGSQGAAYEQYF

SEQ ID NO: 413573 - protein, 14 aa, Homo sapiens
  CDR3 for alpha chain variable domain of TCR clone 206787 (TRAV13-1, TRAJ32)
CAARGRGATNKLIF

SEQ ID NO: 413574 - protein, 14 aa, Homo sapiens
  CDR3 for beta chain variable domain of TCR clone 206787 (TRBV7-6, TRBJ2-3)
CASSLGTVTDTQYF

SEQ ID NO: 413575 - protein, 10 aa, Homo sapiens
  CDR3 for alpha chain variable domain of TCR clone 206788 (TRAV13-1, TRAJ43)
CAASKNDMRY

SEQ ID NO: 413576 - protein, 13 aa, Homo sapiens
  CDR3 for beta chain variable domain of TCR clone 206788 (TRBV20-1, TRBJ1-5)
CSARTGVNQPQHF

SEQ ID NO: 413577 - protein, 22 aa, Homo sapiens
  CDR3 for alpha chain variable domain of TCR clone 206789 (TRAV40, )
CLLGDGIPDIQNPDPAVYQLRD

SEQ ID NO: 413578 - protein, 16 aa, Homo sapiens
  CDR3 for beta chain variable domain of TCR clone 206789 (TRBV20-1, TRBJ1-5)
CSAELQGQQTNQPQHF

SEQ ID NO: 413579 - protein, 12 aa, Homo sapiens
  CDR3 for alpha chain variable domain of TCR clone 206790 (TRAV2, TRAJ29)
CFPNSGNTPLVF

SEQ ID NO: 413580 - protein, 15 aa, Homo sapiens
  CDR3 for beta chain variable domain of TCR clone 206790 (TRBV4-1, TRBJ2-5)
CASSQWDLYQETQYF

SEQ ID NO: 413581 - protein, 15 aa, Homo sapiens
  CDR3 for alpha chain variable domain of TCR clone 206791 (TRAV26-1, TRAJ29)
CIVRVEGEGNTPLVF

SEQ ID NO: 413582 - protein, 15 aa, Homo sapiens
  CDR3 for beta chain variable domain of TCR clone 206791 (TRBV7-9, TRBJ1-5)
CASSQGHQPNQPQHF

SEQ ID NO: 413583 - protein, 14 aa, Homo sapiens
  CDR3 for alpha chain variable domain of TCR clone 206792 (TRAV8-4, TRAJ9)
CAVRINTGGFKTIF

SEQ ID NO: 413584 - protein, 15 aa, Homo sapiens
  CDR3 for beta chain variable domain of TCR clone 206792 (TRBV10-2, TRBJ2-6)
CDSSEQGTGANVLTF

SEQ ID NO: 413585 - protein, 13 aa, Homo sapiens
  CDR3 for alpha chain variable domain of TCR clone 206793 (TRAV8-3, TRAJ36)
CAVGSTGANNLFF

SEQ ID NO: 413586 - protein, 15 aa, Homo sapiens
  CDR3 for beta chain variable domain of TCR clone 206793 (TRBV7-2, TRBJ1-2)
CASSQRAGWNYGYTF

SEQ ID NO: 413587 - protein, 11 aa, Homo sapiens
  CDR3 for alpha chain variable domain of TCR clone 206794 (TRAV13-1, TRAJ5)
CAPNGRRALTF

SEQ ID NO: 413588 - protein, 15 aa, Homo sapiens
  CDR3 for beta chain variable domain of TCR clone 206794 (TRBV11-2, TRBJ1-1)
CASSSRSSLLLSLDK

SEQ ID NO: 413589 - protein, 15 aa, Homo sapiens
  CDR3 for alpha chain variable domain of TCR clone 206795 (TRAV3, TRAJ29)
CAVRDINSGNTPLVF

SEQ ID NO: 413590 - protein, 16 aa, Homo sapiens
  CDR3 for beta chain variable domain of TCR clone 206795 (TRBV4-1, TRBJ2-5)
CASSQTFYGEQETQYF

SEQ ID NO: 413591 - protein, 17 aa, Homo sapiens
  CDR3 for alpha chain variable domain of TCR clone 206796 (TRAV17, TRAJ52)
CATDRNAGGTSYGKLTF

SEQ ID NO: 413592 - protein, 12 aa, Homo sapiens
  CDR3 for beta chain variable domain of TCR clone 206796 (TRBV5-4, TRBJ1-1)
CASSFGQTEAFF

SEQ ID NO: 413593 - protein, 14 aa, Homo sapiens
  CDR3 for alpha chain variable domain of TCR clone 206797 (TRAV8-4, TRAJ15)
CAATIREAGTALIF

SEQ ID NO: 413594 - protein, 13 aa, Homo sapiens
  CDR3 for beta chain variable domain of TCR clone 206797 (TRBV10-3, TRBJ2-7)
CAISEKGGYEQYF

SEQ ID NO: 413595 - protein, 17 aa, Homo sapiens
  CDR3 for alpha chain variable domain of TCR clone 206798 (TRAV17, TRAJ52)
CATAPRAGGTSYGKLTF

SEQ ID NO: 413596 - protein, 14 aa, Homo sapiens
  CDR3 for beta chain variable domain of TCR clone 206798 (TRBV7-3, TRBJ2-1)
GASSTSGGWDEQFF

SEQ ID NO: 413597 - protein, 13 aa, Homo sapiens
  CDR3 for alpha chain variable domain of TCR clone 206799 (TRAV17, TRAJ26)
CATVDNYGQNFVF

SEQ ID NO: 413598 - protein, 15 aa, Homo sapiens
  CDR3 for beta chain variable domain of TCR clone 206799 (TRBV2, TRBJ2-1)
CQHVEGSLSYNEQFF

SEQ ID NO: 413599 - protein, 12 aa, Homo sapiens
  CDR3 for alpha chain variable domain of TCR clone 206800 (TRAV8-6, TRAJ33)
CAVTDSNYQLIW

SEQ ID NO: 413600 - protein, 15 aa, Homo sapiens
  CDR3 for beta chain variable domain of TCR clone 206800 (TRBV4-3, TRBJ1-2)
CASSRGQGGNYGYTF

SEQ ID NO: 413601 - protein, 15 aa, Homo sapiens
  CDR3 for alpha chain variable domain of TCR clone 206801 (TRAV25, TRAJ52)
RAGTSGGTSYGKLTF

SEQ ID NO: 413602 - protein, 16 aa, Homo sapiens
  CDR3 for beta chain variable domain of TCR clone 206801 (TRBV15, TRBJ1-2)
CATSRGPRTGGGGYAF

SEQ ID NO: 413603 - protein, 16 aa, Homo sapiens
  CDR3 for alpha chain variable domain of TCR clone 206802 (TRAV1-2, TRAJ10)
CAVRGVLTGGGKKLTF

SEQ ID NO: 413604 - protein, 14 aa, Homo sapiens
  CDR3 for beta chain variable domain of TCR clone 206802 (TRBV6-5, TRBJ2-7)
CASSSGVPPYEQYF

SEQ ID NO: 413605 - protein, 11 aa, Homo sapiens
  CDR3 for alpha chain variable domain of TCR clone 206803 (TRAV12-2, TRAJ49)
CALQGGNQFYF

SEQ ID NO: 413606 - protein, 12 aa, Homo sapiens
  CDR3 for beta chain variable domain of TCR clone 206803 (TRBV7-8, TRBJ2-7)
CASSLGDREQYF

SEQ ID NO: 413607 - protein, 10 aa, Homo sapiens
  CDR3 for alpha chain variable domain of TCR clone 206804 (TRAV12-2, TRAJ43)
CAVKVLSMRV

SEQ ID NO: 413608 - protein, 14 aa, Homo sapiens
  CDR3 for beta chain variable domain of TCR clone 206804 (TRBV11-2, TRBJ2-7)
CASSLGNSLYEQYF

SEQ ID NO: 413609 - protein, 10 aa, Homo sapiens
  CDR3 for alpha chain variable domain of TCR clone 206805 (TRAV1-2, TRAJ23)
CAGQGGKLIF

SEQ ID NO: 413610 - protein, 16 aa, Homo sapiens
  CDR3 for beta chain variable domain of TCR clone 206805 (TRBV20-1, TRBJ1-4)
CSAPGQGLLTNEKLFF

SEQ ID NO: 413611 - protein, 15 aa, Homo sapiens
  CDR3 for alpha chain variable domain of TCR clone 206806 (TRAV8-3, TRAJ45)
CASSYSGGGADGLTF

SEQ ID NO: 413612 - protein, 14 aa, Homo sapiens
  CDR3 for beta chain variable domain of TCR clone 206806 (TRBV7-2, TRBJ2-5)
CASSTGGELKTQYF

SEQ ID NO: 413613 - protein, 17 aa, Homo sapiens
  CDR3 for alpha chain variable domain of TCR clone 206807 (TRAV35, TRAJ28)
CAGLQVYSGAGSYQLTF

SEQ ID NO: 413614 - protein, 13 aa, Homo sapiens
  CDR3 for beta chain variable domain of TCR clone 206807 (TRBV19, TRBJ2-7)
CASQSYGAGEQYF

SEQ ID NO: 413615 - protein, 13 aa, Homo sapiens
  CDR3 for alpha chain variable domain of TCR clone 206808 (TRAV8-1, TRAJ23)
CAWRDNQGGKLIF

SEQ ID NO: 413616 - protein, 15 aa, Homo sapiens
  CDR3 for beta chain variable domain of TCR clone 206808 (TRBV3-1, TRBJ2-1)
CASSPRDSGFNEQFF

SEQ ID NO: 413617 - protein, 11 aa, Homo sapiens
  CDR3 for alpha chain variable domain of TCR clone 206809 (TRAV20, TRAJ34)
CAVLDTDKLIF

SEQ ID NO: 413618 - protein, 14 aa, Homo sapiens
  CDR3 for beta chain variable domain of TCR clone 206809 (TRBV19, TRBJ2-1)
CASPTFVLSGEQFF

SEQ ID NO: 413619 - protein, 11 aa, Homo sapiens
  CDR3 for alpha chain variable domain of TCR clone 206810 (TRAV13-1, TRAJ6)
CATLGSYIPTF

SEQ ID NO: 413620 - protein, 12 aa, Homo sapiens
  CDR3 for beta chain variable domain of TCR clone 206810 (TRBV7-9, TRBJ2-7)
CASSLEGYEQYF

SEQ ID NO: 413621 - protein, 15 aa, Homo sapiens
  CDR3 for alpha chain variable domain of TCR clone 206811 (TRAV13-1, TRAJ5)
CAASPRGHGQESTYF

SEQ ID NO: 413622 - protein, 15 aa, Homo sapiens
  CDR3 for beta chain variable domain of TCR clone 206811 (TRBV5-1, TRBJ2-3)
CASSVTSGSTDTQYF

SEQ ID NO: 413623 - protein, 14 aa, Homo sapiens
  CDR3 for alpha chain variable domain of TCR clone 206812 (TRAV8-3, TRAJ24)
CAVGSTDSWGKLQF

SEQ ID NO: 413624 - protein, 15 aa, Homo sapiens
  CDR3 for beta chain variable domain of TCR clone 206812 (TRBV6-1, TRBJ2-3)
CASSERGGITDTQYF

SEQ ID NO: 413625 - protein, 10 aa, Homo sapiens
  CDR3 for alpha chain variable domain of TCR clone 206813 (TRAV23/DV6, TRAJ43)
CAAVVAALEQ

SEQ ID NO: 413626 - protein, 13 aa, Homo sapiens
  CDR3 for beta chain variable domain of TCR clone 206813 (TRBV12-4, TRBJ1-2)
CASSLRQGKGYTF

SEQ ID NO: 413627 - protein, 13 aa, Homo sapiens
  CDR3 for alpha chain variable domain of TCR clone 206814 (TRAV22, TRAJ29)
CAVGGSGNTPLVF

SEQ ID NO: 413628 - protein, 18 aa, Homo sapiens
  CDR3 for beta chain variable domain of TCR clone 206814 (TRBV10-3, TRBJ2-3)
CAISDSRVGPMRGDTQYF

SEQ ID NO: 413629 - protein, 14 aa, Homo sapiens
  CDR3 for alpha chain variable domain of TCR clone 206815 (TRAV14/DV4, TRAJ7)
CAMREAYGNNRLAF

SEQ ID NO: 413630 - protein, 15 aa, Homo sapiens
  CDR3 for beta chain variable domain of TCR clone 206815 (TRBV19, TRBJ2-1)
CASSINREPSHERFF

SEQ ID NO: 413631 - protein, 13 aa, Homo sapiens
  CDR3 for alpha chain variable domain of TCR clone 206816 (TRAV30, TRAJ24)
CGTVTDSWGKLQF

SEQ ID NO: 413632 - protein, 16 aa, Homo sapiens
  CDR3 for beta chain variable domain of TCR clone 206816 (TRBV6-1, TRBJ2-5)
CASSETLDRGAETQYF

SEQ ID NO: 413633 - protein, 12 aa, Homo sapiens
  CDR3 for alpha chain variable domain of TCR clone 206817 (TRAV12-3, TRAJ17)
CAMTLTGNKLTF

SEQ ID NO: 413634 - protein, 13 aa, Homo sapiens
  CDR3 for beta chain variable domain of TCR clone 206817 (TRBV6-4, TRBJ2-1)
CASSASVNNEQFF

SEQ ID NO: 413635 - protein, 14 aa, Homo sapiens
  CDR3 for alpha chain variable domain of TCR clone 206818 (TRAV12-2, TRAJ24)
CAVTPADSWGKLQF

SEQ ID NO: 413636 - protein, 12 aa, Homo sapiens
  CDR3 for beta chain variable domain of TCR clone 206818 (TRBV3-1, TRBJ2-1)
CASSQGCSGQFF

SEQ ID NO: 413637 - protein, 13 aa, Homo sapiens
  CDR3 for alpha chain variable domain of TCR clone 206819 (TRAV8-4, TRAJ30)
CAVSVNRDDKIRF

SEQ ID NO: 413638 - protein, 13 aa, Homo sapiens
  CDR3 for beta chain variable domain of TCR clone 206819 (TRBV3-1, TRBJ2-2)
CASLARGSGELFF

SEQ ID NO: 413639 - protein, 12 aa, Homo sapiens
  CDR3 for alpha chain variable domain of TCR clone 206820 (TRAV8-4, TRAJ37)
CAKSSNTGTLIF

SEQ ID NO: 413640 - protein, 15 aa, Homo sapiens
  CDR3 for beta chain variable domain of TCR clone 206820 (TRBV5-1, TRBJ2-3)
CASSYTSGSTDTQYF

SEQ ID NO: 413641 - protein, 11 aa, Homo sapiens
  CDR3 for alpha chain variable domain of TCR clone 206821 (TRAV12-1, TRAJ21)
CVVNNFNKFYF

SEQ ID NO: 413642 - protein, 18 aa, Homo sapiens
  CDR3 for beta chain variable domain of TCR clone 206821 (TRBV6-9, TRBJ1-1)
CQQLLRGGTGGRNTEAFF

SEQ ID NO: 413643 - protein, 13 aa, Homo sapiens
  CDR3 for alpha chain variable domain of TCR clone 206822 (TRAV13-1, TRAJ41)
CADAPNSGYALTF

SEQ ID NO: 413644 - protein, 13 aa, Homo sapiens
  CDR3 for beta chain variable domain of TCR clone 206822 (TRBV19, TRBJ2-7)
CASEGTTTHEQYF

SEQ ID NO: 413645 - protein, 12 aa, Homo sapiens
  CDR3 for alpha chain variable domain of TCR clone 206823 (TRAV27, TRAJ9)
CAGESGGFKTTF

SEQ ID NO: 413646 - protein, 14 aa, Homo sapiens
  CDR3 for beta chain variable domain of TCR clone 206823 (TRBV6-1, TRBJ2-1)
CASAKDGFYNEQFF

SEQ ID NO: 413647 - protein, 11 aa, Homo sapiens
  CDR3 for alpha chain variable domain of TCR clone 206824 (TRAV2, TRAJ13)
CASGGYQRVTF

SEQ ID NO: 413648 - protein, 14 aa, Homo sapiens
  CDR3 for beta chain variable domain of TCR clone 206824 (TRBV6-1, TRBJ1-3)
CASVQGGGGNTIYF

SEQ ID NO: 413649 - protein, 11 aa, Homo sapiens
  CDR3 for alpha chain variable domain of TCR clone 206825 (TRAV12-1, TRAJ21)
CVVNNFNKFYF

SEQ ID NO: 413650 - protein, 15 aa, Homo sapiens
  CDR3 for beta chain variable domain of TCR clone 206825 (TRBV19, TRBJ2-1)
CASSSPGVPLDEQFF

SEQ ID NO: 413651 - protein, 12 aa, Homo sapiens
  CDR3 for alpha chain variable domain of TCR clone 206826 (TRAV21, TRAJ6)
CVVSERSYIPTF

SEQ ID NO: 413652 - protein, 21 aa, Homo sapiens
  CDR3 for beta chain variable domain of TCR clone 206826 (TRBV7-3, TRBJ2-1)
GGTQPCISVPAAYGLAGAQFF

SEQ ID NO: 413653 - protein, 11 aa, Homo sapiens
  CDR3 for alpha chain variable domain of TCR clone 206827 (TRAV21, TRAJ34)
CAVTNTDKLIF

SEQ ID NO: 413654 - protein, 13 aa, Homo sapiens
  CDR3 for beta chain variable domain of TCR clone 206827 (TRBV2, TRBJ1-5)
CASSTYSDQPQHF

SEQ ID NO: 413655 - protein, 12 aa, Homo sapiens
  CDR3 for alpha chain variable domain of TCR clone 206828 (TRAV17, TRAJ57)
CATDGGSEKLVF

SEQ ID NO: 413656 - protein, 15 aa, Homo sapiens
  CDR3 for beta chain variable domain of TCR clone 206828 (TRBV20-1, TRBJ2-4)
CSVTTGLLAKNIQYF

SEQ ID NO: 413657 - protein, 13 aa, Homo sapiens
  CDR3 for alpha chain variable domain of TCR clone 206829 (TRAV2, TRAJ12)
CAVGAGSSYKLIF

SEQ ID NO: 413658 - protein, 15 aa, Homo sapiens
  CDR3 for beta chain variable domain of TCR clone 206829 (TRBV7-2, TRBJ2-1)
CASSSGLAGGNEQFF

SEQ ID NO: 413659 - protein, 14 aa, Homo sapiens
  CDR3 for alpha chain variable domain of TCR clone 206830 (TRAV8-3, TRAJ27)
CAGGRNSNAGKSTF

SEQ ID NO: 413660 - protein, 15 aa, Homo sapiens
  CDR3 for beta chain variable domain of TCR clone 206830 (TRBV11-3, TRBJ2-5)
CASSLRGRVQETQYF

SEQ ID NO: 413661 - protein, 14 aa, Homo sapiens
  CDR3 for alpha chain variable domain of TCR clone 206831 (TRAV13-1, TRAJ35)
CAASKGGFGNVLHF

SEQ ID NO: 413662 - protein, 13 aa, Homo sapiens
  CDR3 for beta chain variable domain of TCR clone 206831 (TRBV7-3, TRBJ1-1)
CASSQDWGAEAFC

SEQ ID NO: 413663 - protein, 15 aa, Homo sapiens
  CDR3 for alpha chain variable domain of TCR clone 206832 (TRAV21, TRAJ53)
CATVNSGGSNYKLTF

SEQ ID NO: 413664 - protein, 17 aa, Homo sapiens
  CDR3 for beta chain variable domain of TCR clone 206832 (TRBV20-1, TRBJ2-2)
CSASGSGQGGLTGELFF

SEQ ID NO: 413665 - protein, 12 aa, Homo sapiens
  CDR3 for alpha chain variable domain of TCR clone 206833 (TRAV12-3, TRAJ17)
CAMTLTGNKLTF

SEQ ID NO: 413666 - protein, 15 aa, Homo sapiens
  CDR3 for beta chain variable domain of TCR clone 206833 (TRBV20-1, TRBJ1-1)
CSARGGGTLKLSLDK

SEQ ID NO: 413667 - protein, 15 aa, Homo sapiens
  CDR3 for alpha chain variable domain of TCR clone 206834 (TRAV21, TRAJ38)
CAVRQDAGNNRTLIW

SEQ ID NO: 413668 - protein, 16 aa, Homo sapiens
  CDR3 for beta chain variable domain of TCR clone 206834 (TRBV4-2, TRBJ1-1)
CASRPLDGGGDTEAFF

SEQ ID NO: 413669 - protein, 14 aa, Homo sapiens
  CDR3 for alpha chain variable domain of TCR clone 206835 (TRAV12-2, TRAJ49)
CAVTLGLYGNQFYF

SEQ ID NO: 413670 - protein, 17 aa, Homo sapiens
  CDR3 for beta chain variable domain of TCR clone 206835 (TRBV7-9, TRBJ1-1)
CASSSPPGQGQNTEAFF

SEQ ID NO: 413671 - protein, 14 aa, Homo sapiens
  CDR3 for alpha chain variable domain of TCR clone 206836 (TRAV35, TRAJ22)
CVGLRPGSAGQLTF

SEQ ID NO: 413672 - protein, 15 aa, Homo sapiens
  CDR3 for beta chain variable domain of TCR clone 206836 (TRBV12-4, TRBJ2-5)
CASSPPTGLQETQYF

SEQ ID NO: 413673 - protein, 15 aa, Homo sapiens
  CDR3 for alpha chain variable domain of TCR clone 206837 (TRAV27, TRAJ38)
CAARRNAGNNRKLIW

SEQ ID NO: 413674 - protein, 13 aa, Homo sapiens
  CDR3 for beta chain variable domain of TCR clone 206837 (TRBV20-1, TRBJ1-1)
CSAREGGNTEAFF

SEQ ID NO: 413675 - protein, 12 aa, Homo sapiens
  CDR3 for alpha chain variable domain of TCR clone 206838 (TRAV10, TRAJ43)
CVVVRVGNDMRF

SEQ ID NO: 413676 - protein, 15 aa, Homo sapiens
  CDR3 for beta chain variable domain of TCR clone 206838 (TRBV6-3, TRBJ2-7)
CASSSPGRVFYEQYF

SEQ ID NO: 413677 - protein, 13 aa, Homo sapiens
  CDR3 for alpha chain variable domain of TCR clone 206839 (TRAV13-2, TRAJ48)
CAEMDFGNENLTF

SEQ ID NO: 413678 - protein, 16 aa, Homo sapiens
  CDR3 for beta chain variable domain of TCR clone 206839 (TRBV27, TRBJ2-2)
CASSFRGLVRTGELFF

SEQ ID NO: 413679 - protein, 13 aa, Homo sapiens
  CDR3 for alpha chain variable domain of TCR clone 206840 (TRAV8-3, TRAJ28)
CAVGAVGSYQLTF

SEQ ID NO: 413680 - protein, 14 aa, Homo sapiens
  CDR3 for beta chain variable domain of TCR clone 206840 (TRBV7-9, TRBJ2-2)
CASSFRQGTGELFF

SEQ ID NO: 413681 - protein, 14 aa, Homo sapiens
  CDR3 for alpha chain variable domain of TCR clone 206841 (TRAV27, TRAJ40)
CAGSLLRGTYKYIF

SEQ ID NO: 413682 - protein, 15 aa, Homo sapiens
  CDR3 for beta chain variable domain of TCR clone 206841 (TRBV6-3, TRBJ1-4)
CASSSPGQDNEKLFF

SEQ ID NO: 413683 - protein, 16 aa, Homo sapiens
  CDR3 for alpha chain variable domain of TCR clone 206842 (TRAV8-3, TRAJ8)
CAVPRDGNTGFQKLVL

SEQ ID NO: 413684 - protein, 15 aa, Homo sapiens
  CDR3 for beta chain variable domain of TCR clone 206842 (TRBV6-1, TRBJ2-6)
CASSSRPSGANVLTF

SEQ ID NO: 413685 - protein, 14 aa, Homo sapiens
  CDR3 for alpha chain variable domain of TCR clone 206843 (TRAV1-2, TRAJ16)
CAVNRFSDGQKLLF

SEQ ID NO: 413686 - protein, 14 aa, Homo sapiens
  CDR3 for beta chain variable domain of TCR clone 206843 (TRBV7-3, TRBJ2-1)
CASSLAGGKNEQFF

SEQ ID NO: 413687 - protein, 14 aa, Homo sapiens
  CDR3 for alpha chain variable domain of TCR clone 206844 (TRAV12-1, TRAJ12)
CVVTRMDSSYKLIF

SEQ ID NO: 413688 - protein, 16 aa, Homo sapiens
  CDR3 for beta chain variable domain of TCR clone 206844 (TRBV7-2, TRBJ1-2)
CASSSNQDRRGHGYTF

SEQ ID NO: 413689 - protein, 13 aa, Homo sapiens
  CDR3 for alpha chain variable domain of TCR clone 206845 (TRAV8-3, TRAJ43)
CAVVPYNNNDMRF

SEQ ID NO: 413690 - protein, 14 aa, Homo sapiens
  CDR3 for beta chain variable domain of TCR clone 206845 (TRBV7-6, TRBJ2-3)
CASSLGTATDTQYF

SEQ ID NO: 413691 - protein, 17 aa, Homo sapiens
  CDR3 for alpha chain variable domain of TCR clone 206846 (TRAV8-6, TRAJ58)
CAVSSWVGETIGSRLTF

SEQ ID NO: 413692 - protein, 14 aa, Homo sapiens
  CDR3 for beta chain variable domain of TCR clone 206846 (TRBV2, TRBJ2-7)
CASRPPGGHYEQYL

SEQ ID NO: 413693 - protein, 14 aa, Homo sapiens
  CDR3 for alpha chain variable domain of TCR clone 206847 (TRAV12-3, TRAJ10)
SHLPLTGGGNKLTF

SEQ ID NO: 413694 - protein, 14 aa, Homo sapiens
  CDR3 for beta chain variable domain of TCR clone 206847 (TRBV5-1, TRBJ2-7)
CASSRGESLYVQYF

SEQ ID NO: 413695 - protein, 13 aa, Homo sapiens
  CDR3 for alpha chain variable domain of TCR clone 206848 (TRAV3, TRAJ33)
CAVRDRSNYQLIW

SEQ ID NO: 413696 - protein, 16 aa, Homo sapiens
  CDR3 for beta chain variable domain of TCR clone 206848 (TRBV4-2, TRBJ2-7)
CASSEDRGTSSYEQYF

SEQ ID NO: 413697 - protein, 14 aa, Homo sapiens
  CDR3 for alpha chain variable domain of TCR clone 206849 (TRAV12-2, TRAJ40)
CAVKIPSGTYKYIF

SEQ ID NO: 413698 - protein, 16 aa, Homo sapiens
  CDR3 for beta chain variable domain of TCR clone 206849 (TRBV28, TRBJ2-5)
CASSFSPAGGWESQYF

SEQ ID NO: 413699 - protein, 13 aa, Homo sapiens
  CDR3 for alpha chain variable domain of TCR clone 206850 (TRAV17, TRAJ26)
CATVDNYGQNFVF

SEQ ID NO: 413700 - protein, 16 aa, Homo sapiens
  CDR3 for beta chain variable domain of TCR clone 206850 (TRBV2, TRBJ2-1)
CASSVGGSLTYNEQFF

SEQ ID NO: 413701 - protein, 14 aa, Homo sapiens
  CDR3 for alpha chain variable domain of TCR clone 206851 (TRAV8-6, TRAJ3)
CAVTWGSSASKIIF

SEQ ID NO: 413702 - protein, 16 aa, Homo sapiens
  CDR3 for beta chain variable domain of TCR clone 206851 (TRBV7-3, TRBJ2-2)
CASSLKRGTLSGELFF

SEQ ID NO: 413703 - protein, 15 aa, Homo sapiens
  CDR3 for alpha chain variable domain of TCR clone 206852 (TRAV8-6, TRAJ48)
CCESRFNFGNEKLTF

SEQ ID NO: 413704 - protein, 15 aa, Homo sapiens
  CDR3 for beta chain variable domain of TCR clone 206852 (TRBV12-4, TRBJ2-2)
CASSPQPGSTGELFF

SEQ ID NO: 413705 - protein, 15 aa, Homo sapiens
  CDR3 for alpha chain variable domain of TCR clone 206853 (TRAV26-1, TRAJ44)
CIARVSFGPASKLTF

SEQ ID NO: 413706 - protein, 15 aa, Homo sapiens
  CDR3 for beta chain variable domain of TCR clone 206853 (TRBV20-1, TRBJ1-1)
CSASRGVTGNTEAFF

SEQ ID NO: 413707 - protein, 15 aa, Homo sapiens
  CDR3 for alpha chain variable domain of TCR clone 206854 (TRAV8-3, TRAJ11)
CAVGLLNSGYSTLTF

SEQ ID NO: 413708 - protein, 16 aa, Homo sapiens
  CDR3 for beta chain variable domain of TCR clone 206854 (TRBV7-3, TRBJ2-1)
CASSLSSGGGAKEQFF

SEQ ID NO: 413709 - protein, 14 aa, Homo sapiens
  CDR3 for alpha chain variable domain of TCR clone 206855 (TRAV1-2, TRAJ16)
CAVNRFSDGQKLLF

SEQ ID NO: 413710 - protein, 15 aa, Homo sapiens
  CDR3 for beta chain variable domain of TCR clone 206855 (TRBV19, TRBJ1-1)
CASTSGQIQNTEAVF

SEQ ID NO: 413711 - protein, 15 aa, Homo sapiens
  CDR3 for alpha chain variable domain of TCR clone 206856 (TRAV20, TRAJ6)
CAVRLQSGGSYIPTF

SEQ ID NO: 413712 - protein, 13 aa, Homo sapiens
  CDR3 for beta chain variable domain of TCR clone 206856 (TRBV5-1, TRBJ2-1)
CASSLGSYNEQFF

SEQ ID NO: 413713 - protein, 14 aa, Homo sapiens
  CDR3 for alpha chain variable domain of TCR clone 206857 (TRAV8-4, TRAJ48)
CAVSETFGNEKVTF

SEQ ID NO: 413714 - protein, 14 aa, Homo sapiens
  CDR3 for beta chain variable domain of TCR clone 206857 (TRBV13, TRBJ2-7)
CASSLKGASYEQYF

SEQ ID NO: 413715 - protein, 14 aa, Homo sapiens
  CDR3 for alpha chain variable domain of TCR clone 206858 (TRAV12-1, TRAJ12)
CVVTSGDSSYKLIF

SEQ ID NO: 413716 - protein, 14 aa, Homo sapiens
  CDR3 for beta chain variable domain of TCR clone 206858 (TRBV4-1, TRBJ2-2)
CASSQAVNTGELFF

SEQ ID NO: 413717 - protein, 11 aa, Homo sapiens
  CDR3 for alpha chain variable domain of TCR clone 206859 (TRAV12-3, TRAJ43)
CAMSVSNDMRF

SEQ ID NO: 413718 - protein, 14 aa, Homo sapiens
  CDR3 for beta chain variable domain of TCR clone 206859 (TRBV29-1, TRBJ2-2)
CSVLAETNTGELFL

SEQ ID NO: 413719 - protein, 13 aa, Homo sapiens
  CDR3 for alpha chain variable domain of TCR clone 206860 (TRAV8-3, TRAJ36)
CAVGATGADNLFF

SEQ ID NO: 413720 - protein, 22 aa, Homo sapiens
  CDR3 for beta chain variable domain of TCR clone 206860 (TRBV11-2, TRBJ1-4)
CASSLDITRRGIPRKDNEKLFF

SEQ ID NO: 413721 - protein, 15 aa, Homo sapiens
  CDR3 for alpha chain variable domain of TCR clone 206861 (TRAV13-1, TRAJ32)
CAASIYGGATNKLIF

SEQ ID NO: 413722 - protein, 17 aa, Homo sapiens
  CDR3 for beta chain variable domain of TCR clone 206861 (TRBV7-3, TRBJ2-5)
CASSVGSGRSGSETQYF

SEQ ID NO: 413723 - protein, 11 aa, Homo sapiens
  CDR3 for alpha chain variable domain of TCR clone 206862 (TRAV3, TRAJ32)
CAVREGIMVVL

SEQ ID NO: 413724 - protein, 13 aa, Homo sapiens
  CDR3 for beta chain variable domain of TCR clone 206862 (TRBV2, TRBJ1-1)
CASSEGVNTEAFF

SEQ ID NO: 413725 - protein, 13 aa, Homo sapiens
  CDR3 for alpha chain variable domain of TCR clone 206863 (TRAV8-3, TRAJ21)
CAVGAYYFNKFYF

SEQ ID NO: 413726 - protein, 16 aa, Homo sapiens
  CDR3 for beta chain variable domain of TCR clone 206863 (TRBV19, TRBJ2-1)
CASSMGGGSSYNEQFF

SEQ ID NO: 413727 - protein, 14 aa, Homo sapiens
  CDR3 for alpha chain variable domain of TCR clone 206864 (TRAV12-1, TRAJ12)
CVVTRMDSSYKLIF

SEQ ID NO: 413728 - protein, 12 aa, Homo sapiens
  CDR3 for beta chain variable domain of TCR clone 206864 (TRBV7-9, TRBJ2-7)
CASSLEGYEQYF

SEQ ID NO: 413729 - protein, 14 aa, Homo sapiens
  CDR3 for alpha chain variable domain of TCR clone 206865 (TRAV3, TRAJ21)
CALRDKYNFNKFYF

SEQ ID NO: 413730 - protein, 14 aa, Homo sapiens
  CDR3 for beta chain variable domain of TCR clone 206865 (TRBV27, TRBJ2-3)
CASRDSPITDTQYF

SEQ ID NO: 413731 - protein, 18 aa, Homo sapiens
  CDR3 for alpha chain variable domain of TCR clone 206866 (TRAV21, TRAJ52)
CAVRPSPAGGTSYGTLTF

SEQ ID NO: 413732 - protein, 13 aa, Homo sapiens
  CDR3 for beta chain variable domain of TCR clone 206866 (TRBV12-4, TRBJ1-2)
CASSLRQGKGYTF

SEQ ID NO: 413733 - protein, 14 aa, Homo sapiens
  CDR3 for alpha chain variable domain of TCR clone 206867 (TRAV38-2/DV8, TRAJ23)
AAMDFCALSRKLIF

SEQ ID NO: 413734 - protein, 17 aa, Homo sapiens
  CDR3 for beta chain variable domain of TCR clone 206867 (TRBV5-4, TRBJ2-1)
CASSSAGGRGPYNEQFF

SEQ ID NO: 413735 - protein, 10 aa, Homo sapiens
  CDR3 for alpha chain variable domain of TCR clone 206868 (TRAV36/DV7, TRAJ48)
CAVGNEKLTF

SEQ ID NO: 413736 - protein, 17 aa, Homo sapiens
  CDR3 for beta chain variable domain of TCR clone 206868 (TRBV20-1, TRBJ2-1)
CSARDPLAGVWDNEQFF

SEQ ID NO: 413737 - protein, 11 aa, Homo sapiens
  CDR3 for alpha chain variable domain of TCR clone 206869 (TRAV39, TRAJ28)
CAVDPGYQLTF

SEQ ID NO: 413738 - protein, 16 aa, Homo sapiens
  CDR3 for beta chain variable domain of TCR clone 206869 (TRBV4-2, TRBJ2-4)
CASSQELRRAKNIQYF

SEQ ID NO: 413739 - protein, 16 aa, Homo sapiens
  CDR3 for alpha chain variable domain of TCR clone 206870 (TRAV3, TRAJ18)
CAVRDGRGSTLGGLYF

SEQ ID NO: 413740 - protein, 20 aa, Homo sapiens
  CDR3 for beta chain variable domain of TCR clone 206870 (TRBV7-8, TRBJ2-2)
CASSHLFPGPTIHITGELFF

SEQ ID NO: 413741 - protein, 14 aa, Homo sapiens
  CDR3 for alpha chain variable domain of TCR clone 206871 (TRAV1-2, TRAJ16)
CAVNRFSDGQKLLF

SEQ ID NO: 413742 - protein, 15 aa, Homo sapiens
  CDR3 for beta chain variable domain of TCR clone 206871 (TRBV20-1, TRBJ2-7)
CSARDRVSGMDEQYL

SEQ ID NO: 413743 - protein, 21 aa, Homo sapiens
  CDR3 for alpha chain variable domain of TCR clone 206872 (TRAV9-2, )
CALIQIGDIQNADPAVYQLRD

SEQ ID NO: 413744 - protein, 17 aa, Homo sapiens
  CDR3 for beta chain variable domain of TCR clone 206872 (TRBV7-8, TRBJ2-6)
CASSAGTGGAGANVLTF

SEQ ID NO: 413745 - protein, 13 aa, Homo sapiens
  CDR3 for alpha chain variable domain of TCR clone 206873 (TRAV2, TRAJ29)
CAAQNSGNKPLVF

SEQ ID NO: 413746 - protein, 14 aa, Homo sapiens
  CDR3 for beta chain variable domain of TCR clone 206873 (TRBV7-9, TRBJ2-4)
CASSLAMGGNMQYF

SEQ ID NO: 413747 - protein, 19 aa, Homo sapiens
  CDR3 for alpha chain variable domain of TCR clone 206874 (TRAV21, TRAJ20)
SLVTQPPTSVLPNDYKLSF

SEQ ID NO: 413748 - protein, 14 aa, Homo sapiens
  CDR3 for beta chain variable domain of TCR clone 206874 (TRBV7-2, TRBJ1-3)
CASSRLRSGNTIYV

SEQ ID NO: 413749 - protein, 13 aa, Homo sapiens
  CDR3 for alpha chain variable domain of TCR clone 206875 (TRAV8-6, TRAJ8)
CAVSNTGFQKLVF

SEQ ID NO: 413750 - protein, 13 aa, Homo sapiens
  CDR3 for beta chain variable domain of TCR clone 206875 (TRBV10-3, TRBJ1-2)
CAISERDSYGYTF

SEQ ID NO: 413751 - protein, 23 aa, Homo sapiens
  CDR3 for alpha chain variable domain of TCR clone 206876 (TRAV26-1, TRAJ38)
CIADNAGNNHIQNPDPAVYQLRD

SEQ ID NO: 413752 - protein, 13 aa, Homo sapiens
  CDR3 for beta chain variable domain of TCR clone 206876 (TRBV15, TRBJ1-6)
CATSGGLNSSLHF

SEQ ID NO: 413753 - protein, 12 aa, Homo sapiens
  CDR3 for alpha chain variable domain of TCR clone 206877 (TRAV8-3, TRAJ26)
CAGDNYGKNFVF

SEQ ID NO: 413754 - protein, 13 aa, Homo sapiens
  CDR3 for beta chain variable domain of TCR clone 206877 (TRBV20-1, TRBJ1-1)
CSAPLGGGTEAFF

SEQ ID NO: 413755 - protein, 15 aa, Homo sapiens
  CDR3 for alpha chain variable domain of TCR clone 206878 (TRAV8-3, TRAJ37)
CAVGGLSSNTGKLIF

SEQ ID NO: 413756 - protein, 15 aa, Homo sapiens
  CDR3 for beta chain variable domain of TCR clone 206878 (TRBV10-3, TRBJ2-7)
CASREQGLRSYEQYF

SEQ ID NO: 413757 - protein, 14 aa, Homo sapiens
  CDR3 for alpha chain variable domain of TCR clone 206879 (TRAV26-1, TRAJ49)
CIVRLTNTGNQFYF

SEQ ID NO: 413758 - protein, 13 aa, Homo sapiens
  CDR3 for beta chain variable domain of TCR clone 206879 (TRBV4-1, TRBJ2-7)
YASSQGQAYEQYF

SEQ ID NO: 413759 - protein, 13 aa, Homo sapiens
  CDR3 for alpha chain variable domain of TCR clone 206880 (TRAV12-3, TRAJ40)
CAMSAGGTYKYIF

SEQ ID NO: 413760 - protein, 16 aa, Homo sapiens
  CDR3 for beta chain variable domain of TCR clone 206880 (TRBV20-1, TRBJ2-3)
CSGEAGLAGGQDTQYF

SEQ ID NO: 413761 - protein, 13 aa, Homo sapiens
  CDR3 for alpha chain variable domain of TCR clone 206881 (TRAV12-3, TRAJ7)
CAMTPYGNNRLAF

SEQ ID NO: 413762 - protein, 16 aa, Homo sapiens
  CDR3 for beta chain variable domain of TCR clone 206881 (TRBV28, TRBJ1-5)
CASSFRGGYSNQPQHF

SEQ ID NO: 413763 - protein, 15 aa, Homo sapiens
  CDR3 for alpha chain variable domain of TCR clone 206882 (TRAV25, TRAJ52)
CAGRPGGTSYGKLTF

SEQ ID NO: 413764 - protein, 16 aa, Homo sapiens
  CDR3 for beta chain variable domain of TCR clone 206882 (TRBV12-4, TRBJ1-5)
CASSSGARGSNQPQHF

SEQ ID NO: 413765 - protein, 15 aa, Homo sapiens
  CDR3 for alpha chain variable domain of TCR clone 206883 (TRAV13-1, TRAJ17)
CAASIERAAGNKLTF

SEQ ID NO: 413766 - protein, 13 aa, Homo sapiens
  CDR3 for beta chain variable domain of TCR clone 206883 (TRBV7-7, TRBJ2-3)
CASSLRRADTQYF

SEQ ID NO: 413767 - protein, 13 aa, Homo sapiens
  CDR3 for alpha chain variable domain of TCR clone 206884 (TRAV12-2, TRAJ20)
CAVYPSNDYKLSF

SEQ ID NO: 413768 - protein, 16 aa, Homo sapiens
  CDR3 for beta chain variable domain of TCR clone 206884 (TRBV29-1, TRBJ1-2)
CSVEANRDIANYGYTF

SEQ ID NO: 413769 - protein, 14 aa, Homo sapiens
  CDR3 for alpha chain variable domain of TCR clone 206885 (TRAV12-1, TRAJ4)
CGEQRSGGYNKLVF

SEQ ID NO: 413770 - protein, 15 aa, Homo sapiens
  CDR3 for beta chain variable domain of TCR clone 206885 (TRBV6-3, TRBJ2-7)
CASSSPGTVFYEQYF

SEQ ID NO: 413771 - protein, 13 aa, Homo sapiens
  CDR3 for alpha chain variable domain of TCR clone 206886 (TRAV21, TRAJ57)
CAVTQGGSEKLFF

SEQ ID NO: 413772 - protein, 15 aa, Homo sapiens
  CDR3 for beta chain variable domain of TCR clone 206886 (TRBV5-1, TRBJ1-1)
CASSSTTGTNTEAFF

SEQ ID NO: 413773 - protein, 12 aa, Homo sapiens
  CDR3 for alpha chain variable domain of TCR clone 206887 (TRAV12-3, TRAJ17)
CAMTLTGNKLTF

SEQ ID NO: 413774 - protein, 13 aa, Homo sapiens
  CDR3 for beta chain variable domain of TCR clone 206887 (TRBV7-9, TRBJ1-2)
CAGSLKQNYGYTF

SEQ ID NO: 413775 - protein, 11 aa, Homo sapiens
  CDR3 for alpha chain variable domain of TCR clone 206888 (TRAV13-1, TRAJ23)
CAASSRGKLIF

SEQ ID NO: 413776 - protein, 21 aa, Homo sapiens
  CDR3 for beta chain variable domain of TCR clone 206888 (TRBV7-3, TRBJ2-5)
GGTQPCISGPAASGGGETQYF

SEQ ID NO: 413777 - protein, 16 aa, Homo sapiens
  CDR3 for alpha chain variable domain of TCR clone 206889 (TRAV16, TRAJ57)
CAPYLITQGGSEKLVF

SEQ ID NO: 413778 - protein, 13 aa, Homo sapiens
  CDR3 for beta chain variable domain of TCR clone 206889 (TRBV10-3, TRBJ2-7)
CASKLAVNYEQYF

SEQ ID NO: 413779 - protein, 11 aa, Homo sapiens
  CDR3 for alpha chain variable domain of TCR clone 206890 (TRAV17, TRAJ31)
CATSNNARLMF

SEQ ID NO: 413780 - protein, 15 aa, Homo sapiens
  CDR3 for beta chain variable domain of TCR clone 206890 (TRBV20-1, TRBJ2-7)
CSARDRVSGMDEQYF

SEQ ID NO: 413781 - protein, 14 aa, Homo sapiens
  CDR3 for alpha chain variable domain of TCR clone 206891 (TRAV3, TRAJ7)
CAVREEEREQQNRF

SEQ ID NO: 413782 - protein, 12 aa, Homo sapiens
  CDR3 for beta chain variable domain of TCR clone 206891 (TRBV7-8, TRBJ2-7)
CASSLGDREQYF

SEQ ID NO: 413783 - protein, 14 aa, Homo sapiens
  CDR3 for alpha chain variable domain of TCR clone 206892 (TRAV2, TRAJ9)
CAVEDRSGGFKTIF

SEQ ID NO: 413784 - protein, 16 aa, Homo sapiens
  CDR3 for beta chain variable domain of TCR clone 206892 (TRBV18, TRBJ2-1)
CASSPPSGGGNNEQFF

SEQ ID NO: 413785 - protein, 15 aa, Homo sapiens
  CDR3 for alpha chain variable domain of TCR clone 206893 (TRAV17, TRAJ28)
CATDPSGAGSYQLTF

SEQ ID NO: 413786 - protein, 12 aa, Homo sapiens
  CDR3 for beta chain variable domain of TCR clone 206893 (TRBV5-1, TRBJ2-7)
CASSLDSYEQYF

SEQ ID NO: 413787 - protein, 16 aa, Homo sapiens
  CDR3 for alpha chain variable domain of TCR clone 206894 (TRAV4, TRAJ22)
CLVGDLYSGSARQLTF

SEQ ID NO: 413788 - protein, 16 aa, Homo sapiens
  CDR3 for beta chain variable domain of TCR clone 206894 (TRBV28, TRBJ2-3)
CTSVPAVGGGGHTQYF

SEQ ID NO: 413789 - protein, 15 aa, Homo sapiens
  CDR3 for alpha chain variable domain of TCR clone 206895 (TRAV21, TRAJ53)
CATLNSGGSKYKLTF

SEQ ID NO: 413790 - protein, 17 aa, Homo sapiens
  CDR3 for beta chain variable domain of TCR clone 206895 (TRBV20-1, TRBJ2-2)
CSASGSGQGGLTGELFF

SEQ ID NO: 413791 - protein, 15 aa, Homo sapiens
  CDR3 for alpha chain variable domain of TCR clone 206896 (TRAV2, TRAJ22)
CAVPSRGGSSRQLTF

SEQ ID NO: 413792 - protein, 11 aa, Homo sapiens
  CDR3 for beta chain variable domain of TCR clone 206896 (TRBV27, TRBJ2-3)
CASSLGDTQYF

SEQ ID NO: 413793 - protein, 14 aa, Homo sapiens
  CDR3 for alpha chain variable domain of TCR clone 206897 (TRAV13-1, TRAJ3)
CAARKSSSASKIIF

SEQ ID NO: 413794 - protein, 13 aa, Homo sapiens
  CDR3 for beta chain variable domain of TCR clone 206897 (TRBV25-1, TRBJ2-5)
CASSESGRETQYF

SEQ ID NO: 413795 - protein, 18 aa, Homo sapiens
  CDR3 for alpha chain variable domain of TCR clone 206898 (TRAV26-1, TRAJ22)
CIVRVSFWFCKATDLLIC

SEQ ID NO: 413796 - protein, 13 aa, Homo sapiens
  CDR3 for beta chain variable domain of TCR clone 206898 (TRBV7-9, TRBJ1-2)
CASSLKQNYGYTF

SEQ ID NO: 413797 - protein, 14 aa, Homo sapiens
  CDR3 for alpha chain variable domain of TCR clone 206899 (TRAV23/DV6, TRAJ17)
CAASVQAAGNKLTF

SEQ ID NO: 413798 - protein, 14 aa, Homo sapiens
  CDR3 for beta chain variable domain of TCR clone 206899 (TRBV12-5, TRBJ2-5)
CASGSRTHQETQYF

SEQ ID NO: 413799 - protein, 14 aa, Homo sapiens
  CDR3 for alpha chain variable domain of TCR clone 206900 (TRAV1-2, TRAJ8)
CAVREDAGFRKLVF

SEQ ID NO: 413800 - protein, 15 aa, Homo sapiens
  CDR3 for beta chain variable domain of TCR clone 206900 (TRBV6-3, TRBJ2-7)
CASSSPGTVFYEQYF

SEQ ID NO: 413801 - protein, 11 aa, Homo sapiens
  CDR3 for alpha chain variable domain of TCR clone 206901 (TRAV2, TRAJ13)
CASGGYQKVTF

SEQ ID NO: 413802 - protein, 13 aa, Homo sapiens
  CDR3 for beta chain variable domain of TCR clone 206901 (TRBV2, TRBJ2-7)
CASSVGGSGEQYF

SEQ ID NO: 413803 - protein, 17 aa, Homo sapiens
  CDR3 for alpha chain variable domain of TCR clone 206902 (TRAV13-1, TRAJ52)
CAASSGAGGTSYGKLTF

SEQ ID NO: 413804 - protein, 13 aa, Homo sapiens
  CDR3 for beta chain variable domain of TCR clone 206902 (TRBV11-3, TRBJ2-3)
CASSHDTKDTQYF

SEQ ID NO: 413805 - protein, 14 aa, Homo sapiens
  CDR3 for alpha chain variable domain of TCR clone 206903 (TRAV3, TRAJ21)
CAVESQANFNKFYL

SEQ ID NO: 413806 - protein, 12 aa, Homo sapiens
  CDR3 for beta chain variable domain of TCR clone 206903 (TRBV6-3, TRBJ2-7)
CASSLTPYEQYF

SEQ ID NO: 413807 - protein, 13 aa, Homo sapiens
  CDR3 for alpha chain variable domain of TCR clone 206904 (TRAV1-1, TRAJ31)
CASYLNNNDRLMF

SEQ ID NO: 413808 - protein, 14 aa, Homo sapiens
  CDR3 for beta chain variable domain of TCR clone 206904 (TRBV4-1, TRBJ2-5)
CASSRSGSGETQYF

SEQ ID NO: 413809 - protein, 11 aa, Homo sapiens
  CDR3 for alpha chain variable domain of TCR clone 206905 (TRAV12-1, TRAJ34)
CGVNKGRELIF

SEQ ID NO: 413810 - protein, 12 aa, Homo sapiens
  CDR3 for beta chain variable domain of TCR clone 206905 (TRBV11-2, TRBJ2-2)
CASSLGGGELFF

SEQ ID NO: 413811 - protein, 15 aa, Homo sapiens
  CDR3 for alpha chain variable domain of TCR clone 206906 (TRAV4, TRAJ4)
CLVGDWSGGYNKLIF

SEQ ID NO: 413812 - protein, 16 aa, Homo sapiens
  CDR3 for beta chain variable domain of TCR clone 206906 (TRBV7-3, TRBJ2-1)
CASSLEGYRSYNEQFF

SEQ ID NO: 413813 - protein, 12 aa, Homo sapiens
  CDR3 for alpha chain variable domain of TCR clone 206907 (TRAV27, TRAJ13)
CAGAGGYQKVTF

SEQ ID NO: 413814 - protein, 20 aa, Homo sapiens
  CDR3 for beta chain variable domain of TCR clone 206907 (TRBV19, TRBJ2-1)
CARSISRTVTSTRLNNEQFF

SEQ ID NO: 413815 - protein, 12 aa, Homo sapiens
  CDR3 for alpha chain variable domain of TCR clone 206908 (TRAV17, TRAJ30)
CVPERRDDKIIF

SEQ ID NO: 413816 - protein, 15 aa, Homo sapiens
  CDR3 for beta chain variable domain of TCR clone 206908 (TRBV20-1, TRBJ2-7)
CGARDRVSGMDEQYF

SEQ ID NO: 413817 - protein, 12 aa, Homo sapiens
  CDR3 for alpha chain variable domain of TCR clone 206909 (TRAV3, TRAJ43)
CAVRDPNNDMRF

SEQ ID NO: 413818 - protein, 13 aa, Homo sapiens
  CDR3 for beta chain variable domain of TCR clone 206909 (TRBV19, TRBJ1-2)
CASSVPGQDGYTL

SEQ ID NO: 413819 - protein, 12 aa, Homo sapiens
  CDR3 for alpha chain variable domain of TCR clone 206910 (TRAV12-1, TRAJ40)
CVFYSGTYKYIF

SEQ ID NO: 413820 - protein, 13 aa, Homo sapiens
  CDR3 for beta chain variable domain of TCR clone 206910 (TRBV10-3, TRBJ2-7)
CASKLAVNYEQYF

SEQ ID NO: 413821 - protein, 13 aa, Homo sapiens
  CDR3 for alpha chain variable domain of TCR clone 206911 (TRAV8-3, TRAJ20)
CAVGRPNDYKLRF

SEQ ID NO: 413822 - protein, 13 aa, Homo sapiens
  CDR3 for beta chain variable domain of TCR clone 206911 (TRBV6-5, TRBJ1-4)
CASSYLSQEKLFF

SEQ ID NO: 413823 - protein, 13 aa, Homo sapiens
  CDR3 for alpha chain variable domain of TCR clone 206912 (TRAV12-1, TRAJ40)
CVVPTSGTYKYIF

SEQ ID NO: 413824 - protein, 18 aa, Homo sapiens
  CDR3 for beta chain variable domain of TCR clone 206912 (TRBV7-6, TRBJ2-1)
CASSPRTSGMSSYNEHFF

SEQ ID NO: 413825 - protein, 14 aa, Homo sapiens
  CDR3 for alpha chain variable domain of TCR clone 206913 (TRAV2, TRAJ9)
CAVEDRRGGFKTIF

SEQ ID NO: 413826 - protein, 15 aa, Homo sapiens
  CDR3 for beta chain variable domain of TCR clone 206913 (TRBV20-1, TRBJ2-5)
CSAPPRTGFGETQYF

SEQ ID NO: 413827 - protein, 13 aa, Homo sapiens
  CDR3 for alpha chain variable domain of TCR clone 206914 (TRAV39, TRAJ33)
CAAHPDSNYQLIW

SEQ ID NO: 413828 - protein, 13 aa, Homo sapiens
  CDR3 for beta chain variable domain of TCR clone 206914 (TRBV18, TRBJ1-1)
CASSGGRNTEAFF

SEQ ID NO: 413829 - protein, 14 aa, Homo sapiens
  CDR3 for alpha chain variable domain of TCR clone 206915 (TRAV1-2, TRAJ33)
CAVRAPDSNYQLIW

SEQ ID NO: 413830 - protein, 12 aa, Homo sapiens
  CDR3 for beta chain variable domain of TCR clone 206915 (TRBV11-2, TRBJ2-1)
CASSPGNNEQFF

SEQ ID NO: 413831 - protein, 13 aa, Homo sapiens
  CDR3 for alpha chain variable domain of TCR clone 206916 (TRAV27, TRAJ45)
CRSSGGGADGLTF

SEQ ID NO: 413832 - protein, 11 aa, Homo sapiens
  CDR3 for beta chain variable domain of TCR clone 206916 (TRBV19, TRBJ1-1)
CVSSIGSEAFF

SEQ ID NO: 413833 - protein, 17 aa, Homo sapiens
  CDR3 for alpha chain variable domain of TCR clone 206917 (TRAV38-2/DV8, TRAJ38)
CAYRSARGAGNNRKLIW

SEQ ID NO: 413834 - protein, 13 aa, Homo sapiens
  CDR3 for beta chain variable domain of TCR clone 206917 (TRBV6-5, TRBJ2-1)
CASSGRVGNEQFF

SEQ ID NO: 413835 - protein, 15 aa, Homo sapiens
  CDR3 for alpha chain variable domain of TCR clone 206918 (TRAV12-1, TRAJ40)
CVVNMHFPGTYKYIF

SEQ ID NO: 413836 - protein, 14 aa, Homo sapiens
  CDR3 for beta chain variable domain of TCR clone 206918 (TRBV5-1, TRBJ2-2)
CASSLGGGSGELFF

SEQ ID NO: 413837 - protein, 16 aa, Homo sapiens
  CDR3 for alpha chain variable domain of TCR clone 206919 (TRAV26-1, TRAJ53)
CIVRVAQGGSNYKLTF

SEQ ID NO: 413838 - protein, 12 aa, Homo sapiens
  CDR3 for beta chain variable domain of TCR clone 206919 (TRBV7-9, TRBJ1-5)
CASSPQGQPQHF

SEQ ID NO: 413839 - protein, 12 aa, Homo sapiens
  CDR3 for alpha chain variable domain of TCR clone 206920 (TRAV13-1, TRAJ21)
VAAKEGFNRFYF

SEQ ID NO: 413840 - protein, 15 aa, Homo sapiens
  CDR3 for beta chain variable domain of TCR clone 206920 (TRBV25-1, TRBJ1-4)
CASSPGDSTNEKLFF

SEQ ID NO: 413841 - protein, 12 aa, Homo sapiens
  CDR3 for alpha chain variable domain of TCR clone 206921 (TRAV27, TRAJ42)
CAGGGSQGNLIF

SEQ ID NO: 413842 - protein, 13 aa, Homo sapiens
  CDR3 for beta chain variable domain of TCR clone 206921 (TRBV19, TRBJ2-7)
CASSIRSSCEQYF

SEQ ID NO: 413843 - protein, 18 aa, Homo sapiens
  CDR3 for alpha chain variable domain of TCR clone 206922 (TRAV21, TRAJ52)
CAVRPSPAGGTSYGKLTF

SEQ ID NO: 413844 - protein, 15 aa, Homo sapiens
  CDR3 for beta chain variable domain of TCR clone 206922 (TRBV29-1, TRBJ2-7)
CSVEFFDRGSYEQYF

SEQ ID NO: 413845 - protein, 15 aa, Homo sapiens
  CDR3 for alpha chain variable domain of TCR clone 206923 (TRAV1-2, TRAJ30)
CAVRPHGHRDDKIIF

SEQ ID NO: 413846 - protein, 13 aa, Homo sapiens
  CDR3 for beta chain variable domain of TCR clone 206923 (TRBV4-1, TRBJ2-7)
CASSQGQAYEQDF

SEQ ID NO: 413847 - protein, 14 aa, Homo sapiens
  CDR3 for alpha chain variable domain of TCR clone 206924 (TRAV38-2/DV8, TRAJ54)
AAMYQIQGAQKLVF

SEQ ID NO: 413848 - protein, 17 aa, Homo sapiens
  CDR3 for beta chain variable domain of TCR clone 206924 (TRBV6-1, TRBJ2-3)
CASSEALRFISTDTQYF

SEQ ID NO: 413849 - protein, 15 aa, Homo sapiens
  CDR3 for alpha chain variable domain of TCR clone 206925 (TRAV23/DV6, TRAJ18)
CAARYRGSTLGRLYV

SEQ ID NO: 413850 - protein, 13 aa, Homo sapiens
  CDR3 for beta chain variable domain of TCR clone 206925 (TRBV11-2, TRBJ2-1)
CASSLDLVNEQFF

SEQ ID NO: 413851 - protein, 14 aa, Homo sapiens
  CDR3 for alpha chain variable domain of TCR clone 206926 (TRAV12-2, TRAJ44)
CAVNKAGTASHLTF

SEQ ID NO: 413852 - protein, 12 aa, Homo sapiens
  CDR3 for beta chain variable domain of TCR clone 206926 (TRBV19, TRBJ1-4)
CASKDWPRGLFF

SEQ ID NO: 413853 - protein, 15 aa, Homo sapiens
  CDR3 for alpha chain variable domain of TCR clone 206927 (TRAV25, TRAJ52)
CAGRPVGTSYGKLTL

SEQ ID NO: 413854 - protein, 17 aa, Homo sapiens
  CDR3 for beta chain variable domain of TCR clone 206927 (TRBV7-8, TRBJ2-6)
CASSAGTGGAGANVLTF

SEQ ID NO: 413855 - protein, 12 aa, Homo sapiens
  CDR3 for alpha chain variable domain of TCR clone 206928 (TRAV13-1, TRAJ21)
CAAKEGFNKFYF

SEQ ID NO: 413856 - protein, 14 aa, Homo sapiens
  CDR3 for beta chain variable domain of TCR clone 206928 (TRBV6-1, TRBJ1-3)
CTSVQGEGGNTIYF

SEQ ID NO: 413857 - protein, 15 aa, Homo sapiens
  CDR3 for alpha chain variable domain of TCR clone 206929 (TRAV17, TRAJ52)
CATEAGGTSYGKLTF

SEQ ID NO: 413858 - protein, 13 aa, Homo sapiens
  CDR3 for beta chain variable domain of TCR clone 206929 (TRBV28, TRBJ1-5)
CQQFGVLVKTQHF

SEQ ID NO: 413859 - protein, 13 aa, Homo sapiens
  CDR3 for alpha chain variable domain of TCR clone 206930 (TRAV23/DV6, TRAJ16)
CAASISDVQKLLF

SEQ ID NO: 413860 - protein, 15 aa, Homo sapiens
  CDR3 for beta chain variable domain of TCR clone 206930 (TRBV2, TRBJ2-2)
CASSRETVGTGELFF

SEQ ID NO: 413861 - protein, 14 aa, Homo sapiens
  CDR3 for alpha chain variable domain of TCR clone 206931 (TRAV2, TRAJ9)
CAVEDRSGGFKTIF

SEQ ID NO: 413862 - protein, 15 aa, Homo sapiens
  CDR3 for beta chain variable domain of TCR clone 206931 (TRBV5-7, TRBJ1-5)
CASSYGKLWDQPQHL

SEQ ID NO: 413863 - protein, 12 aa, Homo sapiens
  CDR3 for alpha chain variable domain of TCR clone 206932 (TRAV12-1, TRAJ40)
CVFYSGAYKYIF

SEQ ID NO: 413864 - protein, 18 aa, Homo sapiens
  CDR3 for beta chain variable domain of TCR clone 206932 (TRBV12-4, TRBJ2-2)
CASSFVAGTRGRTGELFF

SEQ ID NO: 413865 - protein, 11 aa, Homo sapiens
  CDR3 for alpha chain variable domain of TCR clone 206933 (TRAV21, TRAJ20)
CCRVNDYKLSF

SEQ ID NO: 413866 - protein, 15 aa, Homo sapiens
  CDR3 for beta chain variable domain of TCR clone 206933 (TRBV2, TRBJ2-2)
CASSRQGPNTRELFF

SEQ ID NO: 413867 - protein, 12 aa, Homo sapiens
  CDR3 for alpha chain variable domain of TCR clone 206934 (TRAV12-3, TRAJ17)
CAMTLTGNKLTF

SEQ ID NO: 413868 - protein, 15 aa, Homo sapiens
  CDR3 for beta chain variable domain of TCR clone 206934 (TRBV4-2, TRBJ2-7)
CASSQQRTSHYEQYF

SEQ ID NO: 413869 - protein, 16 aa, Homo sapiens
  CDR3 for alpha chain variable domain of TCR clone 206935 (TRAV14/DV4, TRAJ54)
CAMREGRIQGAQKLVF

SEQ ID NO: 413870 - protein, 14 aa, Homo sapiens
  CDR3 for beta chain variable domain of TCR clone 206935 (TRBV19, TRBJ2-2)
CASSTLHRSGELFF

SEQ ID NO: 413871 - protein, 17 aa, Homo sapiens
  CDR3 for alpha chain variable domain of TCR clone 206936 (TRAV3, TRAJ42)
CAVRDRDYGGSQGNLIF

SEQ ID NO: 413872 - protein, 18 aa, Homo sapiens
  CDR3 for beta chain variable domain of TCR clone 206936 (TRBV20-1, TRBJ2-3)
CSASGLAGGPGTTDTQYL

SEQ ID NO: 413873 - protein, 14 aa, Homo sapiens
  CDR3 for alpha chain variable domain of TCR clone 206937 (TRAV35, TRAJ33)
CAGSSQDSNYQLIW

SEQ ID NO: 413874 - protein, 15 aa, Homo sapiens
  CDR3 for beta chain variable domain of TCR clone 206937 (TRBV19, TRBJ2-1)
CASSRPGQNYNEQFF

SEQ ID NO: 413875 - protein, 14 aa, Homo sapiens
  CDR3 for alpha chain variable domain of TCR clone 206938 (TRAV12-2, TRAJ44)
CAVNPAGTASKLTF

SEQ ID NO: 413876 - protein, 12 aa, Homo sapiens
  CDR3 for beta chain variable domain of TCR clone 206938 (TRBV12-4, TRBJ2-7)
CASSLGGYEQYF

SEQ ID NO: 413877 - protein, 15 aa, Homo sapiens
  CDR3 for alpha chain variable domain of TCR clone 206939 (TRAV12-2, TRAJ5)
CAVNGKDTGRRALTF

SEQ ID NO: 413878 - protein, 17 aa, Homo sapiens
  CDR3 for beta chain variable domain of TCR clone 206939 (TRBV11-2, TRBJ2-1)
CASSLYPPGVEYNEQFF

SEQ ID NO: 413879 - protein, 14 aa, Homo sapiens
  CDR3 for alpha chain variable domain of TCR clone 206940 (TRAV1-2, TRAJ8)
CAVREDTGFQKLVF

SEQ ID NO: 413880 - protein, 15 aa, Homo sapiens
  CDR3 for beta chain variable domain of TCR clone 206940 (TRBV6-3, TRBJ2-7)
CASSFPGTVFYEEYF

SEQ ID NO: 413881 - protein, 13 aa, Homo sapiens
  CDR3 for alpha chain variable domain of TCR clone 206941 (TRAV3, TRAJ3)
CAVRALGASKIIF

SEQ ID NO: 413882 - protein, 13 aa, Homo sapiens
  CDR3 for beta chain variable domain of TCR clone 206941 (TRBV7-9, TRBJ2-3)
CASSPGSTDTQYF

SEQ ID NO: 413883 - protein, 13 aa, Homo sapiens
  CDR3 for alpha chain variable domain of TCR clone 206942 (TRAV14/DV4, TRAJ49)
CAMREYTGNQFYF

SEQ ID NO: 413884 - protein, 16 aa, Homo sapiens
  CDR3 for beta chain variable domain of TCR clone 206942 (TRBV20-1, TRBJ1-4)
CSAPGQGLLTNEKLFF

SEQ ID NO: 413885 - protein, 14 aa, Homo sapiens
  CDR3 for alpha chain variable domain of TCR clone 206943 (TRAV17, TRAJ57)
CATDPQGGSEKLVF

SEQ ID NO: 413886 - protein, 18 aa, Homo sapiens
  CDR3 for beta chain variable domain of TCR clone 206943 (TRBV6-5, TRBJ2-6)
CASSYSGNMEAGANVLTF

SEQ ID NO: 413887 - protein, 14 aa, Homo sapiens
  CDR3 for alpha chain variable domain of TCR clone 206944 (TRAV27, TRAJ22)
CAGVSVLGKRQLTF

SEQ ID NO: 413888 - protein, 16 aa, Homo sapiens
  CDR3 for beta chain variable domain of TCR clone 206944 (TRBV12-5, TRBJ2-5)
CASGPRTSGNQETQYF

SEQ ID NO: 413889 - protein, 18 aa, Homo sapiens
  CDR3 for alpha chain variable domain of TCR clone 206945 (TRAV21, TRAJ52)
CAVRPSPAGGTSYGNLTF

SEQ ID NO: 413890 - protein, 13 aa, Homo sapiens
  CDR3 for beta chain variable domain of TCR clone 206945 (TRBV29-1, TRBJ2-1)
CSVEGGRVNEQFF

SEQ ID NO: 413891 - protein, 17 aa, Homo sapiens
  CDR3 for alpha chain variable domain of TCR clone 206946 (TRAV12-2, TRAJ53)
CAPLTDSQEVSNYKLTF

SEQ ID NO: 413892 - protein, 12 aa, Homo sapiens
  CDR3 for beta chain variable domain of TCR clone 206946 (TRBV11-2, TRBJ2-2)
CASSLGGGELFF

SEQ ID NO: 413893 - protein, 14 aa, Homo sapiens
  CDR3 for alpha chain variable domain of TCR clone 206947 (TRAV26-1, TRAJ38)
CIADNAGNDRKLIW

SEQ ID NO: 413894 - protein, 17 aa, Homo sapiens
  CDR3 for beta chain variable domain of TCR clone 206947 (TRBV7-9, TRBJ2-3)
CASSPTVEGDLTDTQYF

SEQ ID NO: 413895 - protein, 11 aa, Homo sapiens
  CDR3 for alpha chain variable domain of TCR clone 206948 (TRAV1-2, TRAJ40)
CAVPGTYKYIF

SEQ ID NO: 413896 - protein, 16 aa, Homo sapiens
  CDR3 for beta chain variable domain of TCR clone 206948 (TRBV29-1, TRBJ2-7)
CSVEVVGTSGIYEQYF

SEQ ID NO: 413897 - protein, 17 aa, Homo sapiens
  CDR3 for alpha chain variable domain of TCR clone 206949 (TRAV3, TRAJ6)
CAVRDGPMAGGSYIPTF

SEQ ID NO: 413898 - protein, 18 aa, Homo sapiens
  CDR3 for beta chain variable domain of TCR clone 206949 (TRBV7-9, TRBJ2-7)
CASSLTTSGSRTWYEQYF

SEQ ID NO: 413899 - protein, 12 aa, Homo sapiens
  CDR3 for alpha chain variable domain of TCR clone 206950 (TRAV3, TRAJ20)
CAVRDLDYKLSF

SEQ ID NO: 413900 - protein, 13 aa, Homo sapiens
  CDR3 for beta chain variable domain of TCR clone 206950 (TRBV18, TRBJ1-1)
CASSPETKPEAFF

SEQ ID NO: 413901 - protein, 15 aa, Homo sapiens
  CDR3 for alpha chain variable domain of TCR clone 206951 (TRAV3, TRAJ5)
CAVRDLDTGRRELTF

SEQ ID NO: 413902 - protein, 13 aa, Homo sapiens
  CDR3 for beta chain variable domain of TCR clone 206951 (TRBV12-4, TRBJ2-7)
CASSPTDTYEQYF

SEQ ID NO: 413903 - protein, 12 aa, Homo sapiens
  CDR3 for alpha chain variable domain of TCR clone 206952 (TRAV29/DV5, TRAJ49)
CAATDTGTQFYF

SEQ ID NO: 413904 - protein, 12 aa, Homo sapiens
  CDR3 for beta chain variable domain of TCR clone 206952 (TRBV12-4, TRBJ2-7)
CASSLGGYEQYF

SEQ ID NO: 413905 - protein, 15 aa, Homo sapiens
  CDR3 for alpha chain variable domain of TCR clone 206953 (TRAV3, TRAJ22)
CAVRDRSGSARQLTF

SEQ ID NO: 413906 - protein, 14 aa, Homo sapiens
  CDR3 for beta chain variable domain of TCR clone 206953 (TRBV20-1, TRBJ2-5)
CSALVPGYQETQYF

SEQ ID NO: 413907 - protein, 17 aa, Homo sapiens
  CDR3 for alpha chain variable domain of TCR clone 206954 (TRAV16, TRAJ37)
CAFWPKNGSSDTGKLIF

SEQ ID NO: 413908 - protein, 17 aa, Homo sapiens
  CDR3 for beta chain variable domain of TCR clone 206954 (TRBV6-5, TRBJ2-7)
CASSYSFWGQGSYEQYF

SEQ ID NO: 413909 - protein, 16 aa, Homo sapiens
  CDR3 for alpha chain variable domain of TCR clone 206955 (TRAV1-2, TRAJ6)
CAVRDQGTGGSYIPTF

SEQ ID NO: 413910 - protein, 17 aa, Homo sapiens
  CDR3 for beta chain variable domain of TCR clone 206955 (TRBV3-1, TRBJ2-5)
CASSNWGGTSGQETQYF

SEQ ID NO: 413911 - protein, 15 aa, Homo sapiens
  CDR3 for alpha chain variable domain of TCR clone 206956 (TRAV17, TRAJ57)
CATGPSQGGSEKLVF

SEQ ID NO: 413912 - protein, 15 aa, Homo sapiens
  CDR3 for beta chain variable domain of TCR clone 206956 (TRBV7-2, TRBJ2-1)
CASSPLAGEYNEQFF

SEQ ID NO: 413913 - protein, 13 aa, Homo sapiens
  CDR3 for alpha chain variable domain of TCR clone 206957 (TRAV21, TRAJ15)
CAVANQAGTALIF

SEQ ID NO: 413914 - protein, 14 aa, Homo sapiens
  CDR3 for beta chain variable domain of TCR clone 206957 (TRBV10-3, TRBJ2-2)
CASSLGAATGELFF

SEQ ID NO: 413915 - protein, 14 aa, Homo sapiens
  CDR3 for alpha chain variable domain of TCR clone 206958 (TRAV8-1, TRAJ5)
CAVRTDTGRRALTF

SEQ ID NO: 413916 - protein, 12 aa, Homo sapiens
  CDR3 for beta chain variable domain of TCR clone 206958 (TRBV11-3, TRBJ2-1)
CASSPGNNEQFF

SEQ ID NO: 413917 - protein, 13 aa, Homo sapiens
  CDR3 for alpha chain variable domain of TCR clone 206959 (TRAV39, TRAJ48)
WAAVNFGNEKLTF

SEQ ID NO: 413918 - protein, 12 aa, Homo sapiens
  CDR3 for beta chain variable domain of TCR clone 206959 (TRBV5-5, TRBJ2-5)
CASSYFGETQYF

SEQ ID NO: 413919 - protein, 16 aa, Homo sapiens
  CDR3 for alpha chain variable domain of TCR clone 206960 (TRAV36/DV7, TRAJ30)
CAVETYGLDRDEKIIF

SEQ ID NO: 413920 - protein, 16 aa, Homo sapiens
  CDR3 for beta chain variable domain of TCR clone 206960 (TRBV7-3, TRBJ2-2)
CASSLKRGTLSGELFF

SEQ ID NO: 413921 - protein, 16 aa, Homo sapiens
  CDR3 for alpha chain variable domain of TCR clone 206961 (TRAV1-2, TRAJ16)
CAVNRFQMARSCSLQG

SEQ ID NO: 413922 - protein, 14 aa, Homo sapiens
  CDR3 for beta chain variable domain of TCR clone 206961 (TRBV7-2, TRBJ2-7)
CASRSQGAAYEQYF

SEQ ID NO: 413923 - protein, 17 aa, Homo sapiens
  CDR3 for alpha chain variable domain of TCR clone 206962 (TRAV3, TRAJ42)
CAVRDRDYGGSQGNLIF

SEQ ID NO: 413924 - protein, 15 aa, Homo sapiens
  CDR3 for beta chain variable domain of TCR clone 206962 (TRBV19, TRBJ1-5)
CASSIVWADNQPQHF

SEQ ID NO: 413925 - protein, 11 aa, Homo sapiens
  CDR3 for alpha chain variable domain of TCR clone 206963 (TRAV12-2, TRAJ26)
CAVNNGQDFVF

SEQ ID NO: 413926 - protein, 11 aa, Homo sapiens
  CDR3 for beta chain variable domain of TCR clone 206963 (TRBV12-4, TRBJ2-5)
CASSFQGAQYF

SEQ ID NO: 413927 - protein, 15 aa, Homo sapiens
  CDR3 for alpha chain variable domain of TCR clone 206964 (TRAV2, TRAJ20)
CAVDLRGSNDYKLSF

SEQ ID NO: 413928 - protein, 17 aa, Homo sapiens
  CDR3 for beta chain variable domain of TCR clone 206964 (TRBV11-2, TRBJ2-1)
CASSLYPPGVEYNEQFF

SEQ ID NO: 413929 - protein, 15 aa, Homo sapiens
  CDR3 for alpha chain variable domain of TCR clone 206965 (TRAV21, TRAJ40)
CAVRPQTSGTYKYIF

SEQ ID NO: 413930 - protein, 13 aa, Homo sapiens
  CDR3 for beta chain variable domain of TCR clone 206965 (TRBV10-3, TRBJ2-7)
CASKLAVNYEQYF

SEQ ID NO: 413931 - protein, 18 aa, Homo sapiens
  CDR3 for alpha chain variable domain of TCR clone 206966 (TRAV20, TRAJ4)
CAVQPYYMFSGCYNKLIF

SEQ ID NO: 413932 - protein, 13 aa, Homo sapiens
  CDR3 for beta chain variable domain of TCR clone 206966 (TRBV19, TRBJ2-3)
CATWDKITDTQYF

SEQ ID NO: 413933 - protein, 14 aa, Homo sapiens
  CDR3 for alpha chain variable domain of TCR clone 206967 (TRAV17, TRAJ6)
CATDASGGSYIPTF

SEQ ID NO: 413934 - protein, 15 aa, Homo sapiens
  CDR3 for beta chain variable domain of TCR clone 206967 (TRBV6-1, TRBJ2-6)
CASSSRPSGANVLTF

SEQ ID NO: 413935 - protein, 13 aa, Homo sapiens
  CDR3 for alpha chain variable domain of TCR clone 206968 (TRAV38-2/DV8, TRAJ57)
CAYTQGGTEKLVF

SEQ ID NO: 413936 - protein, 18 aa, Homo sapiens
  CDR3 for beta chain variable domain of TCR clone 206968 (TRBV5-5, TRBJ1-5)
CASSLRQVKGSSNQPQHF

SEQ ID NO: 413937 - protein, 14 aa, Homo sapiens
  CDR3 for alpha chain variable domain of TCR clone 206969 (TRAV36/DV7, TRAJ44)
CCGANTGTASKLTF

SEQ ID NO: 413938 - protein, 13 aa, Homo sapiens
  CDR3 for beta chain variable domain of TCR clone 206969 (TRBV19, TRBJ2-5)
CASSIPYGETQYF

SEQ ID NO: 413939 - protein, 14 aa, Homo sapiens
  CDR3 for alpha chain variable domain of TCR clone 206970 (TRAV13-1, TRAJ24)
CAASPADSWGKFQF

SEQ ID NO: 413940 - protein, 19 aa, Homo sapiens
  CDR3 for beta chain variable domain of TCR clone 206970 (TRBV7-3, TRBJ1-2)
CASSFPQGNDGELWLDLRF

SEQ ID NO: 413941 - protein, 14 aa, Homo sapiens
  CDR3 for alpha chain variable domain of TCR clone 206971 (TRAV26-1, TRAJ31)
CIALPPNNNARLMF

SEQ ID NO: 413942 - protein, 16 aa, Homo sapiens
  CDR3 for beta chain variable domain of TCR clone 206971 (TRBV10-2, TRBJ2-7)
CASSGSPGSSGFEQYF

SEQ ID NO: 413943 - protein, 16 aa, Homo sapiens
  CDR3 for alpha chain variable domain of TCR clone 206972 (TRAV12-2, TRAJ10)
CAVNRVLTGVGTKLTF

SEQ ID NO: 413944 - protein, 16 aa, Homo sapiens
  CDR3 for beta chain variable domain of TCR clone 206972 (TRBV12-5, TRBJ2-5)
CASGPRTSGNQETQYF

SEQ ID NO: 413945 - protein, 18 aa, Homo sapiens
  CDR3 for alpha chain variable domain of TCR clone 206973 (TRAV21, TRAJ52)
CAVRPSPAGGTSYGKLTF

SEQ ID NO: 413946 - protein, 13 aa, Homo sapiens
  CDR3 for beta chain variable domain of TCR clone 206973 (TRBV29-1, TRBJ2-1)
FSVEGGRVNEQFF

SEQ ID NO: 413947 - protein, 14 aa, Homo sapiens
  CDR3 for alpha chain variable domain of TCR clone 206974 (TRAV12-1, TRAJ17)
CVVNYKAAGNKLTF

SEQ ID NO: 413948 - protein, 14 aa, Homo sapiens
  CDR3 for beta chain variable domain of TCR clone 206974 (TRBV19, TRBJ2-1)
CASSRLASINEQFF

SEQ ID NO: 413949 - protein, 18 aa, Homo sapiens
  CDR3 for alpha chain variable domain of TCR clone 206975 (TRAV3, TRAJ17)
CAVRARRGGRSCREQANF

SEQ ID NO: 413950 - protein, 14 aa, Homo sapiens
  CDR3 for beta chain variable domain of TCR clone 206975 (TRBV4-1, TRBJ2-2)
CASSQAVNTGELFF

SEQ ID NO: 413951 - protein, 13 aa, Homo sapiens
  CDR3 for alpha chain variable domain of TCR clone 206976 (TRAV3, TRAJ21)
CAVREPDFNKFYF

SEQ ID NO: 413952 - protein, 15 aa, Homo sapiens
  CDR3 for beta chain variable domain of TCR clone 206976 (TRBV5-1, TRBJ1-5)
CASSLGTVSNQPQHF

SEQ ID NO: 413953 - protein, 14 aa, Homo sapiens
  CDR3 for alpha chain variable domain of TCR clone 206977 (TRAV12-3, TRAJ9)
CAMSVETGGFQTIF

SEQ ID NO: 413954 - protein, 14 aa, Homo sapiens
  CDR3 for beta chain variable domain of TCR clone 206977 (TRBV7-2, TRBJ2-7)
CASRSQGAAYEQYF

SEQ ID NO: 413955 - protein, 12 aa, Homo sapiens
  CDR3 for alpha chain variable domain of TCR clone 206978 (TRAV13-1, TRAJ20)
SVQQVNDYKLSF

SEQ ID NO: 413956 - protein, 13 aa, Homo sapiens
  CDR3 for beta chain variable domain of TCR clone 206978 (TRBV7-6, TRBJ2-3)
CQQLNRGTDTQYF

SEQ ID NO: 413957 - protein, 12 aa, Homo sapiens
  CDR3 for alpha chain variable domain of TCR clone 206979 (TRAV20, TRAJ33)
CAVRGSNYQLIW

SEQ ID NO: 413958 - protein, 15 aa, Homo sapiens
  CDR3 for beta chain variable domain of TCR clone 206979 (TRBV11-3, TRBJ2-3)
CASLKDGREGDKQYF

SEQ ID NO: 413959 - protein, 16 aa, Homo sapiens
  CDR3 for alpha chain variable domain of TCR clone 206980 (TRAV3, TRAJ27)
CAVRDPQGTNAGKSTF

SEQ ID NO: 413960 - protein, 17 aa, Homo sapiens
  CDR3 for beta chain variable domain of TCR clone 206980 (TRBV4-1, TRBJ2-7)
CAGSQGRGLQTSYEQYF

SEQ ID NO: 413961 - protein, 14 aa, Homo sapiens
  CDR3 for alpha chain variable domain of TCR clone 206981 (TRAV3, TRAJ6)
CAVRDWGGSYIPIF

SEQ ID NO: 413962 - protein, 15 aa, Homo sapiens
  CDR3 for beta chain variable domain of TCR clone 206981 (TRBV5-1, TRBJ2-1)
CASSPPRAPYNEQFF

SEQ ID NO: 413963 - protein, 21 aa, Homo sapiens
  CDR3 for alpha chain variable domain of TCR clone 206982 (TRAV1-1, TRAJ6)
CLLLLRCERLERTGGSYIPTF

SEQ ID NO: 413964 - protein, 22 aa, Homo sapiens
  CDR3 for beta chain variable domain of TCR clone 206982 (TRBV7-2, TRBJ2-5)
RRTRPCISGPAACQGGGETQYF

SEQ ID NO: 413965 - protein, 17 aa, Homo sapiens
  CDR3 for alpha chain variable domain of TCR clone 206983 (TRAV3, TRAJ6)
CAVRDGPRAGGSYIPTF

SEQ ID NO: 413966 - protein, 14 aa, Homo sapiens
  CDR3 for beta chain variable domain of TCR clone 206983 (TRBV7-2, TRBJ2-7)
CASSPKTRLYEQYF

SEQ ID NO: 413967 - protein, 13 aa, Homo sapiens
  CDR3 for alpha chain variable domain of TCR clone 206984 (TRAV3, TRAJ21)
CAVREPDFNKFYL

SEQ ID NO: 413968 - protein, 15 aa, Homo sapiens
  CDR3 for beta chain variable domain of TCR clone 206984 (TRBV4-3, TRBJ2-2)
CASSQGQGGTGELFF

SEQ ID NO: 413969 - protein, 15 aa, Homo sapiens
  CDR3 for alpha chain variable domain of TCR clone 206985 (TRAV21, TRAJ53)
CATLNSGGSNYKLTF

SEQ ID NO: 413970 - protein, 16 aa, Homo sapiens
  CDR3 for beta chain variable domain of TCR clone 206985 (TRBV9, TRBJ2-1)
CASSVGGGGNYNEQFC

SEQ ID NO: 413971 - protein, 14 aa, Homo sapiens
  CDR3 for alpha chain variable domain of TCR clone 206986 (TRAV16, TRAJ33)
CALSAMDSNYQLIW

SEQ ID NO: 413972 - protein, 14 aa, Homo sapiens
  CDR3 for beta chain variable domain of TCR clone 206986 (TRBV7-3, TRBJ2-2)
CASSSGGYTGELFF

SEQ ID NO: 413973 - protein, 14 aa, Homo sapiens
  CDR3 for alpha chain variable domain of TCR clone 206987 (TRAV12-2, TRAJ11)
CAVEGGSGYSTLTF

SEQ ID NO: 413974 - protein, 14 aa, Homo sapiens
  CDR3 for beta chain variable domain of TCR clone 206987 (TRBV7-2, TRBJ2-7)
CASRSQGAAYEQYF

SEQ ID NO: 413975 - protein, 12 aa, Homo sapiens
  CDR3 for alpha chain variable domain of TCR clone 206988 (TRAV12-1, TRAJ34)
CVVAGATDKLIF

SEQ ID NO: 413976 - protein, 16 aa, Homo sapiens
  CDR3 for beta chain variable domain of TCR clone 206988 (TRBV7-2, TRBJ1-2)
CASSSNQDRRGHGYIF

SEQ ID NO: 413977 - protein, 13 aa, Homo sapiens
  CDR3 for alpha chain variable domain of TCR clone 206989 (TRAV20, TRAJ31)
CAVQAIGGARLMF

SEQ ID NO: 413978 - protein, 14 aa, Homo sapiens
  CDR3 for beta chain variable domain of TCR clone 206989 (TRBV2, TRBJ1-5)
CASSGTVSKQPQHF

SEQ ID NO: 413979 - protein, 13 aa, Homo sapiens
  CDR3 for alpha chain variable domain of TCR clone 206990 (TRAV38-1, TRAJ43)
CAFMKGNNNDMRF

SEQ ID NO: 413980 - protein, 14 aa, Homo sapiens
  CDR3 for beta chain variable domain of TCR clone 206990 (TRBV25-1, TRBJ1-1)
CASTHLGGNTEAFF

SEQ ID NO: 413981 - protein, 14 aa, Homo sapiens
  CDR3 for alpha chain variable domain of TCR clone 206991 (TRAV2, TRAJ23)
CAVEDINQGGKLIF

SEQ ID NO: 413982 - protein, 15 aa, Homo sapiens
  CDR3 for beta chain variable domain of TCR clone 206991 (TRBV7-9, TRBJ2-1)
CASSPRGTRDNEQFF

SEQ ID NO: 413983 - protein, 12 aa, Homo sapiens
  CDR3 for alpha chain variable domain of TCR clone 206992 (TRAV35, TRAJ30)
CAGLNRDDKIIF

SEQ ID NO: 413984 - protein, 15 aa, Homo sapiens
  CDR3 for beta chain variable domain of TCR clone 206992 (TRBV9, TRBJ1-6)
CASSVTGTGDSPLHF

SEQ ID NO: 413985 - protein, 14 aa, Homo sapiens
  CDR3 for alpha chain variable domain of TCR clone 206993 (TRAV8-3, TRAJ47)
CAVGGREYGNKLVF

SEQ ID NO: 413986 - protein, 14 aa, Homo sapiens
  CDR3 for beta chain variable domain of TCR clone 206993 (TRBV6-6, TRBJ1-2)
CASSYSDRSYGYTF

SEQ ID NO: 413987 - protein, 18 aa, Homo sapiens
  CDR3 for alpha chain variable domain of TCR clone 206994 (TRAV13-1, TRAJ52)
CAASKRSAGGTSYGKLAF

SEQ ID NO: 413988 - protein, 15 aa, Homo sapiens
  CDR3 for beta chain variable domain of TCR clone 206994 (TRBV6-3, TRBJ2-7)
CASSSPGTVFYEQYF

SEQ ID NO: 413989 - protein, 13 aa, Homo sapiens
  CDR3 for alpha chain variable domain of TCR clone 206995 (TRAV12-2, TRAJ48)
CAVNNFGNEKLTF

SEQ ID NO: 413990 - protein, 14 aa, Homo sapiens
  CDR3 for beta chain variable domain of TCR clone 206995 (TRBV12-4, TRBJ2-5)
CASSLWQKQETQYF

SEQ ID NO: 413991 - protein, 16 aa, Homo sapiens
  CDR3 for alpha chain variable domain of TCR clone 206996 (TRAV30, TRAJ24)
CGTEIVDADSWVKFKF

SEQ ID NO: 413992 - protein, 14 aa, Homo sapiens
  CDR3 for beta chain variable domain of TCR clone 206996 (TRBV12-5, TRBJ2-5)
CASGSRTHQETQYF

SEQ ID NO: 413993 - protein, 12 aa, Homo sapiens
  CDR3 for alpha chain variable domain of TCR clone 206997 (TRAV8-4, TRAJ31)
CAVSDSNARLMF

SEQ ID NO: 413994 - protein, 18 aa, Homo sapiens
  CDR3 for beta chain variable domain of TCR clone 206997 (TRBV11-3, TRBJ2-3)
CASSLGGASRGAPNTQYF

SEQ ID NO: 413995 - protein, 15 aa, Homo sapiens
  CDR3 for alpha chain variable domain of TCR clone 206998 (TRAV9-2, TRAJ8)
CALRGLNTGFQKLVF

SEQ ID NO: 413996 - protein, 14 aa, Homo sapiens
  CDR3 for beta chain variable domain of TCR clone 206998 (TRBV28, TRBJ2-7)
CASSLLRISYEQYF

SEQ ID NO: 413997 - protein, 13 aa, Homo sapiens
  CDR3 for alpha chain variable domain of TCR clone 206999 (TRAV12-2, TRAJ12)
CAGPEDSRYKLIF

SEQ ID NO: 413998 - protein, 13 aa, Homo sapiens
  CDR3 for beta chain variable domain of TCR clone 206999 (TRBV28, TRBJ2-1)
CASSLIGRDEQFF

SEQ ID NO: 413999 - protein, 15 aa, Homo sapiens
  CDR3 for alpha chain variable domain of TCR clone 207000 (TRAV26-1, TRAJ17)
CIVRVVKAAGNKLTF

SEQ ID NO: 414000 - protein, 11 aa, Homo sapiens
  CDR3 for beta chain variable domain of TCR clone 207000 (TRBV29-1, TRBJ2-5)
CSEDRTGTQYF

SEQ ID NO: 414001 - protein, 11 aa, Homo sapiens
  CDR3 for alpha chain variable domain of TCR clone 207001 (TRAV12-1, TRAJ8)
CVVTGFQKLVF

SEQ ID NO: 414002 - protein, 15 aa, Homo sapiens
  CDR3 for beta chain variable domain of TCR clone 207001 (TRBV6-3, TRBJ2-7)
CASSSPGTVFYEQYF

SEQ ID NO: 414003 - protein, 12 aa, Homo sapiens
  CDR3 for alpha chain variable domain of TCR clone 207002 (TRAV13-1, TRAJ48)
CAAKFGNEKLTF

SEQ ID NO: 414004 - protein, 11 aa, Homo sapiens
  CDR3 for beta chain variable domain of TCR clone 207002 (TRBV20-1, TRBJ1-5)
CSAQGGQPQHF

SEQ ID NO: 414005 - protein, 14 aa, Homo sapiens
  CDR3 for alpha chain variable domain of TCR clone 207003 (TRAV23/DV6, TRAJ37)
CAASTSSNTCKLIF

SEQ ID NO: 414006 - protein, 13 aa, Homo sapiens
  CDR3 for beta chain variable domain of TCR clone 207003 (TRBV7-7, TRBJ1-1)
CASSLGANTEAFF

SEQ ID NO: 414007 - protein, 16 aa, Homo sapiens
  CDR3 for alpha chain variable domain of TCR clone 207004 (TRAV12-3, TRAJ53)
CAMSPGSGGSTYKLTF

SEQ ID NO: 414008 - protein, 13 aa, Homo sapiens
  CDR3 for beta chain variable domain of TCR clone 207004 (TRBV7-2, TRBJ2-5)
CASSQTSVETQYF

SEQ ID NO: 414009 - protein, 19 aa, Homo sapiens
  CDR3 for alpha chain variable domain of TCR clone 207005 (TRAV26-1, TRAJ52)
CIVRTHRNAGGTSYGKLTF

SEQ ID NO: 414010 - protein, 15 aa, Homo sapiens
  CDR3 for beta chain variable domain of TCR clone 207005 (TRBV12-4, TRBJ2-5)
CASSPPTGLQETQYF

SEQ ID NO: 414011 - protein, 13 aa, Homo sapiens
  CDR3 for alpha chain variable domain of TCR clone 207006 (TRAV12-3, TRAJ33)
CAMSVNSNYQLIW

SEQ ID NO: 414012 - protein, 13 aa, Homo sapiens
  CDR3 for beta chain variable domain of TCR clone 207006 (TRBV7-2, TRBJ2-2)
CAISLAVTGELFF

SEQ ID NO: 414013 - protein, 13 aa, Homo sapiens
  CDR3 for alpha chain variable domain of TCR clone 207007 (TRAV3, TRAJ20)
CAVRDTPRYKLSF

SEQ ID NO: 414014 - protein, 14 aa, Homo sapiens
  CDR3 for beta chain variable domain of TCR clone 207007 (TRBV11-1, TRBJ2-7)
CASTFAVPSYEQHF

SEQ ID NO: 414015 - protein, 15 aa, Homo sapiens
  CDR3 for alpha chain variable domain of TCR clone 207008 (TRAV3, TRAJ22)
CAVRDRGGSARQLTF

SEQ ID NO: 414016 - protein, 16 aa, Homo sapiens
  CDR3 for beta chain variable domain of TCR clone 207008 (TRBV25-1, TRBJ1-1)
CASSGDRDRGRIEAFF

SEQ ID NO: 414017 - protein, 15 aa, Homo sapiens
  CDR3 for alpha chain variable domain of TCR clone 207009 (TRAV14/DV4, TRAJ10)
CAMREITGGGNKLTF

SEQ ID NO: 414018 - protein, 17 aa, Homo sapiens
  CDR3 for beta chain variable domain of TCR clone 207009 (TRBV15, TRBJ1-2)
CATSGREIDVVNYGYAF

SEQ ID NO: 414019 - protein, 11 aa, Homo sapiens
  CDR3 for alpha chain variable domain of TCR clone 207010 (TRAV2, TRAJ33)
CAVASNYQLIW

SEQ ID NO: 414020 - protein, 13 aa, Homo sapiens
  CDR3 for beta chain variable domain of TCR clone 207010 (TRBV27, TRBJ1-4)
CASSLMGDEKLFF

SEQ ID NO: 414021 - protein, 15 aa, Homo sapiens
  CDR3 for alpha chain variable domain of TCR clone 207011 (TRAV8-3, TRAJ45)
CASSYSGGGADGLTF

SEQ ID NO: 414022 - protein, 15 aa, Homo sapiens
  CDR3 for beta chain variable domain of TCR clone 207011 (TRBV27, TRBJ2-1)
CASSNGGGSYNEQFF

SEQ ID NO: 414023 - protein, 13 aa, Homo sapiens
  CDR3 for alpha chain variable domain of TCR clone 207012 (TRAV2, TRAJ15)
CAVASQAGTALIF

SEQ ID NO: 414024 - protein, 17 aa, Homo sapiens
  CDR3 for beta chain variable domain of TCR clone 207012 (TRBV20-1, TRBJ2-1)
CSARDRRRASSYNEQFF

SEQ ID NO: 414025 - protein, 16 aa, Homo sapiens
  CDR3 for alpha chain variable domain of TCR clone 207013 (TRAV17, TRAJ52)
CATSNAGGTSYRKLTF

SEQ ID NO: 414026 - protein, 13 aa, Homo sapiens
  CDR3 for beta chain variable domain of TCR clone 207013 (TRBV27, TRBJ1-6)
CASSLVLVSPLHF

SEQ ID NO: 414027 - protein, 16 aa, Homo sapiens
  CDR3 for alpha chain variable domain of TCR clone 207014 (TRAV30, TRAJ24)
CGTEIVDADSWGKFLF

SEQ ID NO: 414028 - protein, 14 aa, Homo sapiens
  CDR3 for beta chain variable domain of TCR clone 207014 (TRBV12-5, TRBJ2-5)
CASGSRTHQKTQYF

SEQ ID NO: 414029 - protein, 16 aa, Homo sapiens
  CDR3 for alpha chain variable domain of TCR clone 207015 (TRAV4, TRAJ22)
FLVGDLYSGSARQLTF

SEQ ID NO: 414030 - protein, 16 aa, Homo sapiens
  CDR3 for beta chain variable domain of TCR clone 207015 (TRBV7-9, TRBJ2-1)
CASSHVAGGSYNEQFF

SEQ ID NO: 414031 - protein, 14 aa, Homo sapiens
  CDR3 for alpha chain variable domain of TCR clone 207016 (TRAV17, TRAJ16)
CDTADFSDGQKLLF

SEQ ID NO: 414032 - protein, 15 aa, Homo sapiens
  CDR3 for beta chain variable domain of TCR clone 207016 (TRBV18, TRBJ2-1)
CASSPPSASYNEQFF

SEQ ID NO: 414033 - protein, 16 aa, Homo sapiens
  CDR3 for alpha chain variable domain of TCR clone 207017 (TRAV17, TRAJ52)
CATGIIGGTSYGKLTF

SEQ ID NO: 414034 - protein, 14 aa, Homo sapiens
  CDR3 for beta chain variable domain of TCR clone 207017 (TRBV7-3, TRBJ2-2)
CASSSGGYTGELFS

SEQ ID NO: 414035 - protein, 11 aa, Homo sapiens
  CDR3 for alpha chain variable domain of TCR clone 207018 (TRAV2, TRAJ13)
CASGGYQKVTF

SEQ ID NO: 414036 - protein, 15 aa, Homo sapiens
  CDR3 for beta chain variable domain of TCR clone 207018 (TRBV19, TRBJ2-1)
CASSINREPSHEQFF

SEQ ID NO: 414037 - protein, 11 aa, Homo sapiens
  CDR3 for alpha chain variable domain of TCR clone 207019 (TRAV8-3, TRAJ15)
CAVGPGTAMIF

SEQ ID NO: 414038 - protein, 15 aa, Homo sapiens
  CDR3 for beta chain variable domain of TCR clone 207019 (TRBV7-9, TRBJ2-7)
CASSLALAEAYEQYF

SEQ ID NO: 414039 - protein, 15 aa, Homo sapiens
  CDR3 for alpha chain variable domain of TCR clone 207020 (TRAV21, TRAJ57)
CAVIITQGGSEKLVF

SEQ ID NO: 414040 - protein, 14 aa, Homo sapiens
  CDR3 for beta chain variable domain of TCR clone 207020 (TRBV5-1, TRBJ2-2)
CAGSLIWIPGELFF

SEQ ID NO: 414041 - protein, 17 aa, Homo sapiens
  CDR3 for alpha chain variable domain of TCR clone 207021 (TRAV3, TRAJ6)
CAVRDVPRAGGSYIPTF

SEQ ID NO: 414042 - protein, 16 aa, Homo sapiens
  CDR3 for beta chain variable domain of TCR clone 207021 (TRBV7-9, TRBJ1-2)
CASSLGFSSGEDGYTF

SEQ ID NO: 414043 - protein, 14 aa, Homo sapiens
  CDR3 for alpha chain variable domain of TCR clone 207022 (TRAV12-3, TRAJ9)
CAMSPNTGGFKTIF

SEQ ID NO: 414044 - protein, 12 aa, Homo sapiens
  CDR3 for beta chain variable domain of TCR clone 207022 (TRBV16, TRBJ2-2)
CASSQSVGELFF

SEQ ID NO: 414045 - protein, 13 aa, Homo sapiens
  CDR3 for alpha chain variable domain of TCR clone 207023 (TRAV17, TRAJ9)
CATDYTGGFKTIF

SEQ ID NO: 414046 - protein, 16 aa, Homo sapiens
  CDR3 for beta chain variable domain of TCR clone 207023 (TRBV7-8, TRBJ2-4)
CASSAERTLAKNIQYF

SEQ ID NO: 414047 - protein, 15 aa, Homo sapiens
  CDR3 for alpha chain variable domain of TCR clone 207024 (TRAV21, TRAJ32)
CAVNSYGGATNKLIF

SEQ ID NO: 414048 - protein, 18 aa, Homo sapiens
  CDR3 for beta chain variable domain of TCR clone 207024 (TRBV7-9, TRBJ2-1)
RASSTGLAEGSSYNEQFF

SEQ ID NO: 414049 - protein, 14 aa, Homo sapiens
  CDR3 for alpha chain variable domain of TCR clone 207025 (TRAV8-2, TRAJ4)
CVVSPSGGYNKLVF

SEQ ID NO: 414050 - protein, 14 aa, Homo sapiens
  CDR3 for beta chain variable domain of TCR clone 207025 (TRBV10-3, TRBJ2-2)
CAISEVSHSGELFF

SEQ ID NO: 414051 - protein, 13 aa, Homo sapiens
  CDR3 for alpha chain variable domain of TCR clone 207026 (TRAV26-1, TRAJ33)
CIVRVEGNYQLIW

SEQ ID NO: 414052 - protein, 16 aa, Homo sapiens
  CDR3 for beta chain variable domain of TCR clone 207026 (TRBV15, TRBJ2-7)
CATSRDRVRRRGEQYF

SEQ ID NO: 414053 - protein, 13 aa, Homo sapiens
  CDR3 for alpha chain variable domain of TCR clone 207027 (TRAV13-1, TRAJ21)
CAASIYNFNKFYF

SEQ ID NO: 414054 - protein, 15 aa, Homo sapiens
  CDR3 for beta chain variable domain of TCR clone 207027 (TRBV5-1, TRBJ2-7)
CASSLDLTSSYEQYF

SEQ ID NO: 414055 - protein, 13 aa, Homo sapiens
  CDR3 for alpha chain variable domain of TCR clone 207028 (TRAV1-2, TRAJ12)
CAVSMDSSYKLIF

SEQ ID NO: 414056 - protein, 14 aa, Homo sapiens
  CDR3 for beta chain variable domain of TCR clone 207028 (TRBV4-1, TRBJ2-2)
CASSQAVNTGELFF

SEQ ID NO: 414057 - protein, 15 aa, Homo sapiens
  CDR3 for alpha chain variable domain of TCR clone 207029 (TRAV26-1, TRAJ22)
CIVRVSFWFCKATDL

SEQ ID NO: 414058 - protein, 14 aa, Homo sapiens
  CDR3 for beta chain variable domain of TCR clone 207029 (TRBV20-1, TRBJ1-1)
CSAQTRIGGTEAFF

SEQ ID NO: 414059 - protein, 13 aa, Homo sapiens
  CDR3 for alpha chain variable domain of TCR clone 207030 (TRAV21, TRAJ27)
CAARPGNAGKATF

SEQ ID NO: 414060 - protein, 13 aa, Homo sapiens
  CDR3 for beta chain variable domain of TCR clone 207030 (TRBV20-1, TRBJ1-1)
CSARGGGNTEAFF

SEQ ID NO: 414061 - protein, 14 aa, Homo sapiens
  CDR3 for alpha chain variable domain of TCR clone 207031 (TRAV12-1, TRAJ40)
CVVNRDSGTYKYIF

SEQ ID NO: 414062 - protein, 15 aa, Homo sapiens
  CDR3 for beta chain variable domain of TCR clone 207031 (TRBV18, TRBJ2-5)
CASTDRGPRQETQYF

SEQ ID NO: 414063 - protein, 13 aa, Homo sapiens
  CDR3 for alpha chain variable domain of TCR clone 207032 (TRAV8-1, TRAJ23)
CAVTGGQGGKLIF

SEQ ID NO: 414064 - protein, 14 aa, Homo sapiens
  CDR3 for beta chain variable domain of TCR clone 207032 (TRBV19, TRBJ2-1)
CASPTFVLSGEQFF

SEQ ID NO: 414065 - protein, 12 aa, Homo sapiens
  CDR3 for alpha chain variable domain of TCR clone 207033 (TRAV25, TRAJ54)
CAGPKGAQKLVF

SEQ ID NO: 414066 - protein, 13 aa, Homo sapiens
  CDR3 for beta chain variable domain of TCR clone 207033 (TRBV2, TRBJ2-1)
CATSRGTDNEQFF

SEQ ID NO: 414067 - protein, 12 aa, Homo sapiens
  CDR3 for alpha chain variable domain of TCR clone 207034 (TRAV8-3, TRAJ43)
CAVGAGNNDMRF

SEQ ID NO: 414068 - protein, 18 aa, Homo sapiens
  CDR3 for beta chain variable domain of TCR clone 207034 (TRBV20-1, TRBJ2-6)
CSAETTPTHGSGANVLTF

SEQ ID NO: 414069 - protein, 14 aa, Homo sapiens
  CDR3 for alpha chain variable domain of TCR clone 207035 (TRAV29/DV5, TRAJ48)
CAAMALFGNEKLTF

SEQ ID NO: 414070 - protein, 14 aa, Homo sapiens
  CDR3 for beta chain variable domain of TCR clone 207035 (TRBV11-2, TRBJ2-7)
CASSLGAGAYEQYF

SEQ ID NO: 414071 - protein, 13 aa, Homo sapiens
  CDR3 for alpha chain variable domain of TCR clone 207036 (TRAV21, TRAJ27)
CAARPGNAGKSTF

SEQ ID NO: 414072 - protein, 17 aa, Homo sapiens
  CDR3 for beta chain variable domain of TCR clone 207036 (TRBV4-2, TRBJ1-1)
CASTQFGGGSGNTEAFF

SEQ ID NO: 414073 - protein, 10 aa, Homo sapiens
  CDR3 for alpha chain variable domain of TCR clone 207037 (TRAV12-3, TRAJ34)
CAMSADKLIF

SEQ ID NO: 414074 - protein, 15 aa, Homo sapiens
  CDR3 for beta chain variable domain of TCR clone 207037 (TRBV20-1, TRBJ2-3)
CSARRGEAVTDTQYF

SEQ ID NO: 414075 - protein, 13 aa, Homo sapiens
  CDR3 for alpha chain variable domain of TCR clone 207038 (TRAV12-1, TRAJ43)
CVVSHHNNNGMRF

SEQ ID NO: 414076 - protein, 14 aa, Homo sapiens
  CDR3 for beta chain variable domain of TCR clone 207038 (TRBV5-5, TRBJ2-2)
CASSLLGDTGELFF

SEQ ID NO: 414077 - protein, 13 aa, Homo sapiens
  CDR3 for alpha chain variable domain of TCR clone 207039 (TRAV8-3, TRAJ28)
CAVGAVRSYQLTL

SEQ ID NO: 414078 - protein, 14 aa, Homo sapiens
  CDR3 for beta chain variable domain of TCR clone 207039 (TRBV25-1, TRBJ1-1)
CASTRLGGNTEAFF

SEQ ID NO: 414079 - protein, 14 aa, Homo sapiens
  CDR3 for alpha chain variable domain of TCR clone 207040 (TRAV12-2, TRAJ9)
CAVNLNTGGFKTIF

SEQ ID NO: 414080 - protein, 13 aa, Homo sapiens
  CDR3 for beta chain variable domain of TCR clone 207040 (TRBV25-1, TRBJ2-5)
CASIESGRETQYF

SEQ ID NO: 414081 - protein, 15 aa, Homo sapiens
  CDR3 for alpha chain variable domain of TCR clone 207041 (TRAV17, TRAJ4)
CATGTWSGGYNKLIF

SEQ ID NO: 414082 - protein, 15 aa, Homo sapiens
  CDR3 for beta chain variable domain of TCR clone 207041 (TRBV4-1, TRBJ2-1)
CASSQDAGGLYEQFF

SEQ ID NO: 414083 - protein, 15 aa, Homo sapiens
  CDR3 for alpha chain variable domain of TCR clone 207042 (TRAV26-1, TRAJ44)
CIVRANTGTASKLTF

SEQ ID NO: 414084 - protein, 16 aa, Homo sapiens
  CDR3 for beta chain variable domain of TCR clone 207042 (TRBV7-7, TRBJ2-1)
CASSLASGTSYTEQFF

SEQ ID NO: 414085 - protein, 14 aa, Homo sapiens
  CDR3 for alpha chain variable domain of TCR clone 207043 (TRAV1-2, TRAJ16)
CAVNRFSDGQKLLF

SEQ ID NO: 414086 - protein, 14 aa, Homo sapiens
  CDR3 for beta chain variable domain of TCR clone 207043 (TRBV19, TRBJ1-2)
CASSIGAGSYGYTF

SEQ ID NO: 414087 - protein, 15 aa, Homo sapiens
  CDR3 for alpha chain variable domain of TCR clone 207044 (TRAV1-2, TRAJ28)
CAVQYSGAGSYQLTF

SEQ ID NO: 414088 - protein, 13 aa, Homo sapiens
  CDR3 for beta chain variable domain of TCR clone 207044 (TRBV4-2, TRBJ1-1)
CASSQAGNTEAFC

SEQ ID NO: 414089 - protein, 14 aa, Homo sapiens
  CDR3 for alpha chain variable domain of TCR clone 207045 (TRAV35, TRAJ33)
CAGSSQDSNYQLIW

SEQ ID NO: 414090 - protein, 15 aa, Homo sapiens
  CDR3 for beta chain variable domain of TCR clone 207045 (TRBV20-1, TRBJ2-7)
CSAESWTSGAYEQYF

SEQ ID NO: 414091 - protein, 15 aa, Homo sapiens
  CDR3 for alpha chain variable domain of TCR clone 207046 (TRAV23/DV6, TRAJ37)
CAAGEGSSNTGKLIF

SEQ ID NO: 414092 - protein, 17 aa, Homo sapiens
  CDR3 for beta chain variable domain of TCR clone 207046 (TRBV20-1, TRBJ2-7)
CSATRAGGVAGVDEQYF

SEQ ID NO: 414093 - protein, 11 aa, Homo sapiens
  CDR3 for alpha chain variable domain of TCR clone 207047 (TRAV17, TRAJ49)
RATDAGNQFYF

SEQ ID NO: 414094 - protein, 15 aa, Homo sapiens
  CDR3 for beta chain variable domain of TCR clone 207047 (TRBV9, TRBJ1-6)
CASSVTGTGDSPLHF

SEQ ID NO: 414095 - protein, 14 aa, Homo sapiens
  CDR3 for alpha chain variable domain of TCR clone 207048 (TRAV1-2, TRAJ16)
CAVNRFSDGQKLLF

SEQ ID NO: 414096 - protein, 12 aa, Homo sapiens
  CDR3 for beta chain variable domain of TCR clone 207048 (TRBV7-3, TRBJ1-1)
CQSQDWGAEAFF

SEQ ID NO: 414097 - protein, 16 aa, Homo sapiens
  CDR3 for alpha chain variable domain of TCR clone 207049 (TRAV38-1, TRAJ45)
SAFMKGSGGGADGLTF

SEQ ID NO: 414098 - protein, 15 aa, Homo sapiens
  CDR3 for beta chain variable domain of TCR clone 207049 (TRBV20-1, TRBJ2-7)
CSAREGRDSLYEQYF

SEQ ID NO: 414099 - protein, 15 aa, Homo sapiens
  CDR3 for alpha chain variable domain of TCR clone 207050 (TRAV26-1, TRAJ48)
CIVRVGDFGDEKLNF

SEQ ID NO: 414100 - protein, 16 aa, Homo sapiens
  CDR3 for beta chain variable domain of TCR clone 207050 (TRBV4-1, TRBJ2-3)
CASSQRAGGLTDTQYF

SEQ ID NO: 414101 - protein, 14 aa, Homo sapiens
  CDR3 for alpha chain variable domain of TCR clone 207051 (TRAV20, TRAJ56)
CAVQFGGSNSKLTF

SEQ ID NO: 414102 - protein, 14 aa, Homo sapiens
  CDR3 for beta chain variable domain of TCR clone 207051 (TRBV20-1, TRBJ2-7)
CSAKRGRSSYGQYF

SEQ ID NO: 414103 - protein, 14 aa, Homo sapiens
  CDR3 for alpha chain variable domain of TCR clone 207052 (TRAV17, TRAJ35)
CATDRPGFGNVLYC

SEQ ID NO: 414104 - protein, 19 aa, Homo sapiens
  CDR3 for beta chain variable domain of TCR clone 207052 (TRBV11-3, TRBJ2-2)
CASSTRPGAKTTNTGELFF

SEQ ID NO: 414105 - protein, 14 aa, Homo sapiens
  CDR3 for alpha chain variable domain of TCR clone 207053 (TRAV1-2, TRAJ13)
CAVKHSAGYQKVTF

SEQ ID NO: 414106 - protein, 12 aa, Homo sapiens
  CDR3 for beta chain variable domain of TCR clone 207053 (TRBV7-3, TRBJ2-5)
CASSSPGGTQYF

SEQ ID NO: 414107 - protein, 18 aa, Homo sapiens
  CDR3 for alpha chain variable domain of TCR clone 207054 (TRAV26-2, TRAJ33)
CCVLLHPEEPASNYQLIW

SEQ ID NO: 414108 - protein, 15 aa, Homo sapiens
  CDR3 for beta chain variable domain of TCR clone 207054 (TRBV11-2, TRBJ1-6)
CASTLRGTGNSPLYF

SEQ ID NO: 414109 - protein, 14 aa, Homo sapiens
  CDR3 for alpha chain variable domain of TCR clone 207055 (TRAV1-2, TRAJ8)
CAVREETGFQKLVF

SEQ ID NO: 414110 - protein, 13 aa, Homo sapiens
  CDR3 for beta chain variable domain of TCR clone 207055 (TRBV27, TRBJ1-1)
CASSLSIGAEAFF

SEQ ID NO: 414111 - protein, 14 aa, Homo sapiens
  CDR3 for alpha chain variable domain of TCR clone 207056 (TRAV23/DV6, TRAJ17)
CSASVQAAGNKLTF

SEQ ID NO: 414112 - protein, 18 aa, Homo sapiens
  CDR3 for beta chain variable domain of TCR clone 207056 (TRBV20-1, TRBJ2-7)
CSAGLPPRSGGSPYEQYF

SEQ ID NO: 414113 - protein, 15 aa, Homo sapiens
  CDR3 for alpha chain variable domain of TCR clone 207057 (TRAV21, TRAJ53)
CATLNRGGSNYKLTF

SEQ ID NO: 414114 - protein, 13 aa, Homo sapiens
  CDR3 for beta chain variable domain of TCR clone 207057 (TRBV12-4, TRBJ2-7)
CASSFVPTAEQYF

SEQ ID NO: 414115 - protein, 16 aa, Homo sapiens
  CDR3 for alpha chain variable domain of TCR clone 207058 (TRAV14/DV4, TRAJ20)
CAMREGRSRDDYKLSF

SEQ ID NO: 414116 - protein, 15 aa, Homo sapiens
  CDR3 for beta chain variable domain of TCR clone 207058 (TRBV2, TRBJ2-5)
CASSEQGLIGETQYF

SEQ ID NO: 414117 - protein, 14 aa, Homo sapiens
  CDR3 for alpha chain variable domain of TCR clone 207059 (TRAV12-2, TRAJ13)
CAVKKAGGYQKVTF

SEQ ID NO: 414118 - protein, 15 aa, Homo sapiens
  CDR3 for beta chain variable domain of TCR clone 207059 (TRBV27, TRBJ2-1)
CASSNGGGSSNGQFF

SEQ ID NO: 414119 - protein, 16 aa, Homo sapiens
  CDR3 for alpha chain variable domain of TCR clone 207060 (TRAV26-1, TRAJ23)
CIVRVHPYNQGGKLIF

SEQ ID NO: 414120 - protein, 12 aa, Homo sapiens
  CDR3 for beta chain variable domain of TCR clone 207060 (TRBV11-2, TRBJ2-2)
CASSLGGGELFF

SEQ ID NO: 414121 - protein, 15 aa, Homo sapiens
  CDR3 for alpha chain variable domain of TCR clone 207061 (TRAV12-3, TRAJ4)
CAMSAGAEGYNKLIF

SEQ ID NO: 414122 - protein, 15 aa, Homo sapiens
  CDR3 for beta chain variable domain of TCR clone 207061 (TRBV7-9, TRBJ1-6)
CASSSPGRGNSPLHF

SEQ ID NO: 414123 - protein, 13 aa, Homo sapiens
  CDR3 for alpha chain variable domain of TCR clone 207062 (TRAV36/DV7, TRAJ37)
CAVFSSNTGKLIF

SEQ ID NO: 414124 - protein, 12 aa, Homo sapiens
  CDR3 for beta chain variable domain of TCR clone 207062 (TRBV11-2, TRBJ2-2)
CASSLGGEELFF

SEQ ID NO: 414125 - protein, 17 aa, Homo sapiens
  CDR3 for alpha chain variable domain of TCR clone 207063 (TRAV3, TRAJ22)
CAVRDPPLEGFCKATDL

SEQ ID NO: 414126 - protein, 14 aa, Homo sapiens
  CDR3 for beta chain variable domain of TCR clone 207063 (TRBV4-2, TRBJ1-4)
CASSQGATNEKLFF

SEQ ID NO: 414127 - protein, 14 aa, Homo sapiens
  CDR3 for alpha chain variable domain of TCR clone 207064 (TRAV1-2, TRAJ8)
CAAREDTGFQKLVF

SEQ ID NO: 414128 - protein, 16 aa, Homo sapiens
  CDR3 for beta chain variable domain of TCR clone 207064 (TRBV24-1, TRBJ2-3)
CATSDPGTGATDTQYF

SEQ ID NO: 414129 - protein, 14 aa, Homo sapiens
  CDR3 for alpha chain variable domain of TCR clone 207065 (TRAV1-2, TRAJ16)
CAVNRFSDGEKLLF

SEQ ID NO: 414130 - protein, 14 aa, Homo sapiens
  CDR3 for beta chain variable domain of TCR clone 207065 (TRBV18, TRBJ2-7)
CASSPRGGAYEQYF

SEQ ID NO: 414131 - protein, 16 aa, Homo sapiens
  CDR3 for alpha chain variable domain of TCR clone 207066 (TRAV30, TRAJ24)
CGTEIVDAGSWGKFQF

SEQ ID NO: 414132 - protein, 16 aa, Homo sapiens
  CDR3 for beta chain variable domain of TCR clone 207066 (TRBV20-1, TRBJ1-4)
CSAPGQGLLTNEKLFF

SEQ ID NO: 414133 - protein, 14 aa, Homo sapiens
  CDR3 for alpha chain variable domain of TCR clone 207067 (TRAV8-4, TRAJ39)
CAVSLNNAGNMLTF

SEQ ID NO: 414134 - protein, 16 aa, Homo sapiens
  CDR3 for beta chain variable domain of TCR clone 207067 (TRBV7-3, TRBJ2-1)
CASSKPLAGGYNEQFF

SEQ ID NO: 414135 - protein, 16 aa, Homo sapiens
  CDR3 for alpha chain variable domain of TCR clone 207068 (TRAV21, TRAJ37)
CAVRPRGSSNTGKLIF

SEQ ID NO: 414136 - protein, 13 aa, Homo sapiens
  CDR3 for beta chain variable domain of TCR clone 207068 (TRBV7-2, TRBJ2-1)
CASSLGQLNEQFF

SEQ ID NO: 414137 - protein, 12 aa, Homo sapiens
  CDR3 for alpha chain variable domain of TCR clone 207069 (TRAV13-2, TRAJ23)
CAERHRGGKLIF

SEQ ID NO: 414138 - protein, 13 aa, Homo sapiens
  CDR3 for beta chain variable domain of TCR clone 207069 (TRBV12-4, TRBJ1-2)
CAISLRQGKGYTF

SEQ ID NO: 414139 - protein, 11 aa, Homo sapiens
  CDR3 for alpha chain variable domain of TCR clone 207070 (TRAV27, TRAJ43)
CVRYNNNDMRF

SEQ ID NO: 414140 - protein, 17 aa, Homo sapiens
  CDR3 for beta chain variable domain of TCR clone 207070 (TRBV11-2, TRBJ2-1)
CASSLYPPGVEYNEQFF

SEQ ID NO: 414141 - protein, 11 aa, Homo sapiens
  CDR3 for alpha chain variable domain of TCR clone 207071 (TRAV3, TRAJ17)
PRGAAGNKLTF

SEQ ID NO: 414142 - protein, 15 aa, Homo sapiens
  CDR3 for beta chain variable domain of TCR clone 207071 (TRBV6-1, TRBJ2-1)
CASSELRGQYNEQFF

SEQ ID NO: 414143 - protein, 12 aa, Homo sapiens
  CDR3 for alpha chain variable domain of TCR clone 207072 (TRAV1-1, TRAJ30)
CAVRGRDDKIIF

SEQ ID NO: 414144 - protein, 15 aa, Homo sapiens
  CDR3 for beta chain variable domain of TCR clone 207072 (TRBV9, TRBJ2-1)
CASSLAGSSYNEQFF

SEQ ID NO: 414145 - protein, 14 aa, Homo sapiens
  CDR3 for alpha chain variable domain of TCR clone 207073 (TRAV29/DV5, TRAJ32)
CAAAYGGATNKLIF

SEQ ID NO: 414146 - protein, 15 aa, Homo sapiens
  CDR3 for beta chain variable domain of TCR clone 207073 (TRBV20-1, TRBJ2-7)
CSARDRVSGMDEQYF

SEQ ID NO: 414147 - protein, 13 aa, Homo sapiens
  CDR3 for alpha chain variable domain of TCR clone 207074 (TRAV1-2, TRAJ9)
CAALNTGGFKTIF

SEQ ID NO: 414148 - protein, 15 aa, Homo sapiens
  CDR3 for beta chain variable domain of TCR clone 207074 (TRBV11-2, TRBJ2-1)
CASSLGTSGLNEQFF

SEQ ID NO: 414149 - protein, 13 aa, Homo sapiens
  CDR3 for alpha chain variable domain of TCR clone 207075 (TRAV8-3, TRAJ48)
WAVVPFGNGKLTF

SEQ ID NO: 414150 - protein, 15 aa, Homo sapiens
  CDR3 for beta chain variable domain of TCR clone 207075 (TRBV11-2, TRBJ2-1)
CASSSPSTRYNEQFF

SEQ ID NO: 414151 - protein, 13 aa, Homo sapiens
  CDR3 for alpha chain variable domain of TCR clone 207076 (TRAV13-1, TRAJ20)
CAARVSNDYKLSF

SEQ ID NO: 414152 - protein, 13 aa, Homo sapiens
  CDR3 for beta chain variable domain of TCR clone 207076 (TRBV20-1, TRBJ1-1)
CSAPLGGGTEAFF

SEQ ID NO: 414153 - protein, 16 aa, Homo sapiens
  CDR3 for alpha chain variable domain of TCR clone 207077 (TRAV20, TRAJ4)
CAVAAPFSGGYNKLIF

SEQ ID NO: 414154 - protein, 13 aa, Homo sapiens
  CDR3 for beta chain variable domain of TCR clone 207077 (TRBV7-3, TRBJ2-1)
CASSLDSYNEQFF

SEQ ID NO: 414155 - protein, 13 aa, Homo sapiens
  CDR3 for alpha chain variable domain of TCR clone 207078 (TRAV3, TRAJ21)
CAVREPDFNKFYF

SEQ ID NO: 414156 - protein, 14 aa, Homo sapiens
  CDR3 for beta chain variable domain of TCR clone 207078 (TRBV6-1, TRBJ1-3)
CASVQGGGGNTIYS

SEQ ID NO: 414157 - protein, 18 aa, Homo sapiens
  CDR3 for alpha chain variable domain of TCR clone 207079 (TRAV25, TRAJ37)
CRNLLLSPRGSNTGKLIF

SEQ ID NO: 414158 - protein, 15 aa, Homo sapiens
  CDR3 for beta chain variable domain of TCR clone 207079 (TRBV11-2, TRBJ1-2)
CASSLEGVQRNGYTF

SEQ ID NO: 414159 - protein, 16 aa, Homo sapiens
  CDR3 for alpha chain variable domain of TCR clone 207080 (TRAV16, TRAJ21)
CACGWATTSTNFTLDL

SEQ ID NO: 414160 - protein, 13 aa, Homo sapiens
  CDR3 for beta chain variable domain of TCR clone 207080 (TRBV10-3, TRBJ2-7)
CASKLAVNYEQYF

SEQ ID NO: 414161 - protein, 15 aa, Homo sapiens
  CDR3 for alpha chain variable domain of TCR clone 207081 (TRAV22, TRAJ45)
CAAEYSGGGADGLTF

SEQ ID NO: 414162 - protein, 14 aa, Homo sapiens
  CDR3 for beta chain variable domain of TCR clone 207081 (TRBV5-4, TRBJ1-1)
CASSLDSRRDEAFF

SEQ ID NO: 414163 - protein, 16 aa, Homo sapiens
  CDR3 for alpha chain variable domain of TCR clone 207082 (TRAV3, TRAJ3)
CAVRDRAKSSASKTIF

SEQ ID NO: 414164 - protein, 13 aa, Homo sapiens
  CDR3 for beta chain variable domain of TCR clone 207082 (TRBV10-3, TRBJ2-7)
CASKLAVNYEQYF

SEQ ID NO: 414165 - protein, 16 aa, Homo sapiens
  CDR3 for alpha chain variable domain of TCR clone 207083 (TRAV30, TRAJ24)
CGTEIVDADSWGKFQF

SEQ ID NO: 414166 - protein, 16 aa, Homo sapiens
  CDR3 for beta chain variable domain of TCR clone 207083 (TRBV19, TRBJ2-1)
CASSMGGGSSYNEQFF

SEQ ID NO: 414167 - protein, 12 aa, Homo sapiens
  CDR3 for alpha chain variable domain of TCR clone 207084 (TRAV3, TRAJ20)
CAVRDPDYKLSF

SEQ ID NO: 414168 - protein, 12 aa, Homo sapiens
  CDR3 for beta chain variable domain of TCR clone 207084 (TRBV6-3, TRBJ2-7)
CASSLTPYEQYF

SEQ ID NO: 414169 - protein, 21 aa, Homo sapiens
  CDR3 for alpha chain variable domain of TCR clone 207085 (TRAV34, TRAJ44)
PAMQASTSVEQITGTASKLTF

SEQ ID NO: 414170 - protein, 13 aa, Homo sapiens
  CDR3 for beta chain variable domain of TCR clone 207085 (TRBV11-2, TRBJ2-1)
CASSLDLVNEQFF

SEQ ID NO: 414171 - protein, 13 aa, Homo sapiens
  CDR3 for alpha chain variable domain of TCR clone 207086 (TRAV27, TRAJ57)
WAGFQGGSEKLVF

SEQ ID NO: 414172 - protein, 14 aa, Homo sapiens
  CDR3 for beta chain variable domain of TCR clone 207086 (TRBV20-1, TRBJ1-2)
CSGRKDGRAYGYTF

SEQ ID NO: 414173 - protein, 14 aa, Homo sapiens
  CDR3 for alpha chain variable domain of TCR clone 207087 (TRAV12-2, TRAJ13)
CAVKKTGGYQKVTF

SEQ ID NO: 414174 - protein, 12 aa, Homo sapiens
  CDR3 for beta chain variable domain of TCR clone 207087 (TRBV12-4, TRBJ1-2)
CASSFIWPHLRF

SEQ ID NO: 414175 - protein, 16 aa, Homo sapiens
  CDR3 for alpha chain variable domain of TCR clone 207088 (TRAV14/DV4, TRAJ53)
CAMREGGGGSNNKLTF

SEQ ID NO: 414176 - protein, 14 aa, Homo sapiens
  CDR3 for beta chain variable domain of TCR clone 207088 (TRBV7-6, TRBJ2-3)
CASSLGTVTDTQYF

SEQ ID NO: 414177 - protein, 14 aa, Homo sapiens
  CDR3 for alpha chain variable domain of TCR clone 207089 (TRAV16, TRAJ33)
CALSAMDSNYQLIW

SEQ ID NO: 414178 - protein, 16 aa, Homo sapiens
  CDR3 for beta chain variable domain of TCR clone 207089 (TRBV5-7, TRBJ2-3)
CASSPWTSGGTDTQYF

SEQ ID NO: 414179 - protein, 15 aa, Homo sapiens
  CDR3 for alpha chain variable domain of TCR clone 207090 (TRAV12-2, TRAJ53)
CAVNVGGGSNYKLTF

SEQ ID NO: 414180 - protein, 13 aa, Homo sapiens
  CDR3 for beta chain variable domain of TCR clone 207090 (TRBV3-1, TRBJ1-1)
CASGPGVITEAFF

SEQ ID NO: 414181 - protein, 11 aa, Homo sapiens
  CDR3 for alpha chain variable domain of TCR clone 207091 (TRAV2, TRAJ33)
CAVDSNYQLIW

SEQ ID NO: 414182 - protein, 15 aa, Homo sapiens
  CDR3 for beta chain variable domain of TCR clone 207091 (TRBV18, TRBJ2-2)
CQLTPSGVNTGELFF

SEQ ID NO: 414183 - protein, 11 aa, Homo sapiens
  CDR3 for alpha chain variable domain of TCR clone 207092 (TRAV2, TRAJ33)
CAVDSNYQLIW

SEQ ID NO: 414184 - protein, 13 aa, Homo sapiens
  CDR3 for beta chain variable domain of TCR clone 207092 (TRBV11-3, TRBJ1-1)
CATEEGLNTEAFF

SEQ ID NO: 414185 - protein, 15 aa, Homo sapiens
  CDR3 for alpha chain variable domain of TCR clone 207093 (TRAV13-2, TRAJ10)
CAENKIGGGGNKLTF

SEQ ID NO: 414186 - protein, 14 aa, Homo sapiens
  CDR3 for beta chain variable domain of TCR clone 207093 (TRBV5-1, TRBJ2-7)
CASSRGESLYEQYF

SEQ ID NO: 414187 - protein, 14 aa, Homo sapiens
  CDR3 for alpha chain variable domain of TCR clone 207094 (TRAV13-1, TRAJ9)
CAASALTGGFKTIF

SEQ ID NO: 414188 - protein, 13 aa, Homo sapiens
  CDR3 for beta chain variable domain of TCR clone 207094 (TRBV4-2, TRBJ1-1)
CASSQAGNTEAFL

SEQ ID NO: 414189 - protein, 13 aa, Homo sapiens
  CDR3 for alpha chain variable domain of TCR clone 207095 (TRAV13-2, TRAJ48)
CAEMDFGNEKLTF

SEQ ID NO: 414190 - protein, 15 aa, Homo sapiens
  CDR3 for beta chain variable domain of TCR clone 207095 (TRBV7-9, TRBJ1-6)
CASSSPGRGDSPLYF

SEQ ID NO: 414191 - protein, 12 aa, Homo sapiens
  CDR3 for alpha chain variable domain of TCR clone 207096 (TRAV3, TRAJ39)
CAVIEWSNMLTF

SEQ ID NO: 414192 - protein, 13 aa, Homo sapiens
  CDR3 for beta chain variable domain of TCR clone 207096 (TRBV12-4, TRBJ2-5)
CVSRLAVQETQYF

SEQ ID NO: 414193 - protein, 13 aa, Homo sapiens
  CDR3 for alpha chain variable domain of TCR clone 207097 (TRAV12-2, TRAJ20)
CAVYPSNDYKLSF

SEQ ID NO: 414194 - protein, 17 aa, Homo sapiens
  CDR3 for beta chain variable domain of TCR clone 207097 (TRBV20-1, TRBJ2-2)
CSASGSGQGGLTGELFF

SEQ ID NO: 414195 - protein, 11 aa, Homo sapiens
  CDR3 for alpha chain variable domain of TCR clone 207098 (TRAV17, TRAJ9)
CGFTGGFKTIF

SEQ ID NO: 414196 - protein, 14 aa, Homo sapiens
  CDR3 for beta chain variable domain of TCR clone 207098 (TRBV11-2, TRBJ2-5)
CASSRTGGMETQYF

SEQ ID NO: 414197 - protein, 12 aa, Homo sapiens
  CDR3 for alpha chain variable domain of TCR clone 207099 (TRAV13-1, TRAJ21)
CAAFFNFNKFYF

SEQ ID NO: 414198 - protein, 13 aa, Homo sapiens
  CDR3 for beta chain variable domain of TCR clone 207099 (TRBV10-2, TRBJ2-7)
CASGASGGYEQYF

SEQ ID NO: 414199 - protein, 14 aa, Homo sapiens
  CDR3 for alpha chain variable domain of TCR clone 207100 (TRAV1-2, TRAJ16)
CAVNRFSDGQKLLF

SEQ ID NO: 414200 - protein, 14 aa, Homo sapiens
  CDR3 for beta chain variable domain of TCR clone 207100 (TRBV14, TRBJ2-1)
CASSRVQGRGEQFF

SEQ ID NO: 414201 - protein, 13 aa, Homo sapiens
  CDR3 for alpha chain variable domain of TCR clone 207101 (TRAV35, TRAJ58)
CAGLETSGSGLTF

SEQ ID NO: 414202 - protein, 15 aa, Homo sapiens
  CDR3 for beta chain variable domain of TCR clone 207101 (TRBV20-1, TRBJ2-1)
CSARFSAGGLNEQFF

SEQ ID NO: 414203 - protein, 15 aa, Homo sapiens
  CDR3 for alpha chain variable domain of TCR clone 207102 (TRAV14/DV4, TRAJ26)
CEMREGQNYGQNFVF

SEQ ID NO: 414204 - protein, 13 aa, Homo sapiens
  CDR3 for beta chain variable domain of TCR clone 207102 (TRBV24-1, TRBJ2-2)
CATSDWSTGELFF

SEQ ID NO: 414205 - protein, 11 aa, Homo sapiens
  CDR3 for alpha chain variable domain of TCR clone 207103 (TRAV26-1, TRAJ37)
CIVRVGRKLIF

SEQ ID NO: 414206 - protein, 15 aa, Homo sapiens
  CDR3 for beta chain variable domain of TCR clone 207103 (TRBV28, TRBJ1-5)
CASSLSGYSNQPQHF

SEQ ID NO: 414207 - protein, 12 aa, Homo sapiens
  CDR3 for alpha chain variable domain of TCR clone 207104 (TRAV12-3, TRAJ17)
CAMTLPGNKLTF

SEQ ID NO: 414208 - protein, 16 aa, Homo sapiens
  CDR3 for beta chain variable domain of TCR clone 207104 (TRBV13, TRBJ2-2)
CASSPRTGEHTGELFF

SEQ ID NO: 414209 - protein, 14 aa, Homo sapiens
  CDR3 for alpha chain variable domain of TCR clone 207105 (TRAV13-1, TRAJ35)
FSASKGGFGNVLHC

SEQ ID NO: 414210 - protein, 13 aa, Homo sapiens
  CDR3 for beta chain variable domain of TCR clone 207105 (TRBV7-3, TRBJ1-1)
CASSQDWGAEAFF

SEQ ID NO: 414211 - protein, 16 aa, Homo sapiens
  CDR3 for alpha chain variable domain of TCR clone 207106 (TRAV2, TRAJ4)
CAVEDRFSGGYNKLIF

SEQ ID NO: 414212 - protein, 14 aa, Homo sapiens
  CDR3 for beta chain variable domain of TCR clone 207106 (TRBV7-3, TRBJ2-2)
CASSSGGYTGELFF

SEQ ID NO: 414213 - protein, 16 aa, Homo sapiens
  CDR3 for alpha chain variable domain of TCR clone 207107 (TRAV30, TRAJ24)
CGTEIGDADSWGKFRF

SEQ ID NO: 414214 - protein, 16 aa, Homo sapiens
  CDR3 for beta chain variable domain of TCR clone 207107 (TRBV7-3, TRBJ2-3)
ELSLMKRMRGADTQYF

SEQ ID NO: 414215 - protein, 13 aa, Homo sapiens
  CDR3 for alpha chain variable domain of TCR clone 207108 (TRAV8-1, TRAJ13)
CDVSKGGYQMVTF

SEQ ID NO: 414216 - protein, 18 aa, Homo sapiens
  CDR3 for beta chain variable domain of TCR clone 207108 (TRBV11-2, TRBJ2-7)
CASSWRTVQTGQSYEQYF

SEQ ID NO: 414217 - protein, 13 aa, Homo sapiens
  CDR3 for alpha chain variable domain of TCR clone 207109 (TRAV21, TRAJ20)
CAVGLRVDYKLSF

SEQ ID NO: 414218 - protein, 16 aa, Homo sapiens
  CDR3 for beta chain variable domain of TCR clone 207109 (TRBV4-2, TRBJ1-2)
CASIQEIGGASYGYTF

SEQ ID NO: 414219 - protein, 19 aa, Homo sapiens
  CDR3 for alpha chain variable domain of TCR clone 207110 (TRAV26-1, TRAJ43)
CCVLLHRQTPRYNNNDMRF

SEQ ID NO: 414220 - protein, 15 aa, Homo sapiens
  CDR3 for beta chain variable domain of TCR clone 207110 (TRBV2, TRBJ2-1)
CASSEEREGDNEQFF

SEQ ID NO: 414221 - protein, 12 aa, Homo sapiens
  CDR3 for alpha chain variable domain of TCR clone 207111 (TRAV27, TRAJ37)
CADSGNTGKLIF

SEQ ID NO: 414222 - protein, 18 aa, Homo sapiens
  CDR3 for beta chain variable domain of TCR clone 207111 (TRBV7-9, TRBJ1-1)
CASSKPCDTMGMNTEAFF

SEQ ID NO: 414223 - protein, 18 aa, Homo sapiens
  CDR3 for alpha chain variable domain of TCR clone 207112 (TRAV13-1, TRAJ4)
CSKYKEVPWRGGYNKLIF

SEQ ID NO: 414224 - protein, 20 aa, Homo sapiens
  CDR3 for beta chain variable domain of TCR clone 207112 (TRBV7-8, TRBJ2-2)
CASSHLFPGPTIHITGELFF

SEQ ID NO: 414225 - protein, 16 aa, Homo sapiens
  CDR3 for alpha chain variable domain of TCR clone 207113 (TRAV12-3, TRAJ53)
CAMSVCSGGSNYKLTF

SEQ ID NO: 414226 - protein, 13 aa, Homo sapiens
  CDR3 for beta chain variable domain of TCR clone 207113 (TRBV7-6, TRBJ1-2)
CASSLVADYGYTF

SEQ ID NO: 414227 - protein, 14 aa, Homo sapiens
  CDR3 for alpha chain variable domain of TCR clone 207114 (TRAV12-3, TRAJ10)
SHLPLTGGGNKLTF

SEQ ID NO: 414228 - protein, 16 aa, Homo sapiens
  CDR3 for beta chain variable domain of TCR clone 207114 (TRBV4-1, TRBJ1-4)
CASSQDLRQGGEKLFF

SEQ ID NO: 414229 - protein, 16 aa, Homo sapiens
  CDR3 for alpha chain variable domain of TCR clone 207115 (TRAV3, TRAJ37)
CAVRVRGSGNTGKLIF

SEQ ID NO: 414230 - protein, 15 aa, Homo sapiens
  CDR3 for beta chain variable domain of TCR clone 207115 (TRBV4-1, TRBJ2-1)
CASSQVLAGGDEQFF

SEQ ID NO: 414231 - protein, 13 aa, Homo sapiens
  CDR3 for alpha chain variable domain of TCR clone 207116 (TRAV12-2, TRAJ20)
CAVYPSNDYKLSF

SEQ ID NO: 414232 - protein, 13 aa, Homo sapiens
  CDR3 for beta chain variable domain of TCR clone 207116 (TRBV28, TRBJ2-7)
CAILDRAGGEQYF

SEQ ID NO: 414233 - protein, 16 aa, Homo sapiens
  CDR3 for alpha chain variable domain of TCR clone 207117 (TRAV13-1, TRAJ45)
WAASWESGGGADGLTF

SEQ ID NO: 414234 - protein, 14 aa, Homo sapiens
  CDR3 for beta chain variable domain of TCR clone 207117 (TRBV12-4, TRBJ1-3)
CASGQTVSGNTIYF

SEQ ID NO: 414235 - protein, 14 aa, Homo sapiens
  CDR3 for alpha chain variable domain of TCR clone 207118 (TRAV1-2, TRAJ16)
CAVNRFSDGQKLPF

SEQ ID NO: 414236 - protein, 15 aa, Homo sapiens
  CDR3 for beta chain variable domain of TCR clone 207118 (TRBV27, TRBJ1-1)
CASSPYADPYTEAFF

SEQ ID NO: 414237 - protein, 15 aa, Homo sapiens
  CDR3 for alpha chain variable domain of TCR clone 207119 (TRAV3, TRAJ4)
CAVRDGTGGYNKLIF

SEQ ID NO: 414238 - protein, 14 aa, Homo sapiens
  CDR3 for beta chain variable domain of TCR clone 207119 (TRBV4-1, TRBJ2-2)
CASSQAVNTGELFF

SEQ ID NO: 414239 - protein, 14 aa, Homo sapiens
  CDR3 for alpha chain variable domain of TCR clone 207120 (TRAV1-2, TRAJ16)
CAVTRFSGGQKLLF

SEQ ID NO: 414240 - protein, 16 aa, Homo sapiens
  CDR3 for beta chain variable domain of TCR clone 207120 (TRBV20-1, TRBJ1-4)
CSAPGQGLLTNEKLFF

SEQ ID NO: 414241 - protein, 14 aa, Homo sapiens
  CDR3 for alpha chain variable domain of TCR clone 207121 (TRAV12-2, TRAJ13)
CAVKKTGGYQKVTF

SEQ ID NO: 414242 - protein, 14 aa, Homo sapiens
  CDR3 for beta chain variable domain of TCR clone 207121 (TRBV11-2, TRBJ2-5)
CASRPLAGRETQYF

SEQ ID NO: 414243 - protein, 14 aa, Homo sapiens
  CDR3 for alpha chain variable domain of TCR clone 207122 (TRAV8-1, TRAJ22)
CAAPSSGSARQLTF

SEQ ID NO: 414244 - protein, 16 aa, Homo sapiens
  CDR3 for beta chain variable domain of TCR clone 207122 (TRBV7-3, TRBJ2-2)
CASSLKRGTLSGELFF

SEQ ID NO: 414245 - protein, 15 aa, Homo sapiens
  CDR3 for alpha chain variable domain of TCR clone 207123 (TRAV12-1, TRAJ9)
CVLSFGDTGGFKTIF

SEQ ID NO: 414246 - protein, 12 aa, Homo sapiens
  CDR3 for beta chain variable domain of TCR clone 207123 (TRBV11-3, TRBJ1-1)
CASSHRQGEAFF

SEQ ID NO: 414247 - protein, 15 aa, Homo sapiens
  CDR3 for alpha chain variable domain of TCR clone 207124 (TRAV13-1, TRAJ17)
CAASIERAAGNKLTF

SEQ ID NO: 414248 - protein, 18 aa, Homo sapiens
  CDR3 for beta chain variable domain of TCR clone 207124 (TRBV7-9, TRBJ2-1)
CASSLAVSGTSGRMSSSS

SEQ ID NO: 414249 - protein, 14 aa, Homo sapiens
  CDR3 for alpha chain variable domain of TCR clone 207125 (TRAV17, TRAJ22)
CATSPSGSARQLTF

SEQ ID NO: 414250 - protein, 16 aa, Homo sapiens
  CDR3 for beta chain variable domain of TCR clone 207125 (TRBV4-1, TRBJ2-6)
CASSQVGDPGANVLTF

SEQ ID NO: 414251 - protein, 13 aa, Homo sapiens
  CDR3 for alpha chain variable domain of TCR clone 207126 (TRAV2, TRAJ40)
CAVVTSGTYKYIF

SEQ ID NO: 414252 - protein, 14 aa, Homo sapiens
  CDR3 for beta chain variable domain of TCR clone 207126 (TRBV7-9, TRBJ2-4)
CASSLAMGGNIQYF

SEQ ID NO: 414253 - protein, 15 aa, Homo sapiens
  CDR3 for alpha chain variable domain of TCR clone 207127 (TRAV38-1, TRAJ37)
CAFIHGSGNTGKLIF

SEQ ID NO: 414254 - protein, 11 aa, Homo sapiens
  CDR3 for beta chain variable domain of TCR clone 207127 (TRBV29-1, TRBJ2-5)
CSEDRTGTQYF

SEQ ID NO: 414255 - protein, 14 aa, Homo sapiens
  CDR3 for alpha chain variable domain of TCR clone 207128 (TRAV13-1, TRAJ44)
CAAKATGTASKLTF

SEQ ID NO: 414256 - protein, 12 aa, Homo sapiens
  CDR3 for beta chain variable domain of TCR clone 207128 (TRBV7-3, TRBJ2-1)
CASSPGNNEQFF

SEQ ID NO: 414257 - protein, 13 aa, Homo sapiens
  CDR3 for alpha chain variable domain of TCR clone 207129 (TRAV13-2, TRAJ13)
CADLSVGYQKVTF

SEQ ID NO: 414258 - protein, 15 aa, Homo sapiens
  CDR3 for beta chain variable domain of TCR clone 207129 (TRBV19, TRBJ1-1)
CASSIGGGRNTEAFF

SEQ ID NO: 414259 - protein, 14 aa, Homo sapiens
  CDR3 for alpha chain variable domain of TCR clone 207130 (TRAV1-1, TRAJ27)
CAVIYNTNAGKPTF

SEQ ID NO: 414260 - protein, 16 aa, Homo sapiens
  CDR3 for beta chain variable domain of TCR clone 207130 (TRBV7-3, TRBJ2-2)
CASSLKRGTLSGELFF

SEQ ID NO: 414261 - protein, 17 aa, Homo sapiens
  CDR3 for alpha chain variable domain of TCR clone 207131 (TRAV8-6, TRAJ8)
CAVKEGIENTGFQKLVF

SEQ ID NO: 414262 - protein, 12 aa, Homo sapiens
  CDR3 for beta chain variable domain of TCR clone 207131 (TRBV19, TRBJ1-4)
CASKDWPGGLVF

SEQ ID NO: 414263 - protein, 14 aa, Homo sapiens
  CDR3 for alpha chain variable domain of TCR clone 207132 (TRAV23/DV6, TRAJ37)
CAASTSSNTAKLIF

SEQ ID NO: 414264 - protein, 13 aa, Homo sapiens
  CDR3 for beta chain variable domain of TCR clone 207132 (TRBV7-7, TRBJ1-1)
CASSLGANTEAFF

SEQ ID NO: 414265 - protein, 14 aa, Homo sapiens
  CDR3 for alpha chain variable domain of TCR clone 207133 (TRAV1-2, TRAJ16)
CAVNRFSDGQKLLF

SEQ ID NO: 414266 - protein, 16 aa, Homo sapiens
  CDR3 for beta chain variable domain of TCR clone 207133 (TRBV7-2, TRBJ1-4)
CASSPVSRFDREKLFF

SEQ ID NO: 414267 - protein, 15 aa, Homo sapiens
  CDR3 for alpha chain variable domain of TCR clone 207134 (TRAV13-1, TRAJ28)
CAAKDSGAGSYQLTF

SEQ ID NO: 414268 - protein, 17 aa, Homo sapiens
  CDR3 for beta chain variable domain of TCR clone 207134 (TRBV7-8, TRBJ2-6)
CASSAGTGGAGANVLTF

SEQ ID NO: 414269 - protein, 14 aa, Homo sapiens
  CDR3 for alpha chain variable domain of TCR clone 207135 (TRAV9-2, TRAJ38)
CALSRAGNNRKLIC

SEQ ID NO: 414270 - protein, 12 aa, Homo sapiens
  CDR3 for beta chain variable domain of TCR clone 207135 (TRBV7-2, TRBJ2-5)
CASSQYQETQYF

SEQ ID NO: 414271 - protein, 14 aa, Homo sapiens
  CDR3 for alpha chain variable domain of TCR clone 207136 (TRAV1-2, TRAJ16)
CAVNRFSDVQKLLF

SEQ ID NO: 414272 - protein, 14 aa, Homo sapiens
  CDR3 for beta chain variable domain of TCR clone 207136 (TRBV7-3, TRBJ2-1)
CASSLSGSYNEQFF

SEQ ID NO: 414273 - protein, 15 aa, Homo sapiens
  CDR3 for alpha chain variable domain of TCR clone 207137 (TRAV26-1, TRAJ29)
CIIRVEGSGNTPLVF

SEQ ID NO: 414274 - protein, 14 aa, Homo sapiens
  CDR3 for beta chain variable domain of TCR clone 207137 (TRBV7-9, TRBJ1-5)
CSSQGHQPNQPQHF

SEQ ID NO: 414275 - protein, 17 aa, Homo sapiens
  CDR3 for alpha chain variable domain of TCR clone 207138 (TRAV3, TRAJ6)
CAVGDGPRAGGSYIPTF

SEQ ID NO: 414276 - protein, 14 aa, Homo sapiens
  CDR3 for beta chain variable domain of TCR clone 207138 (TRBV7-2, TRBJ2-7)
CASSPKTSFYEQYC

SEQ ID NO: 414277 - protein, 12 aa, Homo sapiens
  CDR3 for alpha chain variable domain of TCR clone 207139 (TRAV13-2, TRAJ23)
CAERHSGGKLIF

SEQ ID NO: 414278 - protein, 14 aa, Homo sapiens
  CDR3 for beta chain variable domain of TCR clone 207139 (TRBV6-1, TRBJ1-3)
CASVQGGGGNTIYF

SEQ ID NO: 414279 - protein, 16 aa, Homo sapiens
  CDR3 for alpha chain variable domain of TCR clone 207140 (TRAV3, TRAJ10)
CAVRDMRSGGGNKLTF

SEQ ID NO: 414280 - protein, 11 aa, Homo sapiens
  CDR3 for beta chain variable domain of TCR clone 207140 (TRBV7-9, TRBJ2-5)
CASSLGETQYF

SEQ ID NO: 414281 - protein, 16 aa, Homo sapiens
  CDR3 for alpha chain variable domain of TCR clone 207141 (TRAV26-1, TRAJ45)
CIVEKYSGGGADGLTF

SEQ ID NO: 414282 - protein, 15 aa, Homo sapiens
  CDR3 for beta chain variable domain of TCR clone 207141 (TRBV7-2, TRBJ1-2)
CASSPRAGWNYGYTF

SEQ ID NO: 414283 - protein, 11 aa, Homo sapiens
  CDR3 for alpha chain variable domain of TCR clone 207142 (TRAV12-3, TRAJ27)
CAMANAGKSTF

SEQ ID NO: 414284 - protein, 16 aa, Homo sapiens
  CDR3 for beta chain variable domain of TCR clone 207142 (TRBV7-9, TRBJ1-2)
CASSLAPLRAAYGYTF

SEQ ID NO: 414285 - protein, 17 aa, Homo sapiens
  CDR3 for alpha chain variable domain of TCR clone 207143 (TRAV3, TRAJ6)
CAVRNGPRAGGSYIPTL

SEQ ID NO: 414286 - protein, 14 aa, Homo sapiens
  CDR3 for beta chain variable domain of TCR clone 207143 (TRBV7-2, TRBJ2-7)
CASSPKTSFYEQYF

SEQ ID NO: 414287 - protein, 14 aa, Homo sapiens
  CDR3 for alpha chain variable domain of TCR clone 207144 (TRAV13-1, TRAJ35)
CAASKGGFGNVLHC

SEQ ID NO: 414288 - protein, 17 aa, Homo sapiens
  CDR3 for beta chain variable domain of TCR clone 207144 (TRBV24-1, TRBJ2-3)
TSVPPVMPLAGLHTQYF

SEQ ID NO: 414289 - protein, 13 aa, Homo sapiens
  CDR3 for alpha chain variable domain of TCR clone 207145 (TRAV13-2, TRAJ48)
CAAMDFGNEKLTF

SEQ ID NO: 414290 - protein, 12 aa, Homo sapiens
  CDR3 for beta chain variable domain of TCR clone 207145 (TRBV11-2, TRBJ2-2)
CASSLGGGELFF

SEQ ID NO: 414291 - protein, 15 aa, Homo sapiens
  CDR3 for alpha chain variable domain of TCR clone 207146 (TRAV29/DV5, TRAJ53)
CAVPSSGGSNYKLTF

SEQ ID NO: 414292 - protein, 13 aa, Homo sapiens
  CDR3 for beta chain variable domain of TCR clone 207146 (TRBV7-9, TRBJ1-2)
CASSLKQNYGYAF

SEQ ID NO: 414293 - protein, 11 aa, Homo sapiens
  CDR3 for alpha chain variable domain of TCR clone 207147 (TRAV1-2, TRAJ40)
CAAPGTYKYIF

SEQ ID NO: 414294 - protein, 16 aa, Homo sapiens
  CDR3 for beta chain variable domain of TCR clone 207147 (TRBV29-1, TRBJ2-7)
CSVDVVGTSGSYEQYF

SEQ ID NO: 414295 - protein, 13 aa, Homo sapiens
  CDR3 for alpha chain variable domain of TCR clone 207148 (TRAV8-3, TRAJ36)
CAVVATGANNLFF

SEQ ID NO: 414296 - protein, 15 aa, Homo sapiens
  CDR3 for beta chain variable domain of TCR clone 207148 (TRBV27, TRBJ1-5)
CASTFNRGSNQPQHF

SEQ ID NO: 414297 - protein, 10 aa, Homo sapiens
  CDR3 for alpha chain variable domain of TCR clone 207149 (TRAV26-1, TRAJ18)
CIVRVMSSPW

SEQ ID NO: 414298 - protein, 15 aa, Homo sapiens
  CDR3 for beta chain variable domain of TCR clone 207149 (TRBV6-3, TRBJ2-6)
CASNPGGSGANVLTF

SEQ ID NO: 414299 - protein, 10 aa, Homo sapiens
  CDR3 for alpha chain variable domain of TCR clone 207150 (TRAV36/DV7, TRAJ13)
CAAGYQKVTF

SEQ ID NO: 414300 - protein, 14 aa, Homo sapiens
  CDR3 for beta chain variable domain of TCR clone 207150 (TRBV20-1, TRBJ2-5)
CSAHRQGLWETQYF

SEQ ID NO: 414301 - protein, 14 aa, Homo sapiens
  CDR3 for alpha chain variable domain of TCR clone 207151 (TRAV13-1, TRAJ45)
CAAIGGGGADGLTF

SEQ ID NO: 414302 - protein, 16 aa, Homo sapiens
  CDR3 for beta chain variable domain of TCR clone 207151 (TRBV7-2, TRBJ1-1)
CASSLGARWTNTEAFF

SEQ ID NO: 414303 - protein, 13 aa, Homo sapiens
  CDR3 for alpha chain variable domain of TCR clone 207152 (TRAV3, TRAJ21)
CAVREPDLNKFYF

SEQ ID NO: 414304 - protein, 15 aa, Homo sapiens
  CDR3 for beta chain variable domain of TCR clone 207152 (TRBV3-1, TRBJ2-7)
CASSQAPSGSYEQYF

SEQ ID NO: 414305 - protein, 14 aa, Homo sapiens
  CDR3 for alpha chain variable domain of TCR clone 207153 (TRAV1-2, TRAJ8)
CAVREDTGFQKLVF

SEQ ID NO: 414306 - protein, 13 aa, Homo sapiens
  CDR3 for beta chain variable domain of TCR clone 207153 (TRBV6-5, TRBJ2-5)
CASSPQGGETQYF

SEQ ID NO: 414307 - protein, 13 aa, Homo sapiens
  CDR3 for alpha chain variable domain of TCR clone 207154 (TRAV2, TRAJ15)
CAAASQAGTALIF

SEQ ID NO: 414308 - protein, 16 aa, Homo sapiens
  CDR3 for beta chain variable domain of TCR clone 207154 (TRBV7-3, TRBJ2-2)
CASSLKRGTLSGELFF

SEQ ID NO: 414309 - protein, 14 aa, Homo sapiens
  CDR3 for alpha chain variable domain of TCR clone 207155 (TRAV12-2, TRAJ17)
CAVLFKAPGNKLTF

SEQ ID NO: 414310 - protein, 13 aa, Homo sapiens
  CDR3 for beta chain variable domain of TCR clone 207155 (TRBV19, TRBJ1-2)
CASSQGQVYGYTF

SEQ ID NO: 414311 - protein, 15 aa, Homo sapiens
  CDR3 for alpha chain variable domain of TCR clone 207156 (TRAV34, TRAJ38)
CGADFTPGNNRKLTW

SEQ ID NO: 414312 - protein, 16 aa, Homo sapiens
  CDR3 for beta chain variable domain of TCR clone 207156 (TRBV12-5, TRBJ2-5)
CASGPRTSGNQETQYC

SEQ ID NO: 414313 - protein, 15 aa, Homo sapiens
  CDR3 for alpha chain variable domain of TCR clone 207157 (TRAV12-3, TRAJ6)
CAMSATTGGSYIPTF

SEQ ID NO: 414314 - protein, 15 aa, Homo sapiens
  CDR3 for beta chain variable domain of TCR clone 207157 (TRBV19, TRBJ1-1)
CASTSGQIQNTEAFF

SEQ ID NO: 414315 - protein, 15 aa, Homo sapiens
  CDR3 for alpha chain variable domain of TCR clone 207158 (TRAV38-1, TRAJ37)
CAFIFGSGNTGKLIF

SEQ ID NO: 414316 - protein, 15 aa, Homo sapiens
  CDR3 for beta chain variable domain of TCR clone 207158 (TRBV5-1, TRBJ2-1)
CASSPPRAPYNEQFF

SEQ ID NO: 414317 - protein, 14 aa, Homo sapiens
  CDR3 for alpha chain variable domain of TCR clone 207159 (TRAV29/DV5, TRAJ36)
CAARRKTGANNLFC

SEQ ID NO: 414318 - protein, 12 aa, Homo sapiens
  CDR3 for beta chain variable domain of TCR clone 207159 (TRBV12-4, TRBJ2-7)
CASSLGGYEQYF

SEQ ID NO: 414319 - protein, 12 aa, Homo sapiens
  CDR3 for alpha chain variable domain of TCR clone 207160 (TRAV12-1, TRAJ40)
CVFYSGTYKYIF

SEQ ID NO: 414320 - protein, 12 aa, Homo sapiens
  CDR3 for beta chain variable domain of TCR clone 207160 (TRBV7-3, TRBJ2-1)
FASSFINNEQFF

SEQ ID NO: 414321 - protein, 16 aa, Homo sapiens
  CDR3 for alpha chain variable domain of TCR clone 207161 (TRAV12-2, TRAJ45)
CAVIFLSGGGADGLTF

SEQ ID NO: 414322 - protein, 14 aa, Homo sapiens
  CDR3 for beta chain variable domain of TCR clone 207161 (TRBV14, TRBJ2-7)
CASRHRDKPYEQYF

SEQ ID NO: 414323 - protein, 11 aa, Homo sapiens
  CDR3 for alpha chain variable domain of TCR clone 207162 (TRAV12-3, TRAJ34)
CNGLYTDKLIF

SEQ ID NO: 414324 - protein, 14 aa, Homo sapiens
  CDR3 for beta chain variable domain of TCR clone 207162 (TRBV4-1, TRBJ2-2)
CASSQAVNTGELFF

SEQ ID NO: 414325 - protein, 13 aa, Homo sapiens
  CDR3 for alpha chain variable domain of TCR clone 207163 (TRAV12-3, TRAJ5)
CAMRPTGRRALTF

SEQ ID NO: 414326 - protein, 13 aa, Homo sapiens
  CDR3 for beta chain variable domain of TCR clone 207163 (TRBV2, TRBJ2-7)
CASSVMEAYEQYF

SEQ ID NO: 414327 - protein, 16 aa, Homo sapiens
  CDR3 for alpha chain variable domain of TCR clone 207164 (TRAV26-1, TRAJ38)
CIVRAYNAGNNRKLIW

SEQ ID NO: 414328 - protein, 13 aa, Homo sapiens
  CDR3 for beta chain variable domain of TCR clone 207164 (TRBV27, TRBJ2-7)
CASSSGDSYEQYF

SEQ ID NO: 414329 - protein, 14 aa, Homo sapiens
  CDR3 for alpha chain variable domain of TCR clone 207165 (TRAV8-1, TRAJ6)
CAVTASGGSYIPTF

SEQ ID NO: 414330 - protein, 16 aa, Homo sapiens
  CDR3 for beta chain variable domain of TCR clone 207165 (TRBV19, TRBJ2-1)
CASSKAGPSSYNEQFF

SEQ ID NO: 414331 - protein, 11 aa, Homo sapiens
  CDR3 for alpha chain variable domain of TCR clone 207166 (TRAV2, TRAJ13)
CASGGYQEVTF

SEQ ID NO: 414332 - protein, 14 aa, Homo sapiens
  CDR3 for beta chain variable domain of TCR clone 207166 (TRBV18, TRBJ1-2)
CASSPDRVVYGYTF

SEQ ID NO: 414333 - protein, 17 aa, Homo sapiens
  CDR3 for alpha chain variable domain of TCR clone 207167 (TRAV8-1, TRAJ42)
CAVKWGNYGGSQGNLIF

SEQ ID NO: 414334 - protein, 15 aa, Homo sapiens
  CDR3 for beta chain variable domain of TCR clone 207167 (TRBV9, TRBJ1-6)
WASSVAGTGDSPLHF

SEQ ID NO: 414335 - protein, 14 aa, Homo sapiens
  CDR3 for alpha chain variable domain of TCR clone 207168 (TRAV13-2, TRAJ6)
CAGAGTGGSYIPTF

SEQ ID NO: 414336 - protein, 14 aa, Homo sapiens
  CDR3 for beta chain variable domain of TCR clone 207168 (TRBV7-7, TRBJ2-1)
CASSSGLASNEQLF

SEQ ID NO: 414337 - protein, 15 aa, Homo sapiens
  CDR3 for alpha chain variable domain of TCR clone 207169 (TRAV8-4, TRAJ13)
CAVSDWSGGYQKVTF

SEQ ID NO: 414338 - protein, 13 aa, Homo sapiens
  CDR3 for beta chain variable domain of TCR clone 207169 (TRBV10-3, TRBJ2-7)
CASKLAVNYEQYF

SEQ ID NO: 414339 - protein, 16 aa, Homo sapiens
  CDR3 for alpha chain variable domain of TCR clone 207170 (TRAV12-2, TRAJ43)
CAGDDMRFGAGTRLTV

SEQ ID NO: 414340 - protein, 12 aa, Homo sapiens
  CDR3 for beta chain variable domain of TCR clone 207170 (TRBV6-3, TRBJ2-7)
CASSEPGFEQYF

SEQ ID NO: 414341 - protein, 14 aa, Homo sapiens
  CDR3 for alpha chain variable domain of TCR clone 207171 (TRAV12-1, TRAJ17)
CVVNYKAAGNKLTF

SEQ ID NO: 414342 - protein, 15 aa, Homo sapiens
  CDR3 for beta chain variable domain of TCR clone 207171 (TRBV12-4, TRBJ1-2)
CASSPITGGGYGYTF

SEQ ID NO: 414343 - protein, 16 aa, Homo sapiens
  CDR3 for alpha chain variable domain of TCR clone 207172 (TRAV17, TRAJ28)
RATASVSGAGSYQLTL

SEQ ID NO: 414344 - protein, 11 aa, Homo sapiens
  CDR3 for beta chain variable domain of TCR clone 207172 (TRBV7-9, TRBJ2-5)
CASSLGETQYF

SEQ ID NO: 414345 - protein, 20 aa, Homo sapiens
  CDR3 for alpha chain variable domain of TCR clone 207173 (TRAV1-1, TRAJ39)
CLLLLRCESSAYNAGNMLTF

SEQ ID NO: 414346 - protein, 13 aa, Homo sapiens
  CDR3 for beta chain variable domain of TCR clone 207173 (TRBV12-4, TRBJ1-5)
CASSPDRARPQHF

SEQ ID NO: 414347 - protein, 15 aa, Homo sapiens
  CDR3 for alpha chain variable domain of TCR clone 207174 (TRAV21, TRAJ53)
CATLNSGGSNYKLTF

SEQ ID NO: 414348 - protein, 15 aa, Homo sapiens
  CDR3 for beta chain variable domain of TCR clone 207174 (TRBV5-1, TRBJ2-1)
GASSPPRAPCNEQFF

SEQ ID NO: 414349 - protein, 13 aa, Homo sapiens
  CDR3 for alpha chain variable domain of TCR clone 207175 (TRAV21, TRAJ57)
CAVTQGGSEKLVF

SEQ ID NO: 414350 - protein, 15 aa, Homo sapiens
  CDR3 for beta chain variable domain of TCR clone 207175 (TRBV5-1, TRBJ1-1)
CASSSTTGTNTGAFF

SEQ ID NO: 414351 - protein, 15 aa, Homo sapiens
  CDR3 for alpha chain variable domain of TCR clone 207176 (TRAV8-3, TRAJ11)
CAVGLLNSGYSTLTF

SEQ ID NO: 414352 - protein, 15 aa, Homo sapiens
  CDR3 for beta chain variable domain of TCR clone 207176 (TRBV13, TRBJ2-1)
CASSLLFGLNNEQFF

SEQ ID NO: 414353 - protein, 13 aa, Homo sapiens
  CDR3 for alpha chain variable domain of TCR clone 207177 (TRAV16, TRAJ48)
CSPLSFGNEKLTF

SEQ ID NO: 414354 - protein, 11 aa, Homo sapiens
  CDR3 for beta chain variable domain of TCR clone 207177 (TRBV7-9, TRBJ2-3)
CASSPTDTQYF

SEQ ID NO: 414355 - protein, 14 aa, Homo sapiens
  CDR3 for alpha chain variable domain of TCR clone 207178 (TRAV1-2, TRAJ8)
CAVREDTGFQKLVF

SEQ ID NO: 414356 - protein, 14 aa, Homo sapiens
  CDR3 for beta chain variable domain of TCR clone 207178 (TRBV12-5, TRBJ2-5)
CASCSRTHQETQSF

SEQ ID NO: 414357 - protein, 10 aa, Homo sapiens
  CDR3 for alpha chain variable domain of TCR clone 207179 (TRAV35, TRAJ41)
DANSGNALTF

SEQ ID NO: 414358 - protein, 14 aa, Homo sapiens
  CDR3 for beta chain variable domain of TCR clone 207179 (TRBV9, TRBJ2-3)
CASSVGLSTDTQYF

SEQ ID NO: 414359 - protein, 15 aa, Homo sapiens
  CDR3 for alpha chain variable domain of TCR clone 207180 (TRAV29/DV5, TRAJ42)
CAARTDGGSQGNLIF

SEQ ID NO: 414360 - protein, 12 aa, Homo sapiens
  CDR3 for beta chain variable domain of TCR clone 207180 (TRBV11-2, TRBJ2-1)
CASSPGNNEQFF

SEQ ID NO: 414361 - protein, 16 aa, Homo sapiens
  CDR3 for alpha chain variable domain of TCR clone 207181 (TRAV13-2, TRAJ53)
CAETANSGGSNYKLTF

SEQ ID NO: 414362 - protein, 19 aa, Homo sapiens
  CDR3 for beta chain variable domain of TCR clone 207181 (TRBV28, TRBJ2-7)
CASSYSGTSRLGWVYEQYF

SEQ ID NO: 414363 - protein, 15 aa, Homo sapiens
  CDR3 for alpha chain variable domain of TCR clone 207182 (TRAV12-1, TRAJ4)
CVVNPFSGGYNRLIF

SEQ ID NO: 414364 - protein, 17 aa, Homo sapiens
  CDR3 for beta chain variable domain of TCR clone 207182 (TRBV28, TRBJ1-1)
CASSLSGTGYENTEAFF

SEQ ID NO: 414365 - protein, 14 aa, Homo sapiens
  CDR3 for alpha chain variable domain of TCR clone 207183 (TRAV29/DV5, TRAJ20)
CAATIRSNDYKFSF

SEQ ID NO: 414366 - protein, 15 aa, Homo sapiens
  CDR3 for beta chain variable domain of TCR clone 207183 (TRBV20-1, TRBJ2-1)
CSASSAGSSYNEQFF

SEQ ID NO: 414367 - protein, 17 aa, Homo sapiens
  CDR3 for alpha chain variable domain of TCR clone 207184 (TRAV3, TRAJ42)
CAVRDREYGGSQGNLIF

SEQ ID NO: 414368 - protein, 13 aa, Homo sapiens
  CDR3 for beta chain variable domain of TCR clone 207184 (TRBV27, TRBJ1-1)
CASSLSIGAEAFF

SEQ ID NO: 414369 - protein, 14 aa, Homo sapiens
  CDR3 for alpha chain variable domain of TCR clone 207185 (TRAV20, TRAJ4)
CAVRLGGGYNKLIF

SEQ ID NO: 414370 - protein, 21 aa, Homo sapiens
  CDR3 for beta chain variable domain of TCR clone 207185 (TRBV15, TRBJ2-1)
AWGTQPCTGVPPAEVDTARFF

SEQ ID NO: 414371 - protein, 11 aa, Homo sapiens
  CDR3 for alpha chain variable domain of TCR clone 207186 (TRAV2, TRAJ33)
CAVDSNYQLIW

SEQ ID NO: 414372 - protein, 18 aa, Homo sapiens
  CDR3 for beta chain variable domain of TCR clone 207186 (TRBV7-9, TRBJ2-6)
CASSFPGAGISGANVLTF

SEQ ID NO: 414373 - protein, 15 aa, Homo sapiens
  CDR3 for alpha chain variable domain of TCR clone 207187 (TRAV12-1, TRAJ43)
CVVNRGRYNNNDMRF

SEQ ID NO: 414374 - protein, 13 aa, Homo sapiens
  CDR3 for beta chain variable domain of TCR clone 207187 (TRBV13, TRBJ2-5)
CASSPEVWETQYF

SEQ ID NO: 414375 - protein, 18 aa, Homo sapiens
  CDR3 for alpha chain variable domain of TCR clone 207188 (TRAV8-3, TRAJ37)
LSTSVLWVRLSNTGKLIF

SEQ ID NO: 414376 - protein, 15 aa, Homo sapiens
  CDR3 for beta chain variable domain of TCR clone 207188 (TRBV11-2, TRBJ1-2)
CASSQMRGLNYGYTF

SEQ ID NO: 414377 - protein, 15 aa, Homo sapiens
  CDR3 for alpha chain variable domain of TCR clone 207189 (TRAV8-4, TRAJ49)
CAVTGALNTGNQFYF

SEQ ID NO: 414378 - protein, 17 aa, Homo sapiens
  CDR3 for beta chain variable domain of TCR clone 207189 (TRBV5-1, TRBJ2-1)
CASSLRQISFPYNEQFF

SEQ ID NO: 414379 - protein, 12 aa, Homo sapiens
  CDR3 for alpha chain variable domain of TCR clone 207190 (TRAV13-1, TRAJ49)
CAAANTGNQFYF

SEQ ID NO: 414380 - protein, 17 aa, Homo sapiens
  CDR3 for beta chain variable domain of TCR clone 207190 (TRBV25-1, TRBJ2-7)
CASSDARVVFSSYEQYF

SEQ ID NO: 414381 - protein, 12 aa, Homo sapiens
  CDR3 for alpha chain variable domain of TCR clone 207191 (TRAV13-1, TRAJ49)
CAASREGNQFYF

SEQ ID NO: 414382 - protein, 12 aa, Homo sapiens
  CDR3 for beta chain variable domain of TCR clone 207191 (TRBV11-2, TRBJ2-1)
CASSPGNNEQFF

SEQ ID NO: 414383 - protein, 15 aa, Homo sapiens
  CDR3 for alpha chain variable domain of TCR clone 207192 (TRAV12-2, TRAJ42)
CAVNYYGGSQGNLIF

SEQ ID NO: 414384 - protein, 15 aa, Homo sapiens
  CDR3 for beta chain variable domain of TCR clone 207192 (TRBV7-2, TRBJ2-2)
CASASQGEPTGELFF

SEQ ID NO: 414385 - protein, 17 aa, Homo sapiens
  CDR3 for alpha chain variable domain of TCR clone 207193 (TRAV4, TRAJ13)
CLVGVQGYSGGYQKVTF

SEQ ID NO: 414386 - protein, 18 aa, Homo sapiens
  CDR3 for beta chain variable domain of TCR clone 207193 (TRBV15, TRBJ2-3)
CATSRDGAKSWDTDTQYF

SEQ ID NO: 414387 - protein, 14 aa, Homo sapiens
  CDR3 for alpha chain variable domain of TCR clone 207194 (TRAV17, TRAJ45)
CATDARGGADGLTF

SEQ ID NO: 414388 - protein, 11 aa, Homo sapiens
  CDR3 for beta chain variable domain of TCR clone 207194 (TRBV28, TRBJ2-5)
CATGIQETQYF

SEQ ID NO: 414389 - protein, 17 aa, Homo sapiens
  CDR3 for alpha chain variable domain of TCR clone 207195 (TRAV3, TRAJ6)
CAVRDGPRAGGSYIPTI

SEQ ID NO: 414390 - protein, 13 aa, Homo sapiens
  CDR3 for beta chain variable domain of TCR clone 207195 (TRBV19, TRBJ1-1)
CASSITGESEAFF

SEQ ID NO: 414391 - protein, 16 aa, Homo sapiens
  CDR3 for alpha chain variable domain of TCR clone 207196 (TRAV36/DV7, TRAJ30)
CAVETYGLDRDDKIIF

SEQ ID NO: 414392 - protein, 12 aa, Homo sapiens
  CDR3 for beta chain variable domain of TCR clone 207196 (TRBV11-2, TRBJ2-2)
CASSLGGGELFF

SEQ ID NO: 414393 - protein, 23 aa, Homo sapiens
  CDR3 for alpha chain variable domain of TCR clone 207197 (TRAV26-1, TRAJ38)
CIADNAGNNHIQNPDPPVYQLRD

SEQ ID NO: 414394 - protein, 15 aa, Homo sapiens
  CDR3 for beta chain variable domain of TCR clone 207197 (TRBV20-1, TRBJ1-1)
CSARGGGTLKLSLDK

SEQ ID NO: 414395 - protein, 17 aa, Homo sapiens
  CDR3 for alpha chain variable domain of TCR clone 207198 (TRAV3, TRAJ42)
CAVRDRDYEGSQGNPIF

SEQ ID NO: 414396 - protein, 15 aa, Homo sapiens
  CDR3 for beta chain variable domain of TCR clone 207198 (TRBV6-6, TRBJ2-7)
CASSYSYGGSYEQYF

SEQ ID NO: 414397 - protein, 17 aa, Homo sapiens
  CDR3 for alpha chain variable domain of TCR clone 207199 (TRAV12-1, TRAJ52)
CVVTPNAGGTSYGKLTF

SEQ ID NO: 414398 - protein, 17 aa, Homo sapiens
  CDR3 for beta chain variable domain of TCR clone 207199 (TRBV7-3, TRBJ2-7)
CASSFGPLGTGNDEQYF

SEQ ID NO: 414399 - protein, 14 aa, Homo sapiens
  CDR3 for alpha chain variable domain of TCR clone 207200 (TRAV12-2, TRAJ40)
CAVKIPSGTYKYIF

SEQ ID NO: 414400 - protein, 14 aa, Homo sapiens
  CDR3 for beta chain variable domain of TCR clone 207200 (TRBV6-3, TRBJ1-1)
CTSRYTGESTEAFS

SEQ ID NO: 414401 - protein, 12 aa, Homo sapiens
  CDR3 for alpha chain variable domain of TCR clone 207201 (TRAV13-1, TRAJ21)
CAAKEGFNKFYF

SEQ ID NO: 414402 - protein, 14 aa, Homo sapiens
  CDR3 for beta chain variable domain of TCR clone 207201 (TRBV18, TRBJ2-7)
CASSPAGGPGEQYF

SEQ ID NO: 414403 - protein, 22 aa, Homo sapiens
  CDR3 for alpha chain variable domain of TCR clone 207202 (TRAV27, )
CAVRTQVPDIQNPDPAVYQLRD

SEQ ID NO: 414404 - protein, 16 aa, Homo sapiens
  CDR3 for beta chain variable domain of TCR clone 207202 (TRBV5-1, TRBJ2-3)
CASSLGLAVYTDTQYF

SEQ ID NO: 414405 - protein, 14 aa, Homo sapiens
  CDR3 for alpha chain variable domain of TCR clone 207203 (TRAV8-2, TRAJ13)
CVVSDSGGYQKVTF

SEQ ID NO: 414406 - protein, 14 aa, Homo sapiens
  CDR3 for beta chain variable domain of TCR clone 207203 (TRBV5-5, TRBJ1-2)
CASSLDPYNYGYTF

SEQ ID NO: 414407 - protein, 15 aa, Homo sapiens
  CDR3 for alpha chain variable domain of TCR clone 207204 (TRAV3, TRAJ5)
CAVRDHDTGRRALTF

SEQ ID NO: 414408 - protein, 13 aa, Homo sapiens
  CDR3 for beta chain variable domain of TCR clone 207204 (TRBV12-4, TRBJ2-7)
CASSPTETYEQYF

SEQ ID NO: 414409 - protein, 13 aa, Homo sapiens
  CDR3 for alpha chain variable domain of TCR clone 207205 (TRAV24, TRAJ23)
CASHWNQGGKLIF

SEQ ID NO: 414410 - protein, 13 aa, Homo sapiens
  CDR3 for beta chain variable domain of TCR clone 207205 (TRBV13, TRBJ2-1)
CASSLGGRGEQFF

SEQ ID NO: 414411 - protein, 13 aa, Homo sapiens
  CDR3 for alpha chain variable domain of TCR clone 207206 (TRAV17, TRAJ5)
CALRGTGRRALTF

SEQ ID NO: 414412 - protein, 14 aa, Homo sapiens
  CDR3 for beta chain variable domain of TCR clone 207206 (TRBV11-2, TRBJ2-3)
CASSRLARTDTQYF

SEQ ID NO: 414413 - protein, 21 aa, Homo sapiens
  CDR3 for alpha chain variable domain of TCR clone 207207 (TRAV29/DV5, TRAJ52)
CSVLLCSKREAGGTSYGNLTF

SEQ ID NO: 414414 - protein, 13 aa, Homo sapiens
  CDR3 for beta chain variable domain of TCR clone 207207 (TRBV27, TRBJ1-4)
CASSLMGDEKLFF

SEQ ID NO: 414415 - protein, 18 aa, Homo sapiens
  CDR3 for alpha chain variable domain of TCR clone 207208 (TRAV21, TRAJ52)
CAVRPSPAGGTSYGKLTF

SEQ ID NO: 414416 - protein, 14 aa, Homo sapiens
  CDR3 for beta chain variable domain of TCR clone 207208 (TRBV25-1, TRBJ1-1)
CASTHLGGNTKAFF

SEQ ID NO: 414417 - protein, 18 aa, Homo sapiens
  CDR3 for alpha chain variable domain of TCR clone 207209 (TRAV29/DV5, TRAJ52)
CAAGFRGAGGTSYGKLNF

SEQ ID NO: 414418 - protein, 16 aa, Homo sapiens
  CDR3 for beta chain variable domain of TCR clone 207209 (TRBV7-3, TRBJ2-2)
CASSLKRGTLSGELFF

SEQ ID NO: 414419 - protein, 17 aa, Homo sapiens
  CDR3 for alpha chain variable domain of TCR clone 207210 (TRAV3, TRAJ6)
CAVRDGPRVGGSYIPAF

SEQ ID NO: 414420 - protein, 12 aa, Homo sapiens
  CDR3 for beta chain variable domain of TCR clone 207210 (TRBV11-2, TRBJ2-2)
CASSLGGGELFF

SEQ ID NO: 414421 - protein, 17 aa, Homo sapiens
  CDR3 for alpha chain variable domain of TCR clone 207211 (TRAV8-6, TRAJ58)
CAVSSWVGETSGSRLTF

SEQ ID NO: 414422 - protein, 14 aa, Homo sapiens
  CDR3 for beta chain variable domain of TCR clone 207211 (TRBV6-1, TRBJ1-3)
CASVQGGGGNTMYF

SEQ ID NO: 414423 - protein, 19 aa, Homo sapiens
  CDR3 for alpha chain variable domain of TCR clone 207212 (TRAV8-4, TRAJ16)
CAVSPVGRWPEAALCKWDL

SEQ ID NO: 414424 - protein, 14 aa, Homo sapiens
  CDR3 for beta chain variable domain of TCR clone 207212 (TRBV23-1, TRBJ2-5)
CASSFLRSQETQYF

SEQ ID NO: 414425 - protein, 13 aa, Homo sapiens
  CDR3 for alpha chain variable domain of TCR clone 207213 (TRAV2, TRAJ27)
CAVEAQMQANQPL

SEQ ID NO: 414426 - protein, 13 aa, Homo sapiens
  CDR3 for beta chain variable domain of TCR clone 207213 (TRBV10-2, TRBJ2-3)
CASSESGDHTQYF

SEQ ID NO: 414427 - protein, 10 aa, Homo sapiens
  CDR3 for alpha chain variable domain of TCR clone 207214 (TRAV12-2, TRAJ10)
CAAWTGVETH

SEQ ID NO: 414428 - protein, 15 aa, Homo sapiens
  CDR3 for beta chain variable domain of TCR clone 207214 (TRBV6-4, TRBJ2-1)
CASSSGTSGYNEQFF

SEQ ID NO: 414429 - protein, 15 aa, Homo sapiens
  CDR3 for alpha chain variable domain of TCR clone 207215 (TRAV3, TRAJ22)
CAVRDRGGSARQMTF

SEQ ID NO: 414430 - protein, 17 aa, Homo sapiens
  CDR3 for beta chain variable domain of TCR clone 207215 (TRBV28, TRBJ2-5)
CASSTPEGDALQETQYF

SEQ ID NO: 414431 - protein, 14 aa, Homo sapiens
  CDR3 for alpha chain variable domain of TCR clone 207216 (TRAV13-1, TRAJ13)
CAARRVGGYQKVTF

SEQ ID NO: 414432 - protein, 17 aa, Homo sapiens
  CDR3 for beta chain variable domain of TCR clone 207216 (TRBV15, TRBJ1-5)
CATSRAPPGTRNQPQHF

SEQ ID NO: 414433 - protein, 13 aa, Homo sapiens
  CDR3 for alpha chain variable domain of TCR clone 207217 (TRAV20, TRAJ31)
CAVQAWNNARLMF

SEQ ID NO: 414434 - protein, 15 aa, Homo sapiens
  CDR3 for beta chain variable domain of TCR clone 207217 (TRBV7-2, TRBJ2-7)
CASSFTGQGAQEQYF

SEQ ID NO: 414435 - protein, 12 aa, Homo sapiens
  CDR3 for alpha chain variable domain of TCR clone 207218 (TRAV13-1, TRAJ9)
CASHTGGFKTIF

SEQ ID NO: 414436 - protein, 18 aa, Homo sapiens
  CDR3 for beta chain variable domain of TCR clone 207218 (TRBV11-2, TRBJ2-3)
CASSLGGASRGAANTQYF

SEQ ID NO: 414437 - protein, 12 aa, Homo sapiens
  CDR3 for alpha chain variable domain of TCR clone 207219 (TRAV13-1, TRAJ21)
CAAKEGFNKFYF

SEQ ID NO: 414438 - protein, 19 aa, Homo sapiens
  CDR3 for beta chain variable domain of TCR clone 207219 (TRBV2, TRBJ2-7)
CASSEDETSGRANDYEQYF

SEQ ID NO: 414439 - protein, 14 aa, Homo sapiens
  CDR3 for alpha chain variable domain of TCR clone 207220 (TRAV13-1, TRAJ22)
CAASYSGSARQLTF

SEQ ID NO: 414440 - protein, 13 aa, Homo sapiens
  CDR3 for beta chain variable domain of TCR clone 207220 (TRBV6-3, TRBJ1-2)
CASSLTVDYGYTF

SEQ ID NO: 414441 - protein, 14 aa, Homo sapiens
  CDR3 for alpha chain variable domain of TCR clone 207221 (TRAV9-2, TRAJ39)
CALYIYNAGNMLTF

SEQ ID NO: 414442 - protein, 16 aa, Homo sapiens
  CDR3 for beta chain variable domain of TCR clone 207221 (TRBV7-2, TRBJ2-6)
CASSERRASGANVLTF

SEQ ID NO: 414443 - protein, 17 aa, Homo sapiens
  CDR3 for alpha chain variable domain of TCR clone 207222 (TRAV3, TRAJ38)
CAVRDCLNADNNRKLIW

SEQ ID NO: 414444 - protein, 13 aa, Homo sapiens
  CDR3 for beta chain variable domain of TCR clone 207222 (TRBV23-1, TRBJ1-4)
CASRGKFNEKLFF

SEQ ID NO: 414445 - protein, 18 aa, Homo sapiens
  CDR3 for alpha chain variable domain of TCR clone 207223 (TRAV26-1, TRAJ44)
CIVRVAGGGISTARKLTF

SEQ ID NO: 414446 - protein, 12 aa, Homo sapiens
  CDR3 for beta chain variable domain of TCR clone 207223 (TRBV14, TRBJ2-7)
CASSRLKGEQYF

SEQ ID NO: 414447 - protein, 12 aa, Homo sapiens
  CDR3 for alpha chain variable domain of TCR clone 207224 (TRAV27, TRAJ58)
CAGARDTSWLTF

SEQ ID NO: 414448 - protein, 14 aa, Homo sapiens
  CDR3 for beta chain variable domain of TCR clone 207224 (TRBV7-3, TRBJ2-1)
CASSLGTSANEQFF

SEQ ID NO: 414449 - protein, 13 aa, Homo sapiens
  CDR3 for alpha chain variable domain of TCR clone 207225 (TRAV8-6, TRAJ5)
CAVMDTGRRALTF

SEQ ID NO: 414450 - protein, 12 aa, Homo sapiens
  CDR3 for beta chain variable domain of TCR clone 207225 (TRBV7-9, TRBJ1-6)
CASSASESPLHF

SEQ ID NO: 414451 - protein, 13 aa, Homo sapiens
  CDR3 for alpha chain variable domain of TCR clone 207226 (TRAV12-3, TRAJ9)
CAMRNTGGFKTIF

SEQ ID NO: 414452 - protein, 14 aa, Homo sapiens
  CDR3 for beta chain variable domain of TCR clone 207226 (TRBV28, TRBJ1-2)
CASRIQGANYGYTF

SEQ ID NO: 414453 - protein, 13 aa, Homo sapiens
  CDR3 for alpha chain variable domain of TCR clone 207227 (TRAV20, TRAJ21)
CAVEGYNFNRFYF

SEQ ID NO: 414454 - protein, 14 aa, Homo sapiens
  CDR3 for beta chain variable domain of TCR clone 207227 (TRBV3-1, TRBJ2-5)
CASSQGPDQETQYF

SEQ ID NO: 414455 - protein, 14 aa, Homo sapiens
  CDR3 for alpha chain variable domain of TCR clone 207228 (TRAV16, TRAJ31)
CALSGRNNNARLMF

SEQ ID NO: 414456 - protein, 15 aa, Homo sapiens
  CDR3 for beta chain variable domain of TCR clone 207228 (TRBV6-5, TRBJ2-1)
CASSYDAGAGNEQFF

SEQ ID NO: 414457 - protein, 19 aa, Homo sapiens
  CDR3 for alpha chain variable domain of TCR clone 207229 (TRAV17, TRAJ56)
CFLLLCYGAFTGANSKLTF

SEQ ID NO: 414458 - protein, 14 aa, Homo sapiens
  CDR3 for beta chain variable domain of TCR clone 207229 (TRBV19, TRBJ2-1)
CASPTFVLSGEQFF

SEQ ID NO: 414459 - protein, 13 aa, Homo sapiens
  CDR3 for alpha chain variable domain of TCR clone 207230 (TRAV35, TRAJ48)
CAGHEFGNEKLTS

SEQ ID NO: 414460 - protein, 14 aa, Homo sapiens
  CDR3 for beta chain variable domain of TCR clone 207230 (TRBV19, TRBJ2-1)
CASPTFVLSGEQFF

SEQ ID NO: 414461 - protein, 15 aa, Homo sapiens
  CDR3 for alpha chain variable domain of TCR clone 207231 (TRAV1-2, TRAJ35)
GAVRDPGGFGNVLHC

SEQ ID NO: 414462 - protein, 14 aa, Homo sapiens
  CDR3 for beta chain variable domain of TCR clone 207231 (TRBV5-1, TRBJ2-1)
CASSLDDRFDEQFF

SEQ ID NO: 414463 - protein, 14 aa, Homo sapiens
  CDR3 for alpha chain variable domain of TCR clone 207232 (TRAV8-4, TRAJ13)
CAVTLSCGYQKVTF

SEQ ID NO: 414464 - protein, 14 aa, Homo sapiens
  CDR3 for beta chain variable domain of TCR clone 207232 (TRBV7-2, TRBJ1-2)
CASSQTGSTYGYTF

SEQ ID NO: 414465 - protein, 11 aa, Homo sapiens
  CDR3 for alpha chain variable domain of TCR clone 207233 (TRAV1-2, TRAJ20)
CAVSNDYKLSF

SEQ ID NO: 414466 - protein, 16 aa, Homo sapiens
  CDR3 for beta chain variable domain of TCR clone 207233 (TRBV29-1, TRBJ2-6)
CSVDDITYSGANVLIF

SEQ ID NO: 414467 - protein, 14 aa, Homo sapiens
  CDR3 for alpha chain variable domain of TCR clone 207234 (TRAV26-1, TRAJ45)
CIEVTGGGADGLTF

SEQ ID NO: 414468 - protein, 16 aa, Homo sapiens
  CDR3 for beta chain variable domain of TCR clone 207234 (TRBV6-5, TRBJ2-1)
CASSETLAGHYNEQFF

SEQ ID NO: 414469 - protein, 13 aa, Homo sapiens
  CDR3 for alpha chain variable domain of TCR clone 207235 (TRAV12-2, TRAJ30)
FAVNLNRDDKIIF

SEQ ID NO: 414470 - protein, 14 aa, Homo sapiens
  CDR3 for beta chain variable domain of TCR clone 207235 (TRBV20-1, TRBJ2-3)
CSASSGGSTDTQYF

SEQ ID NO: 414471 - protein, 18 aa, Homo sapiens
  CDR3 for alpha chain variable domain of TCR clone 207236 (TRAV21, TRAJ52)
CAVRPPPAGGTSYGKLTF

SEQ ID NO: 414472 - protein, 15 aa, Homo sapiens
  CDR3 for beta chain variable domain of TCR clone 207236 (TRBV15, TRBJ2-3)
CATSRVRARTDTQYF

SEQ ID NO: 414473 - protein, 12 aa, Homo sapiens
  CDR3 for alpha chain variable domain of TCR clone 207237 (TRAV3, TRAJ20)
CAVRDPDYKLSL

SEQ ID NO: 414474 - protein, 15 aa, Homo sapiens
  CDR3 for beta chain variable domain of TCR clone 207237 (TRBV11-3, TRBJ2-7)
CASSPGPASSYEQYF

SEQ ID NO: 414475 - protein, 16 aa, Homo sapiens
  CDR3 for alpha chain variable domain of TCR clone 207238 (TRAV17, TRAJ53)
CATDALSGGSNDKLTF

SEQ ID NO: 414476 - protein, 16 aa, Homo sapiens
  CDR3 for beta chain variable domain of TCR clone 207238 (TRBV12-5, TRBJ2-5)
CASGPRTSGNQETQYF

SEQ ID NO: 414477 - protein, 16 aa, Homo sapiens
  CDR3 for alpha chain variable domain of TCR clone 207239 (TRAV30, TRAJ24)
CGTEIVDADSWGKFQF

SEQ ID NO: 414478 - protein, 13 aa, Homo sapiens
  CDR3 for beta chain variable domain of TCR clone 207239 (TRBV11-2, TRBJ2-5)
CASSSTGQETQYF

SEQ ID NO: 414479 - protein, 15 aa, Homo sapiens
  CDR3 for alpha chain variable domain of TCR clone 207240 (TRAV8-3, TRAJ45)
CASSYSGGGADGLTF

SEQ ID NO: 414480 - protein, 16 aa, Homo sapiens
  CDR3 for beta chain variable domain of TCR clone 207240 (TRBV6-1, TRBJ2-5)
CASSETLDRGAETQYF

SEQ ID NO: 414481 - protein, 13 aa, Homo sapiens
  CDR3 for alpha chain variable domain of TCR clone 207241 (TRAV26-2, TRAJ43)
CILRAVNNNDMRF

SEQ ID NO: 414482 - protein, 11 aa, Homo sapiens
  CDR3 for beta chain variable domain of TCR clone 207241 (TRBV29-1, TRBJ2-5)
CSEGRTGTQYF

SEQ ID NO: 414483 - protein, 12 aa, Homo sapiens
  CDR3 for alpha chain variable domain of TCR clone 207242 (TRAV13-2, TRAJ23)
CAERHRGGKLTF

SEQ ID NO: 414484 - protein, 13 aa, Homo sapiens
  CDR3 for beta chain variable domain of TCR clone 207242 (TRBV12-4, TRBJ1-2)
CASSLRQGKGYTF

SEQ ID NO: 414485 - protein, 15 aa, Homo sapiens
  CDR3 for alpha chain variable domain of TCR clone 207243 (TRAV36/DV7, TRAJ54)
CAVEKPGQGAQKLVF

SEQ ID NO: 414486 - protein, 14 aa, Homo sapiens
  CDR3 for beta chain variable domain of TCR clone 207243 (TRBV4-3, TRBJ2-2)
CASSQGHVTGELFF

SEQ ID NO: 414487 - protein, 15 aa, Homo sapiens
  CDR3 for alpha chain variable domain of TCR clone 207244 (TRAV3, TRAJ22)
CAVRDRGGSARQLTF

SEQ ID NO: 414488 - protein, 14 aa, Homo sapiens
  CDR3 for beta chain variable domain of TCR clone 207244 (TRBV19, TRBJ1-5)
CASSLGLIEQPQHF

SEQ ID NO: 414489 - protein, 14 aa, Homo sapiens
  CDR3 for alpha chain variable domain of TCR clone 207245 (TRAV8-1, TRAJ34)
CAVITTYNTDTLIF

SEQ ID NO: 414490 - protein, 14 aa, Homo sapiens
  CDR3 for beta chain variable domain of TCR clone 207245 (TRBV11-3, TRBJ1-3)
CASSHNGQGNTIYF

SEQ ID NO: 414491 - protein, 14 aa, Homo sapiens
  CDR3 for alpha chain variable domain of TCR clone 207246 (TRAV17, TRAJ54)
CATDANQGAQKLVF

SEQ ID NO: 414492 - protein, 14 aa, Homo sapiens
  CDR3 for beta chain variable domain of TCR clone 207246 (TRBV4-2, TRBJ2-1)
CASGLDRAYNKQFF

SEQ ID NO: 414493 - protein, 10 aa, Homo sapiens
  CDR3 for alpha chain variable domain of TCR clone 207247 (TRAV8-2, TRAJ31)
CVVVNARLMF

SEQ ID NO: 414494 - protein, 18 aa, Homo sapiens
  CDR3 for beta chain variable domain of TCR clone 207247 (TRBV12-4, TRBJ2-2)
CASSLVAGTRGRTGELFF

SEQ ID NO: 414495 - protein, 14 aa, Homo sapiens
  CDR3 for alpha chain variable domain of TCR clone 207248 (TRAV1-2, TRAJ8)
CAVREDTGVQKLVF

SEQ ID NO: 414496 - protein, 16 aa, Homo sapiens
  CDR3 for beta chain variable domain of TCR clone 207248 (TRBV7-3, TRBJ2-2)
CASSLKRGTLSGELFF

SEQ ID NO: 414497 - protein, 16 aa, Homo sapiens
  CDR3 for alpha chain variable domain of TCR clone 207249 (TRAV17, TRAJ35)
CATAEGGIGFWNVLHC

SEQ ID NO: 414498 - protein, 16 aa, Homo sapiens
  CDR3 for beta chain variable domain of TCR clone 207249 (TRBV6-5, TRBJ2-7)
CASSSDPTSGFYEQYF

SEQ ID NO: 414499 - protein, 16 aa, Homo sapiens
  CDR3 for alpha chain variable domain of TCR clone 207250 (TRAV29/DV5, TRAJ36)
CAASAHYRSGANNLFF

SEQ ID NO: 414500 - protein, 16 aa, Homo sapiens
  CDR3 for beta chain variable domain of TCR clone 207250 (TRBV4-2, TRBJ2-3)
CASSQELAGDTDTQYF

SEQ ID NO: 414501 - protein, 18 aa, Homo sapiens
  CDR3 for alpha chain variable domain of TCR clone 207251 (TRAV21, TRAJ52)
CAVRPSPAGGTSSGKLTF

SEQ ID NO: 414502 - protein, 17 aa, Homo sapiens
  CDR3 for beta chain variable domain of TCR clone 207251 (TRBV13, TRBJ2-3)
CASSLSRVAGGRNTRYF

SEQ ID NO: 414503 - protein, 14 aa, Homo sapiens
  CDR3 for alpha chain variable domain of TCR clone 207252 (TRAV35, TRAJ36)
CAGHRLTGANNLFF

SEQ ID NO: 414504 - protein, 15 aa, Homo sapiens
  CDR3 for beta chain variable domain of TCR clone 207252 (TRBV27, TRBJ2-3)
CASSLGLAATDTQYF

SEQ ID NO: 414505 - protein, 17 aa, Homo sapiens
  CDR3 for alpha chain variable domain of TCR clone 207253 (TRAV12-2, TRAJ6)
CAPQGPPRAGGSYIPTF

SEQ ID NO: 414506 - protein, 16 aa, Homo sapiens
  CDR3 for beta chain variable domain of TCR clone 207253 (TRBV19, TRBJ2-2)
CASSTARASNTGELVF

SEQ ID NO: 414507 - protein, 15 aa, Homo sapiens
  CDR3 for alpha chain variable domain of TCR clone 207254 (TRAV36/DV7, TRAJ54)
CAVEKPVQGAQKLVF

SEQ ID NO: 414508 - protein, 17 aa, Homo sapiens
  CDR3 for beta chain variable domain of TCR clone 207254 (TRBV4-1, TRBJ2-5)
CASSQDPSGGPQETQYF

SEQ ID NO: 414509 - protein, 17 aa, Homo sapiens
  CDR3 for alpha chain variable domain of TCR clone 207255 (TRAV26-1, TRAJ58)
CIVRVGAEETSGSRLTF

SEQ ID NO: 414510 - protein, 13 aa, Homo sapiens
  CDR3 for beta chain variable domain of TCR clone 207255 (TRBV7-6, TRBJ1-2)
CASSLVADYGYTF

SEQ ID NO: 414511 - protein, 15 aa, Homo sapiens
  CDR3 for alpha chain variable domain of TCR clone 207256 (TRAV21, TRAJ53)
CATLKSGGSNYKLTF

SEQ ID NO: 414512 - protein, 16 aa, Homo sapiens
  CDR3 for beta chain variable domain of TCR clone 207256 (TRBV20-1, TRBJ1-4)
CSAPGQGLLTNEKLFF

SEQ ID NO: 414513 - protein, 13 aa, Homo sapiens
  CDR3 for alpha chain variable domain of TCR clone 207257 (TRAV8-3, TRAJ28)
CAVGAVGSYQLTF

SEQ ID NO: 414514 - protein, 20 aa, Homo sapiens
  CDR3 for beta chain variable domain of TCR clone 207257 (TRBV7-2, TRBJ2-2)
CASSHLFPGPTIHITGELFF

SEQ ID NO: 414515 - protein, 12 aa, Homo sapiens
  CDR3 for alpha chain variable domain of TCR clone 207258 (TRAV3, TRAJ20)
CAVRDCDYKLSF

SEQ ID NO: 414516 - protein, 13 aa, Homo sapiens
  CDR3 for beta chain variable domain of TCR clone 207258 (TRBV9, TRBJ2-1)
CASSVGQGGEQFF

SEQ ID NO: 414517 - protein, 17 aa, Homo sapiens
  CDR3 for alpha chain variable domain of TCR clone 207259 (TRAV26-1, TRAJ37)
CIVRVITVSSNTGKLIF

SEQ ID NO: 414518 - protein, 12 aa, Homo sapiens
  CDR3 for beta chain variable domain of TCR clone 207259 (TRBV28, TRBJ2-3)
CASSLYRDTQYF

SEQ ID NO: 414519 - protein, 12 aa, Homo sapiens
  CDR3 for alpha chain variable domain of TCR clone 207260 (TRAV8-3, TRAJ26)
CAGDNYGQNFVF

SEQ ID NO: 414520 - protein, 14 aa, Homo sapiens
  CDR3 for beta chain variable domain of TCR clone 207260 (TRBV19, TRBJ2-1)
YASPTFVLSGEQFF

SEQ ID NO: 414521 - protein, 11 aa, Homo sapiens
  CDR3 for alpha chain variable domain of TCR clone 207261 (TRAV4, TRAJ20)
CLVGDKVTTTS

SEQ ID NO: 414522 - protein, 15 aa, Homo sapiens
  CDR3 for beta chain variable domain of TCR clone 207261 (TRBV28, TRBJ2-1)
CASSLDTSSYNEQFF

SEQ ID NO: 414523 - protein, 12 aa, Homo sapiens
  CDR3 for alpha chain variable domain of TCR clone 207262 (TRAV2, TRAJ31)
CAVEDNNARLMV

SEQ ID NO: 414524 - protein, 16 aa, Homo sapiens
  CDR3 for beta chain variable domain of TCR clone 207262 (TRBV10-3, TRBJ2-1)
CAISGVGDGGGGEQSF

SEQ ID NO: 414525 - protein, 12 aa, Homo sapiens
  CDR3 for alpha chain variable domain of TCR clone 207263 (TRAV29/DV5, TRAJ49)
CAATDTGNQFYF

SEQ ID NO: 414526 - protein, 17 aa, Homo sapiens
  CDR3 for beta chain variable domain of TCR clone 207263 (TRBV28, TRBJ2-5)
CASSRQGGLAGAETQYF

SEQ ID NO: 414527 - protein, 15 aa, Homo sapiens
  CDR3 for alpha chain variable domain of TCR clone 207264 (TRAV3, TRAJ5)
CAVRDRKTGRRALTF

SEQ ID NO: 414528 - protein, 13 aa, Homo sapiens
  CDR3 for beta chain variable domain of TCR clone 207264 (TRBV29-1, TRBJ2-5)
CSVGGTSAETQYF

SEQ ID NO: 414529 - protein, 15 aa, Homo sapiens
  CDR3 for alpha chain variable domain of TCR clone 207265 (TRAV16, TRAJ57)
CALSGGQGGSEKLVF

SEQ ID NO: 414530 - protein, 11 aa, Homo sapiens
  CDR3 for beta chain variable domain of TCR clone 207265 (TRBV12-4, TRBJ2-3)
CASTATDTQYF

SEQ ID NO: 414531 - protein, 14 aa, Homo sapiens
  CDR3 for alpha chain variable domain of TCR clone 207266 (TRAV12-3, TRAJ22)
SAMSLFGSARQLTF

SEQ ID NO: 414532 - protein, 11 aa, Homo sapiens
  CDR3 for beta chain variable domain of TCR clone 207266 (TRBV12-4, TRBJ2-2)
CASSSAGELFF

SEQ ID NO: 414533 - protein, 13 aa, Homo sapiens
  CDR3 for alpha chain variable domain of TCR clone 207267 (TRAV20, TRAJ29)
CAVQAVGKTPLVF

SEQ ID NO: 414534 - protein, 15 aa, Homo sapiens
  CDR3 for beta chain variable domain of TCR clone 207267 (TRBV10-2, TRBJ2-5)
CASRGSGGPQETQYF

SEQ ID NO: 414535 - protein, 12 aa, Homo sapiens
  CDR3 for alpha chain variable domain of TCR clone 207268 (TRAV17, TRAJ57)
CATDGGSEKLVF

SEQ ID NO: 414536 - protein, 13 aa, Homo sapiens
  CDR3 for beta chain variable domain of TCR clone 207268 (TRBV7-9, TRBJ2-7)
CASSFAGANEQYF

SEQ ID NO: 414537 - protein, 14 aa, Homo sapiens
  CDR3 for alpha chain variable domain of TCR clone 207269 (TRAV12-2, TRAJ36)
CAVKISTGANNTFF

SEQ ID NO: 414538 - protein, 14 aa, Homo sapiens
  CDR3 for beta chain variable domain of TCR clone 207269 (TRBV25-1, TRBJ1-2)
CASSDTTGVVGYTF

SEQ ID NO: 414539 - protein, 16 aa, Homo sapiens
  CDR3 for alpha chain variable domain of TCR clone 207270 (TRAV3, TRAJ37)
CAVRVRGSGNTGKLIL

SEQ ID NO: 414540 - protein, 16 aa, Homo sapiens
  CDR3 for beta chain variable domain of TCR clone 207270 (TRBV19, TRBJ2-1)
CASSKAGPSSYNEQFF

SEQ ID NO: 414541 - protein, 14 aa, Homo sapiens
  CDR3 for alpha chain variable domain of TCR clone 207271 (TRAV12-2, TRAJ9)
CAVNMEGGGFKTTF

SEQ ID NO: 414542 - protein, 14 aa, Homo sapiens
  CDR3 for beta chain variable domain of TCR clone 207271 (TRBV27, TRBJ2-5)
CASSSLKGWETQYF

SEQ ID NO: 414543 - protein, 21 aa, Homo sapiens
  CDR3 for alpha chain variable domain of TCR clone 207272 (TRAV8-3, TRAJ32)
CAVEGVLQTSSSLELALCLLS

SEQ ID NO: 414544 - protein, 15 aa, Homo sapiens
  CDR3 for beta chain variable domain of TCR clone 207272 (TRBV7-2, TRBJ2-1)
CASSSRTSREDEQFF

SEQ ID NO: 414545 - protein, 10 aa, Homo sapiens
  CDR3 for alpha chain variable domain of TCR clone 207273 (TRAV30, TRAJ48)
CGIGNEKLTF

SEQ ID NO: 414546 - protein, 13 aa, Homo sapiens
  CDR3 for beta chain variable domain of TCR clone 207273 (TRBV7-6, TRBJ2-3)
CQQRSGGQDTQYF

SEQ ID NO: 414547 - protein, 14 aa, Homo sapiens
  CDR3 for alpha chain variable domain of TCR clone 207274 (TRAV16, TRAJ17)
CAPRIKAAGNNITF

SEQ ID NO: 414548 - protein, 17 aa, Homo sapiens
  CDR3 for beta chain variable domain of TCR clone 207274 (TRBV7-2, TRBJ2-3)
CASSSYSGTRRADTQYF

SEQ ID NO: 414549 - protein, 13 aa, Homo sapiens
  CDR3 for alpha chain variable domain of TCR clone 207275 (TRAV12-2, TRAJ20)
CAVYPSNDYKLSF

SEQ ID NO: 414550 - protein, 15 aa, Homo sapiens
  CDR3 for beta chain variable domain of TCR clone 207275 (TRBV4-1, TRBJ1-2)
CASSQGQGAAYGYTF

SEQ ID NO: 414551 - protein, 11 aa, Homo sapiens
  CDR3 for alpha chain variable domain of TCR clone 207276 (TRAV21, TRAJ48)
CAVDGNEKLTF

SEQ ID NO: 414552 - protein, 16 aa, Homo sapiens
  CDR3 for beta chain variable domain of TCR clone 207276 (TRBV12-4, TRBJ1-5)
CASSSGPRGSNQPQRF

SEQ ID NO: 414553 - protein, 15 aa, Homo sapiens
  CDR3 for alpha chain variable domain of TCR clone 207277 (TRAV17, TRAJ57)
CATGPSQGGSEKLVF

SEQ ID NO: 414554 - protein, 15 aa, Homo sapiens
  CDR3 for beta chain variable domain of TCR clone 207277 (TRBV11-2, TRBJ2-7)
CASSLRGGLSYEQYF

SEQ ID NO: 414555 - protein, 23 aa, Homo sapiens
  CDR3 for alpha chain variable domain of TCR clone 207278 (TRAV26-1, TRAJ38)
CIADNAGNNHIQNPDPAVYQLRD

SEQ ID NO: 414556 - protein, 12 aa, Homo sapiens
  CDR3 for beta chain variable domain of TCR clone 207278 (TRBV3-1, TRBJ2-7)
CASSQVRYEQYF

SEQ ID NO: 414557 - protein, 22 aa, Homo sapiens
  CDR3 for alpha chain variable domain of TCR clone 207279 (TRAV16, )
CALRTQIPDIQNTDPAVYQLRD

SEQ ID NO: 414558 - protein, 16 aa, Homo sapiens
  CDR3 for beta chain variable domain of TCR clone 207279 (TRBV7-2, TRBJ1-2)
CASSSNQDRRGHGYTF

SEQ ID NO: 414559 - protein, 13 aa, Homo sapiens
  CDR3 for alpha chain variable domain of TCR clone 207280 (TRAV20, TRAJ31)
CAMQAWNNARLMF

SEQ ID NO: 414560 - protein, 14 aa, Homo sapiens
  CDR3 for beta chain variable domain of TCR clone 207280 (TRBV7-6, TRBJ2-3)
CASSLGTVTDTQYF

SEQ ID NO: 414561 - protein, 13 aa, Homo sapiens
  CDR3 for alpha chain variable domain of TCR clone 207281 (TRAV12-2, TRAJ39)
CAVNNNAGNLLTV

SEQ ID NO: 414562 - protein, 13 aa, Homo sapiens
  CDR3 for beta chain variable domain of TCR clone 207281 (TRBV2, TRBJ1-5)
CATAGPGNQPQHF

SEQ ID NO: 414563 - protein, 14 aa, Homo sapiens
  CDR3 for alpha chain variable domain of TCR clone 207282 (TRAV4, TRAJ9)
CLVGSGTGGFKTIF

SEQ ID NO: 414564 - protein, 15 aa, Homo sapiens
  CDR3 for beta chain variable domain of TCR clone 207282 (TRBV7-2, TRBJ2-1)
CASSLAIGRVNEQFF

SEQ ID NO: 414565 - protein, 14 aa, Homo sapiens
  CDR3 for alpha chain variable domain of TCR clone 207283 (TRAV1-2, TRAJ8)
CAVGEDTGFQKLVF

SEQ ID NO: 414566 - protein, 13 aa, Homo sapiens
  CDR3 for beta chain variable domain of TCR clone 207283 (TRBV7-6, TRBJ1-2)
CASSLVADYGYTF

SEQ ID NO: 414567 - protein, 14 aa, Homo sapiens
  CDR3 for alpha chain variable domain of TCR clone 207284 (TRAV12-2, TRAJ17)
CAALFKAAGNTLTF

SEQ ID NO: 414568 - protein, 17 aa, Homo sapiens
  CDR3 for beta chain variable domain of TCR clone 207284 (TRBV20-1, TRBJ2-2)
CSASGSGQGGLTGELFF

SEQ ID NO: 414569 - protein, 14 aa, Homo sapiens
  CDR3 for alpha chain variable domain of TCR clone 207285 (TRAV38-1, TRAJ45)
CAYYSGGGADGLTF

SEQ ID NO: 414570 - protein, 14 aa, Homo sapiens
  CDR3 for beta chain variable domain of TCR clone 207285 (TRBV25-1, TRBJ1-1)
CASTHLGGNTEAFC

SEQ ID NO: 414571 - protein, 15 aa, Homo sapiens
  CDR3 for alpha chain variable domain of TCR clone 207286 (TRAV13-1, TRAJ44)
CAASRNTGTASKLTF

SEQ ID NO: 414572 - protein, 13 aa, Homo sapiens
  CDR3 for beta chain variable domain of TCR clone 207286 (TRBV4-2, TRBJ1-1)
CASSQAGNTEAVF

SEQ ID NO: 414573 - protein, 12 aa, Homo sapiens
  CDR3 for alpha chain variable domain of TCR clone 207287 (TRAV16, TRAJ10)
CSRTGGGNKLTF

SEQ ID NO: 414574 - protein, 12 aa, Homo sapiens
  CDR3 for beta chain variable domain of TCR clone 207287 (TRBV2, TRBJ2-1)
CAYGPPGNEQFF

SEQ ID NO: 414575 - protein, 11 aa, Homo sapiens
  CDR3 for alpha chain variable domain of TCR clone 207288 (TRAV21, TRAJ27)
CAVRMQANQPL

SEQ ID NO: 414576 - protein, 13 aa, Homo sapiens
  CDR3 for beta chain variable domain of TCR clone 207288 (TRBV7-9, TRBJ1-2)
CASSLEQNYGYTF

SEQ ID NO: 414577 - protein, 16 aa, Homo sapiens
  CDR3 for alpha chain variable domain of TCR clone 207289 (TRAV3, TRAJ23)
CAVEPLIYNPGGKLIF

SEQ ID NO: 414578 - protein, 15 aa, Homo sapiens
  CDR3 for beta chain variable domain of TCR clone 207289 (TRBV19, TRBJ1-5)
CASSPEGRPNQPQHF

SEQ ID NO: 414579 - protein, 14 aa, Homo sapiens
  CDR3 for alpha chain variable domain of TCR clone 207290 (TRAV35, TRAJ53)
CAGNSGGSNYKLTF

SEQ ID NO: 414580 - protein, 16 aa, Homo sapiens
  CDR3 for beta chain variable domain of TCR clone 207290 (TRBV7-2, TRBJ1-2)
CASSSTSGASLGGYTF

SEQ ID NO: 414581 - protein, 17 aa, Homo sapiens
  CDR3 for alpha chain variable domain of TCR clone 207291 (TRAV26-2, TRAJ37)
CILRDRGGSSNTGKLIF

SEQ ID NO: 414582 - protein, 14 aa, Homo sapiens
  CDR3 for beta chain variable domain of TCR clone 207291 (TRBV6-1, TRBJ1-3)
CASVQRGGGNTIYF

SEQ ID NO: 414583 - protein, 14 aa, Homo sapiens
  CDR3 for alpha chain variable domain of TCR clone 207292 (TRAV2, TRAJ34)
CAVGGGYNTDKLIF

SEQ ID NO: 414584 - protein, 14 aa, Homo sapiens
  CDR3 for beta chain variable domain of TCR clone 207292 (TRBV2, TRBJ2-5)
CASKRDGTTETQYF

SEQ ID NO: 414585 - protein, 14 aa, Homo sapiens
  CDR3 for alpha chain variable domain of TCR clone 207293 (TRAV8-1, TRAJ5)
CAVRTDTGRRALTF

SEQ ID NO: 414586 - protein, 14 aa, Homo sapiens
  CDR3 for beta chain variable domain of TCR clone 207293 (TRBV7-8, TRBJ2-3)
CASSVPDGQDTQYF

SEQ ID NO: 414587 - protein, 12 aa, Homo sapiens
  CDR3 for alpha chain variable domain of TCR clone 207294 (TRAV2, TRAJ10)
CASTGGGNKLTF

SEQ ID NO: 414588 - protein, 14 aa, Homo sapiens
  CDR3 for beta chain variable domain of TCR clone 207294 (TRBV7-2, TRBJ2-5)
CASSLAGGGETQYF

SEQ ID NO: 414589 - protein, 12 aa, Homo sapiens
  CDR3 for alpha chain variable domain of TCR clone 207295 (TRAV13-1, TRAJ48)
CAANFGNEKLTF

SEQ ID NO: 414590 - protein, 15 aa, Homo sapiens
  CDR3 for beta chain variable domain of TCR clone 207295 (TRBV4-1, TRBJ1-4)
CASSDTGGTNEKLFF

SEQ ID NO: 414591 - protein, 14 aa, Homo sapiens
  CDR3 for alpha chain variable domain of TCR clone 207296 (TRAV12-3, TRAJ10)
SQLPLTGGGNKLTF

SEQ ID NO: 414592 - protein, 15 aa, Homo sapiens
  CDR3 for beta chain variable domain of TCR clone 207296 (TRBV7-9, TRBJ1-6)
CASSSPGRGNSPLHF

SEQ ID NO: 414593 - protein, 17 aa, Homo sapiens
  CDR3 for alpha chain variable domain of TCR clone 207297 (TRAV3, TRAJ6)
CAVRDGPRAGGSYIPTF

SEQ ID NO: 414594 - protein, 20 aa, Homo sapiens
  CDR3 for beta chain variable domain of TCR clone 207297 (TRBV7-8, TRBJ2-2)
CACSHLFPGPTIHITGELFF

SEQ ID NO: 414595 - protein, 15 aa, Homo sapiens
  CDR3 for alpha chain variable domain of TCR clone 207298 (TRAV1-2, TRAJ30)
CAVRPHGNRDDKLIL

SEQ ID NO: 414596 - protein, 13 aa, Homo sapiens
  CDR3 for beta chain variable domain of TCR clone 207298 (TRBV4-1, TRBJ2-7)
CASSQGQAYEQYF

SEQ ID NO: 414597 - protein, 13 aa, Homo sapiens
  CDR3 for alpha chain variable domain of TCR clone 207299 (TRAV17, TRAJ40)
CATRPSGTYKYIF

SEQ ID NO: 414598 - protein, 16 aa, Homo sapiens
  CDR3 for beta chain variable domain of TCR clone 207299 (TRBV27, TRBJ2-2)
CASSFRGLVRTGELFF

SEQ ID NO: 414599 - protein, 14 aa, Homo sapiens
  CDR3 for alpha chain variable domain of TCR clone 207300 (TRAV12-2, TRAJ13)
CAVKKTGGYQKVTF

SEQ ID NO: 414600 - protein, 15 aa, Homo sapiens
  CDR3 for beta chain variable domain of TCR clone 207300 (TRBV7-2, TRBJ2-1)
CASRLASGRVNEQFF

SEQ ID NO: 414601 - protein, 12 aa, Homo sapiens
  CDR3 for alpha chain variable domain of TCR clone 207301 (TRAV12-3, TRAJ17)
CAMTLTGNKLTF

SEQ ID NO: 414602 - protein, 13 aa, Homo sapiens
  CDR3 for beta chain variable domain of TCR clone 207301 (TRBV20-1, TRBJ2-5)
CSAGGDYQETQYF

SEQ ID NO: 414603 - protein, 15 aa, Homo sapiens
  CDR3 for alpha chain variable domain of TCR clone 207302 (TRAV26-1, TRAJ38)
CIASSNAGNNRKLIW

SEQ ID NO: 414604 - protein, 12 aa, Homo sapiens
  CDR3 for beta chain variable domain of TCR clone 207302 (TRBV5-8, TRBJ1-2)
CASSFGVYGYAF

SEQ ID NO: 414605 - protein, 17 aa, Homo sapiens
  CDR3 for alpha chain variable domain of TCR clone 207303 (TRAV26-1, TRAJ58)
CIVRVGAEETSGSRLTF

SEQ ID NO: 414606 - protein, 18 aa, Homo sapiens
  CDR3 for beta chain variable domain of TCR clone 207303 (TRBV7-9, TRBJ2-7)
RASSLTTSGSRTWYEQYF

SEQ ID NO: 414607 - protein, 16 aa, Homo sapiens
  CDR3 for alpha chain variable domain of TCR clone 207304 (TRAV3, TRAJ3)
CAVRDRAKSSASKIIL

SEQ ID NO: 414608 - protein, 16 aa, Homo sapiens
  CDR3 for beta chain variable domain of TCR clone 207304 (TRBV20-1, TRBJ2-4)
CSATSLAELAKNIQYF

SEQ ID NO: 414609 - protein, 12 aa, Homo sapiens
  CDR3 for alpha chain variable domain of TCR clone 207305 (TRAV12-3, TRAJ21)
CAMLNNFNKFYF

SEQ ID NO: 414610 - protein, 14 aa, Homo sapiens
  CDR3 for beta chain variable domain of TCR clone 207305 (TRBV28, TRBJ2-1)
CASSIQGTVGEQFF

SEQ ID NO: 414611 - protein, 13 aa, Homo sapiens
  CDR3 for alpha chain variable domain of TCR clone 207306 (TRAV8-6, TRAJ49)
CAVITNTGNSSIL

SEQ ID NO: 414612 - protein, 14 aa, Homo sapiens
  CDR3 for beta chain variable domain of TCR clone 207306 (TRBV19, TRBJ2-1)
CASPTFVLSGEQFF

SEQ ID NO: 414613 - protein, 15 aa, Homo sapiens
  CDR3 for alpha chain variable domain of TCR clone 207307 (TRAV12-3, TRAJ6)
CAMSATTGGSYIPTF

SEQ ID NO: 414614 - protein, 14 aa, Homo sapiens
  CDR3 for beta chain variable domain of TCR clone 207307 (TRBV15, TRBJ2-5)
CATSIGGLGETQYF

SEQ ID NO: 414615 - protein, 12 aa, Homo sapiens
  CDR3 for alpha chain variable domain of TCR clone 207308 (TRAV29/DV5, TRAJ34)
CAARHNTDKPIF

SEQ ID NO: 414616 - protein, 14 aa, Homo sapiens
  CDR3 for beta chain variable domain of TCR clone 207308 (TRBV7-2, TRBJ1-5)
CASSTQGAGQPQHF

SEQ ID NO: 414617 - protein, 16 aa, Homo sapiens
  CDR3 for alpha chain variable domain of TCR clone 207309 (TRAV30, TRAJ24)
CGKEIVDAHSWGKFQF

SEQ ID NO: 414618 - protein, 14 aa, Homo sapiens
  CDR3 for beta chain variable domain of TCR clone 207309 (TRBV12-5, TRBJ2-5)
CASGSRTHQETQYF

SEQ ID NO: 414619 - protein, 14 aa, Homo sapiens
  CDR3 for alpha chain variable domain of TCR clone 207310 (TRAV1-2, TRAJ8)
CAVREDTGFQKLGF

SEQ ID NO: 414620 - protein, 13 aa, Homo sapiens
  CDR3 for beta chain variable domain of TCR clone 207310 (TRBV12-4, TRBJ2-5)
CASRKRGKETQYF

SEQ ID NO: 414621 - protein, 14 aa, Homo sapiens
  CDR3 for alpha chain variable domain of TCR clone 207311 (TRAV1-2, TRAJ8)
CALREDTGFQKLVL

SEQ ID NO: 414622 - protein, 15 aa, Homo sapiens
  CDR3 for beta chain variable domain of TCR clone 207311 (TRBV5-5, TRBJ1-5)
CASSSTPGSNQPQHF

SEQ ID NO: 414623 - protein, 12 aa, Homo sapiens
  CDR3 for alpha chain variable domain of TCR clone 207312 (TRAV17, TRAJ12)
CATLRSSYKLIF

SEQ ID NO: 414624 - protein, 13 aa, Homo sapiens
  CDR3 for beta chain variable domain of TCR clone 207312 (TRBV2, TRBJ2-7)
CASSVGGSGEQYF

SEQ ID NO: 414625 - protein, 11 aa, Homo sapiens
  CDR3 for alpha chain variable domain of TCR clone 207313 (TRAV12-3, TRAJ49)
CAMSSGNQFNF

SEQ ID NO: 414626 - protein, 17 aa, Homo sapiens
  CDR3 for beta chain variable domain of TCR clone 207313 (TRBV5-7, TRBJ2-7)
CASSLWRVLAGSYEQYF

SEQ ID NO: 414627 - protein, 14 aa, Homo sapiens
  CDR3 for alpha chain variable domain of TCR clone 207314 (TRAV1-2, TRAJ16)
CAVNRFSDCQKLLF

SEQ ID NO: 414628 - protein, 14 aa, Homo sapiens
  CDR3 for beta chain variable domain of TCR clone 207314 (TRBV20-1, TRBJ2-1)
CSARGGSSYNEQFF

SEQ ID NO: 414629 - protein, 16 aa, Homo sapiens
  CDR3 for alpha chain variable domain of TCR clone 207315 (TRAV41, TRAJ53)
CATPRGSGGSNYKLTF

SEQ ID NO: 414630 - protein, 15 aa, Homo sapiens
  CDR3 for beta chain variable domain of TCR clone 207315 (TRBV27, TRBJ2-2)
CASSLEGPNTGELFS

SEQ ID NO: 414631 - protein, 14 aa, Homo sapiens
  CDR3 for alpha chain variable domain of TCR clone 207316 (TRAV1-1, TRAJ27)
CAVIYNTNAGKSTF

SEQ ID NO: 414632 - protein, 15 aa, Homo sapiens
  CDR3 for beta chain variable domain of TCR clone 207316 (TRBV7-2, TRBJ2-1)
CASSSGLAGDNEQFF

SEQ ID NO: 414633 - protein, 14 aa, Homo sapiens
  CDR3 for alpha chain variable domain of TCR clone 207317 (TRAV21, TRAJ35)
CAVMPIGFGNVLHC

SEQ ID NO: 414634 - protein, 14 aa, Homo sapiens
  CDR3 for beta chain variable domain of TCR clone 207317 (TRBV7-2, TRBJ2-7)
CASSPKTSFYEQYF

SEQ ID NO: 414635 - protein, 15 aa, Homo sapiens
  CDR3 for alpha chain variable domain of TCR clone 207318 (TRAV13-2, TRAJ10)
CAENKIGGGGNKLTF

SEQ ID NO: 414636 - protein, 12 aa, Homo sapiens
  CDR3 for beta chain variable domain of TCR clone 207318 (TRBV7-9, TRBJ2-7)
CASSIKREEQYF

SEQ ID NO: 414637 - protein, 14 aa, Homo sapiens
  CDR3 for alpha chain variable domain of TCR clone 207319 (TRAV8-3, TRAJ4)
CAVGAAGGYNKLLF

SEQ ID NO: 414638 - protein, 15 aa, Homo sapiens
  CDR3 for beta chain variable domain of TCR clone 207319 (TRBV5-1, TRBJ2-1)
CASSPPRAPYNEQFF

SEQ ID NO: 414639 - protein, 12 aa, Homo sapiens
  CDR3 for alpha chain variable domain of TCR clone 207320 (TRAV21, TRAJ33)
CAKLDSNYQLIW

SEQ ID NO: 414640 - protein, 14 aa, Homo sapiens
  CDR3 for beta chain variable domain of TCR clone 207320 (TRBV12-4, TRBJ2-3)
CASTIAGWGDTQYF

SEQ ID NO: 414641 - protein, 14 aa, Homo sapiens
  CDR3 for alpha chain variable domain of TCR clone 207321 (TRAV12-1, TRAJ17)
CVVNYKAAGNKLTF

SEQ ID NO: 414642 - protein, 14 aa, Homo sapiens
  CDR3 for beta chain variable domain of TCR clone 207321 (TRBV20-1, TRBJ1-1)
CSAQTRIGGTEAFV

SEQ ID NO: 414643 - protein, 14 aa, Homo sapiens
  CDR3 for alpha chain variable domain of TCR clone 207322 (TRAV12-2, TRAJ17)
CAALFKAAGNKLTF

SEQ ID NO: 414644 - protein, 16 aa, Homo sapiens
  CDR3 for beta chain variable domain of TCR clone 207322 (TRBV20-1, TRBJ2-2)
CSASASGIPGAEELFF

SEQ ID NO: 414645 - protein, 12 aa, Homo sapiens
  CDR3 for alpha chain variable domain of TCR clone 207323 (TRAV12-3, TRAJ17)
SSMTLTGNKLTF

SEQ ID NO: 414646 - protein, 15 aa, Homo sapiens
  CDR3 for beta chain variable domain of TCR clone 207323 (TRBV20-1, TRBJ2-7)
CSARDRVSGMDEQYF

SEQ ID NO: 414647 - protein, 14 aa, Homo sapiens
  CDR3 for alpha chain variable domain of TCR clone 207324 (TRAV12-3, TRAJ29)
CAMSLLLGNTPLVF

SEQ ID NO: 414648 - protein, 16 aa, Homo sapiens
  CDR3 for beta chain variable domain of TCR clone 207324 (TRBV28, TRBJ2-7)
CASSSGTSGRGYEQYF

SEQ ID NO: 414649 - protein, 15 aa, Homo sapiens
  CDR3 for alpha chain variable domain of TCR clone 207325 (TRAV27, TRAJ38)
CAARRNAGNNRKLIW

SEQ ID NO: 414650 - protein, 13 aa, Homo sapiens
  CDR3 for beta chain variable domain of TCR clone 207325 (TRBV20-1, TRBJ2-7)
CSARGDTQDEQYF

SEQ ID NO: 414651 - protein, 18 aa, Homo sapiens
  CDR3 for alpha chain variable domain of TCR clone 207326 (TRAV13-1, TRAJ52)
CAASKRSAGGASYGKLKF

SEQ ID NO: 414652 - protein, 13 aa, Homo sapiens
  CDR3 for beta chain variable domain of TCR clone 207326 (TRBV12-4, TRBJ1-2)
CASSLRQGKGYTF

SEQ ID NO: 414653 - protein, 12 aa, Homo sapiens
  CDR3 for alpha chain variable domain of TCR clone 207327 (TRAV12-1, TRAJ40)
CVVPSGTYKYIF

SEQ ID NO: 414654 - protein, 15 aa, Homo sapiens
  CDR3 for beta chain variable domain of TCR clone 207327 (TRBV12-4, TRBJ2-1)
CASSPLGGRNNEQFF

SEQ ID NO: 414655 - protein, 12 aa, Homo sapiens
  CDR3 for alpha chain variable domain of TCR clone 207328 (TRAV13-1, TRAJ21)
CAAKEGFNKFYF

SEQ ID NO: 414656 - protein, 14 aa, Homo sapiens
  CDR3 for beta chain variable domain of TCR clone 207328 (TRBV5-1, TRBJ2-5)
CASSRGESLYEQYF

SEQ ID NO: 414657 - protein, 11 aa, Homo sapiens
  CDR3 for alpha chain variable domain of TCR clone 207329 (TRAV17, TRAJ9)
CATTGGFKTIF

SEQ ID NO: 414658 - protein, 12 aa, Homo sapiens
  CDR3 for beta chain variable domain of TCR clone 207329 (TRBV7-9, TRBJ2-7)
CASSIKREEQYF

SEQ ID NO: 414659 - protein, 13 aa, Homo sapiens
  CDR3 for alpha chain variable domain of TCR clone 207330 (TRAV6, TRAJ16)
CALDDSDGQKLLF

SEQ ID NO: 414660 - protein, 13 aa, Homo sapiens
  CDR3 for beta chain variable domain of TCR clone 207330 (TRBV9, TRBJ2-1)
CASSVGQGGEQFF

SEQ ID NO: 414661 - protein, 19 aa, Homo sapiens
  CDR3 for alpha chain variable domain of TCR clone 207331 (TRAV12-1, TRAJ42)
SVIQPPTSVKGGSQGNLIF

SEQ ID NO: 414662 - protein, 14 aa, Homo sapiens
  CDR3 for beta chain variable domain of TCR clone 207331 (TRBV25-1, TRBJ1-2)
CASSDTTGVVGYTF

SEQ ID NO: 414663 - protein, 12 aa, Homo sapiens
  CDR3 for alpha chain variable domain of TCR clone 207332 (TRAV12-1, TRAJ40)
CVVYSGTYKYIF

SEQ ID NO: 414664 - protein, 14 aa, Homo sapiens
  CDR3 for beta chain variable domain of TCR clone 207332 (TRBV7-7, TRBJ2-2)
CATRQDSDTGELFF

SEQ ID NO: 414665 - protein, 13 aa, Homo sapiens
  CDR3 for alpha chain variable domain of TCR clone 207333 (TRAV26-1, TRAJ29)
CIVRGSGNTPLVF

SEQ ID NO: 414666 - protein, 18 aa, Homo sapiens
  CDR3 for beta chain variable domain of TCR clone 207333 (TRBV11-2, TRBJ2-7)
CASSLARQGLTTSSTSGR

SEQ ID NO: 414667 - protein, 11 aa, Homo sapiens
  CDR3 for alpha chain variable domain of TCR clone 207334 (TRAV21, TRAJ34)
CAVTNTDKLIF

SEQ ID NO: 414668 - protein, 15 aa, Homo sapiens
  CDR3 for beta chain variable domain of TCR clone 207334 (TRBV28, TRBJ2-7)
CASSPGGRGFYEQYF

SEQ ID NO: 414669 - protein, 15 aa, Homo sapiens
  CDR3 for alpha chain variable domain of TCR clone 207335 (TRAV3, TRAJ36)
CAVRASQTGANNLFF

SEQ ID NO: 414670 - protein, 16 aa, Homo sapiens
  CDR3 for beta chain variable domain of TCR clone 207335 (TRBV7-9, TRBJ1-2)
CASSLGFSSGEDGYTF

SEQ ID NO: 414671 - protein, 16 aa, Homo sapiens
  CDR3 for alpha chain variable domain of TCR clone 207336 (TRAV12-3, TRAJ53)
CAMSPGSGGSNYKLTF

SEQ ID NO: 414672 - protein, 14 aa, Homo sapiens
  CDR3 for beta chain variable domain of TCR clone 207336 (TRBV6-5, TRBJ2-7)
CAASRSGGSYEQYF

SEQ ID NO: 414673 - protein, 17 aa, Homo sapiens
  CDR3 for alpha chain variable domain of TCR clone 207337 (TRAV13-1, TRAJ53)
CAASWKSSGGSNYKLTF

SEQ ID NO: 414674 - protein, 15 aa, Homo sapiens
  CDR3 for beta chain variable domain of TCR clone 207337 (TRBV20-1, TRBJ2-7)
CSARDRVSGMDEQYF

SEQ ID NO: 414675 - protein, 17 aa, Homo sapiens
  CDR3 for alpha chain variable domain of TCR clone 207338 (TRAV8-4, TRAJ11)
CAVSDRGENAGYSTLTF

SEQ ID NO: 414676 - protein, 14 aa, Homo sapiens
  CDR3 for beta chain variable domain of TCR clone 207338 (TRBV20-1, TRBJ2-1)
CSPNDEASYNEQFF

SEQ ID NO: 414677 - protein, 14 aa, Homo sapiens
  CDR3 for alpha chain variable domain of TCR clone 207339 (TRAV26-1, TRAJ21)
CIVRVVYNFNKFYF

SEQ ID NO: 414678 - protein, 11 aa, Homo sapiens
  CDR3 for beta chain variable domain of TCR clone 207339 (TRBV5-6, TRBJ2-5)
CANSLERTQYF

SEQ ID NO: 414679 - protein, 20 aa, Homo sapiens
  CDR3 for alpha chain variable domain of TCR clone 207340 (TRAV12-1, TRAJ42)
SSVIQPPTSVKGGSQGNLIF

SEQ ID NO: 414680 - protein, 18 aa, Homo sapiens
  CDR3 for beta chain variable domain of TCR clone 207340 (TRBV11-2, TRBJ2-3)
CASSLGGTSRGAPNTQYF

SEQ ID NO: 414681 - protein, 15 aa, Homo sapiens
  CDR3 for alpha chain variable domain of TCR clone 207341 (TRAV17, TRAJ40)
CATVSSTSGTYKYIF

SEQ ID NO: 414682 - protein, 13 aa, Homo sapiens
  CDR3 for beta chain variable domain of TCR clone 207341 (TRBV4-1, TRBJ2-5)
CASSLTRGETQYF

SEQ ID NO: 414683 - protein, 12 aa, Homo sapiens
  CDR3 for alpha chain variable domain of TCR clone 207342 (TRAV3, TRAJ43)
CAVRDPNNDMRF

SEQ ID NO: 414684 - protein, 17 aa, Homo sapiens
  CDR3 for beta chain variable domain of TCR clone 207342 (TRBV7-8, TRBJ2-6)
CASSAGTGGAGANVLTF

SEQ ID NO: 414685 - protein, 15 aa, Homo sapiens
  CDR3 for alpha chain variable domain of TCR clone 207343 (TRAV2, TRAJ37)
CAVEDGSSNTGNLIF

SEQ ID NO: 414686 - protein, 13 aa, Homo sapiens
  CDR3 for beta chain variable domain of TCR clone 207343 (TRBV20-1, TRBJ1-6)
CSTFREGKSPLHF

SEQ ID NO: 414687 - protein, 16 aa, Homo sapiens
  CDR3 for alpha chain variable domain of TCR clone 207344 (TRAV12-3, TRAJ45)
CAMGWGSGGGADGLTF

SEQ ID NO: 414688 - protein, 18 aa, Homo sapiens
  CDR3 for beta chain variable domain of TCR clone 207344 (TRBV12-4, TRBJ2-2)
CASSLVAGTRGRTGELFF

SEQ ID NO: 414689 - protein, 14 aa, Homo sapiens
  CDR3 for alpha chain variable domain of TCR clone 207345 (TRAV12-3, TRAJ58)
CAMSTETSGSRLTF

SEQ ID NO: 414690 - protein, 14 aa, Homo sapiens
  CDR3 for beta chain variable domain of TCR clone 207345 (TRBV11-2, TRBJ2-7)
CASSSTGEGYEQYF

SEQ ID NO: 414691 - protein, 12 aa, Homo sapiens
  CDR3 for alpha chain variable domain of TCR clone 207346 (TRAV27, TRAJ35)
YAGADFGNVLHC

SEQ ID NO: 414692 - protein, 16 aa, Homo sapiens
  CDR3 for beta chain variable domain of TCR clone 207346 (TRBV4-1, TRBJ2-5)
CASSQAIAASSATQYF

SEQ ID NO: 414693 - protein, 13 aa, Homo sapiens
  CDR3 for alpha chain variable domain of TCR clone 207347 (TRAV21, TRAJ24)
GLMTTDSWGKLQF

SEQ ID NO: 414694 - protein, 14 aa, Homo sapiens
  CDR3 for beta chain variable domain of TCR clone 207347 (TRBV11-2, TRBJ2-7)
CASSPPATSSTSGR

SEQ ID NO: 414695 - protein, 16 aa, Homo sapiens
  CDR3 for alpha chain variable domain of TCR clone 207348 (TRAV23/DV6, TRAJ10)
CAASRLLYSREEETNS

SEQ ID NO: 414696 - protein, 15 aa, Homo sapiens
  CDR3 for beta chain variable domain of TCR clone 207348 (TRBV20-1, TRBJ2-1)
CSAEGGLLAGDEQFF

SEQ ID NO: 414697 - protein, 13 aa, Homo sapiens
  CDR3 for alpha chain variable domain of TCR clone 207349 (TRAV20, TRAJ42)
CAVQGGSQGNLIF

SEQ ID NO: 414698 - protein, 13 aa, Homo sapiens
  CDR3 for beta chain variable domain of TCR clone 207349 (TRBV7-3, TRBJ1-1)
CASSQDWGAEAFF

SEQ ID NO: 414699 - protein, 16 aa, Homo sapiens
  CDR3 for alpha chain variable domain of TCR clone 207350 (TRAV3, TRAJ42)
CAVRRNYGGSQGNLIF

SEQ ID NO: 414700 - protein, 12 aa, Homo sapiens
  CDR3 for beta chain variable domain of TCR clone 207350 (TRBV12-4, TRBJ2-7)
CASSLGGYEQYF

SEQ ID NO: 414701 - protein, 17 aa, Homo sapiens
  CDR3 for alpha chain variable domain of TCR clone 207351 (TRAV3, TRAJ6)
CAVSRRTDTGGSYIPTF

SEQ ID NO: 414702 - protein, 18 aa, Homo sapiens
  CDR3 for beta chain variable domain of TCR clone 207351 (TRBV7-2, TRBJ2-3)
CASSLETSRGLKADTQYF

SEQ ID NO: 414703 - protein, 20 aa, Homo sapiens
  CDR3 for alpha chain variable domain of TCR clone 207352 (TRAV14/DV4, TRAJ22)
CAMREGPFSISSGSARQLTF

SEQ ID NO: 414704 - protein, 17 aa, Homo sapiens
  CDR3 for beta chain variable domain of TCR clone 207352 (TRBV11-2, TRBJ2-1)
CASSLYPPGVEYNEQFF

SEQ ID NO: 414705 - protein, 14 aa, Homo sapiens
  CDR3 for alpha chain variable domain of TCR clone 207353 (TRAV35, TRAJ50)
CPGHRKTSYDKVIF

SEQ ID NO: 414706 - protein, 13 aa, Homo sapiens
  CDR3 for beta chain variable domain of TCR clone 207353 (TRBV7-7, TRBJ2-3)
CASSLSRAETQYF

SEQ ID NO: 414707 - protein, 10 aa, Homo sapiens
  CDR3 for alpha chain variable domain of TCR clone 207354 (TRAV12-3, TRAJ49)
CAMNDDQFYF

SEQ ID NO: 414708 - protein, 15 aa, Homo sapiens
  CDR3 for beta chain variable domain of TCR clone 207354 (TRBV2, TRBJ2-7)
CASSEGLARSYEQYF

SEQ ID NO: 414709 - protein, 12 aa, Homo sapiens
  CDR3 for alpha chain variable domain of TCR clone 207355 (TRAV8-3, TRAJ40)
CAVGSGTYKYIF

SEQ ID NO: 414710 - protein, 14 aa, Homo sapiens
  CDR3 for beta chain variable domain of TCR clone 207355 (TRBV6-1, TRBJ1-3)
CASVQGGGGNTIYF

SEQ ID NO: 414711 - protein, 15 aa, Homo sapiens
  CDR3 for alpha chain variable domain of TCR clone 207356 (TRAV14/DV4, TRAJ12)
CAMREERDSSYKLIF

SEQ ID NO: 414712 - protein, 16 aa, Homo sapiens
  CDR3 for beta chain variable domain of TCR clone 207356 (TRBV11-2, TRBJ1-2)
CASSLDTAGADYGYTF

SEQ ID NO: 414713 - protein, 12 aa, Homo sapiens
  CDR3 for alpha chain variable domain of TCR clone 207357 (TRAV12-1, TRAJ23)
CVVNNQGGKLIF

SEQ ID NO: 414714 - protein, 16 aa, Homo sapiens
  CDR3 for beta chain variable domain of TCR clone 207357 (TRBV11-1, TRBJ2-7)
CAGSAQTGTLSYEQYF

SEQ ID NO: 414715 - protein, 12 aa, Homo sapiens
  CDR3 for alpha chain variable domain of TCR clone 207358 (TRAV38-2/DV8, TRAJ48)
CALLSGNEKLTF

SEQ ID NO: 414716 - protein, 16 aa, Homo sapiens
  CDR3 for beta chain variable domain of TCR clone 207358 (TRBV19, TRBJ2-2)
CASRSPGTGATGELFF

SEQ ID NO: 414717 - protein, 15 aa, Homo sapiens
  CDR3 for alpha chain variable domain of TCR clone 207359 (TRAV12-1, TRAJ45)
CVVLSGGGGADGLTF

SEQ ID NO: 414718 - protein, 16 aa, Homo sapiens
  CDR3 for beta chain variable domain of TCR clone 207359 (TRBV6-5, TRBJ2-7)
CASSSLAGTFSYEQYF

SEQ ID NO: 414719 - protein, 13 aa, Homo sapiens
  CDR3 for alpha chain variable domain of TCR clone 207360 (TRAV17, TRAJ9)
CATDYTGGFKTIF

SEQ ID NO: 414720 - protein, 16 aa, Homo sapiens
  CDR3 for beta chain variable domain of TCR clone 207360 (TRBV7-9, TRBJ1-2)
CASSLGFSSGEDGYTY

SEQ ID NO: 414721 - protein, 13 aa, Homo sapiens
  CDR3 for alpha chain variable domain of TCR clone 207361 (TRAV8-3, TRAJ48)
CAVVPFGNEKLTF

SEQ ID NO: 414722 - protein, 14 aa, Homo sapiens
  CDR3 for beta chain variable domain of TCR clone 207361 (TRBV7-2, TRBJ2-7)
CASSPNTSFYEQYF

SEQ ID NO: 414723 - protein, 18 aa, Homo sapiens
  CDR3 for alpha chain variable domain of TCR clone 207362 (TRAV26-1, TRAJ23)
CIVRVGLEVWNQGGKLIF

SEQ ID NO: 414724 - protein, 12 aa, Homo sapiens
  CDR3 for beta chain variable domain of TCR clone 207362 (TRBV19, TRBJ1-5)
CASSIAQQPQHF

SEQ ID NO: 414725 - protein, 13 aa, Homo sapiens
  CDR3 for alpha chain variable domain of TCR clone 207363 (TRAV27, TRAJ42)
CAGARGSQGNLSF

SEQ ID NO: 414726 - protein, 14 aa, Homo sapiens
  CDR3 for beta chain variable domain of TCR clone 207363 (TRBV20-1, TRBJ1-1)
CSAQTRIGGTEAFF

SEQ ID NO: 414727 - protein, 15 aa, Homo sapiens
  CDR3 for alpha chain variable domain of TCR clone 207364 (TRAV8-6, TRAJ27)
CAVREVNTNAGKSTF

SEQ ID NO: 414728 - protein, 12 aa, Homo sapiens
  CDR3 for beta chain variable domain of TCR clone 207364 (TRBV7-6, TRBJ2-3)
CASSTGTDTQYF

SEQ ID NO: 414729 - protein, 11 aa, Homo sapiens
  CDR3 for alpha chain variable domain of TCR clone 207365 (TRAV1-1, TRAJ23)
CAVRQGGKLIF

SEQ ID NO: 414730 - protein, 20 aa, Homo sapiens
  CDR3 for beta chain variable domain of TCR clone 207365 (TRBV11-2, TRBJ1-6)
CASSLVFATGGSVRPSTLGT

SEQ ID NO: 414731 - protein, 23 aa, Homo sapiens
  CDR3 for alpha chain variable domain of TCR clone 207366 (TRAV8-3, TRAJ38)
CAVGASNAGNNHIQNPDPAVYQL

SEQ ID NO: 414732 - protein, 15 aa, Homo sapiens
  CDR3 for beta chain variable domain of TCR clone 207366 (TRBV11-3, TRBJ1-3)
CASSLFGPAGNTIYF

SEQ ID NO: 414733 - protein, 14 aa, Homo sapiens
  CDR3 for alpha chain variable domain of TCR clone 207367 (TRAV13-1, TRAJ13)
CAASKGGGYQKVTF

SEQ ID NO: 414734 - protein, 17 aa, Homo sapiens
  CDR3 for beta chain variable domain of TCR clone 207367 (TRBV20-1, TRBJ2-1)
CSAPPRLAGTRYNEQFF

SEQ ID NO: 414735 - protein, 16 aa, Homo sapiens
  CDR3 for alpha chain variable domain of TCR clone 207368 (TRAV27, TRAJ52)
CAGAGAGGTSYGKLTF

SEQ ID NO: 414736 - protein, 17 aa, Homo sapiens
  CDR3 for beta chain variable domain of TCR clone 207368 (TRBV24-1, TRBJ2-3)
CATSDLPSGEDTDTPYF

SEQ ID NO: 414737 - protein, 15 aa, Homo sapiens
  CDR3 for alpha chain variable domain of TCR clone 207369 (TRAV12-2, TRAJ57)
CAVSRGQGGSEKLVF

SEQ ID NO: 414738 - protein, 14 aa, Homo sapiens
  CDR3 for beta chain variable domain of TCR clone 207369 (TRBV6-1, TRBJ1-3)
CASVQGGGGNTIYF

SEQ ID NO: 414739 - protein, 16 aa, Homo sapiens
  CDR3 for alpha chain variable domain of TCR clone 207370 (TRAV36/DV7, TRAJ45)
CAVEAYSGGGADGLAF

SEQ ID NO: 414740 - protein, 13 aa, Homo sapiens
  CDR3 for beta chain variable domain of TCR clone 207370 (TRBV20-1, TRBJ1-1)
CSARGGGNTEAFF

SEQ ID NO: 414741 - protein, 12 aa, Homo sapiens
  CDR3 for alpha chain variable domain of TCR clone 207371 (TRAV2, TRAJ9)
WAVGAGGVKTIF

SEQ ID NO: 414742 - protein, 16 aa, Homo sapiens
  CDR3 for beta chain variable domain of TCR clone 207371 (TRBV13, TRBJ2-2)
CASSPRTGEHTGELFF

SEQ ID NO: 414743 - protein, 17 aa, Homo sapiens
  CDR3 for alpha chain variable domain of TCR clone 207372 (TRAV13-1, TRAJ28)
CAASPPYSGAGSYQLTF

SEQ ID NO: 414744 - protein, 11 aa, Homo sapiens
  CDR3 for beta chain variable domain of TCR clone 207372 (TRBV7-9, TRBJ2-3)
CASSYTDTQYF

SEQ ID NO: 414745 - protein, 12 aa, Homo sapiens
  CDR3 for alpha chain variable domain of TCR clone 207373 (TRAV2, TRAJ33)
CADPDSNYQLIW

SEQ ID NO: 414746 - protein, 15 aa, Homo sapiens
  CDR3 for beta chain variable domain of TCR clone 207373 (TRBV15, TRBJ1-5)
CATSRDPVSNQPQHF

SEQ ID NO: 414747 - protein, 13 aa, Homo sapiens
  CDR3 for alpha chain variable domain of TCR clone 207374 (TRAV20, TRAJ20)
CAVQAGRGYKLSF

SEQ ID NO: 414748 - protein, 14 aa, Homo sapiens
  CDR3 for beta chain variable domain of TCR clone 207374 (TRBV19, TRBJ2-1)
CASPTFVLSGEQFF

SEQ ID NO: 414749 - protein, 15 aa, Homo sapiens
  CDR3 for alpha chain variable domain of TCR clone 207375 (TRAV3, TRAJ22)
CAVRDRGGSARELTF

SEQ ID NO: 414750 - protein, 15 aa, Homo sapiens
  CDR3 for beta chain variable domain of TCR clone 207375 (TRBV11-2, TRBJ1-1)
CASSSRSSLLLSLDK

SEQ ID NO: 414751 - protein, 14 aa, Homo sapiens
  CDR3 for alpha chain variable domain of TCR clone 207376 (TRAV13-1, TRAJ29)
CAASSNSGNTPLVF

SEQ ID NO: 414752 - protein, 15 aa, Homo sapiens
  CDR3 for beta chain variable domain of TCR clone 207376 (TRBV10-3, TRBJ2-3)
CAISLTSGGTDTQYF

SEQ ID NO: 414753 - protein, 15 aa, Homo sapiens
  CDR3 for alpha chain variable domain of TCR clone 207377 (TRAV16, TRAJ12)
CSKWPLRDSSYKLIF

SEQ ID NO: 414754 - protein, 13 aa, Homo sapiens
  CDR3 for beta chain variable domain of TCR clone 207377 (TRBV19, TRBJ2-1)
CASSRAPYNEQFF

SEQ ID NO: 414755 - protein, 13 aa, Homo sapiens
  CDR3 for alpha chain variable domain of TCR clone 207378 (TRAV12-1, TRAJ39)
CVARSGAGNMLTF

SEQ ID NO: 414756 - protein, 15 aa, Homo sapiens
  CDR3 for beta chain variable domain of TCR clone 207378 (TRBV28, TRBJ2-7)
CASSLISGGYYEQYF

SEQ ID NO: 414757 - protein, 13 aa, Homo sapiens
  CDR3 for alpha chain variable domain of TCR clone 207379 (TRAV2, TRAJ40)
CAVVTSGTYKYIF

SEQ ID NO: 414758 - protein, 14 aa, Homo sapiens
  CDR3 for beta chain variable domain of TCR clone 207379 (TRBV11-3, TRBJ2-3)
CQPEGRAEGDTQYF

SEQ ID NO: 414759 - protein, 15 aa, Homo sapiens
  CDR3 for alpha chain variable domain of TCR clone 207380 (TRAV26-1, TRAJ29)
CIFRVEGSGNTPLVF

SEQ ID NO: 414760 - protein, 14 aa, Homo sapiens
  CDR3 for beta chain variable domain of TCR clone 207380 (TRBV18, TRBJ2-5)
CASSPGVSHETQYF

SEQ ID NO: 414761 - protein, 13 aa, Homo sapiens
  CDR3 for alpha chain variable domain of TCR clone 207381 (TRAV20, TRAJ9)
CAVPDTGGFKTIF

SEQ ID NO: 414762 - protein, 15 aa, Homo sapiens
  CDR3 for beta chain variable domain of TCR clone 207381 (TRBV27, TRBJ2-7)
CASSKAGRGGYEQFF

SEQ ID NO: 414763 - protein, 13 aa, Homo sapiens
  CDR3 for alpha chain variable domain of TCR clone 207382 (TRAV13-1, TRAJ43)
CAASISNNNDMRF

SEQ ID NO: 414764 - protein, 14 aa, Homo sapiens
  CDR3 for beta chain variable domain of TCR clone 207382 (TRBV5-1, TRBJ2-5)
CASSLAGKQETQYF

SEQ ID NO: 414765 - protein, 17 aa, Homo sapiens
  CDR3 for alpha chain variable domain of TCR clone 207383 (TRAV27, TRAJ42)
CAERVIYYGGSQGNLIF

SEQ ID NO: 414766 - protein, 14 aa, Homo sapiens
  CDR3 for beta chain variable domain of TCR clone 207383 (TRBV19, TRBJ2-5)
CASSMTGQQETQYF

SEQ ID NO: 414767 - protein, 16 aa, Homo sapiens
  CDR3 for alpha chain variable domain of TCR clone 207384 (TRAV20, TRAJ53)
CAVQGNSGGSNYKLTF

SEQ ID NO: 414768 - protein, 17 aa, Homo sapiens
  CDR3 for beta chain variable domain of TCR clone 207384 (TRBV7-3, TRBJ2-3)
CASSLMKRMRGADTQYF

SEQ ID NO: 414769 - protein, 13 aa, Homo sapiens
  CDR3 for alpha chain variable domain of TCR clone 207385 (TRAV8-4, TRAJ9)
CAVSDTGGFKTIF

SEQ ID NO: 414770 - protein, 13 aa, Homo sapiens
  CDR3 for beta chain variable domain of TCR clone 207385 (TRBV27, TRBJ2-7)
CASSFSQGYEQYF

SEQ ID NO: 414771 - protein, 12 aa, Homo sapiens
  CDR3 for alpha chain variable domain of TCR clone 207386 (TRAV13-1, TRAJ48)
CAANFGNEKLNF

SEQ ID NO: 414772 - protein, 12 aa, Homo sapiens
  CDR3 for beta chain variable domain of TCR clone 207386 (TRBV7-8, TRBJ2-7)
CASSLGDREQYF

SEQ ID NO: 414773 - protein, 14 aa, Homo sapiens
  CDR3 for alpha chain variable domain of TCR clone 207387 (TRAV17, TRAJ16)
CATADFSDGQKLLF

SEQ ID NO: 414774 - protein, 14 aa, Homo sapiens
  CDR3 for beta chain variable domain of TCR clone 207387 (TRBV2, TRBJ2-3)
CASSEGQNTDTQYF

SEQ ID NO: 414775 - protein, 11 aa, Homo sapiens
  CDR3 for alpha chain variable domain of TCR clone 207388 (TRAV3, TRAJ20)
CAVRDGYKLSF

SEQ ID NO: 414776 - protein, 14 aa, Homo sapiens
  CDR3 for beta chain variable domain of TCR clone 207388 (TRBV4-2, TRBJ2-1)
CASGLDRAYNEQFF

SEQ ID NO: 414777 - protein, 14 aa, Homo sapiens
  CDR3 for alpha chain variable domain of TCR clone 207389 (TRAV1-2, TRAJ8)
CAVREETGFQKLVF

SEQ ID NO: 414778 - protein, 14 aa, Homo sapiens
  CDR3 for beta chain variable domain of TCR clone 207389 (TRBV7-9, TRBJ1-1)
CASTPLQSYTEAFF

SEQ ID NO: 414779 - protein, 12 aa, Homo sapiens
  CDR3 for alpha chain variable domain of TCR clone 207390 (TRAV8-2, TRAJ5)
CVVRDIGRALTF

SEQ ID NO: 414780 - protein, 14 aa, Homo sapiens
  CDR3 for beta chain variable domain of TCR clone 207390 (TRBV19, TRBJ2-7)
CASNFRDTFTGMYF

SEQ ID NO: 414781 - protein, 15 aa, Homo sapiens
  CDR3 for alpha chain variable domain of TCR clone 207391 (TRAV13-1, TRAJ52)
SYHNACGTSYGKLTF

SEQ ID NO: 414782 - protein, 11 aa, Homo sapiens
  CDR3 for beta chain variable domain of TCR clone 207391 (TRBV12-4, TRBJ2-2)
CASSSAGELFF

SEQ ID NO: 414783 - protein, 15 aa, Homo sapiens
  CDR3 for alpha chain variable domain of TCR clone 207392 (TRAV13-2, TRAJ40)
CAENRSRQRTYKYIF

SEQ ID NO: 414784 - protein, 15 aa, Homo sapiens
  CDR3 for beta chain variable domain of TCR clone 207392 (TRBV19, TRBJ2-1)
CASSMGWNSNNEQFF

SEQ ID NO: 414785 - protein, 14 aa, Homo sapiens
  CDR3 for alpha chain variable domain of TCR clone 207393 (TRAV13-2, TRAJ47)
CAESSMEYGNKLVF

SEQ ID NO: 414786 - protein, 12 aa, Homo sapiens
  CDR3 for beta chain variable domain of TCR clone 207393 (TRBV11-2, TRBJ2-2)
CASSLGGGELFF

SEQ ID NO: 414787 - protein, 16 aa, Homo sapiens
  CDR3 for alpha chain variable domain of TCR clone 207394 (TRAV3, TRAJ37)
CAVRVRGSGNTGKLIF

SEQ ID NO: 414788 - protein, 13 aa, Homo sapiens
  CDR3 for beta chain variable domain of TCR clone 207394 (TRBV14, TRBJ2-1)
CASSQDRRNEQLF

SEQ ID NO: 414789 - protein, 14 aa, Homo sapiens
  CDR3 for alpha chain variable domain of TCR clone 207395 (TRAV9-2, TRAJ39)
CALYIYNAGNMLTF

SEQ ID NO: 414790 - protein, 15 aa, Homo sapiens
  CDR3 for beta chain variable domain of TCR clone 207395 (TRBV7-2, TRBJ2-1)
CASSLVGSSYNEQFF

SEQ ID NO: 414791 - protein, 16 aa, Homo sapiens
  CDR3 for alpha chain variable domain of TCR clone 207396 (TRAV8-3, TRAJ13)
CAVGAYPSGGYQKVTF

SEQ ID NO: 414792 - protein, 15 aa, Homo sapiens
  CDR3 for beta chain variable domain of TCR clone 207396 (TRBV19, TRBJ1-5)
CASSIVWGDNQPQHF

SEQ ID NO: 414793 - protein, 13 aa, Homo sapiens
  CDR3 for alpha chain variable domain of TCR clone 207397 (TRAV14/DV4, TRAJ43)
CAMREGGTNDMRF

SEQ ID NO: 414794 - protein, 17 aa, Homo sapiens
  CDR3 for beta chain variable domain of TCR clone 207397 (TRBV20-1, TRBJ2-1)
CSASSSGLAGSYNEQFF

SEQ ID NO: 414795 - protein, 11 aa, Homo sapiens
  CDR3 for alpha chain variable domain of TCR clone 207398 (TRAV1-2, TRAJ11)
CAVRGYSTLTF

SEQ ID NO: 414796 - protein, 14 aa, Homo sapiens
  CDR3 for beta chain variable domain of TCR clone 207398 (TRBV20-1, TRBJ2-3)
CSARVRGITDTQYF

SEQ ID NO: 414797 - protein, 14 aa, Homo sapiens
  CDR3 for alpha chain variable domain of TCR clone 207399 (TRAV17, TRAJ22)
CATSPSGSARQLTF

SEQ ID NO: 414798 - protein, 15 aa, Homo sapiens
  CDR3 for beta chain variable domain of TCR clone 207399 (TRBV7-2, TRBJ2-1)
CASSSGLAGGNEQFF

SEQ ID NO: 414799 - protein, 15 aa, Homo sapiens
  CDR3 for alpha chain variable domain of TCR clone 207400 (TRAV16, TRAJ17)
CALSGNKAAGHKLTF

SEQ ID NO: 414800 - protein, 16 aa, Homo sapiens
  CDR3 for beta chain variable domain of TCR clone 207400 (TRBV7-6, TRBJ1-6)
CASSSLPAGEYSPLHF

SEQ ID NO: 414801 - protein, 15 aa, Homo sapiens
  CDR3 for alpha chain variable domain of TCR clone 207401 (TRAV12-2, TRAJ43)
CAFDMRFGAGTRLTV

SEQ ID NO: 414802 - protein, 18 aa, Homo sapiens
  CDR3 for beta chain variable domain of TCR clone 207401 (TRBV20-1, TRBJ2-3)
CSASGLAGGPGTSDTQYF

SEQ ID NO: 414803 - protein, 18 aa, Homo sapiens
  CDR3 for alpha chain variable domain of TCR clone 207402 (TRAV12-3, TRAJ52)
CAMSVGGAGGTSDGKLTS

SEQ ID NO: 414804 - protein, 15 aa, Homo sapiens
  CDR3 for beta chain variable domain of TCR clone 207402 (TRBV27, TRBJ1-6)
CASSFDRGLGSPLHF

SEQ ID NO: 414805 - protein, 16 aa, Homo sapiens
  CDR3 for alpha chain variable domain of TCR clone 207403 (TRAV12-2, )
CAVEDIQNPDPAVYQL

SEQ ID NO: 414806 - protein, 16 aa, Homo sapiens
  CDR3 for beta chain variable domain of TCR clone 207403 (TRBV19, TRBJ2-1)
CASSKAGPSSYNEQFF

SEQ ID NO: 414807 - protein, 14 aa, Homo sapiens
  CDR3 for alpha chain variable domain of TCR clone 207404 (TRAV13-2, TRAJ22)
CADGTLGSARQLTF

SEQ ID NO: 414808 - protein, 16 aa, Homo sapiens
  CDR3 for beta chain variable domain of TCR clone 207404 (TRBV19, TRBJ2-1)
CASSSKGTRSYTEQFF

SEQ ID NO: 414809 - protein, 16 aa, Homo sapiens
  CDR3 for alpha chain variable domain of TCR clone 207405 (TRAV12-2, TRAJ52)
CRLANAGGTSYGKLTF

SEQ ID NO: 414810 - protein, 14 aa, Homo sapiens
  CDR3 for beta chain variable domain of TCR clone 207405 (TRBV20-1, TRBJ1-1)
CSAQTRIGGTEAFF

SEQ ID NO: 414811 - protein, 16 aa, Homo sapiens
  CDR3 for alpha chain variable domain of TCR clone 207406 (TRAV22, TRAJ45)
CAAEGGKRGGADGLTF

SEQ ID NO: 414812 - protein, 13 aa, Homo sapiens
  CDR3 for beta chain variable domain of TCR clone 207406 (TRBV27, TRBJ1-1)
CASSLSIGAEAFF

SEQ ID NO: 414813 - protein, 12 aa, Homo sapiens
  CDR3 for alpha chain variable domain of TCR clone 207407 (TRAV12-1, TRAJ31)
CVVSLLRARLLF

SEQ ID NO: 414814 - protein, 15 aa, Homo sapiens
  CDR3 for beta chain variable domain of TCR clone 207407 (TRBV3-1, TRBJ1-2)
CASSHTGQGGYGYTF

SEQ ID NO: 414815 - protein, 14 aa, Homo sapiens
  CDR3 for alpha chain variable domain of TCR clone 207408 (TRAV16, TRAJ17)
CALSGRAAGNKLTF

SEQ ID NO: 414816 - protein, 14 aa, Homo sapiens
  CDR3 for beta chain variable domain of TCR clone 207408 (TRBV3-1, TRBJ1-2)
CQQPYPPPRGGYTF

SEQ ID NO: 414817 - protein, 14 aa, Homo sapiens
  CDR3 for alpha chain variable domain of TCR clone 207409 (TRAV12-2, TRAJ13)
CAAKKTGGYQKATF

SEQ ID NO: 414818 - protein, 15 aa, Homo sapiens
  CDR3 for beta chain variable domain of TCR clone 207409 (TRBV27, TRBJ2-1)
CASSNGGGSSNEQFF

SEQ ID NO: 414819 - protein, 16 aa, Homo sapiens
  CDR3 for alpha chain variable domain of TCR clone 207410 (TRAV27, TRAJ13)
CAGAKSDSGGYQKVTL

SEQ ID NO: 414820 - protein, 15 aa, Homo sapiens
  CDR3 for beta chain variable domain of TCR clone 207410 (TRBV29-1, TRBJ2-1)
CSVGRHALFYNEQFF

SEQ ID NO: 414821 - protein, 15 aa, Homo sapiens
  CDR3 for alpha chain variable domain of TCR clone 207411 (TRAV1-2, TRAJ16)
CAVRARFSDGQKLLF

SEQ ID NO: 414822 - protein, 19 aa, Homo sapiens
  CDR3 for beta chain variable domain of TCR clone 207411 (TRBV11-3, TRBJ2-3)
CASGFGTSGGPRGGGTQYI

SEQ ID NO: 414823 - protein, 13 aa, Homo sapiens
  CDR3 for alpha chain variable domain of TCR clone 207412 (TRAV2, TRAJ20)
CAVEDPSEYKLSF

SEQ ID NO: 414824 - protein, 16 aa, Homo sapiens
  CDR3 for beta chain variable domain of TCR clone 207412 (TRBV25-1, TRBJ2-7)
CAGSELTGGGIYEQYF

SEQ ID NO: 414825 - protein, 14 aa, Homo sapiens
  CDR3 for alpha chain variable domain of TCR clone 207413 (TRAV16, TRAJ3)
CALSQYSSASKIIF

SEQ ID NO: 414826 - protein, 12 aa, Homo sapiens
  CDR3 for beta chain variable domain of TCR clone 207413 (TRBV7-9, TRBJ2-7)
CATRTDAYEQYF

SEQ ID NO: 414827 - protein, 16 aa, Homo sapiens
  CDR3 for alpha chain variable domain of TCR clone 207414 (TRAV20, TRAJ53)
CAVQGNSGGSNYKLTF

SEQ ID NO: 414828 - protein, 16 aa, Homo sapiens
  CDR3 for beta chain variable domain of TCR clone 207414 (TRBV15, TRBJ2-6)
CATSVNGGFLANVLTF

SEQ ID NO: 414829 - protein, 16 aa, Homo sapiens
  CDR3 for alpha chain variable domain of TCR clone 207415 (TRAV12-3, TRAJ53)
CAMSPGSGGSNYKLTL

SEQ ID NO: 414830 - protein, 15 aa, Homo sapiens
  CDR3 for beta chain variable domain of TCR clone 207415 (TRBV27, TRBJ2-1)
CASSNGGGSSNEQFF

SEQ ID NO: 414831 - protein, 17 aa, Homo sapiens
  CDR3 for alpha chain variable domain of TCR clone 207416 (TRAV3, TRAJ6)
CAVRDGPRAGGSYIPTF

SEQ ID NO: 414832 - protein, 13 aa, Homo sapiens
  CDR3 for beta chain variable domain of TCR clone 207416 (TRBV12-4, TRBJ2-3)
CASSSPLGGTQYF

SEQ ID NO: 414833 - protein, 12 aa, Homo sapiens
  CDR3 for alpha chain variable domain of TCR clone 207417 (TRAV8-3, TRAJ40)
CAVTSGTYKYIF

SEQ ID NO: 414834 - protein, 12 aa, Homo sapiens
  CDR3 for beta chain variable domain of TCR clone 207417 (TRBV12-4, TRBJ2-3)
CASSSTTDTQYF

SEQ ID NO: 414835 - protein, 13 aa, Homo sapiens
  CDR3 for alpha chain variable domain of TCR clone 207418 (TRAV39, TRAJ48)
CAAVNFGNEKLTF

SEQ ID NO: 414836 - protein, 12 aa, Homo sapiens
  CDR3 for beta chain variable domain of TCR clone 207418 (TRBV5-5, TRBJ2-5)
CASSSFGETQYF

SEQ ID NO: 414837 - protein, 15 aa, Homo sapiens
  CDR3 for alpha chain variable domain of TCR clone 207419 (TRAV26-1, TRAJ29)
CIVRVEGTGNTPLVS

SEQ ID NO: 414838 - protein, 14 aa, Homo sapiens
  CDR3 for beta chain variable domain of TCR clone 207419 (TRBV18, TRBJ2-5)
CASSPGVSQETQYF

SEQ ID NO: 414839 - protein, 12 aa, Homo sapiens
  CDR3 for alpha chain variable domain of TCR clone 207420 (TRAV23/DV6, TRAJ58)
CAARLLRGETSV

SEQ ID NO: 414840 - protein, 15 aa, Homo sapiens
  CDR3 for beta chain variable domain of TCR clone 207420 (TRBV9, TRBJ1-6)
CASSVAGTGDSPLHF

SEQ ID NO: 414841 - protein, 13 aa, Homo sapiens
  CDR3 for alpha chain variable domain of TCR clone 207421 (TRAV38-2/DV8, TRAJ34)
CAYRTWNTDKLIF

SEQ ID NO: 414842 - protein, 18 aa, Homo sapiens
  CDR3 for beta chain variable domain of TCR clone 207421 (TRBV6-6, TRBJ1-3)
CASSYSKWDSSSGNTIYF

SEQ ID NO: 414843 - protein, 13 aa, Homo sapiens
  CDR3 for alpha chain variable domain of TCR clone 207422 (TRAV2, TRAJ40)
CAVVTSGTYKYIF

SEQ ID NO: 414844 - protein, 15 aa, Homo sapiens
  CDR3 for beta chain variable domain of TCR clone 207422 (TRBV27, TRBJ1-6)
CASRPEGVGNSPLHF

SEQ ID NO: 414845 - protein, 22 aa, Homo sapiens
  CDR3 for alpha chain variable domain of TCR clone 207423 (TRAV1-1, TRAJ30)
CAVRDQTEMTRSSLEKGHDFIF

SEQ ID NO: 414846 - protein, 14 aa, Homo sapiens
  CDR3 for beta chain variable domain of TCR clone 207423 (TRBV11-2, TRBJ2-3)
CASSRLARTDTQYF

SEQ ID NO: 414847 - protein, 13 aa, Homo sapiens
  CDR3 for alpha chain variable domain of TCR clone 207424 (TRAV35, TRAJ37)
CAGHAGNTGKLIF

SEQ ID NO: 414848 - protein, 13 aa, Homo sapiens
  CDR3 for beta chain variable domain of TCR clone 207424 (TRBV12-5, TRBJ2-3)
CASGDRQSDTQYF

SEQ ID NO: 414849 - protein, 14 aa, Homo sapiens
  CDR3 for alpha chain variable domain of TCR clone 207425 (TRAV9-2, TRAJ39)
CALYIYNAGNMLTF

SEQ ID NO: 414850 - protein, 18 aa, Homo sapiens
  CDR3 for beta chain variable domain of TCR clone 207425 (TRBV6-5, TRBJ1-1)
CASSYSAPGGTGGTEAFF

SEQ ID NO: 414851 - protein, 12 aa, Homo sapiens
  CDR3 for alpha chain variable domain of TCR clone 207426 (TRAV36/DV7, TRAJ40)
CAVGTGTYKYIF

SEQ ID NO: 414852 - protein, 12 aa, Homo sapiens
  CDR3 for beta chain variable domain of TCR clone 207426 (TRBV19, TRBJ2-7)
CASTDRGYEQYF

SEQ ID NO: 414853 - protein, 15 aa, Homo sapiens
  CDR3 for alpha chain variable domain of TCR clone 207427 (TRAV13-1, TRAJ57)
QVPPLSQGGSEKLVF

SEQ ID NO: 414854 - protein, 15 aa, Homo sapiens
  CDR3 for beta chain variable domain of TCR clone 207427 (TRBV7-2, TRBJ2-1)
CASTHGTGIYNEQFF

SEQ ID NO: 414855 - protein, 13 aa, Homo sapiens
  CDR3 for alpha chain variable domain of TCR clone 207428 (TRAV13-1, TRAJ29)
CAASIGLNTPLVF

SEQ ID NO: 414856 - protein, 15 aa, Homo sapiens
  CDR3 for beta chain variable domain of TCR clone 207428 (TRBV6-1, TRBJ2-5)
CASGEFPLMGETQYF

SEQ ID NO: 414857 - protein, 16 aa, Homo sapiens
  CDR3 for alpha chain variable domain of TCR clone 207429 (TRAV12-3, TRAJ53)
CAMSPGSGGSNYKPKF

SEQ ID NO: 414858 - protein, 11 aa, Homo sapiens
  CDR3 for beta chain variable domain of TCR clone 207429 (TRBV29-1, TRBJ2-5)
CSEDRTGTQYF

SEQ ID NO: 414859 - protein, 15 aa, Homo sapiens
  CDR3 for alpha chain variable domain of TCR clone 207430 (TRAV17, TRAJ13)
CATDAGSGGYQKVTF

SEQ ID NO: 414860 - protein, 16 aa, Homo sapiens
  CDR3 for beta chain variable domain of TCR clone 207430 (TRBV27, TRBJ2-2)
CASSFRGLVRTGELFF

SEQ ID NO: 414861 - protein, 14 aa, Homo sapiens
  CDR3 for alpha chain variable domain of TCR clone 207431 (TRAV12-2, TRAJ13)
CAVKQTGGYQKVTF

SEQ ID NO: 414862 - protein, 15 aa, Homo sapiens
  CDR3 for beta chain variable domain of TCR clone 207431 (TRBV28, TRBJ2-1)
CASSIIAGGRSEQFF

SEQ ID NO: 414863 - protein, 21 aa, Homo sapiens
  CDR3 for alpha chain variable domain of TCR clone 207432 (TRAV30, TRAJ43)
GLPAQLLRNPLPIIEQNDMRF

SEQ ID NO: 414864 - protein, 14 aa, Homo sapiens
  CDR3 for beta chain variable domain of TCR clone 207432 (TRBV27, TRBJ2-1)
CASRHLGGGKEQFF

SEQ ID NO: 414865 - protein, 16 aa, Homo sapiens
  CDR3 for alpha chain variable domain of TCR clone 207433 (TRAV12-3, TRAJ58)
CAMPDTEETSGSRLTF

SEQ ID NO: 414866 - protein, 22 aa, Homo sapiens
  CDR3 for beta chain variable domain of TCR clone 207433 (TRBV23-1, TRBJ2-7)
CASSRRLDSGQGYVGGGYEQYF

SEQ ID NO: 414867 - protein, 16 aa, Homo sapiens
  CDR3 for alpha chain variable domain of TCR clone 207434 (TRAV3, TRAJ10)
CAVRDMRAGGGTKLTF

SEQ ID NO: 414868 - protein, 20 aa, Homo sapiens
  CDR3 for beta chain variable domain of TCR clone 207434 (TRBV11-3, TRBJ2-7)
CASRQRTSGSLRAVLRAGHQ

SEQ ID NO: 414869 - protein, 14 aa, Homo sapiens
  CDR3 for alpha chain variable domain of TCR clone 207435 (TRAV30, TRAJ33)
CCTVAPRSNYQLIW

SEQ ID NO: 414870 - protein, 14 aa, Homo sapiens
  CDR3 for beta chain variable domain of TCR clone 207435 (TRBV19, TRBJ2-1)
CASPTFVLSGEQFF

SEQ ID NO: 414871 - protein, 16 aa, Homo sapiens
  CDR3 for alpha chain variable domain of TCR clone 207436 (TRAV30, TRAJ26)
CGTESVGDNYGQNFVF

SEQ ID NO: 414872 - protein, 16 aa, Homo sapiens
  CDR3 for beta chain variable domain of TCR clone 207436 (TRBV7-2, TRBJ2-5)
CASSPFPTGGEETQYF

SEQ ID NO: 414873 - protein, 12 aa, Homo sapiens
  CDR3 for alpha chain variable domain of TCR clone 207437 (TRAV21, TRAJ11)
CAATSGYSTLTF

SEQ ID NO: 414874 - protein, 17 aa, Homo sapiens
  CDR3 for beta chain variable domain of TCR clone 207437 (TRBV28, TRBJ2-5)
CASSRQGGLAGAETQYF

SEQ ID NO: 414875 - protein, 14 aa, Homo sapiens
  CDR3 for alpha chain variable domain of TCR clone 207438 (TRAV12-3, TRAJ42)
CAMNYGGSQGNLIF

SEQ ID NO: 414876 - protein, 15 aa, Homo sapiens
  CDR3 for beta chain variable domain of TCR clone 207438 (TRBV5-7, TRBJ1-5)
CASSYGKLWDRPQHF

SEQ ID NO: 414877 - protein, 13 aa, Homo sapiens
  CDR3 for alpha chain variable domain of TCR clone 207439 (TRAV1-2, TRAJ9)
CAALNTGGFKTIF

SEQ ID NO: 414878 - protein, 15 aa, Homo sapiens
  CDR3 for beta chain variable domain of TCR clone 207439 (TRBV11-2, TRBJ1-6)
CASSSPGRGNSPLHF

SEQ ID NO: 414879 - protein, 15 aa, Homo sapiens
  CDR3 for alpha chain variable domain of TCR clone 207440 (TRAV12-2, TRAJ9)
CAVNGGYTGGFKTIF

SEQ ID NO: 414880 - protein, 16 aa, Homo sapiens
  CDR3 for beta chain variable domain of TCR clone 207440 (TRBV19, TRBJ2-1)
CASSKAGPSSYNEQFF

SEQ ID NO: 414881 - protein, 18 aa, Homo sapiens
  CDR3 for alpha chain variable domain of TCR clone 207441 (TRAV21, TRAJ52)
CAVRPSPAGGTSYGKLTF

SEQ ID NO: 414882 - protein, 12 aa, Homo sapiens
  CDR3 for beta chain variable domain of TCR clone 207441 (TRBV13, TRBJ2-7)
CASSLGVYEQYF

SEQ ID NO: 414883 - protein, 17 aa, Homo sapiens
  CDR3 for alpha chain variable domain of TCR clone 207442 (TRAV23/DV6, TRAJ58)
CAARLLRGDTSGSRLTF

SEQ ID NO: 414884 - protein, 14 aa, Homo sapiens
  CDR3 for beta chain variable domain of TCR clone 207442 (TRBV2, TRBJ2-7)
CASSLTSGGYEQYF

SEQ ID NO: 414885 - protein, 12 aa, Homo sapiens
  CDR3 for alpha chain variable domain of TCR clone 207443 (TRAV36/DV7, TRAJ37)
CACYGNTGKLIF

SEQ ID NO: 414886 - protein, 14 aa, Homo sapiens
  CDR3 for beta chain variable domain of TCR clone 207443 (TRBV7-7, TRBJ2-5)
CASSLRTGQETQYF

SEQ ID NO: 414887 - protein, 13 aa, Homo sapiens
  CDR3 for alpha chain variable domain of TCR clone 207444 (TRAV3, TRAJ27)
CAVRPLGAGKSTF

SEQ ID NO: 414888 - protein, 17 aa, Homo sapiens
  CDR3 for beta chain variable domain of TCR clone 207444 (TRBV7-3, TRBJ2-5)
CASSLGSGRSGSETQYF

SEQ ID NO: 414889 - protein, 12 aa, Homo sapiens
  CDR3 for alpha chain variable domain of TCR clone 207445 (TRAV21, TRAJ33)
CAKMDSNYQLIW

SEQ ID NO: 414890 - protein, 17 aa, Homo sapiens
  CDR3 for beta chain variable domain of TCR clone 207445 (TRBV24-1, TRBJ2-1)
CATSDAFGGGNYNEQFF

SEQ ID NO: 414891 - protein, 10 aa, Homo sapiens
  CDR3 for alpha chain variable domain of TCR clone 207446 (TRAV8-4, TRAJ43)
CALSADDMRF

SEQ ID NO: 414892 - protein, 18 aa, Homo sapiens
  CDR3 for beta chain variable domain of TCR clone 207446 (TRBV7-2, TRBJ2-7)
CASSLAQGLRDSSYEQYF

SEQ ID NO: 414893 - protein, 12 aa, Homo sapiens
  CDR3 for alpha chain variable domain of TCR clone 207447 (TRAV12-1, TRAJ6)
CVSSGGSYIPTF

SEQ ID NO: 414894 - protein, 12 aa, Homo sapiens
  CDR3 for beta chain variable domain of TCR clone 207447 (TRBV11-2, TRBJ2-2)
SASSLGGGELFF

SEQ ID NO: 414895 - protein, 10 aa, Homo sapiens
  CDR3 for alpha chain variable domain of TCR clone 207448 (TRAV36/DV7, TRAJ48)
CAVGNEKLTF

SEQ ID NO: 414896 - protein, 12 aa, Homo sapiens
  CDR3 for beta chain variable domain of TCR clone 207448 (TRBV7-8, TRBJ2-5)
CASSPSVQTQYF

SEQ ID NO: 414897 - protein, 16 aa, Homo sapiens
  CDR3 for alpha chain variable domain of TCR clone 207449 (TRAV20, TRAJ22)
CAVQASSAGSARQLTF

SEQ ID NO: 414898 - protein, 13 aa, Homo sapiens
  CDR3 for beta chain variable domain of TCR clone 207449 (TRBV7-2, TRBJ2-5)
CASSQTSVETQYF

SEQ ID NO: 414899 - protein, 14 aa, Homo sapiens
  CDR3 for alpha chain variable domain of TCR clone 207450 (TRAV23/DV6, TRAJ22)
CAASVPGPARQLTF

SEQ ID NO: 414900 - protein, 16 aa, Homo sapiens
  CDR3 for beta chain variable domain of TCR clone 207450 (TRBV19, TRBJ2-2)
CASSFPGQGLAGELFF

SEQ ID NO: 414901 - protein, 14 aa, Homo sapiens
  CDR3 for alpha chain variable domain of TCR clone 207451 (TRAV26-1, TRAJ48)
CIVRVGFGNEKLTF

SEQ ID NO: 414902 - protein, 17 aa, Homo sapiens
  CDR3 for beta chain variable domain of TCR clone 207451 (TRBV4-1, TRBJ1-4)
CASSQEGPRGVEEKLFF

SEQ ID NO: 414903 - protein, 13 aa, Homo sapiens
  CDR3 for alpha chain variable domain of TCR clone 207452 (TRAV8-4, TRAJ10)
CAAFTGGGNILTF

SEQ ID NO: 414904 - protein, 15 aa, Homo sapiens
  CDR3 for beta chain variable domain of TCR clone 207452 (TRBV2, TRBJ2-3)
CASSDFEKATDTQYF

SEQ ID NO: 414905 - protein, 16 aa, Homo sapiens
  CDR3 for alpha chain variable domain of TCR clone 207453 (TRAV8-6, TRAJ36)
CAVSDWLGQTTSSLGL

SEQ ID NO: 414906 - protein, 15 aa, Homo sapiens
  CDR3 for beta chain variable domain of TCR clone 207453 (TRBV10-3, TRBJ2-2)
CAISVATSNTGELFF

SEQ ID NO: 414907 - protein, 11 aa, Homo sapiens
  CDR3 for alpha chain variable domain of TCR clone 207454 (TRAV2, TRAJ33)
CAVDSKYQLIW

SEQ ID NO: 414908 - protein, 15 aa, Homo sapiens
  CDR3 for beta chain variable domain of TCR clone 207454 (TRBV19, TRBJ1-2)
CASSVGQVLNYGYTF

SEQ ID NO: 414909 - protein, 11 aa, Homo sapiens
  CDR3 for alpha chain variable domain of TCR clone 207455 (TRAV1-1, TRAJ23)
CAVRQGGKLIF

SEQ ID NO: 414910 - protein, 15 aa, Homo sapiens
  CDR3 for beta chain variable domain of TCR clone 207455 (TRBV5-8, TRBJ2-3)
CASSPVAGLTDTQYF

SEQ ID NO: 414911 - protein, 16 aa, Homo sapiens
  CDR3 for alpha chain variable domain of TCR clone 207456 (TRAV20, TRAJ22)
CAVQASSSGSARQLTF

SEQ ID NO: 414912 - protein, 13 aa, Homo sapiens
  CDR3 for beta chain variable domain of TCR clone 207456 (TRBV7-2, TRBJ2-5)
CASSQTSVETQDF

SEQ ID NO: 414913 - protein, 15 aa, Homo sapiens
  CDR3 for alpha chain variable domain of TCR clone 207457 (TRAV12-3, TRAJ6)
CAMSATTGGSYIPTF

SEQ ID NO: 414914 - protein, 14 aa, Homo sapiens
  CDR3 for beta chain variable domain of TCR clone 207457 (TRBV11-2, TRBJ1-5)
CASSLDRGRQPQHF

SEQ ID NO: 414915 - protein, 15 aa, Homo sapiens
  CDR3 for alpha chain variable domain of TCR clone 207458 (TRAV3, TRAJ3)
CAVRDRRSSASKIIF

SEQ ID NO: 414916 - protein, 13 aa, Homo sapiens
  CDR3 for beta chain variable domain of TCR clone 207458 (TRBV9, TRBJ2-5)
CASSPAGSGTQYF

SEQ ID NO: 414917 - protein, 16 aa, Homo sapiens
  CDR3 for alpha chain variable domain of TCR clone 207459 (TRAV12-2, TRAJ32)
CAVNLGEGGATNKLIF

SEQ ID NO: 414918 - protein, 12 aa, Homo sapiens
  CDR3 for beta chain variable domain of TCR clone 207459 (TRBV29-1, TRBJ2-3)
CSVTGGADTQYF

SEQ ID NO: 414919 - protein, 11 aa, Homo sapiens
  CDR3 for alpha chain variable domain of TCR clone 207460 (TRAV26-1, TRAJ27)
CIDSNAGKSTF

SEQ ID NO: 414920 - protein, 18 aa, Homo sapiens
  CDR3 for beta chain variable domain of TCR clone 207460 (TRBV7-9, TRBJ2-6)
CASSFPGAGIAGANDLTF

SEQ ID NO: 414921 - protein, 15 aa, Homo sapiens
  CDR3 for alpha chain variable domain of TCR clone 207461 (TRAV29/DV5, TRAJ24)
CAASGATDSWGKFQF

SEQ ID NO: 414922 - protein, 15 aa, Homo sapiens
  CDR3 for beta chain variable domain of TCR clone 207461 (TRBV20-1, TRBJ2-7)
CSARDRVSGMDEQYF

SEQ ID NO: 414923 - protein, 15 aa, Homo sapiens
  CDR3 for alpha chain variable domain of TCR clone 207462 (TRAV29/DV5, TRAJ28)
CAAGYYGAGSYQLTF

SEQ ID NO: 414924 - protein, 18 aa, Homo sapiens
  CDR3 for beta chain variable domain of TCR clone 207462 (TRBV3-1, TRBJ1-2)
CASSQDVIGWNGDYGYTF

SEQ ID NO: 414925 - protein, 12 aa, Homo sapiens
  CDR3 for alpha chain variable domain of TCR clone 207463 (TRAV29/DV5, TRAJ49)
CAATDTGNQFYF

SEQ ID NO: 414926 - protein, 12 aa, Homo sapiens
  CDR3 for beta chain variable domain of TCR clone 207463 (TRBV12-4, TRBJ2-7)
CASSLVGYEQYF

SEQ ID NO: 414927 - protein, 16 aa, Homo sapiens
  CDR3 for alpha chain variable domain of TCR clone 207464 (TRAV12-3, TRAJ53)
CAMSPGSGGSNYKLAF

SEQ ID NO: 414928 - protein, 13 aa, Homo sapiens
  CDR3 for beta chain variable domain of TCR clone 207464 (TRBV10-3, TRBJ2-7)
CASKLAVNYGQYF

SEQ ID NO: 414929 - protein, 19 aa, Homo sapiens
  CDR3 for alpha chain variable domain of TCR clone 207465 (TRAV1-1, TRAJ37)
CAVPSSGRYGSGNTGKLIF

SEQ ID NO: 414930 - protein, 14 aa, Homo sapiens
  CDR3 for beta chain variable domain of TCR clone 207465 (TRBV7-6, TRBJ2-7)
CASSLGDRGYGQYF

SEQ ID NO: 414931 - protein, 17 aa, Homo sapiens
  CDR3 for alpha chain variable domain of TCR clone 207466 (TRAV13-1, TRAJ28)
CAAIPPYSGAGSYQLTF

SEQ ID NO: 414932 - protein, 15 aa, Homo sapiens
  CDR3 for beta chain variable domain of TCR clone 207466 (TRBV6-3, TRBJ2-2)
CASSFLATLTGELFF

SEQ ID NO: 414933 - protein, 18 aa, Homo sapiens
  CDR3 for alpha chain variable domain of TCR clone 207467 (TRAV8-4, TRAJ52)
CAVTRANAGGTSYGKLTF

SEQ ID NO: 414934 - protein, 17 aa, Homo sapiens
  CDR3 for beta chain variable domain of TCR clone 207467 (TRBV24-1, TRBJ2-1)
CATSDVSTSGTYNEQFF

SEQ ID NO: 414935 - protein, 13 aa, Homo sapiens
  CDR3 for alpha chain variable domain of TCR clone 207468 (TRAV8-3, TRAJ36)
CAVGATGANNLFF

SEQ ID NO: 414936 - protein, 15 aa, Homo sapiens
  CDR3 for beta chain variable domain of TCR clone 207468 (TRBV7-2, TRBJ1-2)
CASSPRAGWNYGYAL

SEQ ID NO: 414937 - protein, 17 aa, Homo sapiens
  CDR3 for alpha chain variable domain of TCR clone 207469 (TRAV13-2, TRAJ42)
CAEKGKNYGGSQGNLIF

SEQ ID NO: 414938 - protein, 15 aa, Homo sapiens
  CDR3 for beta chain variable domain of TCR clone 207469 (TRBV7-9, TRBJ1-5)
CASSQGHQPNQPQHF

SEQ ID NO: 414939 - protein, 14 aa, Homo sapiens
  CDR3 for alpha chain variable domain of TCR clone 207470 (TRAV27, TRAJ15)
CAGFDNQAGTALIF

SEQ ID NO: 414940 - protein, 13 aa, Homo sapiens
  CDR3 for beta chain variable domain of TCR clone 207470 (TRBV29-1, TRBJ1-1)
CSAPPGGHTEAFF

SEQ ID NO: 414941 - protein, 12 aa, Homo sapiens
  CDR3 for alpha chain variable domain of TCR clone 207471 (TRAV1-1, TRAJ39)
CAVPVVGNMLTF

SEQ ID NO: 414942 - protein, 13 aa, Homo sapiens
  CDR3 for beta chain variable domain of TCR clone 207471 (TRBV20-1, TRBJ2-1)
CSARSSPRDEQFF

SEQ ID NO: 414943 - protein, 18 aa, Homo sapiens
  CDR3 for alpha chain variable domain of TCR clone 207472 (TRAV26-1, TRAJ52)
CIVRVEGAGGTSYGKLTF

SEQ ID NO: 414944 - protein, 13 aa, Homo sapiens
  CDR3 for beta chain variable domain of TCR clone 207472 (TRBV7-3, TRBJ1-2)
CARSLKRGYGYTF

SEQ ID NO: 414945 - protein, 15 aa, Homo sapiens
  CDR3 for alpha chain variable domain of TCR clone 207473 (TRAV8-3, TRAJ21)
CAVGALPPRGYKFYF

SEQ ID NO: 414946 - protein, 15 aa, Homo sapiens
  CDR3 for beta chain variable domain of TCR clone 207473 (TRBV7-8, TRBJ1-5)
CASGLERRGLEPQHF

SEQ ID NO: 414947 - protein, 11 aa, Homo sapiens
  CDR3 for alpha chain variable domain of TCR clone 207474 (TRAV21, TRAJ34)
CAVTNTDKLIF

SEQ ID NO: 414948 - protein, 15 aa, Homo sapiens
  CDR3 for beta chain variable domain of TCR clone 207474 (TRBV29-1, TRBJ2-5)
CSVRLASGGGKTQYF

SEQ ID NO: 414949 - protein, 14 aa, Homo sapiens
  CDR3 for alpha chain variable domain of TCR clone 207475 (TRAV12-2, TRAJ44)
CAVNPAGPASKLPF

SEQ ID NO: 414950 - protein, 13 aa, Homo sapiens
  CDR3 for beta chain variable domain of TCR clone 207475 (TRBV20-1, TRBJ1-6)
CSAPLGVGSPLHF

SEQ ID NO: 414951 - protein, 16 aa, Homo sapiens
  CDR3 for alpha chain variable domain of TCR clone 207476 (TRAV8-3, TRAJ44)
CAVGTLLTGTASKLTF

SEQ ID NO: 414952 - protein, 13 aa, Homo sapiens
  CDR3 for beta chain variable domain of TCR clone 207476 (TRBV11-2, TRBJ2-1)
CASSLRLTHEQFF

SEQ ID NO: 414953 - protein, 12 aa, Homo sapiens
  CDR3 for alpha chain variable domain of TCR clone 207477 (TRAV21, TRAJ33)
CAKMDSNYQLIW

SEQ ID NO: 414954 - protein, 14 aa, Homo sapiens
  CDR3 for beta chain variable domain of TCR clone 207477 (TRBV7-7, TRBJ2-2)
CATRQDSDTGELFF

SEQ ID NO: 414955 - protein, 17 aa, Homo sapiens
  CDR3 for alpha chain variable domain of TCR clone 207478 (TRAV20, TRAJ53)
CAVQAQGSGGSNYKLTF

SEQ ID NO: 414956 - protein, 11 aa, Homo sapiens
  CDR3 for beta chain variable domain of TCR clone 207478 (TRBV18, TRBJ2-5)
CASSARETQYF

SEQ ID NO: 414957 - protein, 17 aa, Homo sapiens
  CDR3 for alpha chain variable domain of TCR clone 207479 (TRAV1-2, TRAJ26)
CAVRDLITMVRILSLVR

SEQ ID NO: 414958 - protein, 17 aa, Homo sapiens
  CDR3 for beta chain variable domain of TCR clone 207479 (TRBV13, TRBJ2-3)
CASSLSRVAGGRNTQYF

SEQ ID NO: 414959 - protein, 12 aa, Homo sapiens
  CDR3 for alpha chain variable domain of TCR clone 207480 (TRAV3, TRAJ43)
CAVRDPNNDMRF

SEQ ID NO: 414960 - protein, 11 aa, Homo sapiens
  CDR3 for beta chain variable domain of TCR clone 207480 (TRBV10-3, TRBJ2-7)
CAISEGLEQYF

SEQ ID NO: 414961 - protein, 13 aa, Homo sapiens
  CDR3 for alpha chain variable domain of TCR clone 207481 (TRAV8-3, TRAJ47)
CAVSMEYGYKLVF

SEQ ID NO: 414962 - protein, 14 aa, Homo sapiens
  CDR3 for beta chain variable domain of TCR clone 207481 (TRBV2, TRBJ1-5)
CASSGTGFNQPQHF

SEQ ID NO: 414963 - protein, 15 aa, Homo sapiens
  CDR3 for alpha chain variable domain of TCR clone 207482 (TRAV36/DV7, TRAJ28)
CAVVLLWGWELPTHF

SEQ ID NO: 414964 - protein, 16 aa, Homo sapiens
  CDR3 for beta chain variable domain of TCR clone 207482 (TRBV19, TRBJ2-2)
CASRSPGTGATGELFF

SEQ ID NO: 414965 - protein, 11 aa, Homo sapiens
  CDR3 for alpha chain variable domain of TCR clone 207483 (TRAV3, TRAJ21)
CAVGNFNKFYF

SEQ ID NO: 414966 - protein, 11 aa, Homo sapiens
  CDR3 for beta chain variable domain of TCR clone 207483 (TRBV27, TRBJ2-3)
CASSLGDTQYF

SEQ ID NO: 414967 - protein, 12 aa, Homo sapiens
  CDR3 for alpha chain variable domain of TCR clone 207484 (TRAV3, TRAJ20)
CAVRDGDYKLSF

SEQ ID NO: 414968 - protein, 13 aa, Homo sapiens
  CDR3 for beta chain variable domain of TCR clone 207484 (TRBV9, TRBJ2-1)
CASSVGQGDEQFF

SEQ ID NO: 414969 - protein, 15 aa, Homo sapiens
  CDR3 for alpha chain variable domain of TCR clone 207485 (TRAV3, TRAJ47)
CAVRHIGEYGNKLVF

SEQ ID NO: 414970 - protein, 14 aa, Homo sapiens
  CDR3 for beta chain variable domain of TCR clone 207485 (TRBV13, TRBJ2-5)
CASSLERVGETQYF

SEQ ID NO: 414971 - protein, 14 aa, Homo sapiens
  CDR3 for alpha chain variable domain of TCR clone 207486 (TRAV2, TRAJ37)
CAVDFTSNTVKLIF

SEQ ID NO: 414972 - protein, 15 aa, Homo sapiens
  CDR3 for beta chain variable domain of TCR clone 207486 (TRBV19, TRBJ1-1)
CASTSEQIQNTEAFF

SEQ ID NO: 414973 - protein, 16 aa, Homo sapiens
  CDR3 for alpha chain variable domain of TCR clone 207487 (TRAV20, TRAJ10)
CAVLRGLTGGGNKLTF

SEQ ID NO: 414974 - protein, 13 aa, Homo sapiens
  CDR3 for beta chain variable domain of TCR clone 207487 (TRBV10-3, TRBJ2-7)
CASRLAVNYEQYF

SEQ ID NO: 414975 - protein, 14 aa, Homo sapiens
  CDR3 for alpha chain variable domain of TCR clone 207488 (TRAV1-2, TRAJ27)
CAPAEYTNAGKSPF

SEQ ID NO: 414976 - protein, 18 aa, Homo sapiens
  CDR3 for beta chain variable domain of TCR clone 207488 (TRBV28, TRBJ1-2)
CASRQQQGKRGSNYGCTF

SEQ ID NO: 414977 - protein, 11 aa, Homo sapiens
  CDR3 for alpha chain variable domain of TCR clone 207489 (TRAV26-1, TRAJ37)
CIVRVGRKLIF

SEQ ID NO: 414978 - protein, 14 aa, Homo sapiens
  CDR3 for beta chain variable domain of TCR clone 207489 (TRBV25-1, TRBJ1-1)
CASTHLGGNTEAFF

SEQ ID NO: 414979 - protein, 13 aa, Homo sapiens
  CDR3 for alpha chain variable domain of TCR clone 207490 (TRAV1-2, TRAJ9)
CAVLNTGGFKTIF

SEQ ID NO: 414980 - protein, 15 aa, Homo sapiens
  CDR3 for beta chain variable domain of TCR clone 207490 (TRBV11-1, TRBJ2-1)
CASHTGLAGSNEQFF

SEQ ID NO: 414981 - protein, 13 aa, Homo sapiens
  CDR3 for alpha chain variable domain of TCR clone 207491 (TRAV17, TRAJ9)
CATDYTEGLKTIF

SEQ ID NO: 414982 - protein, 14 aa, Homo sapiens
  CDR3 for beta chain variable domain of TCR clone 207491 (TRBV19, TRBJ2-5)
CASSMTGQQETQYF

SEQ ID NO: 414983 - protein, 15 aa, Homo sapiens
  CDR3 for alpha chain variable domain of TCR clone 207492 (TRAV27, TRAJ38)
CAARRNAGNNRKLIW

SEQ ID NO: 414984 - protein, 15 aa, Homo sapiens
  CDR3 for beta chain variable domain of TCR clone 207492 (TRBV11-2, TRBJ2-1)
CASSSPSTRYNEQFF

SEQ ID NO: 414985 - protein, 13 aa, Homo sapiens
  CDR3 for alpha chain variable domain of TCR clone 207493 (TRAV2, TRAJ24)
CAVPTDSWGKLQF

SEQ ID NO: 414986 - protein, 13 aa, Homo sapiens
  CDR3 for beta chain variable domain of TCR clone 207493 (TRBV4-2, TRBJ1-1)
CASSQAGNTEAFF

SEQ ID NO: 414987 - protein, 13 aa, Homo sapiens
  CDR3 for alpha chain variable domain of TCR clone 207494 (TRAV12-1, TRAJ33)
CGDAPDSNYQLIW

SEQ ID NO: 414988 - protein, 14 aa, Homo sapiens
  CDR3 for beta chain variable domain of TCR clone 207494 (TRBV13, TRBJ2-7)
CASSVKGASYEQYF

SEQ ID NO: 414989 - protein, 12 aa, Homo sapiens
  CDR3 for alpha chain variable domain of TCR clone 207495 (TRAV1-1, TRAJ15)
CAVGQAGTALIF

SEQ ID NO: 414990 - protein, 19 aa, Homo sapiens
  CDR3 for beta chain variable domain of TCR clone 207495 (TRBV7-2, TRBJ2-3)
CASSFLSRNWGGGTDTQYF

SEQ ID NO: 414991 - protein, 13 aa, Homo sapiens
  CDR3 for alpha chain variable domain of TCR clone 207496 (TRAV20, TRAJ21)
CAVEGYNFNKFYF

SEQ ID NO: 414992 - protein, 14 aa, Homo sapiens
  CDR3 for beta chain variable domain of TCR clone 207496 (TRBV7-8, TRBJ2-3)
CASSSRDSTDTQYF

SEQ ID NO: 414993 - protein, 13 aa, Homo sapiens
  CDR3 for alpha chain variable domain of TCR clone 207497 (TRAV12-3, TRAJ7)
CAMTPYGNNRVAF

SEQ ID NO: 414994 - protein, 16 aa, Homo sapiens
  CDR3 for beta chain variable domain of TCR clone 207497 (TRBV20-1, TRBJ1-4)
CSARPYGGELKEKLFF

SEQ ID NO: 414995 - protein, 14 aa, Homo sapiens
  CDR3 for alpha chain variable domain of TCR clone 207498 (TRAV2, TRAJ39)
CAVEGDNSGNMLTF

SEQ ID NO: 414996 - protein, 14 aa, Homo sapiens
  CDR3 for beta chain variable domain of TCR clone 207498 (TRBV28, TRBJ2-7)
CASSLRARGNEQYF

SEQ ID NO: 414997 - protein, 12 aa, Homo sapiens
  CDR3 for alpha chain variable domain of TCR clone 207499 (TRAV12-3, TRAJ3)
CAIDSSASKIIF

SEQ ID NO: 414998 - protein, 17 aa, Homo sapiens
  CDR3 for beta chain variable domain of TCR clone 207499 (TRBV7-9, TRBJ2-3)
CASSLEEAGAYPDTQYL

SEQ ID NO: 414999 - protein, 16 aa, Homo sapiens
  CDR3 for alpha chain variable domain of TCR clone 207500 (TRAV1-2, TRAJ10)
CAVRGVITGGGNKLTF

SEQ ID NO: 415000 - protein, 16 aa, Homo sapiens
  CDR3 for beta chain variable domain of TCR clone 207500 (TRBV24-1, TRBJ2-3)
CATSDAISGITDTQYF

SEQ ID NO: 415001 - protein, 10 aa, Homo sapiens
  CDR3 for alpha chain variable domain of TCR clone 207501 (TRAV8-1, TRAJ21)
CAVNGTKFYF

SEQ ID NO: 415002 - protein, 16 aa, Homo sapiens
  CDR3 for beta chain variable domain of TCR clone 207501 (TRBV7-2, TRBJ1-5)
CASSPWGPEGNQTQHF

SEQ ID NO: 415003 - protein, 14 aa, Homo sapiens
  CDR3 for alpha chain variable domain of TCR clone 207502 (TRAV35, TRAJ50)
CAGHRKTSYDKMIF

SEQ ID NO: 415004 - protein, 13 aa, Homo sapiens
  CDR3 for beta chain variable domain of TCR clone 207502 (TRBV7-7, TRBJ2-3)
CASSLSRADTQDF

SEQ ID NO: 415005 - protein, 11 aa, Homo sapiens
  CDR3 for alpha chain variable domain of TCR clone 207503 (TRAV2, TRAJ13)
CASGGYQKVTF

SEQ ID NO: 415006 - protein, 16 aa, Homo sapiens
  CDR3 for beta chain variable domain of TCR clone 207503 (TRBV4-1, TRBJ2-1)
CASSQEAGQGSDEQFF

SEQ ID NO: 415007 - protein, 14 aa, Homo sapiens
  CDR3 for alpha chain variable domain of TCR clone 207504 (TRAV12-3, TRAJ42)
CAMNYGGSQGNLIF

SEQ ID NO: 415008 - protein, 15 aa, Homo sapiens
  CDR3 for beta chain variable domain of TCR clone 207504 (TRBV5-7, TRBJ1-5)
CASSYCKLWDQPQHF

SEQ ID NO: 415009 - protein, 16 aa, Homo sapiens
  CDR3 for alpha chain variable domain of TCR clone 207505 (TRAV3, TRAJ37)
CAGRGKGSGNTGKLIF

SEQ ID NO: 415010 - protein, 16 aa, Homo sapiens
  CDR3 for beta chain variable domain of TCR clone 207505 (TRBV12-4, TRBJ1-5)
CASSRPVGGSNQPQHF

SEQ ID NO: 415011 - protein, 14 aa, Homo sapiens
  CDR3 for alpha chain variable domain of TCR clone 207506 (TRAV21, TRAJ45)
RAVSSGGGADGLTF

SEQ ID NO: 415012 - protein, 15 aa, Homo sapiens
  CDR3 for beta chain variable domain of TCR clone 207506 (TRBV6-1, TRBJ2-4)
CASSEAVWTINSQYF

SEQ ID NO: 415013 - protein, 15 aa, Homo sapiens
  CDR3 for alpha chain variable domain of TCR clone 207507 (TRAV23/DV6, TRAJ38)
CAASGGAGNNRQLIW

SEQ ID NO: 415014 - protein, 13 aa, Homo sapiens
  CDR3 for beta chain variable domain of TCR clone 207507 (TRBV7-2, TRBJ1-2)
CASSLPGLYGYTF

SEQ ID NO: 415015 - protein, 14 aa, Homo sapiens
  CDR3 for alpha chain variable domain of TCR clone 207508 (TRAV16, TRAJ39)
CALSKNNAGNMPTF

SEQ ID NO: 415016 - protein, 14 aa, Homo sapiens
  CDR3 for beta chain variable domain of TCR clone 207508 (TRBV7-2, TRBJ1-1)
CASSFLTGTTEAFF

SEQ ID NO: 415017 - protein, 14 aa, Homo sapiens
  CDR3 for alpha chain variable domain of TCR clone 207509 (TRAV2, TRAJ37)
CAVDFTSNTGKLIF

SEQ ID NO: 415018 - protein, 15 aa, Homo sapiens
  CDR3 for beta chain variable domain of TCR clone 207509 (TRBV20-1, TRBJ1-1)
CSPSLGVTGNTEAFF

SEQ ID NO: 415019 - protein, 15 aa, Homo sapiens
  CDR3 for alpha chain variable domain of TCR clone 207510 (TRAV16, TRAJ48)
CALFISNFGNEKLTF

SEQ ID NO: 415020 - protein, 12 aa, Homo sapiens
  CDR3 for beta chain variable domain of TCR clone 207510 (TRBV7-8, TRBJ2-7)
CASSLGDREQYF

SEQ ID NO: 415021 - protein, 14 aa, Homo sapiens
  CDR3 for alpha chain variable domain of TCR clone 207511 (TRAV12-3, TRAJ10)
SHLPLTGGGNRLTF

SEQ ID NO: 415022 - protein, 12 aa, Homo sapiens
  CDR3 for beta chain variable domain of TCR clone 207511 (TRBV7-9, TRBJ2-7)
CATRTDAYEQYF

SEQ ID NO: 415023 - protein, 11 aa, Homo sapiens
  CDR3 for alpha chain variable domain of TCR clone 207512 (TRAV21, TRAJ9)
CAVPGGFKTIF

SEQ ID NO: 415024 - protein, 12 aa, Homo sapiens
  CDR3 for beta chain variable domain of TCR clone 207512 (TRBV20-1, TRBJ2-3)
CSARVGTDTLYF

SEQ ID NO: 415025 - protein, 15 aa, Homo sapiens
  CDR3 for alpha chain variable domain of TCR clone 207513 (TRAV9-2, TRAJ8)
CSLRGLNTGFQKLVF

SEQ ID NO: 415026 - protein, 20 aa, Homo sapiens
  CDR3 for beta chain variable domain of TCR clone 207513 (TRBV7-8, TRBJ2-2)
CASSHLFPGPTIHITGELFF

SEQ ID NO: 415027 - protein, 12 aa, Homo sapiens
  CDR3 for alpha chain variable domain of TCR clone 207514 (TRAV12-3, TRAJ31)
CAMSVPNARLMF

SEQ ID NO: 415028 - protein, 12 aa, Homo sapiens
  CDR3 for beta chain variable domain of TCR clone 207514 (TRBV11-2, TRBJ2-1)
CAGSVQREGQFF

SEQ ID NO: 415029 - protein, 14 aa, Homo sapiens
  CDR3 for alpha chain variable domain of TCR clone 207515 (TRAV24, TRAJ42)
CAQNYGGSQGNLIF

SEQ ID NO: 415030 - protein, 11 aa, Homo sapiens
  CDR3 for beta chain variable domain of TCR clone 207515 (TRBV12-4, TRBJ1-2)
CASRGDRGYTF

SEQ ID NO: 415031 - protein, 10 aa, Homo sapiens
  CDR3 for alpha chain variable domain of TCR clone 207516 (TRAV1-2, TRAJ20)
CALNDYKLSF

SEQ ID NO: 415032 - protein, 16 aa, Homo sapiens
  CDR3 for beta chain variable domain of TCR clone 207516 (TRBV20-1, TRBJ1-1)
CSARALTQGMDTEAFF

SEQ ID NO: 415033 - protein, 13 aa, Homo sapiens
  CDR3 for alpha chain variable domain of TCR clone 207517 (TRAV8-3, TRAJ36)
CAVGATGANNLFL

SEQ ID NO: 415034 - protein, 15 aa, Homo sapiens
  CDR3 for beta chain variable domain of TCR clone 207517 (TRBV7-2, TRBJ1-2)
CASSPRAGWNYGDTF

SEQ ID NO: 415035 - protein, 12 aa, Homo sapiens
  CDR3 for alpha chain variable domain of TCR clone 207518 (TRAV13-2, TRAJ23)
CAERHRGGKLIF

SEQ ID NO: 415036 - protein, 13 aa, Homo sapiens
  CDR3 for beta chain variable domain of TCR clone 207518 (TRBV6-1, TRBJ1-2)
CASSDSPSYGYTF

SEQ ID NO: 415037 - protein, 14 aa, Homo sapiens
  CDR3 for alpha chain variable domain of TCR clone 207519 (TRAV13-1, TRAJ44)
CAAKATGTASKLTF

SEQ ID NO: 415038 - protein, 16 aa, Homo sapiens
  CDR3 for beta chain variable domain of TCR clone 207519 (TRBV5-1, TRBJ2-2)
CASSSRTGGRTGELFF

SEQ ID NO: 415039 - protein, 14 aa, Homo sapiens
  CDR3 for alpha chain variable domain of TCR clone 207520 (TRAV13-1, TRAJ35)
CAASKGGFGNVLHC

SEQ ID NO: 415040 - protein, 13 aa, Homo sapiens
  CDR3 for beta chain variable domain of TCR clone 207520 (TRBV7-3, TRBJ1-1)
CASSQDWAAEAFS

SEQ ID NO: 415041 - protein, 13 aa, Homo sapiens
  CDR3 for alpha chain variable domain of TCR clone 207521 (TRAV12-1, TRAJ22)
CVASGGSARQLTF

SEQ ID NO: 415042 - protein, 15 aa, Homo sapiens
  CDR3 for beta chain variable domain of TCR clone 207521 (TRBV6-1, TRBJ2-3)
CASSERWDSTDTQYF

SEQ ID NO: 415043 - protein, 11 aa, Homo sapiens
  CDR3 for alpha chain variable domain of TCR clone 207522 (TRAV27, TRAJ45)
CAGAQAEVLTD

SEQ ID NO: 415044 - protein, 15 aa, Homo sapiens
  CDR3 for beta chain variable domain of TCR clone 207522 (TRBV20-1, TRBJ2-7)
CSARDRVSGMDEQYF

SEQ ID NO: 415045 - protein, 16 aa, Homo sapiens
  CDR3 for alpha chain variable domain of TCR clone 207523 (TRAV30, TRAJ24)
CGTEIVDADSWGKFQF

SEQ ID NO: 415046 - protein, 13 aa, Homo sapiens
  CDR3 for beta chain variable domain of TCR clone 207523 (TRBV5-7, TRBJ2-3)
CASSLGRTDTQYF

SEQ ID NO: 415047 - protein, 11 aa, Homo sapiens
  CDR3 for alpha chain variable domain of TCR clone 207524 (TRAV21, TRAJ11)
CAVNGYSTLTF

SEQ ID NO: 415048 - protein, 14 aa, Homo sapiens
  CDR3 for beta chain variable domain of TCR clone 207524 (TRBV20-1, TRBJ2-7)
CSAPELAGVGEQYF

SEQ ID NO: 415049 - protein, 15 aa, Homo sapiens
  CDR3 for alpha chain variable domain of TCR clone 207525 (TRAV3, TRAJ5)
CAVRDLDTGRRAFTF

SEQ ID NO: 415050 - protein, 14 aa, Homo sapiens
  CDR3 for beta chain variable domain of TCR clone 207525 (TRBV25-1, TRBJ1-1)
CASTHLGGNTEAFF

SEQ ID NO: 415051 - protein, 23 aa, Homo sapiens
  CDR3 for alpha chain variable domain of TCR clone 207526 (TRAV8-4, TRAJ38)
CARLNAGNNHIQNPDPAVYKLRD

SEQ ID NO: 415052 - protein, 14 aa, Homo sapiens
  CDR3 for beta chain variable domain of TCR clone 207526 (TRBV7-8, TRBJ2-3)
CASSLEAGTDTQYF

SEQ ID NO: 415053 - protein, 15 aa, Homo sapiens
  CDR3 for alpha chain variable domain of TCR clone 207527 (TRAV26-1, TRAJ52)
CIVRSGGTSYGKLTF

SEQ ID NO: 415054 - protein, 11 aa, Homo sapiens
  CDR3 for beta chain variable domain of TCR clone 207527 (TRBV11-2, TRBJ2-2)
CASSLPGELFF

SEQ ID NO: 415055 - protein, 13 aa, Homo sapiens
  CDR3 for alpha chain variable domain of TCR clone 207528 (TRAV2, TRAJ40)
CAVVTSGTYKYIL

SEQ ID NO: 415056 - protein, 12 aa, Homo sapiens
  CDR3 for beta chain variable domain of TCR clone 207528 (TRBV11-2, TRBJ2-2)
CASSLGGGELFF

SEQ ID NO: 415057 - protein, 14 aa, Homo sapiens
  CDR3 for alpha chain variable domain of TCR clone 207529 (TRAV16, TRAJ17)
CALSCRAAGNKLTF

SEQ ID NO: 415058 - protein, 17 aa, Homo sapiens
  CDR3 for beta chain variable domain of TCR clone 207529 (TRBV18, TRBJ2-6)
CASSPRQGAVGANVLTF

SEQ ID NO: 415059 - protein, 14 aa, Homo sapiens
  CDR3 for alpha chain variable domain of TCR clone 207530 (TRAV21, TRAJ35)
CAVMPIGFGNVLHC

SEQ ID NO: 415060 - protein, 13 aa, Homo sapiens
  CDR3 for beta chain variable domain of TCR clone 207530 (TRBV20-1, TRBJ2-5)
CSAATELQETQYF

SEQ ID NO: 415061 - protein, 15 aa, Homo sapiens
  CDR3 for alpha chain variable domain of TCR clone 207531 (TRAV12-2, TRAJ20)
CAVKGGFGAVTTVTV

SEQ ID NO: 415062 - protein, 13 aa, Homo sapiens
  CDR3 for beta chain variable domain of TCR clone 207531 (TRBV12-4, TRBJ2-7)
CASSPGQLYEQYF

SEQ ID NO: 415063 - protein, 15 aa, Homo sapiens
  CDR3 for alpha chain variable domain of TCR clone 207532 (TRAV12-3, TRAJ10)
CASYILTGGGNKLTF

SEQ ID NO: 415064 - protein, 14 aa, Homo sapiens
  CDR3 for beta chain variable domain of TCR clone 207532 (TRBV12-4, TRBJ2-3)
CASSGQGSTDTQYF

SEQ ID NO: 415065 - protein, 13 aa, Homo sapiens
  CDR3 for alpha chain variable domain of TCR clone 207533 (TRAV8-3, TRAJ21)
CAVGAYNFNKFYF

SEQ ID NO: 415066 - protein, 16 aa, Homo sapiens
  CDR3 for beta chain variable domain of TCR clone 207533 (TRBV19, TRBJ2-1)
CASSMGGGSSYNEQLF

SEQ ID NO: 415067 - protein, 14 aa, Homo sapiens
  CDR3 for alpha chain variable domain of TCR clone 207534 (TRAV27, TRAJ42)
CAGEKVGSQGNPIF

SEQ ID NO: 415068 - protein, 15 aa, Homo sapiens
  CDR3 for beta chain variable domain of TCR clone 207534 (TRBV7-2, TRBJ2-2)
CASSLVAGSAGELFF

SEQ ID NO: 415069 - protein, 14 aa, Homo sapiens
  CDR3 for alpha chain variable domain of TCR clone 207535 (TRAV8-3, TRAJ36)
CAVGTQTGANNLFF

SEQ ID NO: 415070 - protein, 17 aa, Homo sapiens
  CDR3 for beta chain variable domain of TCR clone 207535 (TRBV28, TRBJ1-1)
CASSLSGTGYENTEAFF

SEQ ID NO: 415071 - protein, 15 aa, Homo sapiens
  CDR3 for alpha chain variable domain of TCR clone 207536 (TRAV8-6, TRAJ11)
CAVNFMNSGYSTLTF

SEQ ID NO: 415072 - protein, 14 aa, Homo sapiens
  CDR3 for beta chain variable domain of TCR clone 207536 (TRBV20-1, TRBJ2-7)
CSAKRGRSSYEQYF

SEQ ID NO: 415073 - protein, 13 aa, Homo sapiens
  CDR3 for alpha chain variable domain of TCR clone 207537 (TRAV1-1, TRAJ23)
CAVVANQGGKLIF

SEQ ID NO: 415074 - protein, 15 aa, Homo sapiens
  CDR3 for beta chain variable domain of TCR clone 207537 (TRBV7-8, TRBJ2-5)
CASSDAAGSQETQYF

SEQ ID NO: 415075 - protein, 14 aa, Homo sapiens
  CDR3 for alpha chain variable domain of TCR clone 207538 (TRAV3, TRAJ42)
CCETLGGSQGNLIF

SEQ ID NO: 415076 - protein, 15 aa, Homo sapiens
  CDR3 for beta chain variable domain of TCR clone 207538 (TRBV2, TRBJ2-1)
CASSELAGSYNEQFF

SEQ ID NO: 415077 - protein, 15 aa, Homo sapiens
  CDR3 for alpha chain variable domain of TCR clone 207539 (TRAV8-4, TRAJ36)
CAVRKSWTGANNLFF

SEQ ID NO: 415078 - protein, 17 aa, Homo sapiens
  CDR3 for beta chain variable domain of TCR clone 207539 (TRBV5-5, TRBJ1-1)
CASSLRFRGLMNTEAFF

SEQ ID NO: 415079 - protein, 17 aa, Homo sapiens
  CDR3 for alpha chain variable domain of TCR clone 207540 (TRAV3, TRAJ12)
CAGRDGGRMDSSYKLIF

SEQ ID NO: 415080 - protein, 15 aa, Homo sapiens
  CDR3 for beta chain variable domain of TCR clone 207540 (TRBV4-1, TRBJ1-4)
CASSDTGGTNEKLFF

SEQ ID NO: 415081 - protein, 12 aa, Homo sapiens
  CDR3 for alpha chain variable domain of TCR clone 207541 (TRAV27, TRAJ20)
CAGASNDYKLSF

SEQ ID NO: 415082 - protein, 15 aa, Homo sapiens
  CDR3 for beta chain variable domain of TCR clone 207541 (TRBV27, TRBJ2-5)
CASSLYPRGGETQYF

SEQ ID NO: 415083 - protein, 12 aa, Homo sapiens
  CDR3 for alpha chain variable domain of TCR clone 207542 (TRAV12-3, TRAJ41)
CAMSYSGYALNF

SEQ ID NO: 415084 - protein, 19 aa, Homo sapiens
  CDR3 for beta chain variable domain of TCR clone 207542 (TRBV7-3, TRBJ2-6)
CLECGAPGIGGAGANVLTF

SEQ ID NO: 415085 - protein, 13 aa, Homo sapiens
  CDR3 for alpha chain variable domain of TCR clone 207543 (TRAV12-3, TRAJ7)
CAMSASGNNRLAF

SEQ ID NO: 415086 - protein, 18 aa, Homo sapiens
  CDR3 for beta chain variable domain of TCR clone 207543 (TRBV7-2, TRBJ2-3)
CASSLKREGSGITDTQYF

SEQ ID NO: 415087 - protein, 15 aa, Homo sapiens
  CDR3 for alpha chain variable domain of TCR clone 207544 (TRAV2, TRAJ9)
CAVEDRGTEASKLSL

SEQ ID NO: 415088 - protein, 16 aa, Homo sapiens
  CDR3 for beta chain variable domain of TCR clone 207544 (TRBV24-1, TRBJ2-3)
CATSDPGTGATDTQYF

SEQ ID NO: 415089 - protein, 14 aa, Homo sapiens
  CDR3 for alpha chain variable domain of TCR clone 207545 (TRAV13-1, TRAJ22)
CAASTSGSARQLTF

SEQ ID NO: 415090 - protein, 12 aa, Homo sapiens
  CDR3 for beta chain variable domain of TCR clone 207545 (TRBV12-4, TRBJ1-1)
CASSFGRAEAFF

SEQ ID NO: 415091 - protein, 15 aa, Homo sapiens
  CDR3 for alpha chain variable domain of TCR clone 207546 (TRAV13-1, TRAJ27)
CAARELNTNAGKSTF

SEQ ID NO: 415092 - protein, 15 aa, Homo sapiens
  CDR3 for beta chain variable domain of TCR clone 207546 (TRBV20-1, TRBJ2-7)
CSARDRVSGMDEQYF

SEQ ID NO: 415093 - protein, 12 aa, Homo sapiens
  CDR3 for alpha chain variable domain of TCR clone 207547 (TRAV8-3, TRAJ7)
CSVEGGNNRLAF

SEQ ID NO: 415094 - protein, 15 aa, Homo sapiens
  CDR3 for beta chain variable domain of TCR clone 207547 (TRBV10-3, TRBJ2-1)
CAIRDVQDRAYEQFF

SEQ ID NO: 415095 - protein, 17 aa, Homo sapiens
  CDR3 for alpha chain variable domain of TCR clone 207548 (TRAV13-2, TRAJ31)
CAENARLIFGDGTQLVV

SEQ ID NO: 415096 - protein, 14 aa, Homo sapiens
  CDR3 for beta chain variable domain of TCR clone 207548 (TRBV7-9, TRBJ2-1)
CASSLGVADNEQFF

SEQ ID NO: 415097 - protein, 13 aa, Homo sapiens
  CDR3 for alpha chain variable domain of TCR clone 207549 (TRAV8-6, TRAJ9)
CAVSDTGGFKTIF

SEQ ID NO: 415098 - protein, 14 aa, Homo sapiens
  CDR3 for beta chain variable domain of TCR clone 207549 (TRBV7-6, TRBJ2-3)
CASSVAGGTETQYF

SEQ ID NO: 415099 - protein, 14 aa, Homo sapiens
  CDR3 for alpha chain variable domain of TCR clone 207550 (TRAV4, TRAJ23)
CLVGSYNQGGKLIF

SEQ ID NO: 415100 - protein, 18 aa, Homo sapiens
  CDR3 for beta chain variable domain of TCR clone 207550 (TRBV6-5, TRBJ2-6)
CASRTTGQGKTGANVLTF

SEQ ID NO: 415101 - protein, 17 aa, Homo sapiens
  CDR3 for alpha chain variable domain of TCR clone 207551 (TRAV14/DV4, TRAJ3)
CAMREGPAYSSASKIIF

SEQ ID NO: 415102 - protein, 17 aa, Homo sapiens
  CDR3 for beta chain variable domain of TCR clone 207551 (TRBV20-1, TRBJ1-5)
CSARVGGERQGNQPQHS

SEQ ID NO: 415103 - protein, 12 aa, Homo sapiens
  CDR3 for alpha chain variable domain of TCR clone 207552 (TRAV9-2, TRAJ26)
CALRGYGQNFVF

SEQ ID NO: 415104 - protein, 15 aa, Homo sapiens
  CDR3 for beta chain variable domain of TCR clone 207552 (TRBV9, TRBJ1-6)
CASSVAGTGDSPLHF

SEQ ID NO: 415105 - protein, 14 aa, Homo sapiens
  CDR3 for alpha chain variable domain of TCR clone 207553 (TRAV16, TRAJ15)
CALSSNQAGTALIF

SEQ ID NO: 415106 - protein, 16 aa, Homo sapiens
  CDR3 for beta chain variable domain of TCR clone 207553 (TRBV9, TRBJ2-7)
CASSAGPDRSPYEQYF

SEQ ID NO: 415107 - protein, 14 aa, Homo sapiens
  CDR3 for alpha chain variable domain of TCR clone 207554 (TRAV12-2, TRAJ36)
CAVNPPTGANNLFF

SEQ ID NO: 415108 - protein, 13 aa, Homo sapiens
  CDR3 for beta chain variable domain of TCR clone 207554 (TRBV15, TRBJ1-6)
CATSGGLNSPLHF

SEQ ID NO: 415109 - protein, 13 aa, Homo sapiens
  CDR3 for alpha chain variable domain of TCR clone 207555 (TRAV12-1, TRAJ53)
CVVNAESNYKLTF

SEQ ID NO: 415110 - protein, 14 aa, Homo sapiens
  CDR3 for beta chain variable domain of TCR clone 207555 (TRBV11-2, TRBJ2-3)
CASSLGGGANTQYF

SEQ ID NO: 415111 - protein, 12 aa, Homo sapiens
  CDR3 for alpha chain variable domain of TCR clone 207556 (TRAV8-3, TRAJ26)
CAGDNSGQNFVF

SEQ ID NO: 415112 - protein, 11 aa, Homo sapiens
  CDR3 for beta chain variable domain of TCR clone 207556 (TRBV29-1, TRBJ2-5)
CSEDRAGTQYF

SEQ ID NO: 415113 - protein, 15 aa, Homo sapiens
  CDR3 for alpha chain variable domain of TCR clone 207557 (TRAV12-2, TRAJ43)
CAFDMRFGAGTRLTV

SEQ ID NO: 415114 - protein, 18 aa, Homo sapiens
  CDR3 for beta chain variable domain of TCR clone 207557 (TRBV20-1, TRBJ2-3)
CSSSGLAGGPGTTDTQYF

SEQ ID NO: 415115 - protein, 14 aa, Homo sapiens
  CDR3 for alpha chain variable domain of TCR clone 207558 (TRAV13-1, TRAJ3)
CAASKSSSASKIIF

SEQ ID NO: 415116 - protein, 13 aa, Homo sapiens
  CDR3 for beta chain variable domain of TCR clone 207558 (TRBV11-2, TRBJ2-7)
CASSGTRPYEQYF

SEQ ID NO: 415117 - protein, 12 aa, Homo sapiens
  CDR3 for alpha chain variable domain of TCR clone 207559 (TRAV17, TRAJ30)
CATDARDDKIIF

SEQ ID NO: 415118 - protein, 15 aa, Homo sapiens
  CDR3 for beta chain variable domain of TCR clone 207559 (TRBV4-1, TRBJ2-1)
CASSRGGELYNEQFF

SEQ ID NO: 415119 - protein, 11 aa, Homo sapiens
  CDR3 for alpha chain variable domain of TCR clone 207560 (TRAV21, TRAJ34)
CAVTNTDKLIF

SEQ ID NO: 415120 - protein, 15 aa, Homo sapiens
  CDR3 for beta chain variable domain of TCR clone 207560 (TRBV7-2, TRBJ2-1)
CASSLVAGRYNEQFF

SEQ ID NO: 415121 - protein, 14 aa, Homo sapiens
  CDR3 for alpha chain variable domain of TCR clone 207561 (TRAV36/DV7, TRAJ40)
CAVETTSGNYKYIF

SEQ ID NO: 415122 - protein, 13 aa, Homo sapiens
  CDR3 for beta chain variable domain of TCR clone 207561 (TRBV29-1, TRBJ2-1)
CSVEGGRVNEQFF

SEQ ID NO: 415123 - protein, 13 aa, Homo sapiens
  CDR3 for alpha chain variable domain of TCR clone 207562 (TRAV2, TRAJ40)
CAVVTSGTYKYIF

SEQ ID NO: 415124 - protein, 14 aa, Homo sapiens
  CDR3 for beta chain variable domain of TCR clone 207562 (TRBV19, TRBJ2-1)
CASPTVVLRGEQFF

SEQ ID NO: 415125 - protein, 12 aa, Homo sapiens
  CDR3 for alpha chain variable domain of TCR clone 207563 (TRAV13-1, TRAJ3)
QVYNSSASKIIF

SEQ ID NO: 415126 - protein, 17 aa, Homo sapiens
  CDR3 for beta chain variable domain of TCR clone 207563 (TRBV5-1, TRBJ2-7)
CARSKPEGREASYEQYF

SEQ ID NO: 415127 - protein, 15 aa, Homo sapiens
  CDR3 for alpha chain variable domain of TCR clone 207564 (TRAV21, TRAJ24)
CAARSSTDGWGQLQF

SEQ ID NO: 415128 - protein, 15 aa, Homo sapiens
  CDR3 for beta chain variable domain of TCR clone 207564 (TRBV20-1, TRBJ1-1)
CSASRGVTGNTEAFF

SEQ ID NO: 415129 - protein, 15 aa, Homo sapiens
  CDR3 for alpha chain variable domain of TCR clone 207565 (TRAV8-2, TRAJ40)
CVLSDRGSGTYKYIF

SEQ ID NO: 415130 - protein, 17 aa, Homo sapiens
  CDR3 for beta chain variable domain of TCR clone 207565 (TRBV9, TRBJ2-1)
CASSVRSLSGGNNEQFF

SEQ ID NO: 415131 - protein, 16 aa, Homo sapiens
  CDR3 for alpha chain variable domain of TCR clone 207566 (TRAV30, TRAJ24)
CGTEIVDADSWGKFQF

SEQ ID NO: 415132 - protein, 16 aa, Homo sapiens
  CDR3 for beta chain variable domain of TCR clone 207566 (TRBV6-1, TRBJ2-1)
CASILRQGSCYNEQFF

SEQ ID NO: 415133 - protein, 14 aa, Homo sapiens
  CDR3 for alpha chain variable domain of TCR clone 207567 (TRAV1-2, TRAJ8)
CAVREDTGFQKLVF

SEQ ID NO: 415134 - protein, 15 aa, Homo sapiens
  CDR3 for beta chain variable domain of TCR clone 207567 (TRBV15, TRBJ1-1)
CATSLHGGRNTEAFF

SEQ ID NO: 415135 - protein, 14 aa, Homo sapiens
  CDR3 for alpha chain variable domain of TCR clone 207568 (TRAV12-3, TRAJ5)
CAMTWDTGRRALPF

SEQ ID NO: 415136 - protein, 14 aa, Homo sapiens
  CDR3 for beta chain variable domain of TCR clone 207568 (TRBV10-2, TRBJ1-5)
CASSSTGRNQTQHF

SEQ ID NO: 415137 - protein, 14 aa, Homo sapiens
  CDR3 for alpha chain variable domain of TCR clone 207569 (TRAV12-2, TRAJ40)
CAVKIPSGTYKYII

SEQ ID NO: 415138 - protein, 13 aa, Homo sapiens
  CDR3 for beta chain variable domain of TCR clone 207569 (TRBV12-4, TRBJ1-1)
CASSPGTGFEAFF

SEQ ID NO: 415139 - protein, 15 aa, Homo sapiens
  CDR3 for alpha chain variable domain of TCR clone 207570 (TRAV17, TRAJ42)
CATDHNGGSQGNLIF

SEQ ID NO: 415140 - protein, 14 aa, Homo sapiens
  CDR3 for beta chain variable domain of TCR clone 207570 (TRBV19, TRBJ2-5)
CASSIEHSQETQYF

SEQ ID NO: 415141 - protein, 13 aa, Homo sapiens
  CDR3 for alpha chain variable domain of TCR clone 207571 (TRAV30, TRAJ24)
CGTVTDSWGKLQF

SEQ ID NO: 415142 - protein, 13 aa, Homo sapiens
  CDR3 for beta chain variable domain of TCR clone 207571 (TRBV28, TRBJ2-5)
CASSSRNQETQYF

SEQ ID NO: 415143 - protein, 12 aa, Homo sapiens
  CDR3 for alpha chain variable domain of TCR clone 207572 (TRAV27, TRAJ21)
CAGVRQLQQILL

SEQ ID NO: 415144 - protein, 14 aa, Homo sapiens
  CDR3 for beta chain variable domain of TCR clone 207572 (TRBV7-9, TRBJ1-4)
CASSLEGQSEKPFF

SEQ ID NO: 415145 - protein, 13 aa, Homo sapiens
  CDR3 for alpha chain variable domain of TCR clone 207573 (TRAV25, TRAJ44)
CAGYTGTASKLTF

SEQ ID NO: 415146 - protein, 14 aa, Homo sapiens
  CDR3 for beta chain variable domain of TCR clone 207573 (TRBV6-6, TRBJ1-3)
CASSRQGSGNTIYF

SEQ ID NO: 415147 - protein, 14 aa, Homo sapiens
  CDR3 for alpha chain variable domain of TCR clone 207574 (TRAV1-2, TRAJ8)
CAVREGTGFQKLVF

SEQ ID NO: 415148 - protein, 13 aa, Homo sapiens
  CDR3 for beta chain variable domain of TCR clone 207574 (TRBV19, TRBJ2-1)
CATSRGVYNEQFF

SEQ ID NO: 415149 - protein, 17 aa, Homo sapiens
  CDR3 for alpha chain variable domain of TCR clone 207575 (TRAV12-2, TRAJ4)
CAVNVRPVSGGYNKLIF

SEQ ID NO: 415150 - protein, 17 aa, Homo sapiens
  CDR3 for beta chain variable domain of TCR clone 207575 (TRBV6-3, TRBJ2-1)
CASSYSSGTRVLDEQFF

SEQ ID NO: 415151 - protein, 14 aa, Homo sapiens
  CDR3 for alpha chain variable domain of TCR clone 207576 (TRAV17, TRAJ54)
CATDANQGAQKLVF

SEQ ID NO: 415152 - protein, 14 aa, Homo sapiens
  CDR3 for beta chain variable domain of TCR clone 207576 (TRBV25-1, TRBJ1-1)
CASTHLGGNTEAFF

SEQ ID NO: 415153 - protein, 11 aa, Homo sapiens
  CDR3 for alpha chain variable domain of TCR clone 207577 (TRAV8-1, TRAJ8)
CARTGFQKLVF

SEQ ID NO: 415154 - protein, 14 aa, Homo sapiens
  CDR3 for beta chain variable domain of TCR clone 207577 (TRBV5-4, TRBJ1-2)
CASTRQTDNYGYTF

SEQ ID NO: 415155 - protein, 16 aa, Homo sapiens
  CDR3 for alpha chain variable domain of TCR clone 207578 (TRAV30, TRAJ24)
CGTEIVDADSWGKFQF

SEQ ID NO: 415156 - protein, 13 aa, Homo sapiens
  CDR3 for beta chain variable domain of TCR clone 207578 (TRBV18, TRBJ1-1)
CASSGGQNTEAFF

SEQ ID NO: 415157 - protein, 12 aa, Homo sapiens
  CDR3 for alpha chain variable domain of TCR clone 207579 (TRAV13-1, TRAJ36)
WRGGAGANNLFF

SEQ ID NO: 415158 - protein, 16 aa, Homo sapiens
  CDR3 for beta chain variable domain of TCR clone 207579 (TRBV7-9, TRBJ2-5)
CGSRLKIGTRKETQYF

SEQ ID NO: 415159 - protein, 12 aa, Homo sapiens
  CDR3 for alpha chain variable domain of TCR clone 207580 (TRAV8-3, TRAJ34)
WASGYNTDKLIF

SEQ ID NO: 415160 - protein, 12 aa, Homo sapiens
  CDR3 for beta chain variable domain of TCR clone 207580 (TRBV6-4, TRBJ2-3)
CQQCFVPDTQYF

SEQ ID NO: 415161 - protein, 14 aa, Homo sapiens
  CDR3 for alpha chain variable domain of TCR clone 207581 (TRAV17, TRAJ54)
CATDANHGAQKLVF

SEQ ID NO: 415162 - protein, 12 aa, Homo sapiens
  CDR3 for beta chain variable domain of TCR clone 207581 (TRBV7-9, TRBJ2-7)
CASSIKREEQYF

SEQ ID NO: 415163 - protein, 15 aa, Homo sapiens
  CDR3 for alpha chain variable domain of TCR clone 207582 (TRAV3, TRAJ9)
CAVRARNTGGFKTIF

SEQ ID NO: 415164 - protein, 15 aa, Homo sapiens
  CDR3 for beta chain variable domain of TCR clone 207582 (TRBV19, TRBJ2-1)
CASSTGTSSYSEQFF

SEQ ID NO: 415165 - protein, 15 aa, Homo sapiens
  CDR3 for alpha chain variable domain of TCR clone 207583 (TRAV13-1, TRAJ39)
CAASPLNDAGNMLTF

SEQ ID NO: 415166 - protein, 15 aa, Homo sapiens
  CDR3 for beta chain variable domain of TCR clone 207583 (TRBV7-6, TRBJ2-1)
CASSSLAGEGNEQFF

SEQ ID NO: 415167 - protein, 15 aa, Homo sapiens
  CDR3 for alpha chain variable domain of TCR clone 207584 (TRAV1-1, TRAJ24)
CSLSGGTDSWGKFQF

SEQ ID NO: 415168 - protein, 16 aa, Homo sapiens
  CDR3 for beta chain variable domain of TCR clone 207584 (TRBV2, TRBJ2-7)
CASSEPWTGPSYEQYF

SEQ ID NO: 415169 - protein, 18 aa, Homo sapiens
  CDR3 for alpha chain variable domain of TCR clone 207585 (TRAV21, TRAJ52)
CAVRPSPAGGTSYGKLTF

SEQ ID NO: 415170 - protein, 15 aa, Homo sapiens
  CDR3 for beta chain variable domain of TCR clone 207585 (TRBV18, TRBJ1-5)
CASSPQARSNQPQHF

SEQ ID NO: 415171 - protein, 10 aa, Homo sapiens
  CDR3 for alpha chain variable domain of TCR clone 207586 (TRAV29/DV5, TRAJ48)
CAAGGEKSTF

SEQ ID NO: 415172 - protein, 14 aa, Homo sapiens
  CDR3 for beta chain variable domain of TCR clone 207586 (TRBV7-9, TRBJ2-5)
CASSLAPDQETQYF

SEQ ID NO: 415173 - protein, 14 aa, Homo sapiens
  CDR3 for alpha chain variable domain of TCR clone 207587 (TRAV1-2, TRAJ16)
CAVNRFSDGQKLLF

SEQ ID NO: 415174 - protein, 14 aa, Homo sapiens
  CDR3 for beta chain variable domain of TCR clone 207587 (TRBV13, TRBJ2-5)
CASSLGWGQETQYF

SEQ ID NO: 415175 - protein, 12 aa, Homo sapiens
  CDR3 for alpha chain variable domain of TCR clone 207588 (TRAV41, TRAJ43)
CAVNYNNNDMRF

SEQ ID NO: 415176 - protein, 13 aa, Homo sapiens
  CDR3 for beta chain variable domain of TCR clone 207588 (TRBV20-1, TRBJ1-1)
CSARGGGNTEAFF

SEQ ID NO: 415177 - protein, 15 aa, Homo sapiens
  CDR3 for alpha chain variable domain of TCR clone 207589 (TRAV13-1, TRAJ52)
SYYNAGGTSYGKLTF

SEQ ID NO: 415178 - protein, 16 aa, Homo sapiens
  CDR3 for beta chain variable domain of TCR clone 207589 (TRBV20-1, TRBJ1-4)
CSAPGQGLLTNEKLFF

SEQ ID NO: 415179 - protein, 17 aa, Homo sapiens
  CDR3 for alpha chain variable domain of TCR clone 207590 (TRAV3, TRAJ6)
CAVRDGPRAGASYIPTF

SEQ ID NO: 415180 - protein, 14 aa, Homo sapiens
  CDR3 for beta chain variable domain of TCR clone 207590 (TRBV7-2, TRBJ2-7)
CASSPKTSFYEQYF

SEQ ID NO: 415181 - protein, 13 aa, Homo sapiens
  CDR3 for alpha chain variable domain of TCR clone 207591 (TRAV35, TRAJ43)
CAGYPYNNNDMRF

SEQ ID NO: 415182 - protein, 17 aa, Homo sapiens
  CDR3 for beta chain variable domain of TCR clone 207591 (TRBV12-4, TRBJ1-1)
CASSLSGFRTMNTEAFF

SEQ ID NO: 415183 - protein, 15 aa, Homo sapiens
  CDR3 for alpha chain variable domain of TCR clone 207592 (TRAV3, TRAJ4)
CAQNMFSGGYNKLIF

SEQ ID NO: 415184 - protein, 14 aa, Homo sapiens
  CDR3 for beta chain variable domain of TCR clone 207592 (TRBV19, TRBJ2-5)
CASSMTGQQETQYF

SEQ ID NO: 415185 - protein, 15 aa, Homo sapiens
  CDR3 for alpha chain variable domain of TCR clone 207593 (TRAV12-1, TRAJ41)
CVVNSRTGSGYALNF

SEQ ID NO: 415186 - protein, 11 aa, Homo sapiens
  CDR3 for beta chain variable domain of TCR clone 207593 (TRBV6-4, TRBJ2-1)
CACSDSYAQFF

SEQ ID NO: 415187 - protein, 10 aa, Homo sapiens
  CDR3 for alpha chain variable domain of TCR clone 207594 (TRAV12-2, TRAJ37)
CAVDTGKLIF

SEQ ID NO: 415188 - protein, 13 aa, Homo sapiens
  CDR3 for beta chain variable domain of TCR clone 207594 (TRBV20-1, TRBJ1-1)
CSARGPGTGEAFF

SEQ ID NO: 415189 - protein, 13 aa, Homo sapiens
  CDR3 for alpha chain variable domain of TCR clone 207595 (TRAV21, TRAJ27)
CAARPGNAGKSTF

SEQ ID NO: 415190 - protein, 14 aa, Homo sapiens
  CDR3 for beta chain variable domain of TCR clone 207595 (TRBV7-6, TRBJ2-1)
CASSFVGGQMSSSS

SEQ ID NO: 415191 - protein, 14 aa, Homo sapiens
  CDR3 for alpha chain variable domain of TCR clone 207596 (TRAV12-2, TRAJ13)
CAVKKTGGYQKVTF

SEQ ID NO: 415192 - protein, 16 aa, Homo sapiens
  CDR3 for beta chain variable domain of TCR clone 207596 (TRBV19, TRBJ2-1)
CASSIETGSPYNEQFF

SEQ ID NO: 415193 - protein, 14 aa, Homo sapiens
  CDR3 for alpha chain variable domain of TCR clone 207597 (TRAV12-2, TRAJ24)
CAVTPADSWGKLQF

SEQ ID NO: 415194 - protein, 16 aa, Homo sapiens
  CDR3 for beta chain variable domain of TCR clone 207597 (TRBV12-4, TRBJ1-5)
CASSRPVGGSNQPQHF

SEQ ID NO: 415195 - protein, 15 aa, Homo sapiens
  CDR3 for alpha chain variable domain of TCR clone 207598 (TRAV26-1, TRAJ29)
CIVRVEGSGNTPLVF

SEQ ID NO: 415196 - protein, 16 aa, Homo sapiens
  CDR3 for beta chain variable domain of TCR clone 207598 (TRBV7-9, TRBJ2-2)
CASSGFGGANTGELFF

SEQ ID NO: 415197 - protein, 18 aa, Homo sapiens
  CDR3 for alpha chain variable domain of TCR clone 207599 (TRAV12-3, TRAJ52)
CAMSVGGAGGTSYGKLTF

SEQ ID NO: 415198 - protein, 14 aa, Homo sapiens
  CDR3 for beta chain variable domain of TCR clone 207599 (TRBV9, TRBJ2-7)
CASSPLRAVGEQYF

SEQ ID NO: 415199 - protein, 12 aa, Homo sapiens
  CDR3 for alpha chain variable domain of TCR clone 207600 (TRAV1-2, TRAJ26)
CAVRYYGQNFVF

SEQ ID NO: 415200 - protein, 13 aa, Homo sapiens
  CDR3 for beta chain variable domain of TCR clone 207600 (TRBV7-9, TRBJ1-2)
CASSLKQNYGYTF

SEQ ID NO: 415201 - protein, 17 aa, Homo sapiens
  CDR3 for alpha chain variable domain of TCR clone 207601 (TRAV3, TRAJ6)
CAVRGGPRAGGSYIPTF

SEQ ID NO: 415202 - protein, 14 aa, Homo sapiens
  CDR3 for beta chain variable domain of TCR clone 207601 (TRBV12-5, TRBJ2-5)
CASGSRTHQETQYF

SEQ ID NO: 415203 - protein, 15 aa, Homo sapiens
  CDR3 for alpha chain variable domain of TCR clone 207602 (TRAV17, TRAJ57)
CATGPSQGGSERLVF

SEQ ID NO: 415204 - protein, 13 aa, Homo sapiens
  CDR3 for beta chain variable domain of TCR clone 207602 (TRBV10-3, TRBJ2-7)
CASKLAVNYEQYF

SEQ ID NO: 415205 - protein, 15 aa, Homo sapiens
  CDR3 for alpha chain variable domain of TCR clone 207603 (TRAV4, TRAJ36)
CLVGDRQTGANNLFF

SEQ ID NO: 415206 - protein, 13 aa, Homo sapiens
  CDR3 for beta chain variable domain of TCR clone 207603 (TRBV7-2, TRBJ2-2)
CASSLAVTGELFF

SEQ ID NO: 415207 - protein, 13 aa, Homo sapiens
  CDR3 for alpha chain variable domain of TCR clone 207604 (TRAV12-1, TRAJ40)
CVVPTSGTYKYIF

SEQ ID NO: 415208 - protein, 18 aa, Homo sapiens
  CDR3 for beta chain variable domain of TCR clone 207604 (TRBV7-6, TRBJ2-1)
CASSPRTSGMSSYNAQFF

SEQ ID NO: 415209 - protein, 12 aa, Homo sapiens
  CDR3 for alpha chain variable domain of TCR clone 207605 (TRAV2, TRAJ32)
CAVGGATNKLIF

SEQ ID NO: 415210 - protein, 13 aa, Homo sapiens
  CDR3 for beta chain variable domain of TCR clone 207605 (TRBV7-2, TRBJ2-5)
CASSQTSVETQYF

SEQ ID NO: 415211 - protein, 16 aa, Homo sapiens
  CDR3 for alpha chain variable domain of TCR clone 207606 (TRAV30, TRAJ24)
CGTEIVDADSWGKFQF

SEQ ID NO: 415212 - protein, 12 aa, Homo sapiens
  CDR3 for beta chain variable domain of TCR clone 207606 (TRBV7-9, TRBJ2-7)
CASSQGVYEQYF

SEQ ID NO: 415213 - protein, 13 aa, Homo sapiens
  CDR3 for alpha chain variable domain of TCR clone 207607 (TRAV2, TRAJ40)
CAVVTSGTYKYIF

SEQ ID NO: 415214 - protein, 17 aa, Homo sapiens
  CDR3 for beta chain variable domain of TCR clone 207607 (TRBV5-1, TRBJ2-3)
CASSLGASTSGTDTQYF

SEQ ID NO: 415215 - protein, 15 aa, Homo sapiens
  CDR3 for alpha chain variable domain of TCR clone 207608 (TRAV4, TRAJ39)
CLVGPNNNAGNMLTF

SEQ ID NO: 415216 - protein, 14 aa, Homo sapiens
  CDR3 for beta chain variable domain of TCR clone 207608 (TRBV12-5, TRBJ2-5)
CASGSRTRQETQYF

SEQ ID NO: 415217 - protein, 17 aa, Homo sapiens
  CDR3 for alpha chain variable domain of TCR clone 207609 (TRAV38-2/DV8, TRAJ23)
CALSRKLIFGQGTELSV

SEQ ID NO: 415218 - protein, 11 aa, Homo sapiens
  CDR3 for beta chain variable domain of TCR clone 207609 (TRBV12-4, TRBJ1-6)
CASSSNSPLHF

SEQ ID NO: 415219 - protein, 15 aa, Homo sapiens
  CDR3 for alpha chain variable domain of TCR clone 207610 (TRAV12-3, TRAJ11)
CAMSEENSGYSTLTF

SEQ ID NO: 415220 - protein, 15 aa, Homo sapiens
  CDR3 for beta chain variable domain of TCR clone 207610 (TRBV6-1, TRBJ2-6)
CASSSRPSGANVLTF

SEQ ID NO: 415221 - protein, 14 aa, Homo sapiens
  CDR3 for alpha chain variable domain of TCR clone 207611 (TRAV1-2, TRAJ16)
CAVNRFSDGQKLLF

SEQ ID NO: 415222 - protein, 16 aa, Homo sapiens
  CDR3 for beta chain variable domain of TCR clone 207611 (TRBV11-2, TRBJ1-2)
CASSSPPRGPYYGYTF

SEQ ID NO: 415223 - protein, 17 aa, Homo sapiens
  CDR3 for alpha chain variable domain of TCR clone 207612 (TRAV3, TRAJ38)
CAVRDFLDAGNNRKLIW

SEQ ID NO: 415224 - protein, 13 aa, Homo sapiens
  CDR3 for beta chain variable domain of TCR clone 207612 (TRBV23-1, TRBJ1-4)
CASRGKFNEKLFF

SEQ ID NO: 415225 - protein, 16 aa, Homo sapiens
  CDR3 for alpha chain variable domain of TCR clone 207613 (TRAV3, TRAJ37)
CAVRPHGSGNTGKLIF

SEQ ID NO: 415226 - protein, 13 aa, Homo sapiens
  CDR3 for beta chain variable domain of TCR clone 207613 (TRBV14, TRBJ1-1)
CASSQEAGTEAFF

SEQ ID NO: 415227 - protein, 14 aa, Homo sapiens
  CDR3 for alpha chain variable domain of TCR clone 207614 (TRAV13-1, TRAJ40)
CAAHPTSGTYKYIF

SEQ ID NO: 415228 - protein, 15 aa, Homo sapiens
  CDR3 for beta chain variable domain of TCR clone 207614 (TRBV11-2, TRBJ2-2)
CASSPSGGGTGKLFF

SEQ ID NO: 415229 - protein, 16 aa, Homo sapiens
  CDR3 for alpha chain variable domain of TCR clone 207615 (TRAV12-3, TRAJ53)
CAMSPGSGGSNYRLTF
